United States Patent Application Publication US 2005/0228172 A9 - sequence listing, part 15

SEQ ID NO: 49616 - DNA, 1224 bp, Homo sapiens
ccagcctcccctcctgtcacacttaaaagtctgcccacaaatcctctcaagagacatggctcaaatctagcgggtgaaaaaagtctgagtgaggcttggagccaagatcctgcatcttacaacctgcagtttctgaggctgccgagagccctgaactccagatgcttgtataaacaagacttcctagaagtcattacctcataactcctcataagcttacacctgacaagcctctcaaagcgagagggctgtgttttccctaataaattcctttttgaacccacttgttagtcaagcgttgtgcacactaactacagaaaggaccctgtgccttggggcataaattattcttctgtgccactgtttctgagcaccccccagttatggattacttcgttctcgacttgacaggaacataattagaactgttgatgaaatctaccaaattgttcctccgtggcctcagtggtcaggaaatttggctgagtcgtatttgtcaccgatgtggaggctctaaacacttcatattaactacgttattaatgtgccctctaatctgcccatgaattggtaacacttgaagtgagcctggccctaatggcaccttgcaatgaatgcattgtaggcccgcattaaaagtttcagcagggagaggatgttaataaaattcctgtgtgtgtgcatgtgtgtgtgtctgtgctgtcaacgccttgatgcttccatttagaaacatgatattgcttaggcctttgctgataccagtttgtgcaytgtcaagttggctggtattttagccactgctttgttccatgaatccccctcctgaggtgagaaggcagtgaggtagggtggttaagaacgtggcatttcaggccgggcgcggtggctcacacctgtaatcccagcactttgggaggccgaggagggtggatcattcgaggtcaggagtttgagaccagcctggccaacatggtgaaaccccatctctactgaagatacaaaaattaggtgggcatggtggcaggcgcccataatcccagctacctaggggctgaggcaggagaatcacttgaacccaggaggcggaggttggagtgagccaagatggcgccactgcattccagcctgggcaacagagtgagactccatctcaaaaaagaaaaaaaaaaaaaaactgtggcatttggagtgaggcaggtctgggttgaagtcctagcttttgcc

SEQ ID NO: 49617 - DNA, 1224 bp, Homo sapiens
ccagcctcccctcctgtcacacttaaaagtctgcccacaaatcctctcaagagacatggctcaaatctagcgggtgaaaaaagtctgagtgaggcttggagccaagatcctgcatcttacaacctgcagtttctgaggctgccgagagccctgaactccagatgcttgtataaacaagacttcctagaagtcattacctcataactcctcataagcttacacctgacaagcctctcaaagcgagagggctgtgttttccctaataaattcctttttgaacccacttgttagtcaagcgttgtgcacactaactacagaaaggaccctgtgccttggggcataaattattcttctgtgccactgtttctgagcaccccccagttatggattacttcgttctcgacttgacaggaacataattagaactgttgatgaaatctaccaaattgttcctccgtggcctcagtggtcaggaaatttggctgagtcgtatttgtcaccgatgtggaggctctaaacacttcatattaactacgttattaatgtgccctctaatctgcccatgaattggtaacacttgaagtgagcctggccctaatggcaccttgcaatgaatgcattgtaggcccgcattaaaagtttcagcagggagaggatgttaataaaattcctgtgtgtgtgcatgtgtgtgtgtctgtgctgtcaacgccttgatgcttccatttagaaacatgatattgcttaggcctttgctgataccagtttgtgcattgtcaagttggctggtattttagccactgctttgttccatgaatccccctcctgaggtgagaaggcagtgaggtagggtggttaagaacgtggcatttcaggccrggcgcggtggctcacacctgtaatcccagcactttgggaggccgaggagggtggatcattcgaggtcaggagtttgagaccagcctggccaacatggtgaaaccccatctctactgaagatacaaaaattaggtgggcatggtggcaggcgcccataatcccagctacctaggggctgaggcaggagaatcacttgaacccaggaggcggaggttggagtgagccaagatggcgccactgcattccagcctgggcaacagagtgagactccatctcaaaaaagaaaaaaaaaaaaaaactgtggcatttggagtgaggcaggtctgggttgaagtcctagcttttgcc

SEQ ID NO: 49618 - DNA, 1736 bp, Homo sapiens
aagatatccctaaccatggggcattgagacatgagtgggttgacaaatgctcactgaaatgtgcaccatgatcaattattataaataccacacagactaggatgataagttaataaaagagaacgggtaaaagatgaaccactagcagaggacatatgggttctagcatcaatgagaacacagcaacaaagttattggtcactgaaatatagcctttggtttcatctgttaactaggcatgaaaaattaaaaacctaacattttatgacaagttgttctttgggggtttattccctgtgcccgagttttctacttgtagaaaatacaaatgccagtacttgtagagacaacaaataatctctaaaatattaaggtaaagatcatggcgaaggtgtgtattctggtcacatgattttgatcttccttgttttaaatatttataaaactcttactattgttatgtgcttttaataagagccctctgatacaggagctgttggcatctccaccaggcagatgtggtracatatgaaacctggtctccttccatctctgtgaaggaagcgctttgcaaaaaacccaactaaccaaccaaacgaacaggtaaataaatccatgcattaaggtactttcagggttttaaacccaaaccaaccaaacaaaaacacagcttgttttcaatccttaaatttgcagaatatatatacaaattttgctcaataaattactgttaagtgtcacaggaatccatttccataatagctaggaggactacgaagatcccaggctctcctctctctgggaaattgctcccaggtgcaagctctggttctttcttgagcttgagagaaatgttcaatccttgatagtttcaaccaggaaagagttagttttaagcagagaataatgaacaatgaaatggtaggaaatgatttgtgtaggcacactactgagaggtagagatgcaaagaaaattcagaagttcacaatttttcttgtatgtgagtaccagtttccagcctatgaaattctgctcctctttcaaaaccctaattcaaatgctaccttatacattaagtctttcttgattcagattctatttggaaataagcttactcttccccaatttcccttcccatttaacttgtattgtggttatttacatggttctattaggtcctacgtgactgtgagtgactagcttttatttgcccttcattttatccatacatcctacttgatactgtatgcaccattgcataccctttctttcatttgtacatttgaccaattcgtgagatagaatacgtatacaaactgtcaatttaagaggtcaaatgaattacatgaaataagttttatatttatgaagagggaaaaattatggatagctagagaattttaaagaacttcacttgcatacgaagacataggtcataattattcctgttttatagatgatgaaatggggaggctgaattactccaggtcatgtagttagtgagggatagagctaggatttatctcagcattccctgcagttattgtcagatgctagaaatcagaagacaaaccagagcaatgaataaatacagtgtaactatggatcacatttgaatatattttaaaaaccaggacagaataaggtgagtgtcttaatacaataagggagaacattttacagacttctttttcactaaaatcagatcagtatatcactgttatttttaaactaa

SEQ ID NO: 49619 - DNA, 547 bp, Homo sapiens
tcgagtcattattgattcccttgccattggtacccaggtcacaagaaatgacattgaaggagggaatagaatcaagacatttgagatctatttttggttatgctttcactcattgtacagacattaattaatgttttaaacattttcctcactttattttgctacaaaatgaaaaagtaaactactgggaaaatgtctaacttaaatacaaaatatayggctttattaataatccatgaatgatttagggttgtcaaactataatattacatttctgctttcagaaaaatttaaaatacactgagtgcacaagtcctaggaaataaagatgtctgcccagacaatatatccacatagcaaaactgcaggcgtaccccttaaatttatacaaataaaaaaggttttaaaataaagatgtctattatgagcattttaaaataataactccacatttgagtatttaaagaaggcatttcatagcatttctcaaatgacaaggacaattgcctgaattttaaatgttttatgcagagttcgttatgtttgt

SEQ ID NO: 49620 - DNA, 583 bp, Homo sapiens
ctgccctctgttccctgcctgtctcttgaatagcaccccacacctcacttccacttcatttatcatgctccagccatatgcatcttttctcagttccttacacataccaagttctctttttcccttagggccttgcacatgcaggtccttccacgtgaaacactctttttttttttttttttttttttttgagacggagtctcgctctgtcgcccaggctggagtgcagtggcgtgatctcgactcactgcaagttctgcctcccgggttctcaccattctcctgcctcagcctcccaagtagctgggattacaggcgtccgccaccatgcccggctaatttttttgtatttttagtagagayggggtttcactgtgttaaccaggatgatctcgatctcctgacctcgtgatccacccgtctcggcctcccaaaggaaacactctttatcctgcttgtaacatgagtaatgcctccttgtccttcaaatcttagcttaagcgtcatctccccagaggccttccttaaccagcccatcccatccttgctgccctgtctccatttattctgttgtaataattac

SEQ ID NO: 49621 - DNA, 583 bp, Homo sapiens
ctgccctctgttccctgcctgtctcttgaatagcaccccacacctcacttccacttcatttatcatgctccagccatatgcatcttttctcagttccttacacataccaagttctctttttcccttagggccttgcacatgcaggtccttccacgtgaaacactctttttttttttttttttttttttttgagacggagtctcgctctgtcgcccaggctggagtgcagtggcgtgatctcgactcactgcaagttctgcctcccgggttctcaccattctcctgcctcagcctcccaagtagctgggattacaggcgtccgccaccatgcccggctaatttttttgtatttttagtagagacggggtttcactgtgttaaccaggatgatctcgatctcctgacctcgtgatccacccgtctcggcctcccaaaggaaacactctttatcctgcttgtaacatgagtaatgcctccttgtccttcaaatcttagcttaagygtcatctccccagaggccttccttaaccagcccatcccatccttgctgccctgtctccatttattctgttgtaataattac

SEQ ID NO: 49622 - DNA, 439 bp, Homo sapiens
tttaacctgcaagtgtttcttttatacagaatgaaaaaaaatggaatacaattggtaaaatcaattatttttgcaggtagaaatgttgaaattattaactctgggcaaaaactacctcactttggaaatttctctttttccatcaagtaaacctgatggctaatgttgcagcattgtgartcatgtgtgaggatagcattggggctgccaaaataccactggacatggggtaatataacaatgtgttggatattaaagatctagaagcaactcttaatccagtttccaataaccagtcccatgagacatccaatccttcacctgaaccagttaaaaaaaatgaagaatgtcaacagtagtaatattgagatgtattaactgtaaaatgttctggtgcacataatgacagtcatagcactaataacgctttgcaattaaa

SEQ ID NO: 49623 - DNA, 439 bp, Homo sapiens
tttaacctgcaagtgtttcttttatacagaatgaaaaaaaatggaatacaattggtaaaatcaattatttttgcaggtagaaatgttgaaattattaactctgggcaaaaactacctcactttggaaatttctctttttccatcaagtaaacctgatggctaatgttgcagcattgtgagtcatgtgtgaggatagcattggrgctgccaaaataccactggacatggggtaatataacaatgtgttggatattaaagatctagaagcaactcttaatccagtttccaataaccagtcccatgagacatccaatccttcacctgaaccagttaaaaaaaatgaagaatgtcaacagtagtaatattgagatgtattaactgtaaaatgttctggtgcacataatgacagtcatagcactaataacgctttgcaattaaa

SEQ ID NO: 49624 - DNA, 596 bp, Homo sapiens
attttcaagttgtttgctaaccaacacttgtgtagatttgctatgttgaaaccaaacaactagcttacttaattatatctaggtctaatacargcatggctagagtttaagtgggcaatttcaaaagcaatcccaggtagcattttagaatggtatacagtgttttaagtattcattatccctgagcatttgcctggatctatacaaggcaaatatttcacagcagtagaaactatatatggaagaattgtgaaagtaattttaatctgtaagggagttggtctgggtaagttattttcataatgtttataaaccagtatacacatttgattaacagcccatatggattttcatgcttggaaaacgaccatccgcaggaaaatgtatccattatgtttattactttagcattgtttgactgactactgagttctataaatttgagcacttcagactaattgtttgtgtgtgtacagtcctgccaaactcattgataagctacttgatgttctcttctctttgctgtgttcttctagaaagaatgatctttaagaaaatactgtctctgtaatttcgtttcctttggatgctttggc

SEQ ID NO: 49625 - DNA, 541 bp, Homo sapiens
tttctaaatctagctatcattataattatttgaatagtaggaatcataatcaccataatttattgagttacaaaattcaagaatgactgattataacaagtttaaattttaccacagtgtacatcacatgtaccagtagaatatatatactccactgtagatattctactacatatattctaccagtagaatatatatatatacattatgtatagaatatatatacacacgcattatatataatgcttatatatcacataatacctacatgtatgaatagatgactagaagtgataagaatatatgtccttgtctgatcttaggttaataacattcactttttcatcacatagatggcctctatcttatttaggacactcccttgcactcctaccttatagaaaattttgaacaggcataggtgttggatttagtcaaatgatttgtccaagtatattgaaatgatataccagatttatccttaagtattgcgtattttgagatattttgatacatttttaaattcastaattcttactca

SEQ ID NO: 49626 - DNA, 836 bp, Homo sapiens
tttttttttttttccttgagacagggtctccctttgtcacccaggctggagtggagtggtatgatcatggctcctgcagcctctacttgctgggctccagtgatcctcccacctcagcctctcaaatagctgggactacgggctcacaccaccacacctgtctcatttttgtattttttgtagagaaggggtttggacatgttacccaggctggtcttgaattcttgggctcaagtagtccttctgcctccatctcccgaagtgttgggattacaggtgtgagtcgtcatgcctggctgtaaaattgtattatatttctaatatgaagaaatacttggtttctctttactgtttagaaagataattatcatgattgttttctttattaactcctatatgatactttgtatttttatcccctgctactcaccccaagcttatttttataattagaaaggaatcaagctagccaaacaggagttatccttccttaaggtagagaagttactrttttttttcaaatggcgatctgcctgcctgagttgctatttggatctctgatgatttcttcctttgatcccctaactcaaagcaggcaatcaaggctatgctgttagttgtaaccagatggaaacctgatctccatttatactttgcctcttgtattgataacaggacatgaaccaggatagatacactaacagtatttgactctgctgcagttgccaggctaaataaccagaactcatatctcattctactctacctatggaaacactctgtataatgaaaatgtgtgttgaaagtgtgtgggtatatgttgtgtgtatatgcat

SEQ ID NO: 49627 - DNA, 637 bp, Homo sapiens
tcgggaggctgaggcaggagaatcgcttgaacccgggaggtggagattgaggtgagcctagatcgcgccattgcacrccatcttgggcaaaaagatcgaaacttggtctcaaaaaaaaaaaaagaaagaaaataaaatttcatggggtaggggtgagggtggggaaattaaaaagactaggggaggcgttgataatgaaaaaaaaacaggtcgagaaactcatttgtcaagggacaaacactagaagtgtccacttttgaaagtatctttaaaccgtttcccccatcataattgcacatacatacacaaatttcccaggggggaaaacatgcaagcagttcattgcaagggctcaagttcatatccaccctggagagagagaagctgaagaaacagtctatcctccagccccaggcagaggcctgcatcagataagtcttgaaaatattgatctaagaagtgcttgcttctttcagatacccccaaggattaagcaactggcataaggaatgcttgattctctttcagactccccccaaagactaagcatgcgggaaaccacactcctccctaatgaagcccagcaatcactgcaacccacagctgtgagtcaggctgtgcatgtagtttgggttca

SEQ ID NO: 49628 - DNA, 617 bp, Homo sapiens
acacacacacacacccctacacgggatcaaataagacagaaagattgcattttatcctgtgtgatgaaacacaatttgcaatttttgttcaattctaggtatcttcattttaagtggtaccttgactaatcatagctctcctaagaagggtataaggactttaaaagttctggaagtcatctgataactattgcagtagacttctagttcactctgaatcttcttaaatgctgcttcttctctaaatactatcaaatgcatttgtacagcgggggagattttctctaactgtgattggtagcttattcatttgcacgtgtacacagtgcttaccacttgttatcccaattatgagattctgagattatgaatgtttgcataaactggcagaagaaaataaaagaaggaaatttacagtttaaaaccaaaawgctcacatttttacaagcctatttaaagaggttctataaccaaagtaatacatttgctcatcataaaggcacagctataaaccaatgtactttattaaacccttaccttaaataaattttttaaaaaataaataaagcaaaaataagaaaacaggaaagaaagagccactgtgtaaaatggcttta

SEQ ID NO: 49629 - DNA, 617 bp, Homo sapiens
acacacacacacacccctacacgggatcaaataagacagaaagattgcattttatcctgtgtgatgaaacacaatttgcaatttttgttcaattctaggtatcttcattttaagtggtaccttgactaatcatagctctcctaagaagggtataaggactttaaaagttctggaagtcatctgataactattgcagtagacttctagttcactctgaatcttcttaaatgctgcttcttctctaaatactatcaaatgcatttgtacagcgggggagattttctctaactgtgattggtagcttattcatttgcacgtgtacacagtgcttaccacttgttatcccaattatgagattctgagattatgaatgtttgcataaactggcagaagaaaataaaagaaggaaatttacagtttaaaaccaaaatgctcacatttttacaagcctatttraagaggttctataaccaaagtaatacatttgctcatcataaaggcacagctataaaccaatgtactttattaaacccttaccttaaataaattttttaaaaaataaataaagcaaaaataagaaaacaggaaagaaagagccactgtgtaaaatggcttta

SEQ ID NO: 49630 - DNA, 617 bp, Homo sapiens
acacacacacacacccctacacgggatcaaataagacagaaagattgcattttatcctgtgtgatgaaacacaatttgcaatttttgttcaattctaggtatcttcattttaagtggtaccttgactaatcatagctctcctaagaagggtataaggactttaaaagttctggaagtcatctgataactattgcagtagacttctagttcactctgaatcttcttaaatgctgcttcttctctaaatactatcaaatgcatttgtacagcgggggagattttctctaactgtgattggtagcttattcatttgcacgtgtacacagtgcttaccacttgttatcccaattatgagattctgagattatgaatgtttgcataaactggcagaagaaaataaaagaaggaaatttacagtttaaaaccaaaatgctcacatttttacaagcctatttaaagaggttctataaccaaagtaatacatwtgctcatcataaaggcacagctataaaccaatgtactttattaaacccttaccttaaataaattttttaaaaaataaataaagcaaaaataagaaaacaggaaagaaagagccactgtgtaaaatggcttta

SEQ ID NO: 49631 - DNA, 617 bp, Homo sapiens
acacacacacacacccctacacgggatcaaataagacagaaagattgcattttatcctgtgtgatgaaacacaatttgcaatttttgttcaattctaggtatcttcattttaagtggtaccttgactaatcatagctctcctaagaagggtataaggactttaaaagttctggaagtcatctgataactattgcagtagacttctagttcactctgaatcttcttaaatgctgcttcttctctaaatactatcaaatgcatttgtacagcgggggagattttctctaactgtgattggtagcttattcatttgcacgtgtacacagtgcttaccacttgttatcccaattatgagattctgagattatgaatgtttgcataaactggcagaagaaaataaaagaaggaaatttacagtttaaaaccaaaatgctcacatttttacaagcctatttaaagaggttctataaccaaagtaatacatttgctcatcataaaggcacagctataaaccaatgtaytttattaaacccttaccttaaataaattttttaaaaaataaataaagcaaaaataagaaaacaggaaagaaagagccactgtgtaaaatggcttta

SEQ ID NO: 49632 - DNA, 568 bp, Homo sapiens
aagcaatgagagcctgaccatgggaggcagcttcttgccaccactgcccagcctgcacctgtggactgtctgtgttcagctgaaggagtcagagatgttgacaagcatatgtgggacccctgctccagtgcagtgctgggaaaagcatttccctaaaagccacagtggtgcaccaggtggcacctggctgtgatcactgaaagcactctcaccagctgggctttcagccaaggtcaggactttgcaccacccyttcacacatgccccaaggccatgtcccagcaatgccctcaggaccactgtaaaggaagcacagtgaatataaaaggaattgtgtgacatctagaaggatgtgtgggtgctatattgggcataagaaagtcaggtttgaatggtgccctctctaaaacctaaagccatctgcaagtcagagagagaggccctaagagaaaccaaccctgctgacagcgggatcttgaactttcagtctccaaaatgatgagaaatgaatttctgtggggtaagccactccctctgtggtattctgttatgacagccttaggacaca

SEQ ID NO: 49633 - DNA, 569 bp, Homo sapiens
gttttgacttctccaacccagggcctatgacagtttgtgttcagatgaatctgcattgtgacacaatggatgcttagaattcaagaaccctaggaggtcagaactgaacaagtcttaattattggagaatgcagggcatttttatcattagttttttgtttgccttaaaaattgcccaaataagataygtgaaaaacaaaaaaattttttaatgccaaaagacttaaaataaaaaagcactatctttccccccaaccttcctactgctactcttgctctcctgggacaacacatttttagccctttcagctgcttcttttgctctgtgtgttcatatttctaaataatatgcatattctgctatttctgctttgtcagttttagacatcctctattgacttcctgctatagtaaacacagattttgctttgttactcacctttctgtccccttcctccttatatagtcctattgcaacttttagtcaaaccaagaacattattataaatgtataaatgaggctcactctagagttaagcaatgggctctgattatattttctttcccat

SEQ ID NO: 49634 - DNA, 542 bp, Homo sapiens
aacatataacagctctgatgccctgcattctcttgccttcctttctcaggctgcacttaccagtgggctaccatggccgtgcctcctctgtcgtggtgtctggcaccccaatccgaaggcccatgggacagatgaaacctgatgactgtgagtgaccgcagcgtccaggccttgctggtrcccagctctctgttcccacacagagagttctgtggcctcactcacagcaccgttttttttttttttctggtgttattccagctaagcctcccgtatatggtgcctgcaagctcttggacatggagctggaaatggtaagtgagcttgatgttttattgccatgggatctatagacacccggcaggagagccctttgggatggctccccgcaccatgagccgcccactcccctcctcttcagccacatcggcagccgctctgtgtccccacctggccatcagaaggacagttgatccttattacttgcagattctgtatttgagaattcacaactacttgctaatatttatttgtaagtccag

SEQ ID NO: 49635 - DNA, 609 bp, Homo sapiens
gctgaagagaatacatccaagttcttcttttacttaattaaaaaataaatgccacggcctgagtacttttaaattaggcttattaaactgcagaccacactctgagtgcatattaacgtgctctcgagctctccattttatttaatatctctaggaataaatgtgatgwaattacacttaatatttcagttgatggcagaggaagttagattaggcaagcttgctggaaattaaaaactaaatagcagcccatgaatcactcccattcaggcacaaatcatttcttttacattttccattttctatctcaatcgcttttcaagttatgaccctctgattttgaaatcactcatctaaaggaataaaaggctgtaaaacccaaatcattccactacctttgacctgtcataatctgtcgtatgcctgtcgagtctgcctgtttggtcacagtgttcggtcagtcagtttccagagactggcatacagcagtgtactctctggggacgcagtggggtgtgtcccacctggatgtccctcgtacttctcttagaagggtccaagtcccacttgcccagcaagaggcattcggttcaccatgtgacactttcg

SEQ ID NO: 49636 - DNA, 581 bp, Homo sapiens
ggaatttgatattgtgacttactggaggagagcttgtcaggaaatacctgtaaagatgtgagagaagggaaaggagtgtagtaagaatgtgatactaggtaaagaggaggaagggatatggttttggagcataaactaaaccatagaattgttttccctttaacacaagactggtcatttgtgccttattaactattaactgactataggcacctttaaagatggggtgggtaacttcccatgctagttcactcaattcagtggaaggcacatttcctgtgacatgaggcagctttgagcctttaggggataatgctcwtggtagctgatggatgtgtgtactggtcacataaatggaatatggatgagcaccataatgtctgctgcaaccacatacactcttatcctttctcaattgtctacttccatgatagatatgaaatgtatcattatcactgctaccaccatagtaatgacttttattatatgtcacgtgggcttgtattttaccacactaattgctctctacactgaatcttctaaatccattcctattttttaactttcaagttcatgggtat

SEQ ID NO: 49637 - DNA, 658 bp, Homo sapiens
atttcataagaagaagcaacaaaccctgtagaaatactaaatatgggaaatgagagtaagaaatgataaacatgcttcttataagtgtatgtgaaatgagataactccaaacttttctatgaaaactggaaaaaatagccatcaacacaaaattcgaaacaaagagggggcagtaaatctgaatcaagagggataaacatgtagcatttcctaaatrtattaccagtgaaatactttctttgttgaacttgaccttgggcatgttaaatttgagtaacacaagatatccaattattttaaggttttcactgaggggtaagaattgaatctctaaaaaggaatgaattcaaacttagaagttgcaagaagagaaatagcaaattattttttaatgtttttagttactccaccaataattgccaaatagatttggtttgcttaaagataacagatacagttattaaaaatcataattttcagtgaagtctcacaattatatcaataaagattttatgctgttattcctgaaaatgaataaaatgtaccattttgcacctgttttgtggcttttttgtaacagaactccaggtttttaaaattcccccaacaacaacaaaatgcacaataaaaaaaaaaacaaaacaccccaagcctcatg

SEQ ID NO: 49638 - DNA, 641 bp, Homo sapiens
tgtcaagagaaaatagagtacccttaaatcaaaacattgatataaacttgaagtatcagttagcaactgtgaaaagataatactagaaactggcatctcatatttttaaaatttgaaaaaataatttggtgcaacaattttactgaaaagaggatttcagattttagaatagccctgtaactaaaagatctttagataactttcacacttttgattagtctacatacaattaagattttatttgacattaaaatcatatcaacctatttctgttttagaattttaaaaagctagtacatgtaagtgtgtatgttcatgttgacataaatccttctgaaaatttagtgtgacagattttctgcaatattgataaacatttgtgctattaagtacatagccaaaccatgtgtattttcaccatgaaaayaaatagcagggaaaagagtataccaccacaagttaattactatgtgtcttgatgactactaagataaatgaaaaaacactgcttctgtggacatgccaagaatgggataatgagaaaaaggtttgtatgtgtatctctaagaaactcagccctgagaagagtcttttgactttatttttaccttactttaggacacactattattgacacaaat

SEQ ID NO: 49639 - DNA, 637 bp, Homo sapiens
caacgagaaagagaaggaattatagtctggtggaagaagaaaataatgagaggtatactactattggctgacagtaggaatcttgagagagtggggatggtaggagaagagaatagaaaggttaaagaggttgtaggcagcctacagaatgttctcaaatgatctccaactcctggtattgacacacttgtgtaatctccctcccttgaaagtgggttcatttagtgactcacttctaacagactacaataagtgatgggacatcacttccaagattaagttatggaaagactgtggctttcattttgagggcctctctctgtctcctcttggacttaggggatccagttgtatgctgtaaataggcctatgaagagacktacgtggcacagtaatgatgtatctggacagtggttagggagaacttgccaacaaccacatgactgagcttggaagcagatccttcttgatatagtttgaatatttgtccctgcccatatcttacgtagaattgtaatccccagtgctggaggtggggtctagtgtaaggtgtttgagttatgggggtagaaccctccatggcttgggactgtctttgcaatagtaaattctctcaagatctggttatttaaaagtt

SEQ ID NO: 49640 - DNA, 637 bp, Homo sapiens
caacgagaaagagaaggaattatagtctggtggaagaagaaaataatgagaggtatactactattggctgacagtaggaatcttgagagagtggggatggtaggagaagagaatagaaaggttaaagaggttgtaggcagcctacagaatgttctcaaatgatctccaactcctggtattgacacacttgtgtaatctccctcccttgaaagtgggttcatttagtgactcacttctaacagactacaataagtgatgggacatcacttccaagattaagttatggaaagactgtggctttcattttgagggcctctctctgtctcctcttggacttaggggatccagttgtatgctgtaaataggcctatgaagagacttacgtggcacagtaatgatgtatctggacagtggttagggagaacttgccaacaaccacatgactgagcttggaagcagatccttcttgatatagtttgaatatttgtccctgcccatatctyacgtagaattgtaatccccagtgctggaggtggggtctagtgtaaggtgtttgagttatgggggtagaaccctccatggcttgggactgtctttgcaatagtaaattctctcaagatctggttatttaaaagtt

SEQ ID NO: 49641 - DNA, 545 bp, Homo sapiens
ataaactaagtagcttataaacaatagaaatttatttttcatagttcgaaaggctggaaagttcttgatcaaagcaccgaatcaaagcatattttctctggggctttttttaaaaaagggcactaatgccattcatgagggctctgccttcatgacccgataacctctcaaaggtcccacctgcaaatacccttatattgaggattcagttttaacacataaatttgaagaggtggggcgggggaagcaaacatttggtctatagcaagaaccaaaaagaagacactgtaaaatctcaccttgttagtcatttcccatatccttcacgtataagaaattcatacactctcattttytcttcgaactccccaatactcataacttaagattaactgatcaaaaatggtccattttaaagtaatctataacgcgaacttgaaacattaaaatatagtaataaaataatattaaagcattagtccctcttaaccagtgtattttcaaaaaggtcaaagcagagacagtaacatgttaaattatcagca

SEQ ID NO: 49642 - DNA, 581 bp, Homo sapiens
gcctatataaccttaaaagactcagttgacattaagcaactatataaaatgaaaattwgctagttctagaattaaactccctcaaatctatggtgttccttaagagtacggatttgttttgatcacgaacaaactgtacatcaaaacagaaaatgcaactttccattgtttcccagtcacagagagtaaagtgggccacgaaagaatttggctcaagttatgtaacattttacaaaagtaagagtttcttaaattttcaaatcagaaaaaaaaaaatcctattttcagactacatttttctactggatgtaaaaacatttttaattaaataatttatttcttttaaggctagtcaaatgaagtagtgggagtgggaaaggaacaaagaaatctgaaaaacatgataaaaattaaaaaaagaaacccacctcaaaattaggtatttcagatcactgtaataatgtcatagcattaattgataaaataaaattacaactgagacaaaataattttataatccaaaaaggaacaaaacaaatgcattccttgtaacctgacaattctggagtacagagagtaac

SEQ ID NO: 49643 - DNA, 588 bp, Homo sapiens
aatactggaaatggatagagcgcattaataaatttacctacagcatacctttgacttcatgtagtgaagcattattattgctattgctagtggatgttctgccactatcaaggctggctggtcttgaagctaaatgaaaaaaccaggagacagtgtgataaaacttctagctgatgatgctratgagcttttacattctgattacagaatgctttgaggaagcaatcatgcatactttcacaagatgagcatgcccagattagaaagcaaatttccagatagttcattgagacactttagaataggacacttctgaaacaatagttgagattcaaagaggaggataaagtgcatatttagatttgaaaatgagttctagatggatatgccaggagtgttttagttaaatagaatgacatatccccccagatcccccaaaatgctattgattgggtcacctacaacagatcagacaaggaactctgcacattgcagagatgtcaagaagaggaggaatacaagcatctatacagttaatgtcctgtattcctatctgtaacaagggtaacaactgtataattaacactg

SEQ ID NO: 49644 - DNA, 568 bp, Homo sapiens
aaaaaatctggttcctttcagctcacttttctttgaagttaagacacgtggcacgacacctgtttctaaacacagctacttgatgtattacttttggcagctcttgcatattttttcatcgccaataaagttattgaaattgaaatataccatctgtttgagagtttgtatcaaaaagacaggtgacaaggttgcaggtaatgacagagtcaagctgttcccacagcaaagggctgttcctagcttccccgtctgccaaaattgacttcatttcttagatttgrcatttttgaaccaatatgttcttctggagcagggattaaaaatccaatatcacaaaaccaattggttttacctgcagcaatattaaagactatggagaaagagcccaacaaatttcccaccatttggctgaaatagaaccagcagagagaaagcaaattctatcagatgtacatatatatgtaaatgcatatatatatatataattcaaaatctgataattaaaatgtagatgtacctgtgtgtagtgtgtacctgacttttttcttaatgtttgtgaaaaaca

SEQ ID NO: 49645 - DNA, 642 bp, Homo sapiens
gatccctttcagagtccccattctttgaatcatgtcctgattattttctctgatgtgtacatgctcacctgtaggttagccatgactctctcagccccaccctcatcagcagctatttattaaatacttcagtgttactcatgatgcatgtaaatgctatgtaattttaaatatttgtgattaggtattccttgtagaatcgaataagagctatgaaagccactctccttctatgatcaaattaacctagtyacatataaatactggaaatctaactttagtttccaggggtgaagattctggcattgtggaatgaaaagatcaaagtatcatctctccaaaaaatataaaagtaggaaacatgtcaaaaataagcatttcaggtctctggaaatcaagcaaacacaaacaactaatggagaagcatttattcataagaaaccccactggaagcctaataagggcagtgggatctgcagccttctttcctgggaatgctttcctcctccttgcctatttcaggtgaagtgacaacttaactcaaaaccagtagacatgttgccagagtgggctgactttttggaacaggaaatataaaaccatattccttttattagttaaagtagcaatttttggaggaaa

SEQ ID NO: 49646 - DNA, 611 bp, Homo sapiens
tgttcattttttaggaagagagcataccgttccattcatccccagggtcagcttgcctccagcagctatggctgcgggatatcaacccaacaaagagaaacagatgcttcaaagaacccatatcacttgagggagaaggaggagaccccaaggaaaagcacccttcctatgaactattttttgatcctagagcaagggttggcaatcagcaagatagtaaactatcaaactgcttttatttgttatttgatttatttgacctgtcatatatttgattaatccacatgtgttttttgagcagctcattggggtctggagagagaacattgacaaagtctctgccctcaaggagtttggagtctagtggaacagggctmctctgaaactcagggatgtacattatggtccacctggccatggtaggctgtcacatcactgtcactagactgtggtcacatcacttatcaccacactttatttattttattttttattctttttgagatggagtctcgctctgtcgcccaggctggagtacagccgcgtgatctcggctcactgcaagctccacctcctgggttcacgccattctcctgcctcagcctcccgag

SEQ ID NO: 49647 - DNA, 549 bp, Homo sapiens
gtttggaaagatgtgcctggttgcaatttctttttaacagacacaactacataaatgctgggcttgaaarctattcttcaacaccctcgacagagctttgtcaagtttaaaggaactccttttattaatgttagtctttttcaggttcacagatctgtttttagcctactcttgttgcttttctagagccactgacctattctggctagattaagcattcatttagcttatctcctgagtccatttatacttttcaacccctttggttgtttagaataatagttctccaagtttgttttgaagaatgtcctgagttgtagagagggtggggatgttgtcccaagcacatgggacacaaggactcaggcctccagggcggaatcagggggtcctgccctgggttgaagtgactggcctagggattggcacgatccaaccacatacagccatttacagtggatgccacttaaaatttaaaccaggggcttttgtccatttatgaaaaatggggagagagcttggaagggagaatggggggctcttcacgaa

SEQ ID NO: 49648 - DNA, 1944 bp, Homo sapiens
gagcactgttccataagggaaaagagcacttcctcactggtattatgacatgcagctttcagacttccacccaaaaagtatgcgcaagagagagcgagcaagagaaattgagactgtgcgtgaacaggtctaagaaataaacataaaatcctggctatccaaatcctgcagtgggtgtattttccaatcagccctgaggcttatggaagagataaaataggaaaggaatatgtccccagctccagccgaacattctgttcaggcttttcaatctaaaaacttcaatgtgctggtcggcaccattgctgttctcgtgtttggcctacgctgggccaaatcctgccccaaaatatcaacgtgtcatatgtgggcccagacaaggctttctaactcttctgaagtttgagttttttccccttcttataaaagcagtgagccagagaagagtccatggtaataattatggcttttcttgtgtggacagcatccagaaaggggcagcaagcccacagagcctggctgaataaagccattcctcagccaatgccaacttcagcaacttctctgttagcagctcttgttagagctgcaaagcaccggtagagctggcgagggtggggggcaattctgaggatatgtccaccttgcgttcaagggtcctgccgtgtcataaactctgcatctttcgtattcacagtacacagcacacgcctctgccaagccacagtcgcaggttgttctcaacaattggttaaagttacttgtcaggattgcacgcaggaattcctccagcaagatcagagtttcgctttgtctagtcagccggaagtcagctaagacagtgaggaagagagtaaaatctcacggagttctctagcacatccgtctcaggcctaggaagggcaacaggatacctaaggaatgaaaggaaaacctgcaaccagaagagtgaaggagctggcacaggaacagccagagggcaagagaaagtagaaaaacaatctctaggggcagctgtggtcagctgacttggctgaacactgcacaactccaaggagctccatttgcttaggctgcttgctacctcccacctccacacatggagaagggcacacacacagatgaaaagggaagccagggtgctggggctgttacggagacacatttaatgcagtcaggggaaggggatggggacctggggttggtggtatggtaggaggcacgagccatggtcgagagcaaccttctggactcagactcagcaactcttctaggcctcggtcctctaatctgcaacatggggttcataattcttgcttcctaaagacgcagtgagaattttaaggactgagcccagtgtgttcagaacctagagcagattaagctatcaataagagctcctaactattgtgaaccactatcacatcacataccgaactctaggataacattcttattaactcattgaggatgcagataatactttatttaatctttgtaacctcagcccctagtgcagtgcctggtgaatataagaactgattattgcagaaggaagggagggagagaggaaggaagaaattcttatttctatatcatggccacccagcaagcgtcaggcattattgtgaacactagcatattcacaaayactgtttgttgaatggaaagtatttattcatcagctacttataaaacaatagctgaggacttgctgtatgcaaagcactgtgttaaaaaccctgggaaacacgtggacaaccccacgacatccctgttctcaaggatctcataacttagccagagactcctacataaatcatcctagcaataatcaactatgataataccataatataggcccaaataaaagaggatgctgaccatcccgcccttcaccccgaccaccaaacaagatatggcatttttttcctatttccttcc

SEQ ID NO: 49649 - DNA, 543 bp, Homo sapiens
ttgctccatgtagttatttctttaacttaattatgttgtcaaacagtatttgaaagtggtttagaattttttatatgccatagagtattgagtatacatagtcttagactagtggatcacattatgacagatttcacctctactcaaatcctctatatttttggcagtttgatgtttgccatacacaaacgataggagaataataaagcattaaaaataaaattctacattaatagtgatggagtaacatatagaaatttcatgaattcactttctctgtcacttctcagcaataactatctgacatcatatggtatcttaaatctacataaaatgcaaccattacaatgtgtctcaaaarttagaccaacctataagatgtaaaggcatgtttattatctgctaattactcagcaaatcatatcttaaggttgaatgtgttcatatctacaaaattttagcttacttttttgtcccttttctatcagttgtgagacttgataatattttttactaatgaagtaactcatatacatatatata

SEQ ID NO: 49650 - DNA, 557 bp, Homo sapiens
caacatactcacaaatcttgcctgaagtgattgcttcamaaacagcctgaataggagaacatccaaatcaatcagagaaacttttgtgaaactacagtatgggtgaagaaacttgttgggcaaagatttcatagagtaaccatctaaagaccatctttccaaaacatagaaagagccttcctgtatgtggccaaaataaatggaacaggcatgggatatagagtgactgataatggcatttgagtccttggatccatccatacctgatctactgctggaaatcttaaacgtgtgtgtcaatgaattctctttttcagaggagccagtttgaattttttttcagccaccatcaagaattctattaaatcctgttttataacaaatattggcattgatagctctcttactaatagaagataaacaacaaaacagtgtgtgcctttaaaatctcaaaggaaagaaaataatgccatagagctgagaagtgcctgtcactgaaaatgaatctctaaatggaagggaagcactttttccaggaatctactcattactcccca

SEQ ID NO: 49651 - DNA, 557 bp, Homo sapiens
caacatactcacaaatcttgcctgaagtgattgcttcacaaamagcctgaataggagaacatccaaatcaatcagagaaacttttgtgaaactacagtatgggtgaagaaacttgttgggcaaagatttcatagagtaaccatctaaagaccatctttccaaaacatagaaagagccttcctgtatgtggccaaaataaatggaacaggcatgggatatagagtgactgataatggcatttgagtccttggatccatccatacctgatctactgctggaaatcttaaacgtgtgtgtcaatgaattctctttttcagaggagccagtttgaattttttttcagccaccatcaagaattctattaaatcctgttttataacaaatattggcattgatagctctcttactaatagaagataaacaacaaaacagtgtgtgcctttaaaatctcaaaggaaagaaaataatgccatagagctgagaagtgcctgtcactgaaaatgaatctctaaatggaagggaagcactttttccaggaatctactcattactcccca

SEQ ID NO: 49652 - DNA, 557 bp, Homo sapiens
caacatactcacaaatcttgcctgaagtgattgcttcacaaacagcctgaataggagaacatccaaatcaatcagagaaacttttgtgaaactacagtatgggtgaagaaacttgttgggcaaagatttcatagagtaaccatctaaagaccatctttccaaaacatagaaagagccttcctgtatgtggccaaaataaatggaacaggcatgggatatagagtgactgataatggcatttgagtccttggatccatccatacctgatctactgctggaaatcttaaacgtgtgtgtcaatgaattctctttttcagaggagccagtttgaattttttttcagccaccatcaagaattctattaaatcctgttttataacaaatattggcattgatagctctcttactaatagaagataaacaacaaaacagtgtgtgcctttaaaatctcaaaggaaagaaaataatgccatagagctgagaagtgcctgtcactgaaaatgaatctctaaatggaagggaagcactttttccaggaatctactcattacycccca

SEQ ID NO: 49653 - DNA, 616 bp, Homo sapiens
tttcaaaccctgttccttggatccccagggttctgccccagggccacaggagggytgcaggagctgctgtaggatgcagagaaggctcatgcacagggctgtggcttcttgcctctgattcagtgagaagcattcggtatttatctgaaagagacttgggatggggaaaatcaaaaaggtcctatgctgagaacatttctatccaaaatgactaaaatccaaagaaagtcgtgggctgtgtgcatactgcggtaaatctgctgctctctgaaaaacttggccatcagaatgacctccctcaaggatgccacaatcttgctggacacagattttctgaggacagccctagatgactctcagcctccatcctccctcctcatgcacgtgggctcctcaggccacccagggccattactgcccttcataatccctatcccatgggccaaacacgtccccctcacctcagaagtcccctggctggtgtcctgttctctcaaagtcctgctgagagacaaatggcaaactcccaaatgaactccactaagaaagcatgtttattttctcttgtatcttctccatccaccggagccctatgttaagctatttacagtgggct

SEQ ID NO: 49654 - DNA, 616 bp, Homo sapiens
tttcaaaccctgttccttggatccccagggttctgccccagggccacaggagggttgcaggagctgctgtaggatgcagagaaggctcatgcacagggctgtggcttcttgcctctgattcagtgagaagcattcggtatttatctgaaagagacttgggatggggaaaatcaaaaaggtcctatgctgagaacatttctatccaaaatgactaaaatccaaagaaagtcgtgggctgtgtgcatactgcgrtaaatctgctgctctctgaaaaacttggccatcagaatgacctccctcaaggatgccacaatcttgctggacacagattttctgaggacagccctagatgactctcagcctccatcctccctcctcatgcacgtgggctcctcaggccacccagggccattactgcccttcataatccctatcccatgggccaaacacgtccccctcacctcagaagtcccctggctggtgtcctgttctctcaaagtcctgctgagagacaaatggcaaactcccaaatgaactccactaagaaagcatgtttattttctcttgtatcttctccatccaccggagccctatgttaagctatttacagtgggct

SEQ ID NO: 49655 - DNA, 1896 bp, Homo sapiens
tttttttaaaaagttttttaaatttgcaaataaagtatgtataaaacacaaaattacatttcttatattaaaatatgcgctatatctaaattactaatattgttataaaaatgtagcaattaaaatgaattttagactagaggtgtctgactaaacttggtgggattttacggttgctttaataacatgccaacagcaaaactggaatctttctttcttaatgcttttagttatatgctcagtaggttacttgaatgtagttaaataacatttaaaatgtcattgaattttctgatatttaggaatatgaaaaagaacttatttttattttttttaaaatagatgtggggtctttactatgttgcccaggctggtcttgaactcttgggctcaagtgatcctcctgccttggcctcccaaagtgctaggattatagtcatgagccaccgtgccaggccaagaatatgaaaaagagcttagttttattaaagttgaatttaggattctaaaatatggatgtggagctgagtgtggtggctcacaacccataatctcagcattttgggaggctaaggctggaggattgcatgaggccaggcatttgagaccagcctgagcaacaaagcgagattcccatctctagagggggggaaagaaagcagggcatgttggcatgggcctgtagtcccagctactcaggaggctgaggcgggaggattacttgacgcaggagttcaaggcttcaagtgagctatgatcatgccactgcaatccagcttgggccacagagtaacaccttgtctcaaaaaaattaattaattaaaataaaataaaatggatatgtttcatctatagtcataacgttactcactttctttagttattaggactttttcttttaagaataaaaattttcgcctagtcttcgtcactttttccgatgtttatagaaactgaaactcaaaaaatagtatgatttattcctgtcattttccagttaagtccagttagagtctggtctttggacttagtgcttgctgtgtcaacacactaatctcctgagactgcctagttcctcacttcatctctgatacgtagtcttcactctatgcctgggtaaaagagcctttctgccattgcttagcaaactccagagagtaagagtgtgaattcagttacagtgttgtctttatagatgagttagagaggcagaataaagaagtaaaaacagcacaccaaactatgtatgatttaggaaacacaaattcaagccctggttttaactgttacttgcttagcttcataatttaaggaaccctaaggtgcagaacaaatcatttctcaagacccactgtgtatttctgtgaatccaattagcaagtgcttgtaaagtgcttcgaaaaagatatgtggtgtacgtatatacatagttttgtatacatacaaatactctttatcttttatacatacaaatacataaaatactctttatcctaacatttctaccgtatttgctaaattaatatgaaatttgagacatttacttttacttcgatattatttttatgtctttttccaatacatttaaagctgttttactgttttattttactctttacctaaacttgccagtctaatgataacattgtaaaaaaaaaaaggcaaaatgacacccatttttagaattattcttttttaatgagaatttcattagtatgaacagtgttatcaattgtaattgtgcgtatgtgtccatgtaaatgtactttactagtatctctcttttatggttgtaatctttttgttttttttttcttttggtctttagayttattcagatttttctattataccatattcatattttcttaactgaaaatgttctggacaaactat

SEQ ID NO: 49656 - DNA, 559 bp, Homo sapiens
caccaatgtcaatttcctggtttgataatggtgtcattgtttatttaagatattaacatgagaggatgttgggggaggactgcaaaagaactctctatgcttttttttttttttttttgcaatttgtctgtaagcctraaattattcaaaaacatttcaaaatgttatttttaaatgtaaaaactatcttaaagttatatttagttcttttaaaactttgtgttattaaaagtgtaatgtattacttcatattatccttaatgcctgagttacatgtgtgtcattttaagcacatgccatttagagaaggctgcagagaaggagaggactaagcactgaccagcatttgctttgcccacttgcaggacacgggtgattgtggcagggagcctgcctgcagaaggccccagagagaaggggaggtgggcgctggaagcagcaggcatgggcagctctttcatggagggtggttctggcagatgcagaggggctgggggcccccagtggataattaagatggaatccattccaacatcttggtttgctgatgagagtgatc

SEQ ID NO: 49657 - DNA, 559 bp, Homo sapiens
caccaatgtcaatttcctggtttgataatggtgtcattgtttatttaagatattaacatgagaggatgttgggggaggactgcaaaagaactctctatgcttttttttttttttttttgcaatttgtctgtaagcctgaaattattcaaaaacatttcaaaatgttatttttaaatgtaaaaactatcttaaagttatatttagttcttttaaaactttgtgttattaaaagtgtaatgtattacttcatattatccttaatgcctgagttacatgtgtgtcattttaagcacatgccatttagagaaggctgcagagaaggagaggactaagcactgaccagcatttgctttgcccacttgcaggacacgggtgattgtggcagggagcctgcctgcagaaggccccagagagaargggaggtgggcgctggaagcagcaggcatgggcagctctttcatggagggtggttctggcagatgcagaggggctgggggcccccagtggataattaagatggaatccattccaacatcttggtttgctgatgagagtgatc

SEQ ID NO: 49658 - DNA, 1849 bp, Homo sapiens
gagagcagaagatgcagaaggaaaaagctgcagtgccctttgtgatctagccctgggagtctcccattatctttttcaccacattctcttggtcaagcaggccagccttgattcggcatgggaggaaactacacgtttgtgaacaccaggagatgaggaccctgcaggcaattgtgctgtctggctatcatacaaagaatgctttattttagagagttactttgattcagcaatagcagagtgctaattttccttgggtattaaaaaaatgagagaagataattattagtgaatagataaagtattttagttattagtgagcaattaaaccttttattttctattctaggcacttgtcagcttttctgattatcagatctttcaggagctcatcaaaggaaaagaggatgattctttccttaggaactctgtttctcagatgttaaggattgtaatggaagagggttgttygacacaaaaacaggtccttaactacctaggtgaatgcttcagagtaaaactcaatgttcctgactggtacccaaatgagcaagctgcggagttcctgtttaagtatgtgtgctttgtctaaactgtttttggaggggcggagggctgtcagtggttctttgtattggttgcagtttgggcgggcgagtcatttgggaatgagaatgaatcttggggtagaatcctggtccttgctagccgggggctacctttgtttttgcggccctcctcacttgtatttttttagtagtcgtgttttattttatagtactttttaacttttattttgaaataatttcagacttccagaataatgtccaaatagtacattggattctaattgtgaacatttcattcatttacatttacttttttactttctgtgtacacagatgtacatttttctttctgtacaatccctgaaagttgcagggattgtatcactttatttctccaaagcaaggactttgtcttatataaccactgtataattactaaagaagccagctccatactggtgctgtccagtgcatagccaccagtcacatgataagcacttcaaatgtggccagtgtagctcaaaaactgaatgcttaattttatttaattaaagttaagtaagcatgagttggggatcttggttaatagaatattaagtagtattaccaactgaattgttttaagcttttttttttttctgttttcacagccagtgcatctgtatccacttgaaatccaatactgaaaagttttatatgctttgtctcatgacgcgaaagctctttgctttagccaaaggagagtgcatggaggacaatcctgatagtttggtgaaccaggaagtcctcacaccgggtcagctcttccttatgttcctgaaggtaaatgcatgctatgtccacccttggccagtggtaccacttgtggaatggcgtgactttgtccagcagcactgttttctgcatgtttatagtttctagttttggcattttgtgtggtctcttttttgtttgttcatttagcagtaaggggatcagaaatcctggcttacaccaggtttggaaatttgcttaatatttttatgtaaagatcacatcaaatcttggtcacagtgttaatgataaaaagcaaatggcctgtatttatacatatggttgatcctcattatttgtagattctgtatttgtgaattcactcactggctaaaatttatttgtaaccctaatgtcagtgctcagtgctttcatgattattcacatacatgagcagagcagtgaagaatttgggtctcctgaggcaaatgttacagctgaggcggggcagggcgatgctctgcttt

SEQ ID NO: 49659 - DNA, 541 bp, Homo sapiens
cttggccaacatggagaaactctgtcactactaaaaagtacaaaaattaggcatggtagcacaagcctgtaatcccagctactcaggaagctgaggcacgagaactgtttgcacctgggaggcagcggttgcagcaagccgaaatcgggccactgcactccatccggggtgacagagcgagactccatctcaaaaaaaaaaaaaaaaagaatgggggcaagtaatgcaggatgggcagctaaaggtattctctctctttaaactcttccttggagctaaaaattaggaatagagtagaggagagtcagtagaatggagcaggcagtctgctgtgtatatagagaagggaagagaaaggagacaaaaaattctagggtctctggtcacacagctaaggcaaccatttccagatatgctggctgctcartgtggccactcccgtgtcagagtcctaagtctcgggctgcctgcacaggtggttgtcagaaaataactcagccttccaagctctgtgttatgtgcacttctgactcattccctg

SEQ ID NO: 49660 - DNA, 621 bp, Homo sapiens
tgataaacacccagcaacaagaaaatagccaatgggcccactaataagaaagcaaaccttctacagaaaatctgtctgctttactttccccttatcaatattgctccgaaagttaatttgtcaccgtatagccagaaagctcacctccgtctttttaaatgtttcatkctaggtttgcccaacaagagtaataaaaataatgacaccattattcctcttctctctttgttttcggtgcatcacttgcagatttgaataatgaattatactcacattatctgtactttctggctcttgactacctctactggctaaaagtgaagctattatccaattgtcaaagactgagaagccttccctggcacagtcagtgatcttgtgaggtagatgcactctggggcaaaattatcgagaggacaatttcaagctatataagagcaaattaccagcctgtgtggaactgaatctacaacctggtgaaatattaaatatttcattagtaatccttttggaacaaaaataagcagacaacagaattagttgtgagttgggcataaaaggctaattaatgttattgtattcggttgattgactttaaggctattaaatcattattttatt

SEQ ID NO: 49661 - DNA, 671 bp, Homo sapiens
gcagagaagaaaacaaaacaatgtgaaatagaccctcttcaggtaatgagaatctattttttgcatcccacgtggaccttcagattcctctctccgaggcttcttccgacatactcctcaraccctttccttacgccctctgtgactcccggtgcacagaatgcgcatctgccccgttcatgctgtgtgcagttcatggcaagacattctgatctggacattttatgtgtctgcttgccatgtgaagtttaaagaagtgtgtagctactcataagtgtgggggcagaattaaaaaaaaaaaaaaacagaaaccaaatataaaatatttacttccaggaagtagactgttggatctacggtagaaaacattctacttttagcaaccagactgtgttagccacttggcttcaaagagtgatttttatttattctcatgaataaaaataaagaatagctgtctgcattttgctcatcaactagcaattccttggccacaacagttacattaatattacaggctccatttacatttatttaaaagggagtacgcactaaagtattgcattttcctctgtggagcatgcggcctcagtgatgccaatgatgcccatttccaggaagctctgcaactgccggaattccatttgccagcagctgccagtgaacaccga

SEQ ID NO: 49662 - DNA, 671 bp, Homo sapiens
gcagagaagaaaacaaaacaatgtgaaatagaccctcttcaggtaatgagaatctattttttgcatcccacgtggaccttcagattcctctctccgaggcttcttccgacatactcctcaaaccctttccttacgccctctgtgactcccggtgcacagaatgcgcatctgccccgttcrtgctgtgtgcagttcatggcaagacattctgatctggacattttatgtgtctgcttgccatgtgaagtttaaagaagtgtgtagctactcataagtgtgggggcagaattaaaaaaaaaaaaaaacagaaaccaaatataaaatatttacttccaggaagtagactgttggatctacggtagaaaacattctacttttagcaaccagactgtgttagccacttggcttcaaagagtgatttttatttattctcatgaataaaaataaagaatagctgtctgcattttgctcatcaactagcaattccttggccacaacagttacattaatattacaggctccatttacatttatttaaaagggagtacgcactaaagtattgcattttcctctgtggagcatgcggcctcagtgatgccaatgatgcccatttccaggaagctctgcaactgccggaattccatttgccagcagctgccagtgaacaccga

SEQ ID NO: 49663 - DNA, 637 bp, Homo sapiens
tccattttactgacaaggaaactgaaacgcaggaagaatacatcccttcttgaggtcttgcagaatcaaggccttaactgaagtccttttccttcaaccccagtgtttttttgccattttggctgcctttatggtcttttactggatttttttttcctttgggtatttcacagtcatctcaaattgaatttatccaaaatggaattcctgatttcttcaaattgcgtccttctcctgttttctatataagaaatctgggagtcatttttgataccttgtctctctcattttcccatatccaatccatcaccacattatgacaattatacctccaaaacacccctcttgctacttctatctggtttaagtactctggatatttatttgttaagtaagtgctgaggtggaatatgtgyaattaagaaggataccaggaagacaaagtagctgggaagtgagctagatttcctcttaaaaataaagattttgaaaggtctcttcaaaaaaaaaaaaaagaagaagaagagaaaaagaagaattaagctcgtgagtcatattaatatcttaaattttcattttagtttccctaggtgcaactgaaattctttctggaacgaagcagtttaaattaaatcca

SEQ ID NO: 49664 - DNA, 637 bp, Homo sapiens
tccattttactgacaaggaaactgaaacgcaggaagaatacatcccttcttgaggtcttgcagaatcaaggccttaactgaagtccttttccttcaaccccagtgtttttttgccattttggctgcctttatggtcttttactggatttttttttcctttgggtatttcacagtcatctcaaattgaatttatccaaaatggaattcctgatttcttcaaattgcgtccttctcctgttttctatataagaaatctgggagtcatttttgataccttgtctctctcattttcccatatccaatccatcaccacattatgacaattatacctccaaaacacccctcttgctacttctatctggtttaagtactctggatatttatttgttaagtaagtgctgaggtggaatatgtgcaattaagaaggataccaggaagacaaagtagctgggaagtgagctagatttcctcttaaaaataaagattttgaaaggtctcttcaaaaaaaaaaaaaaraagaagaagagaaaaagaagaattaagctcgtgagtcatattaatatcttaaattttcattttagtttccctaggtgcaactgaaattctttctggaacgaagcagtttaaattaaatcca

SEQ ID NO: 49665 - DNA, 591 bp, Homo sapiens
ccccagctccccttcaagcctccccgatgccagcacccatgttgtgggcagcctcacatcgagagggtctgacctgcagttcttctggggacagattccttttctgaaatcctggatcaggactgagaccagggcaggagtccaatctgaatggaaaccctggccgggccggtgcgttctcccttccagaaggcactggcgtggggcgaagtctaggttgaggcactgtggtttcacagctgaaatccaactctggaaccactttaaagtgtctaatgggaacgggatggaagggatgcatggcccggctgcaaggagaggaagggccgtggaggccgtggcagagsagcggctccttgttcatcctccgactctacagacctgcccagccaagccctccgggcagaaggagtccagctccgcctgagtgcatgtgctttgtttgcttttgcttatttttcccaatccagactcaacgagcaaaccccaaggtgactcctgccagctcaggttcaatcctcccatgtccgtggcttcatggtgtcctcaggacaccccatgaggtgaacagtttcatgtggtttatagatg

SEQ ID NO: 49666 - DNA, 545 bp, Homo sapiens
tagatagtcacctggatggatggccacctggatggacagtcacctggacggatggtcacctggatagatagtcacccggctagacagtcacctggatgtatgttcacctggatagatggtcacccggctagatagtcacctggatggatggtcacctggatagatggtcacccggctagacagtcacctggatatwtgttcacctggatagatggtcacctggctagatagtcacctggatggacagtcacctggacagatggtcgcctggctagacagtcacctggatggatgttcacctggatagatggtcacccagctagatagtcacctggatggatggtcacctggatggatggtcacctggatggacagtcacctggacggatggtcacctggattgatggtcacatgactagacagtcacctggatggatggtcacctggatagatggtcgcctggctagacagtcacctggatggatggttatctggatagatggtcacccggctatacagtcacctggatggatggtcacctggat

SEQ ID NO: 49667 - DNA, 559 bp, Homo sapiens
cgaacacaccatgtgttaaaataagagttggtgtttctgagaagggaagtccaggagctgaccaggatgggattagctgttgataaggggcccagcattgttctagctctcccctgaggcccacaccacatcctagaagagaagccaggtccctcggccctaccagggctgggacagtcrgggcacagctgcaggagacgccctgggaggctgtctgggctgcggcaggaggaggcagggcagggcagtgcagtggttgggaggtggccactctgcctctgttgagttttctggctttgtcacttgacgttgattctcccccagggccagagtggggtcaagtggggaccatggaggaggacatgagatcctaacaggcgacctcaaactgctgtacaagcccagcaaccctgaccgctccccaacccacaaccagcaaaggtcaaggccagtgccaaggagtgcggggagggcggcgtgggggactctccagtttagactcttcagtctcgaaaaacaaaggctgacaggaatgtgaggaaaccactgtttactctgt

SEQ ID NO: 49668 - DNA, 594 bp, Homo sapiens
tcatccaacaacactacgggtaaatcttgcaaacacaatgttgactcaaaaagccaggcacgacagagaatacacttatgagatccatttatataaaggtcaagaagggcaaaaagactctacrcctgtaatagatgaaatacggcaggggtcctctggagttcctcctatcaagaggcggagtctgttctccacctgctgagagctggccttgagagttgtttagatcaataggattcggtgtgagtgacattttgtgagttatagagactaggcctcctcaagaggtcctgccatttctggccttgcctctcttgtgaggctgcaggccatggagggaggtgtctgtcttagtggagggtggggaactcccctggcaacagccagcacccactgcccgtgtgactgaggccatctggaccttccagtccagcagacactcaaacgtgactggagtcacatgagcccaagcgaatcaggaggagaagtccagccaaaccacagaattgtgaggtttcataaatggtggctgctttaagccaccaagttttcaggtggtttgctgggcagcaggagataactcacagcaggctg

SEQ ID NO: 49669 - DNA, 578 bp, Homo sapiens
tggctggggcctcagctgatccctaaagccagggccttggcctggccacccctctaagggcctctcgcccccacatttgcagctccagctctgtcctaaatagatatgtggtctctggggaaacccctcagccctcagttccccccagtgtcatctaagagctatggctgacacaacgatctctgatgagccagttttctctctcgtgggaggaatggaatccctgacaggccaaggcagtgctgaggcccaccatctttctgccttcctcagggtctccactgtaccagcgatgatgcttaccagcaataggatgatgcagccacctcacacactayagacaggccacagcacctgtcaccttcctgccttctacctccaggaccctttgctaagagaggaagctccttacccagcagagaggcccaaacaagccaaaaagtggcaaggctgggagagggaaagacatcagatcccaggaaacacggtctgtcctgtagcagagagaactccaagcccacaagggcagctgggtaggtcacagcctaacatcagaagcaactctagactagagtatg

SEQ ID NO: 49670 - DNA, 1609 bp, Homo sapiens
ggaaggaggcaaagacttcaattgtaccagaccaaaaccaaactagagcaaaccggagaaggcacaaaacaccctgagctgagttcatctcrtagaaggaaagtgagccggatggatggggagcacctcgtgttgttgatgccactcttccacaatttgtgtttgcacaagagccaagggctttttccttcactgatgtggggcccacttggctccatctgggtggggagaaggatctgacatgcggaggctccggccgtggaccacggagaacctctcctccatgggaatgaaccccaccagttgcttcgggctctgaggctacgtgtccacctccccaagtgtggcaccagcccaggtacctgctcagcgctgtcctgtcggaggggcaggggcagacaaccatgtccacaggatactcgtttgtacaaacagccacggaccagaaaagaaaaatcaagctgtggcctcacgtagggagtagaagacctgattccctgagcagctgtggaggctgaacaagttcagcactctgaactccagcttcctcctctgcaaaatgggataataccacccacttcagaggggtgctgcgacagtctccagaccccaaagtaccatgcctggtgcaggaaggatgttcccaaggatgtgagctttgcctgggggagcaaggactgaaatgcatttgcagtggggaccgctaaatggaagctctggtctcagacctggcttaggaaacgcacctgctcacagcccacccaccttccccaagtcccagaaagcagccagcattgcagcagataaaagatctcagagtcggaacagtagtcctggcccagggacccctaagcctccttgcagcctctgcttaaagcctgtaggggccgagtcccagggaaggttggtgaaggttcccatgtgtccctctctgtcaccctctcactggcaactcccggctcgacaaaatgctgtcctgcacctttaaccgaaagaacccagggccgtgcctaggcaggcctgaacacccatgtttacccagcagaagggtggccctcccccagcaccatggcaagctggagctcatttgcccacagactcgcctggtgcacaggcagtgcatatgaggccccagcccctggccctgcccagggagttttgcccaagaagccttgtggcctggcccaggctgctgttgccgagccaattctcccaggaagccaagcctgggcagcggcaatgcaggcacagcaagctcacaggtatcctcagacccagtagctttgggcaaaacaacctgacccacaaagcgctcctgggagcctggcatggcccagccatctctctggctttggctggcaggggaaagggcaaaagaaggggccaggggtcagaccatgcacatggtccacatcacaaagccgaccagctctgggaaagggtagccaccatgtgttattcaacttgcagggagcgcactggaatgtttgctagatccaagctggtgctgctgggtaacagggagccagagcctggtggtggctgtggtattctaaaggtagctgcgatcctgccaagcaagggctgcaacactggtcaggaaacagtg

SEQ ID NO: 49671 - DNA, 550 bp, Homo sapiens
tctgggtaaagaatagggggggttcctctagttgttctgtatctgtggggatggttggaatgttttcataatttaaattgtgaattaagttttaaagctttgttgtttaggatggaatctcactctgtgctcaggctagagtgcagtggcgcgatctcggctcactgcatcctccgcctcctgagttcaagctatctcccgcctcagcctcctgagtagctgagattacaggcatgcgccaccaagcccagctattctttgtatttttagtagagatggggtttcaccatgttggccaggctggtctcgaactcctgaccttgtgatccgyctacctcggcctcccaaagtgctgggattacacatatgaaccaccgcacctggcctaaaacattatttttaagaaccaagttgctagtatttgtaattgttgaagagaaattaatcatcagtaacagattatctgtcatcaggtttcattttacaattatttatctaagaccttatttcctcctgtgttcactttgcttaaaaataaatacatgcagta

SEQ ID NO: 49672 - DNA, 550 bp, Homo sapiens
tctgggtaaagaatagggggggttcctctagttgttctgtatctgtggggatggttggaatgttttcataatttaaattgtgaattaagttttaaagctttgttgtttaggatggaatctcactctgtgctcaggctagagtgcagtggcgcgatctcggctcactgcatcctccgcctcctgagttcaagctatctcccgcctcagcctcctgagtagctgagattacaggcatgcgccaccaagcccagctattctttgtatttttagtagagatggggtttcaccatgttggccaggctggtctcgaactcctgaccttgtgatccgcctacctcggcctcccaaagtgctgggattacacatatgaaccaccgcacctggcctaaaacattatttttaagaaccaagttgctagtatttgtaattgttgaagagaaattaatcatcagtaacagattatctgtcatcargtttcattttacaattatttatctaagaccttatttcctcctgtgttcactttgcttaaaaataaatacatgcagta

SEQ ID NO: 49673 - DNA, 688 bp, Homo sapiens
tcgaaacgtgttataaaaggaatcatgtaatgcttccacttgaacaaaggaagtcatgcacaatagaataatctgatttttaaaaaaattttcagttggcagacactaagagagatcatagtatggatcctacccatagcccactcctagaatgggagaggagaatgggagacttagaatctccagagagacagacagtttgacaaaactcttcttgttatttaaatactggattaatgggtcttttctgcctctgctgggcatcaaattaatcttattaaatcatgtcttatctgatagattctagagttcaaggtaaggtttggtccttcatgmttccctcaacttttctcattctgtatctactccttacccattgctacattcttcaccctgcaatgcataaccaatctcccatgttcgattaacttaaaacaataactatgtggtcttgccccagcgctttctaacaatggctaaaattcttacaggactgagacactgtacaaagactctctgaataatctccaggaaaacagagttgcaataaggaatcacacaatgactaatttcattgctaaataacttgagaagtgattttctcactgagtgaagaaaaaagtctggctgaatgtatgccagacaattaacagtgattatctctaggtatgggattatggcagacttg

SEQ ID NO: 49674 - DNA, 531 bp, Homo sapiens
ggagcatcgcttgttaacatagtcaatcagcaaacccaagatggggaaaagctgatagaattcctttctccgtcatatggagctgtggccactagccctggagtgcaggtgccgtctgccagaaaggcttatytgatgcttcacccagcttttctctggagctcaagcctcatcctcagggaattcttctagatcacattaaggaaaagaattatgccagtctctataagcagcacgctccacaccaaagaggcagcatagaccaaatcaaatagacttgggaaagagaactcactctttcattcaacaaacttatccacattttcaaaaaaatcaactaacccagaaaaagtcctgtgcttgaaatgacttccgtgttcaaatcctaaatcaataataaaagaaatacctagagtggcttctattttctgactgaactgttacaaatacttaaggttgatttgggagtaattaatgatgagctccatcaaactgtggaagttaaattctctgagacttacttctttgcaa

SEQ ID NO: 49675 - DNA, 583 bp, Homo sapiens
aattcttagaatgaaactggtatgttaaaaagcataccaaataaataaataaataaataaataaataaataaataaaagattttaccaaatgctctccagaaaagctatcctcccagcaatacatgaatggagtccacttcccagagctttaccaattctaaatatgacagtattttatttgtaatgtgtttgaacatttggaggaaaaatgataaaatcttcttttcaatgctacttaatattatttgattattcatgaggataaggcttttttgcgtttatcatccatctatagttctactttggctaattttcccttagagttttctgcccatttttaatttaaccaactgaccttcatttagtttactcactgagctctttatatcttgatttactttcactatgttgtcaaaatggtgtttttaaaaaacatattaagttttacatacttacgacatcaaatctcttcatctttatggagagatttatgggtttctgccttgcaagtaacccttataaagaccttctctacagcctagagactaaatktactgtattttattctagtactttagcaca

SEQ ID NO: 49676 - DNA, 850 bp, Homo sapiens
atatatttgctggattttaattgagagttttagtttatatgtgaatattatctgaattctaacacctataggagcagtaatttcacatgcctaggaaaatttctggaaaatcttcaggacatgcaataaatgttccccaattcattgcagaggagcaagagaatcgcctactttttattaggaagggctgtgccattgcccctttcattccttggacagaggagggacctgctttcmaacacccaccacctcaccttctatagctcccagcctccaacctcatctcaagcccagagagctccaagaaaatcttaagtgaaacaagaggtttttttttttgccagaggagaacttagtccttggtgagcctcctggctggatagttgctaagctgcaggccattgaatcagagcagaagttttcagacttcttagcggaatttgaacaatgtaccctggaacttagggatcccagtgggtggactcacatggctcacttcggaaaagtctgatggaaagagactaaatggagttgctttgatagcaagaagagggaaagaaagttgttgtggggaaggctgggctttcagaacatggtagagacacttttctcacaacattatggaagagagctgggttggagtcatcttaaagcactagcctgttagaatgactgagtgacattttgtttccattttttagtttacactttgtaaacctagggtagttattcttcccgctcccccattgccatcagggaagggcatcttcattaagctggtgtagactttgtgcatttgaggcccctggtactgcaaggacaggtagtgaagatagagggtcaagtctac

SEQ ID NO: 49677 - DNA, 567 bp, Homo sapiens
tctaccacgtatttaccctgtaatttttacttacctgtgtagttctattttctggagcaacagaaaatgaatcagttcttccttgtacaattcaaaccacgttagatgtttgggaacagctattatctttgccttaatgtcaccctgtgggccaaacattcttttctcacagagtggcgtttctaagatttcctcttctggatgtgttctaatgtaccctgtgttttagcatctacatttgacagccacagttggtgaaattttaccttcacttgtgttcacattaggggcatgtttatttttaaatacctcgttcctcttttttaaaagtaagaacttcagagcaatgttgttttttatcttctcttgtgcaattgattggcgttagtcccattcagttgtcctgacagttgttcaattgaccagtatcactcattggtttttggccatcatttcaacttgtyaaaataatattgcatcttcagcctgctattcagctatccctgcctgctttgtcctatacggaaacttcctaagaatcttaaaacatatctcaactgattctca

SEQ ID NO: 49678 - DNA, 1225 bp, Homo sapiens
taatgagtttcctagacataaatttatttcagtctacaaactcattaatatgtttgtagtatatccaaattaaattagcaytctgatgttgacagaagtgctctttctttgcaaagtaacaaacatagcacataaaaccattttctaagcagcaagtttgatatcactttcaaataaattaataatagtctgacaaattttctacttccttttatttttattttcatcttttcaaatgggtaaactcaggcatctctatatgcagatgtagagtagaaccattaaaaaacactttgaaataaccagttacatagaaaaaatttcatgaatttcttatacaaacaaattgcaaatattgctgtattattgtagatataaaaatataaattgtaaactctagggtcaaggtgcttagattgaaattctggatcaagcactttctgatatagacaagtaacttaaaacctttataccttattttttttatatttaaagtaagcacaattttaccatcttccaaatgagttattatggcaaatgaatgttttaatgtaggttaaaaactcattaggttcatatcattcaaattactaaataagggaataatttctgtaccttcaacctacttgttttacatatataaatattatgcaatatatgcatatctgtacatattattatatttgttaattatataatatacattaataacagatatgctatccatccatctatctatccattcacacacacatatacaatgtatgcacaaagtagaaagtaggaccttccacaagataataattattactacattttgctggtaatttttattagtgttttaaagtgtttttttctttaaaatttatattaattgttgcacttactcatgcctacctttctcagcctctttatgcctttaggtacatcttatcattctcagactcttctgctattggctttacactgcagcgtattaggtcttaatgccaactttttaacactttttaaatttaaaaaggcataccttctgagaagcaccatgcaaatgcagcaaatgcagagcacagaaatggtctacttttggttaaaacttgaagagacaattctacaacaactaatcaaagtaactctgttgaaatgctgagaacttggaggtaagcattgataacctaatcagatggttttgtgatctgtaatagtgttcaattttaatgacatacct

SEQ ID NO: 49679 - DNA, 1921 bp, Homo sapiens
ggcttcattcctttccattttaatacttaataatgttccactgtgtggagagaccccatgtcgtccatccattcatccatccagggacacgtgggttgcttccagcttttctctattataaataacgctgctatcagaccgctctttgtatccttaaaatcaaaacagcagcccacactggggggctcatggggagaaaaccacatggcactccatastgtggggtctgtcccgtgactctcaagcccttgggtctccttcgaaaagatggacctagtcccagcgtgggggtcattatggaagagcacgatgacacaaaggaatgccgtgacttgatacagcccctcatcccaccagcataggaggaggcgagaggagcctgacctgccctgccctcctgcctgaaagccgcaccctggcctgggtgagccctaacctaatcctttcactcagttatttccagaaatgtgagggcccagctgacccagtccctctctttgtatctagattttcttttttcagtgggctccaaagagagataactttcctaaaacacagtacagtgatggtaggagagaccgcctacccgagccaggtggcttcctttctctcgggtgctttcagtggaaaggggcccaccttgtgttttgtgaacatagaatcctctaagattgtggaagttagcctctgagatacagagcttattatacatgagtccttcattattctgggtatatcagacacaaatataaatgagaatccctgccctggaggagatcactgtgcaccactggggaaacacacacagtgaaatgatcagtgtacattgtgataaaaccccagatggagtcacaaatagctttgcacatggtacagcttgggccttttggctgtagtttcagaaaagggtatgacaaggaacgttaccttaacaactagcctcgttttcaagatgagcacatgaggcccaaggagatgaattgatgatctaaaaacataagctgagtcgtggcagacccagggccagaatgcaggcatcactccaggtctagtctcacctgaactaggtggcccacttctgggctccagcttaaaggtggtcttgggcttgctgggttttgaaaagagaggctgagctgtggaatttcagttagaaatcccattcttcctctatctcattccctgctgaaatgacacactgtttaacactcacccttcctgaagcatgtgaattctatctcatatcctgcgggacaatagctggagtgtggctgcaagattaccacgtggtcagtttccataaacaacatccatcagccttgctccatcctgccatgtggggttagcaccagctgaccccagggaaatttgcttatcaatctgggcttgtaacattcaacagacaggactgtagttacattcagaagtgttcttgctccgtgggaatgttctctggtttctcactgtgcctgtgtcctgtctgaggccttccgatggacatatgtgcttctacctgcctggcatcccttcccacttctcctagtaataggaccttgatgttcctttagggacccaccgtctcccatttccaccaccactctgaatgcatccaacatccaaaactgggaacagggcccagaccagaccaattagattctcttgaacatttgaacatcaaactgaggggttcaaggtcagaaattggctggggcttgtttgctgtgagaactgagccctgaagagaccacctggctacacagtagttcttgcacccagagccccctccagctgcttggttcttagctgtctttctattttgtgacagattctatatttttttctatataatactattttgcttcaattagccagagtctacgtctgttgtttgcaactgcagaaccctgactgaccagggttg

SEQ ID NO: 49680 - DNA, 1921 bp, Homo sapiens
ggcttcattcctttccattttaatacttaataatgttccactgtgtggagagaccccatgtcgtccatccattcatccatccagggacacgtgggttgcttccagcttttctctattataaataacgctgctatcagaccgctctttgtatccttaaaatcaaaacagcagcccacactggggggctcatggggagaaaaccacatggcactccatactgtggggtctgtcccgtgactctcaagcccttgggtctccttcgaaaagatggacctagtcccagcgtgggggtcattatggaagagcacgatgacacaaaggaatgccgtgacttgatacagcccctcatcccaccagcayaggaggaggcgagaggagcctgacctgccctgccctcctgcctgaaagccgcaccctggcctgggtgagccctaacctaatcctttcactcagttatttccagaaatgtgagggcccagctgacccagtccctctctttgtatctagattttcttttttcagtgggctccaaagagagataactttcctaaaacacagtacagtgatggtaggagagaccgcctacccgagccaggtggcttcctttctctcgggtgctttcagtggaaaggggcccaccttgtgttttgtgaacatagaatcctctaagattgtggaagttagcctctgagatacagagcttattatacatgagtccttcattattctgggtatatcagacacaaatataaatgagaatccctgccctggaggagatcactgtgcaccactggggaaacacacacagtgaaatgatcagtgtacattgtgataaaaccccagatggagtcacaaatagctttgcacatggtacagcttgggccttttggctgtagtttcagaaaagggtatgacaaggaacgttaccttaacaactagcctcgttttcaagatgagcacatgaggcccaaggagatgaattgatgatctaaaaacataagctgagtcgtggcagacccagggccagaatgcaggcatcactccaggtctagtctcacctgaactaggtggcccacttctgggctccagcttaaaggtggtcttgggcttgctgggttttgaaaagagaggctgagctgtggaatttcagttagaaatcccattcttcctctatctcattccctgctgaaatgacacactgtttaacactcacccttcctgaagcatgtgaattctatctcatatcctgcgggacaatagctggagtgtggctgcaagattaccacgtggtcagtttccataaacaacatccatcagccttgctccatcctgccatgtggggttagcaccagctgaccccagggaaatttgcttatcaatctgggcttgtaacattcaacagacaggactgtagttacattcagaagtgttcttgctccgtgggaatgttctctggtttctcactgtgcctgtgtcctgtctgaggccttccgatggacatatgtgcttctacctgcctggcatcccttcccacttctcctagtaataggaccttgatgttcctttagggacccaccgtctcccatttccaccaccactctgaatgcatccaacatccaaaactgggaacagggcccagaccagaccaattagattctcttgaacatttgaacatcaaactgaggggttcaaggtcagaaattggctggggcttgtttgctgtgagaactgagccctgaagagaccacctggctacacagtagttcttgcacccagagccccctccagctgcttggttcttagctgtctttctattttgtgacagattctatatttttttctatataatactattttgcttcaattagccagagtctacgtctgttgtttgcaactgcagaaccctgactgaccagggttg

SEQ ID NO: 49681 - DNA, 1082 bp, Homo sapiens
tgctaggtactgtgttacatactgagaataagcactgaaaagatagatccctgctgtcctggagtgatacgtgctgttgaccatgaaaagtggttagtacaagcaagataaaaaaaggaaaaggtaaattttcaaaagaaaaacgctcactgcctttcaattttaaaatagccttctgagaccatggggtccagtggtcatccattctgtgcaaacaactgtaacctcactcatctttttgaaacactctttttcactggtcagttgaaggtcaggcttgaagagcttttttggttttttatttttctggttgcctcattctgtcttttaaaccatgacagaaaaggattaatagccaggagagcagagagcctgacaactcaattccatcacccatgagtccttactgagctgccacctggacagagcccagtgctagatgctcttgctaataatatgtggctgtgtcttctccctgcaggaccttggcacacacaagacttgacaggaaactgctccagagcccatggtgggtgtgggattagggcctgagatgagacttcacgtgtgaatctttgtggggagcaaggaaaaaagaggcaaatatgagtctaaggttaattactttccagagagttcacactttgagcaacattgtggagaagggctggctggtgaccatgtgaaggttaatggcactattatatactcaaagagtctatattgttctatgacaattaacagtaaagrgatggacttctttttaataataacataattgatcataaccactcttctggtgcacagagacagggcagtaaaaacgggggcattattagaagacacaaacacacacacacacacacacacacaccccaagcactttgaaaggagactcactccactatcttcagcctctcagatgatcatggcatcagttaaaattgggagagcttaattattcttccggttattgggtgatatggtttggctctgtgtccccacccaaatctcatgttaaattgtaattcccaatgttgtgggagggacctgctgggaggtgatttgataatgggagtgga

SEQ ID NO: 49682 - DNA, 555 bp, Homo sapiens
cagaattaagtagggagcatgttattggaggaagatatatccttgttaagaggtgaaagaaaccctaacaaaattgtatcccacagtcctgtggaaagcagtacttgtgacaaacttgcttatgtggccaaggagatttcaatgcaaactgctgaaggtactccctggttcctccttgctgcttgtagttaagtgaaagaagagagagaaattgaggggaaaacagctaaacaaaaggaaccagggcagaatggttttgaaaactatcaccttctccagatggcaaaagatgttaaatgtcataaatagctgctgaaagtttgcttagagaaaaggctgcatgtgtgactggacaacactctgctgaaagtttggaaaggtttaaggaaaaaaaaaaggtcagagtgttcaggcacaaacaatcccagggcttaagggtgtgagtagtttctcaamgttgagggcttctaggaagctttccagccttctaggtttgctcctcagccactgagggagaagtcaaagatagagaaggcagcaactcaaaataacctg

SEQ ID NO: 49683 - DNA, 1112 bp, Homo sapiens
actttttccaggtcttcctgctgctgttcgttgcctaacatttcacaaagtctctggctgagggccacagaacgttttagctcatcctcactgtctgaatcaaggcataaagccaaggagctcttggatttgaaggtgaatttcctgtaatttaaggaaaaaaaaaaaagcctgataaacatttgtctttgttattcttttattgtaaaaatatcaaaacaaattgcttttccattacggaaaattacttaacagaaaaaaaagatatatcaaaagaggtatatttcagcattacctttgccccactccaaaagagccatgctttgaaaactggacaactcttatgctactacgtatcatcagtaaactaatcatgttgtgccttttttcttttaatgatcaaccccaatgaaatttgctattgtctttataaattatgctattgaattcatgcaggcatagcaatgaataaatgtttttgacaacaaagtgcatgaagactaatttgtgatcttttaaattatgatccatgcactttaaaaataacagtaacattccacttatccacttatctgtaggtcagacttctggcaacctctactttccagaacatagggattccaaagtaagaaaaaaggcttctgaggaaggcagttccaaagcccatgtacttagagggaccctttctttcccaggaaatggtgaataaaatagtgtatcaagytcatcaagaaatgagagctaagaaatgagaaagaataaccacaagaaaggcaaacaagaactataaagtcatttaatgtaaaagcaaactatcttgtaataattaagagcctctgagggcaatatcatattgaaacacagtgcaataattgatacttaaaatgctgattctaagtcattaagatatacttaaattatccttagttattttaagaatgtaaggaacagtgtaacatattttagaaacattttcatccaaactgttaaaaatcttttaaaagataaatcgttaaaaggtaagcttcagttatataaaaattcacttatgtggaatcctttaatgatgccagataagtaaggtgttactgtgttgtcttctaggtaagccg

SEQ ID NO: 49684 - DNA, 594 bp, Homo sapiens
aaaaaaaaaaaaaaaaaaaaaaatagggtttgggaatcctgttttgccttgtgtaatcctgagaaagagtttccagtaacagtcaaaccatgttcctgccaaaaaacaactctcagttgtcctgtttgtgatgcaaagacaaaaccatgtgggcaaaatgataatcaaatatttaggaacttaaagggcgttggtgactgttagtaggatgcactgagttatgctgcagtaacaacccccaaaggtcagtgtctgaaaacattgatttcttggtcacattacatgctcctcctgcatttgcaggggtaatggaggtgaacagctgaagtgttctgccaactactattaatcagaaggatgttggccatgaagctagccttcgattagattgtgaagaggtctggagagggacgtgggcagggctggctttatgggcattaatatatatatttttaaatgtagtctcactatgttgcccaggctgaagtgcsgtggctctgtgtgatcatagtgcactacagcctcgaactcttgggctcaagcaatcctcctgcctcagtgtttggaatagctgagactataggcatatgccac

SEQ ID NO: 49685 - DNA, 557 bp, Homo sapiens
catctcaaataaatcaataawaaaaaaaaaaaacttctaggtaccatttgcttcctttccatgtccatttatggcatcttttaagatagttgttatttatcgagtgcttatttttgccaggacttacaggcactaccctacacctagcacagtgcttagggtattggaaataactcaataaattgtggcagaataaatgaatgatcttatccaatgctcccagcaactctaagaagtagatatcattatctcaattatagtagactttttttgttattattgttgacatctgagactacttcctgattgtggggaatctgcccttgtgtgagggtctcatcttggatgctgagaaagtgaaaaactcccctggacctctggtagcaggaacacagatatacaaaccaagtacagctaatcagatcctcacctgggactttttttaaattttagtttttatttatttatttattttgagacggaatctcgctctgtcacccaggctggagtgcagtggtgcgatctcggctcactgcaagctctgcctcctgggttca

SEQ ID NO: 49686 - DNA, 611 bp, Homo sapiens
tgggcaataacaatgctgctgacttgtagccatccactggctagaaggctccagagtcaggctgtctgggctcaaatcccagccctgccatgggcaagctatttaattccctgggcctcagttttttcatctgaaaaatggggataatagcatctaccttctacgtttttttcccctaattggcgtagagaatatgtatattctagataatgtatacatatatatgtatggcatagagaatatatataatataatatatatatggcacttaaagcccttgcatctgatagtcaatgtttgccatgattattagtatcttggaatgtaattcatccagacttgagctcataaaatggtcatgtrctttcttatctgcacatctatctctagctttcattccctttttaaactgaccttctattttttatattttccaatttattgtctttgatggtaaaaaggaaatcatagaggaatgaatgacttttccttgtttttgtcacagatgaaccatgtgttacttactccaagtaatcagcttatctttccatgtttttcttcttatttcaatatactctgaaatatcctgcttaatattcttggcattttgg

SEQ ID NO: 49687 - DNA, 559 bp, Homo sapiens
gagaaactctgtcttgtaaatgtcatctttctgagctcatcatccaagctgagtgtacagtcattgcagagtagtgttaagtcagaataagggttttattttgtttgtttgtttgtttgtattttaggctagccaagtgaagcagtggaagtggaggaggaacaaagaaatctgtaactagttttgatcaattagttgtagacaccatgcactcagaccagccaagtcagaataagtttaaagcaggagtgawcacctttatccccaaattacccatctcagagatggagataaacagagaaggcctaaggcctaagtaataggtagttatgacttatccacatagtacctcccttcttggaaatctctgaaatactctctcattttctttcctcccacttccatccatggctacaggagtagtcatgatgggtacctaagcatagccagtgaatttattcactgggggttttagatctggaaacactggagattaagatgatctctgtcctgtagttgtatgctctgcaagtaaaatcttgataccgttggcagccat

SEQ ID NO: 49688 - DNA, 661 bp, Homo sapiens
tacaatcatttaacagaagtaacaatcttaaattatcaggcaaaaaaaaaaatttagaagcacaagaaaatatggtgtgttatctaaagaaagacagaattaatactttcaattctttttcttttttttttttttatttttaatgctttcagttctgcccagcattaaaggagaaagttattcacatgagacactgggccaaaccaagagtttgcacgttaatttatgggagtaacacaatatttctatttcaaaatactatctttttataaatacaaaagcacataaagatgtgctatacttttccctaccctgtaataaaaaaaagtgacatataagtgaacacttgccttaagayagacactatcagtccaaaattctacgcctctattatttagtacttacataattcttaacatgcaattaattatactcaaagctaagatgttcattccaactaaatttcaaaatttaagtaagcacacctatactcctatcaaaattaatttctcacagtagcactacaaaaggggagtatgtttcagaaagcattttaaatttttacatgaggtcatgaagttagatttttctcacaaaaattttcaacttatattacatgagaaatgttaagactcaaatattcaaacaaaatcagttgtga

SEQ ID NO: 49689 - DNA, 661 bp, Homo sapiens
tacaatcatttaacagaagtaacaatcttaaattatcaggcaaaaaaaaaaatttagaagcacaagaaaatatggtgtgttatctaaagaaagacagaattaatactttcaattctttttcttttttttttttttatttttaatgctttcagttctgcccagcattaaaggagaaagttattcacatgagacactgggccaaaccaagagtttgcacgttaatttatgggagtaacacaatatttctatttcaaaatactatctttttataaatacaaaagcacataaagatgtgctatacttttccctaccctgtaataaaaaaaagtgacatataagtgaacacttgccttaagatagacactatcagtccaaaattctacgcctctattatttagtacttacataattcttaacatgcaattaattatactcaaagctaagatgttcattccaactaaatttcaaaatttaagtaagcacacctataytcctatcaaaattaatttctcacagtagcactacaaaaggggagtatgtttcagaaagcattttaaatttttacatgaggtcatgaagttagatttttctcacaaaaattttcaacttatattacatgagaaatgttaagactcaaatattcaaacaaaatcagttgtga

SEQ ID NO: 49690 - DNA, 623 bp, Homo sapiens
  misc_feature (1)...(623): n = A,T,C or G
tgtctagcagtgtgtataaaagatagtatataaggacacagttggatttaggattagaaaagataaaagtaatctttaccacagtaacaaattataagagtaaaatcatatgatttgctcagcagatgcatttgataattgtttcagttcccattcaagataaaaattatttgctaactagtaagagagggggatattgatataaagtrtctcctttttttcttttttcttttctcttgagacggagtttcgctgttgttgcccaggctggagtgcaatggcgcaatccccgctcatggcaacctctgcctcccaggttcaagtgattctcctgcctcagcctccgggtagctaggattataggagcccgtcaccatgcccggctaattnttttttttttttttttttttnggatttttagtagagacatggttttgccatgttggccaggctgatctcgaactcctggcctcaaatgatccgcccgcctcagcctcccaaagtgctaggattacaagcatgagctactgcgcccagccttctttttttcttgagactgggttttactgtgtcacccaggctggagtgcagtggcgtgatctcagctcactgcaacctccacc

SEQ ID NO: 49691 - DNA, 2251 bp, Homo sapiens
gcatgatgtgtctgggcgctctactcagggtcttataaggctgaaatcagggtgttaactgagctgtacttctttctggaagctgcaaaaaaatccactttcacactcacttaagttgactgcactcagttccttgcagttttaggactgaggtagctggttccttactggccgtcagccaggagctgctaataaccctagttgcttcctgcatgctytaccatgtggtcagcaatagagaatctcactggttccaaactcctctggagacttgaatctctctccccagaaggagatcagttcttttaaggacatatctaatcgggtcagagtcactcaaaataatctccctatcttaaaatcaactgatttggaaccataagaatgtctttacttttgccatataatctagcataatcatggacgtgattcctcatagtattcacagattctggccacactcaagaagagattacatgaggttagtggtaatggctggtgggggaatgtcatcttagaatttagtcttctacactatgtaataaaaagaattatcatttatcttgattaattctaccccaaaataattacctcttttatcaatatataactgtgcttcatttcccacttatgactgaaaatctgcttacactacccatccatgttttggtttttgtttacatatacctggcacacaattactgattctattctatttcatctcttttgtcattttgttttaagtttatttctcctaaatagaatatatattggttttgcgttgacctgtcttaatcccttcaggctactattacaaatactgtagaaccactggattatccacaacagaaaatttttatttctcacagttctggaagctgaaagtccaagatcagtttgccgacacagtcgggatctggtgagggtcttcttttgtattgtagacttccgatttcttgttgtagaagttctctcatggtggagaaaggaaacaaattctctcctgactcttacaaagacagtgatctcattcaagagtgctcctctttcatgggctgatcttagattccaattacatcccaaagaacccaaaccatgaacatattaattttgggagaacataagcattcggtccataacatgatttatcctaaaatctttgtaatttatttgatacttccctgaaggttctcgttttttaaattttctttgttttattctctattgatttctattttcttaatatgttgagttactaataaatatgattgaatctgtatttcatttcaacaaaaaacaaatagaagttctttaatgattactcctataatgtaggccagttttatcacactccccacctaccttgctccccaacacatacacacccatgttccataattctctcccagtatttcggaaattattttaaattatagttcatggtatttttctttttcattcttgagttatttacatcaatttttcttttaaattcactgtaattttgaagttctgtgttacattttttgagattttgtctattggaaacaatcacattattgccttcatccagcatacattttaattttttctattaaattttggatacactgaaaatcttttatatcttctccttgcctttaggttcctcttttacttcttttctccttagaagtacattcttcttatattttgttaagaatatattttcttacctaataaactggaccagatataatgaatttgaaaattgtgaatttcctctaaatcatctgtgatgtgtttttataggctctaaattagtttattttccccattttactcactctgtaagcaggcaagatctccatacatgctatagcagctgtcccccacctttttgacaccagggtccgctttcatggaagacaatttttccgtggaccagaggtgggggatggttttggaatgatttaagcaaattacatttactgagcactttatttctattattattattacactgtgatatataagtaaataattatacaactcacaataatgtagaatcaatgggagccccaagctggttatcctgtaactagacaggataggggtgatgagagacagtgacagagtatcaggcattagattcgcctaaagaatgagcaacctagatcacttgcacacacagttcccaattgggtttgtgctcttatgagaatctaatgccaccatagatttgataggaggtggagcttaggcggtaatg

SEQ ID NO: 49692 - DNA, 513 bp, Homo sapiens
tcaaggctacagtcaaggacaatgctctttagtttccaaaccaccagtctctgcatttcactggctgtgtggcacatctcattacatactaagttctgttgagctattactacttacactattttagagcttgtttgatggactcattttgccctttaagacctgtaggatgaatgagggagtcttaagatcatgagtgggctgggcatggtagctcacacctgtaatcccagcactttgggaggccaaggcaggctgatcacttgaggttaggagtttgagatcagcctggccaacatggtgcaaccccatctctactaaaaatacaaaaaaaaaaattagctggacaaggtggcacatgcctgtaatcccagctactcaggaggctgagtcaggagaatctcttgaacccgggaagcggaggttgcagtgaaccgagatagtgccattgcactccagcctgggtgacagagcgagactctatcaaaaaaaamaaatcatgaatgagggaca

SEQ ID NO: 49693 - DNA, 567 bp, Homo sapiens
aagtacatatagatgattattatcagggctaataactgagaagtggcctcattctggactgataggtcacatctaggaagttggagtatcatgcagtaaatccatccatctataaatcataagctattttcataaaacacatccatcatggttcactccaaatctacaatctcaaaggatacattttgtcttagtgagatgtgtgtggggaggtttcctgtgcctaccatgtcgaaaatagtaaatgtttccctgagggccaattaagcatgataaatctcaagttgttcctcacaaagcaattgagtaagmaacaaattgtttaaaagttgttttaagatcatgctttcttagggagctagtacttcccacagtaactgtggcaccatattttgagataattcaagttatttttataggttgtgatagatgtgtctttatcaaaatattcccacccaaaccatattaatctttggaagaaaatggagactgcagataactattataggaattctatgagatcaagacatgttagtcatagaatatctctcagggtctttgggaaaa

SEQ ID NO: 49694 - DNA, 401 bp, Homo sapiens
gctcccacatcagctcacatctgtgtgtgagagagagagggaaasaaacttctattttatttaagctgctattatttgggggctttgcaatcatattattttgcttctcatatctcggtaccatactgttgttgactagaaagttagcaaatgtgttaaatagaaagaagcacagacctattagtgaaaaactttctttctttctcttctttcctttcttccttcctgcctgccttcttctttctttctttctctctctctttccctctctctttctctctctctttccctctctttctctctctttctctctctctctttccctctctctttctctatctctctttctcccttccttccttcctttcttttttgatggagtttcactcttgttacccagg

SEQ ID NO: 49695 - DNA, 564 bp, Homo sapiens
aattacacacctatcatttacagattgagagactggattataagcaagttaataagttgatctagaagcatactgaaatacagacccatgayagagcagatgtttctctcctgaaggcaattctctagtaatgtgtggtatttaataattgaaccaagtcagaaatcccaagaacaaccagcctcaacaagaagacaattaaagtagaatccaattaaggggtatacatttcttcctcaacctgatgaacagatttttttaaaggtgagagaaatttcagttgaatatttgtatttcaagattaaacccaataacaaattatacatatagaaaatgggccgggcgcggtggctcacgcctgtaatcccagcactttgggaggtcgaggcgggcggatcacgaggtcaggagatcaagaccatcccggctaaaacggtgaaaccccgtctctactaaaaatacaaaaaaattagccgggcgtagtggcgggcgcctgtagtcccagctacttgggaggctgaggcaggagaatggcgtgaacccgggaggcggagcttgcagtga

SEQ ID NO: 49696 - DNA, 564 bp, Homo sapiens
aattacacacctatcatttacagattgagagactggattataagcaagttaataagttgatctagaagcatactgaaatacagacccatgacagagcagatgtttctctcctgaaggcaattctctagtartgtgtggtatttaataattgaaccaagtcagaaatcccaagaacaaccagcctcaacaagaagacaattaaagtagaatccaattaaggggtatacatttcttcctcaacctgatgaacagatttttttaaaggtgagagaaatttcagttgaatatttgtatttcaagattaaacccaataacaaattatacatatagaaaatgggccgggcgcggtggctcacgcctgtaatcccagcactttgggaggtcgaggcgggcggatcacgaggtcaggagatcaagaccatcccggctaaaacggtgaaaccccgtctctactaaaaatacaaaaaaattagccgggcgtagtggcgggcgcctgtagtcccagctacttgggaggctgaggcaggagaatggcgtgaacccgggaggcggagcttgcagtga

SEQ ID NO: 49697 - DNA, 564 bp, Homo sapiens
aattacacacctatcatttacagattgagagactggattataagcaagttaataagttgatctagaagcatactgaaatacagacccatgacagagcagatgtttctctcctgaaggcaattctctagtaatgtgtggtatttaataattgaaccaagtcagaaatcccaagaacaaccagcctcaacaagaagacaattaaagtagaatccaattaaggggtatacatttcttcctcaacctgatgaacagatttttttaaaggtgagagaaatttcagttgaatatttgtatttcaagattaaacccaataacaaattatacatatagaaaatgggccgggcgcggtggctcacgcctgtaatcccagcactttgggaggycgaggcgggcggatcacgaggtcaggagatcaagaccatcccggctaaaacggtgaaaccccgtctctactaaaaatacaaaaaaattagccgggcgtagtggcgggcgcctgtagtcccagctacttgggaggctgaggcaggagaatggcgtgaacccgggaggcggagcttgcagtga

SEQ ID NO: 49698 - DNA, 564 bp, Homo sapiens
aattacacacctatcatttacagattgagagactggattataagcaagttaataagttgatctagaagcatactgaaatacagacccatgacagagcagatgtttctctcctgaaggcaattctctagtaatgtgtggtatttaataattgaaccaagtcagaaatcccaagaacaaccagcctcaacaagaagacaattaaagtagaatccaattaaggggtatacatttcttcctcaacctgatgaacagatttttttaaaggtgagagaaatttcagttgaatatttgtatttcaagattaaacccaataacaaattatacatatagaaaatgggccgggcgcggtggctcacgcctgtaatcccagcactttgggaggtcgaggcgggcggatcacgaggtcaggagatcragaccatcccggctaaaacggtgaaaccccgtctctactaaaaatacaaaaaaattagccgggcgtagtggcgggcgcctgtagtcccagctacttgggaggctgaggcaggagaatggcgtgaacccgggaggcggagcttgcagtga

SEQ ID NO: 49699 - DNA, 632 bp, Homo sapiens
tacttaggagtctgaggtgggacgatctcttgagcccagaggtttgaggctgcagtgagctatgatcataccactgcactccagcctgggcgacaaagcaagaccccagctctttgaaaaacaaactcttagaaatcttaagttggccttgaaaaaaaaaatcttatgaataaaatcttaaggttttcgaaattataagtcactatacaccaggaactatgttcctgggttttacacacaccagctcttttaatccttcaagaaccccatgttttacagataaggaarctgaggcaaaaaggttgagggactcggccaaggttactaagtggtcaggagtaaaagcagggatctgaacctagctgttcttactccaagtccaggctgttctccactgaccatgaagccaagcagacagcccgctctccctgtttgcagtatgacagcctctaaatcttacacatcttagaaaaactccagccccagagatgctctacttcccatccccacccccaacaaaggatttcccagcaagtcagaaatgacaaaccacaaaacggagtccgtgcataaccatatccacgtctggccaaggcttggttagctcagagttagtcacattttaaaagggg

SEQ ID NO: 49700 - DNA, 632 bp, Homo sapiens
tacttaggagtctgaggtgggacgatctcttgagcccagaggtttgaggctgcagtgagctatgatcataccactgcactccagcctgggcgacaaagcaagaccccagctctttgaaaaacaaactcttagaaatcttaagttggccttgaaaaaaaaaatcttatgaataaaatcttaaggttttcgaaattataagtcactatacaccaggaactatgttcctgggttttacacacaccagctcttttaatccttcaagaaccccatgttttacagataaggaagctgaggcaaaaaggttgagggactcggccaaggytactaagtggtcaggagtaaaagcagggatctgaacctagctgttcttactccaagtccaggctgttctccactgaccatgaagccaagcagacagcccgctctccctgtttgcagtatgacagcctctaaatcttacacatcttagaaaaactccagccccagagatgctctacttcccatccccacccccaacaaaggatttcccagcaagtcagaaatgacaaaccacaaaacggagtccgtgcataaccatatccacgtctggccaaggcttggttagctcagagttagtcacattttaaaagggg

SEQ ID NO: 49701 - DNA, 632 bp, Homo sapiens
tacttaggagtctgaggtgggacgatctcttgagcccagaggtttgaggctgcagtgagctatgatcataccactgcactccagcctgggcgacaaagcaagaccccagctctttgaaaaacaaactcttagaaatcttaagttggccttgaaaaaaaaaatcttatgaataaaatcttaaggttttcgaaattataagtcactatacaccaggaactatgttcctgggttttacacacaccagctcttttaatccttcaagaaccccatgttttacagataaggaagctgaggcaaaaaggttgagggactcggccaaggttactaagtggtcaggagtaaaagcagggatctgaaccyagctgttcttactccaagtccaggctgttctccactgaccatgaagccaagcagacagcccgctctccctgtttgcagtatgacagcctctaaatcttacacatcttagaaaaactccagccccagagatgctctacttcccatccccacccccaacaaaggatttcccagcaagtcagaaatgacaaaccacaaaacggagtccgtgcataaccatatccacgtctggccaaggcttggttagctcagagttagtcacattttaaaagggg

SEQ ID NO: 49702 - DNA, 551 bp, Homo sapiens
cgtgactcaggggatctgaagaaagataaagtaatttggaagtaacatcatttctttttatattcacgttatctttataattttgcaaaatgcatctctttaaatgatgccataagggctttctggctttcccactattccctaagtgacccaagcttgtgattttctgcagtgtrtcaacagcagttgataaaaaccaacctacttgatagtccttagaattacctttgccccatatctttcaagtgttagtaatgttgcatgagctcttccacctgtttcacccaaattcaccacgagtgaggcctcagtaactgtgattctgcagcatagtttttttttttttttttttttttttgtctgcctgtgcctctttaatcatgacatcacatcaagactgaaccacaagggtttggcattctaatggcttgcattacatatgaacataattgaaatgcaatgtggtaatagaggcatttacaaagacctgtgaggttcaagggagaaataattatttctcatgaatgggtgaaagagaatgaagcatttca

SEQ ID NO: 49703 - DNA, 1110 bp, Homo sapiens
cactgttgatcatatttgcargggtgtttcgaagttatcagaaaagtcttcgcatcctagacaagtcaaaagttcacagatttgcgcgagcacaggtgtgcctctgctgaagctgccctctccctgtaagctgtttattctttgcacggggtacgcatctctacactggaaacagccagcccggtcatgggcccagaccacagcatcaaaccactgtgtttctttttccagtggatggagaactctttgagggtaaggaccatgtcttctttatttaaactcccagaaccttgactagacccttcccaacagttgactcattgcaaatatttactaaacaagtgaatgaaatgaaaggccagagttctcatcactcagccatctttacagaccagatgtccattgccagagcagaaacaaaatgaaaacagatttccatgtccaaagctgcagacgacaacccctctagctctaccaccatcccacagagagagcagttggctgatggcttcaccacaagggccacaccctgcaacacggtgaccagcgtccagtagctcagcctcacctcggtaatgagcacctcccctgaattaaggggattgtttccaactccaaaccttgttaagagaaagaaatgcatgagccagtttgaccaactctcacaagctatgccaggccaaatctttagggcagagaaaatgttagaaagagaaatccatggaggaagagcatggcggaacgaggttctggttcaaatccccaggtcagtgggaggttcctcttcaccttgttcctccagctgctcctcccagtctccaggaaaagctcacatgtcacccccacagggaagaggagtggctttctgtggcctgaacctgcacacagcaggggatttgtgagggtttaacacaggaatcactgtaggacagccacaggggtcatgccagggagacccaaaggataccatgcctcagtgctttgaactccgcatgggacatgctcaccaaaaaatacggatctcagcacatccaaaaatattaaaacacttttctttttgtttttcccaccccgccccccataagatgttgggcttgaatggctcatgat

SEQ ID NO: 49704 - DNA, 696 bp, Homo sapiens
tttcttagtatatctatcaacaagtggatagaacaaagaactcaattaatttaataaatactgtttacaggtcttgtaaagggtttggtagagattaaactaatgtcttctccctttatctctcatgggatttgtaggtaacagacctatttagtyattaagtagaaatgctttattcagagttagaattatacagagtgaagcaggagaggttctaaatactccatggcattaagaatttctttttgcagaggaaaaatttgaaaggaaaaccatagtcattataaactggcataaaatgtactttaaactatgtaaaagaaaactttaaaatttctgtacgctgatccatccattcactgaccaacaaatatggagtttaattgctcttaaaggattcaaatctttcaaagtatctgtaacatttttacagcagttaagttttcaatgggcttgtattccaaatacagatggtctttaattaaaatcaagccagtctggttacagctgcaaactcttcagttcaatgaaattttctgcttatattttcctcatttaacacatacagcccacaaacacatgcagatattttatcacataaaagagaacaatggacactttagttttctctgttacaaagattatagataaatacattactacccaagatggccacaatgttcccctcagcatgac

SEQ ID NO: 49705 - DNA, 696 bp, Homo sapiens
tttcttagtatatctatcaacaagtggatagaacaaagaactcaattaatttaataaatactgtttacaggtcttgtaaagggtttggtagagattaaactaatgtcttctccctttatctctcatgggatttgtaggtaacagacctatttagtcattaagtagaaatgctttattcagagttagaattatacagagtgaagcaggagaggttctaaatactccatggcattaagaatttctttttgcagargaaaaatttgaaaggaaaaccatagtcattataaactggcataaaatgtactttaaactatgtaaaagaaaactttaaaatttctgtacgctgatccatccattcactgaccaacaaatatggagtttaattgctcttaaaggattcaaatctttcaaagtatctgtaacatttttacagcagttaagttttcaatgggcttgtattccaaatacagatggtctttaattaaaatcaagccagtctggttacagctgcaaactcttcagttcaatgaaattttctgcttatattttcctcatttaacacatacagcccacaaacacatgcagatattttatcacataaaagagaacaatggacactttagttttctctgttacaaagattatagataaatacattactacccaagatggccacaatgttcccctcagcatgac

SEQ ID NO: 49706 - DNA, 696 bp, Homo sapiens
tttcttagtatatctatcaacaagtggatagaacaaagaactcaattaatttaataaatactgtttacaggtcttgtaaagggtttggtagagattaaactaatgtcttctccctttatctctcatgggatttgtaggtaacagacctatttagtcattaagtagaaatgctttattcagagttagaattatacagagtgaagcaggagaggttctaaatactccatggcattaagaatttctttttgcagaggaaaaatttgaaaggaaaaccatagtcattatamactggcataaaatgtactttaaactatgtaaaagaaaactttaaaatttctgtacgctgatccatccattcactgaccaacaaatatggagtttaattgctcttaaaggattcaaatctttcaaagtatctgtaacatttttacagcagttaagttttcaatgggcttgtattccaaatacagatggtctttaattaaaatcaagccagtctggttacagctgcaaactcttcagttcaatgaaattttctgcttatattttcctcatttaacacatacagcccacaaacacatgcagatattttatcacataaaagagaacaatggacactttagttttctctgttacaaagattatagataaatacattactacccaagatggccacaatgttcccctcagcatgac

SEQ ID NO: 49707 - DNA, 696 bp, Homo sapiens
tttcttagtatatctatcaacaagtggatagaacaaagaactcaattaatttaataaatactgtttacaggtcttgtaaagggtttggtagagattaaactaatgtcttctccctttatctctcatgggatttgtaggtaacagacctatttagtcattaagtagaaatgctttattcagagttagaattatacagagtgaagcaggagaggttctaaatactccatggcattaagaatttctttttgcagaggaaaaatttgaaaggaaaaccatagtcattataaactggcataaaatgtactttaaactatgtaaaagaaaactttaaaatttctgtaygctgatccatccattcactgaccaacaaatatggagtttaattgctcttaaaggattcaaatctttcaaagtatctgtaacatttttacagcagttaagttttcaatgggcttgtattccaaatacagatggtctttaattaaaatcaagccagtctggttacagctgcaaactcttcagttcaatgaaattttctgcttatattttcctcatttaacacatacagcccacaaacacatgcagatattttatcacataaaagagaacaatggacactttagttttctctgttacaaagattatagataaatacattactacccaagatggccacaatgttcccctcagcatgac

SEQ ID NO: 49708 - DNA, 648 bp, Homo sapiens
cagtaaaccaaattatactagcgctatgttatttatacaaagaaaactatagcaagtaaagagacaattgcctaggaaattaagagtgcagggatgagtgacattcacaatatcttttcagagttattagaatgcttgttatcaattcctcttaaattttactcttattgttgttattaacaaccttattctttcacactaaaatgttagtacaggcctgctagaatgtaacttttgtattttaagaatttacagagtttgaggttcagaaagggattttcagactagtttaaatacatactgaagcagatttctatttggtcagatcggttggaaacagtagaaaaacaaatatatcttcggttcaaagactaacgtagctgtcttcctataaaaatgtaatcaagtctcggcayggtggctcatacctgtaatcccagcactttgggaggctgagcagggcggatcacgaggtcaagagatagagaccatcctagtgtgtccggaattggtgggtccttggtctcactgacttcaagaatgaagccgcggacccttgcggtgagtgttacagttcttaaaaggctgtgtgtccagagtttcttccttctgatattcagatgtgttcggagtttcttccttctggtg

SEQ ID NO: 49709 - DNA, 548 bp, Homo sapiens
gccatgcatacataaaccaaaatggacccttatgctcttataataaggtaaacattctgacatcacattttcagcaaatgctccctcttttctgcaactcagtcatgcacatcataaagtcattttggtcaatgatggaccacatattaaatgaagccccataagattataattgagctgaaaattttctattacctagtagctgtggtaatatggcagtgcaaaacattaccttttctatatttagatatgtttagatacacagataccattatgttatattcgcctacaacattcagtataggaacatgctgtacaagtttgtaacctaggatccataggtcatacaagacagcctacgtgtgtagtaggctataacacctatgtttgtgtaagtacgttctgtggtgttagcacaataatgcatttttcagaatgtatcctgtcgttaagtgatagttttaagtgatttctgaaccaaagggactcctagacacccttctagaagataaacaatcctgaagtctcactagaaaaaaamctgctaa

SEQ ID NO: 49710 - DNA, 546 bp, Homo sapiens
taactactgggctcattacactcttaaataccaaaagtaaaatcaaatgtcttttcttatggccgtgatagagtaatttgtaccccattatctttccattataaacaactataaaacaggacaaaatacacaaagcaatacttttcagacattggaaaagaggcagtgcagaaacatcattcctgagggaagagaaacacatgaggtattcctcatggttaccccagttgtctgccttgaaacatttttcaggcaacaatataatgaaatggagcctaagcaaagcatggtaacattaatgagctgaagaagcaatattctgaccccagacctacagaagtggctggaatttgctgtgtagggtcttgaaaaggaggttgctgcacaaagaaggagttctatgaatttgcagatggtcctagttaggtatttttacaaacactacactacacatatagaagatgaagtttaatgaattrtaggaaaaaaaaaaagttactgggaaactaagcactgaacagagatctcagaggccacaaagtacaa

SEQ ID NO: 49711 - DNA, 631 bp, Homo sapiens
ttgaagccctaatctcttatgtgaacgtatttggaggtggggactttgggaagtaattaggtcctaagagtgaagccttcatgatgaaattaagaagagacaccagagagatgatctctctctccatcatgtgaggataaagcaaaactaaggccatctgcaagccaggaagagagccttcaccaggactaagtggagtctgccttgacctkggacttccagcattcagaactgtaagaaataaatatctgttgtttaagacaccccatttatggtattttgctatagcagcctgagcagaataagtcacctagcctcactctgcaacggaaaaataatgactcatgaagattgtcactccaaaccctttgcaaaggaagatacaaatgcccaaggctgctcattacataattgctcagaaacactgtttctcaggtgtacacgatgctgcacacgtccactgagacacctagtggtaggcagttctgtctatctgaagataaaaagcaaaacactatgctcagtgttttgcattttaactcataaaatataaaattggttctctccccaaatgctcaaagacttttgtttattctaactcctctttaaatcatgccaatgaggaatacaa

SEQ ID NO: 49712 - DNA, 629 bp, Homo sapiens
ccacctcagggaccagaatcctcattgtgatttgctacaggcttctttgtctctggagagcttcaagagcaagctagactgaccatggaaataagtgacagttcattggtcaggggcctcaaagtgttacctggatgaatgagagggtctagacttaggcccagagagagctggggatttcataggctagaaagaccccagaacatagtacaattcagttgcctaactccagtgtacaccatttacatcatatgactagtgaatggtacccctgggcctggggagaacatgttgtttctccttaagattctggtacatccaccttcaaagatcccaggccaggggactgagaagagtgcaaccctgagtcagccagggtgtttgactcagtggtactcaggggacagagagagaagatgagcytccatgccagatgcatgtgggtttgagtcacaactttggcactcacaagccacctggctttggatcaatcacttaatctctctataccctggttttccatgtgtacagtgaagtcagtcatacagctgccattgagaaatggaatcaatgtcataataatactcaaacaatacataataagcagtcaatacatggtggctattgtg

SEQ ID NO: 49713 - DNA, 533 bp, Homo sapiens
aatgctaccttttctggcaaaacaggaaaataaacctattcttaaatcctagagaagatgtttctcttttgcaggaaaaggttctgagctgagactgtttcatggttaaagtaaaaacagtgcttgaaactcacgcccaatgaggaaatctgggacgaaggaagtcaggggctgggkgaagcagagagccactatcaagggacagaggtaacaggggagtctgaatgacatcacactcgataaccctccctccacgactttccttgcgatgtccctctttttctccaatccaaatcccacatctcctccaagaaacgctgccatgacgatgaaaaccaccatgacgctgtgaggtggagtccaccaacgtcctctgcccgaccaaaagcatggaattcctcggagcccactcgagtaagctttgacttcctccctgccagtcatgctggacacagggctcgacaaacacaagagacgatcctcggaccatcctaactcaacgactggagactgaggtggccgctgccagaggc

SEQ ID NO: 49714 - DNA, 533 bp, Homo sapiens
aatgctaccttttctggcaaaacaggaaaataaacctattcttaaatcctagagaagatgtttctcttttgcaggaaaaggttctgagctgagactgtttcatggttaaagtaaaaacagtgcttgaaactcacgcccaatgaggaaatctgggacgaaggaagtcaggggctgggtgaagcagagagccactatcaagggacagaggtaacaggggagtctgaatgacatcacactcgataaccctccctccacgactttccttgcgatgtccctctttttctccaatccaaatcccacatctcctccaagaaacgctgccatgacgatgaaaaccaccatgacgctgtgaggtggagtccaccaacgtcctctgcccgaccaaaagcatggaattcctcggagcccactcgagtaagctttgacttcctccctgccagtcatgctggacacagggctcgacaaacmcaagagacgatcctcggaccatcctaactcaacgactggagactgaggtggccgctgccagaggc

SEQ ID NO: 49715 - DNA, 643 bp, Homo sapiens
aaaatgtccccgtccctccagttcattttgttgcctcccttaatccggccttggttgtatcttctttggcaggctgtggctttcccaaggctgggtccatcccgacaagtaaactcctgttgaaccctcaggcaggctggcgcaggatgctgatgagggcttgttgcaggggaggcctggttctgttcctttgtacacaccggtgctgtgcatagactggattgtgcagggatttggcacgcatgcttgtgcccaccaccccagagtatttaggagaaatgaaggacttgcaagctagagatttggtcgatcagatgcttcttaactggagatggcctagcaatgtctctcttttctttcagtcccttctctaggtaacttcttgcccttgtttgtcaatggctctttctagaaaattatttccaggccacagcaagagcaggttcttttctcctttatttttacctttgtttctttatctttacagtttataatctagaaaaggtacgtgttttacrggctaggcgtggtggcttatgcccataatcccagcactttgggaggttgaggtgggcggatcacctgaggtcaggagttcaagaccagcctggccaacatggtgaaaccccgtctctactaaaaa

SEQ ID NO: 49716 - DNA, 949 bp, Homo sapiens
cagatttatatcttgtatttttatatctacagaactttaacggttttatgcaccattatgatagtaaaaaattctatatgtatctgtatatttatatttaatagggagctttatatatggttttatgatgctgtctagcatcattttatttttcaacaaaatggattcattttagcatttctatttgtttatatgcagagtctgtgtttctcagactggatcttggactcctggtctcaagagatctgactgccttggcttcctaaagctgtagaattacaggcatgagccactatgtctggccaccatgtaacatttcttgttacatttcgtgcaacatttcttgttacgtttcctgcaacatttcttgttacatttcgtgcaacatttcttgttacatttcgtgtaacatttcttgttacatttcgtgtaacatttcttatagtgaacaccctgaaatttaatttaggaaagtctgtatttttattttgtttttcaagtaaaataactttgaattaaatattattggttagaattttttattacatcaaaatttgggaagttctcagctttcgttttctttaatttacctctgtattactttttccctacattattcttctcttttttttttttgagacagagtctctctctgtcacccaggctggagtgcggtggctcgatctcagcctcagcctccygagtagctgggaccacaggcgcccaccaccacacctggctaattttttgtattttttcagtagaggcagggtttcaccgtcttagccaggacggtctcgatctcctgactgtgtgatccgcctgcctcggcctcccaaagtgctgggattacaggcatgagccactgtgcccagcccccctatattcttctaagatttatttcatgaatatattgatggacttgatggtgtccaataagttttacatt

SEQ ID NO: 49717 - DNA, 581 bp, Homo sapiens
tgtaaaaattatactaaaataataaagaaaagacacatttctaaataactcaagcaccaaggaatagagtataatgggaagtagaaaatacataaaaacttcaaaaaatgaaaggataacaaaaatagcatcagctcaattctatacttgcaaatattttctgttgattgtatagaattcattgtttccaagactttatgttatttatttagacatttctttatttaattgtatattaaaagtaagcatccaatctttcccaaactcttggccaactttctaaggaatatttattgaaaaattcatcttcctctcggaagttttttttttttttttatcacatagtgacttcttttatacatttaagtttgtttcagaagtatagttattttcctttggtttgttayatcacaattttttaaattttaatttgtataacatttaaataaattctgggtaaattcccttgttatttctcttttctaagaagaaaacggttattcctatcaccagtgcccaattgttgacatctttccaaattttacttttctcctctatgaatattttagttatttaaacac

SEQ ID NO: 49718 - DNA, 1522 bp, Homo sapiens
aatgaagacaaataatgggatgagttgttaatatctcagtgctttattcacctaaagtagtttgttttgaatttgtgtatttttttttttttttgagrtggagtcactctgtcgcccgggctggaatgcagtggcgtgatctcagctcactgcaagctccgtctcccgggttcatgccattctgctgcctcagcctcccgagtagctgggactacaggtacccgccaccacacccagctaattttttgtatttttagtagaaacggggtttcaccgtgttagccaggatagtctcgatctcctgacctcatgatctgcccgccttggcctcccattgaatttgtatattcttaaatctttagtctatggttaagaactctggttcaaggatattggtttggcaagtgtgagggggactggggggaagattggagaagtatgttaaggttctgttatttctggggtaaaaaataagaagatgccaggaaaaggaaactgaagttagaggcagtgccttttgtttagaaggtcaatgttgtggtgcattttaaaaccatctcatttaaaaagtacagagagtacaccagtacccactagcttggtggctgtggctgctttagcatcttgtccaacagccacgatgaccaagctatgtatcttccttttatttcctctcaagagggagttgacctccaacttgcacgttagtcttcgaaatttagttcaatgaagcccaaggattttaaagacatctcatacacaaaatgacacacgtcaagggtacgggtatgttgttttccagtgtttctaagtagatgtgaaagaaaacctcatttaaactctactcagaaatcaacaaaagccttaaaataagaataatgaagcaggatgagtaatgttcagggtctatactgagacaaggatgatgagggcattggttcttcagtcagaacagcaactgtctatgcaatgtctgaggtctgactgtgcgaccttgggcccagccatgaaatactgtcacccaaacccaacccctcctcattaacagtaacaacacacagcgatttagtgctttatggtttcagagctcttttgcatgtattatctcatctctggtccaattttaggatggtgttagccttacctcatgccccagcatttcatcatgtctttgggaacattgcagcttagctgataggtctgatttttctcctcatgctttgggcaacctctggaaggggtaaaggtgatgtttcggcttgctgtttaaacaaataacaaagttggactgaaatggaaagtttctagggagatcaaagaatatgacataagggatgaaattaagcagggtttatgcagtggtggcttctctcactagggctctatgtcagacaaaccggtcccactcattttcccacttgaccctcctgggaagcccctggaggtaggagcatttattattattcctagtgtacagatgaggaaacaaacacttggccgtttacatagtttatagaagtca

SEQ ID NO: 49719 - DNA, 1522 bp, Homo sapiens
aatgaagacaaataatgggatgagttgttaatatctcagtgctttattcacctaaagtagtttgttttgaatttgtgtatttttttttttttttgaggtggagtcactctgtcgccygggctggaatgcagtggcgtgatctcagctcactgcaagctccgtctcccgggttcatgccattctgctgcctcagcctcccgagtagctgggactacaggtacccgccaccacacccagctaattttttgtatttttagtagaaacggggtttcaccgtgttagccaggatagtctcgatctcctgacctcatgatctgcccgccttggcctcccattgaatttgtatattcttaaatctttagtctatggttaagaactctggttcaaggatattggtttggcaagtgtgagggggactggggggaagattggagaagtatgttaaggttctgttatttctggggtaaaaaataagaagatgccaggaaaaggaaactgaagttagaggcagtgccttttgtttagaaggtcaatgttgtggtgcattttaaaaccatctcatttaaaaagtacagagagtacaccagtacccactagcttggtggctgtggctgctttagcatcttgtccaacagccacgatgaccaagctatgtatcttccttttatttcctctcaagagggagttgacctccaacttgcacgttagtcttcgaaatttagttcaatgaagcccaaggattttaaagacatctcatacacaaaatgacacacgtcaagggtacgggtatgttgttttccagtgtttctaagtagatgtgaaagaaaacctcatttaaactctactcagaaatcaacaaaagccttaaaataagaataatgaagcaggatgagtaatgttcagggtctatactgagacaaggatgatgagggcattggttcttcagtcagaacagcaactgtctatgcaatgtctgaggtctgactgtgcgaccttgggcccagccatgaaatactgtcacccaaacccaacccctcctcattaacagtaacaacacacagcgatttagtgctttatggtttcagagctcttttgcatgtattatctcatctctggtccaattttaggatggtgttagccttacctcatgccccagcatttcatcatgtctttgggaacattgcagcttagctgataggtctgatttttctcctcatgctttgggcaacctctggaaggggtaaaggtgatgtttcggcttgctgtttaaacaaataacaaagttggactgaaatggaaagtttctagggagatcaaagaatatgacataagggatgaaattaagcagggtttatgcagtggtggcttctctcactagggctctatgtcagacaaaccggtcccactcattttcccacttgaccctcctgggaagcccctggaggtaggagcatttattattattcctagtgtacagatgaggaaacaaacacttggccgtttacatagtttatagaagtca

SEQ ID NO: 49720 - DNA, 1522 bp, Homo sapiens
aatgaagacaaataatgggatgagttgttaatatctcagtgctttattcacctaaagtagtttgttttgaatttgtgtatttttttttttttttgaggtggagtcactctgtcgcccgggctggaatgcagtggcgtgatctcagctcactgcaagctccgtctcccgggttcatgccattctgctgcctcagcctcccgagtagctgggactacaggtacccgccaccacacccagctaattttttgtatttttagtagaaacggggtttcaccgtgttagccaggatagtctcgatctcctgacctcatgatctgcccgccttggcctcccattgaatttgtatattcttaaatctttagtctatggttaagaactctggttcaaggatattggtttggcaagtgtgagggggactggggggaagattggagaagtatgttaaggttctgttatttctggggtaaaaaataagaagatgccaggaaaaggaaactgaagttagaggcagtgccttttgtttagaaggtcaatgttgtggtgcattttaaaaccatctcatttaaaaagtacagagagtacaccagtacccactagcttggtggctgtggctgctttagcatcttgtccaacagccacgatgaccaagctatgtatcttccttttatttcctctcaagagggagttgacctccaacttgcacgttagtcttcgaaatttagttcaatgaagcccaaggattttaaagacatctcatacacaaaatgacacacgtcaagggtacgggtatgttgttttccagtgtttctaagtagatgtgaaagaaaacctcatttaaactctactcagaaatcaacaaaagccttaaaataagaataatgaagcaggatgagtaatgttcagggtctatactgagacaaggatgatgagggcattggttcttcagtcagaacagcaactgtctatgcaatgtctgaggtctgactgtgcgaccttgggcccagccatgaaatactgtcacccaaacccaacccctcctcattaacagtaacaacacacagcgatttagtgctttatggtttcagagctcttttgcatgtattatctcatctctggtccaattttaggatggtgttagccttacctcatgccccagcatttcatcatgtctttgggaacattgcagcttagctgataggtctgatttttctcctcatgctttgggcaacctctggaaggggtaaaggtgatgtttcggcttgctgtttaaacaaataacaaagttggactgaaatggaaagtttctagggagatcaaagaatatgacataagggatgaaattaagcagggtttatgcagtggtggcttctctcactagggctctatgtcagacaaaccggtcccactcattttcccacttgaccctcctgggaagcccctggaggtaggagcatttattattattcctagtgtacagrtgaggaaacaaacacttggccgtttacatagtttatagaagtca

SEQ ID NO: 49721 - DNA, 489 bp, Homo sapiens
tagcttatatcctggatgtttccttttctaacaaagtattattagaattttattaaaaatagcttttgtgtgtgtgtgtgggttttttgttgttgttgttttgttttgtttgttttgttttttgagacggtctgcctctcttaaccaggctgaagtgcagtagtgagattttggctcattgcagactcaaccttcccaggttcaawcagtggccccttctcagctcccccaacccaccccagtagctgggctcacaggtgtgcactatgcccagctaattttttaaatttttgaattaatattttaactttttaatttgtaaatttttaaatttaaatttttttattttaaaataattttttaaattttttttaaattttttttatgggggtttcaaaaaaaaacacaaagctcactgcagcctcaatctcctgggttcaagccatcctcctatctcagcctcccgagtagctcggactacaggtgcac

SEQ ID NO: 49722 - DNA, 510 bp, Homo sapiens
aatgctacagaacagatagttgcgagtaatcaggttttagagcaggtaggtttacctaccctggttctgctttacccatgatttcagacactggagtgaaaagcacwtaggggcagatatgccattgagacgatcttgggtaattaatttctgtgaacctgttcctcataagcattttttaaagaaatatatgggataatacaaaataatttttaataataagtgacacttattgagcactttccatgtgtcaggcagaaatacaggactccatgtttgttttctgcaatagaaacctacctgaacaagtgcataaaagattttcagaatttgtttctgcagtaatacagaataataggaggaatcaggaaggagctgaacaatttgttgctgaatacgaggcaggaatatctgcattgctattataagaggttctctctcttctgctttcttatatctacatgagcaaagacaaaaacagaaaagtaatttttcccacccaaagaacca

SEQ ID NO: 49723 - DNA, 620 bp, Homo sapiens
atctcggctcactgcaacttccgcctcctgggttcaagcgattctcctgcctcagcctcccgagtagcagtgattacaggcatgcaccaccacacctggctaattttgtgtttttagtcgagacagagtttctccatgttggtcaggctggtctcaaactcccgacctcaggtgatccrcccgcctcagtttcccaaagtgctgggattacaggcgtgagccaccgtgcccggcccccacttttttcttttcattaaaaaatgcaactctaaaatattttgtttttctaaatgggatccattcaatctaaaaattagtgttctttccagttatcaaacattcactgtgtgccaggcattgggtaatagctttcatactcattatttcatttatttacaaacaccctatgaaggagacaccaacacttgaggaaaccgagagaggtttagccatttgcccaagataacacatccactgtggggctcttttgaccatttcatcaatatccatccaacttgtatcactagagtccatgagcttggccatcctttgttttctgaaaacacaaagtagagtggtatttgcactctgttaagcccacacttcactaaagacggcag

SEQ ID NO: 49724 - DNA, 592 bp, Homo sapiens
taacggtagacttacaattacagtagaatcaaaatatatctttgtcagccaagtatttgacaagatcttggtatatccttgtgtatattaaagaaagccaggctggatgagaacatagctggagactgaaaacygacattccaagattgttgattagttaaatgaaattctgaatttttgcaccactgaattctttcattggccatgaatgtaatactttatcaaagttttggatgagaacattgagggcagggttattcccggttattccagatgacccagagcactgaggattactttcacgacagaagaaccaagaatacaaaaccacctcaacagattataaccaagtagtgacatttacccaggatattagtaaagttccccacattgattcaaaaaataaattgtgtagataaacattgcatttgaacaatacaaatgttctaagatatttatactttttgtcatctttttctgccacaaatgagctgtataatctggccagaaatacctaggtaaatacggtgtttctctattttactttgaatgtaagactcaacttcagtatctaagtgttagtgagtatatt

SEQ ID NO: 49725 - DNA, 592 bp, Homo sapiens
taacggtagacttacaattacagtagaatcaaaatatatctttgtcagccaagtatttgacaagatcttggtatatccttgtgtatattaaagaaagccaggctggatgagaacatagctggagactgaaaaccgacattccaagattgttgattagttaaatgaaattctgaatttttgcaccactgaattctttcattggccatgaatgtaatactttatcaaagttttggatgagaacattgagggcagggttattcccggtyattccagatgacccagagcactgaggattactttcacgacagaagaaccaagaatacaaaaccacctcaacagattataaccaagtagtgacatttacccaggatattagtaaagttccccacattgattcaaaaaataaattgtgtagataaacattgcatttgaacaatacaaatgttctaagatatttatactttttgtcatctttttctgccacaaatgagctgtataatctggccagaaatacctaggtaaatacggtgtttctctattttactttgaatgtaagactcaacttcagtatctaagtgttagtgagtatatt

SEQ ID NO: 49726 - DNA, 1640 bp, Homo sapiens
cttagaaaatataaataaagttgcatagggattattctaaattttaagtgtgatagcggccaagagaaaacaaataatttcttccaaggacacccagaaaataaatgatgaaattctaggtcccagatctttaactcctaacacaagtttcttttcattttaccaaactacacattattctgatgggcaaagacacattaatgatcttgatgtgaataataatctaactaagcagatgattgcttttgcctttaggtagattgataaacttcaaagcaattagcacctataattgctaaactgagagctaagtggcactggtgacctgccaaaagaaaacagttggcataagctttgtgagttacgcttcatcagtaagcttcattttaatccagtaaggtccaccctgcctgtccctgaattgccctctcgaggcaagtaacaagtgtcacatttcttttgaaatggctggcactgctatggtatcagttatcacacaatattccaaaaagcaattgtgatctcgagctgtaaggcactggcatccacttggaaaaaatgaagtttaatgttaagcatctggcagtttccatcattgctggaagtaacaaaaagatccagaagtcacctgagctgtctctgagtactgtgaaaatgtcactcgatatttaaactgcatgagaagtcacaaaacctcaggtttcacaaaagcagagcctcaactatcaaagctgtcaggtcttcagagattgtctagtttaataatcttattttataataaagaaatttgtcaccatttgtgtgagcagaggaagaaggactcggagcgagcatcttcattagttattttgtagggaactatagaagtaaacagatacttgataaactgcaaccgcactagaggcaccatgcatttgctaaatgcatgtttatgtttttccataaaaatccaaactatttaggctttacttcatatataagtatcccagcctttaaaaatgttggaaagcaatagaggtaatattaataaaatgcagcatccctggctttcctttattattttagccacawcctggtcagatacaattgttcgctggctcctctgattcatccttcacactgtcatcactgacaataaccttccaaaacaatttttcttccaaaaacagtcccagcaaggcaacctgtgtttttctcataacgttttctcccctgtcttcatcctgacaatcaattttccccagttgctctacagcgcgatcaccagttttgtttttggtttggatagtgacaagagtgcaaaagcttttggagaaattaatgaactctcttttggacctgtttcaataggagaacaataataattttagagaacaaaatgctataattgtcaaagttatgccatggaagcttctctatgccatgcgtatcctcagttcctaagccttctctgtccagccatacctaatcatacctgcatgcaccttgttcccacagtgatcctccattcatagctccagttgggtggaaaatgatggggagcatcatagctagcccagggagtcagtctttcagaacgaaggagaagaaattgctgctgatgtcagttcctaagaaggacctaaagctatttggtgtgg

SEQ ID NO: 49727 - DNA, 639 bp, Homo sapiens
catccccgtgcttcccagccagcgtctgcagttcctcatacttgatctggtacatgctctcagcctcagcctggctgtggttggccatctcctcatactgcgccttgacctcagcgatgatgctgtccatgtccagggagtggctgttgttcatgcacagcaccacagatgtgtccaasatctgggactgcagcttctggatctcctcttcatacagctgcccgaggaggttgatctcttcagtcagcccttccaggcaagactctagctctaccttgttcatataagcttcatccacatactgcctgatgaggacaaattcattctccatctctgtacgtttgttgatctcatcctcatatttgttcttgaagtcttccaccagccctggcatgttgccaagctctgcctccagcttcagcctttccaagcccagagtctccagctgctgcttaaggctgttgatgtagctctcgaacatgttgtccgtgttgctctaagccatcttctgctgctgcaggagggctccacttggtctccagcatcttgttctgctgctccaggaattgtaccttgtctatggaggaggcaaatttgttgttgagggtccttctcctgggtgcacacggcctggatgtt

SEQ ID NO: 49728 - DNA, 1075 bp, Homo sapiens
taaaatttatttatagtcagactaattcttcacaattctgtactgatttcataattatagtttcagaacatgttttagaatctgggagatctaatctttctaaagaacttttttcattgttcttagctatttttcactttttcatgtagttgaatttcaaaatcatcttgtcacaattaaaaatgaaagcttcaacgatattttgactggaattaggttagatttgtgcattaattgttgctcctcactggaatatggaatatctccacatttacttatttcatattgtgtgtgcatgagtaatttttggttgcttttttaacagatcatacatgaatttatgaaagtatcaattataagatattactttttatttattttctaatgtatttttgttcatatatagaaaatgtattagtttgttgcattttttacatacgtagttacagaacacttactagttytaacaattttatcagtagattgttttggctcttttgttcgtttttgtattttatatagtattacttcctagtttacactagactagctcttttcctttttatccctgggcacatggatcaatgcttcctcttcttcctgcttcaatgatatggtgcatttttagcttgcagttgcagtgctttcttttacatgggccccaagaatgacagtatgcatcgcaacaaagcaatcccacaaatatatattatttatagtgtattgattaacaatatctgtgcttataaaaatcaattaaacaagattacatactatagcagtttccaaacagtgccctaaaactataaactataattagtggtatacagttcatgtgacaaaatgtacaaacagcctgtagccctggtgaaagactctattgcctctaacagatcagttagttattgcttacagttaaaaaactgaataactgtgtctccttttgagagtaaacccaggtccaggtatgctggaaagcctctgctatctagaaggatccagccaatatcgtcctaattgaatttacatgagtagaggtagatgctctaagaccatgaatttacatgagtagagg

SEQ ID NO: 49729 - DNA, 556 bp, Homo sapiens
tgtttttcctataggtggatgttggagatttgacttcaaaccctgggttcacttgggctgtgtaggtctttgaggtgttagtccctggactagctgaaatttaactggaccctagggatgaagtcctcatttaaagagtggtcaccagttgcttcgaacttgcttcatcgcccaggagggctccttctcccctcccagacataacttccttgattaagaagccacacatctgccttggaacactaaagcggtcaccttccaaggccttggtcttagggtgcaggactactggaagaaacatttagaaatagaaaatcaggctgggcacgatggctcacacttgtaattccagaagtttgggaggctgaggtgggtggatcacctgaggtcaggagtttgagaccagcctggccatcatggaraaaccccatctctactaaaaatacaacaattaggctgggcgtggtggctcacgcctgtaatcccagcactttgggaggccgaggcaggtggatcatgaggtcaggagttcaagaccagcctggtcaatatggtg

SEQ ID NO: 49730 - DNA, 1521 bp, Homo sapiens
ctacgacagttgcaggtatcttgaaattctgtttatgttcatcactactttaaagttgtgatagttattagctatggcttctaaatgacatgtgactacagtctccctgtctacagacacacgtctatcatagctgggtagtaatccaggcaactctgccacaagtcatgggctcagccaccagtccacgaagtctccagtcacacatattgcttcggactattctctatccccagttgtcaattaactaaaatattaaatgaggtaagttattttcattgtttgataatgttttgcaaaactgaacaggccaaatgagaatttatagccctggctaaggtggtgcagtctgttcttcctggaattcccagaggttgctcaggtttaggattcaggtgcgattgagggaggaagcaccatgagtcagggcacagaaacttgatcaagtggtataagccctggtaacatttttcatttggaagtttcagtgttctgccctaatagatggggccatgtaatgaaaagacagaagctttacaaaattagtattttgggagataggtgatacaggcacattgcacaaaattgaaaaattcagaaggaattcagtgaaaatatttatattactcctgtccctcagccacccaattttcttccccagagacaacaactgctactagtttttttggtataattatcgatcgaatgaatatgtatgcaatcaacatccaccataaacacatgccaagcccctactataacaagagtcccttattttgggggtatcatgaaaataaagcatgacattataaaattcaaattggtatggaaagatatcagttacaaaagaaaatctttcttgatccttctccttttaaaaaacttttttgggatcgtttattttttagtgcttctggtgcctagctccatactttaaataaagtgcttatatctctatttctggacttatcaacttcagataggactctccagtatgatatgttttatctaaagcaacctatattaactaatgtaagtgaactcctctctttccatttttcagttagttattctttttaattcctcttttggttatcttcacaactttaaaaactatttcttttgtagtgtcaacatcaataacattcgttttttgctctataaatatgattattctatgcattgtccatatgttcattctaaatattaacaataattcaaagcttctaagtttttatgaaatattataacttaayacaaatatttgttatttccaaaatgattattgtgattggacctttagagaaggaaatataatcaaaactgctgccatgcaaagcaatgttagtaataacaccaattcttatggaatactatcaatcccactttaaagatgaggatgtagagatccgaggggttcagaaccttgtcccaaggtctcaccgtatttggtagagcaaagtagacacggtttgaaaccaggcagtctgattctagtccatgatactcactattacactg

SEQ ID NO: 49731 - DNA, 2495 bp, Homo sapiens
gtaattttgtttcacttgaaaacctggcaaatatctccttaatcaagtcacctgttaacttcagaaggtaatgggcaaatcaaaattgtagaccacacaatgggatgcaatgagaagagtataacaacacttctgggatgttctttcaaaaatgtattatctgaatggtaatcatgagaaaacatgaggaatattattcaaagctacttgcctgtcatcttcaaaagtgtcagtatcatgaaagtcaaagaaagattgaagaattcttccaaatcaaaggagtcgaaataaatacaacagttcagtgtagcttttgatcccgggttggatctttttcaataaatgacattaatgtgataactggcaaaatttttacacagtctatagattacataccagtaatgaaccattgtcagcttcttcatttagatggttatattacagttatataggagaatattcttggttatagaaaaaataaactgaagtaattgggcatgatgggatatcatgtcaataaggtacttctcaatggatcaggactaacaaaggtctttatcctagcctcccaacctttctgggagtttgaaaacattttaaatacaaataaatagtggtcaaatggtccccaaagtttaacaagatatgcctgccagtttggcaataattaaaaagtttaataataccaagtactaatgatgctatagagcaatacaaagtctcatatgttgtcttcggatatgtacattggttaaatcatgttagaaaataagttggaattggccaggcatggtggctcacacctgtaatcccagcactttgggaggccgatgtgggcggatcatgaggtcaggcaatcgagaccatcgtggctaacacggtgaaaccccgtctctaataaaaccacaaaacagccgggcgtggtggtgggcacctgtagtcccagctacttgggaggctgaggcaggagaaacgcgtgaacccagaagacggagcttgcagtgagccgagatcgcaccactgcactccagcccaggcaacagagtaagactccgtctcaaaaaaaaaaaaaaaaaaaaaaaaagaacatgagttggaattaatgtggtgaatttgaagatatgcaaacactattgccctgctatggtaggcagaattctagatgtagaattcatgacctagaactcatgacctttggtccttactattactcccatgattatgttaacttacrtggcaaaagggattttacagatgcatttagatttactaatcagtgttcttaggatggggagattttctaggtgggtggtgaaatcacacgtgaccccattagagtaaagttttctccagcaggtggccgaagaagattcagagcacggcgaagatttaaaagagggatgttctttgctgtaaaaatacatacacatcgtgacatggtactgtgactagtctcccgggcctgagagaggctcctaacaaccttaggaacctcagtcctaccaccaccaagaactaaagcaaaatcttccaaaaggcaagctcaattaataccttgattatggctttataatatcctgagtagcaaacccaggtgagtgaatgcaggcttctgaactgtaaaattgtgggataagaaatttgtgttgatttaaacccctaagtttgtgataatttttgacatagaaatagaaaattaatataccaggctccccacctctaagtatataccaaaaagaaatttctgagcatgaaaatcattgtactcgtgtagtatatatgtgtgtgtatatatatttatttatacatacatgaatgacattgttctaatatctaaaaatagaaaaaaacccatagctgtatattcatatattcatataaacccatatattcattcaatgcaatacttctgcactgaaagtaaataaattttatctacaaaaaaaagtgggtaatcttacaatgttaggtgaaaaaagaaagacataaaatatatataatatgaatcaatttgcataaagttaaaaaacacacaaaaccaagctatgtttttaggggtgtttttatagcatccctatgaactaaagcaaggaaatgagatacacaaaaatcagcatagtgattttttaaattgtggcatatacagttctttgtgtttgcagataatgtaacaaacacaaagaaaattataactatggcaaaaatatttcaaggaattgtttttaaagtctagtattaaaggagtatactggaatcttaaaaaatttaaggactttttgatttaaggaattccatacttgggatattaggcaggtcatttggactcagcatatttctctatccccaacagttacatgccagtgatgaaaattctaccattgttgccttttcatttagactttccctctctgtgattctaaaataggaatgcttgcaacaataaaatattaaactaatctttccgtatccagaataacagaatcacttttctgaag

SEQ ID NO: 49732 - DNA, 519 bp, Homo sapiens
ggctctgcmcttaaaaataaaaagccctccccctggtttaagttctgctaccatcatctggaaatttcttaagaccttttaaacaaagggtccacattttctttttgcactggcccttgcaaaccatgtagccagtcctgactgtaagatcagatcttcaaacagtcctaatacagtcgattgtgaagatagtttagcttttaggcttccccagcagtattacaatttccagaggattaaaggaagcacctgaggcagtgagaaggaacacctgctgaatcctgagatctatctacagtacaggagccaggctcattgattctgtcgaaaggcaaagtgtgatgcagccttgaacatgcccatcccagcagtgctagggtgctcagagaagagggtgattggcagtggcagatgcagctgtgcggtcaaggaggagaagcataaagaggctttttaatatgccctcaaagaagtaattggagacctggagaaactgtagaagagaagagtacaagctgg

SEQ ID NO: 49733 - DNA, 646 bp, Homo sapiens
tatccttttctcaaaggaaggataatttcacacacgcagggcacttttacaaataagagtcacttcacttgcagcaccttccttttagcacaagggtcagcaaaytagcaccttgggccaaatccagcccactgcctgtttttgtaagtcaagtattttggaacacagccatgcttattcactttacagtccacagtgtcaattagctgggtgtgatgttgcacacctatggtcccaactagtagagaggctgaggtgggaggatcactagagctcagaaagtcaagactgcagtgagccatgatcacacaactgcactccagcctgggaaacagagtgagaccctgtctcaaaaataaattaatttatatagtccacaaagcctaaaatatttactaactggctctttgcagaaaaagctggccaactcctggtttagcagatgaaagatcctttgatacattttaataaaagttttacccaatatactgaaacgtttatattaaatacagatccccatgtacaatcccttggcaatattcagattgagggtccaatatttcagcactcaggcactgacataaaaatttaataactagcaatcttgttgctaacaaggtacagcatcaatatagcatgtagcttc

SEQ ID NO: 49734 - DNA, 646 bp, Homo sapiens
tatccttttctcaaaggaaggataatttcacacacgcagggcacttttacaaataagagtcacttcacttgcagcaccttccttttagcacaagggtcagcaaactagcaccttgggccaaatccagcccactgcctgtttttgtaagtcaagtattttggaacacagccatgcttattcactttacagtccayagtgtcaattagctgggtgtgatgttgcacacctatggtcccaactagtagagaggctgaggtgggaggatcactagagctcagaaagtcaagactgcagtgagccatgatcacacaactgcactccagcctgggaaacagagtgagaccctgtctcaaaaataaattaatttatatagtccacaaagcctaaaatatttactaactggctctttgcagaaaaagctggccaactcctggtttagcagatgaaagatcctttgatacattttaataaaagttttacccaatatactgaaacgtttatattaaatacagatccccatgtacaatcccttggcaatattcagattgagggtccaatatttcagcactcaggcactgacataaaaatttaataactagcaatcttgttgctaacaaggtacagcatcaatatagcatgtagcttc

SEQ ID NO: 49735 - DNA, 646 bp, Homo sapiens
tatccttttctcaaaggaaggataatttcacacacgcagggcacttttacaaataagagtcacttcacttgcagcaccttccttttagcacaagggtcagcaaactagcaccttgggccaaatccagcccactgcctgtttttgtaagtcaagtattttggaacacagccatgcttattcactttacagtccacagtgtcaattagctgggtgtgatgttgcacacctrtggtcccaactagtagagaggctgaggtgggaggatcactagagctcagaaagtcaagactgcagtgagccatgatcacacaactgcactccagcctgggaaacagagtgagaccctgtctcaaaaataaattaatttatatagtccacaaagcctaaaatatttactaactggctctttgcagaaaaagctggccaactcctggtttagcagatgaaagatcctttgatacattttaataaaagttttacccaatatactgaaacgtttatattaaatacagatccccatgtacaatcccttggcaatattcagattgagggtccaatatttcagcactcaggcactgacataaaaatttaataactagcaatcttgttgctaacaaggtacagcatcaatatagcatgtagcttc

SEQ ID NO: 49736 - DNA, 646 bp, Homo sapiens
tatccttttctcaaaggaaggataatttcacacacgcagggcacttttacaaataagagtcacttcacttgcagcaccttccttttagcacaagggtcagcaaactagcaccttgggccaaatccagcccactgcctgtttttgtaagtcaagtattttggaacacagccatgcttattcactttacagtccacagtgtcaattagctgggtgtgatgttgcacacctatggtcccaactagtagagaggctgaggtgggaggatcactagagctcagaaagtcaagactgcagtgagccatgatcacacaactgcactccagcctgggaaacagagtgagaccctgtctcaaaaataaattaatttatatagtccacaaagcctaaaatatttactaactggctctttgcagaaaaagctggccaactcctggtttagcagatgaaagatcctttgatayattttaataaaagttttacccaatatactgaaacgtttatattaaatacagatccccatgtacaatcccttggcaatattcagattgagggtccaatatttcagcactcaggcactgacataaaaatttaataactagcaatcttgttgctaacaaggtacagcatcaatatagcatgtagcttc

SEQ ID NO: 49737 - DNA, 630 bp, Homo sapiens
aactaacttttggtgttttgcttattatgtggctgatgaaataatctgcagtccaaatctccatgatacactttacctatataataaccctgcacatgtacccctgaaactaaaagaaaagttcactaaaaagaaaagaaaatgccttttccctcacatttgccaatactggttatttttcaaataaattaatgmctggaaaaatggtaactcattgttcgctgattttcatttttctgattaacgggcaaggctgaatatcctagtaaaactataaaatttgttcatcatgaatattagcccaaactagggttagtttgacagcacatagttatctcctgttcaatgttgccataggcttacctgtgatactcttcactttcgttgtcaggaaattgctgattttcaggtgttctgctcttcctttgaggaattaatccatcatcaccattgccagcagtgacaccattactcaggttttctagtaatcccacattattactttcatgcttcttcatttcttcttcaaccttgagtgggatattaaggatagttatcactttattgaataaaaagaacctttttaattgattctatcaattgactcagtttgtcattattttagtcatt

SEQ ID NO: 49738 - DNA, 630 bp, Homo sapiens
aactaacttttggtgttttgcttattatgtggctgatgaaataatctgcagtccaaatctccatgatacactttacctatataataaccctgcacatgtacccctgaaactaaaagaaaagttcactaaaaagaaaagaaaatgccttttccctcacatttgccaatactggttatttttcaaataaattaatgcctggaaaaatggtaactcattgttcgctgattttcatttttctgattaaygggcaaggctgaatatcctagtaaaactataaaatttgttcatcatgaatattagcccaaactagggttagtttgacagcacatagttatctcctgttcaatgttgccataggcttacctgtgatactcttcactttcgttgtcaggaaattgctgattttcaggtgttctgctcttcctttgaggaattaatccatcatcaccattgccagcagtgacaccattactcaggttttctagtaatcccacattattactttcatgcttcttcatttcttcttcaaccttgagtgggatattaaggatagttatcactttattgaataaaaagaacctttttaattgattctatcaattgactcagtttgtcattattttagtcatt

SEQ ID NO: 49739 - DNA, 2365 bp, Homo sapiens
tgcatggaggctcctgcagagcaaggactgacatcggatggatgtaagtgctgggttcagactgtcttgagacccagggaaagaggtttatattaggcccttacaccctgagggagcaggggagctcagctcctccatccctaccatgaatcagtggactaaggacaactctctacaggtccccatttccctacaaccctcagatactctctcaagcctctctgctctccttaacccctcccgcaaggcacagaattacacaactttcagaggctatcagttatacattcagcatggaatctcagaaaccacactggccctggagtcaaacaggtctgagctcgaggctggctttgccactgacctggggcaagttacttaacttgtctgagactttatttactcatctggataacagatattatcattagggatactcatctcattttgttaaggatgagatggaataacatacgtgaagctcttagcttagtgcctggcacgactcagtgagcagtatacatcagctggaagaattaggtttgtgtgcagcgcagagcctggcaagcagtaggaactccataaatgtttacttctcctctttcccatgttcttatctctctctagttccttctcattttaaccttcaccacatccacatattctcttactctcctcaagcacattctgacctaactaaaaaaccaatgaacaggatacaattcgcctttttttcttcatataccaccactctaggggatgaagagatcttggagtaactggccctccttttttttttttttttttaaagacaagagtcttgctctgtctcccaggctggagtgcagtggtgtgatcttggctcactgcaacctccacctcccgggttcgagtgattctcatgtctcagcctcccaagtagctgggactacaggcacatgccaccatttccgcgaatttttgtatttttagtggagacggggttttgccatgttgcccaggctggtcatgaactcctgggctgaaacaatccgcctgccttagcctcccaaagtgctgggattacaggcatgagccagtgcacacagccagccttcctttttaaggataaaagtttggaccaaacaaagaaacaccatcattacctctctactttggtggggatgccagagagtacatctccacaaagagcaaagggtagatgaagggaagttatagaaactgcaggtgtctgcaagctgggaggctgggcaaatggacgtaagaaatacaacactataagccattaactcactcatgcattcatttcttcagaaaatatttattgaacaccaactacattgtaggcctgtgctagttaaatgggagatagtgatgaatgagacaaagtccaggccctcatggaacttacatttttgcagggaacacaggtaatcacagaatgatgtaataagtgctataacagggtagcagagggcacatgggggcccataggaggatccctaatacagagtggggttaggggagatttcccagaggaagtaaaagtctaagctgagaccttaagtgtgaaaaggagttagctggaagaagggtgtggagtgtggagcggtaaggaaaaggagaagattctaggcaggggaactctataggtgaaggctctgtaaagaaagaaggtatgatgtatctggagggcaaaagtattactgtctggcgggaccacagcaggttggggagatgaagctggagaaataggcaggggcctgagatgatggacttgttcctgaatctgtctggaatatcagcacccttggctatcagaatgccctgtgtctgcagagctgcctatgctgtgtagagcagagcaagaactgcaagatctgcaaggtgctgaaaggcccgcgctggtttggctctgtctgtactgcctagattgggttggtatggcacctttggtgaggcctttcctaaccagtacaatgtgcttcagcctgcttactagaaagtgggcaggagaggctcaccctgtgacytgggctccgagaccacaactccagcccagctgctctgcctccaactttgtgcaaatcatttaagctccctagcctgccatttcagcaactgtaaaatgacaagcttctccaggtgagctctagccaaggtgccttccaggtctaatgctatgatctgaagagacgacatccaactgcagggtctggttggtccctgattcctgaagcttgactttgaatatgaatgacagttcaagacctcagtcttattgactagccctgtcctccttttgtgctttgaatattgacttacccgctgcttatctgggtctacaaagcggataccaaaatag

SEQ ID NO: 49740 - DNA, 361 bp, Homo sapiens
catttagatctaaaatctctatcaaattaatttttatatatggtgtgaagtagagttgaggttcatttttccatatttgtttttccagtgttttagcattatttgttgaaaatactctcttttggcccccactgaattgccttggtgcccatcaatagtatttcttagaagacaaattataataaaaaaatctactatgactcacacctgtaatcccagtactttgggaggctgaggcaggaggatcacctgaggccaggagttcatgaccaggctgggcaacaacatggcaagaccctgtctctatttaagaaaaaaaaaaaaaccttactctgagtaataccctctctttckggaattc

SEQ ID NO: 49741 - DNA, 623 bp, Homo sapiens
agggattatgctttaacaactgctagtgggaataaggagctccacatgcatgtaaagttccaattatataactgactcttcataaactattgcaacattacagattcctgtcctgctgtggagaacagttgtctactatgaccaaaagagagcaaggttaatgacattgacctcaaaaatgacaaaatttcactagcacaagaagctgaatttagtcttcacagaaaaactgctaatcattttaaatattttcctttgctaaataatctttccaacttcatagccattcttagrttccatagttgagattgccagttaagacttacataaaaatttgtttcagaatcactggttatttttcttttaaaaaaataatatctcattgttcaattcccacctatgagtgagaatatgcagtgtttggttttttgttcttgcgatagtttactgagaatgatgatttccaatttcatccatgtccctacaaaggacatgaactcatcattttttatggctgcatagtattccatggtgtgtatgtgccacattttcttaatccagtctatcattgttggacatttgggttggttccaagtcttcgctattgtgaataatgccgcaat

SEQ ID NO: 49742 - DNA, 623 bp, Homo sapiens
agggattatgctttaacaactgctagtgggaataaggagctccacatgcatgtaaagttccaattatataactgactcttcataaactattgcaacattacagattcctgtcctgctgtggagaacagttgtctactatgaccaaaagagagcaaggttaatgacattgacctcaaaaatgacaaaatttcactagcacaagaagctgaatttagtcttcacagaaaaactgctaatcattttaaatattttcctttgctaaataatctttccaacttcatagccattcttaggttccatagttgagattgccagttaagacttacataaaaatttgtttcagaatcactggttatttttcttttaaaaaaataatatctcattgttcaattcccacctatgagtgagaatatgcagtgtttggttttttgttcttgcgatagtttactgagaatgatgatttccwatttcatccatgtccctacaaaggacatgaactcatcattttttatggctgcatagtattccatggtgtgtatgtgccacattttcttaatccagtctatcattgttggacatttgggttggttccaagtcttcgctattgtgaataatgccgcaat

SEQ ID NO: 49743 - DNA, 551 bp, Homo sapiens
aaaaaacaggaatgacctctaatacataattgtaggccgaatctggatatttcgtcaataagcatgttgtgagttgatcatatcgtaaaawctgaatctagacttgaggttctactagacctataacttagataagttaataaacttcactcagatttagttccttcatatataaaatgaatatagaggtactttgaaaagttgttagcattaatgaaataaagtataagtgacatactgtggacacacagtagttgctcaataaatagttgaaaggatcaattagtacatataacagtattcccaggccacaccaaaaagggttaacaattgtaacggtatttattctgatccctcaatcagtatttcagaaactagaaccacaactcactgagaactttccttttgtaatgggtctttgcaagcttattttcgttttatgcctttgtcaactgctccttttggtaatgcagatatcaagaatggcacacaggctcctttctgccactgtagtactattggctcttctcactgcagccaatgctggtgtt

SEQ ID NO: 49744 - DNA, 541 bp, Homo sapiens
atctttatttgttttcagatttattacatagaagagcaatttgacgagttaactactcatttttcccatattttaatgctayaatacagagaacaataacatatcaattaactttaattaccctctggctggctaccttagatctctgccatcgtaagcagtgtgcttttacgaatagcctcctgacagtgaaaacctcaagaggtcgataactccttttacaatttctgtccagggtctcacacacacaaaaaaatcatttaatatattctgtatgttgcctcatccctccaatattctcagaagtcagaattgtatcatttataagtggatggatattaaagataggttcgtggagtcaagaagggaaaagatccaaccacagggaagtgaactcccactacctgagcaaggaactcctaagtttgtactaaactgagatgcaaaggtaagaggttccctgtgtgtcatggttacaaagcttaagcagctgggaggtggccctgaactgtgagaatgagaatgaaaggcgagtatcatt

SEQ ID NO: 49745 - DNA, 2024 bp, Homo sapiens
aaaatgtgatcatccaggaatcttccattttaagcaaatcctttgcaatccacatcattcaccaatttttggaaaacactttattctacaaaattgtcctcatttaggaaggtgcttagaatattaattactcaaatgcctgtttatttcatcatgtacatggtctrgggcaacctccatcaaaccttttgagtcttaccagcctctcctcctctcccagcctttctacaaaggaacatttttatttggctgttcaagctttcctctcagtggccctctaagtagaaatttatctttctttagctacattccagggctcttaaaatcagagaggaggtagacagagattggactacaaggagtctttctggtggagtcagttcctgaactcacctttatgggtgagaatctgggtaataagcataaaagagaaaaaacagaaaaacgaaacaaaaaaaagcaataagccagatgaaatagatcagcctacacattacagattggaggcaggggtcacaaagaagccactttgtgtcttggtcccctgaatttggtgaggcaggcagaaggtgtgaataggacagtttggaactacaagtgggtgagaaagcagagaaagacaagattgcagaagcatggggtatgaatttgattatctttcatctttaggaggctcatgtgaaatgcccttatagtatttttttttttttaagataagagattccacctttttgcaggcaattctgtttagagacctggcaatgtgggcccactgagtatctcctgctgccctgaactgtggacaatcacagtttccctccctgtccgcctccctcctcatgacctggtgcatcttgagaatattcccccttctgttcataatcagaaactattacgggctctatcttccaggtaaggaacactggctagttgcttggaaatgtaggaaatgtctcttttataggcactatggaacaagaaaaggaggcctttgaattctagcctctttgtctttgttcacatgcagaattccttgctcacccttgactttttttttttttttttttgagatggagtcttgttctgtcacccaggctagaatgcagtggcatgaccgtggctcactgcaaactctgcctcctgggttcaagtgattctcctgtctcaggctcccaagtaggtgggcatgcaccaccatgcaacacgcctggctaatttttgtatttttagtagagatgaggtttcaccgtgttggccaggctggtctcaaactcctgacctcaagtgatctgcccgccttggcctcccaaagtgctgggattaaaggtgtgagccaccacaccagcccacccttgacatttctgcaattcacttacacaaatgtaaactcactgaaggccttatttcatgcacattctcttatgcggtgctcagctgaaagagttctttatcttactaatgttgtaattattgacccttgactcagggctctggaacctggctccactggtgtagatcttgtctgtgcagctctgctccattttgatgcagtcaactccttagtccaattagaattgtctacacagagccatcaaccaactagcatagataagttcaaaaaaagtaacactctggccagggcaatcaggcaagagaaagaaataaagggtattcaaataggaaaagaggaagtcaaattgtctctgtttgcagatgacatgattgtatatttagaaaaccctaccatttcagctcaaaatctccttaagctgataagcaacttcagcaaagtctcaggatacaaaattaatgtgcaaaaatcacaagacaaacagagagccaaatcgtgagtgaactaccactcacagttgctacaaagagaataaaatacctagcaatacaacttacaaggaacgtgaaggacctcttcagggagaactacaaaccactgctcaaggaaataagagaagacacaaataaacggaaaaacattccacatttcaaactcacggataggagaaatc

SEQ ID NO: 49746 - DNA, 2024 bp, Homo sapiens
aaaatgtgatcatccaggaatcttccattttaagcaaatcctttgcaatccacatcattcaccaatttttggaaaacactttattctacaaaattgtcctcatttaggaaggtgcttagaatattaattactcaaatgcctgtttatttcatcatgtacatggtctagggcaacctccatcaaaccttttgagtcttaccagcctctcctcctctcccagcctttctacaaaggaacatttttatttggctgttcaagctttcctctcrgtggccctctaagtagaaatttatctttctttagctacattccagggctcttaaaatcagagaggaggtagacagagattggactacaaggagtctttctggtggagtcagttcctgaactcacctttatgggtgagaatctgggtaataagcataaaagagaaaaaacagaaaaacgaaacaaaaaaaagcaataagccagatgaaatagatcagcctacacattacagattggaggcaggggtcacaaagaagccactttgtgtcttggtcccctgaatttggtgaggcaggcagaaggtgtgaataggacagtttggaactacaagtgggtgagaaagcagagaaagacaagattgcagaagcatggggtatgaatttgattatctttcatctttaggaggctcatgtgaaatgcccttatagtatttttttttttttaagataagagattccacctttttgcaggcaattctgtttagagacctggcaatgtgggcccactgagtatctcctgctgccctgaactgtggacaatcacagtttccctccctgtccgcctccctcctcatgacctggtgcatcttgagaatattcccccttctgttcataatcagaaactattacgggctctatcttccaggtaaggaacactggctagttgcttggaaatgtaggaaatgtctcttttataggcactatggaacaagaaaaggaggcctttgaattctagcctctttgtctttgttcacatgcagaattccttgctcacccttgactttttttttttttttttttgagatggagtcttgttctgtcacccaggctagaatgcagtggcatgaccgtggctcactgcaaactctgcctcctgggttcaagtgattctcctgtctcaggctcccaagtaggtgggcatgcaccaccatgcaacacgcctggctaatttttgtatttttagtagagatgaggtttcaccgtgttggccaggctggtctcaaactcctgacctcaagtgatctgcccgccttggcctcccaaagtgctgggattaaaggtgtgagccaccacaccagcccacccttgacatttctgcaattcacttacacaaatgtaaactcactgaaggccttatttcatgcacattctcttatgcggtgctcagctgaaagagttctttatcttactaatgttgtaattattgacccttgactcagggctctggaacctggctccactggtgtagatcttgtctgtgcagctctgctccattttgatgcagtcaactccttagtccaattagaattgtctacacagagccatcaaccaactagcatagataagttcaaaaaaagtaacactctggccagggcaatcaggcaagagaaagaaataaagggtattcaaataggaaaagaggaagtcaaattgtctctgtttgcagatgacatgattgtatatttagaaaaccctaccatttcagctcaaaatctccttaagctgataagcaacttcagcaaagtctcaggatacaaaattaatgtgcaaaaatcacaagacaaacagagagccaaatcgtgagtgaactaccactcacagttgctacaaagagaataaaatacctagcaatacaacttacaaggaacgtgaaggacctcttcagggagaactacaaaccactgctcaaggaaataagagaagacacaaataaacggaaaaacattccacatttcaaactcacggataggagaaatc

SEQ ID NO: 49747 - DNA, 2024 bp, Homo sapiens
aaaatgtgatcatccaggaatcttccattttaagcaaatcctttgcaatccacatcattcaccaatttttggaaaacactttattctacaaaattgtcctcatttaggaaggtgcttagaatattaattactcaaatgcctgtttatttcatcatgtacatggtctagggcaacctccatcaaaccttttgagtcttaccagcctctcctcctctcccagcctttctacaaaggaacatttttatttggctgttcaagctttcctctcagtggccctctaagtagaaatttatctttctttagctacattccagggctyttaaaatcagagaggaggtagacagagattggactacaaggagtctttctggtggagtcagttcctgaactcacctttatgggtgagaatctgggtaataagcataaaagagaaaaaacagaaaaacgaaacaaaaaaaagcaataagccagatgaaatagatcagcctacacattacagattggaggcaggggtcacaaagaagccactttgtgtcttggtcccctgaatttggtgaggcaggcagaaggtgtgaataggacagtttggaactacaagtgggtgagaaagcagagaaagacaagattgcagaagcatggggtatgaatttgattatctttcatctttaggaggctcatgtgaaatgcccttatagtatttttttttttttaagataagagattccacctttttgcaggcaattctgtttagagacctggcaatgtgggcccactgagtatctcctgctgccctgaactgtggacaatcacagtttccctccctgtccgcctccctcctcatgacctggtgcatcttgagaatattcccccttctgttcataatcagaaactattacgggctctatcttccaggtaaggaacactggctagttgcttggaaatgtaggaaatgtctcttttataggcactatggaacaagaaaaggaggcctttgaattctagcctctttgtctttgttcacatgcagaattccttgctcacccttgactttttttttttttttttttgagatggagtcttgttctgtcacccaggctagaatgcagtggcatgaccgtggctcactgcaaactctgcctcctgggttcaagtgattctcctgtctcaggctcccaagtaggtgggcatgcaccaccatgcaacacgcctggctaatttttgtatttttagtagagatgaggtttcaccgtgttggccaggctggtctcaaactcctgacctcaagtgatctgcccgccttggcctcccaaagtgctgggattaaaggtgtgagccaccacaccagcccacccttgacatttctgcaattcacttacacaaatgtaaactcactgaaggccttatttcatgcacattctcttatgcggtgctcagctgaaagagttctttatcttactaatgttgtaattattgacccttgactcagggctctggaacctggctccactggtgtagatcttgtctgtgcagctctgctccattttgatgcagtcaactccttagtccaattagaattgtctacacagagccatcaaccaactagcatagataagttcaaaaaaagtaacactctggccagggcaatcaggcaagagaaagaaataaagggtattcaaataggaaaagaggaagtcaaattgtctctgtttgcagatgacatgattgtatatttagaaaaccctaccatttcagctcaaaatctccttaagctgataagcaacttcagcaaagtctcaggatacaaaattaatgtgcaaaaatcacaagacaaacagagagccaaatcgtgagtgaactaccactcacagttgctacaaagagaataaaatacctagcaatacaacttacaaggaacgtgaaggacctcttcagggagaactacaaaccactgctcaaggaaataagagaagacacaaataaacggaaaaacattccacatttcaaactcacggataggagaaatc

SEQ ID NO: 49748 - DNA, 2024 bp, Homo sapiens
aaaatgtgatcatccaggaatcttccattttaagcaaatcctttgcaatccacatcattcaccaatttttggaaaacactttattctacaaaattgtcctcatttaggaaggtgcttagaatattaattactcaaatgcctgtttatttcatcatgtacatggtctagggcaacctccatcaaaccttttgagtcttaccagcctctcctcctctcccagcctttctacaaaggaacatttttatttggctgttcaagctttcctctcagtggccctctaagtagaaatttatctttctttagctacattccagggctcttaaaatcagagaggaggtagacagagattggactacaaggagtctttctggtggagtcagttcctgaactcacctttatgggtgagaatctgggtaataagcataaaagagaaaaaacagaaaaacgaaacaaaaaaaagcaataagccagatgaaatagrtcagcctacacattacagattggaggcaggggtcacaaagaagccactttgtgtcttggtcccctgaatttggtgaggcaggcagaaggtgtgaataggacagtttggaactacaagtgggtgagaaagcagagaaagacaagattgcagaagcatggggtatgaatttgattatctttcatctttaggaggctcatgtgaaatgcccttatagtatttttttttttttaagataagagattccacctttttgcaggcaattctgtttagagacctggcaatgtgggcccactgagtatctcctgctgccctgaactgtggacaatcacagtttccctccctgtccgcctccctcctcatgacctggtgcatcttgagaatattcccccttctgttcataatcagaaactattacgggctctatcttccaggtaaggaacactggctagttgcttggaaatgtaggaaatgtctcttttataggcactatggaacaagaaaaggaggcctttgaattctagcctctttgtctttgttcacatgcagaattccttgctcacccttgactttttttttttttttttttgagatggagtcttgttctgtcacccaggctagaatgcagtggcatgaccgtggctcactgcaaactctgcctcctgggttcaagtgattctcctgtctcaggctcccaagtaggtgggcatgcaccaccatgcaacacgcctggctaatttttgtatttttagtagagatgaggtttcaccgtgttggccaggctggtctcaaactcctgacctcaagtgatctgcccgccttggcctcccaaagtgctgggattaaaggtgtgagccaccacaccagcccacccttgacatttctgcaattcacttacacaaatgtaaactcactgaaggccttatttcatgcacattctcttatgcggtgctcagctgaaagagttctttatcttactaatgttgtaattattgacccttgactcagggctctggaacctggctccactggtgtagatcttgtctgtgcagctctgctccattttgatgcagtcaactccttagtccaattagaattgtctacacagagccatcaaccaactagcatagataagttcaaaaaaagtaacactctggccagggcaatcaggcaagagaaagaaataaagggtattcaaataggaaaagaggaagtcaaattgtctctgtttgcagatgacatgattgtatatttagaaaaccctaccatttcagctcaaaatctccttaagctgataagcaacttcagcaaagtctcaggatacaaaattaatgtgcaaaaatcacaagacaaacagagagccaaatcgtgagtgaactaccactcacagttgctacaaagagaataaaatacctagcaatacaacttacaaggaacgtgaaggacctcttcagggagaactacaaaccactgctcaaggaaataagagaagacacaaataaacggaaaaacattccacatttcaaactcacggataggagaaatc

SEQ ID NO: 49749 - DNA, 502 bp, Homo sapiens
gcctcccaaagtgctgagattrcaggcgtgagccaccgtgcctggccaatattagtctttaataattttttttaagttttttttttgtctttaatgtcctgtaatttcattatcatgtgtttatatatggttggggatttgtttgttgtttgttttgtggagaaaacatcttgttacgttgcccaagctggtctcaaactcttgggctcaagcgatcctccctcctcagcctcccaaaatgctgggattacaggcatgagacatcatgttgggacttcactgggattttgttatggttgttttttctgatagaaacatgctctttcttaaatctaagaattcccttttatttcgcagtctagaaaaattctcagtcatcatctcttaaattattttctctttcttattctttctattctctcctttgagaactggtattgggcatacgttatctttctatccttcaaggcccaacccctctcacatattttccacctttctg

SEQ ID NO: 49750 - DNA, 502 bp, Homo sapiens
gcctcccaaagtgctgagattgcaggcgtgagccaccgtgcctggccaatattagtctttaataattttttttaagttttttttttgtctttaatgtcctgtaatttcattatcatgtgtttatatatggttggggatytgtttgttgtttgttttgtggagaaaacatcttgttacgttgcccaagctggtctcaaactcttgggctcaagcgatcctccctcctcagcctcccaaaatgctgggattacaggcatgagacatcatgttgggacttcactgggattttgttatggttgttttttctgatagaaacatgctctttcttaaatctaagaattcccttttatttcgcagtctagaaaaattctcagtcatcatctcttaaattattttctctttcttattctttctattctctcctttgagaactggtattgggcatacgttatctttctatccttcaaggcccaacccctctcacatattttccacctttctg

SEQ ID NO: 49751 - DNA, 502 bp, Homo sapiens
gcctcccaaagtgctgagattgcaggcgtgagccaccgtgcctggccaatattagtctttaataattttttttaagttttttttttgtctttaatgtcctgtaatttcattatcatgtgtttatatatggttggggatttgtttgttgtttgttttgtggagaaaacatcttgttacgttgcccaagctggtctcaaactcttgggctcaagcgatcctccctcctcagcctcccaaaatgctgggattayaggcatgagacatcatgttgggacttcactgggattttgttatggttgttttttctgatagaaacatgctctttcttaaatctaagaattcccttttatttcgcagtctagaaaaattctcagtcatcatctcttaaattattttctctttcttattctttctattctctcctttgagaactggtattgggcatacgttatctttctatccttcaaggcccaacccctctcacatattttccacctttctg

SEQ ID NO: 49752 - DNA, 502 bp, Homo sapiens
gcctcccaaagtgctgagattgcaggcgtgagccaccgtgcctggccaatattagtctttaataattttttttaagttttttttttgtctttaatgtcctgtaatttcattatcatgtgtttatatatggttggggatttgtttgttgtttgttttgtggagaaaacatcttgttacgttgcccaagctggtctcaaactcttgggctcaagcgatcctccctcctcagcctcccaaaatgctgggattacaggcatgagacatcatgytgggacttcactgggattttgttatggttgttttttctgatagaaacatgctctttcttaaatctaagaattcccttttatttcgcagtctagaaaaattctcagtcatcatctcttaaattattttctctttcttattctttctattctctcctttgagaactggtattgggcatacgttatctttctatccttcaaggcccaacccctctcacatattttccacctttctg

SEQ ID NO: 49753 - DNA, 626 bp, Homo sapiens
gatgcacaaaataaagtgcaatagctacaggaaaacgggaaaattatgcccattccattttccattattgcagcaatctgttgaaaarcagactcttcaatgtgcagagggtcaggattttgtcaggaaagaactacacagctgctcccaatctggctccaagcaaggaccacctgagagctgactccgctgagcgaggccccggcttcctttaattgactctcttccgccccgttcattaacatatgtcactctacaagaccgagaaggaaagcactccttttttaaaagtgcctctacactcagaaggataacccttagagtctggcctggataacaccttttacgtggcagtgcgccgcaatatggcgtgctagcacctcttcatctggagctccatggcatatggctacacgcaaaagaaaaaaagaaaaagaaaaaagatattcccagattaactggctcatcgggtaggagtgacacatgcagcaaggtgagaagggtgcaggggatcagcattcaggatgtgtgaaagaggcatttttccatttctctaacagtgagagaccctcatcaaaaaaaaaaaatgagaagttccaggtcttggacaaattcacaaaggctac

SEQ ID NO: 49754 - DNA, 372 bp, Homo sapiens
ggcttgcatgtttccaaatcaagagaagcccacatgagaatcctcactcagatccagacctgatgcaaataaagagactctggattttgagctgaaggagtgarggatgtgccatctcaaaatatgtcaggttggtatattggtgattatttcaagtggaaaacacggggaaaattgtagttcagtaagggatcgctgacctgtctcttcctgtgggcagcaaaccataaagattcttctgagaagcacatcctccctgtaccagggtgagaaaatagcccttatcaccagagacgggaaactgggggctgccatggacctgaataaacacacttaatgaagtgatcctatctcccactggttttatacccc

SEQ ID NO: 49755 - DNA, 523 bp, Homo sapiens
atcccaggtggtaacactgggcttctctctggatttccccaccttgaaactttttcctcatattctgttggtgggagtgtagattagtacagtcactatggagaacagtatggaagttcctcaggaaactaaaaacatatagttctctaccatctgattcagcarttccactactgggtatatgtcgaaaagaaagggaatcaatatatcaaagagttatctgcatgcccatgtgtattgcagcactattcacagtagcgaagatatgcaatcaacctaagttctcatcaatggatgggtaaataaagtaaatgtggtatatatatatatgcaatggaatattattcagccataaaaagaatgaaatcctgtaatttcctgcaacatggatggaactggaggtcattatgttaaataagccaaccacagggagacaaatatcgtatgttctcactcatatgtgggaactaaaattgtggatctcatgaggatatgcagtagattggtggttactagaggccag

SEQ ID NO: 49756 - DNA, 523 bp, Homo sapiens
atcccaggtggtaacactgggcttctctctggatttccccaccttgaaactttttcctcatattctgttggtgggagtgtagattagtacagtcactatggagaacagtatggaagttcctcaggaaactaaaaacatatagttctctaccatctgattcagcaattccactactgggtatatgtcgaaaagaaagggaatcaatatatcaaagagttatctgcatgcccatgtgtattgcagcactattcacagtagcgaagatatgcaatcaacctaagttctcatcaatggatgggtaaataaagtaaatgtggtatatatatatatgcaatggaatattattcagccataaaaagaatgaaatcctgtaatttcctgcaacatggatggaactggaggtcattatgttaaataagccaaccacagggagacaaatrtcgtatgttctcactcatatgtgggaactaaaattgtggatctcatgaggatatgcagtagattggtggttactagaggccag

SEQ ID NO: 49757 - DNA, 565 bp, Homo sapiens
ataaactgaagcttaatgtttcacacagccccaaagcctatcccctagaccctacatagygagaaagacaatcactgcagcaaattttgacaataagcaggtattagttttgccacaatcaggaatataatatactgagtatagcgtttggtccattcatcacaatccaattaactttagggtcccttctgcaactttgtccaactgatgagtccagatagcagtatattccagctggagaatatactctgtagcccagccagatcagaagtgactttggtgcccacacagaagctcagcctcatagcagggcttagctggtggtcttgctggatagcagagcatagccagctgttccacccaaattcagagaaaaggcagtgacccagacatctagagaacctgaatgcaagctctgcctgcccagattcattaccagctggcccattcagaattatagcatagactaactagtgaaggtctatctctgccaaagaactcttataaatgccagaaaaggtggctttctctgaaaatgcataaacagcaatgcaggaacacaaag

SEQ ID NO: 49758 - DNA, 565 bp, Homo sapiens
ataaactgaagcttaatgtttcacacagccccaaagcctatcccctagaccctacatagtgagaaagacaatcactgcagcaaattttgacaataagcaggtattagttttgccacaatcaggaatataatatactgagtatagcgtttggtccattcatcacaatccaattaactttagggtcccttctgcaactttgtccaactgatgagtccagatagcagtatattccagctggagaatatactctgtagcccagccagatcagaagtgactttrgtgcccacacagaagctcagcctcatagcagggcttagctggtggtcttgctggatagcagagcatagccagctgttccacccaaattcagagaaaaggcagtgacccagacatctagagaacctgaatgcaagctctgcctgcccagattcattaccagctggcccattcagaattatagcatagactaactagtgaaggtctatctctgccaaagaactcttataaatgccagaaaaggtggctttctctgaaaatgcataaacagcaatgcaggaacacaaag

SEQ ID NO: 49759 - DNA, 628 bp, Homo sapiens
agaatcactacagttttatatgcagtatttcttaaatatattaaaaaccatgacttcgatttcagactggtttcatggaacctgcagcctcctcagaagtacttaaggaattctataaataataatgatttaaactgcctgaagtattatagctttctttcatctgtgttataacatattggggttctactaactgcacagtgaaaaagtcccgatgctkgaaaagactgcaaaccaccctagactctgttagttactagtttaggagcttaccagcagaagcagtatctgcaagcgaatcatgagtctgattcaatatactatccacaacatctgagaaaagggaagctgtgtcccgggggctgtcagccacagctgtttggagaacatgtcgttgaaattcagcctccttggtgcggcacacagtgaggatcatagcactggcagagagtggggaaataactccagtgatggggggccggccttcaccagggtccacatcagcaacctacgtgagaagccctaattagttgagaatattattgtcaatatgcctaaagaagaatgtagtgtactaaaagacagaataaccattttcccaattattattaacgtgaaaactatgaaa

SEQ ID NO: 49760 - DNA, 628 bp, Homo sapiens
agaatcactacagttttatatgcagtatttcttaaatatattaaaaaccatgacttcgatttcagactggtttcatggaacctgcagcctcctcagaagtacttaaggaattctataaataataatgatttaaactgcctgaagtattatagctttctttcatctgtgttataacatattggggttctactaactgcacagtgaaaaagtcccgatgcttgaaaagactgcaaaccaccctagactctgttagttactrgtttaggagcttaccagcagaagcagtatctgcaagcgaatcatgagtctgattcaatatactatccacaacatctgagaaaagggaagctgtgtcccgggggctgtcagccacagctgtttggagaacatgtcgttgaaattcagcctccttggtgcggcacacagtgaggatcatagcactggcagagagtggggaaataactccagtgatggggggccggccttcaccagggtccacatcagcaacctacgtgagaagccctaattagttgagaatattattgtcaatatgcctaaagaagaatgtagtgtactaaaagacagaataaccattttcccaattattattaacgtgaaaactatgaaa

SEQ ID NO: 49761 - DNA, 2581 bp, Homo sapiens
aatggacctcctcctataaaaaagtaatttctctaactttgagcttggatcagtgctctgtctcttacggattaaggccaaactacaatccttttaacttctgtagccttccttttctcctaaggaaaagaatcatactcacttgaatcagaaaatgtagtgaagacacagaagtccagggatggagagttaaactgtggctaccaaaatgtcatgtccacccagagcctgtgagtgtgattttacctaggtctttgcagatgtaattaagttaaaaatctctagatgacatcatcctgaatttaggttgggctacaaattccaggacaggcatcctttcaaaataaaggcagagggagctatgacaggctatgcataggagaaggctatgcaaagatggaggcagaaatcggcgtgagtcaagaacgccaagaactgctggcagccaccagaaggcagaagagaggcatggaacagcttttccctcggagcctccagaaggaaccaaccctgctgacaccttgatatcagacttcctggtctccagaaatgtgagaaaataaatgtttgatgtttgaagccacctagtctgtgatactttgttatatacagccctaggaaactaatacagaggactaaccaaaaggaacctatgacctcatggaaaaatccatcttctgtctataattatgtgaagatcaaagacatgccaccaaataagtgtctctactcattttactggccttccagcttttttctacagagctgaagaacaacaccattaaggaagtgctgagctcagaaactgatagcattaatatgatgtacagtccaccagtggcttaaattcatggctgacctgggtagatcagatgagagcaccacaaagtaaaaaacttttgactattcaccctaagaattaacaaataacaacaaaaagagacaccttctaaatatgcgaaggatcacttgaggatggcttcatatcaaatggaaagtgagatttctaacagggtgtcaatgtctgtggttttgtagaggtgcttaaaactcaagctagttcattttttctggagtaaatcaaagagattttctttcttcttaaaccctctgtgaggtaaatcacaggttacaaagtattgagctattaaaaagatgggtgaggaatccaaggtttaaataaaagaatgtatttagtaagaagttattgtaaaggattcagaatataaaataagtgacatcgtatacaaaacacaaaaacagcctaatactagaaaaaagccagtataactgatgcaactacatctaagaacagggaaacatttcccaatcattctgcaaaatcattagctttctttccctcaacaaaatggtgatgaaataattttgaactcagatttttaagattacagaacatagaacgtaatgcttccaggcagggtagcttgtagcagaattacatcctgccaaaaacaatgagaaagggaagattaaaaagaatgcgtttaggccaggcgcagtggctcacgcctgtwatcccaacactttgggaggctgaggcgaatggatcacctgaggtcaggagttcaagaccaccttggccaacatggtgagaccctgtctgtacaaaaatacaaaaaaaaaaaaaaaaaaaaaaaaaaattagcccggcatggtggtgtgtgcctgtaatcccagctacttgggaggttgaggcaggagaatcgcttgaacccgggaggtggaggttgcagtgagccaagatcgtgccgccgctacactccagcctgggtgacagagcgaggctccatctcccaaaaaaagaaagaagtgtttaaaggcatcaaagagcagctaaagcaatgaggactagaaggactaagattccacagagcagaaaacctcaaagagttaagagatgacttctgtcaccactgaagagatcagtgatcctgagcacctgcaacaggctaaggatctgggtctttcccaggcagggaccactgctggaggaacagacaacccgcagagtgggttttcagattattttctgcaaagattatagcaattcacactcttagcaatcggtgtgtatttccctttttaatttttgatgatctgaatgggtaaaaaaattgattaacctattgttgctttaatttatattttcctagtagcaaggttggtcatctcgtcatattggccatttgaattttctcttttacatgaactgtctaattcataacttttgctcattttgttttaaaacaatggataagctccacagagtttttttctaatcaaatttccaaaattttaattcaatctggattcctttgagttttgtttcaaaactgcaatttttttttttttttgagacggtctcactctattgcccagactggagcgcagtggtgcaatcctggctcaccgcaacctccacctcccaggcctaagaaattctcccacctcagcctcccaagtagctgggactactacgccactacgcctagctaattttcacacttttgtagagactgagtctatgttgcccagactgtacaaattttttaatagacaa

SEQ ID NO: 49762 - DNA, 2581 bp, Homo sapiens
aatggacctcctcctataaaaaagtaatttctctaactttgagcttggatcagtgctctgtctcttacggattaaggccaaactacaatccttttaacttctgtagccttccttttctcctaaggaaaagaatcatactcacttgaatcagaaaatgtagtgaagacacagaagtccagggatggagagttaaactgtggctaccaaaatgtcatgtccacccagagcctgtgagtgtgattttacctaggtctttgcagatgtaattaagttaaaaatctctagatgacatcatcctgaatttaggttgggctacaaattccaggacaggcatcctttcaaaataaaggcagagggagctatgacaggctatgcataggagaaggctatgcaaagatggaggcagaaatcggcgtgagtcaagaacgccaagaactgctggcagccaccagaaggcagaagagaggcatggaacagcttttccctcggagcctccagaaggaaccaaccctgctgacaccttgatatcagacttcctggtctccagaaatgtgagaaaataaatgtttgatgtttgaagccacctagtctgtgatactttgttatatacagccctaggaaactaatacagaggactaaccaaaaggaacctatgacctcatggaaaaatccatcttctgtctataattatgtgaagatcaaagacatgccaccaaataagtgtctctactcattttactggccttccagcttttttctacagagctgaagaacaacaccattaaggaagtgctgagctcagaaactgatagcattaatatgatgtacagtccaccagtggcttaaattcatggctgacctgggtagatcagatgagagcaccacaaagtaaaaaacttttgactattcaccctaagaattaacaaataacaacaaaaagagacaccttctaaatatgcgaaggatcacttgaggatggcttcatatcaaatggaaagtgagatttctaacagggtgtcaatgtctgtggttttgtagaggtgcttaaaactcaagctagttcattttttctggagtaaatcaaagagattttctttcttcttaaaccctctgtgaggtaaatcacaggttacaaagtattgagctattaaaaagatgggtgaggaatccaaggtttaaataaaagaatgtatttagtaagaagttattgtaaaggattcagaatataaaataagtgacatcgtatacaaaacacaaaaacagcctaatactagaaaaaagccagtataactgatgcaactacatctaagaacagggaaacatttcccaatcattctgcaaaatcattagctttctttccctcaacaaaatggtgatgaaataattttgaactcagatttttaagattacagaacatagaacgtaatgcttccaggcagggtagcttgtagcagaattacatcctgccaaaaacaatgagaaagggaagattaaaaagaatgcgtttaggccaggcgcagtggctcacgcctgttatcccaacactttgggaggctgaggcgaatggatcacctgaggtcaggagttcaagaccaccttggccaacatggtgagaccctgtctgtacaaaaatacaaaaaaaaaaaaaaaaaaaaaaaaaaattagcccggcatggtggtgtgtgcctgtaatcccagctacttgggaggttgaggcaggagaatcgcttgaacccgggaggtggaggttgcagtgagccaagatcgtgccgccgctacactccagcctgggtgacagagcgaggctccatctcccaaaaaaagaaagaagtgtttaaaggcatcaaagagcagctaaagcaatgaggactagaaggactaagattccacagagcagaaaacctcaaagagttaagagatgacttctgtcaccactgaagagatcagtgatcctgagcacctgcaacaggctaaggatctgggtctttcccaggcagggaccactgctggaggaacagacaacccgcagagtgggttttcagattattttctgmaaagattatagcaattcacactcttagcaatcggtgtgtatttccctttttaatttttgatgatctgaatgggtaaaaaaattgattaacctattgttgctttaatttatattttcctagtagcaaggttggtcatctcgtcatattggccatttgaattttctcttttacatgaactgtctaattcataacttttgctcattttgttttaaaacaatggataagctccacagagtttttttctaatcaaatttccaaaattttaattcaatctggattcctttgagttttgtttcaaaactgcaatttttttttttttttgagacggtctcactctattgcccagactggagcgcagtggtgcaatcctggctcaccgcaacctccacctcccaggcctaagaaattctcccacctcagcctcccaagtagctgggactactacgccactacgcctagctaattttcacacttttgtagagactgagtctatgttgcccagactgtacaaattttttaatagacaa

SEQ ID NO: 49763 - DNA, 581 bp, Homo sapiens
attattatctttttgattctgggagttagagattttctcctgctggtttcatgctgagccaggtgagggactgtagggagtggtcaagtgctaatctaaattgkcaccttcgtcctcataggtccccaaattgaagccttttcttgtcagtgcttatattctggcaagacagaaggcagtctcccaggcagtcttaccaccccaaagaaaaggcagaatatttgatatatggttcagtcttctcttttctccccaggaagaagctaagacctgggagatttctctctattgtaccatcacagtgtaccggggagggactatggttggtgaatgccacagatttttttttaccagcttctgtgtggctggtttcaaaatcatctagggtacaaaagcctctttcttaacaggtttttgggtttctcacaaaggtaattgtttcatatattttctttgagtcagtatctccatgagttagagggtctggagcttcctattttaccaccttgctgacatcacctagtctttctgtacattttattttaatggagtttatagattaaaattgacttctaaaaagt

SEQ ID NO: 49764 - DNA, 581 bp, Homo sapiens
attattatctttttgattctgggagttagagattttctcctgctggtttcatgctgagccaggtgagggactgtagggagtggtcaagtgctaatctaaattgtcaccttcgtcctcataggtccccaaattgaagccttttcttgtcagtgcttatattctggcaagacagaaggcagtctcccaggcagtcttaccaccccaaagaaaaggcagaatatttgatatatggttcagtcttctcttttctccccaggaagaagctaagacctgggagatttctctctattgtaccatcacagtgtaccggggagggactatggttggtgaatgccacagatttttttttaccagcttctrtgtggctggtttcaaaatcatctagggtacaaaagcctctttcttaacaggtttttgggtttctcacaaaggtaattgtttcatatattttctttgagtcagtatctccatgagttagagggtctggagcttcctattttaccaccttgctgacatcacctagtctttctgtacattttattttaatggagtttatagattaaaattgacttctaaaaagt

SEQ ID NO: 49765 - DNA, 581 bp, Homo sapiens
attattatctttttgattctgggagttagagattttctcctgctggtttcatgctgagccaggtgagggactgtagggagtggtcaagtgctaatctaaattgtcaccttcgtcctcataggtccccaaattgaagccttttcttgtcagtgcttatattctggcaagacagaaggcagtctcccaggcagtcttaccaccccaaagaaaaggcagaatatttgatatatggttcagtcttctcttttctccccaggaagaagctaagacctgggagatttctctctattgtaccatcacagtgtaccggggagggactatggttggtgaatgccacagatttttttttaccagcttctgtgtggctggtttcaaaatcatctagggtacaaaagcctctttcttaacaggtttttgggtttctcacaaaggtaattgtttcatatattttctttgagtcagtatctmcatgagttagagggtctggagcttcctattttaccaccttgctgacatcacctagtctttctgtacattttattttaatggagtttatagattaaaattgacttctaaaaagt

SEQ ID NO: 49766 - DNA, 576 bp, Homo sapiens
ttttatgccttacattccgcaggatgacctttaacctgggtgatatttcctcctgatcagacttagttacagtattcttggcaagaataccacacaaatgatgacgtgccaggaaacgtaggatgtcaacttgtcataccactggtgatattaatcttgatctataattctgctactcaatttcttaaccttaaagttgaagaggtattctgagattctactaatactctgttccccatcartcctctacccagcatatttacagccactaattagtcctcccaaattatctctatgatagtggtcaaatgtgcttctgtatacccattgttctttctataacttttagttttgttatcaacttctcccccaaataatctactgtttactgatttatgttatgaattcatgtaatcttatttaattcagtgtgttataatttattattacagtgacttattttgatcctcaaatttgttcttggttttcccagtgggagcccttttacactgaatcctgttccctttgacatgtccccattattctctgagcattttggtagttttctggtataac

SEQ ID NO: 49767 - DNA, 586 bp, Homo sapiens
gttccccccacccccatcacttttcaagttgagcactgatcactgcttgatttctaaaggattatgtcatttaaaaattgctgtatggcagactgagttgtaaaagtttaaaatggattagattaattttattttgagaatttcttgagaactccatatattttccaaaaataatgagtctgttaaaactcagattgggtattcctacttagctaaattagaaatccccagttaaaatatattaaagtatttccgatgttactaaatgacaaaactatttgctactccttaaacctaaatgttgtattaaatctaaccaagtgccttttatttatttagaaatggtctcactctgtcacccaggctggagtgcagtggcacaatcatagctcattgcagtctcaacctcctgggctcaagtgatcctccctcctcaacctcctgagtagctgggactgcagatgkgtgccaccacgcccagctaaataaaaaaaaatgtttttctagagatgggatcttgccttgttgcacaggctggtctcgaactgctgggttcaagccatcctcccgccccagcctcccaaag

SEQ ID NO: 49768 - DNA, 539 bp, Homo sapiens
aatgattctaatgtgcatccacagctgtgggccactctgtgaataagctgttaatgttctacccctttttgttttctttcagtatgtttgcatatctctttctctttagctgtgttttttttttttctcctgacatttttattggkgaggtcctataaatctatttttttcttttctcattttgcttttttcttttttacctcctatttactggccaagaagttctcattccaggtatatatatttgatttatattcttatcccatactattcatgctttatgtcagtgtaagagaacacaatatgatggtgaattatatttttgcctgttcttccaaagctaatttaatagtttacattaatttttggtataaatataaaaagatcaatagtagaaactaaggccattgtcaaaaacggatattaaggaaggatttattttaaatgtagttattattggctatgacaaaagacaataaaacagtttagaattttgagaccatacaggtctcaaggacatgtatatatcatatcaacag

SEQ ID NO: 49769 - DNA, 638 bp, Homo sapiens
acagcaaggagataaacagctcacatcatagtgtgaacagtcaaggtagttttcagaaaaacaaatgagtaaaaatgccaacaagtaaagacacctttcacatgtcacgatgacatgtttttaagcctccaggtttgtcaagggtgcagtgaaaaaggaactgatacactgcttgggagaagctaagctggtcataggtttctgagagctacttgtraaaagggccccacgaccctcaacatgactctacaagtttatcctggaatttcatgtctagattttaaaaatgaaaacattacgagataagcacggccattttgaacgagtgttttatatattacacactcaaatgagagaatgctgtgcagccattgtcatgcatttgaaaaatacttcaaaacattgagatatattcaaaagattcaaaagcatacaacattaaaaaacacatagactatttcactacacatgcactcaagaagcatataccatttggaatatctatatacttagtatgtatatggatgtatatagctatacaaaaatgaaactatgtcacatatatgacatttttgttacccatacacctggtcaaaagtgtttgaaagcatatatcacaaatattaacaccatttttt

SEQ ID NO: 49770 - DNA, 599 bp, Homo sapiens
tttttgtatttttgacttaaataacatcctccacccaaagtactgtcaaagtatgcaatgatagcaatatatataattaggtaaatgcttccatgatattttgacaaacgcgcttgtttactgagttattttcaaatcacatttttttccacaattgtatagaaaaaccttaaccactgtatttgtatttttattctcaaaatctgctttggaattcaaaatgtcaaatgttaacatatcctttaatttttacaactggcactttcttttttattatatttyatttcaatagtttttggggaacaggtggtttttggttacatggataaattctttagtggtgatttctgagattttggtgcacccgtcacttgagcagtgtacactgtacccaatgtgtagccttttatttctcaccctcctctcacccttccctgccgagtccccaaagtctattatatcatttttatgtctttgcatcctcatagcttagctctcacttataagtgagaacatagggtatttggttttccattcctgagttacttcacttagaataatggtctccaattccatccaggtttctgcaaatgccatta

SEQ ID NO: 49771 - DNA, 1393 bp, Homo sapiens
tgcacctatagatgggaagatcattgagcccaagagttcacggttgcagtgagctgtgatcatgccactgcactccagcccgctccaaggtaacagagagaaactatgtcccaaaaaataaaaaaagcttgagaaatactggtgtatacgtccaaggagaactaagcacaaattgaggagcaataaaatgcatgtttggaaatgatctcgaatgttcaagttccactctgctttgcgttaggwgcccttctagctaatcccacagtgcatcaatacaattatagaatcccttatcacatcgtgttgtgattgctttcttgtttttatttgtacttgtatttttgcttgttttgcactccatacttttgaaggtattgctaaataaaagtattgtaagagtaatgcaatttctttctttctttttttttttttttttgcagagaaattagctatatttttttctttatttccaaaagttacttgggagagaaagtacagtgaaaagtctggtggttaatctctttattgtatgaatatttgcttcttcaactaagacagatctgccttcaaattccccttccctttggttgcaacacagttaaatccaatgctccatcactagcaaaatcaacttttgctaatattctatttcatattttaacatcttatttgacaggtgtggtttagttactggcaagcatctaatttatgtcaaatctaatattattttcctagagtgaaagttttccctgtcttgtcttagtcctaaggaaactttttaagattttctttttcagaagaagatgaattgtgaaagcaaagttgaataacacatgttaaaatttgttgtgaggaagcaaaatgtgtcacacccatttaaaaacacttgatatatatatatatatatatcccaaaaatacttaaaaatgactgaacatcggccatttcttttaacattaaatgttaaagaaaaatttcaagtgttatattttaatcaaaaccaaagcttttgagtaatttgagaggggagaaaaatggagatgggaagcttttgcaggagaattttttgctcagacccagttcaaatttgtgattccatttaggtatattattatttccataactctgaagtttctgaaacaaatgtccttctttttgctgactgtctcagatgtacctagctgtgatggtagacagtggtgttgttaaaatggaagatgaagcatttcaggaagtcacaaaaagcaactggtgttcactgagcatcaatcacattgagcttgacaggcaatgcgtagccatgactcagccatcccctcaaccagaactctccaatactgtgtatcattgcctccattttcatagaggcagtgaccgatggttagagaggtaa

SEQ ID NO: 49772 - DNA, 536 bp, Homo sapiens
ctatcactaccagtttgggtaaatgtccacgcctccacaaataaaccctaagtatttgtgcatgcttataaataggattcaacggagagacagagtgatagattaggatttgaagggagagaactaatcatcttggaagatgagagaggatgagatctgttgcaaatgttgagtgccttttctaagaagagagattcttctgtgtttgtagcagaaaagaagtagtaaaataaatgagttggctatttagtgatgatgggttgataagaaatcacaggtctgatttttctttagaatttcactaaggaatatgaagtgagaacatcaagtgaggggaggagtgggaacaaggtgttggttgtgaggttggaagagacagaacacttatcctggagagyagaaaagcaggcttgctagggaagctcattggcctacttagcaggactaaggggctaatttggaggtataaaatgtgaaagatacaccaatgtttttgattataggattttctccagctgtgtctacctgctcaattc

SEQ ID NO: 49773 - DNA, 546 bp, Homo sapiens
tttttctaataccaccagggaaatcttttcacttctgtagaacagagataacggtgtttaactaaggtggtaatgttgcctgttatgggggccagcctctgtgctcggctgtgaagcgctacataaagaaaaaggtttgttacatttgatggttttcctgtttgcttgagaaacctgtcacggtagaaataatggattgaggggagaacaggaagggtgttttctttcagggaacttggctgaggaaaacataactcatagcagaacactacaaaacacaaaggtttccactcgcatgtaaactgtcttttactgagaaccaaattgtcacagtcacaatagcaagcaaaatgaactgtctttaaggacaacaaaaagctctcaagataatgactgacaagtatcattaattcatgatccsaataataggcacaatggcctaattcaggttgaaagtgcacacccttcaggaacaccggcagccattcagcttgaaaagccgcctagctcaagaaacttcaagacgaagacatgggaaaaacaaaa

SEQ ID NO: 49774 - DNA, 565 bp, Homo sapiens
tatgtttcatttttaaacaccattttataccaaggaaaaagccaccacttttaccaatgagatcaagaaagtaaacaaaaatgtcatttaagcatttgttaattgacagactgtgttggttaacacagtggtcattaattgcctttggtgtaattttagcatgcacaagcataaggtttgctggaccagctgccaaagaggacattggtgaagagaaagaaagctagacccagtaatagtagaggctgataaaactgacaaagctgcaaaggtgcatctgtgggttaagtcaagaagtcctacatgtgatgtcagggagcatggcaaccctttagaggacactttggccatatctgtaaaacttttaaatccatgtaccatttgacccagaatttccatttgtatcagtcaggattgcacttggytgtgtgcacctacaacccgattagagacttaaccaaatagagctttatttttgtcttaagaagggacttggaataaggtatccatttgtgctaagcgtgtgacttttattgcctttcccaggcaaattccagggtaaagg

SEQ ID NO: 49775 - DNA, 605 bp, Homo sapiens
cttatgcagcagttagaagaaatgcgctagctgtgcataaaggaacatgaatagagcttaaaaacagcattgcatcaaaaagcaagaaacagaatgagagccattgaacattacagatttaacacatatattcataaagcagcattatagaaaaaacaacctgggggtacactcatatccaaacacttattaatacatcagagtgactgccagtgctggcaatcaaggaggaaaacaatgaaktaaaataaaacaaaaaggtcctctcatggatgatcacatacagtgatctgaggaaggcgattaactcaaatctttgcactttaagtccaaaagaagaaaaaaggaaagatctaaatcctatcttcctttcttgaagctttttcatcccataaatgagatgcaacatctgatttttgagataatccatgtaaacatctgtgcaactagcaactcaaggatcatccatctagctggttcttccgggtctctggggacacttgagcaaagcacacatccatgagatgccagagggtagaaataaaacagagtgaaggatacccttgtaaactcaattccataaaccaaagcctaaatacggcctc

SEQ ID NO: 49776 - DNA, 522 bp, Homo sapiens
gcattgcctctctctcctaggctgagtgtcctgagctatacatgagagctgtgagatggttgtgaggattccaytgggtgcagcattaaaggggctcggaacaatgtctgaagatgccaatgctagagaaatggtggttgaatctgaatctaggcagcttctgtaggcataactcaggctctttctggtctgaattctttgcttgctgggctttgtatcttgagacctctctttcttcccactggtcagaatcctgaacatccttcaaggctgggctgaaaacttccctcctctgtgccgacttttctgactacctgaatcctcagtgatcagtcccacctctcaattcttactgtcttctgttatgtctttgataatttcttcctctctctctgtctcttctggtttctctttttttgtattagttctattagtcagacactggatccacagattggtcttctaggtctcctatttttttctattaccttttttatctcttattttgagatctgttttttg

SEQ ID NO: 49777 - DNA, 522 bp, Homo sapiens
gcattgcctctctctcctaggctgagtgtcctgagctatacatgagagctgtgagatggttgtgaggattccactgggtgcagcattaaaggggctcggaacaatgtctgaagatgccaatgctagagaaatggtggttgaatctgaatctaggcagmttctgtaggcataactcaggctctttctggtctgaattctttgcttgctgggctttgtatcttgagacctctctttcttcccactggtcagaatcctgaacatccttcaaggctgggctgaaaacttccctcctctgtgccgacttttctgactacctgaatcctcagtgatcagtcccacctctcaattcttactgtcttctgttatgtctttgataatttcttcctctctctctgtctcttctggtttctctttttttgtattagttctattagtcagacactggatccacagattggtcttctaggtctcctatttttttctattaccttttttatctcttattttgagatctgttttttg

SEQ ID NO: 49778 - DNA, 522 bp, Homo sapiens
gcattgcctctctctcctaggctgagtgtcctgagctatacatgagagctgtgagatggttgtgaggattccactgggtgcagcattaaaggggctcggaacaatgtctgaagatgccaatgctagagaaatggtggttgaatctgaatctaggcagcttctgtaggcataactcaggctctttctggtctgaattctttgcttgctgggctttgtatcttgagacctctctttcttcccactggtcagaatcctgaacatccttcaaggctgggctgaaaacttccctcctctgtgccgacttttctgactacctgaatcctcagtgatcagtcccacctctcaattcttactgtcttctgttatgtctttgataatttcttcctctctctctgtctcttctggtttctctttttttgtattagttctattagtcagacactggatccacagattggtcttctaggtctyctatttttttctattaccttttttatctcttattttgagatctgttttttg

SEQ ID NO: 49779 - DNA, 877 bp, Homo sapiens
tattaaacacttaccatgtgctatctgcactagaacagtgaagaaacatggaaacatgcttaagatatggagttaagatttctgtctgtctatatctatgtaacatatatataactatggaaaaagaattgcttgcaacaaaaacttggaaggaaatataacaagatgccttttttttgtttgttttaattgagatggagtttctctcttattccccaggctggaatacagtggtgtgatctcagctcactgtaacttccgcctcctgagttcaagcggattcttctgcctcagcctaccaagtagctggattacaggcacctgctactacacctggctaatttttgtatttttcatagagacggggtttcaccatgttagccaggctggtctggaactcctgacctcaggtgatccacccgcctcagcctcccaaagtgctgggattacaggcgtgagccaccatgcctggccagacaagatgcttttaatggttgtgttaggatagcaaaattaagagatattgctactttttctctaatttccaattttaacataatgctattgtattatttttagaataaaaatgaattacatatcaaaattaaacaaaatattggaaaaaatgaaacacgccaacctcagaaacattgtatgccacttagatatgagagcagatactatcagaatacagttctgttagctataattaattgggctagctgtttgtttgtcttatttaatcttttaacracctgtgagacagttactattattgcctcaattttctagatgagaaatttaaggctcagaaaggataagcagtttacccaatgtcacacagctagaggctgagccaaaatttgaacctaggtct

SEQ ID NO: 49780 - DNA, 637 bp, Homo sapiens
ggttttaacaccacactgcattattataaagagattagaaaaagaaaatgggcattaattttacttattatagaattccaggctctatcaatgaattgaatcctcttcacctgttccagtctctgctgatttattgtaaaagcccggatagcatttttttaaaatctttcccatgttgcatggaataaatatgtcggtgctggaatgcttaggaattttaaattgttcatatggtctaaaagggaaaagttatttgtttttaagattaacttcttttgagattattgctgtccatatttaggtttcaagtactgaatctaatgggagatttgtgcattgatataacagctgtttcctttcatactctgtagattatgtatctgcctaargggaggctttgaatgtatcataatcatctatattcttaataatggtaaaaagttgtattcagaggatatctttaacattgtatcaacctaaatgcttcttttattaaatttggattaacatacttgcagatttgatttctttttcagttatttgaatatattttttcatttctatgaccatgttacagtttaaatatacaagcagtaaatgttatagtttaaaagtcttggtctttttccttaatttt

SEQ ID NO: 49781 - DNA, 637 bp, Homo sapiens
ggttttaacaccacactgcattattataaagagattagaaaaagaaaatgggcattaattttacttattatagaattccaggctctatcaatgaattgaatcctcttcacctgttccagtctctgctgatttattgtaaaagcccggatagcatttttttaaaatctttcccatgttgcatggaataaatatgtcggtgctggaatgcttaggaattttaaattgttcatatggtctaaaagggaaaagttatttgtttttaagattaacttcttttgagattattgctgtccatatttaggtttcaagtactgaatctaatgggagatttgtgcattgatataacagctgtttcctttcatactctgtagattatgtatctgcctaaarggaggctttgaatgtatcataatcatctatattcttaataatggtaaaaagttgtattcagaggatatctttaacattgtatcaacctaaatgcttcttttattaaatttggattaacatacttgcagatttgatttctttttcagttatttgaatatattttttcatttctatgaccatgttacagtttaaatatacaagcagtaaatgttatagtttaaaagtcttggtctttttccttaatttt

SEQ ID NO: 49782 - DNA, 1677 bp, Homo sapiens
gataaaaaggattatctaatttgaaataatttctacacctctatagcctccagaagttttttctttcttccttttcttctcttttttctttattttttaaagcaatgaataaatgagaaaacatatctttgttctaacagcctaattccaaagacatccatcctaatagaatgtgaaaggtcctgtgtaagacattgcaatgcagacctgtaaatctataactcgcataggtgtgagactccactactagagatgaatgtagactcattttctttctttttttttttttttttgagacggagtctcactctgtcgcccaggctggagtgcagtggcgcgatcttggctcactgmaagctccgcctcctaggttcacgcaattctcccgcctcagcctcccgattagctgggactacaggcgcttgccaccacgcccagctaatttttttgtatttttagtagagacgtgttttagtagagactgtgttagccaggatggtctcgatctcctgacctcgtgatccacccacctcggccccccaaagtgttgggattacaggcgtgagccaccgcgcccggcccccgttttcttaatagccaggagaaaccagtgaatccctcaccctaatttcctcttggaaatattatacagaagcttccttagagctacaaacttactaatatttgaactcacctaaactgccagtgtctttaagattttagtatattattattcaagtgttatgaaacaccatttcagacgttattttcattacatttagagacaaaattccttattcatattgagtcaaggtcaaataacaaaaggaataatttctgatgcttaggatgagacccatctcctaagaacatctcctaatcagaaatggactttagaaattatttcattcgaccacctgtttctcatatgagtaaactgaggtccagcagagtgaaataatttggtaaaaaggttgagctattcttactgaatattctctctcattgtaatttttcttatactcccaatattatttattgattgtatttataatatttgtttattattcaaaaatttaaaactatgataagcttagcctagtcttgattaaagaaagaacggccatcaatctctgtgctggttgattttgtttttgttttttcgtcattactatgcaagacaaggttatgtcccatctgcaccgagagaccctgcataaataaataagcagccctaaccctaaaggagaatgccttctattacaaagatatatttaaccgtgccaatttattttaaaaagttcagttagtaagtcattcactagcaaaccgataatgaaatatgactgtaactcatcaaaaatgagaatgactcacaaaataatgtattcaaaaagtttgtgttagaaaatggaaaaaaataattattttcaactgaatcttcacaaattgactcccttttttaaattgattattgaattgaaagtattttccaagaaaagtgtctgatctctttttaaaaaataagagatcaaattctaaattccatatttatccatctggaaatgttaaggacaggtgaaatggagaaaggcacagtttgggaacaacccacaggaggtataggaaggctatcagaattgtcaggatagtccatggcaatttgggtgcacaaac

SEQ ID NO: 49783 - DNA, 544 bp, Homo sapiens
ttccccaactttaattaaaaatttcagaagtataataaagtgaaaataatattgtagtaaatatccatataccttctaccttgattcagcaattattatcatttggcactagctgcttagtctaaaaatataagcatgaacacatacacacatttttggataataatggaaggtaaattataaacataatgacatttttaaaaaattgtggtaaaataggtataaatgaaatttaccatcttaactgtttttaagtgtatggttcagtaatgttaagtaaactcacatcattgtgaaccagtctccagaactcttttcgtgttgcaaagctaaactctatacactttaaatgacaattccccattcctcgctaccctcagttcctggcaaccactattctactttctatctctataaatctgactactctaagtcccttatacagacaaaatcatatagtacttgtcttttgtgactggcttrtttcatttagcataatgtcctcaaagttcacagacgttgtagcatgtgtcagaatttcctt

SEQ ID NO: 49784 - DNA, 2542 bp, Homo sapiens
tgaattgatcttcattttaaaatctgtaattaaaaaaaaattaccactaaatgagtatccagtatttttagcactattgatataacttagttgtcttcagttttaatgcaaatgttgatttgatagaacatttttagcatctgtactttagagattcccacaaaagtgaaatgttaaatgtactatattttattacttttggaaaaagatacggtccctatcttcaagaaagtagaacttggcagtaacacttatggcttaattagttagcgtatcctgtgttaaaggcattttgggaagtggtgagggtcagtcgggagagagattcagacaaaactcatgtccttggaggagatatggcgtagtgataaagatatatatgtgtaaatttaaaagggcattaatgaagcaattaagaagtgattactgaatgtgaaagactcaacatttagaccttagattaattcactgctattatagcagcattgcctagagaaagcaaatcaagtcagatgaaatagtttggtcatgtagagtgaatcagaaatttaacatgctctggttgggtagaagagtatagcagatacagatgccttttgtgcctagagtcacatctagttggtttactctgatttcagctgcagggaatgcatagtctctgcatgcagatagaaacccactttaaacatttgctgtgtgtgtgcgttttttccgcctactcaattcttgttgcttggaaattgacttagctagtacatgggtatagtgcagaagcactggggagttaaagccccttgcagcaacattgcaccacagggagttggtaggtgaatgccccaacctcctttccattagcgagtggggctgggcagtccaaggcgtgttttacatggttttacagagggtcccctggaggattgagcttctgtggcccttagtggtaatcagctcaaccatatgccattcattggttatttctttttccctgtctagtccccttactcctgcatccaagttcttagataccgctttgggggtaacccaaactaagaagtcggctgtttaatgctgttgttagctcatgcgatatgctacatgtctgattttatcaaacagttgtaaaatgttataaggaaaggggaactgatttttatcagttttatcaaagtgtttggcaggttttaaaaattaatttagtattatttcttaagcttttaaattatgtatattcttgttttttgattacctaatttttagaatttagcattagttaggtgttagactaataggttttatataacaaaagggctrtgtagagatatatgtacatatttatgtttaaagattcttttgtagtgttatttatacttggaaataatcatccaacaagaaatttaagtacgtaagtctacatggtgtaatgtatagctataaatatgcttatagaaaagactataaagttacatttcagttattatagtatgacctcattttttaaaagtatgaaaaaaatatatatatataaatttggagattgtccagaatgttagcagtaattatttctagctgaatgaatctgtttgactaataataattttcttcgaagtatcctacatttaaatgcatttcccatgaaacagttcttctgttatactggaaggaaagaccttttttctttaatccttaggtagctcttgaaaatagtttagtgtgatactcattttaaattattttacaattaacaaagaaaaattaacatatattaacttctgatacatttgtcttaggtttggagctgttcgggatgtttctgtatatttcacatgccctgtatccagaagtgggctaaagacagccagtttcttgtatcttctgtgactgatgatgattttggaaagaaagattgtccctggccttggtaactttttctaattagttggattattattattattttcagatggagttttgctcttgtcacgcaggctggagtgcagtggcgatcttggctcactgcaacctccacctcctgggttcaagagattctcctgtctcatcctcctgagtagctgggattataggcacctgtcactatgcctggctaattttttgtatttttagtagacacagggtttcaccatgtctgccaggctggtcttgaactcctgacctcaggtgacccaccccaaaaaatcccaaagtgccaactaggctggcacgccaccacgcctggcctaattggattattaaattgtagaataaatgaagattgtagattctaagttgctttattggtggtttcaatatccatgttgggcttttaattagtcatttggtgtgtgaagatgtggaatcttgataaagtcttgtttttttcaatttgaatttctataactactagttccttttgataactaataaatcatccagacttaatttttcctgtgcaaaacaattccttaattatcctttgaaaggactttcaattttctttaggactgagaatcattcataattgtgatcttcttgtccagaattctat

SEQ ID NO: 49785 - DNA, 278 bp, Homo sapiens
aaaaatagagtaattttrgccattggttttggcacgtgtacctgaattttcatttctattcattagtgctccagacccctgttctgagtcagtgagaggggaagatgcaggactcccacatataacctgtgtgcagtcctcagttggtgagggagtaattaagatggacttgaagttcaacacaacttgactatattttagacagccttttattttttttacctggccctagcctcctaatcgcctctttcttaaagcatttagttcagaaaattttc

SEQ ID NO: 49786 - DNA, 558 bp, Homo sapiens
ttacgtacttaccagtatttaagtacctatgtgtgcaaggcactcagaaacactgaagacaacaggtggttactataacacttgtcctcttgattcagaattgaaatactccttatctcacctgctcagagcattgaaagacgctgaatcttagctaaacccctcctgaaaaattgcctggagccaaagagagttgccttgcccaagtcatggccccttctaggggtgaagctgctacccaacttaaatgactgggtcatgcaggggtacccgagcctggtttctttgcctcagcacagagtcattcttaagggacatccagcttcaaagctccctgtggaatcagctgaggtctttgttatgactttctctgaccaaactctccctctgctaaaccatgtttttctacaatatktcttcttacactttaagcatgagaatgacagcatcggtttcctgaggagtcgaatgtacagaagtgactatgctagtactgaccgccttatgggtcataaacagcctattttgactgcaaaacaaaatagctttaatttaaaa

SEQ ID NO: 49787 - DNA, 551 bp, Homo sapiens
ggcacaacctaagctaagtgaaactggaagtgagccaggcatggtggctcatgactgwaatcccagcactttgggaggctgaagcagaaggattgcttcaggccagcagtttgaaaccagcctgggcaacatagtgagacccctctgccatctctacaaaaaaaataaaactaaaccagctgagcattatggtatgtgcttgtgatctcagcttctcgggaggcagaggtagaagtatcacttaagcctgggagactgggatcacaccactgcactccagcctgggtgacagagcaagaccctgaaaaaaaaaaaaaggaaagggaagggaagggaagggaagggaatggaaaggaagaaaggaaggaactggaagtggatggagaggagcccagcatgctgcgaatggtgggtatcgagatttccaatggtcagtggtcaactcctccttgccaagtcctccacctagagggtaatgatatctataaccctaaagaacaaggtaggagggagcatgaatctggcttccgaaaacagtagaaaccaaaaca

SEQ ID NO: 49788 - DNA, 605 bp, Homo sapiens
gaaagttctgtcggacagtgctgcctcagaactcaaacttcgagtgtgggtctgtcttgttctttctggtggccccaagccctgccaccttgctgagcacatcgcacgtgttgaataaacagctgtggaaggaatgaaccaatgaatggatctccatttacagaggaggaaaacgtgattaggagaggttaagttaattctgtgggtgtcacaaatatgttggcagaactagggctccaactcaagcctccacctccacacccaggccttgtttagcccctctctgcagctgccttgatttgccaccaacctctgacaggaggaaatggttctcacctgtcaccacagcaagctcctgctggctgattggaaaaccactttacaaaatgacttataatttcccctgtcccccaaggtaaaagggatakaaaacgtgtaaaatgcagaaaattagaaaaggaaaagtcattcattcctccaacactcaaaccagctcagttaacattttggtatgtttcttcacaatcactttgcaatactgaggcttttcccacaagtttgtgtcatttgcttttgaaaaattgattttctagggccaggcatgg

SEQ ID NO: 49789 - DNA, 645 bp, Homo sapiens
tagatctttatacacttgcccaattagtttattagtaaaaattcctagaagtgtgagtattaaagaatacggtttgttaagatttttgactcatattcacaaattgtcctttcaaaaagttactctcagacccgccatcaacaatgtttaagagtattaatattcctacatcttaaaaaaccattgacattatcattgctttcaaatttttcctatttgatagcctaaataaagtatttcattattggaatttgatgtttgtttgattaccacaaagactgactttttccgtgcctttcttattattaaaattatccaatttgttttaggttgttcatcttttcttgttgacttgtaggtctcttttttattaaagatattaatatccagtattgtacatgttttaagtattttctccaaattgtcatttgttcactaatcttttatgggttttcttatgttcccataataaaaaaataaatctaaagtctttyggttctggaaacatggcagactgaggtaacacaatattcctctacctcccatcaatacaaccaaataaaaattacagatcaaaagaaaaattaaatacacagtttttattaaaataaagaaatgaaaatttctttggtgccaaaaaaaaga

SEQ ID NO: 49790 - DNA, 575 bp, Homo sapiens
tgaggtrtgctcttttataattatgaaagcgaacaataatagatgaagaaaattctgtaattaatcaagatttgagaaattagctttgaatacaagtcacagaaacattcttcattaataattcaataagattttccttaatagtttactaaaattttatatgtatattcatacctcttatgcagatgacattctactaggagatatggagaattttaacacataaaatactattttgtggtgacaagagattgacaatttaacatagaagagaatatgttcataatgttcattttttttttctaagaggatttttccttctgcaaagaaaggcactcaaactgatccttaaagaattagaaaaatttagagaagagaaattgaatcagaaaggaaggagaaaagagggaatagtaggagcaaggatatcctggttagaaaggtgtcaatgaaaccaacacagctttccatggcagagggacgtcagggaaattggaacactgggcatcaagggaaagtcatagaacattcttgggagccccaaattgttagatcatttgtctgaatataggatt

SEQ ID NO: 49791 - DNA, 545 bp, Homo sapiens
gaatatatttatatctgggatacattttcatgtataatccaatgactgcaaggcttttttctgaagtataggaatactgatgaagaaagacttgatagctaatatcaattatcagtcataaaattcttrgttaccatttgttaacaagtcctaagttgaaaaacctcttgactaagttggcactagcctaaaatttgctgtacaatgaatataatccagctctaatagaagataactgtatttccaagtatatttaaaatagaaaaaaagagattattgcaataaatctaacatcaaagcaaccaattcatggagcttaattatgacactactaaatgtgaaaatctattcagcgctaggaacacttttcacattacattcacgctaaagattggctgttaagagctcattactggtatttttctaaagagtggtttattaaacacagttacctaataagcatctttggtggtgcaaattgctgaaaacagtaatgagtctgattagacttcatttcaattacgacagcttgtctaggaaaaaaa

SEQ ID NO: 49792 - DNA, 591 bp, Homo sapiens
attgactgaatgaatgtgttaattaatctgaaacgcgcctaaacttttaacagcctgtgtgagagtcagagaggcggagccttcagacttggttagtccagggggcstgggcggctgatgaactttcgaagtaggtcgagcagccgggcgctttgcctgccccgcccgcgctccgcaggatgcaggactccacccggctcaggttcgcagcaggtcccggaagccctcctgggggcggggccaccctaatcggcaggtgggacccagccccagccggggcagggcccctttaacgccccacctctccgccacgactttcgccccggcgtgacgtcaccccagcgggcgaccaatgggagtgcggcttactggcaggcggcgcaggcggccgctgccaaaggggaagtgatctggggctggagcgatggcccggggctggagctcgcggccgccgccgccgcagccgccgccaccaacgccaacaacaacgtgtcgggagcagccgcggccgaagccggagcaggggccggagtcgcggctggagtggggcctgcgcgtgtgagtggccgagagttgcccgtgccggagacc

SEQ ID NO: 49793 - DNA, 660 bp, Homo sapiens
ttgcagcttaggtattgatcctggcccatatagcccagtctgttctgcttccctcacacttttgggttaggttctaatataaattttttaatgctctagaagcacagagggacatgtctcaatggcactgatggcttggagaaattcaggcaaccacaataattataatggaaagtaaacctttgagtggagaggggaagggcaatgaggcagtgggcagagggcacgagaccaagggaacttgcgtacagatgcaaagctgctggaacaagttgtaccttaaagattattttcatgtgtgaaaagaaaatagaagcttgcatatttaagaggaagagatttcaatgtgtaaaagtgaaatgtatacaacaagagtacaagaattaaatgaggaagggcacattaaatatgtggcaatgcttgaagctttaaaatttgctatttacaaagacrtggaatcaacctaggtgtctatcaagggtggattggataaagaaaatgtggtacatatacatcatggaatactatgaagccataaaaaagaacaaaatcatgtcctttgcagcaacacagaagcagctgagccaataccctaagagaatacatgcaggaacagaaaaccaaataccacatgttctcacttataagtagcaattccct

SEQ ID NO: 49794 - DNA, 581 bp, Homo sapiens
aaagggaggagggtataatgaggcattttggctcccttttctcatcatggcctgaactcatttttttcaggttagctttggaatgcccctggctgagaggaggggcccattcagatggttgtggtgccttagaattttatttttggtttacaattcatgggagagtaaatatagtaaaggagagacaaacagtatacaggctccaccactagagcatatgaytctgggcaaattccttatgctctctgtgcctccctttcccccttgacaaaataatgacaatgatatctttatgtgtatgtgagcattcaattaatcaataaatgtaattatgtgtattagttactgttgttgttgatgttcatggagagagtattactgtaaaccccaggaaagacagggactttgttttgactcaccatttaatttctaacatttgttatagcatttcttgaggaataagcactcaataaagattcaagtgggcacagtggctcatgactgtaatcccagctactcaagaggctgaggcaggaggattgcttgaggccaggagtttgagaccagactgggaatcatag

SEQ ID NO: 49795 - DNA, 430 bp, Homo sapiens
ggagatagaactgacaatctccacagaggaaggtctcctgggaggaaggcaggacagctcctcagaaggaggggtcacatcacatttagacctagcacaggacttggtacagaggagcatccattccttaacaatgcactgtggactgaggaccgkgaggggaagctctggggtagggctcacttgccactactccagcacagacccattgtgctacgctggaacccagagagcctgtgccctccccttacctaataggaattagacagatgctaccactaacgggctaaactccccttggtgtttgtcggcttgacatctgtctggattgtgagctgatgaccacgggcacgagcccccgagggaattctttccacccaggggtccagcttacacctgggctggcagaccaaggccacactgcagcctc

SEQ ID NO: 49796 - DNA, 430 bp, Homo sapiens
ggagatagaactgacaatctccacagaggaaggtctcctgggaggaaggcaggacagctcctcagaaggaggggtcacatcacatttagacctagcacaggacttggtacagaggagcatccattccttaacaatgcactgtggactgaggaccgtgaggggaagctctggggtagggctcacttgccactactccagcacagacccattgtgctacgctggaacccagagagcctgtgccctccccttacctaataggaattagacagatgctaccactaacgggctaaactccccttggtgtttgtcggcttgacatctgtctggattgtgagctgatgaccacgggcaygagcccccgagggaattctttccacccaggggtccagcttacacctgggctggcagaccaaggccacactgcagcctc

SEQ ID NO: 49797 - DNA, 532 bp, Homo sapiens
cacacattatttcaaagagaaggtctacataaggcacacaaagggcaagaggtaattaagaccagctcctgtgatggttatctattttgcaaaactgggttaagttctcaatataataaagtgtgagacaaatgtcttcagtgaattaagtgtcaatatagctacaaatgccttcagttctatggaggaagcctcctcattagtttatgggttttatgtgccactataatggattcttcaggaagccaaactcagggtgcaaatacaataacatcatatttattaatagttctcagattcctaagggctcctgtggcagggataccccatgcattcttcttcttgacggggtctcgctctgttgcccaggctggagtgcagtggcaygatcttagctcactgcaacttctgcctccttggttcaagtgattctcatgcctcggcctcctgagtagtccatgcattgttttctaagtcatcctcccatgtatcttcttccaatttcaacttttattcttctagttcctttatt

SEQ ID NO: 49798 - DNA, 557 bp, Homo sapiens
cacagctaataagtcaccaagctcagactcaaaccttaggttattctgactccctagctgtgtccttaatcactgtgctctattgccttatgagatggagcttcacaaagaaattattgccataggaggcaaatcaaaactgtcatttttttttgagaaatcaaaattactgtgctaagtttgtatggatgattaaaaacaccaaaagacagaataaatattttcatctctctgaagggttatcacacagtaawaattagtttagatttttttcatacatcagcattaagaatggaagttttagggtgagcaattcaatctcaatatgagacaagaactagttatatctattccaaatagattactggatgctttagaaggaaataaaggcttctggtcatcatgtgggaatgataattgctcgcaaagatgataacagatttttagataagctgaactaaatggccttaatgttcctttaaaacgaaagattttatgatcctatgataaacagaagctaataaaaggggaaggagaagaaagggggaagaaatact

SEQ ID NO: 49799 - DNA, 590 bp, Homo sapiens
ctctaatgttcaaactcttcatttatagaatgggaaacctataataattgagctacctactcaattatttactgatgtgttcactcagtcacttacttaaacacactctcattctctttttaccagttcatacaattatcaaaaggatgctccatacttggagtaatgctagaatctgaggatgaaaaggttaatcagaaatcattcttgccttcaagcgactcatggtgtaaggggaagggacatgagtggagaaataaattgaaatgtgcagtataccaaatttgcagaacagacgataatataaataacagcattgattccaagataaattaaatatgttttgacaaaagtcaatttcaggatcatgaacatgaacatgtatgtcatgtataatttctttcttttttaaaaaataatttaaccacagttctcagtgagtctcttctttctagtaaagggacatacttgcagggctcaaaaatttatttcagagaaattataggtgtaattgtctattgatttctgaaytctcaaaaaggaatatcacaggattatgtcaaatatggcattgtttgtgattctcatat

SEQ ID NO: 49800 - DNA, 605 bp, Homo sapiens
ggcaataactaaggaaataatagagaatgtttttagtactgattgaagacagatataagcagatttaagraggtcaacaaattctgagtggagtaagaaaagtacaatgaagaaaacaaaaggcaaagccaaaattctgtaaagcagcctgaaaataaggcttattaccattaaataacaacatttcagtctatagaaacttacatcctaggagagggaatactttaaataaaaaagtaatggatgaaaagagaaaaattccatcaagtgggataactgttatccataaagaagtagcaggtgagatggggagtaaaaaaacaaacatatataaatcctcttattttatatattatagctcaattttattcccatctttgataatccaaaaattatacactgatcaatatatctgttctaaatgttaagattccaacaggtagatcatgtctctcaaaatgtgttgcacattgcctcaactggtggttcatgatgcatattaaaataagaaaggcttagagaattcttacagcaaggaaaacaatgtaagtttatttaatttagtgttttagctatatatttaataattattttaggtaggcagt

SEQ ID NO: 49801 - DNA, 599 bp, Homo sapiens
ttgcctcagcttaatggaagaggcaatgtgctataaggaagccatgcagtaaaagttcagtgtttcgagaggtttacctcctgcttctgtgcagattattttatcattagcaagccaaataagccattctcttttgttagataaaatgggattgataataataattaatgataaaaataataacaaaaacaactgctaccaaaacaatggtctgcctgccttaaaagcattagcttctcaaattctagagcataccacaggttgttctttttatggtacatgcttataaaacaatcatcttgattcttaaaaatgaaaccagtctcatccatatyattgtcactgatacaagtgcattttatttgcacttatgtagcatgaaatagtgcatgaaagccttttatggtgataaaataacttcttaactagggtgaaaaaggaaaactgttaacttgggttcacaggactaatgctcacatataattgtatctataaatgtcctagatgctatgatccctcccatatgtgtaatcctcctgttgatgtcaatccaaaatactatgctcatgttacggtatctcctctacatccttattgta

SEQ ID NO: 49802 - DNA, 477 bp, Homo sapiens
aaaaaaaaaaaaaaaaaaaaaaaagtttaaaaaaatcaaagtaggagcataagtgatttacttatggctagatatggtgagaagctaggagagcagtttacttctgaaatgtcggaggagacctcgatcatgattcctggggccttgataattacatggcagcaatgtccatcctagcctggactttatccaccgtggtcttcctggactcagaagctaaatggctccactcatcatccccatatcaaaccttatagtactgtacttttcctggcctgataggtaatttaccaactttcattcattcattcattcatgataagttgtggggtttttttwaaaaaaattcaattttaggaaaaagagagaaagagggaaaaagagacagagataccaaagagagatatcattcaagaagtgtatatatgaatacattacagacttagatttcttatgcaaattcaatccactactaac

SEQ ID NO: 49803 - DNA, 548 bp, Homo sapiens
cacccattgtcctgcacccactgtccracaatccccagtgagatgaacccagtacctcagttggaaatgcagaaatcattcgtcttctgcgtcgcacatgttggaagctgtagactggagctgttcctattcggccatcttggctccacccctcctatgtatttcttaaatctgtcctcttatctccatccaccttccctctgcctttactcaagtgctccttatcttctctcctctctttattgtcagagcctcctaaaaggtcggcctgcttccaatcaccctccatttcagttctaaagtgaaaatctgatcctgcttaaaacttttaagtgcctcactgtcaccatgagacccttcacaattcctccctgcatgtgcacaggccccttctgagtggacccctgggtcatgctctctagcctcacatctcgctgctctccaccttgcagtccaggctccagcaatgcagacccccctccaggactgctctcccaacctccctgtctttatttatgttcctttctcacaggctagaatgctgccca

SEQ ID NO: 49804 - DNA, 539 bp, Homo sapiens
ataaaataaaataaaataaaagtatacatatttgaattttacagctgggagtggaagctcatgcctgtaatcccagcactttgggaggccgaagcaggcggattgcttgagccaaggagttcaagaccmgcctggccaacacggcgaaacctcatctctacaaaaaatatttaaaaattagtgaggtgtggtggcatgcacctgtagtcccaggtacttgggatgctgaggtgggaggattgcttgaggctacaatgattacatcactgttctccagcctgggtgacagagcaagacactgtctcaaaaataattttatacttaaaaaatttaatatagggtatctgattcatcatgaatactagatatcacggctggaatcccagaaaaaaaggtcatctagattttacttaaatgtgtctaatatctgtaggattaacagcagttagaatgtggctcattgtgtggctggacagctcaaatccttcgaaagcttcttgaagttcaaacttctattgagttcacacttctctataatg

SEQ ID NO: 49805 - DNA, 539 bp, Homo sapiens
ataaaataaaataaaataaaagtatacatatttgaattttacagctgggagtggaagctcatgcctgtaatcccagcactttgggaggccgaagcaggcggattgcttgagccaaggagttcaagacccgcctggccaacacggcgaaacctcatctctacaaaaaatatttaaaaattagtgaggtgtggtggcatgcacctgtagtcccaggtacttgggatgctgaggtgggaggattgcttgaggctacaatgattacatcactgttctccagcctgggtgacagagcaagacactgtctcaaaaataattttatacttaaaaaatttaatatagggtatctgattcatcatgaawactagatatcacggctggaatcccagaaaaaaaggtcatctagattttacttaaatgtgtctaatatctgtaggattaacagcagttagaatgtggctcattgtgtggctggacagctcaaatccttcgaaagcttcttgaagttcaaacttctattgagttcacacttctctataatg

SEQ ID NO: 49806 - DNA, 539 bp, Homo sapiens
ataaaataaaataaaataaaagtatacatatttgaattttacagctgggagtggaagctcatgcctgtaatcccagcactttgggaggccgaagcaggcggattgcttgagccaaggagttcaagacccgcctggccaacacggcgaaacctcatctctacaaaaaatatttaaaaattagtgaggtgtggtggcatgcacctgtagtcccaggtacttgggatgctgaggtgggaggattgcttgaggctacaatgattacatcactgttctccagcctgggtgacagagcaagacactgtctcaaaaataattttatacttaaaaaatttaatatagggtatctgattcatcatgaatactagatrtcacggctggaatcccagaaaaaaaggtcatctagattttacttaaatgtgtctaatatctgtaggattaacagcagttagaatgtggctcattgtgtggctggacagctcaaatccttcgaaagcttcttgaagttcaaacttctattgagttcacacttctctataatg

SEQ ID NO: 49807 - DNA, 403 bp, Homo sapiens
tttgtctttctctaggttatacagagtgattactgagtattgctaacatgatgggacagtgctgttcagtagaactttctgctggatggagatgctctgtatctgtgctgcccagtgtggtagctacttgtcacacgtggctattgagcacttgaaacacagttggtgtgaatgaggacacgcattttaaatatsgaattttaatttttattttaaataatcacctgtgactcctgactgctagacctaaggcgagtctacaaacattatgctacatttctgttatttagaagtcaaattacagtaacatccagggaattttccattaatactatgtgcactcttgagaacatatagggggatgataggaggaggaggtggtgatatatgaaataggaatgga

SEQ ID NO: 49808 - DNA, 482 bp, Homo sapiens
aacaaaatttattaaaatagctttatatactctattcttacaggaaaaaatatatacatgagatattttttccttttgacatacactagtgttattaatataatcttaggcaaaaaaaaaaaaaaaaaaaaagaacttgttcattaactacaaagaatcaacttttggttcctgaactatattacttccagaagtcacactactggaaatatattagttacctctgaaggtcacaaaatttcaatcaattttagaatgtcagggctgtctatggmatattccaaacctcgacattcaaagtggcagctgtggcttacagatgatcatctttcaggtccatctctaactgacgcaatttccacagggcagagatgtgcagaaaacttgtatgaggcaaatgtcttctcttgaatgtctctaccactccccctaaacagccactcattgttctctgacatggacagatttgctttaaatcttca

SEQ ID NO: 49809 - DNA, 1340 bp, Homo sapiens
atatgaaaaataaaaataaaataggctattcactgtaaagtgacaatcatattctgtggtattattatattagtcttgagccataacaatgatcctcctccttctctaaggtgagtggatggtaagattatacgcatagtgggaaagctttaccattcaggataaactaagtcaaatgctcagtgttgaccaaggaaaccttaggctaattattctgattcataggttcaattgtgtgatgtcagcttgtctaaaacccggaactgtttcctagatttccgatttccctcatctgtagcaggagtaggaatctagtttagaattggccaaaagagtgatgtgattatgttttagaaagataaaacaaaacagacatcattaatttcagaggatgtaaaatttagatgtagcaacaaaaagataacagaaatgccctgtggctcccaactgatgattgctttcctctactccatgtccggctcatcgtccaacagctgcaccctccgaaactaacattcccagggcaacaagcaggcatttggatgtaacaaacatttaaaaatacgataccaaatctctacaatcccttctaaaaatatagaggcagagggcacacttccttactcattttatgaagccagaattgccctaatagcaaaactagataagagtaatagaaaagggaaactataggatgaaatttttcatgaacatacattaaaaatcctcaagaaagtctggattcagtggcttgtacttgtaatcccaacattttgggaggccaaagaaggaggttcgtttgagcctgggagtttgagaccagggtgggtaacataatgagaccttgcctctactatacacacacacacacacacacacacacacacacacacayatatatatatagagagagagcgagagataatatatatttaaaaatatatattttatgtattatatatttaaagtatatgtatttatatattatatttaaaatatatatacacacatatatgtacacacacagagaaatgtatttcctaatatatctctctgtgtatgtatgtatgtgtatatatatatttaaaaatcctcaacaaaatattagtgaactgaatcaaaaaatgtgtaaaaaattatacactataaccaagtgtaattttttgccagatatgcaaggatgtttgaacattcaaaaaccaattactttaacctatcatattaacaggctaaaggagaaaaattgcaagatcatgtcaatatatacaaattaaaaatttgatagtccaacactcagttatgataaaaacattttgcaaacaaacaatagagataaattt

SEQ ID NO: 49810 - DNA, 1340 bp, Homo sapiens
atatgaaaaataaaaataaaataggctattcactgtaaagtgacaatcatattctgtggtattattatattagtcttgagccataacaatgatcctcctccttctctaaggtgagtggatggtaagattatacgcatagtgggaaagctttaccattcaggataaactaagtcaaatgctcagtgttgaccaaggaaaccttaggctaattattctgattcataggttcaattgtgtgatgtcagcttgtctaaaacccggaactgtttcctagatttccgatttccctcatctgtagcaggagtaggaatctagtttagaattggccaaaagagtgatgtgattatgttttagaaagataaaacaaaacagacatcattaatttcagaggatgtaaaatttagatgtagcaacaaaaagataacagaaatgccctgtggctcccaactgatgattgctttcctctactccatgtccggctcatcgtccaacagctgcaccctccgaaactaacattcccagggcaacaagcaggcatttggatgtaacaaacatttaaaaatacgataccaaatctctacaatcccttctaaaaatatagaggcagagggcacacttccttactcattttatgaagccagaattgccctaatagcaaaactagataagagtaatagaaaagggaaactataggatgaaatttttcatgaacatacattaaaaatcctcaagaaagtctggattcagtggcttgtacttgtaatcccaacattttgggaggccaaagaaggaggttcgtttgagcctgggagtttgagaccagggtgggtaacataatgagaccttgcctctactatacacacacacacacacacacacacacacacacacacatatatatatatagagagagagcgagagataatatatatttaaaaatatatattttatgtattatatatttaaagtatatgtatttatatattatatttaaaatatatatacacacatatatgtacacacacagagaaatstatttcctaatatatctctctgtgtatgtatgtatgtgtatatatatatttaaaaatcctcaacaaaatattagtgaactgaatcaaaaaatgtgtaaaaaattatacactataaccaagtgtaattttttgccagatatgcaaggatgtttgaacattcaaaaaccaattactttaacctatcatattaacaggctaaaggagaaaaattgcaagatcatgtcaatatatacaaattaaaaatttgatagtccaacactcagttatgataaaaacattttgcaaacaaacaatagagataaattt

SEQ ID NO: 49811 - DNA, 562 bp, Homo sapiens
cctacagtgagctgcagccrctacctggcagctggcagcataagacacctcttatggttggcttccctccatacctttgcagcaagttccgaagcacagcaccaatcagcagactttgcagcaagttccaaggtgtagcaccaaccaacaggcagctcccccagcaccagagagggccgattctcagtaacatcagtgtagcagctcagcaaacctttccaccttcccatgagccacagctgcaccctttccaataaggtctggatttcagccctagagtatgagtggaggtcctcctcttccagatttgttctcttcttgaacactctatctcagccttatggatggcagaagctccctttatctatttatgtatcctttggcattttctttaccgattgctagcccatcatccattactccagtcccccattataattatattaaactgttcctgtgcaaactactctgtggcttttgcctcctgagtggaccctggctgatatctggggttcagcagagagcttcagacagaatgtatatccttgggagctgtcagcaa

SEQ ID NO: 49812 - DNA, 559 bp, Homo sapiens
taatttaaattattctttaatagggttagtagcttaatagatcagggggtattagagacactacagacaggggatggatttaagccaggcatttgacaagtcttctgatatttttcttgttgacaagacaattaacataagctagatttcaagcaatttctgcttgaggaaaagttgatgataatgtgtaaataatttgaaaaatcaaaataatgataagtatttatttagaattattcatatgcaagccactgccatatgctttacatgtatgctccaacattcttaattctcatagtctatgaaatcttatacacatcctttatattagaaaactgaggcaaaatgaggttaaatactttatacaaggtcttgtgaatagtaaygggcaaagtcacactgcaaacccagtaagtttaatttcaaaattacacccttaaccgctatgtgatatatcacttcccttgttctgcacctttaggcattttaattaattatagcaatgaaaattgtgccataagctgtatctgaagtaatagaagatattctgagcaatgca

SEQ ID NO: 49813 - DNA, 1079 bp, Homo sapiens
gcgcccggccttggctgaatcctttacctctgagtcactgagaggagctccctttgcaaagggagcacaccatgatttctctacatcttccctgccctccttttgagatgcaatttatgtcctgcgaagagatccactgaggctggggaactgaccttgcagcagacgttagacagtggctcactggaacagcaagctggatgaaggggctgccaagaagatctgcagctactgaactactatatggggccaagtcacctggtgggaccctccatgagcactattttggcaggagaatgatccacaagtccatgcagcaatagctggcatcatcagagtttatcggggcacaataggaacaggaagacaaggcacatcacctagagaccagcagacaccagctaaagcccagaaggagactgtggatttyttccctgccattccccacactgccttaaagatccagaagctgctcagcttcataaacctggacgccttcttagggaaacattcaagaaagcctgggagactaaacatttctatttgaagaaaaattaaacacagggactgcataaattaatatgttgcagtcaactgtaaatggtgaaggagtaagaacaaatattcaacacacacacacacgtgcacacacacgcacacacatacatgcacacatacgcacgcatgttctcatatacattttaaccagcaggtggaggatggagctttggccagtagagatgtccatcttcagaactgcctatagctggtctgacagaggggtcaggccagaggccgcctgaagctcatggaagctgggcaggtatgggccaggtagaaaaggctttttcaaagggaggtttcctcgatgaggaagccaaccaggtggaggatgcagtaaccctgattcagagcctttgtaggtgggaaggccatggaacacatctgaagggacttgaggcttcaaagaaacagtcatccaaaacttctgcccttttccttcttgttccatggctaatctctatgttatagattaatagtctgagtaagtctcagtctttaaatgtctctcagtaatt

SEQ ID NO: 49814 - DNA, 570 bp, Homo sapiens
caggatggtggagagtgacattccgaaaggcagggccggggcagagcttgctggggaggagtggctggctctgtgtgcatggctggtgggtgcacctctgtatccctgcatgagggtttgtcctccctgccactccggaaggggataacaaagcagaagagacctggcttttaattctaaaggacaaaaggaagggctcttgtcaacagtggagcacacgtatcctcacatctgcacttggtgctgtgcacacagcctttgctttgactcggagtggagggtggagagagcaggatggagaggaaagagggctccatgtagagagtgacaggttaaaaggagagaaagaagaatgtgtaattcactctgttcattattataacaatcgcaaaattgggccagggaggacaaattaggccgcggcatctgcattgacgtgtcttagcttacgtttccccygtgctctagtgttatatatttatggaaatgtcaggcttgcgttgcactgttaactttcttacacggtgacttattttcagtcatccaaagtagaaagattctaattggtgt

SEQ ID NO: 49815 - DNA, 619 bp, Homo sapiens
aagtacaagatgaccaatggattctattgtaacagaatgaaaagttcattgatatggcttcagatttcttaatacaactaacctttaatgaattatcacttgccaagttttgttgtagtatcagaaaatatctataagtatctgaaaaagctattaaaatgcttctactttccaactacttattcatgtgattctggattttattactgtacttcagccagaacagtgtatttcaacagactgaatgtagaagcagaaataagaattcgacttccttcttttcagataaacattaaagagatttgcaaaaatgtaaaatgaattcataatttattcacaatttttttgtttggaaagtatagttttttttaataaaatatatcatktaggttaacatataatagatttattattttcaaaagaatcaaatatttgaaaattttctcagttttcacttgtaagtattaataattataatccacataaaaactgttggggcaagggtcttcaataaattttaattatataaagggatactgagacaaccaaagggtttgagaattgctggcttagagtgtaccttgttctatagttaagcccagactctcacatttaaggc

SEQ ID NO: 49816 - DNA, 635 bp, Homo sapiens
tgagtttaatggcagtaggtaagatgagtggagataagaaagagataaggtacagagcttatttcagatgcacgaggtgatgcagaactggattgaagtccttcctctttcctccaaccattctttttagtttcaaggagaatgcttaggctgggtacagtggcttgcacctgtaatcctagcactttggaatgctgaggcaggggattgctttagcccagcggtttgagaccagttgggcaacatagggagaacccatctctatagaaaataggaaaaatttagccaggctggtgtgtgctggaggtcccagctacttgggaggctgaggtgggaggatcwattaagcccaggaggtcaacactgcaatgagccatgatcacaccactgcaccctgcctgagtgacagagcgagacactttctcaaaaaaaaacaaaggagaatgctttatttatttaagcttgtcttaaaggaagagcagagtttgccagtaaagaaggagaataatgccatctaggtgaagggaatggcagaatgcaggcaaagagatgatggcatgctcctgaaatcttaactaatttgctcaaaatcacactattaatagtagccaagttctagaatccagatttctaat

SEQ ID NO: 49817 - DNA, 612 bp, Homo sapiens
atgtcaagccaagcacaaatatttaaatagccactggagatcccaaaacacactttcgagagcatgcttaaagaacttattggccaggcgcagtggttcgtacctgtaatcccaacactttgggatgctgagatgggaggatcacttgaggttaggagttcaagaccagcctgggcaacgtagtgagatctcacttctacaaaaaaaaaataataaaaactaatttaatatcaatattgtgactaaataatatcacaaacctgtcacctagcaatcacataaaaagcaattagtgataagagagaatttttaatcaaggaagaaaataataccatstaagaaaaaaataacttcaggaaaggaagtgggagccaagataaagtagtgccagtagagaatactttgtcaaaactattttttttctgcaacagaaatatcaagcatattgtttggtcataatgccttaacctcttcttagtgaaatgcattcaactaaaactttaggttatatatcataaaacttgacttcacttctgtaatggaattctgtgggaagaaatcattaacctgattggcatttgctttatagttcatgatttcgggaatttgagg

SEQ ID NO: 49818 - DNA, 1051 bp, Homo sapiens
tgaaaggttaattcatttgcctgtagtaatagggtcagctctcctaatattagactacaaaagatttgaattcccaaagagaacttttacttcctcacaccaatacactcccagccttctaaactaatctccctttctagcattaattttaatatgtttattttttacaataacccayggcaattgatagattttcaaaggactgaagttgaagccataactaacattttgggggataaattctttttaatccgtattcattcctagtatttcttacactcttctgaaatgtggaagtggaaacctttcaattacccaggggtcaatcagcatagctcaaaaacaaaaaacttcttgacatgacctctcaggccctgcctggtctgtctctcacctgtttttactttgtcctctcccaacacacaactttcccacctctctgctccagtcacacctgttctatttcagtctcttgtatttgtcatgttccctcctgccgcaggcttttgcacatactacttcctctgcttgttctattctttcctccccttatcacctaattaacttctattcattcttcagataacaatatgaccaatacttcctttgtaaggctttccctgacattcctaactaggctatgtgcccctattataagatctctttcacagcatttattgctgatgcattttatatgattatctgcctgaaaaatccatcagtctcaatctctaaattgtgtgcttcatgatggcaggggccatgcctgtttttgttgatgattagtatccccagtacctacatcaatgtctggcacatggtaaatattcaataaatatttaacaaatgaattgattgatccaaacatattggatttgcttgaactgctagattttcaaaactatacagcttctccaggaggagagcaagacacaagtgactctccaagtcttcccattccttcctgctcagaattcttgataaaagcaagaataatcagtagcatattgcaaagataatgaggaaaaaacatgaggctgtaaagctctca

SEQ ID NO: 49819 - DNA, 548 bp, Homo sapiens
ctcaggaagcggaggcaggaggatggcttgagcccaggaggtgaaggctacagtgagccaagatcatgccactgcacttcagcttgggcaacagagtgagacccgtctcaaaaaaagataaaactggaaaagtgggccatgaggatggaggagctcaaatgccagaggaaggagtctattctgatctcagtaggtatgggaatgtcattgaagtttctgagcaaattagaggcctgacagttactgtctatcagaacctaatctgtccacatgtatagtwggaacacatagatcaacaggtttatgagatcacctaagcacaaaaatgatgacagtaaaaatggaaagacaagagtaaaaatgagagcagaagaggcaaaattggcaggacttggcaattggtttgtatgtcagtgtggagagaataaaaggtgacactgagtttcctaggtgggtgcccgggaatacagcagatccagtaataaatcaggaaggtaagataagggacttgtttcagaaaaaaggaggaaaggaaggaaggaaggaag

SEQ ID NO: 49820 - DNA, 662 bp, Homo sapiens
  misc_feature (1)...(662): n = A,T,C or G
ttagaatgttggagctgaaaggtcctttagaggtcactagtctgtaagtccagaaggggcttatccagggtcattcagccagttnagtgcaagggccagaactggaacccagaatctatatactaaaatagtcattacatatactattttactattttatgttatttttgataacataatacaaaacattcttttttttttttttttttttttttgagatggagtctcactctgttgcccaggctggagtgcagtggcatgatcttggctcactgcaacctccgcttcccaggttcaagcaattctcccacttcagtctccctagtagctgggactacaggcatgcgccaatatgcctggctaatgtttgtttttattttttattttttttagtagagacggggtttcaccacgttggccaggctggtctcaaactcctaacctcaggtgatccgtgcaccttggcctcccaaagtgctgggattacaggcgtaagccaccgcscccagccccttctgagattataagttttctgagagtagctacttctgagcacctcctgagtctaaggtatgatccttcaaggaaaagtacttcttttgtatcctccgtgacatttagtactataactctttctcagaaggtgttcagtaagtacctat

SEQ ID NO: 49821 - DNA, 565 bp, Homo sapiens
gagtgatgacagcgccctgrggcagtgttctgttgtctgtgactccctaaagcatattctgggggcaaagaagagtcagggggacatacctgcaggagaaacactgcaccattcacccccaaatagggtataggatgtggctggcagccaggcaccaaggctgactgcataactggactgtgccaggcttgtaagctgccataatatgaccatgaatgggattctctttataaacgctaaatgggcaaaggcatttatgaagcaccctgggcatgcagggcaggtggaggcctctgtggctggttggttgcgctgagcagaaagggttagtgataatgtgtgtaaactgcctgggacatgatggatcctcagtaagtgctggcagatactgaccacaggaaagaagtttgggggttggagggtggaggggtggcattagggtatgtgagccgctccccatgcttcacctcccctctcccctcaagcactgggagccacacgctcagagcaccaccaacttacattggtgattatgtcgccgttgagttcggtcacagacttgatg

SEQ ID NO: 49822 - DNA, 565 bp, Homo sapiens
gagtgatgacagcgccctgaggcagtgttctgttgtctgtgactccctaaagcatattctgggggcaaagaagagtcagggggacatacctgcaggagaaacactgcaccattcacccccaaatagggtataggatgtggctggcagccaggcaccaaggctgactgcataactggactgtgccaggcttgtaagctgccataatatgaccatgaatgggattctctttataaacgctaaatgggcaaaggcatttatgaagcaccctgggcatgcagggcaggtggaggcctctgtggctggttggttgcgctgagcagaaaggrttagtgataatgtgtgtaaactgcctgggacatgatggatcctcagtaagtgctggcagatactgaccacaggaaagaagtttgggggttggagggtggaggggtggcattagggtatgtgagccgctccccatgcttcacctcccctctcccctcaagcactgggagccacacgctcagagcaccaccaacttacattggtgattatgtcgccgttgagttcggtcacagacttgatg

SEQ ID NO: 49823 - DNA, 565 bp, Homo sapiens
gagtgatgacagcgccctgaggcagtgttctgttgtctgtgactccctaaagcatattctgggggcaaagaagagtcagggggacatacctgcaggagaaacactgcaccattcacccccaaatagggtataggatgtggctggcagccaggcaccaaggctgactgcataactggactgtgccaggcttgtaagctgccataatatgaccatgaatgggattctctttataaacgctaaatgggcaaaggcatttatgaagcaccctgggcatgcagggcaggtggaggcctctgtggctggttggttgcgctgagcagaaagggttagtgataatgtgtgtaaactgcctgggacatgatggatcctcagtwagtgctggcagatactgaccacaggaaagaagtttgggggttggagggtggaggggtggcattagggtatgtgagccgctccccatgcttcacctcccctctcccctcaagcactgggagccacacgctcagagcaccaccaacttacattggtgattatgtcgccgttgagttcggtcacagacttgatg

SEQ ID NO: 49824 - DNA, 1840 bp, Homo sapiens
tccactgatatgtttgaaagttgtctaaacgatatctgctcagaagtctgtcttcaagagtctgttatctggatagtcagtagtttaagtacctagtacagtctcttacttaagtctctaaaactgttttacttgttgaagaaaaaatctctgatttttggttttggcagagacttcaggcaagcatcaggttcaaatgaaaactgtctgtggatgatggttatttaaaatggctgtacttaayttattcctaataacagttaaatttgagaggtcgaatgagggttcaaaataagcataatgcaagtgacaaaaaaattgtttctgaggcatacaaaacaaacaacaacacacttccaaaatcaaagttagacaaaatattcctaaggtcaataattaagcctgttttcaagacattgaatatcacatctgatttacacaaatgtatgaacatgatttttattaagagaaaaactcaagatatgtgataaagtggttctgagacttaattttatagatcaagtatgtaaagcaaaaaagatgcaataagtccagagtagggcctagacatctgtatttctctcaaactccaagggtaagtctgatatgtatgcccaattgagaaaattgagaactagtgtctaacagatgttatatttgaattaaaaaggtattactatcatcaattgacattttaaataataactgaaattatgactactatttattatcaaatattgggcaaagcaggaagctgtaagctatacaaaaactggacaaatattccaaagagctatgataactgtttctcttgagattgaaacatattatggacagcgaggacattaacaactctctctaaacttccataaagcatgtaatttcttaaatattgatattaataatattttacctatacaaagttaggtcaatgaaggctgagaatcaataactattcccatgcaactgttatcatagtaacacatcaaacaaaccaaatgctttctagtatttctatttataaggtgaaaaaaatattttattttccaggtgccctttgggctatctcaaaatattttcaggtataaaagatatcctgacaattgcattcattttttatgtatttagaatctgatttgaagaatgcaagaaagaaaatagaagaggagatttagatacttgattaagatatggtctgataaacaatacttgttacatatttaataaaagttataataaaatgcttttttaaaaaaataggctccacaattaaaaagaacattagctcttttataattgaaaatattttcatattgtggacaaaggtgttaatctataacccaaggaagaagaaagactataaaaattgaacaaactgtacaattttaacacattttacagactttttttcagtctcaggtatgataaatcaaggcgaataaaatttactttccaagttttcctatgttttgctgtcgtcttattttaaaaatatctatatatctaatgattatgtattaattaacacaactttatatcaatcagttttttttttatttttttttttctgagacggagtctcgctgtagcccaggctggagtgcagtggtgcaatctcggctcactgcaaactccgccttccgggttcacgccattctgctgcctcagcgtcctgagtagctgggactacagacgcccgccaccatgcccagctaattttttttcgtatttttagtagagacggggtttcaccgtgttagccaggatggtctcacatcctgacctcgtgatccgcctgcctcggcctcccaaagtgctgggattacaggcgtgagccacc

SEQ ID NO: 49825 - DNA, 1764 bp, Homo sapiens
catgtggaattactttctattaccagagtgtgcagctattccttttatcactagggctctgtgtatgttgctttttccacctaggacactcttcctccccttaccaggctagcttctattcatatttcaggtcttaggttaagtgtaatctccaggaggcatttcttgatttctcaagttccaattaggtgattctatagtatccccaaatgtattgtacttgctgtttatttatctgtrtctcctactagccaaaaagccttatgagggccagaatcttgtctgattacttgataattatgcctcccaaattggcacacaggctgaagcattgtgggtactcagcaaaaagtagttaaatgaagaatagtgtcaaatgcaacaggaaggtctaaagttagagattgcccatcatccatgagtttggcaatctagtggactctgatgaccttacaggggcagtttcagtggagaagtggcagcaaaagctagcgccaagtgggcaatgaggaagtagaaatgggaagtgcattgggaatcacacccctcctaactctgttgctggccaaaatatttcagtcaggtcagcgggcaggagaggcagtggaaacacaaatgtattagatacctgagacattcgtttgtaaaaagtggtgtcccaaagaagggcaaagtgacagttgacacacacaggaaaaataagaggaggcaaagatgctaaggcaccaactttaaggcacacttttccataagccacagaaggtacagtgcctggggtccacaaaaatgtttaattttcatttcttttaaagttagaataaaaattactctaatcataacatatctgtaataataaattcagtcatgattatgtttgtctttataataaaatacaatttttaatgttaattgttggaggaaggaggtcacaaaggcaaaagtgcccagagctcagggaggacataatgcagctgtgagcgactttgctgattttacaatctagtcttgcttgtgagattcatttggcatgaactaggtcaccccctttcttctctcagcctctggctcccaccttagctctctcatacttccggggtcaacctggggtgggtgactacatgctctgatattgagggcactttggtctgaaaaggtcttgttagaggttcttgacaaggctaaaggtgatattgcttttaataatttctacaaagatattgagttcagcctttgggcatgtctgtcttagtttctcctcagggcaaacacagtctagatgatacagataccatctttctggaaatgttgagagagagaagacccagataactctgccagtgtggcacagtatgcgtaaacaagaagtgctgactttgttctatgaggcaattcgaaactatcataaatgactcaatagataaactaacttggggaaattaaaaggggcccatgggcaatgattacttcccctttaaggaagctaaggaccaaagaaacttaccagaaaacactttaacttgcagactcatttcccaacaaggtagtctttgttccaaatagaagtctcatttgctttagataatgtagaccatcaaattgtgtgatttcttaattttacaggaatctcaatgtttcttgtaaaagagatgaagtttttctggctcctggtgtacaaggagggcagaggtcaaaacgaggacttctatctcccaaagcttttccttttggaaaccacctgccaccaacacagaacaaagccacagt

SEQ ID NO: 49826 - DNA, 491 bp, Homo sapiens
agaaatgtaaattccctcatttctctaactaatggtttaccaatatctccagtaatcagggtagaggtgtaccacatggttgaccatgttttatgatggaaggagcataacctacttagaaaagtccatctgaagaaagaaagcttggtgaagagtcatttgcttctaaaaaatgttartcaactcatctttctggagttaacagtgataaccaaacagaaaaaaatacttgactcaaagtcctgttaatggggcagttcagtaaattgtatggaagtgtatacaattctatacagctatcgcaccagtgaaggtgaaatgtcatatgggtcaaggaaagtgagagaaggcaggaaggtgttaccaacacacactgagggtgtcaccagagcatcttctgtagatcaaataaagcccatcagcacataactagatggtgatgaggctgagagagcatgaaggatgtgagttcagtgcaatgcaaactgaca

SEQ ID NO: 49827 - DNA, 647 bp, Homo sapiens
ttaaatataaatacagtaacagtaggctgggtgcagtggctcatgcctgtaatcccagcactttgggaggccgaggcgggcagatcacttgaggtcaggagtttgagaccagcctggccaacatggtgaaaccccgtctctaccaaaaatacaaaaattagccaggcgtggtggtgggcacctgtaatcccacctgctcaggaggctgaggcaggagaatcgcctgaacttgggaggcggaggttgcagtgagctgagatcatgccactgccctactgtccgaccaacaaagtgaaactccatctcaaaaaataaataaaataagaactctgatggtgactattgcagtataagggtgagtcatttatttactaagaacgcttttaatgtactaaaattaattttactaatgaatttaaaaattaaaacagcgatgcagacatatggaccgcattgtrtaaacatataacatggtatgaaatgagcagtcactctctgccactctggatgccagccactgtcgctggtttgctgcttgtctttccccagaagcgtttgccatttcgagactattttaaaatgctgacttacagttcatggagagtagcatgatgccatctacatcatgcctctgactttttaaaaaa

SEQ ID NO: 49828 - DNA, 610 bp, Homo sapiens
tttgtaacatcggaaacctgtactcaaaggaaattttaaattaaagactaatttataaaaagataaaaatctgagttgctatggtgaaacagaaaaataggacccaaagcctcccagttttgcctcttccctattccctttcacttcctcatgagtccctacctggaatcccagttagaaaatctctatgcaaaaccatcagtaagctgatgcagcaggcagcaggaatgcagcatcccaggccaagtrggagtggagaatgatgtcagggacaacgttaagatgagtgatgcgagagccttaaatcagatcatagacaggataacctcccctgtctccttttccatttatccactggagctttcttactgaaaaatacttgacttctgatctcttaactatgtgtggaatcaccagtgagcacaccccaaagtgattaatttggtatgaaggaaaggtggtgtctgagcatgggatggagacagagaaattcctggcacatttttttctctgaattagcagtgttggggttgagcaattgaggaataatttccacccaactgtaggaccaaatactattttgaatgaccggggaatagaatgaaataca

SEQ ID NO: 49829 - DNA, 610 bp, Homo sapiens
tttgtaacatcggaaacctgtactcaaaggaaattttaaattaaagactaatttataaaaagataaaaatctgagttgctatggtgaaacagaaaaataggacccaaagcctcccagttttgcctcttccctattccctttcacttcctcatgagtccctacctggaatcccagttagaaaatctctatgcaaaaccatcagtaagctgatgcagcaggcagcaggaatgcagcatcccaggccaagtgggagtggagaatgatgtcagggacaacgttaagatgartgatgcgagagccttaaatcagatcatagacaggataacctcccctgtctccttttccatttatccactggagctttcttactgaaaaatacttgacttctgatctcttaactatgtgtggaatcaccagtgagcacaccccaaagtgattaatttggtatgaaggaaaggtggtgtctgagcatgggatggagacagagaaattcctggcacatttttttctctgaattagcagtgttggggttgagcaattgaggaataatttccacccaactgtaggaccaaatactattttgaatgaccggggaatagaatgaaataca

SEQ ID NO: 49830 - DNA, 610 bp, Homo sapiens
tttgtaacatcggaaacctgtactcaaaggaaattttaaattaaagactaatttataaaaagataaaaatctgagttgctatggtgaaacagaaaaataggacccaaagcctcccagttttgcctcttccctattccctttcacttcctcatgagtccctacctggaatcccagttagaaaatctctatgcaaaaccatcagtaagctgatgcagcaggcagcaggaatgcagcatcccaggccaagtgggagtggagaatgatgtcagggacaacgttaagatgagtgatgcgagagccttaaatcagatcatagacaggataacctcccctgtctccttttccatttatccactggagctttcttactgaaaaatacttgacttctgatctcttaactatgtgtggaatcaccagtgagcacaccccaaagtgrttaatttggtatgaaggaaaggtggtgtctgagcatgggatggagacagagaaattcctggcacatttttttctctgaattagcagtgttggggttgagcaattgaggaataatttccacccaactgtaggaccaaatactattttgaatgaccggggaatagaatgaaataca

SEQ ID NO: 49831 - DNA, 568 bp, Homo sapiens
ggttgcagtcttgtagtgctactactgctaatgctttgttaagttaatgaagaaggagaggaaagctgaccgatgatggttgaggtatgctgcttttggacttgttagaaaactatccagcagtcacatatgtggctatagccacatcactagaatctacaaggcaagactcttgttttgcatagtgtcacattctcagagcctaaaaataatatgtggcacattgtcaccactcaatgtttttgaactaaattaatcagacctaaaatcaatttgagtaatcaccaccagtgggttgcctcttcagctcctgaattcagtaggacacmcttctaaaacacaggtcttcagaccatcttactccatgacaaagtgttcttaggtcctggcaagcatccttctcagacattcctggctgctcatttttgggaaatcaggccacaggctaacacttttctcaaaacttaacaaaacaaaaaaatatagtcagacatttgaactgcttgctttctagaccagcagataggagaagtttaggtaataagatgtcacatattggcttctctca

SEQ ID NO: 49832 - DNA, 511 bp, Homo sapiens
caagaagttacattgcatgtctctatatttattcttttctcttcctaggtaaaattgtatatatagtcttttcacgcaaatcttacacktaagaaaaactattcccagcagatgacatgattgtatatttagaaaatcccaacgtctcagcccaaaatctccttaagctggtaagcaacttcagcaaagtctcaggatacaaaatcaatgtgcaaaaatctcaagcattcctatacacgaataacagacaatcagagagcaaaatcatgagtgaaccactcacgattgctacaaagagaataaaatacctaggaatacaacttacaagggatgtgaagaacctcttcaaggagaactacaaaccactgctcaaggaaataacagaggacacaaacaaatggaagaacattccatgctcatgaataggaagaatcaaaatcgtgcaaatggccatactgcccaaagtaatttatagactcaattctatccccatcaagcgaccattgacttt

SEQ ID NO: 49833 - DNA, 511 bp, Homo sapiens
caagaagttacattgcatgtctctatatttattcttttctcttcctaggtaaaattgtatatatagtcttttcacgcaaatcttacacgtaagaaaaactattcccagcagatgacatgattgtatatttagaaaatcccaacgtctcagcccaaaatctccttaagctggtaagcaacttcagcaaagtctcaggatacaaaatcaatgtgcaaaaatctcaagcattcctatacacgaataacagacaatcagagagcaaaatcatgagtgaaccactcacgattgctacaaagagaataaaatacctaggaatacaacttacaagggatgtgaagaacctcttcaaggagaactacaaaccactgctcaaggaaataacagaggacacaaacaaatggaagaacattccatgctcatgaataggaagaatcaaaatcgtgcaaatggccatactgcccaaagtaatttatagactcaatkctatccccatcaagcgaccattgacttt

SEQ ID NO: 49834 - DNA, 1629 bp, Homo sapiens
aaggtgcactcacacctgaacctaagattttcaatttagacaaggcctcgcttggaaaataaaacttatgtcacaggaagaaagggcatgaagcagaaaaggtgttttatttctagaacatttgtaggtaatatggaaagaaactcttgagcctggttgttggtaggctcagagcttggctctgacccaagtcagagccagagatattttaagttttagcatctttccccaaagaaagctcaccatggtgaaaccgcccccataaagtttacaagaattacatgctggattctgggcagaaaaaaatagttataattaagcattaatcaggatgcactttggttgagtcagatggggctgactttacgtgtctgtgctgaatccaaggtctaatccccatgagttttatggagragtgagtttccagcaagacttcatgtgatctgttctactgaggctttacctagttgtcaggatgctggctttccaggtcttcaataacatccagtctccaggctgactagggtgaaagggcacatttgtaggaaacagcaatctgctagaagcaaatttatgaatggcaggagaatcaggcctaaggattgcacatacctgacagtgtctcactcttttttgtgtatattattggggtcctttattccaagggtggagcatgggaagggcatcccatatagcatttcaaaaggactaaatttgatcctgattttaagagccactcttactctgagcagggaaataggcaaagccttattccaggtcaagttggtttcctgacaaatcttaactaaagccttttctcaggacatgattcattttttcactcttctttgtgggtcctccaggctgtgtggaatttccatgttatgccaaggacttgagagacatccttagtgactttagccacaaaggtggcaccattgtcactctgattagaaatgggcaagccaaactgagggatgattgtttttaaagcagagccttagcaacttcagatatcttctctgctctgcaatagaatgcctcaatctatccttaaaaagaatctacaaacatgagcagatatttaaagtttcctgccaccctcagcatcatggtgaagtcaatctaccagccccaagttggcccttcactccgtgcctggactccttgtatcatgggtggagggccagtttttgggttactccagacccaggagagacacttctgtatgaccatttgaaaaatcttatgcatacatgggtgaacaatatatctctgactccaatggagaagggcatcccacctatactgagtggttccctgagtatgtccaacaatgccatccatgaggcattcagatactaggaatatcccctcttggttatgtatccatccatcctgtgtttttcaactggggtcaaaaccccaatcgagtgctcttttagatcctcctctgagtatgtaggtagttcaaggtcaaggattattccaggtgttaatggtgttagtaaagtttgggggatcttttctcttgctgcggtctttgcagccttatctgattattgctttttgccaccaaactgtctgtctgttgatgcccaacgcaatgaactacagccacttctttgg

SEQ ID NO: 49835 - DNA, 612 bp, Homo sapiens
caaattgtttctaaaattacattttattgtatcttgctgttcctttcatacagtaagcataaaaatgttttgtggctgggcgcggtggctcacgcctgtaatcccagcactctgggaggccgaggcgggtggatcacgagatcaggatatcgagaccatcctggctaacacggtgaaaccccatctctactaaaaaaatacaaaaaattagccgggcgtagtggcgggcgcctgtagtcccagctactcaggaggctgaggcaggagaatggcatgaacctgggaggcagagcttgcagtgagccaagatcacgccactgctctccagcctgggcaacgaagcaasactccgtctcaaaaaaaaaaaaaaaaagttttgttagcctacccaggcgacagtcatttttctcaggtgaccctgatttatctggctcttgtaaggcttcaggcatcaagaaaagttttggtaggcctgaagccttctggtaaaattcctgtgtgtttggtacttaaatgcttcaactaaaatgaattgaagcaaatttttaactaatatggtaactgtatctatattttttctctatgacaattgttaaagtttttccaatccaa

SEQ ID NO: 49836 - DNA, 625 bp, Homo sapiens
ctgaatagtatcaccacttacttttgaaaatgaatgtttcttggaggagcacctcctcattgtggctgaatgtgcctagccaaaacttccattctaacatcagtttacaagagattttatttatatcatagcttaaatatatgtaacagtagagaaaaaaaattaagtgtgtcaaataagaaaaatattgaataaaaactattataaacatttatctgccttgaacactaaagggttgtcttttagcaaaaagaacagtctccaatttttgcctagctttaaccattgtgaaacacagagagaagtccaaggggtagctaggctctgctgcagtcaagagtctgggacaaccagttccagagctctgcaaacacaatacccagtggggcccaacccagcactgtgttacagagctcacatgatccagccccagacctggcttgcagctttggatcatgtagcctttttctagagtgagattcactgcagtgtttatatgagctcccaggtagggcatcagaatgactatgcatccaactgtcatgttccagtttttttcttgaagcttaagcaaagttttaactatgtcctggtaagctartgtgtaaaagctatgctctttcaa

SEQ ID NO: 49837 - DNA, 519 bp, Homo sapiens
ccagcctggccagcatggtgaaaccctgtctctactaaaaatacaaaaattagctgggcatggtggcatgcacctgtaatcccagctactcgggaagttgaggcaggaaatcacttgaacttaggaggcggaggttgcagtgagctgagatcgcaccactgcactccagcctggacaacagagcctgacgccatctcaaaaaaaaaaaaaaaaaaaaaaaaaaggaacgaaatgaattaataccagcaaagagtttaaaacagtgcctgaaaaacagtatgcccttgataaatagctattattatcttggcctatggggcaacataatatttactgaaaccattaaatgggtccacctcacttaaaaaatacccagtgaggctctttttacaagtaattttatgaaagaggggaacaatcagataaacattttgttttgaaatgtggatttagtttaacttaggcataaatatagatgcaaraaataaaaaaatgaggatataaaactattaagaaaaa

SEQ ID NO: 49838 - DNA, 636 bp, Homo sapiens
cccgcctcggcctcccaaagtgctgggattacaggcgtgaaccaccacgccctgcccctcttggttttaatcactcatttaataatggtttcttatgaaaaatacttactggtagtgtagattaaaaagtatttaggctgggtgtggtggctcatggctgtaatcccaggactttggaaggccaaggtgggaggattgcttgagcttgggagtttgagaacagcctgggcaacataaggagacctcatctctattaaacattttttgaaaatagccagttgctgtggtgcacacctgttgtccaacctacttgggaggctgaagcagaaggatcacttgagccaggagatcaaaagtgcagtaagctatgatcatgccactgctcttcagcctgggcaacagagcaagactttgtctcaaaaaaaaraaaaagaaaaagaaaaaaaaagcatcattattttttcttaccccaaattctccttctactttatcaggtgaggctctatgtaaaggtgaccaaataatgtaccatactaaatgggacaattagaaagcaaaagaaggtgtgcaattagtgtgggatgacaagcataaactgtcacatactaggaaacatatctaattataaatatgcat

SEQ ID NO: 49839 - DNA, 533 bp, Homo sapiens
ctagagggaaaaattgctcaagggaactttttgactcctgcaatctgtgggaggtgggatgtcatgaattctttggcctgggctatatgtgtgtactcacctaccaacctcaagctgccaggacaaccttcatctgcccaggggccctttaaaaagggcccttcccaaatggatattgacatgctttggatttaaccatgtgggcgactttagaagcagccttattaggatgcttaagtatattttagacaccctcacgcaacctttctacttctgagaccaggcctgtcggtgtctggtgtctgccacagcagccctcattatgggagatgtgcaggtaagaaagcaggaacaagagagtgagaaaccaagggtgcacagcagaggatgtgaaagctggagcactgtagatycatcaaccttgcaatctctggatgaggagatgagtcaccatcaaggccaaggtggttttggaagtcaaatgtgaactcccaaattccttactgggtgctatatttataggccacacttgc

SEQ ID NO: 49840 - DNA, 1771 bp, Homo sapiens
aggatgcttgtggtttcaaaacattttctccttctctggtgcagtctccccacagctgttttcattgcccctccttcctcctacccaagatgttctgccaaacatgcacctcctccaagtgacaacagccctctgaccaaatagaaaytgctaccccactaacaaattagagatgtcctcaggcccaaagtttccccaagattttagactcctctgcccaagaactttgggacagttttccataccttagacaactgttggtgtcagtggcaactattaactccttctttagaggcaactaattaagatccaagatcaggaatatgtttcctttgttttctacctgaccaaaggctcctctcttctggggcaacccccaggattggagtagcctttgtattttttactgtgtaggggaaaaatttacaaatgtctatcaatcaatcctagttttctagttatttaggcagctactcaatgttcataatcatttctacccaggtatctgtggcagcctctcattttgcggcagatgtgacagtcatatgtgatctagggtttgggatgattttaccttgagaaatgccctaggagtctatgatagtcttcaacaaggaggaaatattgtgtattattcacggttttactgttatttaatcacagaggaactatatgtttggctataagctatgtcttagaactgggttaatgatcccaagcagaatgtctgtcacacaggtcatcagtcaatgtttgcagaataagccagctagggttttatttaaaaaaaaaaaaatcaacatgccaaagggttagctggcacagatgagaatctatattctgggtaatattctctagtagtaaaaaaagataaggaaaggtaaagaccaaattatttgacataaatgcttttaatgggataggaagaaaagaaaaaagtaaaactagttgaggtgagcgagtgtagaaccttggatttctaattcaagatgagtttttttttcccccaaaaactgctctgaagtgacagaaaaaataaagtataaatagtgcttgaagacagaaattagtaccatcagatactgaatttttaggcaataatgaagatggaataatgttaatggcagggaaaaaaaaaacccaacagtgtcttaaagcagttacaggagaaagctcctgtacaggtaaggttggcttttcccagcctagagaaacaaacacagagtcagcagttacacagatcagcaacaggagtggcatgacctgaaggcagaaggcttctagtaacaaactactcataccctgccttcacccaacactctccttactctcccatcctttagagtgtttggctgagcctttggagaaaaacagctttttctacaagaatctttgtgtgcctgcccagtgaggagcgaaggtgtgcttcctagtgtgggcacagcagtagaggtaacgccagatacaggagcagagccagggtgagtcaagaggagtgtgtaataaagaaagaattagtgatttgagatgatgtgagaactccaaggattaaagggaaactcctaaacactttcagaaagaaggtgttttaaaagtgaaagaaaagctaaaagaagaaaagaaaaagaaaaaaaaagcaaaacatgcaaaaaatttaaaaggctcaaaatcagccatataaagacacgggtcatattgaccacaatgcgctaaaagcagaaatgagtaagataaaaattgtaaaataaaaatattttacaattactatggc

SEQ ID NO: 49841 - DNA, 1771 bp, Homo sapiens
aggatgcttgtggtttcaaaacattttctccttctctggtgcagtctccccacagctgttttcattgcccctccttcctcctacccaagatgttctgccaaacatgcacctcctccaagtgacaacagccctctgaccaaatagaaattgctaccccactaacaaattagagatgtcctcaggcccaaagtttccccaagattttagactcctctgcccaagaactttgggacagttttccataccttagacaactgttggtgtcagtggcaactattaactccttctttagaggcaactaattaagatccaagatcaggaatatgtttcctttgttttctacctgaccaaaggctcctctcttctggggcaacccccaggattggagtagcctttgtattttttactgtgtaggggaaaaatttacaaatgtctatcaatcaatcctagttttctagttatttaggcagctactcaatgttcataatcatttctacccaggtatctgtggcagcctctcattttgcggcagatgtgacagtcatatgtgatctagggtttgggatgattttaccttgagaaatgccctaggagtctatgatagtcttcaacaaggaggaaatattgtgtattattcacggttttactgttatttaatcacagaggaactatatgtttggctataagctatgtcttagaactgggttaatgatcccaagcagaatgtctgtcacacaggtcatcagtcaatgtttgcagaataagccagctagggttttatttaaaaaaaaaaaaatcaacatgccaaagggttagctggcacagatgagaatctatattctgggtaatattctctagtagtaaaaaaagataaggaaaggtaaagaccaaattatttgacataaatgcttttaatgggataggaagaaaagaaaaaagtaaaactagttgaggtgagcgagtgtagaaccttggatttctaattcaagatgagtttttttttcccccaaaaactgctctgaagtgacagaaaaaataaagtataaatagtgcttgaagacagaaattagtaccatcagatactgaatttttaggcaataatgaagatggaataatgttaatggcagggaaaaaaaaaacccaacagtgtcttaaagcagttacaggagaaagctcctgtacaggtaaggttggcttttcccagcctagagaaacaaacacagagtcagcagttacacagatcagcaacaggagtggcatgacctgaaggcagaaggcttctagtaacaaactactcataccctgccttcacccaacactctccttactctcccatcctttagagtgtttggctgagcctttggagaaaaacagctttttctacaagaatctttgtgtgcctgcccagtgaggagcgaaggtgtgcttcctagtgtgggcacagcagtagaggtaacgccagatacaggagcagagccagggtgagtcaagaggagtgtgtaataaagaaagaattagtgatttgagatgatgtgagaactccaaggattaaagggaaactcctaaacactttcagaaagaaggtgttttaaaagtgaaagaaaagctaaaagaagaaargaaaaagaaaaaaaaagcaaaacatgcaaaaaatttaaaaggctcaaaatcagccatataaagacacgggtcatattgaccacaatgcgctaaaagcagaaatgagtaagataaaaattgtaaaataaaaatattttacaattactatggc

SEQ ID NO: 49842 - DNA, 1771 bp, Homo sapiens
aggatgcttgtggtttcaaaacattttctccttctctggtgcagtctccccacagctgttttcattgcccctccttcctcctacccaagatgttctgccaaacatgcacctcctccaagtgacaacagccctctgaccaaatagaaattgctaccccactaacaaattagagatgtcctcaggcccaaagtttccccaagattttagactcctctgcccaagaactttgggacagttttccataccttagacaactgttggtgtcagtggcaactattaactccttctttagaggcaactaattaagatccaagatcaggaatatgtttcctttgttttctacctgaccaaaggctcctctcttctggggcaacccccaggattggagtagcctttgtattttttactgtgtaggggaaaaatttacaaatgtctatcaatcaatcctagttttctagttatttaggcagctactcaatgttcataatcatttctacccaggtatctgtggcagcctctcattttgcggcagatgtgacagtcatatgtgatctagggtttgggatgattttaccttgagaaatgccctaggagtctatgatagtcttcaacaaggaggaaatattgtgtattattcacggttttactgttatttaatcacagaggaactatatgtttggctataagctatgtcttagaactgggttaatgatcccaagcagaatgtctgtcacacaggtcatcagtcaatgtttgcagaataagccagctagggttttatttaaaaaaaaaaaaatcaacatgccaaagggttagctggcacagatgagaatctatattctgggtaatattctctagtagtaaaaaaagataaggaaaggtaaagaccaaattatttgacataaatgcttttaatgggataggaagaaaagaaaaaagtaaaactagttgaggtgagcgagtgtagaaccttggatttctaattcaagatgagtttttttttcccccaaaaactgctctgaagtgacagaaaaaataaagtataaatagtgcttgaagacagaaattagtaccatcagatactgaatttttaggcaataatgaagatggaataatgttaatggcagggaaaaaaaaaacccaacagtgtcttaaagcagttacaggagaaagctcctgtacaggtaaggttggcttttcccagcctagagaaacaaacacagagtcagcagttacacagatcagcaacaggagtggcatgacctgaaggcagaaggcttctagtaacaaactactcataccctgccttcacccaacactctccttactctcccatcctttagagtgtttggctgagcctttggagaaaaacagctttttctacaagaatctttgtgtgcctgcccagtgaggagcgaaggtgtgcttcctagtgtgggcacagcagtagaggtaacgccagatacaggagcagagccagggtgagtcaagaggagtgtgtaataaagaaagaattagtgatttgagatgatgtgagaactccaaggattaaagggaaactcctaaacactttcagaaagaaggtgttttaaaagtgaaagaaaagctaaaagaagaaaagaaaaagaaaaaaaaagcaaaacatgcaaaaaatttaaaaggctcaaaatcagccatataaagacacgggtcatattgaccacaatgcrctaaaagcagaaatgagtaagataaaaattgtaaaataaaaatattttacaattactatggc

SEQ ID NO: 49843 - DNA, 503 bp, Homo sapiens
cacaggaatatagagccactgtcactcagggtagctctgctatcaggtgtaaccaggtctccccttaatcagggacagtgacatgataggcagaagaggggccactcacagagcaggcaggcaggagcagtggcatgaactgggccatgcagaagccacactcacaagtacgcccaagaccaagcacggctggagaccactgggtttccactcacctagttagtacagaggaaaaaatgagggtttacaggcagcaaaaagaaacagacattaccactatccatctttccacagacaaatgtgggatgttcagaaacacattttcacctgcaaattttcaaacatgactcactcaaaamcattttcagtcatggcaggtatttatcaagccatctgttttgctaacacaaatacagtagaaggcagagacttgaaacactgtaataaaaaatcatcatgaagattacaggtggatcttaagaccataaaatgaatgccttgtc

SEQ ID NO: 49844 - DNA, 594 bp, Homo sapiens
ggcctttctttgatgatagactttgtttattattgattcaatcttcttactagtgattgatctattcaaactttatatttcttcatggttcagtcttggtagactgtatgtgtcttagaatttgtccatttcttctaggtwacccaacttcttggcatataattgttcatctcactctattctctcctctcctaaaagctgataactttcatggcattaaacacacacacacacacacacacacacacacacaatttcaaagaaactgatttttaaagcatagaaaaaatgtgttgagattacatttgttataagttaaagttaaagttatcttagaagtatatatatatacacacatatatatatgttaatcattaacaacacttcaaagagatgacagtgatagtaacatgcccttgaatttcgttaaggtatatcttagatttaaccaagacacactagtttacaggagctggaaaatatattctaaagtgtcttttggaagattcgtagaaaatactgaaaatgcaaaatgggataatgtacataattttcttatttttcagaagttaaagggaaaagacatttccttga

SEQ ID NO: 49845 - DNA, 1172 bp, Homo sapiens
gacaggcggcattaagagagtggtcccagaaagcaaaatggaggttccctttaagggggaacaggcaatcctcttctctctgcaacagagcatggctgccatgggagccagagaggaagagagcagctggtgttcagtgcactggacagataggagctgaggaggatgaagactcagctatccctgtatggtacagacatgacacttggcacacatagagaaacacgacagctgccgcaccctgtgtctaagctgggttgaatttcacatactgtggccaagcgaatgcgggcttttggcccatmatagatgccagagagggtgtgcctcctacacattttcatatgttaccacccattacttgctcccgagtattcagtgttacctgggggcagatgattccagtactttctcagcctcctcaacttgaacatcttcatcctcatcttcgtcattttctgtaaatacaaaatgttcgttcagatatttcccacttcacattctgcaagcacagtcagcccaatgtgcacagagacatgaacatctatgtatggttcagcactgtactgaaaactgtcatattttatctttcacaaaatgccctggcatggtttcctggtccatcgggcaatgcatttctgatctggagggccaccatcaagatgtggtcaaatattgaaaagaccttttgcttcccatatcactggaggcttgtgcagcctctctctggactttggcagctgtcgcccccatcctgccacatatctgattcccaggaacaggcttggtgtcctgtcacagttcgcatttcaaacctcattctttctcttaggagaggacaaacttgtcccacagtcctctatgcatcatgagactgcacaggccctccatgtggcttctgctgtgttattcagggacattctatccacggggagtgctccagtctgaagcacttcctaccaccaaatgcccctacaccaagtgccttctccaacaccaaacggagaggggcttcatctcattttaaaaagcattcgtaagtgttcccatatttggatgcttcagacccttgcaagagacaatttgtctgcctttgcagatggagagagagaaactctggaaagataaatcactcactcaccgacagttactaagaacattgtcaaaaagac

SEQ ID NO: 49846 - DNA, 1172 bp, Homo sapiens
gacaggcggcattaagagagtggtcccagaaagcaaaatggaggttccctttaagggggaacaggcaatcctcttctctctgcaacagagcatggctgccatgggagccagagaggaagagagcagctggtgttcagtgcactggacagataggagctgaggaggatgaagactcagctatccctgtatggtacagacatgacacttggcacacatagagaaacacgacagctgccgcaccctgtgtctaagctgggttgaatttcacatactgtggccaagcgaatgcgggcttttggcccataatagatgccagagagggtgtrcctcctacacattttcatatgttaccacccattacttgctcccgagtattcagtgttacctgggggcagatgattccagtactttctcagcctcctcaacttgaacatcttcatcctcatcttcgtcattttctgtaaatacaaaatgttcgttcagatatttcccacttcacattctgcaagcacagtcagcccaatgtgcacagagacatgaacatctatgtatggttcagcactgtactgaaaactgtcatattttatctttcacaaaatgccctggcatggtttcctggtccatcgggcaatgcatttctgatctggagggccaccatcaagatgtggtcaaatattgaaaagaccttttgcttcccatatcactggaggcttgtgcagcctctctctggactttggcagctgtcgcccccatcctgccacatatctgattcccaggaacaggcttggtgtcctgtcacagttcgcatttcaaacctcattctttctcttaggagaggacaaacttgtcccacagtcctctatgcatcatgagactgcacaggccctccatgtggcttctgctgtgttattcagggacattctatccacggggagtgctccagtctgaagcacttcctaccaccaaatgcccctacaccaagtgccttctccaacaccaaacggagaggggcttcatctcattttaaaaagcattcgtaagtgttcccatatttggatgcttcagacccttgcaagagacaatttgtctgcctttgcagatggagagagagaaactctggaaagataaatcactcactcaccgacagttactaagaacattgtcaaaaagac

SEQ ID NO: 49847 - DNA, 1172 bp, Homo sapiens
gacaggcggcattaagagagtggtcccagaaagcaaaatggaggttccctttaagggggaacaggcaatcctcttctctctgcaacagagcatggctgccatgggagccagagaggaagagagcagctggtgttcagtgcactggacagataggagctgaggaggatgaagactcagctatccctgtatggtacagacatgacacttggcacacatagagaaacacgacagctgccgcaccctgtgtctaagctgggttgaatttcacatactgtggccaagcgaatgcgggcttttggcccataatagatgccagagagggtgtgcctcctacacattttcatatgttaccacccattacttgctcccgagtattcagtgttacctgggggcagatgattccagtactttctcagcctcctcaacttgaacatcttcatcctcatcttcgtcattttctgtaaatacaaartgttcgttcagatatttcccacttcacattctgcaagcacagtcagcccaatgtgcacagagacatgaacatctatgtatggttcagcactgtactgaaaactgtcatattttatctttcacaaaatgccctggcatggtttcctggtccatcgggcaatgcatttctgatctggagggccaccatcaagatgtggtcaaatattgaaaagaccttttgcttcccatatcactggaggcttgtgcagcctctctctggactttggcagctgtcgcccccatcctgccacatatctgattcccaggaacaggcttggtgtcctgtcacagttcgcatttcaaacctcattctttctcttaggagaggacaaacttgtcccacagtcctctatgcatcatgagactgcacaggccctccatgtggcttctgctgtgttattcagggacattctatccacggggagtgctccagtctgaagcacttcctaccaccaaatgcccctacaccaagtgccttctccaacaccaaacggagaggggcttcatctcattttaaaaagcattcgtaagtgttcccatatttggatgcttcagacccttgcaagagacaatttgtctgcctttgcagatggagagagagaaactctggaaagataaatcactcactcaccgacagttactaagaacattgtcaaaaagac

SEQ ID NO: 49848 - DNA, 1172 bp, Homo sapiens
gacaggcggcattaagagagtggtcccagaaagcaaaatggaggttccctttaagggggaacaggcaatcctcttctctctgcaacagagcatggctgccatgggagccagagaggaagagagcagctggtgttcagtgcactggacagataggagctgaggaggatgaagactcagctatccctgtatggtacagacatgacacttggcacacatagagaaacacgacagctgccgcaccctgtgtctaagctgggttgaatttcacatactgtggccaagcgaatgcgggcttttggcccataatagatgccagagagggtgtgcctcctacacattttcatatgttaccacccattacttgctcccgagtattcagtgttacctgggggcagatgattccagtactttctcagcctcctcaacttgaacatcttcatcctcatcttcgtcattttctgtaaatacaaaatgttcgttcagatatttcccacttcacattctgcaagcacagtcagcccaatgtgcacagagacatgaacatctatgtatggttcagcaytgtactgaaaactgtcatattttatctttcacaaaatgccctggcatggtttcctggtccatcgggcaatgcatttctgatctggagggccaccatcaagatgtggtcaaatattgaaaagaccttttgcttcccatatcactggaggcttgtgcagcctctctctggactttggcagctgtcgcccccatcctgccacatatctgattcccaggaacaggcttggtgtcctgtcacagttcgcatttcaaacctcattctttctcttaggagaggacaaacttgtcccacagtcctctatgcatcatgagactgcacaggccctccatgtggcttctgctgtgttattcagggacattctatccacggggagtgctccagtctgaagcacttcctaccaccaaatgcccctacaccaagtgccttctccaacaccaaacggagaggggcttcatctcattttaaaaagcattcgtaagtgttcccatatttggatgcttcagacccttgcaagagacaatttgtctgcctttgcagatggagagagagaaactctggaaagataaatcactcactcaccgacagttactaagaacattgtcaaaaagac

SEQ ID NO: 49849 - DNA, 558 bp, Homo sapiens
gtataatagacagagacacatggtgatctagcaccaaaaaaaaaaaaaaaaaaaaaatcacattagagtattacttcacaccatatgtcacaatcaaactgtgaaaataacaaacagttaaataaaaacctaaacccataagaaaaaaaacaaccgtagaagaataattttataatcttgagatagggaagactatgagcatgacacaatagccaataagtatacagaaaactacattttacttcataraaaataaaataaaataaaagacaaatctgcaatttttaaaagctaataacaaatgggagaaaattttggaaaaatatgtgaggaaaaaatggtttctattgataataatttttaaatcttaaaagaaaaaagatagaaaaatatagaaagtatattcattaaatttgccaaagaagaaatataaatggactaaaaatatatgaatagagtttagattcactggtattcaaagaattgctgattaacaagaaaatggaatatttactaatatttgctaatataaactcttttttgctaatgtaattagca

SEQ ID NO: 49850 - DNA, 558 bp, Homo sapiens
gtataatagacagagacacatggtgatctagcaccaaaaaaaaaaaaaaaaaaaaaatcacattagagtattacttcacaccatatgtcacaatcaaactgtgaaaataacaaacagttaaataaaaacctaaacccataagaaaaaaaacaaccgtagaagaataattttataatcttgagatagggaagactatgagcatgacacaatagccaataagtatacagaaaactacattttacttcatagaaaataaaataaaataaaagacaaatctgcaatttttaaaagctartaacaaatgggagaaaattttggaaaaatatgtgaggaaaaaatggtttctattgataataatttttaaatcttaaaagaaaaaagatagaaaaatatagaaagtatattcattaaatttgccaaagaagaaatataaatggactaaaaatatatgaatagagtttagattcactggtattcaaagaattgctgattaacaagaaaatggaatatttactaatatttgctaatataaactcttttttgctaatgtaattagca

SEQ ID NO: 49851 - DNA, 669 bp, Homo sapiens
aaaagaccacatattgggtacagtgtacactgctctgttgatgggtgtagcaaaatctcagaaatcactgctaaagaacttttccaagcaacaaaacaccaccttttccctcaaaactattgaaattaaaaaaaaaaaattaagggattagtagagaagtcaattcactgtgttacctaataatatattgttattgcctgttatccccaatctagaataaagtaggataattgaaaaaattaataatataatctgtaaaccccccaaaatccctgayaattactagtatccatcaataaaggattgtcttcccctccagacatatagagactgcatgtctcaggctcctggctattgagtgagatcattcacctatttctcactaattcttttcctgtatacactaaggaggccacctgtttcagattgttgagctacaaattaggaacactgccatctgcatgggaaatagcttctctgaacagttgtcaagagttagaaataaacccttgctagcttaagggactgcaaattagtatatgattttcattactgcagcatcgcctagtctatcttgtataataatataccaatctgtcactgtaatttttttctttttttcaagtgcggtttccttccagagggtaaagggagtcataggtgaaggca

SEQ ID NO: 49852 - DNA, 2024 bp, Homo sapiens
gattacatgtgattttttatagatgcaatgtgtaatgatcaaatcagagcaattgggatatccatcacttcaaacgttgatcatttatttgtgttgagaatatctcaaatcttcttttctagctattttgaaatgtacagcaaattactgataagtatagtcascctagtgtgcaataaaacactataaatcattccttctatctatgtgtttgtaccccttaatgaacctctcttcaccttctaccccttctcttcttagcctctggtatccagcattctaatctctacctctgtgagataaactttaaagtctctcacatatgagtgagaacataaacatgataaagttttgaaaatggctttgtagtttcatattaaaacatttaatcataatgtgtttattcaaatgtttactttcaataaaataatgaagcagcagaaatggttaatagtttacgttgtaacaactattggtcagaacctaatacaacaaattttaagaggtaaaaagtacattgtttaaatattgcagtgttagtaattaaaaagaaaatacaattaaataaaatatatttttcattttatttgaaactgaagtttaaagaaattttaaatagaaaatgaaaaagataaagtatatggtttttgaaacttgaaacaaagctaaatggaatggataagatctagtatttgatagcacagcagggtgactacagtcaacaataatttattgtatattttaaaataactaaaagaatataattggattgtttgtaacaaaaagaaaaagtgcttgaagttatgaatcccctatttaccctgatgtgattattatgcattgtatgcctgtatcaaaatatcttatataccccataaatatatatacctaccatgtacccacaaaaattaaaaattaaaaaatcaaattatatttaaaaagaagacttctgacattttcaaaggctgctgctaataatactggctctatataaaaactcacttaggtggggtgtacttgccaaaacctgtagtcccaactctcaagaggctggggcaggaggatcatttgagtccaggtgttcagaattacaatgagctataatcataccattgcacaaaaaaatttaagttcaaatggtgtgggcatttcatttcaatcactgagacggataaaatacagtcatcagtactgattattttcagtctttctgtttattaaaatatttaaacatctgtggtactttttccttaaaatccaagaaaatttgttcatttcccaaaacaattctgcttttttgctttatttaaccttgcatactgcaattgttatagttttatgacatcctcagtttttctctatgatcttagtgcctcacatttggagcttatttcctttgtattctgcaccagtagccaggttttaaccaatcattactacttctcaaatctttaagtcctggcttaataaggccaagcatctcatctactacttaaaactaaagcaactaaaattcctattcaaaatgtcattgctaaattaacaatcatagtccaggctggttattgagcatttttttcatgttgatgagtttgagcctaaccattgacttattgagttttttacagcaatatgaagggcttcacaatcggttaattaccctagctattgtcaactctttcctgggtcccagtgtgtcagagaagaatagaatataaatagacactgaagtcaaaaacctaatcacttatagagcaatatggggcttttcagctcctcttctacagcactgaagtgaaatgtgatttgcttctgtgaatgctaatgaccaaccagacagcaaagctgaagattaaatgagtagataagggtgaaataatcaaagataaaaataatattcttaatatggtgtgctaacactgcatccagagaatcatgtcttcggctgaataaatgtttctgatatttaaaaaatggtcaattacattcttatccatatagtcaaaccaatatattagcactgg

SEQ ID NO: 49853 - DNA, 2024 bp, Homo sapiens
gattacatgtgattttttatagatgcaatgtgtaatgatcaaatcagagcaattgggatatccatcacttcaaacgttgatcatttatttgtgttgagaatatctcaaatcttcttttctagctattttgaaatgtacagcaaattactgataagtatagtcagcctagtgtgcaataaaacactataaatcattccttctatctatgtgtttgtaccccttaatgaacctctcttcaccttctaccccttctcttcttagcctctggtatccagcattctaatctctacctctgtgagataaactttaaagtctctcacatatgagtgagaacataaacatgataaagttttgaaaatggctttgtagtttcatattaaaacatttaatcataatgtgtttattcaaatgtttactttcaataaaataatgaagcagcagaaatggttaatagtttacgttgtaacaactattggtcagaacctaatacaacaaattttaagaggtaaaaagtacattgtttaaatattgcagtgttagtaattaaaaagaaaatacaattaaataaaatatatttttcattttatttgaaactgaagtttaaagaaattttaaatagaaaatgaaaaagataaagtatatggtttttgaaacttgaaacaaagctaaatggaatggataagatctagtatttgatagcacagcagggtgactacagtcaacaataatttattgtatattttaaaataactaaaagaatataattggattgtttgtaacaaaaagaaaaagtgcttgaagttatgaatcccctatttaccctgatgtgattattatgcattgtatgcctgtatcaaaatatcttatataccccataaatatatatacctaccatgtacccacaaaaattaaaaattaaaaaatcaaattatatttaaaaagaagacttctgacattttcaaaggctgctgctaataatactggctctatataaaaactcacttaggtggggtgtacttgccaaaacctgtagtcccaactctcaagaggctggggcaggaggatcatttgagtccaggtgttcagaattacaatgagctataatcataccattgcacaaaaaaatttaagttcaaatggtgtgggcatttcatttcaatcactgagacggataaaatacagtcatcagtactgattattttcagtctttctgtttattaaaatatttaaacatctgtggtactttttccttaaaatccaagaaaatttgttcatttcccaaaacaattctgcttttttgctttatttaaccttgcatactgcmattgttatagttttatgacatcctcagtttttctctatgatcttagtgcctcacatttggagcttatttcctttgtattctgcaccagtagccaggttttaaccaatcattactacttctcaaatctttaagtcctggcttaataaggccaagcatctcatctactacttaaaactaaagcaactaaaattcctattcaaaatgtcattgctaaattaacaatcatagtccaggctggttattgagcatttttttcatgttgatgagtttgagcctaaccattgacttattgagttttttacagcaatatgaagggcttcacaatcggttaattaccctagctattgtcaactctttcctgggtcccagtgtgtcagagaagaatagaatataaatagacactgaagtcaaaaacctaatcacttatagagcaatatggggcttttcagctcctcttctacagcactgaagtgaaatgtgatttgcttctgtgaatgctaatgaccaaccagacagcaaagctgaagattaaatgagtagataagggtgaaataatcaaagataaaaataatattcttaatatggtgtgctaacactgcatccagagaatcatgtcttcggctgaataaatgtttctgatatttaaaaaatggtcaattacattcttatccatatagtcaaaccaatatattagcactgg

SEQ ID NO: 49854 - DNA, 1080 bp, Homo sapiens
tgggcagctcggagcaggtcctgccaccaatctaggggtccagtctcaagatgtcccaggttgtggtaaggacccgaaagggaggtgcaccggcttctagcccagggcagaccctgtcaggggggcttctaggagcgacggggatgccagcgtccgcccttccagccctgctgggaaagcgtcaccgtgttctgaagaaagcatcctttttgttcattccagaaacatttatcgagtgcctatggcatgtcaggcacagttcaagttctgaggatacrgagtaaacaacaggcaacatcacgcctcctcgagcttctgttctactgggagtcagggtaggaagagacgacaacaaggtaaataagtcaaatccggactgtgttactgacaatgcaagctaggagaaaaaaggaagcaggagcagagaggagcctgggtgatgatggagatggggagtttacttaaataggtggccatgaggctatccagcctgtcccaggcggacttttagaagacggattgtttataagagcccaaaagtataagttcttaaaaaaaattaatttctgaatgtgtgatgagaacacaaattcctccacgacagccctgtttttcctgtgctgcgtagctgagctctgggtcacggctgccgagtgcaggcaacactcgggcagtcccagggctgaccgactgcgcatctggacactggcaatcacagggaaggaggcgagagctctgccgggtgctttgaggctgtcgcgtcatgtcttcctccccacagcgttctgcggggcctgtccccttggtgttgtggcacctcctggtcctcggctctgctcttggggaagaaagaggacactgtcacaggttcctgtcccctccagccaacaggagcagccacacgtggcatctgccctcgaagctctgtggcatccctgccgtaggagaagttaccaagaaacccccagagcccacaggctggagcccccccaggttctgctcagcggggagaggcagattgagtccaaattttccattttaactggaatcctaggggttaaacctggctgtgacttggca

SEQ ID NO: 49855 - DNA, 1253 bp, Homo sapiens
tttcttcactataaatyactaaattaccctccaaaagtctgcatcaatatacactctgtcaaaatttgtgattatgttcaaaacaattttctattctagtgattcatggcataaatatttgtgcagtagttgtctctggtgctcaatacaaaatctgtgcagtggagccaaaaaatgagtaatattcccattcttatactcattaatcttatttttaatattaggaaaatttctgaaagccaactacaatatgctgttggtaattttcttcatttcctcttgcaattgacatgaaacacacagagcgtaaggaagattttccatgtcaaatacagagtgactaaggaagatgctaccagtagaagataactttatgtacctgacaatttttaaaaccaccatcaggtttgtcagtggtaagattacctgccaacatatattccattatatccagtgaaacgtcaatacataatttaaagacactataccaggtcaatatcttctattggattccttccatcatatgttccttttacatagcatgattttaactttgatacatattttttagaaatgtttttaaagatttttctttctgtttttgttttctctttagccaaagaaataatgccatgaaaagattatcaacatattattcaccttgccaaatatttttgcatatcccacagttaccatctcatgtaattttgatacaaaaaattctaaactcagtcattgacctcaactgtgataacctactgatgccttcaggcaaacatttttggttattaaataatacataaaaatatttaaattgcaatgcaatattttttgtaagtaaccaaggtatttccttataactgaccataagaagggggctgttgaggaagcaagatcagaataataagtagagaagagaggcagacaaaagaggagttcagcccacactaagggcacaccacattatgaaaagaaaaggaaagagcagaagaaggaaaaaaagagaaggaagaggaggaagaaggaaagggaaggataagtaggagagaattttagaaatgttggtattcaggtctttacaattttaccagtagattcctttaaaattgtaatattatggaaacaaattttcaatttatcagaccggcaatgctttcccaaaattaaggagttctgaaaagcatcctaagtaaatcttgtagtatttatgacatgtaataatgatactctaaattattaagagactcaaagaa

SEQ ID NO: 49856 - DNA, 1253 bp, Homo sapiens
tttcttcactataaatcactaaattaccctccaaaagtctgcatcaatatacactctgtcaaaatttgtgattatgttcaaaacaattttctattctagtgattcatggcataaatatttgtgcagtagttgtctctggtgctcaatacaaaatctgtgcagtggagccaaaaaatgagtaatattcccattcttatactcattaatcttatttttaatattaggaaaatttctgaaagccaactacaatatgctgttggtaattttcttcatttcctcttgcaattgacatgaaacacacagagcgtaaggaagattttccatgtcaaatacagagtgactaaggaagatgctaccagtagaagataactttmtgtacctgacaatttttaaaaccaccatcaggtttgtcagtggtaagattacctgccaacatatattccattatatccagtgaaacgtcaatacataatttaaagacactataccaggtcaatatcttctattggattccttccatcatatgttccttttacatagcatgattttaactttgatacatattttttagaaatgtttttaaagatttttctttctgtttttgttttctctttagccaaagaaataatgccatgaaaagattatcaacatattattcaccttgccaaatatttttgcatatcccacagttaccatctcatgtaattttgatacaaaaaattctaaactcagtcattgacctcaactgtgataacctactgatgccttcaggcaaacatttttggttattaaataatacataaaaatatttaaattgcaatgcaatattttttgtaagtaaccaaggtatttccttataactgaccataagaagggggctgttgaggaagcaagatcagaataataagtagagaagagaggcagacaaaagaggagttcagcccacactaagggcacaccacattatgaaaagaaaaggaaagagcagaagaaggaaaaaaagagaaggaagaggaggaagaaggaaagggaaggataagtaggagagaattttagaaatgttggtattcaggtctttacaattttaccagtagattcctttaaaattgtaatattatggaaacaaattttcaatttatcagaccggcaatgctttcccaaaattaaggagttctgaaaagcatcctaagtaaatcttgtagtatttatgacatgtaataatgatactctaaattattaagagactcaaagaa

SEQ ID NO: 49857 - DNA, 1253 bp, Homo sapiens
tttcttcactataaatcactaaattaccctccaaaagtctgcatcaatatacactctgtcaaaatttgtgattatgttcaaaacaattttctattctagtgattcatggcataaatatttgtgcagtagttgtctctggtgctcaatacaaaatctgtgcagtggagccaaaaaatgagtaatattcccattcttatactcattaatcttatttttaatattaggaaaatttctgaaagccaactacaatatgctgttggtaattttcttcatttcctcttgcaattgacatgaaacacacagagcgtaaggaagattttccatgtcaaatacagagtgactaaggaagatgctaccagtagaagataactttatgtacctgacaatttttaaaaccaccatcaggtttgtcartggtaagattacctgccaacatatattccattatatccagtgaaacgtcaatacataatttaaagacactataccaggtcaatatcttctattggattccttccatcatatgttccttttacatagcatgattttaactttgatacatattttttagaaatgtttttaaagatttttctttctgtttttgttttctctttagccaaagaaataatgccatgaaaagattatcaacatattattcaccttgccaaatatttttgcatatcccacagttaccatctcatgtaattttgatacaaaaaattctaaactcagtcattgacctcaactgtgataacctactgatgccttcaggcaaacatttttggttattaaataatacataaaaatatttaaattgcaatgcaatattttttgtaagtaaccaaggtatttccttataactgaccataagaagggggctgttgaggaagcaagatcagaataataagtagagaagagaggcagacaaaagaggagttcagcccacactaagggcacaccacattatgaaaagaaaaggaaagagcagaagaaggaaaaaaagagaaggaagaggaggaagaaggaaagggaaggataagtaggagagaattttagaaatgttggtattcaggtctttacaattttaccagtagattcctttaaaattgtaatattatggaaacaaattttcaatttatcagaccggcaatgctttcccaaaattaaggagttctgaaaagcatcctaagtaaatcttgtagtatttatgacatgtaataatgatactctaaattattaagagactcaaagaa

SEQ ID NO: 49858 - DNA, 552 bp, Homo sapiens
taaaaatgaggtgctacctgaagaactatgccaataaattaaggaagaaaaacattaaatttattagcattttgtatcagacttacaataaagactgtataccaacatccacgcacccragaccacctcccaaaggaggatgttattctaagctctcccgcagaactgtgactaaaatcacttctgatactccaccttagtgttttcaggaagtctagcaaaattaagcaacctatactcaaataaggtatgactctaaaagagacagagacagggcatggatgagcaggaattactttggcagcgtgtacctgcagaacgcacactgctggtgtctgtagcctctttccaattaacagattacgagatgggtctaagccacacaacagggtgaaaaaggaatgtttcgaaaacagcattttaggaaataactataaaggatcaatatattggcagtgcggtgttttaaatattgtctttctaaaacaattcttccctttcagctaagttttcatagtatatagcattttccatgtcaagttatgacggagt

SEQ ID NO: 49859 - DNA, 1518 bp, Homo sapiens
gaattctacttagagggaaaatctgggagttcagatacggaaaattctgtcttctcaacaccaagactttccatcaaaaactagtttagtcttttgaatgttttgtccacatgatggtaaatatctgaatatttaacagatatctgaagttaccatcctgcaggtctcagtttatccaggtagattttcgtcatgttgctgtaagtgactatattctgaatctaacttctcattttcaaatcatctctcagaaaccgtgccttctctatgaagctatttatgtgttgattaaaaaatataattgcttcctcaccagtagcattcaaacaggtacattttatttattttgtatatttaaaaaaagtttgtacagttgtctaactagtgtcttttctgctaacacagggctaaatacgtagtaggtccgccataaatgcctgttgatttgttaatcacttcaggagtgaatatcagaggagaccgtggctttcagataataattccaccagttttaattgctttattctgaacattaggctggtggtagttttgcatgggtagattgtggccaacctgcatgactcgttctgaagataagtttactgctagtatgtctttacccctgggaaataaacatatgtaatcttcttgccattattcttaatttaaagccctgtattgtatgtttaggttatttcaggccttgtgagggtgaggggctggacttggaagataattgggggggaaatgtcacaccacgtccctattgtaggagggtgcaaggttcacaccacgtggtgagcagccctgtagagggcatccacttgaagacagagaaccagaagatgcatggcttggtgtaagcagatggagccaagccagcaagcacatcccagctgggaatcttcctagtctcctgggccttctccttccatcactgcccaggctgcagtttcattgaggctggtctccttgttctttcctttcctcacctaaatctgtcattgtgtaaattcacccttattgatgacacctctttcacctctccccacctcctccactttggtgactccagaacatgttcatttctctctgctacagtgccagtcaccttcccttggccgccctgcacaaacactcctcagatgcacaaccttcattgttgcttcatagatgcatggatttgatctctggctttgccaggaactagctaagtgacctcaagcaagttatgttggtgatctccaaggacctcagttttctcaccagggaattgatctacaatgacacttgccactttggaatgtgcatcatacaygagagcacgcactgtgatgacaccttgtagaataaacaatcatttcccaccttcagccactgtctgctgcagaggtggttgtttggcctgattcatgtctgctgctacttcttcttttggctaactttccacttttatttttcagggctgggagagggttctgccctccttcatccagacagcaggtctcatcctaggtc

SEQ ID NO: 49860 - DNA, 612 bp, Homo sapiens
tttaaagactcacaaagtatcaacagaaactaaggattaaatagtcctgaaataatgacatacttgattttacagcttgttaaaattcagccttcaatacacacacatacatacacacacacacacacacacatgaaatggaatcarcaccaagtttggtgcagagtagacaatgaactccaagggtacagaagatttacatgttcatctaggcagaagatccacatgacatacaaggggaataactgggctgggctcagattcctccagtgcaatattcaatgccagaagccagtgcagtgttatttaaaaggttttgagtgggaagagtgtcacccaaaattttcatacttagccaagttgtatataacgtagaaaaaaaaaaaggcagatgctgtcaagcaggcaatacttcaagaattccatgagcgcttattggaaaaagaaaaactgaatgatgaaatttagccaattgaaagatgaatcaaaataatttttttaaaaaaggaaaaactgtagtcaaagactagtggtgaaatgctgatcatcactaatcagagaaaagcaaatcaaaaccacaatgaggtatcatctcacccattagaatggttt

SEQ ID NO: 49861 - DNA, 1778 bp, Homo sapiens
ggtaggaagaaagtgctgtgagggaaattaaggaaggagccaaaagagtctgggagaagatcagatcacagtgtaggtctggccttgttagggaaagagaagaaagatgtttgttaggaagtaccttagaccgaggtgcaatactaagtgttctgggaaggctggcgacaaataccagagcccaaattgcccatcagaggagtcataaatgtcttaaatggggctgccttagcaccctggttgcgttcaggcagaatgaggcagtggaagtatagcattctaatagcccctacagttagcccttgttgtgcagacttactactttgcagagttcagaacagtgactccttgtcctataggatacccttcctgagaagaatttcaagaggatactactgagatgaaataaagctcctgccactgaagctgatctgkggtcacaacagatactcatcttctgcctcctttaccatcaaccctgcattctttgcctttagctgaggtttagtgcttacctggtgatgtgacccaaaccttcatcttaaagtgtctgaaccctagtgatcatgtgcttctcaagacagggctgctgaatgttggggttacagtagggcgagaaaagtatgaggagatactggagtgcatcacctgggtttcatccatattcttactgctctcagagtgtaagatagcacaatctcttactaatcggtcacttacccctgccatgaggaagactgtaagtgaccagtggctcattcagagctatggaaaatggggtcattcttctaaatgttgggccctgcatcagaacaacttattaaatgttcttgcttttagtgaatggaagagtttaacaggattcaggtgcctgtaggggaacacactgcacctgtgctgtcttcccactgggaatacagggctctataggtgcttctgtaatatactgctgcatcatgaactagggcactccacacatttagcacatttacctggatttaatgcttctgctgtgctttctgaagcctcttccaacattgaggctacatgcttctgaatggtggtaatatgaccagttgacctcaagaacaggggcccactctgtaacttctatgacctcagtccattcataagatcctttgctgggtataattccacatctgtgaatgatgtagtgcaaatatctccagacagtggttgtggttaagaatctgcaagcaggaaagacaaacctataccaaaacatattcctgtgaatggaagcagctcaatgtagtcaatttgccaagtggcaagtcttcttaaatagtgctatattgggattcaacacttgtctcactacaggctgggcattcagctgtagcagtagctaagttgtctctaggaaatacggtccaatgttgagtacctatgtagcctcaatctcagccaccatggtcattgtcattttcccattgtctgacaaacattggctgacaactggaaaggctattttgtctggttgttcgttgagtcttctgtgactggtgctctgtagtgggtgttaattaacatctgacatgaaatctacatgtctttcacatgcatgtcctatagactttcttgtctctttctagtcctttccatccaggctactgaccagatgactaggccatcggtccctgctgagagatcagtatacattctcttcttgggccatgtgtcgctccacttaaggtagattcatagtgaactggctcgagttgttaattatttttcccaaagttgggggcctgaga

SEQ ID NO: 49862 - DNA, 1778 bp, Homo sapiens
ggtaggaagaaagtgctgtgagggaaattaaggaaggagccaaaagagtctgggagaagatcagatcacagtgtaggtctggccttgttagggaaagagaagaaagatgtttgttaggaagtaccttagaccgaggtgcaatactaagtgttctgggaaggctggcgacaaataccagagcccaaattgcccatcagaggagtcataaatgtcttaaatggggctgccttagcaccctggttgcgttcaggcagaatgaggcagtggaagtatagcattctaatagcccctacagttagcccttgttgtgcagacttactactttgcagagttcagaacagtgactccttgtcctataggatacccttcctgagaagaatttcaagaggatactactgagatgaaataaagctcctgccactgaagctgatctggggtcacaacagatactcatcttctgcctcctttaccatcaaccctgcattctttgcctttagctgaggtttagtgcttacctggtgatgtgacccaaaccttcatcttaaagtgtctgaaccctagtgatcatgtgcttctcaagacagggctgctgaatgttggggttacagtagggcgagaaaagtatgaggagatactggagtgcatcacctgggtttcatccatattcttactgctctcagagtgtaagatagcacaatctcttactaatcggtcacttacccctgccatgaggaagactgtaagtgaccagtggctcattcagagctatggaaaatggggtcattcttctaaatgttgggccctgcatcagaacaacttattaaatgttcttgcttttagtgaatggaagagtttaacaggattcaggtgcctgtaggggaacacactgcacctgtgctgtcttcccactgggaatacagggctctataggtgcttctgtaatatactgctgcatcatgaactagggcactccacacatttagcacatttacctggatttaatgcttctgctgtgctttctgaagcctcttccaacattgaggctacatgcttctgaatggtggtaatatgaccagttgacctcaagaacaggggcccactctgtaacttctatgacctcagtccattcataagatcctttgctgggtataattccacatctgtgaatgatgtagtgcaaatatctccagacagtggttgtggttaagaatctgcaagcaggaaagacaaacctataccaaaacatattcctgtgaatggaagcagctcaatgtagtcaatttgccaagtggcaagtcttcttaaatagtgctatattgggattcaacacttgtctcactacaggctgggcattcagctgtagcagtagctaagttgtctctaggaaatacggtccaatgttgagtacctatgtagcctcaatctcagccaccatggtcattgtcattttcccattgtctgacaaacattggctgacaactggaaaggctattttgtctggttgttcgttgagtcttctgtgactggtgctctgtagtgggtgttaattaacatctgacatgaaatctacatgtctttcacatgcatgtcctatagactttcttgtctctttctagtcctttccatccaggctactgaccagatgactaggccatcggtccctgctgagagatcagtatacrttctcttcttgggccatgtgtcgctccacttaaggtagattcatagtgaactggctcgagttgttaattatttttcccaaagttgggggcctgaga

SEQ ID NO: 49863 - DNA, 1276 bp, Homo sapiens
ttttgttataaatatcaagcatcgtattatcaactccaccttaatatttcttaatacatttatttcttttatattgagttgtgttttaaaacatgctttttctactgcttgaagacacatttcctttaataaataagcagtcttctgcttaaagagtgatgtaactttaaccgtgttttcatgttttaaaaattcttgccttaacttcatttttcattgtgttgttaataacgcgatattaaatcatctctctagaaacagatttgcagtgatcattcctaattctccatgaatgtgttggggatagattgaaatggaaaacatagaagatgaccccaaaagactgtctgatcatgatttatatgtagacagcacagtgtccagctcatagtaagtactcaagaatgaagtaaataatcaaaactatgaaagcagtatacagcaatccatccccacctctacatacaatatttgacttatcaatgctgtgtaaaactatagatttgagtaataactttttaaataagatatctagttggagtaaataaaaccaacagacagacagacaaggaaaagacattacattccaaagaaggagggaagaggaattttaatttccacttataccaaataagaaaatggaggtgcagataatatcagtgrgtcacatagccaggagcagagcaggatacaacggaggggataatttgtcaataagttaattggcattttctctgtgtggcacatcttctgcctgcccttctcgaaaccctcaaggcaactagattccttttgtggcttaggttttcatcttacctcagattcttataggcttcagaacaaacactggttaaacacaacaactctctctagctattttatttcattttattttggacctcatgatgcaacagtaatatttctagcttttgtgaggctaaaatttattaaagtgaggacgttagggagaaatgcttttgaggagagggtggggtgtttccttcagactggagagacatcaaagggagtcccctgggtacagccagtgggtagccattcccgtgtgagataagtgggtgctgctgcaagcagctgggttcctggacacatgcctcccgggttccccaggcttcttgtgccccagccactgcgtggaggtggcagagctgccagaacttaagggccaggcccaggcccagtgagagagtctgtggatcggtgataaggacggtggattcataacccttttcaagactggtctttagatctttggcca

SEQ ID NO: 49864 - DNA, 614 bp, Homo sapiens
  misc_feature (1)...(614): n = A,T,C or G
gnnnnnnnnnnnnnnnnnnnnnnnnnnnnnnnnnnnnnnnnnnnnnnnnnnnnnnnnnnnnnnnnnnnnnnnnnnnnnnnnnnnnnnnnnnnnnnnnnnnntaatacatgggagaggagagaaaagggtcaggtatcagactgagaattgaagggggattaaaccaagttaaaaaaattcttaatctgtattaatatattcattgacatttcattagtgtggccattagcttggatcagttaacagcagtgacataatgtcactgcgtaatgacacaaygtaatgaacttttatctttgctcctcccctcaattaaaaaaaaaaggcgggccgggcacggtggctcatgcctgtaatcccagcactttgggaggccgaggctagcagatcatgagatcaggagatcgagaccatcctggctaacatggtgaaaccccgtctctactaaaaatacaaaaaattagccaggcgtggtagcgggcgcctgtagtcccagctactcgggaggctgaggcaggagaatggtgtgaacctgggaggcggagcttgcagtgggccgagatcgtgccactgcactccagcctgggcgacagagcgaggctccgtctcaaaaa

SEQ ID NO: 49865 - DNA, 641 bp, Homo sapiens
tgagaacaattgccccaagaaaaatatctccagctgggctcggtggctcatgcctgtaatcccagcactttgggaggccgaggtgggcagatcacgaggtcagaagttcgagaccagcctgagcaacatggtgaaaccccgtatctactaaatatacaaaacytagctgggcttggtggtgcatgcctgtaatcccagatactcgggaggctgaggcaggagaatcgcttgaacctgggaggcagaggtcgcagtgagtcgagattgtgccactgcactccagcctgagtgacagagcaagactccgtctcaaaaaaacccccaaaactcccccaccccccaagagacacatataagactattcattgcaacgatgtttgtgattaccccccaaattaaattacttaatgtctttcaataagagtatggatgaatactttttgatatagtcacataataaaatatatttttaaagttaaaaaaatgaatgtgttcgatttacatgtattggctgggcgtggtggctcacccctgtaataccagcatattgggtggccaaggtgggaggatcacctgaggtgaggagttcgagaccagcctggccatcatggcaaaaccttgtctctactaaaaattcaaaa

SEQ ID NO: 49866 - DNA, 641 bp, Homo sapiens
tgagaacaattgccccaagaaaaatatctccagctgggctcggtggctcatgcctgtaatcccagcactttgggaggccgaggtgggcagatcacgaggtcagaagttcgagaccagcctgagcaacatggtgaaaccccgtatctactaaatatacaaaacctagctgggcttggtgrtgcatgcctgtaatcccagatactcgggaggctgaggcaggagaatcgcttgaacctgggaggcagaggtcgcagtgagtcgagattgtgccactgcactccagcctgagtgacagagcaagactccgtctcaaaaaaacccccaaaactcccccaccccccaagagacacatataagactattcattgcaacgatgtttgtgattaccccccaaattaaattacttaatgtctttcaataagagtatggatgaatactttttgatatagtcacataataaaatatatttttaaagttaaaaaaatgaatgtgttcgatttacatgtattggctgggcgtggtggctcacccctgtaataccagcatattgggtggccaaggtgggaggatcacctgaggtgaggagttcgagaccagcctggccatcatggcaaaaccttgtctctactaaaaattcaaaa

SEQ ID NO: 49867 - DNA, 641 bp, Homo sapiens
tgagaacaattgccccaagaaaaatatctccagctgggctcggtggctcatgcctgtaatcccagcactttgggaggccgaggtgggcagatcacgaggtcagaagttcgagaccagcctgagcaacatggtgaaaccccgtatctactaaatatacaaaacctagctgggcttggtggtgcatgcctgtaatcccagatactcgggaggctgaggcaggagaatcgcttgaacctgggaggcagaggtcgcagtgagtcgagattgtgccactgcactccagcctgagtgacagagcaagactccgtctcaaaaaaaccccmaaaactcccccaccccccaagagacacatataagactattcattgcaacgatgtttgtgattaccccccaaattaaattacttaatgtctttcaataagagtatggatgaatactttttgatatagtcacataataaaatatatttttaaagttaaaaaaatgaatgtgttcgatttacatgtattggctgggcgtggtggctcacccctgtaataccagcatattgggtggccaaggtgggaggatcacctgaggtgaggagttcgagaccagcctggccatcatggcaaaaccttgtctctactaaaaattcaaaa

SEQ ID NO: 49868 - DNA, 597 bp, Homo sapiens
agaaaacttcaactggctgtttcccgatggaatccactttctccacccagggctggaccaccagctgccccgctttttgccggctgcttgctgaccctaatagatggcttgggatattcgaagggtaatgtcttttctgtctgcaaagctcttgatcctgggttctcagtcatggttgcaaaggaaattctccctcagatttcttacagaactcctgcagctgtcaggcagggcaagaagccaaaatacccagggaacaacttgaacaggcatcagcatagttcccgctcagagcaggagtcccaacasagagtatcctgttcctgttccttttccttttgaagccagagatcaagcctttgatttgtgtggtgatgattatcatgtagcctgctgggtgtaccgggctctgggagtggagctaagaggcacctaattcccccagcgctccccagagcctcctgagccccagcagataacttcatagtcaagctgagattgtctttttgcctttaaattcatacatgcagcccggaggccactcagcttcccggtattttcattaagaatcccctcagcagtcattttcatacttca

SEQ ID NO: 49869 - DNA, 597 bp, Homo sapiens
agaaaacttcaactggctgtttcccgatggaatccactttctccacccagggctggaccaccagctgccccgctttttgccggctgcttgctgaccctaatagatggcttgggatattcgaagggtaatgtcttttctgtctgcaaagctcttgatcctgggttctcagtcatggttgcaaaggaaattctccctcagatttcttacagaactcctgcagctgtcaggcagggcaagaagccaaaatacccagggaacaacttgaacaggcatcagcatagttcccgctcagagcaggagtcccaacagagagtatcctgttcctgttccttttccttttgaagccagagatcaagcctttgatttgtgtggtgatgattatcatgtagcctgctgggtgtaccgggctctgggagtggagctaagaggcacctaattcccccagcgctccccagagcctcctgagccccagyagataacttcatagtcaagctgagattgtctttttgcctttaaattcatacatgcagcccggaggccactcagcttcccggtattttcattaagaatcccctcagcagtcattttcatacttca

SEQ ID NO: 49870 - DNA, 545 bp, Homo sapiens
attgttttggacaactaaaaaagattaaagctttactttgatctgatccctgctctttcatggcctctcttagaacagtggtkttaaaactgtgtgtatagggtgtcttcagatggcagcatggtggtagggggttcagctctactcttaccagaagagctctatatttatccattttttcacaatgacatttttatattggagtgatagtaatgagtaagttcgattggggataaaaaacaaaaatgagcttctggtactaagccttgaaggtcaccgatgctggctaaggttcttgatggcattatgatgattagaacacacaatgtggacaggacgatatctgtgtcaggtacaaaagttcataaagctggagtagaaggcaatcatattgacatattttagggtataggttaggaaaagtagttatagggattccaaattcagattttgagtatttggcagggggctgcaaatgaatatgcagctcttatctggctttaggatatgggcctaggagtggctcagctaactaggaatcaaaa

SEQ ID NO: 49871 - DNA, 299 bp, Homo sapiens
atacttgaggctgtggccgccttctccagggagcggcaggcaactggaggaaggtgtcaactccaaagcaaatttttttatgtttgctagtttttatgtttgctagttttataaaactagggccgttttataaaaaaaaaaaaaaatggggccaggcgcagtggttcacgcctgttatcccaccacttatgggaggccaaggtgggcggatcgtgaggtcaggagttcaagaccagcctgascaacatggtgaaaccctgtctctactaaaaatacaaaaattagacaggcagatggtg

SEQ ID NO: 49872 - DNA, 575 bp, Homo sapiens
ccaacctatggtttcatttacatagtgcagatcttttctttgtgggtgatacaaagggacacttcaacctcagcctggtggaattttcagattccaaattaaggaagtgttaaaatgcaaaagatccattacatccttcctgaagacattctttcgcatccaatatacttcctgaggaagttaccaacatctcattacttgcaggactcaagaagtctagtagaaagagtgtgggacttgaaacaaggcagatttgtgtttaaaggtcctacccaggtgacttcaggcaagtcacttaacctctctgagcctcagtttgtcatctgtacaatggrgatgataatacccacatcaaagtttcattgtgaagactgaatactacatgctctaatctatgaagtatctaacacagagtcagaagcctgggtgatcagtaaaagtcagttcttttcgcttcccttcctatgttgtccttgtttttcttcccgaaaagagagaatgtctagagcagggttttccagccccagcactgttgacattttgagcctgatcattccttgttgtggggggctgtt

SEQ ID NO: 49873 - DNA, 656 bp, Homo sapiens
cactgggcaggccaggactggtaaaaccttgaatttcccctctggttgacccaggagctgtttgatgaaagttctgctcatagtattagtgctggcttaggaagcttggctttcttgccattgtaatgagtgttgtaactcctggtctctgtgggtcaggccaacaacagcagagtagagttgatgtggattttgagggcgttatggggagatgacatttcaggaaagaataattgacttaaagctattgcttttttcttaaaggcagggggcatggcagaacagaaagaaaagaataataatccatatttgcccaaaaatctatcttcacagttttaatgtaccactgtctatatatatatatatatatatatatatatatatatatatatatgaaatttgtgcttcagtgaatatatttccactgtgtttgagtagactctaaataatttataaatgaagacttttaytgaatctttcatcaggccttcagtagaacctccggggtttgttcaccttctgatatcccaagagaaataatatctccagattcttgttgatttttttgagctgtgtattttatgccatagtactcttaacatcatctggaaaaaggttaccaagatttacatttggaagatcaggataaccttcaa

SEQ ID NO: 49874 - DNA, 245 bp, Homo sapiens
tatgtcgtcaaccccttttaaaaataactggaggtagcttttaatagtaaatacacaaacgataagaggattagaaacaaagaggataaagaaagagcacaagtagtcccgttttgatatatatgagttgtataaaatgttaaattgtggggggctggaggaagggtgcatgggatttcctgyacatttctttgtaatctacagggtctataattatttcaaaaaacatatttttaaaaacagca

SEQ ID NO: 49875 - DNA, 1570 bp, Homo sapiens
ctggggttaatgctatggaaattacccaaagagctcaaactcttttttttttattattattttttttttttactgttcaaatctggactgacatcttagaatayaacctaatagtagcagaaatcagattttgtgttaatttgaaatgtacataattcagttttacaggaagttattcagatgtgtaaattctgagtaacgctttgttttgcattatattgttaagaaattgttcataaaatctgtattctgctccctctaaccagttctgtaggcatttattgctagtcttgggattgtcagacctatggatatttctggccctttattttgaactgtttgaggtaaatgtcacttcccagagttcatatgttcttcatctcagcaactggggagtgacagtagggagtaacagtacgatgtgccttatcaggaggaagaagtttgtggaggtctgagctaagtgtctatgatttattgtgaagactggaaactcccctggagctcaagccactaatttctttttatagcataagaaagcttggcctgcacattttccctgcagcacatatattgacagataatacatttttatatgggtctgcagacacatgaacttcaaggctaatcaatgccaagggcatacataaagaggtatgcaaacgacagggaagtcagtggaaaccatctaaagaaaactttctcatattcaaaaaatgtcctcaataaaataccatgaatcttagtgttaatcctgaaaccaggttctctgtttcctccttttttatatctcatttacggctgtgatgcagaagtctggccttaggtttatatcccatggctatacccaaggtgcttgaatgcacctttactgctatcttggcactcaagggttcataaaaaaattatgttcaacaaagcaccaaagtgaagaggtgaaaagacatcacacaaacattttaagaagcaattcatcatttatagtggcatctaaccagatattaattgtcctgcaagaaagaacaaagttgttcttaagtcaaaatattgagtctcatgctgggttataaccttatgcatcatttatgtaagtggtgtctagaaataaaataattgtttgcaggattccaccaccacatacagcctggtggttctgactcactcctctgactcattggccccatattattccctttggatagattaggcagaatggtaggatattgaccattaaaataattttatgggattaactttccaattagtgctagaggaaatttctgatttttcaaatgagactcttatggtctaaccaacgaaccactctgccttaataaattcaccatacatgtaccagaaaagaattctatgaaatagttgcaacactgaataatgaaggcattatgaaaatttttggcttaatcattacaatttcaagtttaaggtgtaattaatgccattttttctgcagtgtcacatgtaagctaagtagggtttaataccttttcaatgcattaataaaatgcttatgatggaattcttgtcaatattttttctgaagttagagaaa

SEQ ID NO: 49876 - DNA, 1529 bp, Homo sapiens
tgctgcttccaaactggtaaccaagacttgcarttctttgccctagagattctgatgggagaaaattagaaactggggtcttttataaatgtctacatcttttgaagagtagacagtacttagattacattagatcacctggaagatgaggagacagaactgatgaggtcataggaaacaattgtagggcattgggggtgaaatagaaaaatgtatgcacagtaggaatctaaacgctacacctcgaacagtgcagtagaaaggtagagaagcctcagaataaaaggcggaatggtccacccagagaatctagatcctagacactagagttcccacttcaacaaagagtctcataggtgactacaaagccacaaacctgcaggaaccaaaaggatatgaaggctggaacaatgggctctccatgacaaccactgtggtcagatgattgatgcgctaaagggtctctctaaatgtgtgaacttaggagcatgggaagctccaagaataatgaaagtgttgtctgtctcatgagctcctaaggcatcctatcgtggatcttattatgctcaatgtagctaccattttttgttgccatttttggctaccattgtcagcccaggtgatagtaaactttttctgtaaagggccagacagtaaatatttaaccccaaattgtgaccaatacagtctggcacagccactcaactctaccattatacgacaaaacagccaaagacaatatgtaaatgaatgggcacatcagagttccaataaaactttatttgcaaaaacaagcagtggggcagatttggcccaagggccgtaattagccaacttctagtccaatgtattaaattataagctcactgaggtcagagatcatatcttttactaaaccagcaaaaatttactgagaatttaccatcaaaatccgtgaaaagcagccatcaggacttagtagtgattaagacaaaatatgttctctaatgtagcttagattctactacaaaaggggagatagcacataaataaaattaatatctgaaagcaaccaatcttattcaccaatgagtctctactgtcctgcacaatattcactacccaccaagtactgagtataaatttgctcaatgaatttgctcatgtctagtactgtaacatttttggccaaccctcagctctttcctgcctaagcagttaggggcttaagctgctgaaacttccaagaggaagtggagttacaagctagtcctaaagcagctggctcaatcactcattatttttaatgaaaccacaagccagtgcctgcctccagctcctaccaggagctgaagaacttcttcagtgtgggctctcctacaaggacaaatctgctgaagtaacagggaatgaacagctcttgtggtaagctgagtaatgtccctcaaggatatccacatccttatcccctgaatctgtgaatgtgttgtcttacatggccgaaaggactttgcagctacaataaagttaaggattttcacatggggaca

SEQ ID NO: 49877 - DNA, 1529 bp, Homo sapiens
tgctgcttccaaactggtaaccaagacttgcagttctttgccctagagattctgatgggagaaaattagaaactggggtcttttataaatgtctacatcttttgaagagtagacagtacttagattacattagatcacctggaagatgaggagacagaactgatgaggtcataggaaacaattgtagggcattgggggtgaaatagaaaaatgtatgcacagtaggaatctaaacgctacacctcgaacagtgcagtagaaaggtagagaagcctcagaataaaaggcggaatggtccacccagagaatctagatcctagacactagagttcccacttcarcaaagagtctcataggtgactacaaagccacaaacctgcaggaaccaaaaggatatgaaggctggaacaatgggctctccatgacaaccactgtggtcagatgattgatgcgctaaagggtctctctaaatgtgtgaacttaggagcatgggaagctccaagaataatgaaagtgttgtctgtctcatgagctcctaaggcatcctatcgtggatcttattatgctcaatgtagctaccattttttgttgccatttttggctaccattgtcagcccaggtgatagtaaactttttctgtaaagggccagacagtaaatatttaaccccaaattgtgaccaatacagtctggcacagccactcaactctaccattatacgacaaaacagccaaagacaatatgtaaatgaatgggcacatcagagttccaataaaactttatttgcaaaaacaagcagtggggcagatttggcccaagggccgtaattagccaacttctagtccaatgtattaaattataagctcactgaggtcagagatcatatcttttactaaaccagcaaaaatttactgagaatttaccatcaaaatccgtgaaaagcagccatcaggacttagtagtgattaagacaaaatatgttctctaatgtagcttagattctactacaaaaggggagatagcacataaataaaattaatatctgaaagcaaccaatcttattcaccaatgagtctctactgtcctgcacaatattcactacccaccaagtactgagtataaatttgctcaatgaatttgctcatgtctagtactgtaacatttttggccaaccctcagctctttcctgcctaagcagttaggggcttaagctgctgaaacttccaagaggaagtggagttacaagctagtcctaaagcagctggctcaatcactcattatttttaatgaaaccacaagccagtgcctgcctccagctcctaccaggagctgaagaacttcttcagtgtgggctctcctacaaggacaaatctgctgaagtaacagggaatgaacagctcttgtggtaagctgagtaatgtccctcaaggatatccacatccttatcccctgaatctgtgaatgtgttgtcttacatggccgaaaggactttgcagctacaataaagttaaggattttcacatggggaca

SEQ ID NO: 49878 - DNA, 552 bp, Homo sapiens
ttctcactctagcaggactgaattagttaccacaagagcaggttgttataaagtgaggttgccttgttttgggtctctgcacacaacatttgcctatctgcttttccaccatgttgygacacagcacatggtgctcacctgaagccaagcagatgttggtgccatgctcttggactttccagccaccagaaccatgagccaaataaacctcctcttttctttataaattattcagtttcaggtattctgttatagcaacattaaatggactgagtacacaagaatttgaaggaaggcactaaataaaggatcaagaatttactactctatatggacaggcagaagtattatgactttcactcattcaattgtttgacatacatttattgtttactctgtataaaataatacaatacttagcactttgggaaacaaaggtaaattagggatgattctcgctctcaaaaaataattgtttatatctcagtgggtatgggatttttagctttcagcagaaagccctttgtaaagcagtttaaatgtggaaatgca

SEQ ID NO: 49879 - DNA, 632 bp, Homo sapiens
ttatctttttatttgcaaggtgatgtcaataaccctttttctctttcactacttctttttagagctgcactctccaatgtgatagcgaccggcagcatgtggttattgagcacttaatgatggcctaatgttaagggctaatcagaatttagatatgaaataaatgtgaagcttatattgaaacttaaagacctcataaaaataatgaatgcaaaataactcattaamaaattgttggttaccttttgaaatattttagatataatgtgttaaataaaatatattttaaaattaatatcacttctttttttatctgataggattactttagatataaattaaatatcagtataaaattaagtgctttctttgaaaagacatttattaaacaggaagaattttgtgggaaggtgatgaaaatgctattggttatattttggaatgccagtctatgaaatgtaattatttcaattcaaaggagctatatattcaaaaagaaaaactaggtgatattttctcttgtggttcactactgtatgtctttgtatttcttttttcatgcttggaattgatgttctgatggattacacagtgcaacatttatgacgaaagtagctttagaaaagactgtt

SEQ ID NO: 49880 - DNA, 633 bp, Homo sapiens
tgacattcctgcttctctcttttaaggacccttatgattacactgagcccacacaaataatccagcataacctattgattttaagattaaatcacatctgcaatgtcccttttgccatttaaaataatatattcacaaggttccagggataagaacatggatatctttgggggaccattattctgccttctacagctggtaacagctaaactccctcgtggtcctacttttgaattggggatcagctaggcagatctgcttctgcagctaattgctggccctcttycacttgtctcatccttcatgtgtctatcaccaacctgcaggaggccaggcttgctatggacacatggcatgaacaaagattaggggagaatgtcagtagaagcatgcaaactgcttaaggtctgggttagaactggccactctattacttctgcttctttttatttttttggccaaagtaagtaaaactatacctgatacaagtggtgggaaaacagattctgcctcttaatgggagtagctgcaaagccaaattgccaaggacatggattcaggaaaactcttaactggggccatccagacaatctggctatcacaatgggtcacaagtattcaagtttactaaaa

SEQ ID NO: 49881 - DNA, 586 bp, Homo sapiens
tcactagtttattgaatatctgtttatttcaaagccttcttatgcactggtgcaagcaccaaagtgctcaggctgagttcttagaattgaacaaaaggccaaagataagctttccttttgtgtaatctggctaaatcccagtacatagaatagatagaaagagcaggttgtgagatcctagggcatttgttcagttcctgcctgaatctctgaaactgccttatcccctgtaatccaccctccacatagctacctagtgacctaatgcagagacctgatcacatggcttgtggtagagtgcatggatggacctgactctccagtcctccgtatagccatgaactttgtcatatgacttggcaggagctctcactggttcccctcctcttgaatctagactgggtcatgtgactttggtggacagaatgaggtggaagtgacaacgtgccagttctgagcccaracctcaagacaccttgcatgtttctttccgtgctcttgtgcctctgtcattgccatgagcaagacatgcccaggctggcccagcagttccaggaggaagacaagacatatatggagaagagcc

SEQ ID NO: 49882 - DNA, 586 bp, Homo sapiens
tcactagtttattgaatatctgtttatttcaaagccttcttatgcactggtgcaagcaccaaagtgctcaggctgagttcttagaattgaacaaaaggccaaagataagctttccttttgtgtaatctggctaaatcccagtacatagaatagatagaaagagcaggttgtgagatcctagggcatttgttcagttcctgcctgaatctctgaaactgccttatcccctgtaatccaccctccacatagctacctagtgacctaatgcagagacctgatcacatggcttgtggtagagtgcatggatggacctgactctccagtcctccgtatagccatgaactttgtcatatgacttggcaggagctctcactggttcccctcctcttgaatctagactgggtcatgtgactttggtggacagaatgaggtggaagtgacaacgtgccagttctgagcccaarcctcaagacaccttgcatgtttctttccgtgctcttgtgcctctgtcattgccatgagcaagacatgcccaggctggcccagcagttccaggaggaagacaagacatatatggagaagagcc

SEQ ID NO: 49883 - DNA, 520 bp, Homo sapiens
ggcaatgatttagattatacaagattatgtgcaaatactacaccattttttttctcagagacttgaccatctgtggattttggtatccatgggaggtcttggaagcaatccccttcagataccaagggatgactgcagtttcagttcattagcccactctaacatagtcataagaacaggcactactscccatatgccacaaagtaagaggaccaaaaggagatcacgatgtatgattcaaataagtaaatgtaataataaagaaaatgtggctaaaaaaaaagaaacttcaaagtgtgatattgttaatgtgtctcaaatatttggcagaatgatttgaagagactatgaagaaacgaaatcttaaacaagatgacaaatagttaaagatagaaaagaggttgtgtacagaaaggcagctaagacaaaagttgggccagcacagtaagtcaaaggaattattgttttctgtccccccttccctcaaagaaagagggagcagaagaagtataagcggtaa

SEQ ID NO: 49884 - DNA, 528 bp, Homo sapiens
agcccttttgtttccctttcatgtatccatccaccagcaatctgtgggccccagaaaggtgcctgccacagctccgtaatcccagtgtcagcctgctctcaggaaacactctcattgatatagtttggatatttgtccctgcccaaatctcatattgaattttaatccccartgctgaggtggggtctgcagggaggtgtttgggtcacaggggcagaccgattatggcttagtgctgtctttagggcgcggtggctcctgcctgtaatcccagtactttggaaggccaaggcagatggatcatgaggtcaggggatcgagaccatcctggctaacatggtgaaaccctgtttctactaaaattacaaaaaatcagtcagacatggtggcacatgcctgtagtcccagctacttaggaggctgaggcaggagaattgcttgaacctgggaagcggaggttgcagtgagccgagatcgcgccactgcactccagccttggtgacacagcgagactccgtccaaaaaaaa

SEQ ID NO: 49885 - DNA, 528 bp, Homo sapiens
agcccttttgtttccctttcatgtatccatccaccagcaatctgtgggccccagaaaggtgcctgccacagctccgtaatcccagtgtcagcctgctctcaggaaacactctcattgatatagtttggatatttgtccctgcccaaatctcatattgaattttaatccccagtgctgaggtggggtctgcagggaggtgtttgggtcacaggggcagaccgattatggcttagtgctgtctttagggcgcggtggctcctgcctgtaatcccagtactttggaaggccaaggcagatggatcatgaggtcaggggatcgagaccatcctggctaacatggtgaaaccctgtttctactaaaattacaaaaaatcagtcagacatggtggcacatgcctgtagtcccagctacttaggagkctgaggcaggagaattgcttgaacctgggaagcggaggttgcagtgagccgagatcgcgccactgcactccagccttggtgacacagcgagactccgtccaaaaaaaa

SEQ ID NO: 49886 - DNA, 528 bp, Homo sapiens
agcccttttgtttccctttcatgtatccatccaccagcaatctgtgggccccagaaaggtgcctgccacagctccgtaatcccagtgtcagcctgctctcaggaaacactctcattgatatagtttggatatttgtccctgcccaaatctcatattgaattttaatccccagtgctgaggtggggtctgcagggaggtgtttgggtcacaggggcagaccgattatggcttagtgctgtctttagggcgcggtggctcctgcctgtaatcccagtactttggaaggccaaggcagatggatcatgaggtcaggggatcgagaccatcctggctaacatggtgaaaccctgtttctactaaaattacaaaaaatcagtcagacatggtggcacatgcctgtagtcccagctacttaggaggctgaggcaggagaattgcttgaacctgggaagcggaggttgcagtgagccgagatcrcgccactgcactccagccttggtgacacagcgagactccgtccaaaaaaaa

SEQ ID NO: 49887 - DNA, 528 bp, Homo sapiens
agcccttttgtttccctttcatgtatccatccaccagcaatctgtgggccccagaaaggtgcctgccacagctccgtaatcccagtgtcagcctgctctcaggaaacactctcattgatatagtttggatatttgtccctgcccaaatctcatattgaattttaatccccagtgctgaggtggggtctgcagggaggtgtttgggtcacaggggcagaccgattatggcttagtgctgtctttagggcgcggtggctcctgcctgtaatcccagtactttggaaggccaaggcagatggatcatgaggtcaggggatcgagaccatcctggctaacatggtgaaaccctgtttctactaaaattacaaaaaatcagtcagacatggtggcacatgcctgtagtcccagctacttaggaggctgaggcaggagaattgcttgaacctgggaagcggaggttgcagtgagccgagatcgcgccactgcactccagcctkggtgacacagcgagactccgtccaaaaaaaa

SEQ ID NO: 49888 - DNA, 546 bp, Homo sapiens
tccaaaaacagctattaagctgcttggcctcacttatttcttccctctcccagcagtgtggagcttaaagaaaaggttgaggatttggatgtgtgtccattaacctcattccagccagttccataggtctcatacaagatactaccagagtctcaggccccaggagggatgaaggctgcatcctgtcccaaagctgggtctgaaggaataggcatcaagaaaagagataccttgactcttgtcagtggtgcactggtgcctcatggaaactaggcttggggcttccctctttgcttcccacccctccccttccagcagcctattaatcactgagtataaaatactgtctggaggaccctattcccccacccctaccctgaggctccctgccaggcagaaggctgcaagctaagcagggagaaaagagagaatgggcrgcaggcaggggtgcccatcatttatcaaccaaacacagcggccagccactctttccagcagcattctggcaggctgggcaggcgatgcagccagtgttttctggcaatg

SEQ ID NO: 49889 - DNA, 570 bp, Homo sapiens
tgactgcactgtactcgcttggggggatgtattacagcttttgtaactttatgcaaaatgcttacagtataatgtcaaatgggggagaagacgacgaatgattgtatgtaactacaactacaaccacaaaaattcctacgtatgaataaagacaagggcttagaaagatgagattacggactaatttcatcttttagggtgaaagaactgactttttgtatgtatgtgacattaccattataaatgtagttaggaaaaatatatttctctaattttcccattaaggggtctataatgtctgtatagtaaaaaataattccttttttgaaaaccagaaaacrggtccttggttctagaatatctgctctctgtaacacagtgacagcaatcaccaaaagatagtgctgcagctgtagggctcatcataaagcttcaagagacattttgggcaagagaacaatgtaattaatgttttccaagggccttcaaagaaagttgttgcttacataaacaattcttgttattcaaatatatatatatattcaacttacaaaatgatgaactagagca

SEQ ID NO: 49890 - DNA, 570 bp, Homo sapiens
tgactgcactgtactcgcttggggggatgtattacagcttttgtaactttatgcaaaatgcttacagtataatgtcaaatgggggagaagacgacgaatgattgtatgtaactacaactacaaccacaaaaattcctacgtatgaataaagacaagggcttagaaagatgagattacggactaatttcatcttttagggtgaaagaactgactttttgtatgtatgtgacattaccattataaatgtagttaggaaaaatatatttctctaattttcccattaaggggtctataatgtctgtatagtaaaaaataattccttttttgaaaaccagaaaacaggtcyttggttctagaatatctgctctctgtaacacagtgacagcaatcaccaaaagatagtgctgcagctgtagggctcatcataaagcttcaagagacattttgggcaagagaacaatgtaattaatgttttccaagggccttcaaagaaagttgttgcttacataaacaattcttgttattcaaatatatatatatattcaacttacaaaatgatgaactagagca

SEQ ID NO: 49891 - DNA, 570 bp, Homo sapiens
tgactgcactgtactcgcttggggggatgtattacagcttttgtaactttatgcaaaatgcttacagtataatgtcaaatgggggagaagacgacgaatgattgtatgtaactacaactacaaccacaaaaattcctacgtatgaataaagacaagggcttagaaagatgagattacggactaatttcatcttttagggtgaaagaactgactttttgtatgtatgtgacattaccattataaatgtagttaggaaaaatatatttctctaattttcccattaaggggtctataatgtctgtatagtaaaaaataattccttttttgaaaaccagaaaacaggtccttggttctagaatatctgctctcygtaacacagtgacagcaatcaccaaaagatagtgctgcagctgtagggctcatcataaagcttcaagagacattttgggcaagagaacaatgtaattaatgttttccaagggccttcaaagaaagttgttgcttacataaacaattcttgttattcaaatatatatatatattcaacttacaaaatgatgaactagagca

SEQ ID NO: 49892 - DNA, 660 bp, Homo sapiens
cactgcagttgataaactggcctttttgctggagttgtaccaaaaatttctccatctgtctttgccagaatgcatgtttccaattatgtgaaactcttcaggagaagttaactcctttttgaattggttaaatcaaaaacgcggtgtttgggaaagcactgccagtgctgcaggggcccgtgctggggcccaccgagccagccaccgcaggatgacatgctgcaccgcagggctcctttcttaggctccattttctctcatttgtggacaaaataggggtatccgttgtgggaaaatgggtctctgtggtcaccgaatcttgggtaagtggctggaggcaggaagggtgggtgcgcctcacccctcactcactcccacacctttgctttcccaaggcaatgtggaagcaggattctggatgggtagtgcaaaggaggtgcaaaccttaatgtcaggctgcctggtaaagagtttttaaatgaggtgacgcaygcttcccccttctcagctgagagcctggcccttccctccccgactctgaaggcctcggcctcctcccagcctctggctgtccacacttatgaatttgtctctctcccttcctctctcctgtcttgagccccgtctccctccccaccacacattcgcactgagatttcc

SEQ ID NO: 49893 - DNA, 548 bp, Homo sapiens
ggaatggctttcwttgaaaaaatactgtctccatacttaatgtctattagctacttctttgaaggagaaatgtaattaaaatgcctgtgtttaaaagcggctttaaattattaacactgtcttagtccatttaagttgctataaaaaaattcctgaggctgggtaatatataaagaaaaaaggtgtatttggctcatgatttttctggctggaagattgggcatctagtgaaagccttagggctgcttctactcatggtaaaggaagggaaactagtatatgcagagatcacaacgtgagggtggaatcaaggagggcagcaaggtgccaggctcttttttaacaaccagcacacataggaactaatagagatagagcttactcattaccatgaggatagcaccaagccattcatgagggatctgtcgcacaacccagacacctctcattaatccctgcctctaatgatggagatcacatttcaacatgagatttggagaggccagtatctaaactatagcagatactgttccacgtctttggatttt

SEQ ID NO: 49894 - DNA, 548 bp, Homo sapiens
ggaatggctttcattgaaaaaatactgtctccatacttaatgtctattagctacttctttgaaggagaaatgtaattaaaatgcctgtgtttaaaagcggctttaaattattaacactgtcttagtccatttaagttgctataaaaaaattcctgaggctgggtaatatataaagaaaaaaggtgtatttggctcatgatttttctggctggaagattgggcatctagtgaaagccttagggctgcttctactcatggtaaaggaagggaaactagtatatgcagagatcacaacgtgagggtggaatcaaggagggcagcaaggtgccaggctcttttttaacaaccagcacacataggaactaatagagatagagcttactcattaccatgaggatagcaccaagccattcatgagggatctgtcrcacaacccagacacctctcattaatccctgcctctaatgatggagatcacatttcaacatgagatttggagaggccagtatctaaactatagcagatactgttccacgtctttggatttt

SEQ ID NO: 49895 - DNA, 314 bp, Homo sapiens
tgaaggaaattataggatttggccttgtcacagggtctttggtacaaaggaaaacctctccataatttaaaaacrcaactcacaaacttgatggttttataaattttggtttttatatattgatgtctttaaaatcagggcacacatattagaaatgttattactttatataaatgccatcatttaaagaaaaagcaactttattttttaatcatttttaattgacaaaatttatatatatttatggtatacaaagcaatgttctcatatatgtatatactatggagtgattcaatcaagcttattaatataag

SEQ ID NO: 49896 - DNA, 648 bp, Homo sapiens
ggggatgaatgagggaaagtatcctgcctacggccagctcatcaatatcagaactgggcttccaatgaatattagataaaactgatatgttttgggagtttatcacatgcctccccctatgctgagtccattatatgtgtcatcttatccaacctgtaccacaaacctatgaagtggtgaaaataccttgcccagggtgagtttagcagtaactggtggatatgggatctgaacacacgactggactccaagacatatggtcagatgtgcaactagatgcctaggcattggactcccatcccagtgcacttttccatctccctcactaggaagagattctaggtgtcatttccaatttttacatgttcttcactccacccaagagaggccagaaccattcctaaagcaccaacacattgaggcaaaatgtcaggcagcagagstgtggcacctttcaaggatgacaagcctttaactaaactctggccttcagtagggagaatgttgagctgaaaacaaatctgggcaacatttcaggtgctgagccttgttgctgacaccacagaggcccagcaatgctgctgagttagtggtggcagacaacttgctcctggaatctacaagggaactggaaatgttaggaaggaa

SEQ ID NO: 49897 - DNA, 603 bp, Homo sapiens
atggtggtgcacccctgtcatcccagctactcagaaggctgaggcaggagaatcgcttgaacctgggaggcagaggttgcagtgagctgagattgtgccactgcactccagcctgggcaacagagtgagactgtgaaaaaaaagaaagaaagaaagaaagaaaaaaaagaaagaaagagaaggagagagggaggaaggaagggaagttaaacatatataataaaagtagatagcatagtrtatcaacccccataatcctgaaactcaacaaccatcactgatgattggtcaaatgtgagaggtgccctccatatacctggaggaaacgagcatctttctctctgaacacacagggacacggaaaaaatctgaacaaacaggccctactaagtcccctcagtttattaccattggatcctattgtcacggagaatcttattcctccacgactctccgttcttcatcaagcctagctcaggtttgtctggtctttgctcccttatgaaggcccccatgtcacataaaatgtacattaaatacatttgtatgctttctcttgttaatctgtctttcattcaagtggctttagccacaaacctagga

SEQ ID NO: 49898 - DNA, 1448 bp, Homo sapiens
tgaaatatttgttatacaataatggtgatttagttgtcctttttcagatatagaatttcaatacatttactcaaaatgtggagtaagatagagttcaagatcttagattctagaaactatatagcaggaatatgaccataggctacttcctaacagctgtgtgatttgggtataataacttaatctctttaagcctcatttctccttctgaaaaactgaagaaataacacctactcgtctgagttcttaaaaggattaaatagcgtggtgtgtcattttggattccaccagcagcacagtcagggacaagtatcctaacacaagaaatttgtcatggtggtaattccaggaaagtctggtggagacaggtgaagtgagactgagagaggaaggtggctaatagaatttgcactatctagcaaacatcactgaaggctgctagagcttaactctgctgtattgaacaaggtcttcagagtgaactaactgaagagcaaggagccagacgattagttgaggatgttggactttgtgtgtgtgtgtgtgcgtgtgtgtgtgtatgtacaggtgcgtgtgcttgtgcatgtacactaattttcaggtaattccatcccagccgagtgggctctggagacagagaaaagtcctgaggcaaagacatatagatggaagtccagtctgtatgttttcaatgcttctctacccagagagatatcctgctatgcattgtaacatgcaacgcttaacagaatatataaaaataataaataagtcatagctattagctattattaaatagtatggtttctgagatgactaggtatcctcttctgggaaatggagaaaacaacaggacattgtacaggatcctctgcgagatttcgatgatgacatacataaaatgtctagcttacagttaattaaggcttagtggaattaatccatgatatttatatttcatctataataccactttattataatatgctatgaattcaaaactttggtcctacctacagtatgtactaataattaagctaattaggcaagaaataattcaatgtcacatgaataacaaagttttaaagatcaaatgataatgtagttaccactacgactcttgtcagtgttgctaggttaaccactgcttctggatctgactcaaaaaacatataacaaaagaaaagtttcacacagtttttccaaaagtcttcctatctaaagtggccattttcaacacatctcaaaaactttggactgcaaaatttctaaagaaattcctgaaattacttgcaagtaaaaacagcgcatgtaatttatcttaatttaaaacaatcaaactatcttacacaatattgaatattgaacactaacttgaaatgactttcttttatgctatttgtggttttgagtaatgtartaatcatacatgcttggtacttgtgatc

SEQ ID NO: 49899 - DNA, 537 bp, Homo sapiens
taccgagaagcatttggaaacgcactgcttcaaagactggaagctttgaaaagagatggacagtcatgactacactttttcctttcagaggggctggtgctggtacagaatgttgatayaaagcttaaaattcttgcatatggtcatagaaaatgcatctttggttttgtgtttttatcacttgcttccaacttaggcttttggctcagaagattattgaataatgatttgtcttagtttctgtttcagtaagggaattctgaggccgttgctatgataccatcattaagacattcacatgtcttcatataatatctcttcatttcaaatcctaatcactatttcatactattacagggctttgatgctgccagcactgtcttttacataggaaattctagatttgcacagtaatagaggaattagaagtacctaactatacactttgattcagcctgctaaatcaggggttcaatactagcttggacaaactttgtagtaattaattgctaccagccttattggaaacaaattatc

SEQ ID NO: 49900 - DNA, 598 bp, Homo sapiens
aggatcacttgagcccaggagttcaagaccagcctgagcaacacagcaagacaccatctctaaaaataaataaataaataaataaatattttgaaaagaaaagaaaaaaggaaatctggcaagcagtaagctgttccttgtgcctgaggcgatggtgacccttgattccatgtatatttgaacatctggattccctgcatcacatcttttgccacctatagctggaatgaagtgttgtcttggagtctactgtacatttaaaagtaaactcttggaaaaaagaaaaacaaagaaaaaacagcagaggcaggccagcccatggtgcctggagccacccgacttaggaacactacttatgggagatgattttcccagtgcgtaggtctttttgagtttggttttctgttgctggtagccaaaagcatccaaatggattaaaactgcacaaaaatcagttttgttacaaatgaagggtaaatattaatttattattaataaattttaatacattaattaaattaattaatttaatacattaattaattaaattaatttaatacattaattaattaaattaawttaatacattaattaaata

SEQ ID NO: 49901 - DNA, 640 bp, Homo sapiens
atggatgaagctggaaaccatcattctgagcaaactgtcacaaggacagaaaaccaaacaccacatgttctcactcataggtgggaaatgaacaatgagaacacttagacacaggaaggggaacatcacacaccrgggcctgttgtggggtggggggagggggaagggatagcattaggagatatgtctaatgtaaatgacgagttaatgggtgcagcacaccaacatggcacatgtatacatatgtaacaaacctgcacgttgtgcacatgtacccaagaacttaaaatataataataataataaagggtaatgtatggcttgaaaaggtatatttaatagaacctgagttgggactaataaaaagcttaagaaatgttaatctaaaatctcaatgttaagattccagttcaatgatactagaaaatatattgtaaccctctttgctactgatgacctatttctaatttatttcctttttaattatggcataatttctcaacataacacatcaaaacttatactcccttaaatattaaaaaataatacaaatgtaagcaatattttaaatacaatatttaattgttagatacattaggtatattatattacttataacattccattatataaaaattca

SEQ ID NO: 49902 - DNA, 640 bp, Homo sapiens
atggatgaagctggaaaccatcattctgagcaaactgtcacaaggacagaaaaccaaacaccacatgttctcactcataggtgggaaatgaacaatgagaacacttagacacaggaaggggaacatcacacaccggggcctgttgtggggtggggggagggggaagggatagcattaggagatatgtctaatgtaaatgacgagttaatgggtgcagcacaccaacatggcacatgtatacatatgtaacaaacctgcacgttgtgcacatgtacccragaacttaaaatataataataataataaagggtaatgtatggcttgaaaaggtatatttaatagaacctgagttgggactaataaaaagcttaagaaatgttaatctaaaatctcaatgttaagattccagttcaatgatactagaaaatatattgtaaccctctttgctactgatgacctatttctaatttatttcctttttaattatggcataatttctcaacataacacatcaaaacttatactcccttaaatattaaaaaataatacaaatgtaagcaatattttaaatacaatatttaattgttagatacattaggtatattatattacttataacattccattatataaaaattca

SEQ ID NO: 49903 - DNA, 423 bp, Homo sapiens
atttcctccctacattcacttccccatcataccttagcttcaagaaggtagcagctgtggtctggttcattttcagctgtatgctcagcccttggtgttcagcctgccacagagatakccctcagtatccatctgtgcatgaattggttgctgggagaaccctggagaaggagcagccatgtttgcaaggagagctagggaagattttgcagaggaggtggtgtctgagcagagccttaaaggacagaaaagaagatcccatctaagacactctcaagaattcagggacacaggtggggcactttgggagggtggggagtctgggctttcaagtcaggtgctcctactaactgtgggacttagggcaaagtcctggctagaaggggtaatgtgaagatcagaaagggcaattacagagtacca

SEQ ID NO: 49904 - DNA, 2123 bp, Homo sapiens
gctttgttctcacaagaaaataaaaatagcctgaaataaggatctgaaatataagtcagactaatactgagatgccagctattgaatttaggattccttaaaaatatcttaccaaaattaacaccgaaggaaacagaaagagtaggcaacccttttattaaaaaaccagaaatatgtcaggcacagtggctcaagcctgtaatcctagagccctgataggctgaggcagttggatcacttgagcccaagagcttgaagctgcagtgagccatgatcacaccgctacacttcagcctgggtgacagagccagttcctgattgaaaaaagaactaacagtcttcccacaaaaggaagacaaaccattttacaggcaaattccaccacaatttcaagcatatcattctaatcttatataaattttttcaaaggataggaaaagaggaaataatccccaactcattctgagttcagcacaattttaatacaaatactagacaaagaaagagagaaaactattcttagaccttgtcactcatggatttagatacagaaattctaaattaagtattagcagctgaataaaaatgcataaaaaagataatactgcaagaccgaactgagtttgttccaggaatgcaaaaaaggcttaatagaaaatattaaacatcatttgccaatcaacatattaaaaacatttaatcatgtcaacaggagtagaaaatgtgtttgataaaattcagtattcatccatgataaaaaaagaaaaaacatttagtaaactagaaatatcattaaacttccttagcctgataatggtatattcaaagtacctaaggcaaacctcaatttcttttttttattattatactttaagttctggggtacatgtgcacaatgcacaggtttgttacataggtatacatgtgccatgttgggcaaacctcaatttaaatgggaaagccatagacacactctctttaaaatctgaactaagactatttgcattaagaattgtctaaaagttttcttcagttcattaggacaagaaaaaaagacattaaaggcagaaagattggaaaggaaaagacaaaacattttatgatctgcatatttgtttatacaaaatgtaaataatctatggacagattatttaaaataataaggaaacctaacaatgtggccttatataaactcagtatgtaaaaatcaactgcatttctacacattagcaataaacaagaaaatggaacttttaaaaaaaatatctttacaacaacaaaaataaaaggaacctagacataagtgtaataaaagatgtacaaaatgtgtacacagaaatttatgaaactataaaggcattaaagaagatataaataagtaaaaagatttcctatactcaaggatacaacttactgatataaatatgccatgtcttcccaaatctatctagagatgcactgtaactgcaaatcaaaatcccaaaagtttttttggcatttaagcagattctaaagtgtgtatagaagattaaatgattaaaaattgcctagacactctcaaagaaaaactaaagggcttaccctaccagatatcgatacttagtataacattacagtggcagggacagacaatttgatcaaggaaacataatagagattctagaaagaggattatctatagatatacagttgacccttgaacaacatgggtttgaattgcatgggtccacttacgccaagatcttcttccacctctgccaccccaagatagcaagaccaacccttctcttcctcagcctacacaacgtgaaggcaatgagtacgaagacctytaaatgatccatttacacctaatttatagaaaatatatttcctcttccttatgactttctcaataacattttcttttctctagcttactttattgtaagaatatagtatatgatacttattgtaagaatatagtatatgatacacacaaaatatgtgttaattgactacgttattggtaaggctttgggtcaaaagtaagctattagtagttaactttttggaaagtcaaaagttatacaccgattttcgactgcaccttttgttcaaaggtgaattgtacttagtaatat

SEQ ID NO: 49905 - DNA, 1266 bp, Homo sapiens
tcttcactttaaaacattctcaaaactttataatattccaaaagaaaagaaaaaaccatcaacttttgacctgctgtctttcttggttctgtttatgttctcaacttgttctactctatcaaactctccaaatgggggggcctatggccatattttccatccatgctcactcttcagaatcccctaacccaaatttctttgcatacagtcagtttattcaagttacacttgttcttaggttcatcctttccaacatttctgatcatcttctccttcctggggctctctttggaaatgacagttaccattcaaggggcatccttaaaccactttctattacattatttaatccttacatgaatcatgagtaatcatttctgtaagggctattacatggtaatattcattccttatagaaaaaatagaaaatacctgtaaacaaaagcaaattgaaatctcttctaattttaccaacaggagataactttttgctaatgtttgttaatatttgggatgttttctccaggcattttttctgtgaaattttgcaaaacatgagattttatatgctgagcatacattttagtctgtctttatttattaacaatagattatgaacccttttccatgttaataaatatacagctacaacttaattcttaatgtttgcacactatgtttctatatggatatatgacaacttccttacaaatctattgttaaacatttgaattaattccaatcttcactattaaaatagcatcttatagctatatctttgtgtacatccttaattatttctccaaaataaattcctaaatgtggaaatgaattcatacttctgcttttgacaaatttcccccccagaaagtttgtactaatttagactcccaacagccatgtgtgaacagggctatttccctgcactctaaccaacatttgggtattaatgtttttattgycctggctaatttcataagtagcattttattattgttttaattagcttttctacagttataagtaaaatagaatatgctcttccatgtttatttaccaattgatttttttcttttgtgatttaaattgttaatattcttcatatagtaacactggtacatagaaataaatattaaccagtattattatcatcatcatgattatcattataggtagcagcccttgtacattgtaaacagaatcccaaatttttcatttccttttaatttaatccaattatattttatcaatttaggccatacagag

SEQ ID NO: 49906 - DNA, 622 bp, Homo sapiens
cagagaatgtgctgagatttacaggacttaccaattgtcatagcaatctggaagggtattcttacctccattttcaaactaaggaaacaaagaggaggagtggattagctaaataactcatgtgagattgtataattagtaagaggcagggtttgaattctttccactacaacataccttgccttggccttcttacaaaaaacaagcaaaagagaaagcatatgagttcagctgtgcctatctaggaaatcagaggtctatttctaacaatttagttcaataaacttttactatgcacctactaaaagtgcctcagcattttctagggcctagaaaaagagaagagtamaataatccctgtcttcaaggaccttataacctaaagggcagaaaaacccatgtacttatatctttcatgccatttacttacatctttgctccattcacaaaagattttaggtactataaatgacacaaagaaaaacaaaaactgtaataataactgaagtcaagagaaataaaataggaagttaagacaaggtgttaagtagaaatgcaagcatgaagattcttgggtcctcagtggttattaaacttaagtcataatttgatcctaagcttg

SEQ ID NO: 49907 - DNA, 599 bp, Homo sapiens
ttttttaaaattaaagaaaaactttttttttaaaaatagaaagagggtcttgccctgttgcccatgatggtgtgcagtgtagctcactgcaccctctacatcttgggctcaagcgatcctcctgccttggcctcccaaagcagtgggattacaggcgtgagccaccacacctggcctggttatctttgattatgttccagactttatatttgaaaattgttcatagaagtaacttgagcctgaaagaatgttgtctatttatcttcagagaggattttcttttccttctgttggacactgagggtgaccagcagtctagggcaatcttggaaatggagctttctggagcacccagccaaactgaaggtgtgctgcagccagtgtgaggcttggtttacttcttctggttcatgcttttttttttttttttttttaaaagcagtctcaccctattgcccaggctggagtgcaatggtgcgatctcagctcactgcaacctccgcctcccgggttcaagcgattctcctgcctcagcttcccaagtagctgggattataggcgcccrccaccatacctggctaatttttgtatttttagtg

SEQ ID NO: 49908 - DNA, 522 bp, Homo sapiens
ggactggtggtcggggggcctgggttctctttctggtcagcactgtgtggccttgaccttgcctatctatgaaatgggstggtccagatctctccagtccacactctgaatctatcttgttcacggctgcatcttgcaccaagcatagcacaaggcacatagttcctcaataaatactcactgagtgacagacttctaaagccctgctctatgccagggttctgagattctgcaacttggtattgtccaggcagacatttgggggactacccagggacaggcagaaggaactgcttcactaccaacattgaagagtggcagactttcacataaatgacattatttaatcctcgtaacagccctgtggcctgcacttccccatcaccatttcacagatgaggaaactgaggctagaaggttaagtgacctgatcaagctcacacccaggtccttggcttcaaatccagtgctctttctgctgcccccaaatgctttcatttgctcttagaataaaccccaaga

SEQ ID NO: 49909 - DNA, 522 bp, Homo sapiens
ggactggtggtcggggggcctgggttctctttctggtcagcactgtgtggccttgaccttgcctatctatgaaatggggtggtccagatctctccagtccacactctgaatctatcttgttcacggctgcatcttgcaccaagcmtagcacaaggcacatagttcctcaataaatactcactgagtgacagacttctaaagccctgctctatgccagggttctgagattctgcaacttggtattgtccaggcagacatttgggggactacccagggacaggcagaaggaactgcttcactaccaacattgaagagtggcagactttcacataaatgacattatttaatcctcgtaacagccctgtggcctgcacttccccatcaccatttcacagatgaggaaactgaggctagaaggttaagtgacctgatcaagctcacacccaggtccttggcttcaaatccagtgctctttctgctgcccccaaatgctttcatttgctcttagaataaaccccaaga

SEQ ID NO: 49910 - DNA, 531 bp, Homo sapiens
caagtgccatggttccttgggtgtgcttcctgagccctagaggtagtaactgccccccatgtctgctacccctctttaaaggtaccttttcccctcttagttggtaaccaccttttattaattttttcagttaattgctttttatattacttttttctgtgtggtttctgtctcctgactggaccttgactgatacatttaacaaagttcatatttttgtcacatatgcttgctgttattttttttcttttaaggaaattacacattacrgatatagctaaagtcccttctaatggccatccctggttctataccctttctccaagagggaaccattattatgagtttgaggtaaatcctcatattttaaaaatgtttccatccattcatatgtatccacaaataaggcatgctatttttacattttaaaatgtatatgagtgatatgcttttcatatcattctgaatcttttttctatctacccaacattatataacttaaaactatgcatgtggatatatgtagatcta

SEQ ID NO: 49911 - DNA, 1054 bp, Homo sapiens
catgtgtgccataactctgatctcaatagctgttttgatactgacttctgttcaacctcttctctccctgagcctttcatcagaactacttgggaaggaacgagataggcttacatcagtttctcatcctctcctaggaggtttcataaatatttgttgacttaatgacctatcttctcttgctgcaatactctagtgttgctaaagcagaagttaaaatggctaagagaaaagttgcaagagggaaaagttgtccctaaaaacttgaaggctggctaaattaagactataactcattaattaagtagaatgattccttgggaatgactgtataattttaaaggtgcctacaaagatatatacggcaaataataatcataaaattggcatgttcaaataatcaacgtatataaaacaatcttttatatactataaatagaataatacatgtttattaatttgtttagatagacaacttctgcctcacacttaaggccccaaaggaacaagaataaaagcaatacttagattatcaggaactacaatgccaatgaaggaatgacaaccatcattgttgtcaacaacatgtcaacaacatcaacaaatagaaagcattcctccattcatcactccttctgggtaagccagttttaacttttttccctaaaactcaaaaagttgtgccagaatgtgacaaaacrttctataactttaatccctgtttagataattttttgcttctatatacaaaagagaaaaaaattgagtagtcattataagatctatacattacaaaaataaatcatttgcctatctaaccattataatcttcccaacttgtaagcatgttcaaattaccacagatgaaggaaaccatttaaataattctaaaaacaccggttttaattgtaagatatgtcatttgatttgtgtgttggtcaaaagtacctaaattatctttttaaatcattggtataaaaccaaaacatcttccagaaccacaataataattgttttcttttctcctggtgcatttcttaaaatgttaacttca

SEQ ID NO: 49912 - DNA, 1919 bp, Homo sapiens
gcctgtgtccttggattaaggctcaatccaagatgggcctcccagagggctcccctttattttcttcttcgagagagatacctcccacgttcccagctcagaaggggccaaccaggtggctcaattcccaccctgagaaacacaagcaggtggttatgggtgggcctggtgcctgaggtcagcaactgaccctcctccaggccgggcctctggtctcctgcccgcctggccctgtgccctgcatccccagttccgtctctgcctttgtctacctctgcattttgctcttctctcttgcgcctccttctctaaacagccttttggaaagagcacagagatcagttactatttgacccctcttagccacaatttccccacctgctaagcagggtcaaatgcccttcacgtggtgaggtgaggctcaggagctacacgcacacactaggcccctgaaaagcctcctgggccagagcactcccagcttacccagaaagaagggcttctttggtcccttccttttttgcccactgaagccttcctccctccggccagggatgtgaatgcacccccggtcctgtccatcccacatcacatcaggcgcttccgggcacggaccatctgctccacaaccctgcttctctatgacacagcctctggggccaggggctcaagtgggatcttccattttctatctgcctggatttggagagcaagggacaggaccatggccttgaaagtcttggagcagtgaggtggggtgggacggtggggggatgggagcaaaattccctcctcctggtcttggcttttgcggtttctatcctccaaaacaacaacaacaacaacaacaaaacccatcgggggtcattcctggtctcctcactcctccattactttctcacacctcctttcctccttttcttccaggagcttttattatcacacactccccaaggcaaggcccagcccatcctctgcttctaggagaggggagaggaagaagcagtcactcaaggccaccctggggctgcttagagactcccccaggggagctgcactggggggtctctctcccctctctcatgcctccagggggtttgggagaggctgcaggctgatcaaactggcccctgaccttgcctgctttgctgatgaatgcaactctccaaaggtggaatgagctggagatcgcagggtgcaacggcagcacatccatggggcctggagagagccctgggaaaagtcagggatgaagcagggggaggtgctggacacagtttgaaggtaactcacacttcatggaaacagtgttcggaaactcagagatagcgcaggcggtttcggcagttcccagttttctgaggtgggccctgccctcccaacctgaactcgcatcaaggatagccaccaggatgtccctcctatctgtgggtatctgtttaggctctcaaagaagagggacaygttggggggagaaactggaaacttccttgtccaagtcagaggccctggaggggcctatcagcctggagatgcgatgccttccctaccgtggctggattctttctgtagcgggtttagggaggaaggagggaaccaggagatgacacaataggcttaaattaaagcaggacagattatggcaggcctaaagaatcatttctttttttattcagaaggcaatggaaaagacacactcatttactccaaagcacttattgtgcatgaaggacaggcagcccctgtgccaagcgctagggtgtatctgaataagacacaggttctacctgtaaaccaataatgcaggtgagctaagacccagacagcagcgtgggccagcccatcggaaccacagagctgtgagtgaccaaggatgtgctctagggtggctggtgcagttgattcctgaaggacaaaca

SEQ ID NO: 49913 - DNA, 1919 bp, Homo sapiens
gcctgtgtccttggattaaggctcaatccaagatgggcctcccagagggctcccctttattttcttcttcgagagagatacctcccacgttcccagctcagaaggggccaaccaggtggctcaattcccaccctgagaaacacaagcaggtggttatgggtgggcctggtgcctgaggtcagcaactgaccctcctccaggccgggcctctggtctcctgcccgcctggccctgtgccctgcatccccagttccgtctctgcctttgtctacctctgcattttgctcttctctcttgcgcctccttctctaaacagccttttggaaagagcacagagatcagttactatttgacccctcttagccacaatttccccacctgctaagcagggtcaaatgcccttcacgtggtgaggtgaggctcaggagctacacgcacacactaggcccctgaaaagcctcctgggccagagcactcccagcttacccagaaagaagggcttctttggtcccttccttttttgcccactgaagccttcctccctccggccagggatgtgaatgcacccccggtcctgtccatcccacatcacatcaggcgcttccgggcacggaccatctgctccacaaccctgcttctctatgacacagcctctggggccaggggctcaagtgggatcttccattttctatctgcctggatttggagagcaagggacaggaccatggccttgaaagtcttggagcagtgaggtggggtgggacggtggggggatgggagcaaaattccctcctcctggtcttggcttttgcggtttctatcctccaaaacaacaacaacaacaacaacaaaacccatcgggggtcattcctggtctcctcactcctccattactttctcacacctcctttcctccttttcttccaggagcttttattatcacacactccccaaggcaaggcccagcccatcctctgcttctaggagaggggagaggaagaagcagtcactcaaggccaccctggggctgcttagagactcccccaggggagctgcactggggggtctctctcccctctctcatgcctccagggggtttgggagaggctgcaggctgatcaaactggcccctgaccttgcctgctttgctgatgaatgcaactctccaaaggtggaatgagctggagatcgcagggtgcaacggcagcacatccatggggcctggagagagccctgggaaaagtcagggatgaagcagggggaggtgctggacacagtttgaaggtaactcacacttcatggaaacagtgttcggaaactcagagatagcgcaggcggtttcggcagttcccagttttctgaggtgggccctgccctcccaacctgaactcgcatcaaggatagccaccaggatgtccctcctatctgtgggtatctgtttaggctctcaaagaagagggacacgttggggggagaaactggaaacttccttgtccaagtcagaggccctggaggggcctatcagcctggagatgcgatgccttccctaccgtggctggattctttctgtagcgggtttagggaggaaggagggaaccaggagatgacacaataggcttaaattaaagcaggacagattatggcaggmctaaagaatcatttctttttttattcagaaggcaatggaaaagacacactcatttactccaaagcacttattgtgcatgaaggacaggcagcccctgtgccaagcgctagggtgtatctgaataagacacaggttctacctgtaaaccaataatgcaggtgagctaagacccagacagcagcgtgggccagcccatcggaaccacagagctgtgagtgaccaaggatgtgctctagggtggctggtgcagttgattcctgaaggacaaaca

SEQ ID NO: 49914 - DNA, 602 bp, Homo sapiens
gctcctttgtttagtgggcttgttgaacttttctgaacattcaaaaaatatttttgtcaaataatttggacatttcaaattctgcttcaagcatgaagggaggttgccactaacaccattgttacctcttgggccacggtctcccttgggatggtcatttcagagggaggaaatacccttggctgtcagaggccaagggtctataaacttctagatgagggtaagcgtgttgaagtcatactgatttggattttcattctgtctcctctgctcacaatagctatatgaccttgggcaggtagcctaacctctctgagcttaatagcctcattttaaaaatggaaatcatatgtactcttcaggatgattttgaaaattaaatgagatcatatatataaaatgtctgccatacaaaagatagtcaatgaatkctaattttgtctttcctttcctcatttaattcatctctctacctccaaatacagccttatcaaaactaggtcagtcataatttatcttattttttaagaccatggaaggaaaaaaagatggtttaatccttctcctaatccatattgtgacttctaactttctctggcagg

SEQ ID NO: 49915 - DNA, 587 bp, Homo sapiens
atgtaaggaattaagtggagctttagcagattctctgcttcaaaatccactcccatactttcattgtctgttatggcagctacctactctactattaaaatggcatctgtcatatattgctgtgtaacaaattaactcaaatatcttcttcaggggtcaactggggttgtaaatattctaaggctgcacggggaaagaatctgctttcaagttcattcaagtagttgttggtaatgtttagttccttgctggctgatggccagaggcttccctcacctctcataatatggcagctggcttcactgaagatcatgagagatacaagagagacagagattagagtaagttaaaacaagacagacacaatattttgtttccaaatcttagaggtaccatctcatttcttttgccatattatggcatgacyaccgagaggaacaaatattgggtggaagttcagaatctgcctaccagttttcctctgataactaataatttatgccccttccacatgaaaaagccattcagttcctctaaaacctctacaaaattatcatcccatcacattatgtcaatgtctaccatct

SEQ ID NO: 49916 - DNA, 1224 bp, Homo sapiens
gatagagcataaaagaaaatttgaacctacctgatgggtagatttgaattactggcttaagcggctgaactttgttcccagtatgtttactccattgagtgcgtggattcttggaagatatatctggaaccacttccagaagcaaatgaaaaatcagactacagtcccatctcccatgtttaaactcatttggtaccatttcaataagttttatataagtattgtatacaaaactgaaagctaaaaaataaatgttctaggtcatagggagtcagtaaaattttaggagcaagggtgattttattaagaagactagtatgcaggtggcaaaaaatagctatataataaataaaataatgtattcacatcatcaagaggcacaaagatagaggtggtttaggtggtctgtggaggtcccacatagcagacagtctagctgttgtaagccatagggacagaatatatattgactttgcttgccgcacccctgggccaattgtttagttgggaaatggagtgcccaatgaagactgtggcaggtagaattggagtgaggaagcggaagcaccataactttcatcctcatcaaggccacatagaaaggagttcaccatgtgaagaaatatgaagcatagcatgtatctaataaagaataaattacaggagcagtaaatcattaagtaaatacaggtgggagcttcggagctgatgcctatggagagctggagatgtaaggttattacagctcaggaaagagcaggtaaagacctgaaccagggtagcaggccttgaaatagaaaggcatgtgaactgtacaaaaaataaacttattcttttcacttttgtgtacttgtatcgtgtcaagcatctgaatcaacaatttgaaacatagttttgccctcagcaaatttctaaatggcctaaaattggtttgtcctccgaacaattctaaaaagactttttgacttgtaggacacatttattcacttgtcctgaaaaccctaccaattcttatgatcaaatttttatttctcttcctctttcrttttttcccattaatttctaatttgctatttttctcaaattctctattgtgtattaactcactttcttcaatcctcctttccttctgctctatcaaagtatcacttcctaaattagccttcttgagctagacaatatagaatctcaccactacctaacactcctcttgtctctactttg

SEQ ID NO: 49917 - DNA, 587 bp, Homo sapiens
ggattacagtgtgccctgcctgacatggtacaaacttaatccctcatgcaacagtgttgggagacggggacttttggtaatttaggctgattaatgctgtttttaagtgagcttgtgggagtgggttcaggctctttcactgtcccgctgtgtgaagacacaatgtttatcctcttaccctctgccttctgccaygtgaggacactgtaataactggcaccttgattgggtgctttgaagcctctaaaactgtgagatgatacatttctgtcccatatgggttacccaagctgtaatctgggtaatccataaaggactgtgactcttttttacagcagcacaaacgggctgagacatatggcatggcttctcttcctacccctctactgactgtcatcaccaagctcagtgagcattttttagtccttatctttctaaaaggacatcttggtagagtggggactggagctctgacagtgctggtgatcagggttggggagtctctccaattgatttacagttgaggcttagatactgttttaaacttggaaggaacctcctaaccatctaaacacagctactgattc

SEQ ID NO: 49918 - DNA, 587 bp, Homo sapiens
ggattacagtgtgccctgcctgacatggtacaaacttaatccctcatgcaacagtgttgggagacggggacttttggtaatttaggctgattaatgctgtttttaagtgagcttgtgggagtgggttcaggctctttcactgtcccgctgtgtgaagacacaatgtttatcctcttaccctctgccttctgccacgtgaggacactgtaataactggcaccttgattgggkgctttgaagcctctaaaactgtgagatgatacatttctgtcccatatgggttacccaagctgtaatctgggtaatccataaaggactgtgactcttttttacagcagcacaaacgggctgagacatatggcatggcttctcttcctacccctctactgactgtcatcaccaagctcagtgagcattttttagtccttatctttctaaaaggacatcttggtagagtggggactggagctctgacagtgctggtgatcagggttggggagtctctccaattgatttacagttgaggcttagatactgttttaaacttggaaggaacctcctaaccatctaaacacagctactgattc

SEQ ID NO: 49919 - DNA, 587 bp, Homo sapiens
ggattacagtgtgccctgcctgacatggtacaaacttaatccctcatgcaacagtgttgggagacggggacttttggtaatttaggctgattaatgctgtttttaagtgagcttgtgggagtgggttcaggctctttcactgtcccgctgtgtgaagacacaatgtttatcctcttaccctctgccttctgccacgtgaggacactgtaataactggcaccttgattgggtgctttgaagcctctaaaactgtgagatgatacatttctgtcccatatgggttacccaagctgtaatctgggtaatccataaaggactgtgactctttkttacagcagcacaaacgggctgagacatatggcatggcttctcttcctacccctctactgactgtcatcaccaagctcagtgagcattttttagtccttatctttctaaaaggacatcttggtagagtggggactggagctctgacagtgctggtgatcagggttggggagtctctccaattgatttacagttgaggcttagatactgttttaaacttggaaggaacctcctaaccatctaaacacagctactgattc

SEQ ID NO: 49920 - DNA, 625 bp, Homo sapiens
ttatcatggctatatctttcatgcctttcttgtctaacgcccagaaaattctcaataagattttaaaaataaactctccagatcttgatttcctcctctgtaaatagtgaataacaatcacagtgttgttgcaatcaatatgagttaatatatattttagtaatagtaatccagtatattatttgaataaaccagttttcattactaataaactagtgtatctcagtataaaagttgaaggaagacattttataaacatacttttatataattatgaaaacacttttaaaatacactggacaatgcacaattcaaaagctttggattcaaagtgggcctgccaaacgatggatatttcctgtgggactgttaccagtctttcarttgcagtcctgattgagaatgctgcagttggaagaagtgttttgcaatgacaaaggaatactggttgaactctgatgagtagacttatcatgtgtggcaggaagtaaggttatctgtgtccaggaaacagatggaaacccatagactgcttatgaaagaaatgaattcaggggattagaaagtcataccatttagttttgaggggaaattattgacggagtttgcagtaatttggcttgtc

SEQ ID NO: 49921 - DNA, 1461 bp, Homo sapiens
tattgaatagggagacatattttccacagtttggcatttatatctttgatatttttcttttggatttttcaatggcatgatttcatattttatagagactattgaatttttatgtaattaaatgtaaggcttctaagttttatgtctttagaaatgccttgacaaaggacttgtattaagaataggttaagaatacttatatttcaacagttgaaagacaaataacccacttaaaaagtgggcaaaggatttcaatagaaatattcaaatatgacatacataatcaacatacacatgaaaagatgctgaacgtcattagtcactggaaaatgcaaataaaaaccaaaatgagatgtcacttcacatctactaagatatctaaattttttctttttttttctgagacggagtctcactctgtcacccacctctgcctcctgagttcaagtgattctcccgcctccgcctcccgagtagctgggactacagacgtgcaccaccacacttggctaatttttttgtatttttagtagagacagtgtttcactatgttggccaggctggtctcgaactcctgaccttgtgatctgccagcctcagccgcccaaaatgttgggattataggcatgaaccaccatgcccggcctaattttttaaataaatcagaaacagacaataacaagtattgatgaaaatgtggcaaaactggaacacttgtatactgctggtggcattgtaaaatgtttggaacactttagagagcagtttggcagtttctcaaaatgttaaactttttaaagaagatttttgcatccattttcatcagggatattgccctgtattattctttctttgttgtgtctttggttggatttggtatcagggtaatgctaatgtcacagaatgagtatggaagtataccctataccctcctcttcaatttttttttttcaaagagtttcagtaaaactggtattagttctctgtttatgtttggtagaattcagcagtaaagccatcaggtcttgggcttttttttttttttttttgataggagactttttattattgcttstatctcattactcattatttgtctggtcagttttttttttcttatttattcatggttcaatttggcaagttgcataggtctaggaatttatccatttcatctaggttttccaatttgttggcatatagttgttcatacagatctataacaatcatttatatttttgtgttatcaatatgcaaaagaatgaaactagaccccctcaccctatataaatatcaaatcaaaatagattaaaatgcataaatgtaagacctgaaactatgaaactactacagcaaaacattggggaaatgctttgagacattgatatgggtaaagacttcattagactgggcatgaagacttcaagattttattgatgtgggcaaagacctcaaaaccac

SEQ ID NO: 49922 - DNA, 506 bp, Homo sapiens
ccgggaggcggagctggcagtgagccgagatcacgccactgcactccagcctgggcgacagagygagactcatccaaaaaaaaaaagattgtcagtgctttgggaatgaaattgaggggcctgggatggtatactgaaaagtaagggcaataggaattcttgacacagagcagagcatggtgtttaggtacgtagactctggggccagacatgtgtgtatcaatctcacatctttattcgacaagttatgcaacctcactatgcttcaattttctcatcagtaatatgtagataatagtacttagcatattggattgttacggtgatcaaattagtttatttggtatagcacttagaacattcctgggacatcatgagagtgattttttttaatttgataaatacttatatttgtttcttagtgctgccacaacaaagtatcaccaactgggtggcttaaaacaacagaaattcatttctcattctgcaggctagatgtctaaatg

SEQ ID NO: 49923 - DNA, 506 bp, Homo sapiens
ccgggaggcggagctggcagtgagccgagatcacgccactgcactccagcctgggcgacagagcgagactcatccaaaaaaaaaaagattgtcagtgctttgggaatgaaattgaggggcctgggatggtatactgaaaagtaagggcaataggaattcttgacacagagcagagcatggtgtttaggtacgtagactctggggccagacatgtgtgtatcaatctcacatctttattygacaagttatgcaacctcactatgcttcaattttctcatcagtaatatgtagataatagtacttagcatattggattgttacggtgatcaaattagtttatttggtatagcacttagaacattcctgggacatcatgagagtgattttttttaatttgataaatacttatatttgtttcttagtgctgccacaacaaagtatcaccaactgggtggcttaaaacaacagaaattcatttctcattctgcaggctagatgtctaaatg

SEQ ID NO: 49924 - DNA, 615 bp, Homo sapiens
tgtgtcagcaatattaccagtcaccacattgggcaattagggggttgctcttgatttatcaaaattgtgaatgtttgctgcttcaaggtggagggttctgctgctttaattcagaacctttatgggctacagctcatatgctgtcttagttcattctgtgcttctataacagaatatctaagactgaataatttgtaataaacagaaatatattttcttaaagttctggaggttgagaaatccaagatcaagaggctggcacctggtgagagccctcttgctgcatcatcctacggcaggagagcaaaagagcactcaggtgagagagaggaaaggaggccaaccacatcctttgatcaggaatactcwcctgcaataatggtgttaagccacacaggaaggcagatccctcatggcctagttttaccttaaaggtcccacctctcaacaccattgcatcgggattgtttctaacaagtgaactttgggggacacgttcaaatcacagcatatgctaaatagcaacaccagagacattccattcccaggtcaatttccaacagagtacttaaaactttttccctttcctcccacttgagagaatatgtcagaaat

SEQ ID NO: 49925 - DNA, 615 bp, Homo sapiens
tgtgtcagcaatattaccagtcaccacattgggcaattagggggttgctcttgatttatcaaaattgtgaatgtttgctgcttcaaggtggagggttctgctgctttaattcagaacctttatgggctacagctcatatgctgtcttagttcattctgtgcttctataacagaatatctaagactgaataatttgtaataaacagaaatatattttcttaaagttctggaggttgagaaatccaagatcaagaggctggcacctggtgagagccctcttgctgcatcatcctacggcaggagagcaaaagagcactcaggtgagagagaggaaaggaggccaaccacatcctttgatcaggaatactcacctgcaataatggtrttaagccacacaggaaggcagatccctcatggcctagttttaccttaaaggtcccacctctcaacaccattgcatcgggattgtttctaacaagtgaactttgggggacacgttcaaatcacagcatatgctaaatagcaacaccagagacattccattcccaggtcaatttccaacagagtacttaaaactttttccctttcctcccacttgagagaatatgtcagaaat

SEQ ID NO: 49926 - DNA, 1389 bp, Homo sapiens
cacccatctctgttaacagacattgcttaagatagcagtaattaaaaatggtctagaaaagttagtaataggtagatataccacatttatcttactaaaattctcttatttctttaaaggcttgtcccattttttttcattctgaacctgagaaatcatgctaattaagggcatagtctacccaaaccacactgtaggataaatctttttttgtttttttgagacagagtctcgctctgtcactcaggctgtagtgcaatggtgtgatctcagctcactgcaacctccgcctcctgggttcaagcaattctcctgcctcagtctcctgagcagctggggttacaggcacctgccaccacacctggctaatttttgtatttttagtagagacagggtttcaccatgttggccagtagctagggttacaggcacctgccaccacacctggctagtttttgtatttttagtagagacaggatttcaccatgttggccaggctggtcgtgaactcctgacctcaagtgatccgccatgtaggcctcccaaagtgctgggattacaggcatgattcaccatgcccagccactgtaggataagtctaatgaggaactagacttattttccatgtaacatatacccggttgccagggatagatcctccctaaaggtagctcaaataagagtgaattggcggagggtggtggaagggttactttaaggatacatggaggccagtgagaaaggaccttataaggcatccaagattaggaataccaatagagctgggcctcttagaaacagcagccctgtgactagcaggtgtcttcagtctctctcaaggactccgtggataccttggtggcattgctattgctttctgtgtatgcttgtgatcctaactggcctgttcttaacttttactctgtctgctccacctcataccctctgtatcctcactgtttcagcttgtgtgtcactttttcctgttcttcctcagctgcccagtgtatgcctcattccaactgcatttcctgctcctggctgcctggctaactctgcacctctcagttcagattcccaagagaaagaaaacttggctatcgtatggtggcatttattaataccttctgagcgtccaggacttttgaggaaatcttaagaattaaaaaaatgcatatacgatacagtacgtaccctagatgagttaggggcccacttgtggtcttggtcattagagtgtactcagggcagcagatcatctgcaaaagctgtgggccawccagcttccatagaaagttcctcacaaaaagaatagttccttagaagaacctggacacacagaaggtattgaatgagtactgattgctttttgacaataaaataggttca

SEQ ID NO: 49927 - DNA, 695 bp, Homo sapiens
gggaaaacatgaagcttccctggtgtcttgccggccatcgtgcagttaagaccccaaggcgcctcatctcttttgccacactgttcacagacatcttgaagggaaaaacgaaattgctggcaagttggcataatgtcaacgcatcagtagatcccactgagattctttaaagaaaaaaaaaaaccatacattttcacagcttatcccaactgtccttgccgtatgttcctgtacgcggtagactttttggactatgaggaaatcaaaaaacaaagtgtagcaactggccagttgtggtggctcacacctgtaatcccagcactttgggaggctgaggctggaggatcgcttgaggtcaggagttcaagactagcttggtcaatatggcgaaaccccatctctactaaaaatacaaaaattagctggatacggtggtgcatgcctgtaatcccagctacttgggaggttgaggcaggagaattgcttgaacccaggaggtggaggtcgcagtgagctgagatctcaccactgcgctccagcctgagtgacagagcgagactctgtttcaaaaacaaacaacagacaaaccaaagtgtagcaactgacctcttatgaggtattttatattgtgaggggcaagcaagaaataaaagactaattatgaccgaatataaagtatttactasctgctgggc

SEQ ID NO: 49928 - DNA, 600 bp, Homo sapiens
tgaagccagagcagctccctcaagcagcttattcttcaatggagcttgggtcaaggccaggyggttaacagaccccatctcagagaatacaagagtcttttggaaggaccatttacagaggtagaggcaggattatggggaccagcaagagatgctgaggcacccagggactagcaatggcaggaagctgtgtctacctcaggcctgaaagggcaggggagggagtagggatgaggggctgcccagcagcagcgccaatcatgagaaagtggggagaaaatacctcatgcctctctcttcccacctttaggtctcccacaggctgaactcaactggatgccaggcacaagggaggactggggatgcagtacaagtctgccaactgttccaagtaatgttttatctttgcagtgtcaccaaccacctgatttctcccaggcctttgttaggaggaatcactacgtattttcatggttaatttttttcattgcatgaaaaaaaagctgaaaggggtaccctggccttgccttttctaaaactgttaggaagatcaacaggataaaccaggggtctgagctcctggggagataatgtggatgc

SEQ ID NO: 49929 - DNA, 550 bp, Homo sapiens
cagtaaagcaaaaaaaaaaaaaaaaaaaaaaaaggagtattacacaatattccaattcggtaaaataaattttatgtaagtctccaygtttatgcacagaaaacaaacatcgaggaataataaattatcttgggtaataggaaggcgatttgattcttgtattcttttgtactttccacatagcatttattaccattctcataaaaaaaagtaaatgatatcctatcatatttattttcatatgagtaacaaatgatgtaaatggcaattatctcttcaggagacagaacactgtgtttcattctatctgaattgaaggagacagtgtcctagacctgactcagctattgaattctctctaaggataagaaaaaaaaataattgtgtttccctatgtgccagctttctgtcctaataatacctgtcctatctacctttcaaggttgtactgtaacaaggagctggtgtaataagctactttgaaaaacataagaaaagtgaaagatattattattaatgatcatttatgaagaggtagtaattaacatgt

SEQ ID NO: 49930 - DNA, 550 bp, Homo sapiens
cagtaaagcaaaaaaaaaaaaaaaaaaaaaaaaggagtattacacaatattccaattcggtaaaataaattttatgtaagtctccatgtttatgcacagaaaacaaacatcgaggaataataaattatcttgggtaataggaaggcgatttgattcttgtattcttttgtactttccacatagcatttattaccattctcataaraaaaagtaaatgatatcctatcatatttattttcatatgagtaacaaatgatgtaaatggcaattatctcttcaggagacagaacactgtgtttcattctatctgaattgaaggagacagtgtcctagacctgactcagctattgaattctctctaaggataagaaaaaaaaataattgtgtttccctatgtgccagctttctgtcctaataatacctgtcctatctacctttcaaggttgtactgtaacaaggagctggtgtaataagctactttgaaaaacataagaaaagtgaaagatattattattaatgatcatttatgaagaggtagtaattaacatgt

SEQ ID NO: 49931 - DNA, 550 bp, Homo sapiens
gcaaataactgtattgtcatgaatagtaagattcaataagaatttctgaattctagggggagagggccaggaagaaataataagagatcattttaaagtgttttatttcagagtacagaaacaaaatttactaagttgttttgagttacagacagcttaagaagaaagaaaaagggctttctaaaatatccagaaaacagatcattaagayatccataatatcaacagcaaaacaaaaattgcagccatccctcatcagttcattcaatcctctgtgattaattcttattttgctgaatcttgggttagaaatttcagcataatcttaatacatctttttaaattttagtgctacttttcagactcattatttgtatgtgcagttcaaggcaaatcaaaatccctcttccacagacctagaactttctatatccactcaaattttgttcttcactcttctctttctcattctgtaatgaccagacattttactttaggacaaaaatacatgtttttctcttgataaacaaatacctatctaattatattg

SEQ ID NO: 49932 - DNA, 607 bp, Homo sapiens
atttcgagagataagcctgaccaaaatgtctctctctttctctcatttctgttagcgaagaagcgcatgaagcaggccttcaatcctctgtgaagctgggtagataggcagacagttaattatgtagaagcataggtagttctgagactaaatttgaggaaggagtaaacctattctacagtcagtccattgttttgcagtggttgactttatgcactgatcccagttgttctaacagttgttaccagttattctctttcagatagaacccagaagttaggaggtgtgagtaattggcttaaagcaccagaggatttgctaactagaactggaagagaaagaactactttcttttcaaacaatgaaactggaggaatgtgagtctggagttctaccacacacagagaaaacccatctgcatcagtgaaaaaataaagccaacccacacataaaggcagagagtctcgaaggtgatgacctccaaggcctccatcatccctaaggacagctctgcrcctatacgacctgcaattgcgttacaagtaccaataaaccacctttgtttgctcatgctaactggaattgggctttgacatcagcaactgaa

SEQ ID NO: 49933 - DNA, 602 bp, Homo sapiens
atatatttagtagtgtttgattttcctgtattaccagttaacctggttttaagatcacacattattagaatatcatttagaattatgtaaacacaacagattccttttttctctgctattttctaacattaaaattacaaatcaatcatcagattaaccatgtaaataaaagtcaaaagctacgaaaagcatactcattcaattcattgatctatacctttatatttctatgtaagaatcagcctgatcttttaaaatactgtaagaattcataaaattgaagtaattccatatgtagtgctgctctgttacttgtgatcttttactattctggtaataacygataaagaagcagagcacatttgcccccatatcagttttgctgtatcacagtgatgaaaacaaaaataaagaaaaagcttttaatcttctaaaaatattacaaatattacaaatcaagttactctttaaaaaaactgaaaccatgacaacttttctcctctctcctaaatcatagagatgtgcaaataaattattgacatattcttttaatgtcaaagtcattgtatgattttgatcttctacttgtttctgtatcattt

SEQ ID NO: 49934 - DNA, 556 bp, Homo sapiens
tctttttttgcaacctgcagtgatttgcaacattaactctcaagccagctttttcttctctttgactttttattaaatttaagatgaaaaagagtaatcaataatagaatggttttattaataaagacagatcaattttacagtttttcaagataaatgttttagagtttgaagctatactactctagaagtacccacagtgaaattttacatggaaaattaagaaacaaaactaggagtcttgaaatatcaaagggataaacttaaattcaggtaggttaatttgtaaaaacaagattgcaaggatcagctggaatggtttggtttgttttctgagggggttactttttttgttgttggtgagttgagtgatgatttatatatatatatattattattattttgggggccatcctaaaaaaaacscactaagctaaaaacctgtatgttagaatagaagacaatattaaaaagtatgttccagtaaagacacgtactgtttggctatggctactcccattctcctgtatgtcaatttcatgaatttctattcaaa

SEQ ID NO: 49935 - DNA, 543 bp, Homo sapiens
agattagtgcccttataaacagaggaggagaccagagcatttgcacatcctctcttcctctctctttccctctctctctccaccccatgtgaggacacagcatgaagacagccatctgaaaaccaagaagatggccatcagcagatactgaatccaccagtactttgaacttggaccttccagcctccagagctgcaagaaaaaatggttgtttaaggcactcagtctacagtagtttgttagcccaagctgagaaagacaactgatagatawcaatagcacttgtcacaatctacactttgtggctatgatttgtttccttgttcatctagtgtctctttcactagaaaggaaaatccatgaaggcagggagcacgtccatctagttaatccatcaccaacacctagcatataattgtcaatacctaatatcgaatgaatggttcctactacttctccagttaacttcatactcctcaatctctatattctctagctatataggccttattttaattcctcaagctgctattgcacattcca

SEQ ID NO: 49936 - DNA, 556 bp, Homo sapiens
tatgaccagttcatgtttgagtcagctaaatgtcagtgaaccagttggtaagcaattaccaataagtacatcaagattattttgaaatggttatttccacttggataaggggttttgtattttaataacaaatggattacttcaaattgtacttcataattaaatgcaaattctaaaataatctgtaataacacagtaagtaaaatatcatgaattaactaaaaggttaatatagagggatatttattacgatttttttcaaataatagtcttcttctgtttagtggctcatttctctttatcaagaactattccaatgttgtagcaaaagatagctaactagatgccctatgctctaccagttgtctgttttgtcattgttcagtccgtggaatctgtattgtcctcccatgctagtaattttcttctcagacaatsatatttaaaagtgtgtcattccaggctgagcgcagtggctccgcctgtaatcccagcactctgggaggccaaggcaggcggatcacctgaggttaggagttcaagaccagcctggcca

SEQ ID NO: 49937 - DNA, 571 bp, Homo sapiens
ttaacatcattcataacaccaaaatcttccaaatcacttattctctgttcattagtattaaccatgtaacttacctctagcattatttataaactttcttctgattgtgggaggtttgaatcttgtatcgcaaagtcagttgtgcaaaatgtctgacatttatttcatttccttttagtcaacataatctcccttttagttctcatcccaacaaagatgtgaaacatttaactatattcattttatacgattttttctgtcttccaaatggacacatttagtctctcgagcatatatcaatctctgttccaggtgagaaatctctctctctctctcttatctctctctccctcctcctcccctcattcactattttttcttttgcacattcatactactgactgcagaaagaataaatttttgctttagacattaaagccattcacaaagcaaagggaagacatgtgataataaattataatttaaacataaattaatctgaaatttttatatattaattmaccatttaattatttgaatatatttatttaactacttattttattgatca

SEQ ID NO: 49938 - DNA, 568 bp, Homo sapiens
aataaaatggctacaaagatttttttaaaaagcgacctatctccctcacaatttacccacaaggaaattccttgtgggcctcaagatctttatcctcaaacagttctgttgaatttcactctggcaatgtaaattgatagcttatcttcacaggtgtgagataaaggacagaactcaaagacatccgtctgcccatctgagacaaatgcgtatytagttgcttcttctgccctattgtttatgtaaaaatgcagattcactgagccagactaagggataagtgattattcctctacccatctctcacatgtacattgtgtattcagtgaaaggccaatcaaagactcaaaagaatgcaaacagttgtttcttatctacctatgacctggaagtccctgctttgggttgtcccaccttaccagactgaaccaattacatcttacacatattgattgactgtgtcatgtcttcctaaactgtacgaaacaaagctctaccctaatcaccttgggcacatgtcatcaggaccttctaaggctgtgccatgggtgtgtccttaaccttggaa

SEQ ID NO: 49939 - DNA, 568 bp, Homo sapiens
aataaaatggctacaaagatttttttaaaaagcgacctatctccctcacaatttacccacaaggaaattccttgtgggcctcaagatctttatcctcaaacagttctgttgaatttcactctggcaatgtaaattgatagcttatcttcacaggtgtgagataaaggacagaactcaaagacatccgtctgcccatctgagacaaatgcgtatctagttgcttcttctgccctattgtttatgtaaaaatgcagattcactgagccagactaagggataagtgattattcctctacccatctctcacatgtamattgtgtattcagtgaaaggccaatcaaagactcaaaagaatgcaaacagttgtttcttatctacctatgacctggaagtccctgctttgggttgtcccaccttaccagactgaaccaattacatcttacacatattgattgactgtgtcatgtcttcctaaactgtacgaaacaaagctctaccctaatcaccttgggcacatgtcatcaggaccttctaaggctgtgccatgggtgtgtccttaaccttggaa

SEQ ID NO: 49940 - DNA, 571 bp, Homo sapiens
ctgttgcagacttaatccccaatgcaatagtgctgggaggtgtggcctaataagaggcgattatgtcatgagggtggagcccttacgagtggattaatgtcagwattggcaagagttggtggttaaaatgagtgtggttcctgatacctctttctacctcttgtgcttgctttcaccttcaacccttccaccatgggatgaccctctccagatgctgaatccatgttttcagaccttccagtctctgggaaacatgagctacataaactattctttataaattacccagtctgtgttattctgttgtagatgcataaaatgaactaagagatctcaaaaaggccccacctcttaatacaatcatattaggggttaagatttcaaaatatgaatttggagtgggggacacacttagttcataacactcattgaagaaaatttgagttgttttcagttttacatttatgtaaaagattttgtgtaaatataagtttttatttctctagggtaaatacctaggaatggaattacttggtcatataatcagtgaattgtttgaatttaaaataaa

SEQ ID NO: 49941 - DNA, 529 bp, Homo sapiens
cagacctcacttctactgcagcttgtactaatttttaagcaataaaacatttccttctttgggctcttctaatgttttttccacactctataatagcatttaaaaatattattgaactagtttctacatcacttttttgtttcatagactcagagtttgacttatagacccttagcattatggcctgcatattatggaaattttcacaatgtttttatgaatgaatgtatacattttttatagtttgacattggaaagtagcttacaagtaaagctagagtgcttgaacataattttcagcttatatgtgtgctgcttacaaacatacatatattttaagtccataggattaaaaaaaatgtgatgaccattccaagtactataattccatttccttagctttactcatacttgtatctgttcaacaagcattgatcatccattatgtgccaaacactgcattctactaatgatscagcagtgaacacaacagggatatccttcactttaatgtaccatattttagagg

SEQ ID NO: 49942 - DNA, 1621 bp, Homo sapiens
tgcatgtatttagaaattctgctattggaatcgttaagacttcattttgtatataatatgctgttgggtttaggtttgaatcagcaaaaaagcataaaagacctgggagatttagagacatttaaattaattgaggacttgatttgtctattaaaaaaaatacatatccccgttagggtttcttactctctcctttgttgattctcacagatatgttaaattggtatttcccattaattctgaaaaaagtttatagataayatttaaatgaattataaattgacttctggaattaacacgtataattttatatacattcaaaactagcattttagtacctatttagaaaagttaaaaaattaagaacaattcactattcatgtcaatcaccagataatggctaatagttattaaaatatctgtgtgcaattgttattacaaatgaaagtatgattttcatctactgaacacaacaaaatttataagaaaacaaaacaaatatcaaagatgatacattctgcgtaaatagcatgcacccagacaaaataatttgtaattgtatactgtgagatttgttgattatgctaccaaggggtaaggtggactcaatcccacctttcattaaatcagtggccctgaatagcactgtgcagggggaaaaagctttgtatttggaattagacacacctgtaactgaatcatagtactaacacatgcaaatagaaaatagtggactggaaactattattatgctttttacaatcttgctttttcttttttttatttataaatattggaataacaattcctattctgtagctgcacagtggagtatcaatgagaatgtatatgaaatctcctagcacacagcttggccctataagtattcaattatctttctctcctgagtaattagcctgggtctctacctaggctcttcccttgatctaaattggatatctataggttcacctagggtggggctgtactatttcctgtgctagaaagaaacttctgaaatgtgtgtattaagcctggggtcagactgcatctttctatcttttgccagcggcttatttttgatgttcaagtggtttagacaggagtgaagattcctctctgctcctcttcttttggccatgcttaaaataggaaactgggaaaagaagttttgtactgttactgatacttgtttggaattagaatgagagagtcagagtaagtaaatatgaaaacacatttgagtgtagtaagatgtgtacctaagcctacaggtcatttgcttattttattctaaggcatattaataagatcatttaaatttcaaacagtcaaaacagaattacaattctcgttgtttatttactctaggaaatgatcttttgtcaaaaaaaagaagcaaaaaataaagaaccaaaaaaaaagaaaaaaaaggacaggtttttaagtaaaatgctacccaaagtaaataaaaaataaatatcttagtctgggtgacagagtgagaccctgcctcaaaaacaaacaaataaacaaaacccaccaaatacctgtttatatatacaaaatatttaatttgttaagtgggaaaaagtgagaatcagaccctgggttacaattt

SEQ ID NO: 49943 - DNA, 1596 bp, Homo sapiens
gagatttgtagatgttagccatctgagtgacttctcaattgaaagcaagtagaaaagtccttagacttccggagagacgtagtatgaattagtataaaaagtcagaataaagtcttctcttaaaggctgagtctgcctggaaaagaagtagcaacagaaaacacagcaatctttactactccacgtcctaccagcactgcccgcctctctctttgtattttttgctaatacaaatttaaaaattgcaaacttatatcggaaagctgtagatgcaaggcaaaattcatcttgacaatgtctcttactttatctacattaatagagagagggtcagaaagaagagagatcctgattccaactatccaaatgattatcttgccacttcccacttcctatggcaaacaaacagagctgcttcttttttctccttttctcacaagttcctttcttttctacttacccaaatcccacccagccttcttaactgagctcacatctcagtgattctattcttttcttatctagttcacatgttcaagttctacctctttgccaaattctgcgagcatttaaaatctgtagcttacaattcagaacttaatatatcatttactctttgttgttgtttcctgtatcttaatcctctttctcctcttaacaaaattgcaaataatacaaagctgtgtgagacagttaatcacagggaatcaaattacaagaagcaggagtaatgagtccaagataccatgctaaattttgatagcaacaaatgaaaagtctggccttggccaatgacaattgtgtgccatgaactatggagtgtcattaactgaattatgtgcacttcagatctttaaacaacaacaaaacgatacaattccgtgcttaggagcaaaaatggagttgcgtaggtaaaatagtgataaacatattcaaaatagtttgtatttaaaaactaggtctttcatttatttgtcattcagtcattaagcgtttagaatgacctgcaaatttctttacattagaatttaggaatttataggtggagagtgagttgtctctccactcaaggatctcgtacactcctgtgcaaactaaagactggtttacagtacaaggatcacacagtagagacatgttcaaactgctaggtaaaaagcaaaagctcaatattagtcataaatgggcaaattgtagtggataaatgctgtgtgcaaactgaggtggatttcaagatgcatagttctggaaacaataagggagatggtaatcctatggtccttaggcagtcaggccagaaaagggatgcttttagattctaaataacacrtattataaaaggaattaggatatgatgtactctgaaggtggccacatgaaattaaaatgtctggaaaatgaattgtgtaataaaagatgataaaagaagaaaagacataaagaagagataaagatatttaaatacttgaagggctcatgtaggaaaaaatatgtttatacttactctgaaaacatacatgggacaaatgggacttgctggaaaaatggtaaggaggcagaatttggctaaatatgaaggaaattattctaacagaa

SEQ ID NO: 49944 - DNA, 2347 bp, Homo sapiens
ggctcacacctacgatcctagcacttcaagacaccaaggtgagaggattgctggaggctgtgagttcaagaccagyctaggcaacatagtgaaatctcatctctacattttaaaaataataaataaataaataaataaatagccagatattgttcctctgcttaatatccttttacttctatttataactttgttttttgtacttattttactttttctattcttagaaaaagatcaaaacatattattacagctataatgcagatatctggctaaagcctatctctttggtttcctctcatcatatcttccttatgtattatactcattcaaattagtcttttagctctatgcattagccgagctctgtcccacatgaaacctttgcacttggctgtttcttctacttgaactatattcctcctcttcctcatatgtttggccccttctcattcttcatgaatgagctttaatgtcgcgtccccagtgagaatttctcttacaatcccatctaattcagcattgttgattccttaactacttactttctgataaatttcccaggtcatttatttcatgatactgattataattggtgaccatactgtttatttgtttacttatttattattacctcctctagcccatgttctctgtgaagataaaaatctacttcacttactcagcactgggtcttcaattctttattattattattatttttttttctgggtctccaattcttttaacagtgcctagcatgtagtagaagctccctaccctgatccctcgttaagaaattaagtgaaataaaagaaaaatcatcttcaaatgacattgctaagaaacattagataaagaaacccatgaatacactaaaattaataacttgaataagtaagaacataatttctcctagtgtttctcaatcacgtttattagttaataaaatggctttagatgtttattttgcacaaataagatacgaagccagcatggttcaataaaaagaacttcaaagtaaaaacacaggagcatgtttatggctttatctcccatttaaagaagatggatactagtttaaagttaaaattgtctgtttaaaaattgggataatataggcattgtaacctaggaatattcttttgaactccagagactcatgaaatggatgccagtcttgtatttctacaaagaaaatacatttatgtaacaaattttacatgaaaatggatgatttaatgttattcatcttctggaaaccaacacataatagcaatacctctcagtaagtctaatcttcataattccatcattctttctaaaagattttaggcacttaatcagtccttgtcttgtctcttgaaaaactttttacctaaacatctttaaaatcttggtttctaaggagaaaaaatatgaagctgcaacttagtgactactaattcatttaatctataaatcaccaagaacagaaaaataatacatatcatttctagagcttgcaacttccataaataaaaatttcattttctggtactgacaacctgagtttctactaggtagtaagccctcatcatgtctcttgctgtttatggctaaagtaaatattaaagcccgcatacttgatagatctgcagtggttctcttttcctctcagcttttgaaatgaaataagagttcaataaaatggtgcactacaagtctgttgttcagatgcatacagtatatctctggatatatacagcatattcatttcttccaaatgttttattgaccttggtccttgggggtgatgaaaaaacaaaaacagtagaagctgaagtgctgacgtatttacaggggggattggccactattatcaagaataactttcaatttgattttttttttttttttttttggtgtggacatgactaggatatgactgattaggatctgaaaacattcaggtgcttttcaccaagaggcataattaaagtctaagagacacttaggtttggggatttaatttcaagcagtccctcttctgaaatttgaacttggatctcatccaggtttttccctgtctcattttaaatcaccattatatactgcagtagcaaccatgcaaattagcacattcctacatgttcagggcattcgacagagcttgtaaggataatataagagggcacagacttccccttttctttttcttatatttaatttttattaaaattttcagtcgatcttgcagggagaaaaaaactaggtttatttctaactgacaagcgtctatgtattcttaacatagtgaagcagaaaactagaaataatttcaggaaagggaaagagacttgatagg

SEQ ID NO: 49945 - DNA, 457 bp, Homo sapiens
atttctgcctgcacgacttttatttatttattttttttacatgtgttaatactcaggggcacccagggggaaactccacagactttcttgattacaagatatcaccctttctatgtaacaaccatctaatcacttccccttgccaagaaatgagaaaagtatttgtatttggaaaaccaagctacaacacgtgaagcgtattaagaatgattgtctccycagaatccacacgagctttccccatcttagtttgtttttctaaagataaaaaccacacagcagtgtttgtagttagatctaacaagtgcccatgcttgcgtaacaagatttcactttggctgtctcaactttattgtacgtaaataatgttgtaagtaatctttgaaacagtataacgtgcaaccagtgtttatttttttaatacttcagaatatgtcattatttattttaaatggtg

SEQ ID NO: 49946 - DNA, 557 bp, Homo sapiens
catattctgactgcaagccaggccctgtgctaggcacctttcttatattatctgtaatactgtcaattatctcataaggcagatactatttattcatgttttgtccatgaggagtctgaagctcagcaagattaaggagcaaggccaagattaargagcaaggccaaggagcaaggcgcaagcaatccctagctctgtaaatgtcagagccaaaattctagcccacatttgttgaccccaaagccaatgctccatttgttacacattaccttaacaccaagaactctcaaatactctcaaacatgcagttttctctctcattaaaaaaaaaaaaatctggccgggcacggtggctcatgcctgtaatcctagcactttgggaggccgaggcgggcggatcacctgaggtcaggagttcgagaccagcgtggccaacatggcgaaaccctgtctaccgaaaataagctgagcgtggtggcaggtgcctgtaatcccagctactcaggatactgatgcaggagaatcgcttgtacctgggaggcaaaggttgcagggag

SEQ ID NO: 49947 - DNA, 557 bp, Homo sapiens
catattctgactgcaagccaggccctgtgctaggcacctttcttatattatctgtaatactgtcaattatctcataaggcagatactatttattcatgttttgtccatgaggagtctgaagctcagcaagattaaggagcaaggccaagattaaagagcaaggccaaggagcaaggcgcaagcaatccctagstctgtaaatgtcagagccaaaattctagcccacatttgttgaccccaaagccaatgctccatttgttacacattaccttaacaccaagaactctcaaatactctcaaacatgcagttttctctctcattaaaaaaaaaaaaatctggccgggcacggtggctcatgcctgtaatcctagcactttgggaggccgaggcgggcggatcacctgaggtcaggagttcgagaccagcgtggccaacatggcgaaaccctgtctaccgaaaataagctgagcgtggtggcaggtgcctgtaatcccagctactcaggatactgatgcaggagaatcgcttgtacctgggaggcaaaggttgcagggag

SEQ ID NO: 49948 - DNA, 557 bp, Homo sapiens
catattctgactgcaagccaggccctgtgctaggcacctttcttatattatctgtaatactgtcaattatctcataaggcagatactatttattcatgttttgtccatgaggagtctgaagctcagcaagattaaggagcaaggccaagattaaagagcaaggccaaggagcaaggcgcaagcaatccctagctctgtaaatgtcagagccaaaattctagcccacatttgttgaccccaaagccaatgctccatttgttacacattaccttaacaccaagaactctcaaatactctcaaacatgcagttttctctctcattaaaaaaaaaaaaatctggccrggcacggtggctcatgcctgtaatcctagcactttgggaggccgaggcgggcggatcacctgaggtcaggagttcgagaccagcgtggccaacatggcgaaaccctgtctaccgaaaataagctgagcgtggtggcaggtgcctgtaatcccagctactcaggatactgatgcaggagaatcgcttgtacctgggaggcaaaggttgcagggag

SEQ ID NO: 49949 - DNA, 556 bp, Homo sapiens
ctctggtgatgctgatgctcctcatcaggggaccacacttggagaatgattgctatagattaacaacaatgaaacttacaataaagtcacttacccaggaatctaacaaacgatgcataatatgtaaacacagaatactataaatcattgcggatataaatgaaagataatctaaataaatgggtactccacttacatattttggaaaactcaatattctggagatgtcaatttgtctcaaccttgtctatagcttaatgcaatttgattcaaaatttccatagrtttctatttgtggaacccaataaatctgaaatgtatactgaggcattgtgagtaaagagcacagataattaaaataggcttcttactttctgggtttgaatactggctccatcaactactctgtgactatggtcacgttacttaacccttcaaagaaaacaggaaagatacaatttggtgcccatatgggaaaaacagttgacttgaacttcactgatttggcatgtatttatcaaggccctccttttggctgaggagacccctctggaaa

SEQ ID NO: 49950 - DNA, 547 bp, Homo sapiens
agcattgaacagtaaaagggacattttgttttagagccatagtgtgactaagtttagttccaaacttctctttccagccatgtgaccttcctcaggtgacataaccactctgtgtctcaggtaatcacaggcttgtttcgaagattaaatggatcagtgcactgagaacaaaattatgctcataatatgcatccagmcacaccattcctcctcccctcatctgacattctgctggtagagactccctgctcaatggtaagcaatggcactggccttctcttagaatctccttttaaaactcaaaggtcgcacggacagcacacattagtcaccaccatcttggtgtgaattaatttatcatattattttcttcactttaatgaggagaggatttgtgagagtacactcctctccagaaagatgtggaagaggaatgaaggtacaaaagataaggtgatgaaggcatgaaacacaaatttccactaactcgcaacttcacggagacctaatgccgtggagaccctaatgtcagtctcacattcctctc

SEQ ID NO: 49951 - DNA, 595 bp, Homo sapiens
tgttctcttggttttttcctctctctggctgctgggtgccatcatatgcagtgtcatgtttctttgtcggctggttctgtctcagayctggttggtggagaatcctcacaatggggacccacaggtggtggaagacaaagggcttctcaggtgtccctacacccatggggcagtctgctgccagttctcttgcttccctgccaggttacctacaggaagcttctctcttccttggtcctcagtctcaagggcagagaagaattgcccccttttggctttgcagaggtggccaggaaggcttagcatacccacgtagagcaggcagtgtctcctacctcacagacgctgcatggcccatttctcttctggatcctcttggggaaaatcaacagtatacatgagggcaaatggggatgtgctcaggactaccgctactgtgaactccccaagttatattttcttttttgtttgtttgtttgtttcagagatggagtctggctctgttgccaggctgcagtgcagtggtgcgatctctgctgactgcaacctccacctcccaggttcaagtgattcttctgcctcagcctcccaagta

SEQ ID NO: 49952 - DNA, 595 bp, Homo sapiens
tgttctcttggttttttcctctctctggctgctgggtgccatcatatgcagtgtcatgtttctttgtcggctggttctgtctcagatctggttggtggagaatcytcacaatggggacccacaggtggtggaagacaaagggcttctcaggtgtccctacacccatggggcagtctgctgccagttctcttgcttccctgccaggttacctacaggaagcttctctcttccttggtcctcagtctcaagggcagagaagaattgcccccttttggctttgcagaggtggccaggaaggcttagcatacccacgtagagcaggcagtgtctcctacctcacagacgctgcatggcccatttctcttctggatcctcttggggaaaatcaacagtatacatgagggcaaatggggatgtgctcaggactaccgctactgtgaactccccaagttatattttcttttttgtttgtttgtttgtttcagagatggagtctggctctgttgccaggctgcagtgcagtggtgcgatctctgctgactgcaacctccacctcccaggttcaagtgattcttctgcctcagcctcccaagta

SEQ ID NO: 49953 - DNA, 595 bp, Homo sapiens
tgttctcttggttttttcctctctctggctgctgggtgccatcatatgcagtgtcatgtttctttgtcggctggttctgtctcagatctggttggtggagaatcctcacaatggggacccacaggtggtggaagacaaagggcttctcaggtgtccctacacccatggggcagtctgctgccagttctcttgcttccctgccaggttacctacaggaagcttctctcttccttggtcctcagtctcaagggcagagaagaattgcccccttttggctttgcagaggtggccaggaaggcttagcatacccacgtagagcaggcagtgtctcctacctcacagacgctgcatggcccatttctcttctggatcctcttggggaaaatcaacagtatacatgagggcaaatggggatgtgctcaggactaccgctactgtgaactccccaagttatattttcttttttgtttgtttgtttgtttcagagatggagtctggctctgttgccaggctgcagtgcagtggtgcgayctctgctgactgcaacctccacctcccaggttcaagtgattcttctgcctcagcctcccaagta

SEQ ID NO: 49954 - DNA, 595 bp, Homo sapiens
tgttctcttggttttttcctctctctggctgctgggtgccatcatatgcagtgtcatgtttctttgtcggctggttctgtctcagatctggttggtggagaatcctcacaatggggacccacaggtggtggaagacaaagggcttctcaggtgtccctacacccatggggcagtctgctgccagttctcttgcttccctgccaggttacctacaggaagcttctctcttccttggtcctcagtctcaagggcagagaagaattgcccccttttggctttgcagaggtggccaggaaggcttagcatacccacgtagagcaggcagtgtctcctacctcacagacgctgcatggcccatttctcttctggatcctcttggggaaaatcaacagtatacatgagggcaaatggggatgtgctcaggactaccgctactgtgaactccccaagttatattttcttttttgtttgtttgtttgtttcagagatggagtctggctctgttgccaggctgcagtgcagtggtgcgatctctgctsactgcaacctccacctcccaggttcaagtgattcttctgcctcagcctcccaagta

SEQ ID NO: 49955 - DNA, 624 bp, Homo sapiens
acctcaatcagggatcttagagaggagatcagtgagaacttagaccacatagctgatcactaagggttcattgaacccacagatccaacggccttttctttggtaaattgagcataatagtcacatggagggagtgctttgggttccccgagtgaaggtgatgggctggtttaaaagctgccactgcttcggttttattttgtgcatgtccagccaacaggtgccttccacacggtggcactgtgggccacaaagtgaatggctacacaggcactttttaatgacaggctaacttcactgtaagaartaagtggggctcctccagcctgcaccaccactcatggtttggcaggacttgatgaattgtcttattcatccaggcaactctcccgtgattaaaaaacaaaacaaaacacaaaacccccaacatttaaagatagaaaatggagcaggacagggtatggcctctcttgctttcctgcatacccttgtgttgccacggcccagctgaggtccttgcacagaaaaggcaatcaacaaatattgatgggtttcacaacctgtacctgcactcaaggagcctcactattaggagcttttccgcagcctggaaatatccagcat

SEQ ID NO: 49956 - DNA, 577 bp, Homo sapiens
agttctatactttgtaagtttttttttttttttgagacggagtcttgctcagttgcccaggctggagtgcagtggcgccatctcggctcacctcaacctccgcctcccaggttcaagcgattctgcctcagctacaggaactacaggtgtgcgccaccatgcccggctaatttttgtattttttagtagagacagggtttcactatgttggccaggctggtctcgaactcctgacctggtgatccacctgcctcgacctcccaaagtgctgggattacaggcgtgagccaccacgccaggactgtaaggtttttttgtatctcatttacaaatcccttccctagcctaaggtcgtaaagatcttctataattttgcctraaatttttaagttgattgtcagaaaattatttctgattctttttaggcaatagagcatatgttctacaggagaagcatggttgtggctgattcagtttcacatataacacagcaccttcaacatcaggctcttcattctatttctgtggccaaggtatgcagcttattatgtatttagcataagtatgttatcttttt

SEQ ID NO: 49957 - DNA, 517 bp, Homo sapiens
  misc_feature (1)...(517): n = A,T,C or G
agcaatatttttccttcgctcgtacagttttacatttttcacttctgtttttgtgtgttctagatctgttctttataagaggtgctaattagccttctctagttacttctctctctctctctctccatatataaaatacttacttctagccgggcgtggtagctcatgcctgtaatcccagcacttcaagaggctgargcgagtggatcgcgaggttaggagttcgagaccagcctggccaagatggtgaaaccctgtctccgctaaaaatacaaaaattaactgggtgtggtggtgcgtgcctgtgatcccagctactcagtagggtgaggcaggagaatcgcttgaacctgggcagtgagctgagattgtgccactgcactccagcctgggtgacagagcaagactccatctcatatatatatatatatatatgtgtatgtatatacacacacacacatacacannnnnnnnnnnnnnnnnnnnnnnnnnnnnnnnnnnnnnnnnnnnnnnnnna

SEQ ID NO: 49958 - DNA, 574 bp, Homo sapiens
gaaamatccactcacctctgtacacatccaagctgacttcagttcacactgtaacctcttccccactgcaacggttattactgtgaaaaatctctcctgaccctctcactactgcctggctttgtttgtctttgacactctgggttcaggtaggacagggtgtgcccggccacagccccctcagtaactccaggctggcccacttcctgccgtgtgtgaggttttggagtggcaagtttgttctgctttgtttcatggttttcagtccctcccaatatcccctggcctgtggtcaccacagtcagcccaggccagcaactgacccaggctggaggttaacaccacggagctgcccacacgtgtgtgcccgagtccctgcccatgcctcagcaatggtcacaggcttctcacctccattcagcccccctatttggggccctacctttagccagctagccaagtgctcattgtaacccagtatttgtattcattcaccatagaaaatttgtcaaatgggtaatgcatttctttttacccgcctcttagtgactgggcttatgatcagaatcaagtg

SEQ ID NO: 49959 - DNA, 533 bp, Homo sapiens
tttttatctgtaaaacctgtcctctctccctttcaaaaggattatatgagtcagatgtgataacatatgtaaaagtataaaactatgaaaatcatggaaatgtaagttatcatcttggttattaaaataattttgactccatttttttttcctgcaaaacagtgaaacaaaataaatgtcttcttaaagtagttgaatttcccaagttggttctacatacatcacctttttcctttgccatgaacggccatgctcacagagccctttcctgagctctgtacttaaaatggcctctgaggccaggttcagtggcttacccctgtaatccaagcactttgggaggctgaagcagaaggatcacttgaggccagaagttcaagatcaacctgagcaacataatgagaccccatctctaaaaatttttttttwaaaaaactagtcaggtgtggtggcatgagtctgtagtttcagctacttgggaggctgaggtgggaggatggcttgagcccaggaggttgaggcttcagtgagcc

SEQ ID NO: 49960 - DNA, 560 bp, Homo sapiens
ttctgtccaccttttccagctgcatggacttccaacactccaacaacgaaagccctctaaactggtgtgttttcatctcaagtgggcatacaaatcacctagaaatatcgttaaaatgtagattctgattcagaagtccaaggatggagcttgagattctgcatttctagcaagctcccaggcgatgccaatgcctccactcaagcctctgttggagtaggaaggctccgtcattgagcgtagatgccacgtgcttctgcctgtctgccttatgctgtttccaggcttgaaggttcttcattcacctcwctgtctggtgaattcctatagtctgaagatctaaatcaaacatcatcttcttaaaaccttttttttttttaacctttttcaggaagaattgatcatgtgttttctttttttcttttaatatttttaatttttgtgggtacatagtagatgtatatatttatggggtacatgaaatattttgatacagtcatgcaatgtgaaataagcacatcatggagaatggggcatctatcccctcaagcatttatcct

SEQ ID NO: 49961 - DNA, 579 bp, Homo sapiens
ataaaaaagctatatagaaaatgaaacaagtaacatgacctgccagtactttgtggaacttactgagtgttgtaagcatagaataaactgtgggcgtgtgttacgtgcctaagaggcttccatgctccagatgatattgctgaggaaaatgggggtgtatacttcccagtcmataggaaaattgctcttgtttcccctggtacacaaattgaactcagggcagccaaggctgacatattgaatgaggttcttcactacttcagaacaggtttgtgtttacacttcattgtgtgatttttaatggtttgaaatgacacaggggaagttacataatgtttatggagacacgtgctggaaaataaaccaggagccacaatggtagtgttagaggtagctcctgagtaatcattctcatttatttacaaagtgtgttttaaataacaagcaagtaattagaagagttctagttctgttcatggcagagtagcttgtattggactagccctcttgccaataacaactataaattctgaatttgaagccttggaaggcactggagagaacgtaaaatcaggagta

SEQ ID NO: 49962 - DNA, 1058 bp, Homo sapiens
cggatagataaactattataaattatcaatgctatctcagaattggtgtcctaatctactgtttaaatcagagcagaaacatttattggcatgattattttggttccaatttaaatagaagcaactctcgatgcctttcaaacttgttacataatgtgggaatctttcctataatattcctgatgaatattgagccagtctagtcctgtccatctttccattcatgaaataygttatggatacagtcaattctagtgttctaatgtagataacattctcttttctttctttttaaaaatttgtacaaattgaagggatacaagtgcagtcttattacatggatatatcgcttagtggtaaaatctgggcttttgttgtatccatcacctgaataatatacttctacccattaagtaatttctcatccttcactccccttgcaccttcctacccttcggagtctccaatgtctatcattccacactctatgctcatgtgtgtgcattatttagctcccacttataagtaagaatatgtggtactggactgtgtggcagagttgtttagcttaagataatggcctccagtttcatccatgttgctacaaaaggcatgatttcactctttttatagctaaatagtattccattgtgtatatacaccacattttctttatctgaacatccattgatagacacttacattgattccatatctttggtattgtgaatagtgctactttaaacgtataagtgcaggtgtctttttgatagaatgattcctttccctttgggtagatacccagtagtgtgattgctggattgaatggtagttccatttttagttatttgagaaatctccgtactgttttccataaagggtgtactaatatacatgcactgttaacttttagaatttcttcaaaacttcctcttaaaaaaatttttaatttacaataataattgtatatatttatggggtacgatgtaatgttttgatatatgtatacattgtggaatgatcaaactagttaacatatccatcacctcatctactta

SEQ ID NO: 49963 - DNA, 1058 bp, Homo sapiens
cggatagataaactattataaattatcaatgctatctcagaattggtgtcctaatctactgtttaaatcagagcagaaacatttattggcatgattattttggttccaatttaaatagaagcaactctcgatgcctttcaaacttgttacataatgtgggaatctttcctataatattcctgatgaatattgagccagtctagtcctgtccatctttccattcatgaaatatgttatggatacagtcaattctagtgttctaatgtagataacattctcttttctttctttttaaaaatttgtacaaattgaagggatacaagtgcagtcttattacatggatatatcgcttagtggtaaaatctgggcttttgttgtatccatcacctgaataatatacttctacccattaagtaatttctcatccttcactccccttgcaccttcctacccttcggagtctccaatgtctatcattccacactctatgctcatgtgtgtgcattatttagctcccacttataagtaagaatatgtggtactggactgtgtggcagagttgtttagcttaagataatggcctccagtttcatccatgttgctacaaaaggcatgatttcactctttttatagctaaatagtattccattgtgtatatacaccacattttctttatctgaacatccattgatagacacttasattgattccatatctttggtattgtgaatagtgctactttaaacgtataagtgcaggtgtctttttgatagaatgattcctttccctttgggtagatacccagtagtgtgattgctggattgaatggtagttccatttttagttatttgagaaatctccgtactgttttccataaagggtgtactaatatacatgcactgttaacttttagaatttcttcaaaacttcctcttaaaaaaatttttaatttacaataataattgtatatatttatggggtacgatgtaatgttttgatatatgtatacattgtggaatgatcaaactagttaacatatccatcacctcatctactta

SEQ ID NO: 49964 - DNA, 1058 bp, Homo sapiens
cggatagataaactattataaattatcaatgctatctcagaattggtgtcctaatctactgtttaaatcagagcagaaacatttattggcatgattattttggttccaatttaaatagaagcaactctcgatgcctttcaaacttgttacataatgtgggaatctttcctataatattcctgatgaatattgagccagtctagtcctgtccatctttccattcatgaaatatgttatggatacagtcaattctagtgttctaatgtagataacattctcttttctttctttttaaaaatttgtacaaattgaagggatacaagtgcagtcttattacatggatatatcgcttagtggtaaaatctgggcttttgttgtatccatcacctgaataatatacttctacccattaagtaatttctcatccttcactccccttgcaccttcctacccttcggagtctccaatgtctatcattccacactctatgctcatgtgtgtgcattatttagctcccacttataagtaagaatatgtggtactggactgtgtggcagagttgtttagcttaagataatggcctccagtttcatccatgttgctacaaaaggcatgatttcactctttttatagctaaatagtattccattgtgtatatacaccacattttctttatctgaacatccattgatagacacttacattgattccatatctttggtattgtgaatagtgctactttaaacgtataagtgcaggtgtctttttgatagaatgattcctttccctttgggtagatacccagtagtgtgattgctggattgaatggtagttccatttttagttatttgagaaatctccgtactgttttccataaagggtgtactaatatacatgcactgttaacttttagaatttcttcaaaacttcctcttaaaaaaatttttaattkacaataataattgtatatatttatggggtacgatgtaatgttttgatatatgtatacattgtggaatgatcaaactagttaacatatccatcacctcatctactta

SEQ ID NO: 49965 - DNA, 559 bp, Homo sapiens
caccacctggacacatagtaccagaggagaaacagtgtcatgggaggtcaagcaaatgggactacaagcagatgtctgtcccacaggaatagctcagaagccatagaaaactgctacatctcacaagaccatgtagacagagacaattatatttcactgtcaactcagtgaactgatgcttaagaacagatgccctgtcctcaacccatgtcttggcactgcataggatcctactgctgtagtatcaggagagagaaagcttcatttcttgtgtgccagaatttgtcaactgagatctawgtctgcaagaaaagtgtaaggttttggtctcttgtttattatttgctttttgttcaaatactacttcattcattatttcataatccacctttaggactgttgggggtcaaaatgagaaaataatttatgcagaaaacaatacttagaggaatggaagcaatgaactagtttttcttctcagaaacactttttaacctcagtctctagttgcaaaatctcacttataatggtggtagagggtttgctaaatattcacgta

SEQ ID NO: 49966 - DNA, 559 bp, Homo sapiens
caccacctggacacatagtaccagaggagaaacagtgtcatgggaggtcaagcaaatgggactacaagcagatgtctgtcccacaggaatagctcagaagccatagaaaactgctacatctcacaagaccatgtagacagagacaattatatttcactgtcaactcagtgaactgatgcttaagaacagatgccctgtcctcaacccatgtcttggcactgcataggatcctactgctgtagtatcaggagagagaaagcttcatttcttgtgtgccagaatttgtcaactgagatctaagtctgcaagaaaagtgtaaggttttggtctcttgtttattatttgytttttgttcaaatactacttcattcattatttcataatccacctttaggactgttgggggtcaaaatgagaaaataatttatgcagaaaacaatacttagaggaatggaagcaatgaactagtttttcttctcagaaacactttttaacctcagtctctagttgcaaaatctcacttataatggtggtagagggtttgctaaatattcacgta

SEQ ID NO: 49967 - DNA, 542 bp, Homo sapiens
gtcattcttgcttatccactaacactcattctttttttaaattgctacagcgttcaccttatatagggactcagcctgattactcatcaccttaacacctacttagacacttagaaagttcttccaactagagttgctcagcccttcttattctatgttaagacgtcaaccgaagttsttggagagaacacatgttccccaggaacaagatttagttgggtgggatgggggaagtgcttatgcaatgatggaaagagggctggagttttgttttgttattgaaggctgtgtatattttatgtttaaccgggacctctgaggaatctgtcttgggcttatggagcagggagttctgagcggctcctcataattgtggtagcagagaagaagcaaggagcccaggtggccccagcatgccactgggtgtctgggtgggagaggcagaatcctggcttcgccccacttcttacaaagaccagacgtgtgaggtcagcgttctcttgaccttcccgtgatttaggcatcaacaaggtgaagaagtg

SEQ ID NO: 49968 - DNA, 522 bp, Homo sapiens
ggacaccccccagagcaagcagttcctaacttgttctggagtcctgatcccactgagcacctactgaactccagaccttctccctgaaagcgtgtgtgcatacaaatcaaagtcaatgttttcacatgagtctggggcttcaccgactcctgaagtcccttgtgcaccctagattaagaacccctgcaccaggtatttctggaaccccaggcaggtgggtgcctaccagcatctttctcacatggcctggtggacaggtgcctctgcagctgtgggtgagtgtgggtgtcgggaagaccctgccaattccatagttccttatgttgtcatggcaaagccttgacaagggactgagaaagggtggatccgccttttgctgtggcagaaatggctgttcttttgccaggagkcgtttcacagctccacttggacaggcaggaagcactacctgaatgaaatcctatgaagtcttggctgtctcccattctcccgtagtagttctttccaaatagagtttccaga

SEQ ID NO: 49969 - DNA, 533 bp, Homo sapiens
atgacctccacctcctggattcaggcaattctcctacctaggcctcccaagtagctaggacaacaggcatgtgccaccatacctgactaatttttgtatttttagtagagatgggtgttttgccatgttggccaggctggtctcaaactcctgactttaggtaatctgctcacctcggcctcccaaagtgctgggattacaagcgtgagccactgcacccggccaccctgtcatactgcaatacaaatttaatgcattagttgaatttttaatgttaaattttctatgactccaggataatgcaccataataacatttgggatggataagggtgtgcttttctcttgtaaggtaagagaaagagtgttatgaataaaggactattcttagccagatcaatattaataaagagtttatgtagaagtggakaatctagacactgattccattaaaactacccattcaactgccaagggaaagaaaccagtctgaaaaggctatatactgggctgggcacaagtggctcacatcat

SEQ ID NO: 49970 - DNA, 533 bp, Homo sapiens
atgacctccacctcctggattcaggcaattctcctacctaggcctcccaagtagctaggacaacaggcatgtgccaccatacctgactaatttttgtatttttagtagagatgggtgttttgccatgttggccaggctggtctcaaactcctgactttaggtaatctgctcacctcggcctcccaaagtgctgggattacaagcgtgagccactgcacccggccaccctgtcatactgcaatacaaatttaatgcattagttgaatttttaatgttaaattttctatgactccaggataatgcaccataataacatttgggatggataagggtgtgcttttctcttgtaaggtaagagaaagagtgttatgaataaaggactattcttagccagatcaatattaataaagagtttatgtagaagtggataatctagacactgattccattaaaaytacccattcaactgccaagggaaagaaaccagtctgaaaaggctatatactgggctgggcacaagtggctcacatcat

SEQ ID NO: 49971 - DNA, 534 bp, Homo sapiens
tggagagatgaagactgcatcaattcagtaagtagttttgtattcttggtttcctggttcgaaccttgtcaccatatagtctattctcagcacagaagtaacagaagtcacttaaaaacctcactcagattactttcatcttctaatcaaagccctgtactgcttcmccattttactcagagtaaaagctaaagtccttttgatggtccatatagcctagccccactttattctttcatcttgtctctgacagcatggactagggaccccctcagtttctcagctccaacccacttgtcctcctaccattccttaaatgtccctgaccagtttacccttggtatccttctatttgctatatgttcttgcagagagctgcatggctaactgttcacgttcaagtccctgttcaaagtgcaccttctcagcaaagcctaccactctcatactatttaaaattgcagacttccttgttatttgctattgcttgtgtcttccccatagaatataggttcaataacagcatagacttca

SEQ ID NO: 49972 - DNA, 534 bp, Homo sapiens
tggagagatgaagactgcatcaattcagtaagtagttttgtattcttggtttcctggttcgaaccttgtcaccatatagtctattctcagcacagaagtaacagaagtcacttaaaaacctcactcagattactttcatcttctaatcaaagccctgtactgcttccccattttactcagagtaaaagctaaagtccttttratggtccatatagcctagccccactttattctttcatcttgtctctgacagcatggactagggaccccctcagtttctcagctccaacccacttgtcctcctaccattccttaaatgtccctgaccagtttacccttggtatccttctatttgctatatgttcttgcagagagctgcatggctaactgttcacgttcaagtccctgttcaaagtgcaccttctcagcaaagcctaccactctcatactatttaaaattgcagacttccttgttatttgctattgcttgtgtcttccccatagaatataggttcaataacagcatagacttca

SEQ ID NO: 49973 - DNA, 1384 bp, Homo sapiens
taaaaccctagttttttcattcttaaaatgacagtaataatgtcctcctcacaggttttggggaggattaaataagatactatatttgaaattgctttgtaaatttaatatatgtaaaaacacttcctaaacgctatagttcttaagcagttattctcaatggggggcatttgacaaatctgtgggtgctttccgctggtcagattggttaggaatgacactggcaattaattggcataatagggtccaaagaggctaaatgccctgcagtgcatgggacattcccaccaaagtaaaatttccaaatctcacaatgggcatttatagaagtgacaagcctacttactrttgttgagcccagaatttgccctgtttaatatataaacacaaagtattttatatagtttcaataaattctgaattatccaggaatgtacattaagggaagaacacactttgtttcatttaagagttattcattatttctgaaaatcaacaatcgagtcagtgccactcataaaatttaaatctccctaatcagcctgtatttgtagttattgcatttaccagactctatatataggtatatctgattatttcattatgtcttcagtgtagacagtctatgtatttacatatagaattactgtacatgttatattataaattattttctttttacttctttatgtcatagttaacactctatattgattttttaaaattatatgtgtagataaattctataacctatgaatatcgtttcagggtagtaaaggggccattgctaaatattgttttgaaaaggtagcactaattctgagagggttagaaccactattctaaaaacaatgtagtccttgttatcactatattataacctcttaactttatcagatgaatgtccatttctgtgaaaaatacaaattgccacttatcgtagttcactagtgcaatccttcctgaggtgggacaacatttctgtcttggagagcagaagtaactggccctcatagccacctagacagtctagaaggggcacaaatctccctttactattctggtacaaatgtgggcagattttcttcttactttccaggaacaatttctagatcccactagaacatttaaacgaagtcttactaatagcacagggaaaatcaaagtgagaaaatgaatgtcatgaaactagataaactaacgtatgcaatgttctcatcctcaactaggggttctttgcaggaattccttcctcctacaacaagttttgtctccacgcaatcgtgcttacctttaacctctccattcaaagtaccaaagggagcttgaagcccaaaataaggagactggaagtgggataaacatttcctcattttaaattgtg

SEQ ID NO: 49974 - DNA, 1384 bp, Homo sapiens
taaaaccctagttttttcattcttaaaatgacagtaataatgtcctcctcacaggttttggggaggattaaataagatactatatttgaaattgctttgtaaatttaatatatgtaaaaacacttcctaaacgctatagttcttaagcagttattctcaatggggggcatttgacaaatctgtgggtgctttccgctggtcagattggttaggaatgacactggcaattaattggcataatagggtccaaagaggctaaatgccctgcagtgcatgggacattcccaccaaagtaaaatttccaaatctcacaatgggcatttatagaagtgacaagcctacttactgttgttgagcccagaatttgccctgtttaatatataaacacaaagtattttatatagtttcaataaattctgaattatccaggaatgtacattaagggaagaacacactttgtttcatttaagagttattcattatttctgaaaatcaacaatcgagtcagtgccactcataaaatttaaatctccctaatcagcctgtatttgtagttattgcatttaccagactctatatataggtatatctgattatttcattatgtcttcagtgtagacagtctatgtatttacatatagaattactgtacatgttatattataaattattttctttttacttctttatgtcatagttaacactctatattgattttttaaaattatatgtgtagataaattctataacctatgaatatcgtttcagggtagtaaaggggccattgctaaatattgttttgaaaaggtagcactaattctgagagggttagaaccactattctaaaaacaatgtagtccttgttatcactatattataacctcttaactttatcagatgaatgtccatttctgtgaaaaatacaaattgccacttatcgtagttcactagtgcaatcyttcctgaggtgggacaacatttctgtcttggagagcagaagtaactggccctcatagccacctagacagtctagaaggggcacaaatctccctttactattctggtacaaatgtgggcagattttcttcttactttccaggaacaatttctagatcccactagaacatttaaacgaagtcttactaatagcacagggaaaatcaaagtgagaaaatgaatgtcatgaaactagataaactaacgtatgcaatgttctcatcctcaactaggggttctttgcaggaattccttcctcctacaacaagttttgtctccacgcaatcgtgcttacctttaacctctccattcaaagtaccaaagggagcttgaagcccaaaataaggagactggaagtgggataaacatttcctcattttaaattgtg

SEQ ID NO: 49975 - DNA, 1384 bp, Homo sapiens
taaaaccctagttttttcattcttaaaatgacagtaataatgtcctcctcacaggttttggggaggattaaataagatactatatttgaaattgctttgtaaatttaatatatgtaaaaacacttcctaaacgctatagttcttaagcagttattctcaatggggggcatttgacaaatctgtgggtgctttccgctggtcagattggttaggaatgacactggcaattaattggcataatagggtccaaagaggctaaatgccctgcagtgcatgggacattcccaccaaagtaaaatttccaaatctcacaatgggcatttatagaagtgacaagcctacttactgttgttgagcccagaatttgccctgtttaatatataaacacaaagtattttatatagtttcaataaattctgaattatccaggaatgtacattaagggaagaacacactttgtttcatttaagagttattcattatttctgaaaatcaacaatcgagtcagtgccactcataaaatttaaatctccctaatcagcctgtatttgtagttattgcatttaccagactctatatataggtatatctgattatttcattatgtcttcagtgtagacagtctatgtatttacatatagaattactgtacatgttatattataaattattttctttttacttctttatgtcatagttaacactctatattgattttttaaaattatatgtgtagataaattctataacctatgaatatcgtttcagggtagtaaaggggccattgctaaatattgttttgaaaaggtagcactaattctgagagggttagaaccactattctaaaaacaatgtagtccttgttatcactatattataacctcttaactttatcagatgaatgtccatttctgtgaaaaatacaaattgccacttatcgtagttcactagtgcaatccttcctgaggtgggacaacatttctgtcktggagagcagaagtaactggccctcatagccacctagacagtctagaaggggcacaaatctccctttactattctggtacaaatgtgggcagattttcttcttactttccaggaacaatttctagatcccactagaacatttaaacgaagtcttactaatagcacagggaaaatcaaagtgagaaaatgaatgtcatgaaactagataaactaacgtatgcaatgttctcatcctcaactaggggttctttgcaggaattccttcctcctacaacaagttttgtctccacgcaatcgtgcttacctttaacctctccattcaaagtaccaaagggagcttgaagcccaaaataaggagactggaagtgggataaacatttcctcattttaaattgtg

SEQ ID NO: 49976 - DNA, 1447 bp, Homo sapiens
taaagtattttaaaatgaaggtatgcacattgttttttagacatcatgctatttcacacttaacagactatagtatattgtcaacataactttacacacactgggaaaccaaaaaatttgtgtgacttgctttattgctatctttgttttattgtggtggtctggaaccaaacctgcgatatatttgaggtgtgcctgtactgccttttccagactaagcaggacacaaggaggtcaaatccaaaccagaaatgtgtgccttatttcttcgttgctggggttagggagaatggaatcgtgcacaatagtatttcagagcttaggtctagaagtctaccccttcatttcttgtaggagaaaagtaatgctcagagayggaaagacttgaataaggtcacagtatttgctgcagattagaaatgggattagatataaactcattttgcatatttttggggcagttttattttatttatctatttattgagacaatgtcttgctctgttgcccaagctggagtgtagtggtgcaatcacagctcactgcagccttgaactcctgggctcaagtgatcctcctgcctcatcaagctgagtagctgggactacaggtgtgcaccaccacactcagctgattttttaattttttgtagagacagggtcttgctatgttgcccaggcttgtcttgagctcctggcctcaagtgatcctcccacattggcctcccaaaatgctgggattacaggagccagccacagtgactggagacagcttttaaacttcaaaatttacatgttatcttttgtgtcatacctgacattgtaataaaatcagttgttcaggttattaaaattgcaagaatttgggcataggaatcagctgtgtttcggaactgtaactgctgtggccaaatgagtgaggctggtgatggcagaggagttggcaaatcagctggacaggattcagtgatgtccagtccctgactgcatcaggctgtagtcagtgtagaactcagatgtacttttaaaaaatgtagggatgaatcacattctcatttaagattattttaaatatcttctgggaagaataagtgacaagagtgaatctccattggagaaaacagaaagaaattcagttaatatttttaaagtcaccctatacacatagacagacattgatcaattaatctaagggagattacacaatgaacacttcacttgcaactcttggtaccttaggctgacagtgctgtgtcccctgttccaacaccttttcattaggccgtaaataccttagtgaccagttgtgctctgtgttcatgcttttagtcttcagttctttagtccccaaaagaatttcaaacactgttctatctcagtaacttccagcctctctacaataaagaaactcagttaatatttttaaagtcatcctgcatacatggaca

SEQ ID NO: 49977 - DNA, 1278 bp, Homo sapiens
tttgttcttccttgctaatgaagctagtcagtcaacatgtatggcagagtagggcatgggactttttgtacacaggctgtgaaaagtagctaatatatgtgcactccaaaccttttcagcatttaatgtcatccaccaaataggagcttagagttgtgtgtgatcagaatggtttgggtcaatgtgtcatccaccccaaagaatttttttttcaactctctgttcactatagctccttattttaaacatcttcagcagattgagacaggacaaacagcttgtcatcatcaatttgaaattccctgaaaactcaggttgtcatgaacaaccaaaggaagaagggttgagaggctaaagagaaagtacattgggtcagctggggctgttctctgcctggctgatgtgatgatctttcccaaagggcaagtggggacgggagaccagtgttcctacttatctccagggagggctacgctatgtcataaaagtctgaaatgagagatttttatgtccctttggattagctgcaagggtcaatggaacagtaaagcctgcatcatttccctgcccctttccctaggcaaggcaatgtgtgtggtcgtctgggcagagcagagatggtagaataagttgtcccagctggagatgctctgggacaaatcagtgactatgttttttgttaccccttgtggcagactgctttgttagaactttgagataatcatattactgatataaactgagtaaatacaaaagattttgtcctaatttgagtctgctttatgttcaattattggtgatgtcatctgacaagtcatttcccatttgccttttgggcttttgtctcagaaagaaggattagtaactcagagtgatgagatgagcagctgttgctttaggagaatccaggtgaaagatgatggtaacaggtctttgtgtgtcctgatttcacctctcatcctccatcagctggggttttcttggcagccacagctggagccactgggtggaagtaggaagayagtcagagccaacaccatcaggaagcagatacatcaccctgagaacgggaagtgctagtcatttaatagtctgtgccagatgacctgcaagagagagagaggcactaagttttctagacaaagcgcatgttgcctgggaaagtggaaattaagacactttaagaactttatctttacaattatctatattttacagtttccagctcaatttatatgggtaatacaagtttccttgaagataaaatcagggtttgga

SEQ ID NO: 49978 - DNA, 559 bp, Homo sapiens
tcctaggaggcagtttagggctcctcagggtggggggaagatggagcrgggtggttgggaaggggaaaacaaaatgaaagccccctgaacacaccgttcattttcctataattgggtctttgttatgtttccttgtgtatttacacccatcctttaagacctagattcagtgttatctgttttctgtaaatgtcctagacccctccgccaaccaccctgtcccagcccactccccaccaggacaaaattaattgctatcttatttatgttctgaaatctctgttaaatctaatttttctaataattatctctctgaatcatgtgcctgcttccctcaatagattctgagtactttaaccacagggtatatatactttttcacctttgtatttccagtacctggcatataagcaacttctcaataaatgtttacaaaatggaattataaaaaccctaaaaatagcaatgaaggcccaggttttcgctctaggtattgctatagcagattgttttttctccttctgaatttttgttcataataataaaatatatatatata

SEQ ID NO: 49979 - DNA, 559 bp, Homo sapiens
tcctaggaggcagtttagggctcctcagggtggggggaagatggagcggggtggttgggaaggggaaaacaaaatgaaagccccctgaacacaccgttcattttcctataattgggtctttgttatgtttccttgtgtatttacacccatcctttaagacctagattcagtgttatctgttttctgtaaatgtcctagacccctccrccaaccaccctgtcccagcccactccccaccaggacaaaattaattgctatcttatttatgttctgaaatctctgttaaatctaatttttctaataattatctctctgaatcatgtgcctgcttccctcaatagattctgagtactttaaccacagggtatatatactttttcacctttgtatttccagtacctggcatataagcaacttctcaataaatgtttacaaaatggaattataaaaaccctaaaaatagcaatgaaggcccaggttttcgctctaggtattgctatagcagattgttttttctccttctgaatttttgttcataataataaaatatatatatata

SEQ ID NO: 49980 - DNA, 559 bp, Homo sapiens
tcctaggaggcagtttagggctcctcagggtggggggaagatggagcggggtggttgggaaggggaaaacaaaatgaaagccccctgaacacaccgttcattttcctataattgggtctttgttatgtttccttgtgtatttacacccatcctttaagacctagattcagtgttatctgttttctgtaaatgtcctagacccctccgccaaccaccctgtcccagcccactccccaccaggacaaaattaattgctatcttatttatgttctgaaatctctgttaaatctaatttttctaataattatctctctgaatcatgtgcctgcttccctcaatagattctgagtactttaaccacagggtatatatactttttcacctttgtatttccagtacctggcatawaagcaacttctcaataaatgtttacaaaatggaattataaaaaccctaaaaatagcaatgaaggcccaggttttcgctctaggtattgctatagcagattgttttttctccttctgaatttttgttcataataataaaatatatatatata

SEQ ID NO: 49981 - DNA, 559 bp, Homo sapiens
tcctaggaggcagtttagggctcctcagggtggggggaagatggagcggggtggttgggaaggggaaaacaaaatgaaagccccctgaacacaccgttcattttcctataattgggtctttgttatgtttccttgtgtatttacacccatcctttaagacctagattcagtgttatctgttttctgtaaatgtcctagacccctccgccaaccaccctgtcccagcccactccccaccaggacaaaattaattgctatcttatttatgttctgaaatctctgttaaatctaatttttctaataattatctctctgaatcatgtgcctgcttccctcaatagattctgagtactttaaccacagggtatatatactttttcacctttgtatttccagtacctggcatataagcaacttctcaataaatgtttacaaaatggaattataaaaaccctaaaaatagcaatgaaggcccaggttttcgctctaggtattgctatagcagattgttttttctccttctgaatttttgttcataataataawatatatatatata

SEQ ID NO: 49982 - DNA, 547 bp, Homo sapiens
taaaagtatcaacaagctactgcaatattttgcttaggaaaattccaccatcagatttgtmtttttaaagcaaacttttttgttaacaaagtagctatgctagaaaaaggcagattggaaacacaataggaagttggatcagtcagtaatactttgggtgcaaaacagagaagccagattcaacatatattagaaaataacaaggaaacttaataaaagtataatgttcaatcacagaatgttttgatcgaatgaggaacaatcaggcatacagctcagttacaggaaacatttggtttacataaataagggatctatttatctacatatctacctagcactcctctcctcttcttggcttcttcttgcatattcttaatcttaaagaaaaatgtgtgatattcctccttggggaagaagactgctcaggaagcttattttatcttctgtggctgttcggctaaagagagatttaatagatttgctaaacaatattgtgcttatacttaaaacactgtatggtacacttaaagtgcattaggggtag

SEQ ID NO: 49983 - DNA, 558 bp, Homo sapiens
aaaacttattgaatgactttataaggtcacaatcttaagaaaaaaaattttttttttgcttatgaatctattaacttacttatctgtgcacaagtgattctcactttaattaacccccattactatcctatgtgttctaaaagaagtgaatatgcatgagaaaaaacaagcattcccagcttagatttcttaaaaaaaaamcagaaagatctatggatagataaattgcaccgtaaggctgctgtctgaaatgaagactacaaatgacggctaagagaagtaatagaatatgcaggcatcctgtttggaattaatatgtacaatctcctcatattccaaaacgccacacttgtaggttttctttttcctggagtttcttattattcattcaactcacaaaaattattaagctaagtgagatactaatcgtcagtagggaaaaggaaagttatgacaatctattaatataatgacctttgccctaaagaaactgcactctatttgaaagtcctcaagtgatttaagtctttcatcaattgtttaacagttgacatgatt

SEQ ID NO: 49984 - DNA, 558 bp, Homo sapiens
aaaacttattgaatgactttataaggtcacaatcttaagaaaaaaaattttttttttgcttatgaatctattaacttacttatctgtgcacaagtgattctcactttaattaacccccattactatcctatgtgttctaaaagaagtgaatatgcatgagaaaaaacaagcattcccagcttagatttcttaaaaaaaaaccagaaagatctatggatagataaattgcaccgtaaggctgctgtctgaaatgaagactacaaatgacggctaagagaagtaatagaatatgcaggcatcctgtttggaattaatatgtacaatctcctcatattccaaaacgccacacttgtaggttttctttttcctggagtttcttattattcattcaactcacaaaaattattaagctaagtgagatactaatcgtcagtagggaaaaggaaagttatgacaatctattaatataatgaccyttgccctaaagaaactgcactctatttgaaagtcctcaagtgatttaagtctttcatcaattgtttaacagttgacatgatt

SEQ ID NO: 49985 - DNA, 2053 bp, Homo sapiens
tgaatacagcccaattactctctatatgtgacttaggattactcacagcctcgccaacatgtgatatcgccaaactttaaaaaaaaagtacctatctaaatggtacacagtgcggtatcttatggctgtagtctgcatttcccctctcactgctgaagttcagcatacccatacatgctggtagttattagtatttcctctctctcccattgcatattcacttctttaatttattcaattctgagaaatgaaggatccctcctggatgagaaaatggcgtgaaatggttcctcctctgctggccctgtgcctcggggtgacttcgcgttgcacagtccttctgctctcctctaacgatgaatgaacctttgggtacttgaattccatttgcctacacccagggttttgacctcttgtgtttgtgttaacgtgttttcatctcaggcttcatttctttttgagtctgcgggctcgcagtcaccctccctcttagcctggcgctcctcctctctggaggctctgagctgaagcacttaagggctactcaggctccatttgcagtctcagaactgtagtgtccatagtgagcaagaccagccagggcttgaatcccggctctgccacataagagcaatgttgtgtgaccttgaggaagctcttctctcctctgagcctcaattcgaacatctgagaaatcagggttgcgctgagaaataagtgaaattattcactgccgggccctagctctggcagtcacaggctcttgtgaacgtccatcccttccactgcccacccaccccagccctaccctgcccatgcgctgaatttcttctttctctcatctcaccccaagaggaagcaatacccccatgaccacctccagagtccccaggacggccaggccagagtcatagagcaagcgccaagtttaccatcctcagtgactgggaaggcgtgcagcccacgtcctccctcacaggccagatggcccggcacagcgcgacctgtagtcctgaccaggccactcaagggtttatgggcaccctggcacaaatgcagctcagggctgcagcaatatagaggcatgggatggggacgttgtcagaatgagcacaaggagggctatggggaacaggtagactctccaatcccagcaggtagggcctcagctggtggggcacttccgagcagaggaaggcctcattcttgctacagggcacctccttgcccccaccacaaccgaggacagtgtcttgccatctcatgctaacctctgaccccctgagctcaggctccacatcctgtcacctcccaggaagctccctcttgactcatcaccctacctgaccctcacccacagcctccacatctgccagtccaaatgcacttaaaccggctcgggtccctcccgttctagcaaggggcaccctgcccctccataccactctcccctcttctctcctgcttgcagggaacattcctgaaagagttctctaggcttctttgctgtactccccctcctgtcacccctaccctctctctgtaaagtggcccttgtgtaccctcacccctccacccatgacactgcgaccttaactctcttcccttggcgtggtttacctgcttttgaaaattttgtttataattgacacataataattgtacatgcccgtggggtgcagtgtggagggagctacacacaggaaaatcctgtgctgtggaagggtagcgattgccaggctggggctggattttcctctgtgtgtagtaaataccataactacttctgtgaaaagagtaagattttttagaactgtgtgtaggaagatctgtgtgtagctcccttagtagctgcatatctattttggagaatcttgtggaaggcaggagctaagagtcaggaagtagcccaggcaagggatggctatatacaaatcagttcagtaaaggggagatgaaaagaaggcagaatgcacwgagagaatcttcagatttggaaactaagggactgtaggacttgacggggagggatttgtctgaacaagtccaagct

SEQ ID NO: 49986 - DNA, 597 bp, Homo sapiens
aacagaattgagccatccatcaattcacttcagacaaaaccccaagataccacacaatgggaagccggcccgtgtccaaccctataaccatcctagtgagtccctaggcatcttttaactatggtttgaaccagcctgtcttctttctctggctatcaggttttctgaggcactctcttaggaagactgccattctccagcctgacctctgccaaccagggcctcaggttgttgctcyctggggctatggatgacctttccagatttccagcccattcccctggggagcagtgattcctgttgtggagacagctggccccaggactccagctcagacttctcaacaaaggactggtccaagaagaagaacatagttccaatcagactgcctagactgtcacaggacacaggcaaagtttggtctcctttaccctaagagaatcctttggaggccattttacattcttcctcttcctccaggccaggtagcctctatctcttcttactttaatgctggagcctttgtgtccatgttcagaggatgtgccagccctggagggatacagtgggggaacaagaagagacctcccctggaaa

SEQ ID NO: 49987 - DNA, 653 bp, Homo sapiens
atattgcggtagttggatgcacagagttttcatctatgttccaggattcagggggtctgtgatctaccagaaaaatgttttacaaacatttgtagatttagttttttgtgtagcgggcccattgcttacattagattctcaaagttgtctatgaccctaaaatattaagaccctttgtctaatggtttttttttttttctttttctttttcttttgagacggagctttgctcttgttgcccaggctggaatgcaatggygcaatctcggctcactgcaccctccacctcctgggttcaagcgattctcctgcttcagcctcctaagtagctgggactacaggcatgcatcaccatgcctggctaatttttgtattcttaatagagacagggtttctccatgttggccaggctggtctcgaactcctgaccttaagtgatctgcccaccttggcctcccaaagtgctgggattacaggcatgagccactgcacctggcctgtctaatggtttttaaaaagtgtgcctttgagttctaggccactcccaactcccaactccacccttcttcaatcaaagtatcttactttcatctatttcatctatctatttcttctagtagggttaggagtatggtttttttgttgtttaaaaa

SEQ ID NO: 49988 - DNA, 548 bp, Homo sapiens
ctgggtaattattaagtggtatctattttatctcaacattgttgttagtctctttttttggaytcattaatggaaggtatatattttcataaaatatgtgcccaggagaaaaaggatcaaaggcactctttattattcgtcatgagttaatgtcaaacccttattacttcctgcatagatttctaaattatagcttcataaaaactacagcctaagtagttatgacaaattagttttttctcatggaatgttgagaaggaatctgagacaagacctatgctcactgaaaccgagggctatgattcataatgatatcagctgtgggggaaaaaaatgggacctgagggaacgcacgccacccaccctctatctatggctaagataagcaaacagccatcatcttattggaatgaagcaaactgaaacctggatctatttagtgttaatgttatgtagcagttctctctgataattgccaagtcaccagtattgggtcttgcccttttagttttgaggaaattatttcagatgattgctgtgtgtggtat

SEQ ID NO: 49989 - DNA, 548 bp, Homo sapiens
ctgggtaattattaagtggtatctattttatctcaacattgttgttagtctctttttttggactcattaatggaaggtatatattttcataaaatatgtgcccaggagaaaaaggatcaaaggcactctttattattcgtcatgagttaatgtcaaacccttattacttcctgcatagatttctaaattatagcttcwtaaaaactacagcctaagtagttatgacaaattagttttttctcatggaatgttgagaaggaatctgagacaagacctatgctcactgaaaccgagggctatgattcataatgatatcagctgtgggggaaaaaaatgggacctgagggaacgcacgccacccaccctctatctatggctaagataagcaaacagccatcatcttattggaatgaagcaaactgaaacctggatctatttagtgttaatgttatgtagcagttctctctgataattgccaagtcaccagtattgggtcttgcccttttagttttgaggaaattatttcagatgattgctgtgtgtggtat

SEQ ID NO: 49990 - DNA, 548 bp, Homo sapiens
gagagttgatgggaggaaaagcaggtttattcagagagccagcaagccgagaagatggtggactacagtcacaaagaccatcttaaattttaaattttaccataaggagttggtatgggagatacgtgggcatggtgcagggggcagggtctgtgtgtctttgttctgatggatatcttgggtaattgtttggaggtctggttggygttattttgacctcagcctgttggtggtggacgaattgttcttaacttcccttaagcgggagaattctgcaactggggctctctgcctggtttgtttcaagttagctgatggaatttcttaagcaagagcataattacataaccatgcattgctggaggggagtgtctagagagggaaggaatgaagggatgagaggggagggaaacaaagtgggtgattaatatatattttttaaatgggggtcccgagttgcacttggatgggaaagattcacaaagtttggaaactgagcttcttcacaattgttttggaaattatttgttttctcacattagaatgct

SEQ ID NO: 49991 - DNA, 612 bp, Homo sapiens
tagctatatggtaggaccactttccatcaaaagagctaaacccagatcatcatcatatgcaagtaaaacrctggttaccaaaaagtttttgttaatttttataacccactagaagattatagaaacattgaatgattcctgacagtaattgtaatcacttgtgctgtgtataatgttgttctgagaacttcaattgcttaaaattgataagaggtccaccctagcattttatagccaattatgtgtctctttcatttgtcacaccagattagatttctggcgcatctagttaggcagattgcctctgccagtggccaatgtaagcaatgtttcaatgtgaggaaaagagaatgtaatgatagaagaagtgaaataagtgagcaggactcactgggtatgctttccatcaataatagcatgcaatcatttatctagggactatttacatatataatacaaacatatagtctgatacaacacttaatggaaaaactgacacattttgacataaaattatgtcagaacatctttaaggacatttgtttctaccactttgaaaattagttaaaaagcattgtcatatctatagtttcaatgaaaaaatatatactc

SEQ ID NO: 49992 - DNA, 1359 bp, Homo sapiens
ttctgtgtattatctgccatcgtcttagtatttttcatataacaaattttgtaaatcaaaaagtctcaatgtctttataagctatcttggcagaggttgatgtccaaggaataatttctctcccaaattatgtcaatcagaatttcactctaccataattcttttaatcagtttcagaggaatcataaatttcaaaattgttcaaggtagttgttgtagttcaagtacattttgacaggtgtaaaactgtagacagtctgatacaaacatattctaattgactcaaaactatatgggacctattttaaaatctagactttaaaatgtcttgtcaacgtacacatgttctccttgtgaaataattgctttttattctctggatagaataatttaatcttaaaaccttcaattcacgttaaaaacaaaatattacataaggatatgcttataaaaataattcacaactagcttttcaattcagaaatatatgtgaaaaatcatcaagcatctcatggatttcaaggagaaatgggttagtaatttattccatatgtctcaatttttcctagactcaagtcttcctttaaaataattctaggcgtttaagaaaccatgtaaactaaaaagaagaaattgtgacactgccgcttaggttttttaaatctttggacattaatcaatatatttttaaattttatcttaattagacattgtgagttcaccatcttcctgtcagtatagcatccaagctgattatcatagattacaagttcaactatcaactgtgttctgagagtctaaaaaaataaatgaatgtatttgtttgtatattcttaaagcaggagtgaggacacagygaaagtgagacaaagaagagagaacaaaataaaacaggaaagatagaaaagccaataccacacgtgttaagaggcaagttcctgtgttagatatgtgggcttaattctctgggaagctatgtggagcatgcctcagaattacatcactgaatccagggagattcttcttagttaccctcaccttttcttcccacttcatgcccagtatcaacctcccatgctgctagagaaagtcctcagctagaaacagctgcaaattctggagatgagaccttgtagagtgttaagaatggttttcttcccagcagctacaggtaaggaataggggctgggctattaatacatctgctacaaatcaatataccccttaggctccttttggtgatcgacaatgtatttaaaaatattagatgatcaagaagggctgcagaaaggaggaagcagaaacaaacagcacacttcttggtttatttttattcatttcatcagtttaaggaaaatg

SEQ ID NO: 49993 - DNA, 606 bp, Homo sapiens
catcacttctgcctttcctcagaggtaacgatctgaaaaatttgatgtgtttcaggaattcctttaggaacacttttaaaaggaaataaattctaaaagtaattacatttacagagagtttttattcttactaaactcagtaaacctttaatgttaataagagaatgcaaataaagtttgtttacagaaagaaaaaaaaaacacccagtggaaggaaactgactgtccggatatgtcttccagcaaaacaccaaactgaaactaagttttactgacyaaagatcatacataagagatcttttggtttaataataagaaccaaatcctgtttctctatgagtgaaaatggagagagatgctttatgggcatgcaaccatggagtaacaaaacaccctatagctcaaggggtcctttgcttggcttaatgctctgttattgctgtctcaaaattctagatactttttaaacaaagggcaccatatttttattctgccctgagccttgccaattatgttgctggttctggttcccaaggcaagtggcagctagctaccgtctaaggactcttgaggtgacaatggctgtcaaatccactttgtcctcag

SEQ ID NO: 49994 - DNA, 527 bp, Homo sapiens
gtgagttktttttttttttaaaaagaaactcaggtgtaagaattactagcaaatatatttgaaaggataattttcaagaagtgaggcagcatgctgcatgaaaaaaaatgaggatatgctggagaaaaaggttactcaaaatttgcctcagtgtgactatggcagttcttttaaaaagccgtgttatctgttcttgattcagagtggtttatgactctcattctgaagtttagttttgaagtttgagaaaccattaccacatggttgagaatttgttggtgtgaatgttattttttgatattatagattgtcctgtgttatattgactccaaaacctttaatttgttgaagatatggatgtttggtggctattttccaagctgcatattattgcaaaaagaaaaagcacaaggatatatgaatattagattttttaatcaacaaatccagaagttaccatgtacctaggcctaatagtaatcagtaaagtaaagaagacagtggtcatgggggaaattaaactatct

SEQ ID NO: 49995 - DNA, 568 bp, Homo sapiens
tgcatatatgcacaaaaagtcatgtacaagaatgttcagagcagtattatttgacctagcatcaaatggaaacaacccaaatggccaacagtgaatggctaaataaatggtggtatattcatatgctggcatactatacatcaatgagaataatgtgctaatgctacacacacaagttgaggaatttcaaaaacataatactgaacaaaataagacagacacaaaaaggtacatgtgtttgattttatttttgtaaaaaaaaatccataatgatagaagtcagaatactggttattacagggaatggtaataactgcaaggggccaaaaaagcctcgggggtgctggcaatgttgtttctcaatctgartgagctttacacaggagcgttgatgtatgttggtgcctctgagtcagagattaccaggaacacacctgtagagaacagttacttttcttacttgctgcagcaagagagatcaacactatggtaaattgtggtatgtctccgaagagaagaattagtcaagccgtgttcttaatgtttttgatgttgaaattaaccacag

SEQ ID NO: 49996 - DNA, 810 bp, Homo sapiens
cgtctaactgaaaccttgtaccctttaaccaacatctcatttccagtcacctctccccagctcctggcaaccaccattctactctctacttcaatgagtttgactttttttagattccacatataagtgagatcatgtggtatttgtctttctgtgtctggtttatttcacttagcataatgtcctctaggttcatccatgttgtcataaatgacaggattttcctctttttatggattaatagtattccattgtctgtatataccacattttctttagaagaaatgtgttacagatttcatgtgtgatacagatgaaatgaagtgtccatttcatctgtaaatggacacttaggttgattccatatcttggctattgtgaataatgtagcaatgcacacaggagtgcagatatctatttgagatactgattgcaattcctttgaatatatacccaatagtaggattgctggatcatgtggtagtgctatttttatttttttgaggaacctctatactgttttccataatggctgtaccaatttttatttccacaatagtgtattagggtttccctttctccacatcctcaccaatacttgttatcttttgtctttttgatattagctattctaacatgcatgaggtggtatctcattgtggttttaatttgtgtttccctaatgattagcaatgttgagcatttttacctgtacctgctggccatttgtatgtcttcttttgagaattatctgttcaggtcmtttacccatttttaatgggattgctttcttactgttgagttgtttgg

SEQ ID NO: 49997 - DNA, 1472 bp, Homo sapiens
atgagatccacaatggtgagcacaaacagacacaacaactgttgacttcatggaaataacactccaggaccatctttaaaaagtatagaataactgtaagtttcttttgagcaagtaaaagccctgcatacactttcagtttttaaaagatctcattaattttatatacaaaggaacaggacttgggaggtagggaaagaaaggtaattccaaggcttccaaatattagtgttatcatttaaggttgcttctatgttaatggtacccaccatacagtatttgaaggatgtcaatgcaaaagcattatatgcagcagaaaagcagtcagataaaaataatgagtactctcagtgtggctgttaactaagtaataactattgacatctggggactctaatatttttcctggagtagacatgaagagatgcaaattgaagtacaagactacatcacctccttgggtgggtaaagcatgggaggtggggatgcagggaagaaccctgtgacatttaagacatctaagatattcaggaaaacggaggtcagaagatgttctgattaacggaggagaaaaatcgttctcttggatgtttggtttaggctgagttgtaggaaaagattgacttagttcccaggaagctttttttgtggttgtagattccagagttcacagaaaggatcagcttgctcacagactcaacaacagtcaactcaagtgccaagaaagtggggcaaggctggatgaagcccaggtgagtgacatgggagggggtgagacaaccagaaaccagaaccttcaataggaaatgatgagccatcatacccttgagtgggcaataagccctctgaggagaattccaaaaatgttccattatttgaacaagtacaatgcctactttgaggatgggtgcatatattgctatgcttgtttaaaataaatccaatgacttatgtcatctatttctctaataataaacaacaaaaggaaaaacagctgaaaacagcccagaaaaaaataccaggttttgagttgggcagaaagccttgctttggaaatgcarcatcgcctgcagggctgtgcaccttaaagccggccatcacttatgtccagtaggagttttgacttttggaagaaacaacttccttgtgagagatgaaaagataaacaattctgtgtaaataatagatatgctttgtataacgtcagaggaaagctcccaggagtggcagcttgggtaatcagatacctaagaaatttgcttcaagaaaacccttcttcattctgtaatctggacatatctgtttattcatttgatgcattgttatagtaaaactaggcagaactggggaagatgacaattttgaacaatgcatgatactatataattctaaatgcaactttacatgattggttatacagccacagcatttacttactacatgtgtttttaaggctataatatttctcttca

SEQ ID NO: 49998 - DNA, 1472 bp, Homo sapiens
atgagatccacaatggtgagcacaaacagacacaacaactgttgacttcatggaaataacactccaggaccatctttaaaaagtatagaataactgtaagtttcttttgagcaagtaaaagccctgcatacactttcagtttttaaaagatctcattaattttatatacaaaggaacaggacttgggaggtagggaaagaaaggtaattccaaggcttccaaatattagtgttatcatttaaggttgcttctatgttaatggtacccaccatacagtatttgaaggatgtcaatgcaaaagcattatatgcagcagaaaagcagtcagataaaaataatgagtactctcagtgtggctgttaactaagtaataactattgacatctggggactctaatatttttcctggagtagacatgaagagatgcaaattgaagtacaagactacatcacctccttgggtgggtaaagcatgggaggtggggatgcagggaagaaccctgtgacatttaagacatctaagatattcaggaaaacggaggtcagaagatgttctgattaacggaggagaaaaatcgttctcttggatgtttggtttaggctgagttgtaggaaaagattgacttagttcccaggaagctttttttgtggttgtagattccagagttcacagaaaggatcagcttgctcacagactcaacaacagtcaactcaagtgccaagaaagtggggcaaggctggatgaagcccaggtgagtgacatgggagggggtgagacaaccagaaaccagaaccttcaataggaaatgatgagccatcatacccttgagtgggcaataagccctctgaggagaattccaaaaatgttccattatttgaacaagtacaatgcctactttgaggatgggtgcatatattgctatgcttgtttaaaataaatccaatgacttatgtcatctatttctctaataataaacaacaaaaggaaaaacagctgaaaacagcccagaaaaaaataccaggttttgagttgggcagaaagccttgctttggaaatgcaacatcgcctgcagggctgtgcaccttaaagccggccatcacttatgtccagtaggagttttgacttttggaagaaacaacttccttgtgagagatgaaaagataaacaattctgtgtaaataatagatatgctttgtataacgtcagaggaaagctcccaggagtggcagcttgggtaatcagatacctaagaaatttgcttcaagaaaacccttcttcattctgtaatctggacatatctgtttattcatttgatgcawtgttatagtaaaactaggcagaactggggaagatgacaattttgaacaatgcatgatactatataattctaaatgcaactttacatgattggttatacagccacagcatttacttactacatgtgtttttaaggctataatatttctcttca

SEQ ID NO: 49999 - DNA, 591 bp, Homo sapiens
ccgcctgtgagggcgccagcttgtgccgctgtggcctcgcgccctgccggcggctctggggacgaggtgggcgcggtcggcgccgggcaggagccgcatcaggcaccacagacaacggggctcagtttctggaaacttaagccctgggcagagccttcccaccagggagaaaggtcttgtcctcctgtcccctgtggcctggggaatgcctggccacagctgtgccacctaggaagggaagggcatggcgtagccagagtgctccaggaggcgccacctcctttgcctttctgtgaggaggtcacccccaaggctgcgcgtcctggggtgaacgccgtgtgaaagcacgacctggctcagttttttgtggcacaaaccacactcctggagctcagggtcacacttgcctgaggtcacgtgggagcggggtggaccggagcccaccttctgcaacctaagctacgtggctgtcacctgcatagcaaaggctctgagaagttccgcgagaaagaaaccggctcttttcgcagcccrgggtttccaaagctccaggaccatgtgcccccactgctgtgtcttgctggggcacca

SEQ ID NO: 50000 - DNA, 1453 bp, Homo sapiens
gggtaatgaagttgttcccaagcctgtcaccaccacatccttccaaccctgctcttaagcttctttttcagagggaagcagaatgtttactcagtaggacatcctaaaggacagaggcaaggcaaggagaggatggagaaaagctcattctcttttgaccacaatcactgtcactggctgcagggtgtggaaaatgggaaggcacagtatatcatcatttcctcaggacggaatgctggccagtgcccgatgggaacaacagctagcaaattagtgaattgtggctgcccattatttaagagagaacacgtggtaaccaccttcagtaaataaatgcagatgaatttggtgattkacaactcttgtgttttcttgtggtaacacagttgtccaactgatcaggcatgaatgttatatttacacaccataaggtacgtggttagtggttctcaacatttttaaacatgagaaacctgttctaacatacacagagttcacagatctttaagaacttttagctgttctgttatctgttggttgagaagacacataatggtgagatcaaaatgtattaagtggatttgaattacaattatcatggaacttactatatttgaaaactgtgtgtatgtagcatattacacacaatggtgctcagggattcaggatcttttctcgtccccaccaaactgaggaccctcctctgccctcccccgttctcagttcagggccaaagcccccaggttgggatctactgggagaatcaaaagattgtgaattttgggtcaggcagagaggggatcaaatttcaactctaccacatcctgtatgatcttgggtaagttactaaaccttgctgtgccccagcttcctcgtctttaaaatggagatcagttcctatgaagacttaacctcctaggggttttggaggaattgaagttttgtgtaccatgaatagtgcctgcgcaggaaaggtggcacttaaaattttttccccacttcttgcctactctccccacctccaggacagattcaagaccagtaatgcacaagatgaaaatcaataagttaattctttctgcctctgagcattcatttagccggtactgtatgttctagttagtagagctatttgacaaatgactactacttttagtggcgtaaaacaaatctttattacactcaccaattctctggacagggtacaacagggacagctcgtctctgatccgtgttgtggaacttcagctgggcagactgaaaggatgggggctaattacctggtggctcattccctcagcatctgacggataatgctggctgtcacctaagaccttaactgaggcttttggccagaacgctggtgccccattggccctggctttctcacagcatggtggctgggttccaaaaggaaacatcctgagagagctaaacggaaacctcatccatc

SEQ ID NO: 50001 - DNA, 614 bp, Homo sapiens
tatttgtgggtctgagcaattcttattttcagttggtactgtaaacttacttcaaaatatgtgttaaaggcagtttggtagccaattgaaactttcttccaaatataataagaacagtgtcaaaaagagaaaactataaaagagaacacagaacttgatttgaataattttgttttaaaattcaatgttcggagttcattatttacagtgttaaagtgaactaaatatggcctgaaaaggactctgtacttctatatttgagtcctatggaagaaccatacctaamttaataagcagacaagattgaaaacttaacttaggagtatgtgcctgtaaaagtagctgagtcttggccaatttcagcagccatacttcaaccactcatacactgctaagtattcaaactgtgttcaaataaggcaaatgccaacctgtaaccaatctagttgtttctgtacatcacttccctttttcgtctataaattttcctccaccacatggctgtgctggagtctttctgaatttgctgtgattctgggggctgcctaattcacgaattgttcattgctcaattaaacttctttaaatttaattcgactcaagtttttctttta

SEQ ID NO: 50002 - DNA, 515 bp, Homo sapiens
aaaacaaaaactaaatctaacaaaatggactattaatcattttacccatacctcaaaagtaatttctaatatagttcagtagttaatgtctaaatttttaaaattcaaattttccccatttttaataccaaaataattgctttgttaatgctctcttaaaaaacagaagaatccttcagccttccaagtagaaacacactttaaaatttattattttttggccaggtgctttggcccacgcctgtaatcccagcagtttgggaggctgaggcggacagatcacttaaggccaggagttcaagaccagcccagtcaacatggtgaaatcccgtctctactaaaaayacaaaaattagccaggtgtggcgtcaggcgcccataatcccagccactcaggaggctgagggacgagaattgcttgaacccgggaggtggaggttgcagtgagccaagatcacaccactgcactccaatctggatgacagagcaagactctatctcaaaaaaaaaaaaaa

SEQ ID NO: 50003 - DNA, 546 bp, Homo sapiens
ttgccccccaaattttaactttattctctgaaacagatctaaaattcctatctacctcacagtttcacagataacccagtctcttccagtttataactgcctctttggggtaagtattcagttaagtatttcaatatcagggcyatatctgtgttctcaaagaaaatcctttctaccttctcctccccgaaatggcttctgggaggggaaagcttactcttcttgaacaaggaagctgggaggggggtctttggtgtgagctgtcccgtggatcttctgtgacctcttccaggatgtcccttgtcctaccttgtcactggataacttgcatcagtttccaccagatgtggctgattccacctggcctttgggacctcatgttcgcatctgacagtttcattctgcccctcaattctggatttgagattctggcactttgtgagtttatttgtttggactccaggccttgttggatctaccaatctttcagcccatgttccccagcttggataataggaaattcttaatctcctatgggccacccaa

SEQ ID NO: 50004 - DNA, 1128 bp, Homo sapiens
tgctagaattgtgctccacataaaaataactgtatacttaccttgttcatagaggcaactagaaagcttcaagacagagaaattaggaataattcagatgtcgaaactgaaaatgagcataaaaacctgctgtgttaataaaatcctaactacaatgtgaaacacggcttgaccagaaaaatctaacttattcacctgaaatgacttggtaacaaaaatctctacaatgttcttacctcttttttctttttcttttttaatttttaatttttgtaggtacatagtaggtgtatatatttatctcatatactcaaacagagwttatgagatgttttgacacagacattcaatgtgaaataatcacatcatggaagatagggtatccattccctcaagcatttatcctttgtgttacaaacaatacaattatacccctttagttatttttaaatgtacaacgaaattattgttgactagtcagcctgttgtgctattggtcttagctctttcaagaacatatgcaatctgaaaacaaagcataacaccttattcaagataatcatttccaaaatcctgaaaaggcaaagtcatagaagtacaagggtttgtataacttcttgacttggagcagggaacattatctatagggatctgcatttcagtgagaatatactggggtccactctccaaatgttttatgaattacattcaacggtgtgggccacacctaagaaaattgatggatggttcctcttttggcttggtttgtaacaaaaagaaattcttttaaagttattgtcaacaatatctttctttagctaaagacggaaaaggggtcatttatttgattttcagttgtgtgatcattctgaacattctttagaaatgcagtattaaaatagaaaaagtagtaaggattctttttatttaaaaaaatcaagagagctcatttgatcatgataattatgctgaaagatgaaatacctctatgtagagtttaatgggttgagccataaagtttctccaataaaatattctagttggatgcaactaacattcgatcagagacttggacataaaatttactggtatttaactacactgatagttaggtactaggggcctgag

SEQ ID NO: 50005 - DNA, 1128 bp, Homo sapiens
tgctagaattgtgctccacataaaaataactgtatacttaccttgttcatagaggcaactagaaagcttcaagacagagaaattaggaataattcagatgtcgaaactgaaaatgagcataaaaacctgctgtgttaataaaatcctaactacaatgtgaaacacggcttgaccagaaaaatctaacttattcacctgaaatgacttggtaacaaaaatctctacaatgttcttacctcttttttctttttcttttttaatttttaatttttgtaggtacatagtaggtgtatatatttatctcatatactcaaacagagattatgagatgttttgacacagacattcaatgtgaaataatcacatcatggaagatagggtatccattccctcaagcatttatcctttgtgttacaaacaatacaattatacccctttagttatttttaaatgtacaacgaaattattgttgactagtcagcctgttgtgctattggtcttagctctttcaagaacatatgcaatctgaaaacaaagcataacaccttattcaagataatcatttccaaaatcctgaaaaggcaaagtcatagaagtacaagggtttgtataacttcttgacttggagcagggaacattatctatagggatctgcatttcagtgagaatatactggggtccactctccaaatgttttatgaattacattcaacggtgtgggccacacctaagaaaattgatggatggttcctcttttggcttggtttgtaacaaaaaraaattcttttaaagttattgtcaacaatatctttctttagctaaagacggaaaaggggtcatttatttgattttcagttgtgtgatcattctgaacattctttagaaatgcagtattaaaatagaaaaagtagtaaggattctttttatttaaaaaaatcaagagagctcatttgatcatgataattatgctgaaagatgaaatacctctatgtagagtttaatgggttgagccataaagtttctccaataaaatattctagttggatgcaactaacattcgatcagagacttggacataaaatttactggtatttaactacactgatagttaggtactaggggcctgag

SEQ ID NO: 50006 - DNA, 1128 bp, Homo sapiens
tgctagaattgtgctccacataaaaataactgtatacttaccttgttcatagaggcaactagaaagcttcaagacagagaaattaggaataattcagatgtcgaaactgaaaatgagcataaaaacctgctgtgttaataaaatcctaactacaatgtgaaacacggcttgaccagaaaaatctaacttattcacctgaaatgacttggtaacaaaaatctctacaatgttcttacctcttttttctttttcttttttaatttttaatttttgtaggtacatagtaggtgtatatatttatctcatatactcaaacagagattatgagatgttttgacacagacattcaatgtgaaataatcacatcatggaagatagggtatccattccctcaagcatttatcctttgtgttacaaacaatacaattatacccctttagttatttttaaatgtacaacgaaattattgttgactagtcagcctgttgtgctattggtcttagctctttcaagaacatatgcaatctgaaaacaaagcataacaccttattcaagataatcatttccaaaatcctgaaaaggcaaagtcatagaagtacaagggtttgtataacttcttgacttggagcagggaacattatctatagggatctgcatttcagtgagaatatactggggtccactctccaaatgttttatgaattacattcaacggtgtgggccacacctaagaaaattgatggatggttcctcttttggcttggtttgtaacaaaaagaaattcttttaaagttattgtcaacaatatctttctttagctaaagacggaaaaggggtcatttatttgattttcagttgtgtgatcattctgaacattctttagaaatgcagtattaaaatagaaaaagtagtaaggattctttttatttaaaaaaatcaagagagctcatttgatcatgataattatgctgaaagatgaaatacctctatgtagagtttaatgggttgagccataaagtttctccaataaaatattctagttggatgcaactaacattcgatcagagacttggacataaaatttactggtatttaactacaytgatagttaggtactaggggcctgag

SEQ ID NO: 50007 - DNA, 503 bp, Homo sapiens
gaaatgatgcaatgtgaagtttctcaggcaatttctagagatttaacttgcttgtatcatattttggcatagcactggccctaatttatttaacgaaatattttaaatacattttgaggaagtaatttatcattgaaggacattatttgtagagaattcctttgcacaatacttagtttaacttggtttaatagaatagtttaacttagtttaatagaatagtttaacttagtttaataggacagtatttttctattttaccctgcatcttttaacttctgataccataacttgatttttttctgttwactgaacgattaaaaaacttcttcaaagtaatgtaatctaattttactttctgcaaatcaagataatgacttagacccagacgaatgtatgcagcgcactggtggcctttttggttctagaagaccagtattaagtggcacaggtgagaaatagaacttattactgaatattagttactgatgtatgtttttagc

SEQ ID NO: 50008 - DNA, 587 bp, Homo sapiens
tgccttttgaactgcttagcgtcattgccactcttccacccaccaggtaggtgctgtcatggtgtcatggagttccactatgtgggagagccatggttgaaatgtaactagaactaaaggggttctgggttttcctcttaaccagttagtctctttaagagcataaccgaactatttgtgtgtatctcaagggtagcatttgcaacttacagggcaggaaagagaacatcagtggcttgccacttttaggcttcaagtacaatcctgggattatttgcattactccgaggtaattacaactttaaaacattaattgctttcatatttaaaattatttgcttaaaaactgacactcccttttaaaatcaagtgtgttctaatgagatgtagatgtttaactcactcaaaaaaataaagacacagaggaaaatgtataaattaagtaagagtcttaaagtctcatccatcaatttgcagtctctctgtcaatattcwtgcggcaaacaaagaaaacagaacaaaacaaaacatatccctgtgtctttgttatcattattcttttgaagataatgtaaaattctagaaaa

SEQ ID NO: 50009 - DNA, 703 bp, Homo sapiens
tgaccctaccttctagaaggggaactgggaaatgtggaagagctcatgcaaatgcggtgaagaataattatttccaggcggtcgtggtggctcacacctgtaatcccagcactttagggggcaagatgggcagatcacttgaggtcaggagttcgagatcagcctggccaacaaggtgaaaccccatctctactaaaatacaaaaattagccgggcatggtggtgcgygcctgtaatcccagcttgtcagtaggctgaggcaggagaattgctcgaacccaggaggcggaggttgcactgggtcgagattgcatcactgcactccagcctgggtgacagagcaagactccctctcaaaaaaagggaaaaaaaagaataagcatttccattataagaatttctgtaataattttttatctcccaattttcttcctacatcttcaactcttccttcaagagcaactcttttccgtatctacctcactaatgttagcatttttcatggttttatcctccaccctcttctacatactctccctataagagcacctctacactcacatctgaaagatcatctgtagactttttacttccaacccacagtctccatgttagagatctaggtctatagtgagcataatccatccagtagcagcctggtaggtatctcttctgatgttccataggctactgaaactcaggg

SEQ ID NO: 50010 - DNA, 1219 bp, Homo sapiens
tgcacatgaatgagcttgagagagagacagggactgacacagaaaagagaaagaagatggtatttgcttaagtaaagataagccaaatactctgttgcttgcatttgaaagcatacctaatcaaaacagcttgaaatcagaaggaaatgtataggttgattccttgatacttcatgctttcacaaatctaacttcttgaatggagctaggtttccttttgatgttgttagtcctaaattaatattactgccctccacttagttgtatgactttaggaaatatatwtaaattctcactaggctgtttatacttccatagcatttggtataacgttatctcattggcttagtgataagattaaactaaaacaaacataactatatctcctgagtcccatatacatgattaataattttcagttgggcttatagcaaaatgcacctacgaatcttctgtgaagataatggtgttgaaaacttcctttaggaccaggcgggtcacgcctgtaatcccagcactttgggaggccaaggcatgtggatcacttaaggtcaggagtttgagaccagcctggacaacatggtgaaaccccatgtctactaaaaatacaaaaattagctgggtgtggtggcacatgcctataattccagctagtcaagagcctaaggcacagaattgcttgaagctgggaggtgggggttgcagtgagctgagattgtaccactgcactccagcctgggtgacaagtgagactgtgtttcaaaagaaaaaaacaaaacaaaacaaacaaacaaaaaagaaatcttcctttattcagtatctgcttcaaaaaagttgctaatttttaagcacgcgattaaaatcagaagtttaacaatttttgtctatattttatattcctgaatcgtattttgtgataatgtatattatgaatttttttaaaaattgctgaattgttatggagccaaatagtacaggattaatttagttgccttttattttagcggcacatgaatttacttaatttgtttacagagtctcagtgaaaatttgatattttaacttattcacaaactaggtaatatttgttattttttgttttatttgtcatctttattgtgtttttcattccatagcattattttaggtaaacatatgtttacctgcaggggaaaaaaacaggaactgcttttaagaccaggagaaaatttggccttta

SEQ ID NO: 50011 - DNA, 1219 bp, Homo sapiens
tgcacatgaatgagcttgagagagagacagggactgacacagaaaagagaaagaagatggtatttgcttaagtaaagataagccaaatactctgttgcttgcatttgaaagcatacctaatcaaaacagcttgaaatcagaaggaaatgtataggttgattccttgatacttcatgctttcacaaatctaacttcttgaatggagctaggtttccttttgatgttgttagtcctaaattaatattactgccctccacttagttgtatgactttaggaaatatatataaattctcactaggctgtttatacttccatagcatttggtataacgttatctcattggcttagtgataagattaaactaaaacaaacataactatatctcctgagtcccatatacatgattaataattttcagttgggcttatagcaaaatgcacctacgaatcttctgtgaagataatggtgttgaaaacttcctttaggaccaggcgggtcacgcctgtaatcccagcactttgggaggccaaggcatgtggatcacttaaggtcaggagtttgagaccagcctggacaacatggtgaaaccccatgtctactaaaaatacaaaaattagctgggtgtggtggcacatgcctataattccagctagtcaagagcctaaggcacagaattgcttgaagctgggaggtgggggttgcagtgagctgagattgtaccactgcactccagcctgggtgacaagtgagactgtgtttcaaaagaaaaaaacaaaacaaaacaaacaaacaaaaaagaaatcttcctttattcagtatctgcttcaaaaaagttgctaatttttaagcacgcgattaaaatcagaagtttaacaatttttgtctatattttatattcctgaatcgtattttgtgataatgtatattatgaatttttttaaaaattgctgaattgttatggagccaaatagtacaggattaatttagttgccttttattttagcggcacatgaatttacttaatttgtttacagagtctcagtgaaaatttgatattttaacttattcacaaactaggtaatatttgttattttttgttttatttgtcatctttrttgtgtttttcattccatagcattattttaggtaaacatatgtttacctgcaggggaaaaaaacaggaactgcttttaagaccaggagaaaatttggccttta

SEQ ID NO: 50012 - DNA, 527 bp, Homo sapiens
ttttgcttgggaaggattttagctgttgcttaggagacattttatcggaaggaatcattcagatatatgtagcaattaaagaagaatctcttgcaatatcgttttttttttwaaaaaactctagttaaaaccattttttgaaattatgttaaattccaaaagactcttttaaaataggtttaccgttcagtctttgaaatgctacattgctatcgagaggtcctgctaatgcctaattcaaaatgtggcaaaagtccctgtgtgcagctgatgtgtagctccaagagtaaggcctgaactggcgttctggaggcggggagcttgtgaggctcacggggcagatcctcaggctcttagactcttgtattggtaattcaaattacgccctctgtgatcactggttgtccaaaagaggcaaagtttacattgtgttaataatacacgtggatgcttgattagctatttaatttttgaatatttagagcagtggttctcaatctcatgtgattttgcctccctggggacat

SEQ ID NO: 50013 - DNA, 527 bp, Homo sapiens
ttttgcttgggaaggattttagctgttgcttaggagacattttatcggaaggaatcattcagatatatgtagcaattaaagaagaatctcttgcaatatcgtttttttttttaaaaaactctagttaaaaccattttttgaaattatgttaaattccaaaagactcttttaaaatagstttaccgttcagtctttgaaatgctacattgctatcgagaggtcctgctaatgcctaattcaaaatgtggcaaaagtccctgtgtgcagctgatgtgtagctccaagagtaaggcctgaactggcgttctggaggcggggagcttgtgaggctcacggggcagatcctcaggctcttagactcttgtattggtaattcaaattacgccctctgtgatcactggttgtccaaaagaggcaaagtttacattgtgttaataatacacgtggatgcttgattagctatttaatttttgaatatttagagcagtggttctcaatctcatgtgattttgcctccctggggacat

SEQ ID NO: 50014 - DNA, 556 bp, Homo sapiens
atggcagcatgttgcccaatcagccttctgggtatcgagtggcagggtatgaaacccagtgaataaggactccagaatctaaagccagtggcttgaggctacagggagtgtagtaaagccgttgtttacttaaagatttatcaaatcagtcagtgcaaatgtcagatacaatgtatttatttaaaagattcatttttaatcatgaaattacttatcatccacattgttttaaaaagaaacaagatgctggatgtctgccaatttttgccttcattaccttttttgataaagtttctcagatccttgtttcaaacacaaatgcagggattgctgccactttttaactattaagaggcagaaaattgcacaatattgaacttttttccactgaagtagtgtgcagttctagtttgcattcctgatatgatttaaaacatgtaatataaagatgttaaaaaaaaaaaccaaaactgtgcagagtctagaagttgtttgtcatcttcagcttrtgcacaattctgttttaggttaaaaaaaggcattgtttgagctgtcc

SEQ ID NO: 50015 - DNA, 1950 bp, Homo sapiens
tgcaaaactgagctgtggtgatagaaatcatcagtggttatgggtgggggattgactgaaagggacacaaaggaactttctggggtgacagaaatgttctatgacttgaacataatggggtagtgattacacaagtgtatgcatttgtcaaaacttaaaatgtgtacatcctattgcaagtaaactatattcctaaaaagcagattttaaaaaatctactaaaagtacaaaaacaatgtgtcaaagacctttcttggttaatgactctcttagagatcaacagaagtggcaagcaaaaatacaccaacaatatggaagatctgaatcacaaaaatatcacatttcatttaataagcacacacagaaatttttatgctcaacaaaccaggtatacatacatatttttaaaatatccaacgcatcatttgcaaaagctgatcatgtgttcagtcacaaagaaaattcctaaaagttgaaaacctttaagatgcaatcacctaccacaataaagaaaaccagacagataaaccaaaaggctaggacaactaacatgcattccatgcatttcaaacacatctcaaccacctggaaaaattctaaaaacacttataaataatttttctattaaacaagactaaaattaaaattaaagtatatcaagagattaatcacaattagaacaccgtatggcaaaaaaaaaaaagtcaaggtactcagaggaaaatatacagcctccaatgcatttcatagaaaataagcctgataataaatatgtattcaacttaggaagttataataaaaaacaaaccactagccacagtggctcatacctataatcccagcactttgggaggccaaaacaggaggatcgcttgaacccaggagtttgagatcagccggggcatgagatctcatctctactaaaaattaaacagaaaaaagttatctgggaatgatggcacatgcctgtgctccttgctcctggctcctggggaggctgaggtgggaggaacgtttgagcctaggaggctgaggctgcagtaagctgtgactgcaccactgcactccagcctaagcaacagagggaggccctgttccaaaaaaataaaataaaattaacaaacaaaccaaaataaagaacaaagaaggaattcagaaaaataaaagcagaaattaatgaaaaagcaaaccaaataacaattagatatgagctggttcttgaaaagcccattgggagctttatttattatttattaactgtcctaaccactaacaaatttgatctagataaaattattagtattacaaagagctaaaattcaggcctaagtgctagacactgctaagcactttatatattttttctcatttaattctcatgtcaacctgataaaaaaaaactattgtcttctaaacacttcctatcacccttccttttttttgtactcagcactttgctctaaaacatcagatttataaaaatcttgtttaatgtttgtgccacaagmatgttaagttccatgaaggcaaaacatttttatgttttgttcactgttgtatttttaatacctagaacaatgtctgacactaagtaggtcctcaaaaaattttttagaaatgagtgacataattcctattatacatatagaaactgtgataagagcagataataagtgcatattgaatttataggagaatataaccacaggtacacaggagaatatgaaaataataagtaaacataatatgcatatttatgtcaatgaaactgaagtctcaataaaagaaacaattttctagaaaaacataaattatcaaaatgattcaagaaaatgcagaaaacttggataatttagtataaattgaaaaaataatagaaactttatccccaaaaaagcagcagaaccaaaaaatttaagaggaaatttcaaactattattagatcatttt

SEQ ID NO: 50016 - DNA, 619 bp, Homo sapiens
taaaattctccattaacgtaagacaaaaaaatgaaaagagaaaaaaaggaacagaaagaacataaatggatactttccataagcataactgaatttctgctcttccgaaattcagttgaagctactgaaagaagaaaagaaacttttgactccctttctctctaacctcccaggtttaaattttggacacatgttaaataatggaagttcctagaaaaggttacttttgattcacaacgtgggcaggaaagtgctgggtagagaagggtgtggtccctgggtagggctccaccccagggtatakgctgatagacctaggtgagaataggcatttctgttttcctgcctaaatgctgcatttcccaagaccaccctggcctgccacgcccgcatcgtgtgcctgtgaaaacgccgagaccctagtggtctagctggacgtggagaggaacgctgcggcgtaaggacacgccaacagatgctggcaggccagcaggccattaactggcagaacgacgcgaagtttggccagggctgtcagaggagagcccgggccactgaacagcctactccaggggaaaaccatttcccttttgtctcccccatctgttgagacctgctt

SEQ ID NO: 50017 - DNA, 591 bp, Homo sapiens
tcaagggcagctctttccagggctccaggagaaacatttagcctcaccatgggataccaagtgagtatgcaacccaaactgcccatcatgaactgatggctatctgatccactgaccatagaactgaacacacacacaccattccactataaaataaaagtgaaattgagccagaaaacaaatgtgattgcccattgtattgccttctctgcttcatcccctctcctcatctcacatctgtgccacaaagcatgttttctaacacaagttggcaagggagaaataaacgcgggcctggtttayggcaggtctgcaggatgtacaacaacgagctggaattgggtaggctccatactagaatctgactcaggagtggcactgaaagacaataagaaacagaaatcttcccagttggtaagattttgaacagaatacttcgttgtccactgttcgtggtaggagacttagtttcaggcatggaaacatcctgactcaagtgcagtaactaataagggtccacctatcagggatgtggcaaaagtaaaattagaaaactagtgacagggaggtttaggaaaaacaagtgaatcg

SEQ ID NO: 50018 - DNA, 548 bp, Homo sapiens
cagtcgagaaaaattataaatgacctacaattgtggaattacaacagacttcttaacaatatcaatggagattagaaaatagtagtctaatatcttraaagttcagggggaagtgattgccaacttagaattttaaatcaagcaaaactgactttcaagattgagtgcaaaataagaatgtttcagattacagaaattgagagcttaccaacagttcttttctgaagaacttctaaaaatatacttcagatagaaagaaaatgatcccagaggggaatctgaaaacaagaagaaacagtgagtgaataagtggtgaccctcaaggtaaatctaagcaaaccttttctctatagaagaagaatatctatgtaagtgtttttttttaaaggacatactaggctgggcacggtggctcacgcctgtaatcccaacactttgggaggccaagacaggtgggtcacctgaggtcgggagttggagaccagcctgaccagcatggagaaaccccacctctactaaaaatacaaaattagctgggcgtggtggca

SEQ ID NO: 50019 - DNA, 593 bp, Homo sapiens
tgagggcatttaattcttacacaaaagatgacgtctgtgggcggctgctccaacccggattggctaacagtctaggggctgcttctctgcctctcggttttcctttccatagctccaaatacagtycttcatcaaatctattttcaaataaaaaaaaaggaatgatgtccagcgggccctggaattcaccccaagccctcgcaggaggaggagggtgaatggatagcttggccaggcaccgtggctcacgcctgtaatcccagcactttgggaggctgaggcgggtggatcccttgagcccaggaggcaaaagttgcagtgagcaacccctgcactccagccagggcaacagagcaagaccttgtctcaaaacattaaaaaaaagagacaaaatggatagcttttcttgtctccctttttgtatcagggaggaaaaatttccctggcaaagctttgccaagcctgctccccagaccctcatactttccaggccagagctggctcacctgcctagccctatcactggcaaaggagaagtgggatatcatgatgaatttagagccataatgattcattttctgaagctgagcaca

SEQ ID NO: 50020 - DNA, 547 bp, Homo sapiens
aagaactgaggaatcttatcacaaaaatgggaagataaaaggcagagcctaatgagagaacactgaaaccctcgtattttttattccctggagcaaagtaaagaacaggcatagaggagtcagagggcctggttctcctaggactgacccccactgggaagcgctgtagaccgcccaggttgataaaatgttgtcaccctgtgaaagcaacacaatccagtaactaaagcgttcatgaacggggggcctgcagggttctgtgttagctcttggaatctaggttcaaaaaacaaaaaacaacagggcacgttgaagagggctgtrtcaaaatttctcctttcccttcacacccacgccttccacacccactctgctgatggcgttcactccaatttcattgagaaaatggaagctacacatctagccctgccttccctcctatttactggaagcattcctgcttctaccaactgtcagtccctccacctatgctccagttctcatcccctgtagcttcttaaggactgggtctctttcgtcacccctc

SEQ ID NO: 50021 - DNA, 2271 bp, Homo sapiens
gattcgtagtttatagtttatcctgaaaacctgggkgcctccgtgggtctacttcaggctgattctgtcatctggatgtgacagtgccaggctctgggagggacaacattggttgagtgcttgccatgtgtaaggcaccatagtagaaaagataatgtggtccctacccacaggaaagtcaccgtctaatagagaactgtctaatagagaatctgcacagtgagcaggtgaacactaaacatcacaacttgaggggtgaaagaccacctgtctatgcccttctctttaaagatcagagaactgaggcctggttggagaagtgagccagccaagatcctcctgcagatgggccttggaaggcagatgctatcttttggctgcactaccctgtgaaataaaagaaggttctcttataataggtgtaagaaagtccactttttggagttgggcaacattttcaaaattcttctgtcgatttgcactttaagagtccacacctgggcacggtggctcacatctgtaatcccagcacgttgggagacagaggtgggagggtcatttgaggccaggagttagaggacagcctgggcaacatagcaagatcccatctctatttttgtttaaataataacaaaggaaaatcaaagaatcctcatctttcaccaagagggttaaggcaattctcacaaaggagatggatgagaactagaagcagcaggcaggtgcatgtgatttgtaggggatgcttgtagtgaggcctgtctgttctgcctgctcctctggcacaaattacccccagcagctccttatattaagtcaagccatatgatctaatccaaaccacagaatggccaggtgagggagggggaggctgcgtggcccatggtcactgtaaggtgggcccctgctgcagtttgacacccacaggaccctgagctccctggggcagcaccagtaggcttgccccctgcctcctgccagcctcacctgccaccttctgcccctctcgggatgcctttgcagacagagctcttcgctgcctgtggtggccactctttgcttttggttctcttgccccttggcctccctttttgtccccgggcagccttgtgtgacctgcccttttccctcccttcctttccaggacaagcacgccgaggaggtgcggaaaaacaaggagctgaaggaagaggcctccaggtaaagcctagaggccaaagaactttccaggtcagccggacagctccagcagctccacgttccaggcagcctcgcccgccggctgcgctcccagcactggggtttggggggaggggggtggccaaggggcgtttcctctgcttttggtgtttgtacatgttaagaattgaccagtgaagccatcctatttgtttccggggaacaatgacggggtgggagaggggagaggagagagtttgggaaagggagatggagaagaactcaaggacattgcaaccctgcccggcgcagatctgattttcacatctctacctggacattgagcctccaggcaccatgttgaggagagatgaaaaccagggcggtagaacttcagggtgaaggacagagtcctgggtggggcagcggctgcagggcgcaccagagaacccagccagaggggttgtgagtaccagtggtgttgcttccaccctgcagcaggtgggatgaggtctgtgtgtgtgtgtgaaccatcattttttgatcatcatgaccaatgaaacattgactccaagtgtccagttctttatttcccaaatgtgtcctttgggtaattgttaaaaagttctcgaaacctggctttcatccatctgatggcagatgcccctttgcttccttaattctgccattcaagcatctggagcctgggtgaggtgggttgaatcaggccagcctttggcataattgaaaggttttctcttctgttttttaaaatcccctctgtgggctaatctttattggatagcatgcactaaattgatgagaaaagaaactcaatcttcctttcaatgaactgacatcctaatatggtccccaagatgcactgtaagaaggaatttgtcttagtcacaaccgttcagactgctgtaacaaaataccttagactaagtaattgataacagaaattgattgctcacagttttggaggctgggaagtccaatatcaaggtgccagcagattcagtgtctggtgagggcttgccatctgcttcaaagatgatgcctttttgctgcatcctcacatggcagaag

SEQ ID NO: 50022 - DNA, 559 bp, Homo sapiens
tatttccaaactaacaattttatttatctcttttagagaataataacacgttatatctaacactgatatgctgattaaaaaacattattttcctcctcttcataggctacagcaggaaatgtattttctgagaacgtcttaaaaatcatttacccatctactgaataaaggaggagattatactggactgccacttatgagaaagaatcacattaatcttccactaaatcctcctttctagcttctcacaaggcagtgaagtattgaaagaggatacttsctcacatggacaaagatcggatgagagactttagtagaatccttctaatgctagtataaggttgcttaatttatttccttcagtaagaatagtaataaaaatatacatatagcccactttgctatttgtgaacagtcatgtatgttctttcccaaaagatatttatccaaaattacagtttcccatttcaaaagcaacttgaatctgaaaatattgcaaagatggaagtgctataaaatgacagtgaagaattacaagcaaccaattcattattcaatc

SEQ ID NO: 50023 - DNA, 1040 bp, Homo sapiens
taatgtatgtaaagcactttataaactgtaaaatgctttacaaatgtaagggattattataaaccacaatacactgatgttttatgcttttataaaactactggctggaactgctgtaaggggaatccctctggtgatttttattttggaaacaggaggacttgggtttgcctccttgccaggaattggattcctggcagcagctgtttattccatttcactccgcaacacacatatggccacagcacgcctcctgcagagctgacaatatgtactactgtgtttgagcacatccacggaaagcatcctttctccaccctcactatttctaacttgccaagtctaacacctaggaaatacagactttcaaatcgcatttcaccacagcaacatttgttttcttagatgaggtttttcctccttagcaaccagaattttgcagtcaaactttcaccacgaaaacagttttctcttgagcagattgaaaaaattggatgctgctttattcaacctttgccatggttaaaatgaaaatgatattaatatttgtcctgagaccgggcttggaccagctgaaaaggattaaagtactaacacgttmttttttccttgtacctgcagtgcacagatagactggaccagcgctgggtgacggtgctcaatctttctgctgcaatggaatggagtgcactgacgctctgcacaaatatctgcacagggcagtgttatagataaccactcactgctccctgaggggcttgagatcattcgatgtctaagaactactactggcttgtaaatgtcaagagaaattatgaacatttgtagaaaagtaactgtttgactaatttcctgttccatggagcaaacacactgccccatgtatttagaatctggtgctgacagccaggccatggcaagcttcaaggttataggatcataaatgggattagataagccagacagtgcggctcagactccagcactttaaaaatattattaaaaccccaggaaaggcaaacaattttgaagggaaagta

SEQ ID NO: 50024 - DNA, 557 bp, Homo sapiens
tgagtgaaagaagccagatataaaatgccacrtattgtatgattccatgcacatgaaatgtctccaatgggcaaatccgtagagccagaaagtagattagtggttgccaggagctatgaggaggagaggactgctaatgcatacagagtttccttctggaatgatgaaagtgttctgaattagatagtagtgatagttgcccagctttgacagtagagtaaaaaccattgaatgctactgtttacagtggcggatttttatgtgtattataactcaataaaaagatgatctaatccatggaaaatgtgtcaatatggcaggtacatggactgattttagacacttttaggtaacttgccactgcttttgtcccctctctcctgcttgcgagtctgcctatttatattctctctctgtccatctgtctctgtctttcatgtcccttcattcaactgtggcctgcccttcttcaacttctctaacagcctctactgacattgtatgagagctactgtggggtaggaatcttggaagtaagattgccctctaagagctaa

SEQ ID NO: 50025 - DNA, 1265 bp, Homo sapiens
attgtaaaggaaaatgcctccctccatgcgctacaaaacagcacatttatgatggcactttgaaaagatatgggctgtggtgtcacatattgacaattccttggccagaagcttaacagtgccagcagtgccagaagattaagaagacagcaaaaacagaaaagggagaagatggtgaagtagctatataacatgagcgagaatgctcctgattacaaagcagagaaattgactttttttcttagtgttttctatagtcattgctctatccctgttctagaattcaagtcatgataagaatttcttcacgttgacttcctgcattgctttcagacattgcaattaaagaatgcgaagaaagaacctcacagaggtaacagagtttgttttcctgggattctccagattccacaaacatcacatcactctctttgtggtttttctcatcctgtacacattaactgtggctggcaatgccatcatcatgaccatcatctgcattgaccgtcacctccacactcccatgtacttcttcctgagcatgctggctagctcaaagacagtgtacacactgttcatcattccacagatgctctccagcttcgtaacccagacccagccaatctccctagcmggttgtaccacccaaacgttcttctttgttaccttggccatcaacaattgcttcttgctcacagtgatgggctatgaccactatatggccatctgcaatcccttgagatacagggtcattacgagcaagaaggtgtgtgtccagctggtgtgtggagcctttagcattggcctggccatggcagctgtccaggtaacatccatatttaccttacctttttgtcacacggtggttggtcatttcttctgtgacatcctccctgtcatgaaactctcctgtattaataccactatcaatgagataatcaattttgttgtcaggttatttgtcatcctggtccccatgggtctggtcttcatctcctatgtcctcatcatctccactgtcctcaagattgcctcagctgagggttggaagaagacctttgccacctgtgccttccacctcactgtggtcattgtccattatggctgtgcttccattgcctacctcatgcccaagtcagaaaactctatagaacaagacctccttctctcagtgacctaaaccatcatcactcccctgctgaaccctgttgtttacagcctaaagaacaaggaggtcaaggatgccctatgcagggccatgggca

SEQ ID NO: 50026 - DNA, 558 bp, Homo sapiens
ggaaaatatttactaacaggataaaataccttgtaaaaaagcctcctggatatagtactcacaattaagagctgtgaagataaatctatctatctatctatctatctatctatctatctatctatctatctatatgtctgtctgtctgtctatctttttaatttttcagaacaatgcttatgttttatatagctaatggctatragtctgtaacaaaaaccaagctcacagcagctgagcttgaaattaaaaataagtcaatcttataacttttccttttggtttttctgttggttttttacttaaaatagtaattttaagaggtaacaaatgcctgtccacatccattcctatctggcctagaccgattaattggctataaatcttttgactcttcaggccctcagccatagggatcctgccgagggaaaaatgacactgaagaattatatgacttatcctgtgaccaaaccttttttcttccaaatactagtatatggtgcaatacaaaagtgggggaaaaatagatttgtctactgttaagaagtctataacaat

SEQ ID NO: 50027 - DNA, 698 bp, Homo sapiens
aactagaacatatttacattgttgtgaaactagaaaatcaccataggaatattattttgtgaatgaatttaaagagatttaatttgctctatccagtgcagctggagacaactaaagtacgactgccaacaaatcctgcctcaaaccaactctctttatgactcattgctccatgttgagaaactcacatcagcccttgatgactcagttcagtcaattataaaccaggaaagataatatttattgtctttcagggtgttgcaagaatgcattaatgtttatagcacattcgtaaaaggtccaaaaacaggatttcatattatatttctagtattcccacatgaatttgaggtgctcttttaaaatctgaacatctatcacaagaactggtataatactttaatataaaaaaattactaataataaataacaattttagtctgttgggagttaagttgcatcatagcaccagatggtcatactagaccagtgctactgtttcttctgggctgggactttggtggtgggggtggagctttggctccctcaatctggtctggaaatgagaaggtgaacactaaaggtttttgctaagctcattgtatgastcacttgaagaaatttatctcattaactcaatatgatactatgacatagacatgaatctgaggctaccagtaccgtctcctccaataaac

SEQ ID NO: 50028 - DNA, 1101 bp, Homo sapiens
aattagaaatgtacacaaggatcatgatggaatataactcatataatagttcaggacagaagaaatgctgattagggttaagctagtgctctattctgttactgtaaaggatggggactcaattatgtttgggaacctgtagggaagagaaacagactgccacaaacatcctaagaaatacttatgcaagaaattatcattatatcttatgctgagggcctgcagttgctactcaaactttgaatcaaacctgagatggtgatcattcctgaagtttaaatggtgtaatcacctatcccaatctctccaagacacagaaatattgaatatctctttctttctctctctcttccacatcttttctctcccttttcaaaggtgtcatttatgtatacatattatttttatttttawttcacatacagatacctaaactattccatttttaagagtagaaatcatgcctatttatattttttattacattgattcctattttacaacattctatctacttataatttttaacttattgtgattttaaagttttattttataattaaaacacatagctgttttagagatcattatcaaatgtttggagatattttatatttttattgagccaaattagcttttgatatagtcaagatccatatataatattgagaaccacctctctcctgatgcttggattccaaggcctagttttatagattttataattctatgtatttattaaattgtaacatatggtccatacacaaaacaatagcaagcctttgatctcaatgtgcaagctcataaaatgataatgctttcataaaaatagatgaaagaaatcatttatttaaaaaaacttccatatcttaaaatcaggggagaacattaatcctttcactaagataatcttattatccagaatgtgacctattcttgtatacaggctatactttctaattgccatatgatgcagatctttgtaaaatgatttaatggaacctgaatttgctaagataggtgcatataaacagttatagatagaatttatctgaggttgagaagctgcagcatttacagtatttaaaagtagcctcactt

SEQ ID NO: 50029 - DNA, 1222 bp, Homo sapiens
ttgctgttgttacaggctcaaaagaaggaaggaaactaacaatgcggggaggctgtagctaggcctgggtcaggatgaggtttgacatcatatctatattatctcatgtattctgcacagagacttattcccaatatacaaataagggaactgaggctcaggaaggtaaacaaatcccccaagacctcaaagcctagtggtagcatctggatttcacttcaggtttccctggtttcaaagcccatgctcttttcattcctcagagctacctctcagcccactgcagagagggtgaccatcaactcctcctggagactagcatttgaggttctaagaggcagccattgccactgatgagaaaagctttttagttgtatttatagaaattatttacatctgaacccataatgtatatgtatataaaatatatacgtrtttgaggcaacacaaagagaccatatacacgggtaagaaaataattattgcagatgggagaataaaatgttgctaagtagtgtggataaaatcttttgggtctggcacagaagttgttaagggtctgagttggcaagcaggctcacaagatgcaaataagctttcatcttctcccatgttgacttagccttatggaaggccacagaactggagatacagcagatgtagcattcccagctcatgagaagcccagcagctacccaaggatgcagcttcttttacctcctcacccacatgggacatgaacagctggtgtggatgagagccaaagggtgggggtcatccgacacagagcagcacagccaccccaatttcccaccaatctttcataccacgctgatcagcaggccccaggcccacatgccaactcagagctcatccagaccggatgaagtctcccaggtcagagacttcacagacacaacatccctcatttgttttaactgccatttccacagaacagcactggggaaaaaagtctgcctctcaagtcacccaggcctgatgttaacactttagtctcaggtatcaagctaagaggcaagagcattcaagaagcaacattgggtcagtttcagtggctcacgtctgtaatcccagcactttgggaggcaagttgggagaatcacttgagcccaggaatttgagaccagcctgggcaacatacaaagatgctgtctctacaagagcaacaacaaaaatagctggatgtggtggcacttgtctc

SEQ ID NO: 50030 - DNA, 1222 bp, Homo sapiens
ttgctgttgttacaggctcaaaagaaggaaggaaactaacaatgcggggaggctgtagctaggcctgggtcaggatgaggtttgacatcatatctatattatctcatgtattctgcacagagacttattcccaatatacaaataagggaactgaggctcaggaaggtaaacaaatcccccaagacctcaaagcctagtggtagcatctggatttcacttcaggtttccctggtttcaaagcccatgctcttttcattcctcagagctacctctcagcccactgcagagagggtgaccatcaactcctcctggagactagcatttgaggttctaagaggcagccattgccactgatgagaaaagctttttagttgtatttatagaaattatttacatctgaacccataatgtatatgtatataaaatatatacgtatttgaggcaacacaaagagaccatatacacgggtaagaaaataattattgcagatgggagaataaaatgttgctaagtagtgtggataaaatcttttgggtctggcacagaagttgttaagggtctgagttggcaagcaggctcacaagatgcaaataagctttcatcttctcccatgttgacttagccttatggaaggccacagaactggagatacagcagatgtagcattcccagctcatgagaagcccagcagctacccaaggatgcagcttcttttacctcctcacccacatgggacatgaacagctggtgtggatgagagccaaagggtgggggtcatccgacacagagcagcacagccaccccaatttcccaccaatctttcataccacgctgatcagcaggccccaggcccacatgccaactcagagctcatccagaccggatgaagtctcccaggtcagagacttcacagacacaacatccctcatttgttttaactgccatttccacagaacagcactggggaaaaaagtctgcctctcaagtcacccaggcctgatgttaacactttagtctcaggtatcaagctaagaggcaagagcattcaagaagcaacattgggtcagwttcagtggctcacgtctgtaatcccagcactttgggaggcaagttgggagaatcacttgagcccaggaatttgagaccagcctgggcaacatacaaagatgctgtctctacaagagcaacaacaaaaatagctggatgtggtggcacttgtctc

SEQ ID NO: 50031 - DNA, 2691 bp, Homo sapiens
aataaatgagtgaacaaatgaatgaataacaatttaatctctttagagaagataacttaaaactgtattccccaaggtattaaactgatatattgatgttttgaagctataaatgatcatatggatatatgtcaaatgtttcttatttatcatctcatattctagtgtttcattattgtttatggaaataagtagaactcttgaaagcttttgttaaggaatatttatatctacagctacaaatgcaaattatcttgcgttatccctttccaaacatgaaggttgcagtcataatcaaattattaataatttgctaatgtattcttatggtattttaatcatttccctaagtcagtaatattattcatacatttattcattaaataaacatttttatcaactacactatttgtaagaatcattttaatggatgccatgaaagacataacttgacaaaacattgtccctactacctcatagcttctatattcttaggatcttaaaatctactagaggaaatgagttgtcagcttgagtaaacataaaacaaggtggaacatcatgaggattagcaagattctgtaagggagtgtggcagaatgaagaaaacataaattttagagttcaagcaggcctgaattcaggtcccaattctgccacctgggcaagttacttctctcaatctccattttctcagctgtaaaaattatggactctatcctcctactccatgaagttgttatgagcacttatactaagcgcttaaaactttgtctaacatatactaagtttctattaaatgacagctgttattaatattattgttaacataagtttagctgttatcattaatattattattatattgtcattaatgtaatagtggaaatgattccttccagcattgttgccagggtaccaattgatctgaaccttgaagtatggataatgtttaaattgtgaagatgctgagaatatggcctggacattttggacatgggaaatattagactcagaaatatggaaaggtatcttatgtatgagcagacagagagtatttgacacatagtgataaatgagactagcaatagagattggggccagattacaaatcatgttggttgaaggagttagaaacctagggttggcaatagggatctgttgtagaatttcaagcagagtcatgacaacgtaaattagaaacattttgtcaataagaaagactagagatcaagaataagggacaactttttttagattagagtagaaatgatgagggcatgatctatggtgtatcagtttcctattgaggccgtaacccattatcattagcttagcaacttaaaacaatgcacatttaccatgccatcctaagactaggtgagctctactggcttctctgctctgtgtctcacaagaccaaaatcaaggtgtcatccacgctcggattttatcttaagactcaaggcaagactccatttccaaggtcattcagttgttggcggagctcagtgccttgtggttgtggacctcaggttcccattttcctggacatatgacctccttcatcttcaagctaacaaagacacattgaatctttcttgtgcatttaatctctctgactatccattctcccttatcccttctgccttccagtcagagaagtttccctgcttttaagggcttatgtaattagattgggcccactcaggtgatctaggaaaatctccctattttaaggttcattaccttaattacatttgaaaaggtccttttgctatgtaatgtggcatattcccagagtccagggtgcagtgcatggacatctttgggggaccattctgtctaccagaaatgatagtaatagatgaaaaggtaaggaaattcaagaaatactgtagacatatttttgaagttattatatgcatcctgtatgcttcctgggagtcaatgcaaatagaaataaatgttaactttcatagcttaccttctttgaccaaagaacacccacagttattaagatttaagctttttttctaatataaaatttagaagaatttatcagtcattaaaaaatgtaattagcaatagcatgaatttgttgtttaattttcacaacttgagatgtaaatattatcattaccattttacagaaatctaaaatcagaaaactaaaatgcagtttcatggttgacagataaagctctaaagctggtattctttatatgacccccattattgctaacagtgtatttttataattagcttttttcatattattagggggggagatctttcttttcaaaataaaaattcctcaggaaagtacttctaatttaatataagctttatttaactggacatattttaagatgtaaatagccarcaggcattgtccaggttagtaatcagtaaagtcctggtaactgtaaataaaccataaagaatttaattctgagccaagaaatacatacaagaaaaagaagtctttaatttcattaaaatttataagtgccttaaggtttttgagcatcagagtataaacagaaatgcaattttaaggccattttaaatgaaatccccatacactctgaattggtatatggagctgctgaatgctatttactcaattgagtcctgtccgtgttacctactagaaagacttccaaagacacagttgcagttatttga

SEQ ID NO: 50032 - DNA, 1978 bp, Homo sapiens
actcaataagtttattttgttaacttccatggatatattagcataaatctcattgcaragataatgaaaatactaatcatttaatctttcttctcatactgtgaatatcttgtttttttgtttttttgtttttttttgagacagggtcctgctttgttacccaggctggagtgcagtggcatgaacatggctcactgcaactttgacctctagggcctaagtgatcctcccacctcagctccccaagtagctgggactacaggcacgcaccaccacacctggctaattttggtattttttgtagagataaggtttcaccttgttgcccagactggtcttgagctcctgagctcaggcaatccacccacctcagcctcccaaaatgctgggactacaggcctgagctgaagtgtccagcttgcaaatgttttttgacctcatcaatttttatgaaagtttcgggtcgaccagctactgaagtattacatctgctcttcactcttgaaacctgctgagtaaaaaccaaaaatacttttgaaaactgaaatcacaaaagcttaaaatttatttgtacaatattgacataaaactggggatggaagaaaagattatatattttggatttcatattcacgtcaagggtaatttctcaagactattaaatacctttagcaattttaagtcagtttaaaaatatcaacttcatggatttatcgctcatgacttaaatgcaatgatattatattacagcaaaaaataaaaaataaagtaaaataatttaggatcctgagggttggtttttaataaaccaaaccaaaatatatccacaaatattcctatttagcataaagacacttgtatgtaaggaattaagtcacagtcacaggtaattgataccagttgtgaaaactaatatcgtatctatcttcacaactgatgaatcctcctattaccaagaacaagtgtatatcaaaaggaaagaggttagttcagtctgcagcatgatttataacttttcatgagaaattcccgtctctctcagcaactagccttttctgagttgactggaaaacacttaaatagtgatggaagtaggcattcgtttttctacttctttttagcatagccacttctgagccttactgctttttttttctttttccattacttcccagagagactttctttctcttcccttcccttggtattagccagcagtttgcattctcctcatcatcagctacattagtggtccccaacatttttggcaacaggaaacagttttgtcgaagacagttcttccacagaccaggagcaagggatggtttcaggatgattcaagggcattacatttattgtgcactttatttctattattattacattgttgtatataatgaaataattatacaactcaccataatatagaatcagtgggagccctgagcttgttttcctgtaactagacagtcctatctcggggtgatgggagacagtgacagatcatcaagcattagattctataaggagtgcacaacctagatccctcacgtgtgcatttaaaataaggttcgcactcctgtgaggcagagctcaggtggtaatgcaagcagtggggagcagctgtaaatacagaacagatgaagctttgctcactcacccgccactgctcacctcctactgtgtggctcagggtaggctggggacccctggcttacatcatttgtagcatagaaaagggcaggctgccacaggcgtaaccatgttcctgatggaactaatccatggtctagacatgatagagctacttcatgtaacaacctttctgagtatttacttaagtgatcaaacctctatttcaggaataaactaatttcacgtaatttaaaactctggtgattttttaaaaactattacaaaaagtgatacataaatgacatgtaactttctagccctgttagaattgatgggacttaaa

SEQ ID NO: 50033 - DNA, 1978 bp, Homo sapiens
actcaataagtttattttgttaacttccatggatatattagcataaatctcattgcaaagataatgaaaatactaatcatttaatctttcttctcatactgtgaatatcttgtttttttgtttttttgtttttttttgagacagggtcctgctttgttacccaggctggagtgcagtggcatgaacatggctcactgcaactttgacctctagggcctaagtgatcctcccrcctcagctccccaagtagctgggactacaggcacgcaccaccacacctggctaattttggtattttttgtagagataaggtttcaccttgttgcccagactggtcttgagctcctgagctcaggcaatccacccacctcagcctcccaaaatgctgggactacaggcctgagctgaagtgtccagcttgcaaatgttttttgacctcatcaatttttatgaaagtttcgggtcgaccagctactgaagtattacatctgctcttcactcttgaaacctgctgagtaaaaaccaaaaatacttttgaaaactgaaatcacaaaagcttaaaatttatttgtacaatattgacataaaactggggatggaagaaaagattatatattttggatttcatattcacgtcaagggtaatttctcaagactattaaatacctttagcaattttaagtcagtttaaaaatatcaacttcatggatttatcgctcatgacttaaatgcaatgatattatattacagcaaaaaataaaaaataaagtaaaataatttaggatcctgagggttggtttttaataaaccaaaccaaaatatatccacaaatattcctatttagcataaagacacttgtatgtaaggaattaagtcacagtcacaggtaattgataccagttgtgaaaactaatatcgtatctatcttcacaactgatgaatcctcctattaccaagaacaagtgtatatcaaaaggaaagaggttagttcagtctgcagcatgatttataacttttcatgagaaattcccgtctctctcagcaactagccttttctgagttgactggaaaacacttaaatagtgatggaagtaggcattcgtttttctacttctttttagcatagccacttctgagccttactgctttttttttctttttccattacttcccagagagactttctttctcttcccttcccttggtattagccagcagtttgcattctcctcatcatcagctacattagtggtccccaacatttttggcaacaggaaacagttttgtcgaagacagttcttccacagaccaggagcaagggatggtttcaggatgattcaagggcattacatttattgtgcactttatttctattattattacattgttgtatataatgaaataattatacaactcaccataatatagaatcagtgggagccctgagcttgttttcctgtaactagacagtcctatctcggggtgatgggagacagtgacagatcatcaagcattagattctataaggagtgcacaacctagatccctcacgtgtgcatttaaaataaggttcgcactcctgtgaggcagagctcaggtggtaatgcaagcagtggggagcagctgtaaatacagaacagatgaagctttgctcactcacccgccactgctcacctcctactgtgtggctcagggtaggctggggacccctggcttacatcatttgtagcatagaaaagggcaggctgccacaggcgtaaccatgttcctgatggaactaatccatggtctagacatgatagagctacttcatgtaacaacctttctgagtatttacttaagtgatcaaacctctatttcaggaataaactaatttcacgtaatttaaaactctggtgattttttaaaaactattacaaaaagtgatacataaatgacatgtaactttctagccctgttagaattgatgggacttaaa

SEQ ID NO: 50034 - DNA, 539 bp, Homo sapiens
tatttgttttacccattgaaatattcaccttgcactttgggaaacccaaattgctcttactatgctggcgaaaattttcctatcacttagagctgcagctctaaggaaggaagaaagaagccrtgattggcaacaggaaagacacatttcagatgttttagcagtaatacaagtaaatggttctcgaagtgtgcaatagacaagcctcgccctgggaaaaccaccttcatgatcatggtatcttcccttccaggtaagtgtaattctcagaccttacagggaggcagaacagcatattgtaaagaagttgggtttcaaaagtgaaatggagctggatcccaatgtgctaattcacaattatctgggccacccataagcctctctgagccttggtttcttcatgcaaaaataaggatgtatttcatacctgttgagaagacgaatggatttagctatagaaaggaagaggtcacaacaggtggtctacgtgggcacagaccctgcttctgcagatgaccagctgtgtggccctggatggg

SEQ ID NO: 50035 - DNA, 629 bp, Homo sapiens
ggtgtggagttgtatccaagttcagtaatgtcagcaagcccctggcgatgtggctggttggtctgcatgtkcagtgacagctcagggcaatgaccatattggcttttaggagccactgtccagaaagcacatgattgccccagtgatctgaaggcatccacaaatttgtaccagatgctgtagatatgtgggggaaacatgttcccctctacgtggggttaatcttaataaggaggtgctccggctcaccacactcataaaatgtacttaacctgtgcaaaaccctaggagttggcaatatgactttccccattttattggcgagattacagggactcagacatagggtttttacatggtgagtcaggtaacctctgctcaaacaaggatttagactaaggtgtttctggctcctgagccctccctcctaactgtctctcatgcatgcatctttgtgctgttctgctttagtagtttaggatggattcatcagaatggaattactgagtttttgtgcctgtgtacataacattttttttttttgagacagagtcaccatgctggagtgcagtggcatgatctcagctcaaactgcaaccttcgtctcccaggttcaagagattctcctg

SEQ ID NO: 50036 - DNA, 525 bp, Homo sapiens
caatgcaattcaattgcacaatattaatcaagagtctatgatgtgccaggcatcatacccagtgccagtttgcaawtatgtgcataacgtggaccctgacatcatggagtacatagcctatttccaaatgtcaaccggaagaggtttggaaatactcttcttccctgttctttggaatactgtgtgcaaaatggatcactatgctcaaaggaagccataacagagctggagaaggtccaaagaagagaaagaacaagaaggcaagtgtctgccaccatgcacttgttacgtatgtcacctcctctgtgaagtcctccatggttgattcccctaggtagaattgacttacttttttttttttttttgagatggagtcttgctctgttgcccaggctggagtgcagtggtgtggtctcggctcattgcaagctccacctcccgggttcatgccattctcctgcctcagcctcttgagtagttgggactacaggcgcccgccaccgtgcctggctaattttttgtatt

SEQ ID NO: 50037 - DNA, 525 bp, Homo sapiens
caatgcaattcaattgcacaatattaatcaagagtctatgatgtgccaggcatcatacccagtgccagtttgcaattatgtgcataacgtggaccctgacatcatggagtacatagcctatttccaaatgtcaaccggaagaggtttggaaatactcttcttccctgttctttggaatactgtgtgcaaaatggatcactatgctcaaaggaagccataacagagctggagaaggtccaaagaagagaaagaacaagaaggcaagtgtctgccaccatgcacttgttacrtatgtcacctcctctgtgaagtcctccatggttgattcccctaggtagaattgacttacttttttttttttttttgagatggagtcttgctctgttgcccaggctggagtgcagtggtgtggtctcggctcattgcaagctccacctcccgggttcatgccattctcctgcctcagcctcttgagtagttgggactacaggcgcccgccaccgtgcctggctaattttttgtatt

SEQ ID NO: 50038 - DNA, 576 bp, Homo sapiens
tgactgtacaaattgactatatcatgggtcagggttatttagacctgcttgttcatcaggagctgtatgggtcagtgtcccttagaaggtaacattttgaggcgcaacctcttagttacaaatatagtcaagtggaagggtggagttcagggacaggaagtttgtatttagtaatgttacactgtaaatttttgttccatctgtactttgcctctttcttaattgcaacttctcagtttcagcttaagaccaagcctggttcaactttgtatcttctgaaccaagtatgatacaacactgggcatattagatatctaaacatatttttactaaacatttttgaaatgaatgaacacataccagctttcctctactttcacttgtgaaggtaatatttaaaattcatacactactttccaccttaattatttcaaccattgcattctagactctgtattatgaccttaatttatgctataggacttagtttttccaacgacccaatcaatacaattcattgtcccaatttaacatatragcaaactgagctttagaaagtaatttagctggaccccc

SEQ ID NO: 50039 - DNA, 621 bp, Homo sapiens
cgggtgaacattgcttttaattatgacatgcctgaggattctgacacctacctgcattgggtggccagagccagccggtttggcaccaagagcttggctatcacatttgtgtctgacgagaatgatgccaagatcctcaawgacatgcaggatcgctttgaggtcaatcgtagtgatctgcctgatgagagagacatcttctcctgctttgaaaagacatggtaaaggacatggtagaggacacattgcagaatatgaccgtctgtccttcaggagaggacacatcagggtgggggtgaaggagacaccagtgcccccacccctgacagcccccaccccatggcttccttcttttgcatcaccaccactcctgaacccccatttctgatttgtcagaatggttttttaacaaaactaaaaacaaaaaatatatatagataatattatatattatacttatttattatatgctatataatatacatatatatatattagactcatattatatacggtaaatatttcatagttgagggcactgagcccagcaaggccgtgccagagccagaattccaaccctgggggtctggctccagaatccacactccccgtagcgacact

SEQ ID NO: 50040 - DNA, 571 bp, Homo sapiens
ggtgggagactgtctgccaccccctccgtgggtggggccagcttccggycccttctgctggtgaccgtgctgcgctcctttctagcaaacaagggagcgtctggcagctgctttgtctccctgcggcccctccaagtcgctgctctggaaaacacttgcctctgtcaccaggctgcacctgtaaataaagcagaagataaaagaggcctttctgtttttcaaactgtgacaggcacatcccggcaaattaccttcatgtttttttaatagaagtaaaaaggtttgggtggcttgcgttgcctgatacagaagcacttttctctcattcaagccgccacagatgggataatgaacgcatttttatctccatctctaaacaagacgcaaagaacctggagttagacaaactttcctttacggcattttgaggacagagctgggagtggtgaaaagctcttggtgcttgggaactaaaggccgggaacttgttcaggctagaagtgtatttgcctcctgtatgcagagacccacttgtgtatttcaatctcagtttatttatctacaaaatggg

SEQ ID NO: 50041 - DNA, 645 bp, Homo sapiens
atgaccgtcctgatggcgtttctgtgcttcatcctccttgtcaccagtagaatccactccatccccatcaggggccctccccaggtagayagaaggagcggaggcaggagccggtggggaatgaacgcactggaagaagcaggtctacccgccatgaggggtaaagggttggcagcaggagccccgtgcccaacgaagggacgtgagaaacaagtgtgtccaaggaccacaagagatccagcacctggcgggtgtggcccggctgcaggtctgtgaggccaaagcctaagttatggcagccagcgcagccctcaagtggacaggcttgtggtgtgcgtctgaagggacaatgggtgtgctcgggtgccgctgagggagcagaggtgaaaaccaggcctgaccccaaatggagtgtgtcttcccagctttgccatgggagcgagagggagcagtgacttttccttagagcctgtccagtgattgcacagcgtcttcctcctgaagggctggcagggaaggagcacttctggaggatggaggaggagaaagttttcctcacccacccccagcaggtagcagggccattgaaaatcgtggttttaagttcatcctcccatgcaaacaacattatctgattgccacgct

SEQ ID NO: 50042 - DNA, 1839 bp, Homo sapiens
  misc_feature (1)...(1839): n = A,T,C or G
atccctttaaagagagagagagagagagaacattaaaaacatatatatatatatatrtgtgtgtgtgtgtgtgtgtgtgtgtgtgtatatatatatagacacacatatatatataaataaatatatatagacacacatatatatataaataaaacagaatgggcaacaaatgtttgtcttttaaaaataatgtctatttaaaattttgtaattgaggccgggcgtggtggctcatgcctgtaatcccagcactttgggaggttgaggtgggctgatcacaaggtcaggagatggagaccatcctggccaacatggtgaaaccctgtaaaaatacagaaattagccgggcatagtggtgtgtgcctgtaatcccagctactcgggaggctgaggcaggagaatcgcttgaacccgggaggcagaggttgcagtgagctgagatcacgccactgcactccagcctgggcgacagagtgagactccgcctccaaaaaaaaaaaaaaagttgtaatagaaaagtaaattactttttaatatagcaattaaaagcttcacaaaagttaagttggcaaatattagattgtgtattccaaaagtaagaaatgtacataatctatttttaaaagcataatatttctatttaaagatatactctattggcaaataaaaatgaaggcacatttcacttaaaacatataaggcaattatgctgtcctatattttttctaggtttacttacttttaaagttcatagaaaacaacaccaattttgcttgtgacaataatttttctgtagagcattgtgtatgcctcctgtctgacatggatccttgacatagcccatgaaatatccaaatcatggtctacctagagaattcccagtgcattaattattgggccaggacagttcactgtcagtgagacttatggccctaaatacagcgaaaatttgggttcaacaattgtcatttttcaccattccttcctaaagaaagtaggtcttgtcagtttagcctcgtcaaagtctatttatataattaaatgcttgttaagttttatttggtcatgaacaacaggcatactttttcaaggagnnnnnnnnnnnnnnnnnnnnnnnnnnnnnnnnnnnnnnnnnnnnnnnnnnnnnnnnnnnnnnnnnnnnnnnnnnnnnnnnnnnnnnnnnnnnnnnnnnnncttatacatcaacaactttattaagcactgttatatgcccatcattgtattagaaacaagggtaaaaagatgaacacaccccttacctaaaggaataggtagctgagtagagaagatggagctatgtgcagattaatgaaaataacatgataagtaatataataggaatttgttttagagtttttttgttttatttatttattttgagactgggtctcactctgtcactcaggctggagtgcattgatgcaatcatggctaactgcagcctcaaactcctggactcaagaaatcctcctgcctcagtctcctgagtagctaggactacagatgtgtgctactaggcctggctaacttttaaaatttttttgtagagatgaggtcttgccatgttgcccaggctggtcttccccaagcaagcctctggccttggccttccaaagtgctgggattacaggcatgagccaccatgtctggcttgctttagagatttttaaaggacaaaagtcaaattccttttagatgtcttccccaaaacctggtaaaatgcagagtatgaccccaaaattctttcaactgtctgaggatggaattgtttaggctcatctttagattttgttgatagggaaactagggccaaatgca

SEQ ID NO: 50043 - DNA, 635 bp, Homo sapiens
gtctgtgctttgaacaatgggtgaaattcaaatagaagaaaagtagaacagatattaccttattcaggcaaagaaacagaagcctggttttgaaacatctgatggcaagtctctgcttcaggaggtcacatggggaatatttttccaatatgcccccattaattgggctgatattaaaacaactgatttaaaaaaaaaatcaaaatactcccaagagatgcctagcaaagctattgagtgaggtggttagcagcatgggtctggggtcaggaaacatrgattagagactggctttggcttttttactcattgtatgccttcaggaggttatgcctaatagtgcatcccgcagagaggcagcacctcttagagtcgcaggaactgagacggcactcagtaaatagtggtgagtaagattcaaaataggttttcagagaagaaatcagcacatgaagatatcatggtgtcatagtgtgttgacagggtcctgtctggagatactagtccagaatttcaaaaaaaggaaaagttttcttctggccgggcgctgtggctcatgcctgtaatcccagcactttgggaagccgaggtgggcagatcacctgaggtcgggagtttgagatcagcctggccaa

SEQ ID NO: 50044 - DNA, 437 bp, Homo sapiens
ttgagtctccctcttactctctgcatccaattagttggcaaattatcagttgggtttctaaaatacatcctaaatctgacaacttattttcatcttcatttttattaatttaaaccttggccaagccagagactgggtttctccctagtcttgtgtgcacacagttttgcacacaggacaaatggaagtaataaataaagtatctaaaccagattatatcactcttcagctaaagccttaattggcttccatcatgctttgaataacatcccaaatcctctctatggcctctgtgacttgcccttgctcaccttagtcttcatccccaccactcttccctttgctcactgtagtccagccacactgacactcttscattctcaaacatgccaagcttaattctgcctcagagacttctgtgattctgattctctctt

SEQ ID NO: 50045 - DNA, 833 bp, Homo sapiens
atcttaccttcctccaaaaaaatatctgagccacagctgcaacatcctaactttttccagtacatcattawtctcctagtcacatgtcagaaaactcactccttccactagaacataaactgtcacctcatcaatgagggccaccttgactactccatttaaaatttcatctctatggccccagcattcttgattcccccttaaagtgctctgtttgttcccagcatttattgttttctagtatgctacataatttacctatctacttattatttctcattctgtccccaaatcttactagaatgtaagcaccactgaagacagagacttctgttcacagatatcatccctgtgcttataacagtgcccgacatacagtaagtgctcaataaatatttgttcaattaattcattcactctacaagtatatacttaatataacaaataatgtaacttaaaataccttactcctctaattggaatttacactctgtgaagtagaggtctttgacttctttgttcactgctgtgtccccagaatctagaatggcaccaggtagcaaaggtgttcaataaaaatctgttgaataaatgaacgaatggataggaactcattgagtaccttttagtaccaagtactaagtgaggtgcttggggattctagatattttaaataactaactatgatgcaatgggataaatataaataatagaagtaggaacaaaatggcatgggaactcaggagcaatggcactgaagatcattcttcacgcctgagtctgaaagaagacacagatgtttatctgctccctgtgccaggtaaagggccaca

SEQ ID NO: 50046 - DNA, 577 bp, Homo sapiens
ttgaaaatacatatatcctaagactcaatgttccattcctaggaatattctgtagcaaaacaggtgcacatgtataccaggatatatgcatgtgcagagtatacaagaatacacactgtgtgatttctttatatcaaattgaaaaccaggcaaaacaaaatgatatgatttaggttgtatacagtggtcagaaatagaaatgaaaagcaagaaaatgatgatcacaaaattcaggatagcggttaactatttggggtaaagaggtttgtgatggggaaggggcacaaggrggcttctgaggtgctggcaatattctttcttgactagagtaggagttacatgggtatttgctttatagttattctctaaatcatccatgtagactttatgaaccatgttgtatgtcatatttcatagatgaaaaagcagtagagtatgcaatgttttaaatttaaggaagactcttgccacacttgcctaggctcctaatgctgctccattttcatagtagtcttgtggccaccaaaatgtaaatattccctgactttctcttttttatttgctgagaaggaaaata

SEQ ID NO: 50047 - DNA, 577 bp, Homo sapiens
ttgaaaatacatatatcctaagactcaatgttccattcctaggaatattctgtagcaaaacaggtgcacatgtataccaggatatatgcatgtgcagagtatacaagaatacacactgtgtgatttctttatatcaaattgaaaaccaggcaaaacaaaatgatatgatttaggttgtatacagtggtcagaaatagaaatgaaaagcaagaaaatgatgatcacaaaattcaggatagcggttaactatttggggtaaagaggtttgtgatggggaaggggcacaagggggcttctgaggtgctggcaatattctttcttgactagagtaggagttacatgggtatttgctttatarttattctctaaatcatccatgtagactttatgaaccatgttgtatgtcatatttcatagatgaaaaagcagtagagtatgcaatgttttaaatttaaggaagactcttgccacacttgcctaggctcctaatgctgctccattttcatagtagtcttgtggccaccaaaatgtaaatattccctgactttctcttttttatttgctgagaaggaaaata

SEQ ID NO: 50048 - DNA, 628 bp, Homo sapiens
tgagcattgtggtttgcacctgttgtcccaggtactcggaaggctgaggcaagagggtcctttgaacacaggagtttgaggctgcagtgagttatgatcgcaccacagcactccagtctgagtaacagagcaagaccatgtctctgagaagaaaacaaaaaacttactacctgttcctcctttttctgtacccccaaactctgcaactgtaataaaatcccaaagagaccttaataccaagccatcacttgctttatcactcacttcattaacttgcatgtatttcaatctgagtaaatcaagtgactttgctcagtctctcacartttctggttatagctactagctataacctctagtatacaaggttctcagttcagtctgtttatgggccatctggcgttcttgcatttcaagatcaaagactcacctataactctgaccaactctagacaactttaagcccaagcagaacaatatcagagagtcttgttcatacttgttgctcaacaagggctgtttttcttcatccactaccatggcctcaccaatctcggggcattcctatgagcagtttggcatttcccttcctccctactctttctaaaccccttaatattgcaaatag

SEQ ID NO: 50049 - DNA, 507 bp, Homo sapiens
gggggacagaggcagacccctgtctcaaaaaaaaaataaaaaaaaaaaaataaaggaggaggttattaatatattcttggcgtttggttaaaaccaagtctgaaaaaactttctttttaggttttatttattttcttttgcactgtctttaggtatttcatgttgatatgttattttgaggaaaagtgtgtcatatatcaaatacatctaacaccatttccacagtttgtgttatgtgactattttatgaaagaaatcaacttcaaaggaggtttgggttttacttygttttgtttctgtaattcataaacaatagtgcccttgaattggtccagagtttacattttagactttgtgttctgacattttgccagtggcttacttgaagaaacactttaatgaatacctgtgggaagaatttctctcatggtttactaataagaatggctgtgcttcttctgggcccttaccttatttttatcttatagatgctatgactctcatcga

SEQ ID NO: 50050 - DNA, 546 bp, Homo sapiens
ggaacttcacaattttacagattgcacttgatggtaacctcatgggtttgttttgttttcatttttacagcaagacttgcctggttgatatgcttgcaagtttacatcacgtgtttttaaaatttttgtgcaatcacaatgaatttaatcacaaacactaaaaataaatccagtaattagttttgttatgaataatcaactcggtccttatagctatgtgagtcttgtacttctccttgtacaaattcctctttcttttcccaaccactaggccaacctccattrgcctgtgttgtggcaccataagacttggtggtaccataatttatataattttgagtaatgtcccctgtttcttcatcgagttcatcttcatgaataaatccacatttttcttcacttgtttcctccgggtctgcccagggttgtttctctcctgaggcaaatattgcataaaatataactccaccatagtggactagggcagcgatcaggaagacatactgccactcttcacgtgactgcagtgagaaaaagcagcactgt

SEQ ID NO: 50051 - DNA, 1379 bp, Homo sapiens
tcttgcagctgagtggcagagtgattatattttgccaagtggaacaggagtagaaaaaaatctacccaacctctgggttatcattcctccttgcccttcctcctaccctttttttctcctttatttcagggcatacaaaggagagcaacactgggggtggcagggcaaccagaaggaaggagcccagccccctataactttagcaggcagaaatgccattctagctgactttaaagtaaaaggaaactaaactgtcttgtttaaatcagtattgtttgaggtttctgttacagcagctgaacatgttccttaatacaaagattttccgtcctacatggaacatgactaagaactactgatcaagaagcaaatccttcatactttccttttcctccttagcctaacaagatggccgacatcatcgtctttgactccaaaggatagcaagttataccaggaggttcaagaaatctctctttaatctcaaatcccaatttttaagtgctagatccacctgaaaatacaagctttgcttttccagtcactcaatgtctcaaccgaccttttgaattgaattttctaccagactctctcatataaattactcaatttctggaacaggtctagcatcacctcgtaatgctaatgctgtttctcctgcctagaaggcccttcctgagctagaaaattccacaacatcacggtcaagttcaaacgtaaaaatgttccaactcctaagggcttggaagactttgaaatattgactgaagtatattggggcatacatacctgccaacccaccaatctgcagagttcctaaaggcagaagcagtttttcatctttgtatccctgaccaccccccataccatccaccacatacatcccagtacctggcacagtaaaaactcaataaatatttgatgaactaattaagaaatcattgaactgtgttaaggttgtccttaagagtattttttaaagtagttgaaaattcaaaggcagaggccacaactttaggaaatccccttgtaaatcaaacacacatattcctgttaaactagtacaacttagcctattaaaatatgagataggagacatagcctttaaacyaggggcagccaatgttttggcttcaccaaagggccgcactagaagaactgtcttgggccacacataaaatacactaacagtaaggaaacctgatgagctaaaaaaaaattccattttttaagaaactttacaaatttgtgttgggccgcattcaaagccgtcctgggccacaggtggcccgcagtctggacaagcttgctctaaactataaaagcggagctaaagatccatgtcacttacaagcatcgactatcattaggagttgaac

SEQ ID NO: 50052 - DNA, 1408 bp, Homo sapiens
  misc_feature (1)...(1408): n = A,T,C or G
cacagctctgcacagctttcgcacacacaccggctctgctcactcggctgctgccctcatcagactgtgtgagctgtttgaagggaagggctgaatcaaatgcacaccacatgagtaattaaaatgctctgctagataattctccaggagacagagaggtagctgttaaaactattgcatctcacagttggaagtgacctcaggaagtggccttaaggatctaagacactcatattcagtgaacaaatatactggtggtatttgttcatttccatagactttccttccttcatttgtcaaatgaaaggcatggttgttaggccgggtgtggtggctcgtgcctgtaatcccagcattttgggaggccgaggtgggtggatcacttgaggtcaggagttcgagaccagcctggccaacatggtgaaaccccatctctactaaaaatacaaaaattagctgggcatggtggcaggcacctgtaatcctagctactcggaaggctgaggtgggagaattgcttgaacccaggaggcagaggtgcagtgagcagagatcgtgccaccacactccagcctgggtgacagagcaagactgtatcaaaaaaaaaaaaaaaaatgaaaggcatggttgtgttttagctttgtgttttagttttctattgctatgtaacaaattgccagtaacttagcagcttaacacaagatttacagttctaaaggtcaaaagtcccagctggcatggctgagttctctgcccaggatatcacaaggctgaaatccaggtatcacccagagaaaactcttagcttttaaaagggtttgtgtgattaggttaggcccaccagataatctccctgtcttaaggtgaactgattagtaatgttaaatacatctgcaaaatcctttttgccaagtaagataacatgatctacaggagtaatgccaggggtgaaggtcatgaaggctatcatagaattccggttcacactctctattatggttatcattatttcaagatttttttcttcctctttctccatttttattacatgagggtgaggacaccagcctcccttacttcatttggccttaagagcattatggastaacgttagcatgttttaagcattggtgaagtgatttgttaataaatacacaacagtactagaaagtcaaggagagaagaaatgatatctctgaattttatgaaaaacaggcttctacccccactgaatccaggaacaacaatgacaacatggagaaacactcttactctaaagattttagaatctatttgtcanagtattattctgggactccccttagtaagaggccccatgggtcngatgtattttttaaaggagacatcggatatcttcaaccctgcccccactatcccatttataaag

SEQ ID NO: 50053 - DNA, 1408 bp, Homo sapiens
  misc_feature (1)...(1408): n = A,T,C or G
cacagctctgcacagctttcgcacacacaccggctctgctcactcggctgctgccctcatcagactgtgtgagctgtttgaagggaagggctgaatcaaatgcacaccacatgagtaattaaaatgctctgctagataattctccaggagacagagaggtagctgttaaaactattgcatctcacagttggaagtgacctcaggaagtggccttaaggatctaagacactcatattcagtgaacaaatatactggtggtatttgttcatttccatagactttccttccttcatttgtcaaatgaaaggcatggttgttaggccgggtgtggtggctcgtgcctgtaatcccagcattttgggaggccgaggtgggtggatcacttgaggtcaggagttcgagaccagcctggccaacatggtgaaaccccatctctactaaaaatacaaaaattagctgggcatggtggcaggcacctgtaatcctagctactcggaaggctgaggtgggagaattgcttgaacccaggaggcagaggtgcagtgagcagagatcgtgccaccacactccagcctgggtgacagagcaagactgtatcaaaaaaaaaaaaaaaaatgaaaggcatggttgtgttttagctttgtgttttagttttctattgctatgtaacaaattgccagtaacttagcagcttaacacaagatttacagttctaaaggtcaaaagtcccagctggcatggctgagttctctgcccaggatatcacaaggctgaaatccaggtatcacccagagaaaactcttagcttttaaaagggtttgtgtgattaggttaggcccaccagataatctccctgtcttaaggtgaactgattagtaatgttaaatacatctgcaaaatcctttttgccaagtaagataacatgatctacaggagtaatgccaggggtgaaggtcatgaaggctatcatagaattccggttcacactctctattatggttatcattatttcaagatttttttcttcctctttctccatttttattacatgagggtgaggacaccagcctcccttacttcatttggccttaagagcattatggactaacgttagcatgttttaagcattggtgaagtgatttgttaataaatacacaacagtactagaaagtcaaggagagaagaaatgatatctctgaattttatgaaaaacaggcttctacccccactgaatccaggaacaacaatgacaacawggagaaacactcttactctaaagattttagaatctatttgtcanagtattattctgggactccccttagtaagaggccccatgggtcngatgtattttttaaaggagacatcggatatcttcaaccctgcccccactatcccatttataaag

SEQ ID NO: 50054 - DNA, 494 bp, Homo sapiens
tttagcttagcagataagtcttgccctagtgagttactagaagagtgtcacataggaagaaggttcacttttctgaaaatggccccagcatcaactggacagkttccgacatgggtactattgtgtctgattcaaaacccccaccacagaaatgacctttccactttcagggatttgtcagcttgttaaaagaaaaacttcagctgaattaaatttaaaggagtttaattgagtgatgaatgattcgtgaatcgggcagcccccagaatcacagcagatttggagagactgcagagatgcctcagggtcagaacaaatttatagacaaaaaagggaagtgacatacaggaatcggaggtgaggtacagaacagctgaactggctacaggttggagtttgccttatttgaacacaatttgaatgctcagcagtgtgtgagtggttgaagtatggctgctgggattggccaggactcagcgactgttacaagtgca

SEQ ID NO: 50055 - DNA, 2171 bp, Homo sapiens
aaagaagtaatgatggactctgatgtagataaatttatggtagaggaaacagcagtcatataatatcattttctataaagtaaaatactatattttggatggagtgagctggaaaagaaagtatgtataacagactgtggagaatgagaaaggaagttgcatggggacacattttgtttttgtttttgtttttgagacagagttttgctctctcgcccaggctggagtgcagtgacgtgatcttggctcactgcaacctccgcctcccaggttcaagccattcttctgcctcagcctcctgattagctgggattacaggcgtgtgccaccacacccwgctaatttttgtatttttagtagagacagggtttcaccatgttgatcaggctgttcttgatctcctgaccttgtgatccacctgcctcagcctcccaaagtgctgagattacaggcgtgagccaccacgccttgccagggacacatgtttttataggaagttgtgtagagaggtgtgtttataggaacaagtacattcagtatgataataaatcaagtgttgtaggaggtagaatactgaaactattcagtattctgagttgacagctcagctactgccaacttagcctgtattgtggtctcagggtagcatccttcacctgtggccactctgagacacatccagcagaatttctggttgaagcaaaacaagtgtgctatgtgatcttaaagttatctccttcctgctggagatttccttcaaatgccttggtgttttcaaatattgctagagggctaaactcagagtcttccaaccattgtagggatgtcaaatatcattaatttatttttgtttttttaattgagatgggtttgaagccttttttggggagagtgggggaaagagtcctgttttgtcacctaggctggaatgcagtacgggatctgggctcactgcaccctctgcctcccgagttcaagcaattcttctgcctcagtctcagtggctgtgattacagacatgcaccatcacgcctggctaatttttgtatttttagtagagatggggtttcaccacatgggtcagactggtcttgaactcttgacctcatgtcatctgtgggcctcagcctcccaaagtgctgggattacaggcatgagccaccgcatctggcctaaaatattattttaaatcaagaaaggttagtgggctttttgctagtttaatacagtggagaaggacgctaatatagttggatatgaacatttggatctatttaattataaaaaatggagtcggctgaaaatctgagaaaggagtaggctttctcctgtcactttttttattgaaatacttttatttttattttgaaagttttttttcttttgtgtttttggagacagggtcttggtctgttgcccaggaatacagtggttctatcatagctcactgcaatcttgaaatcctggctcaagcaatcctcccacctcagcctccaaagtaactgggacgacaggtgtgcactaccgtgcctggctaattttttaaattttttttgtagaggttggggtcttgctacattgcccaagctggtctccaatgcctgggctcaggcgatcctcctgcctccacctcccaaattgcgatgattacaggtgtgagccgccatgcccagcttattttgaaataatttcaaatttatagaaaagttgaaagaactttatacatttttccagattcaacaatcaatacgattttaccacaactattttagcattctgtaagatatgtatgtatatgaatatacacgtattttccttgtcacctttgtttgatctaataatctaagatgttctcacatgtgtacttacaatgtcaacagtaactggtatccctgtgtgcatgaaaaaagcaaaaaccaaaaaacaaaaacagtggtgatgtcaggggcacagtggcatgtacctgtagtccctgctacatgggaagctgatgtgggagaatcacttgggggccaggagctcagtcaaggctgcagtgagctataattatgcctgtgaatagctactgcactccagcctaggcaacaaagtgagaccccatctctaaaaataaatagaaaaaaaagtttttaatttaaaaaaaactgtcagtagtaaatgaaaataccaca

SEQ ID NO: 50056 - DNA, 2171 bp, Homo sapiens
aaagaagtaatgatggactctgatgtagataaatttatggtagaggaaacagcagtcatataatatcattttctataaagtaaaatactatattttggatggagtgagctggaaaagaaagtatgtataacagactgtggagaatgagaaaggaagttgcatggggacacattttgtttttgtttttgtttttgagacagagttttgctctctcgcccaggctggagtgcagtgacgtgatcttggctcactgcaacctccgcctcccaggttcaagccattcttctgcctcagcctcctgattagctgggattacaggcgtgtgccaccacacccagytaatttttgtatttttagtagagacagggtttcaccatgttgatcaggctgttcttgatctcctgaccttgtgatccacctgcctcagcctcccaaagtgctgagattacaggcgtgagccaccacgccttgccagggacacatgtttttataggaagttgtgtagagaggtgtgtttataggaacaagtacattcagtatgataataaatcaagtgttgtaggaggtagaatactgaaactattcagtattctgagttgacagctcagctactgccaacttagcctgtattgtggtctcagggtagcatccttcacctgtggccactctgagacacatccagcagaatttctggttgaagcaaaacaagtgtgctatgtgatcttaaagttatctccttcctgctggagatttccttcaaatgccttggtgttttcaaatattgctagagggctaaactcagagtcttccaaccattgtagggatgtcaaatatcattaatttatttttgtttttttaattgagatgggtttgaagccttttttggggagagtgggggaaagagtcctgttttgtcacctaggctggaatgcagtacgggatctgggctcactgcaccctctgcctcccgagttcaagcaattcttctgcctcagtctcagtggctgtgattacagacatgcaccatcacgcctggctaatttttgtatttttagtagagatggggtttcaccacatgggtcagactggtcttgaactcttgacctcatgtcatctgtgggcctcagcctcccaaagtgctgggattacaggcatgagccaccgcatctggcctaaaatattattttaaatcaagaaaggttagtgggctttttgctagtttaatacagtggagaaggacgctaatatagttggatatgaacatttggatctatttaattataaaaaatggagtcggctgaaaatctgagaaaggagtaggctttctcctgtcactttttttattgaaatacttttatttttattttgaaagttttttttcttttgtgtttttggagacagggtcttggtctgttgcccaggaatacagtggttctatcatagctcactgcaatcttgaaatcctggctcaagcaatcctcccacctcagcctccaaagtaactgggacgacaggtgtgcactaccgtgcctggctaattttttaaattttttttgtagaggttggggtcttgctacattgcccaagctggtctccaatgcctgggctcaggcgatcctcctgcctccacctcccaaattgcgatgattacaggtgtgagccgccatgcccagcttattttgaaataatttcaaatttatagaaaagttgaaagaactttatacatttttccagattcaacaatcaatacgattttaccacaactattttagcattctgtaagatatgtatgtatatgaatatacacgtattttccttgtcacctttgtttgatctaataatctaagatgttctcacatgtgtacttacaatgtcaacagtaactggtatccctgtgtgcatgaaaaaagcaaaaaccaaaaaacaaaaacagtggtgatgtcaggggcacagtggcatgtacctgtagtccctgctacatgggaagctgatgtgggagaatcacttgggggccaggagctcagtcaaggctgcagtgagctataattatgcctgtgaatagctactgcactccagcctaggcaacaaagtgagaccccatctctaaaaataaatagaaaaaaaagtttttaatttaaaaaaaactgtcagtagtaaatgaaaataccaca

SEQ ID NO: 50057 - DNA, 1959 bp, Homo sapiens
tcaattgattcatatagtattctctctctctctatgtaatatatatcaatacttcattccttcttatttataagtagtattaaattgtatgtataccacaatttgtttatctatttacctgttgaaggaaatttggcttattttcagctttgggctatgaacatttgagtgcaaaattttttacagacatacacttccatttctctcagggagatacctaagagtggaatggttggatcataatgttaagtatattttgaytttttaaggaattgacaaaatgttttccgaagtggttgtgccattttacattcccatcagcagtgtacagtatataaattccatttcctccacattctcaccaacacttgttatggttagtgtttttaattttggctattatagtaatgacagtgtgcctcattgtggctttgcatagaatgatggcatgggaagcaaatgtagaaattgtttcaaaaaataagttatctaataataggttaagtgacagagaaatcagccaggattcaatcattacactgtttttgagtttatgatttaatctcaagtgccaagaatctaaattggaaacaatatattctctgaattcattgtttacagtccagtggggagacaagggcaaattattcaaaatgtatttatattaaggcagggaaagtatatgcaaaacatgaaataaaatctgggtggggtcagggaagacttcagaggaaaggtgtattttgagataaaactggaagtataaatagtttcctaataccagagaagcagattaataatatgtataaaatgtccatgcgttcaagagcatgccattttctaaaaaaaagtgcaagcaacttattatcactggaacacaaatactgagtgttggggataaaaagaattgggaagggaagagatcagagagaaaggagaattgatacgtaggataatatatttcatcttgtcttagtaaagaggtttgaaaaattctgagcagtgatgtgttgcaatttgaactatctaccgcatttttagagactctcctaattctcttgccaggcatatgataggattatacttcctgatcctcctggttaggtagtcacatgactagttctggccagtgagtcgtgcgaggactgatgcatgtcatctctggcctggtgctgatgcaagattctgcagagctttctgttccctctggcacagtgataggcaaaagtcagtatggtggatactccatcacttgcttctttgaataactgttatctctattgtgttaagccatgacgatttggaagttgtttgtttctgtagcacaattaattcttttttggctgagacagatactgcatagcacaatattctattgatttgattggcttaagcaataaaagaatggctgagatagatagatagtaaggcaatcgaatcagtagcatattgtgatttaccaacagtacaaagagggagagagagaaatctagactaatgagttgtataaaagattatcctttggacttagtagttaggttgccacttgtgatcttcaagaaatcttgaaggttttcgtggaatactggagaaccaaagtacatagaatggactatagaataaatggggttgaagaagtggagacaactaatgttgaaatcaatagcatgaattagactggctggctatggaatatcttatgctgcaaaatataaacatacttgcttctattttcttttacaaaatttgcacactgtattaccggaaagtgaagtaaatacaacaaacaaacaaataaaaaacctgtgactgcatttaatagtttgaatataccaacaatcttgggaaatgaaggattcttattggataatatagaaactgtagtttctgattttctttacaaattctatctgtaatttatatgacagaaattcatcatttatttctagacttcatttc

SEQ ID NO: 50058 - DNA, 1160 bp, Homo sapiens
ttatgtatagagtcactaaacttcttgcctctcacaagtgctgaatcacgaatgtcraatgcatttattttaaataactctctaaacagttcatgtcaaaggctaaaagtgttttccatactattagaagtagagtccttagcgtttttggggtctaatcatattaggcaaccaactccagaaatgcccaaaccaacaaaagaactcaatctttaatattctctttctctagaaccactcctggtaccaaaaatctgtattagtcagggttctctagagggacagaagtaatataggatatatatcatatattttatatatatatacatatataaattatatatttaactagtacctttaatcgaagtggcagagtggcagggaagttatggggggtccagagctggcaaagaaggaagatgacaggatgtgtaggaggaaatgtttaaacttttgctcctattccattgtgaaaatgtcaggcggcacctgagaccacaagtgccagtagtctggtttgattgaagcagtaatagctccagtctgtgctaataaccacctaaaaccacattaataggtgaattggcttaattgaacataaagaatggattacaaatagagtgttgagcattagaatgaaacaggcataatgaggttaagtatgatttctgatgctgaatgaaagtttaaaaatgaaaatcactgcactgagctatgaaatgttagataattccaatggcagaactccttagatttctagctgctggtcagcctatattatattatatctatatatagatataatagatatatatatatacctattacttctgtaatagatatatatatatatatatattcccccttcccaggacttcttgattttgcttgctctgggttgtaggggtttgttgtttgtttagtgacttttctggactatattttaaagtctacattctttgtcatgtacagacactgccatctcttaatttattagcttagcggccacctagtgatttgatagagattttcttaaatgtatggaattaaaaaaaaaatcccagtatttgtagatgctatgcgtgtgtctgtgttggagcacataatacctcaaaagatgagctagtctatcttcactttggccaatttaagagtttttc

SEQ ID NO: 50059 - DNA, 1160 bp, Homo sapiens
ttatgtatagagtcactaaacttcttgcctctcacaagtgctgaatcacgaatgtcaaatgcatttattttaaataactctctaaacagttcatgtcaaaggctaaaagtgttttccatactattagaagtagagtccttagcrtttttggggtctaatcatattaggcaaccaactccagaaatgcccaaaccaacaaaagaactcaatctttaatattctctttctctagaaccactcctggtaccaaaaatctgtattagtcagggttctctagagggacagaagtaatataggatatatatcatatattttatatatatatacatatataaattatatatttaactagtacctttaatcgaagtggcagagtggcagggaagttatggggggtccagagctggcaaagaaggaagatgacaggatgtgtaggaggaaatgtttaaacttttgctcctattccattgtgaaaatgtcaggcggcacctgagaccacaagtgccagtagtctggtttgattgaagcagtaatagctccagtctgtgctaataaccacctaaaaccacattaataggtgaattggcttaattgaacataaagaatggattacaaatagagtgttgagcattagaatgaaacaggcataatgaggttaagtatgatttctgatgctgaatgaaagtttaaaaatgaaaatcactgcactgagctatgaaatgttagataattccaatggcagaactccttagatttctagctgctggtcagcctatattatattatatctatatatagatataatagatatatatatatacctattacttctgtaatagatatatatatatatatatattcccccttcccaggacttcttgattttgcttgctctgggttgtaggggtttgttgtttgtttagtgacttttctggactatattttaaagtctacattctttgtcatgtacagacactgccatctcttaatttattagcttagcggccacctagtgatttgatagagattttcttaaatgtatggaattaaaaaaaaaatcccagtatttgtagatgctatgcgtgtgtctgtgttggagcacataatacctcaaaagatgagctagtctatcttcactttggccaatttaagagtttttc

SEQ ID NO: 50060 - DNA, 555 bp, Homo sapiens
caaataaacaacaagcttcctcctgggcatttatggtttcaaaaataaataagggcagagattacagtctcagagtctatttacttgcacmagggtgacacttctttttatatccactgctcagcaccagctcaactcttttctctggttccaacccctttgcaattatctgcctgagaagaagagggacacatgtgggtatctagtgggagataaatgcagcatgacaagcggattaccatggttgaaacacttttctgaacacactggagcttaaaaagcctaaagctgtttaattccttggctgcagaagttagggacagtaagcatgaaagcatgaacccctcaataagaagaaattaaaacattttaaaccttaaaaataacagctagccgggcacggtggctcaagtctgtaatcccagcattttgggaggctgaggtgggtagatcatttgaggtcaggagtttgagaccagcccggccaatatggtgaaaccccatctctactaaaaatacaaaaattagctgggtgtggtggcgtgcccctgtaat

SEQ ID NO: 50061 - DNA, 561 bp, Homo sapiens
aaatgccatctaaggcattggggtaaggttgttattcttgccaacctttatttgcttattttgaaggcatctgggtaaaagagaactgtgtcaggattttatgtcctcacatatctggatacaccttttaggcacaatggctggctttgtttcttgaaggagtaaggaaaagtttggtggtggacttttgacttctgttcactcttggcactgacaggtgaagacaaatagctgcatcataaaaaatgaagccatcttcctaaagaaatgtagtcaggggaaatataatttttaattatccttttacactgcacagtagaaaaaggaagcaattaactaaaacaagtagaawtggaaatgattttttttcagccccaacatggaattgagtgtatgaatacataaaaggagaacacaatttgacagagaataagagagatcctctccttattttttgtctccattaataaaatatatttgtattattcctcttctaatgctatctctctcccactctatgatcttttaagggagtactacatagagacaagatttatctta

SEQ ID NO: 50062 - DNA, 596 bp, Homo sapiens
tacatatatacacatatgtatataaagcaattcttactctatgataaaaatatataccctggaaatactggttctgagaaagcatctcattttaaatgattgggagttgaaaaaaaaagtatttagaaactgatttctactaaaacaattataagaaacataaacaacattgaaacccaagaggtttgtaacatattaggaagaaaataataaatgtagattatattagcaacaggatgctgcctagccagtttgagaacacaaactataaaatgtgtaattttcccttaggtattgcaaattgaccacataacaacatcagaaatttcacttgtgagaaaaatgagataacacatacaggctaattgctgagaagagaaatagtaaaacaaagtaaagtgtgttatctgaaatttatattatgatacttgacagttgttttattytgaaattccacatttgcttttaaaagctctatgatggaaatcaggtcaggtgcacatggccagttacagtcgtaaattgttttaaaaagtattttgaatatccagtaacctactccctccctctttatttgtcttatgtattagtcaaag

SEQ ID NO: 50063 - DNA, 551 bp, Homo sapiens
taattaaccttgcgaggcattgtgataactaaacacttcacatgtattaattataactccctgctatctcacaaggaaggtaaaacatacttacttaaatttagactggatgagtaacctccattaagaaagactgaaaatatccagaaaaattaaataattttrtaactttctccaacaacatagctagaaatacaaatgaacaaggagattgaatgagctaaatgtatttcattcattctctgcttctgatttctcagttgcttctgtataggtaaaacaggacattaattaaaatgaaaagttaaatgtgaatactgaaagttgatctgctgttttatttaaaattgtagctatctaacatccttgtatagttagtttactcaattatagacaaactataatcaattccagcaagacacattaaaggccattattatgtaagaaatcatacggtattttatagagtataaaatctatttcaccagaaataatacttgcctctgctgaattatttgaaagacctctactgaatggacagaattaagaag

SEQ ID NO: 50064 - DNA, 587 bp, Homo sapiens
gtggcatcatgttagtgatcaaaaagtcagtttcaggtattggagcatttcaacttttgggttttcagattagggacactcaacatgcatatacctacaaataatattactcagccttataaaagaatgagatgctgacatatactacaacttgaatgaactttgaggatagcatactgaatgaaatrtcagtcacaaaaagacagatactatgtgatttcttacatgaagttctctcagtagtcaaaatcatagagacaaagtagaatggtggttgtgaggcacaagggggaaaagggaatagggagttattgtttaatggacacagagttttaatttacaatatgaaaagacttatggagatggatggtggtgatagttggacaacattatgaatgcacttaataccattgaactgtatacttaaaatgttgaagttatagatttcatattatgtgtattttaccacaataaaaatgtaatactcttatatttgaagtgttcaatatggataactactttaattagcttgccaatatcactttagcagtagtagtgactcagagtgtggagtatagtgttttcca

SEQ ID NO: 50065 - DNA, 587 bp, Homo sapiens
gtggcatcatgttagtgatcaaaaagtcagtttcaggtattggagcatttcaacttttgggttttcagattagggacactcaacatgcatatacctacaaataatattactcagccttataaaagaatgagatgctgacatatactacaacttgaatgaactttgaggatagcatactgaatgaaatgtcagtcacaaaaagacagatactatgtgatttcttacatgaagttctctcagtagtcaaaatcatagagacaaagtagaatggtggttgtgaggcacragggggaaaagggaatagggagttattgtttaatggacacagagttttaatttacaatatgaaaagacttatggagatggatggtggtgatagttggacaacattatgaatgcacttaataccattgaactgtatacttaaaatgttgaagttatagatttcatattatgtgtattttaccacaataaaaatgtaatactcttatatttgaagtgttcaatatggataactactttaattagcttgccaatatcactttagcagtagtagtgactcagagtgtggagtatagtgttttcca

SEQ ID NO: 50066 - DNA, 587 bp, Homo sapiens
gtggcatcatgttagtgatcaaaaagtcagtttcaggtattggagcatttcaacttttgggttttcagattagggacactcaacatgcatatacctacaaataatattactcagccttataaaagaatgagatgctgacatatactacaacttgaatgaactttgaggatagcatactgaatgaaatgtcagtcacaaaaagacagatactatgtgatttcttacatgaagttctctcagtagtcaaaatcatagagacaaagtagaatggtggttgtgaggcacaagggggaaaagggaatagggagttattgtttaatggacacagagttttaatttacaatatgaaaagacttatggagatggatggtggtgatagttggacaacattatgaatgcacttaataccattgaactgtatacttaaaatgttgaagttatagatttcatattatgtgtattttaccacaataaaaatgtaatactcttatatttgaartgttcaatatggataactactttaattagcttgccaatatcactttagcagtagtagtgactcagagtgtggagtatagtgttttcca

SEQ ID NO: 50067 - DNA, 603 bp, Homo sapiens
gggtttcaccatgttggccaggctggtctagaactcctgatctcaagtgatccgcccgcctcagcctcccaaggtgctgggattacaggcatgagccactgtgcccaggctraaagacaatattctttacaacagcatcagaaaacatcaggtatctagtggggcacagtggcatgtgcctatagtcccagctactcaggagggtgaggtaggaggatcacttggacctaggagttcgaagctgcggtgagctatgatcgtaccactgcactccagcctggatgacaaaataagacccttcctcaaaaaataaaataaaataaaataaaatatcaagtctcctagaataaacctaacaatggacacattttcaagacctctagaaggaaaagtgtaaaactttaagagatattaaaaagggctaagtaattggagagagatattgtgttcatggattatataatttaatagtgtaatttgatctatatattcagtgcaattcttgtcaaattcctaataatatttttaaaaatagaacctgaaaaaatgattctaaacttatgtgaaagcataaaagaccaaaaataggatgtttctgaaaag

SEQ ID NO: 50068 - DNA, 603 bp, Homo sapiens
gggtttcaccatgttggccaggctggtctagaactcctgatctcaagtgatccgcccgcctcagcctcccaaggtgctgggattacaggcatgagccactgtgcccaggctgaaagacaatattctttacaacagcatcaraaaacatcaggtatctagtggggcacagtggcatgtgcctatagtcccagctactcaggagggtgaggtaggaggatcacttggacctaggagttcgaagctgcggtgagctatgatcgtaccactgcactccagcctggatgacaaaataagacccttcctcaaaaaataaaataaaataaaataaaatatcaagtctcctagaataaacctaacaatggacacattttcaagacctctagaaggaaaagtgtaaaactttaagagatattaaaaagggctaagtaattggagagagatattgtgttcatggattatataatttaatagtgtaatttgatctatatattcagtgcaattcttgtcaaattcctaataatatttttaaaaatagaacctgaaaaaatgattctaaacttatgtgaaagcataaaagaccaaaaataggatgtttctgaaaag

SEQ ID NO: 50069 - DNA, 603 bp, Homo sapiens
gggtttcaccatgttggccaggctggtctagaactcctgatctcaagtgatccgcccgcctcagcctcccaaggtgctgggattacaggcatgagccactgtgcccaggctgaaagacaatattctttacaacagcatcagaaaacatcaggtatctagtggggcacagtggcatgtgcctatagtcccagctactcaggagggtgaggtaggaggatcacttggacctrggagttcgaagctgcggtgagctatgatcgtaccactgcactccagcctggatgacaaaataagacccttcctcaaaaaataaaataaaataaaataaaatatcaagtctcctagaataaacctaacaatggacacattttcaagacctctagaaggaaaagtgtaaaactttaagagatattaaaaagggctaagtaattggagagagatattgtgttcatggattatataatttaatagtgtaatttgatctatatattcagtgcaattcttgtcaaattcctaataatatttttaaaaatagaacctgaaaaaatgattctaaacttatgtgaaagcataaaagaccaaaaataggatgtttctgaaaag

SEQ ID NO: 50070 - DNA, 622 bp, Homo sapiens
gaccttctgtgagtcccctcactctgctagaaatccggtcatccggctcagaaatcaacaaggtagacttcaggattaattggttggagccctgatatttcatgaagacaaattagtacattatcaagcacagattatttttattgactagtggtcattttaataaacaaagaatccactaattccttcttataagtagaagttaatttaatattttatcacctttcttatttccaaaaatgtctaaatcagtcttctcttatttattctcttttttccacaatgacaaactatgtagtccactatagcaagctatctctaccatatagaagaaatgaaatctaatccttttggtacctggggagctcctcagtgaatcctttgctatcaccatcttggataactctctaatgctrcttccaaaaaggcagtggttgctccattttacaatcccaccaacaagggttccaatttctccacattctcaccaacactggttattttctggtgtgtatgtttttggttttgtttttattttaatagtagccatcctaacagatataaggtgatatttcgttttggtttagtttcacatttctctgatgcaaagagagagaggttt

SEQ ID NO: 50071 - DNA, 554 bp, Homo sapiens
aaactgagaaaaagaacccagaaacacatccatgacagcttaataggatttaaacaactctatctcattaacttttcaagggaaccctggcaaagtatgaaatttaagcaccactccaggctgagaacagttatctgttgttcatgtcactgcacctgccctatactccaaagacatgggccacagctgcttctcccaaatgtgccctagaatatctaaagggttggctggcacacagcaggagggcattctgktagtgagggatgccccttttgaagctgtgtgtgcatagcaagtgcccagtttttatttagattgcatatttatttggagtaggatgggtagaaattccaacagggctgaagcccttccaagccatatttttgctccaacgtaggtatatccaaagtgaacacgaacctcaatggcagagtgaaaagtggcccaatatgctctatctattgcaatgtgggaagcttctttttcttgtattttcctttattttgatctttttttttttttggcaaaagtaaaaggatagagaagcatgaata

SEQ ID NO: 50072 - DNA, 554 bp, Homo sapiens
aaactgagaaaaagaacccagaaacacatccatgacagcttaataggatttaaacaactctatctcattaacttttcaagggaaccctggcaaagtatgaaatttaagcaccactccaggctgagaacagttatctgttgttcatgtcactgcacctgccctatactccaaagacatgggccacagctgcttctcccaaatgtgccctagaatatctaaagggttggctggcacacagcaggagggcattctgttagtgagggatgccccttttgaagctgtgtgtgcatagcaagtgcccagtttttatttagattgcatatttatttggagtaggatgggtagaaattccaacagggctgaagcccttccaagccatatttttgctccaacgtaggtatatccaaagtgaacacgaacctcaatggcagagtgaaaagtggcccaatatgctctatctattgcmatgtgggaagcttctttttcttgtattttcctttattttgatctttttttttttttggcaaaagtaaaaggatagagaagcatgaata

SEQ ID NO: 50073 - DNA, 565 bp, Homo sapiens
tcaaattccctcagctctctgtcctcagggcacttacaatttaattaggtagatagcacacatgttcacaaaaagttagctagcaacaccacaagatcatttcaaataaatatgaaaagagtggtggcggctggccgcggtggctcactcctgtaatcccagcactttgggaggccgaggcgggtggatcactagaggtcaggagttcgagaccagcctggccaacgtggtgaaaccctgtctctactaaacaaaaattagccaggcatggtggtgggcgcctgtaatcccagctactgcgggggccgagggaggagaatcacttaaactcaggaggtggaggttgcaaaaagccgagaagattgtgccactccgctcatgcctgggcaacagtgcgactccgtctcaaaaaaaaaaaaaaaaaaaaaagtggtggcaaaaatagatgccrcatgagttgaaaggatcactgtgagttggagttaattgggaagtagtcatgaaaaatttgaaattatttgcagctagaaattctaggtctacataggatagaataaccccacca

SEQ ID NO: 50074 - DNA, 574 bp, Homo sapiens
  misc_feature (1)...(574): n = A,T,C or G
ttgtaaacaagaaagctctgctaccccctagcctaaagaaaaggggggaagggatattgtttggagctaaggggagggctgaagccatgaagaaagttcggctgccggatctctagctggagggctaaacactgacaggtgcagctctggagaagggacggaatggggaagaggaccactttctttgttcaggcatttgccaagttcaactagaaatagccagkgagggagaaggtgatagagttggtgggtctacatttcctggcacagaccagagctggtagtggggaagagtttggaaagcagtcaacacantagcaccagtgcctggtccttcttcacagggctgtgggtaaaagagccactgccttcctacccagactctatacctacagggggaatcaccatgaatccaagaaaactcaggcttcaggggcttttcccattatgtattgcttcaaaatactccaccccaaaacttggggggttcaaacaagaatgacttatgatttcttatgtttctgtaggttggccgggtggtctttctgctttttcgtggtgtcagctggagtca

SEQ ID NO: 50075 - DNA, 446 bp, Homo sapiens
tgggaggcagaggttgcagtgaaccgagatcgcaccactgcactccagcctgggtgacagagctagactcagtctcaaaaaaaaaaaaaaagaaatttaaaattttagaccaaataaaagtattcataatctatccaggccatagattctcacatggttcctgtgatcctttcagaaagtcataagtgttttcatactaatagtaagatactgtttgccttttccactctcattctttcacaaatgtatggtgactttttccagtggctacatgaaatgctatctcaacaaactgaacgcagagayggatatgggaatcccactgttttccattaagactttagagaaaattgctaaacatttaaaacaatgacattcttctcactaaatatttttttgacttggaaaatataattattttaaataaaaaatgttatttttatata

SEQ ID NO: 50076 - DNA, 576 bp, Homo sapiens
ggaagttccatagctattgatttcaactcattggtactgggtgatcacagggaatctcagtgatcagagattaggtaataatatcttcccggtcaggaaagtttgaagccagttggctatctttctttctatatgacagttattcatacacgaaggtgtgaaattttcaactacctttcctggaatataattcatgggtatgtatcagtaacaatgtatgtctccttttatgaacatcatgggcaaagkatgaaaacaaaacaatcacctcttaaacgtgtcaatcagttaccatagccaagtgcactgtgacattatgattgtttcagagcggggagcatttgctgtgcatcattttatcctgaatgtttttcctaaccctgactcatggtagtcgtcctcaatatgtatttatttgaaatgtatgttttattttcctgttagatctcgtaaatatcagacttccgaggacataaatctgttaaagccttgtctcatgtttattgtttttgtgtatctcttaaggaaatgatattttgtttttatattttctgatccgaaaagagcaaaagcccc

SEQ ID NO: 50077 - DNA, 806 bp, Homo sapiens
gtgtgagtgactactaatgggtataggattatttggggaatgaggaaagtgttctggaattggatactgacaatggttgtacaactttgtgaatatactaaaatacwctgaatgatataattttgcaagataaattttatgttgtgtgaattctatatctccatttttaaaaaactgagtcattctctctcccccatgatttcatttcttcagtgttatgatgaaatttggtaattctacccacggtgaggatagtaaggaaagcagctaattattctaattgacttataaatccaagatccatattatattactttacattatgttatattatattgcattatattatatttatcatcattctgaaataatctcttggatatttacattcatctaagatgaatatttgatgaaaattagaatagagccatccagggatgtaaatatttttattatcaggttaacacaaactgtatgtaataactgccttaaatagtttacatatatcagggctattttctaatatgccaaagcctttccagtaagagctcctcatttcttttggggatttcattaggcctttcatctgtaactttgtaaaccaaaaacaaatctctaagcccctcaaccaactgacggaccccctctcagccaaggacatttcaaagaaatctgaaaaactagttcagggcatgaagggggtcagccgtgcctcactgtaccccactccctttggaattcagacacaactcaccagcattcacattaaaacagggatcttcagaccgatagaatagatgtagcaa

SEQ ID NO: 50078 - DNA, 614 bp, Homo sapiens
attatcagcactattcttactttcaatgacagagtcttggcatggctaaagatgtcccactggcagagacacaaataaatccagacccatgggaaggctttccaaacccccttcacacccaaaggaggaaatgaacacacaggcatgaacaggcctgcatggagaattcatcacttaggaaccaagaaatccccaaagcttcctaacactgctgagaaataacaaagttatctttttctctttcttctcagcttaagaaatctgattaaatatcctcacaagaagccttcttaggtgaatccatgtgagaaccactctcctcacagaacctgtgaaaattatgatgaatgactattacaccacttgatatatggtttgatttctaaatataagtacacgtatttcaaaaacgtgcagtcctcatgagccagcatcccatattgcttagtctccattcactcctttatttgtttgatgagtwttgagtgcttactatgtggcagcactgtcaggaccacccaggatgccacagtgaccaagatagacacacatttgctgatctcctggagcttatattctggtgaagggagacagagaaaaagtttatatattca

SEQ ID NO: 50079 - DNA, 614 bp, Homo sapiens
attatcagcactattcttactttcaatgacagagtcttggcatggctaaagatgtcccactggcagagacacaaataaatccagacccatgggaaggctttccaaacccccttcacacccaaaggaggaaatgaacacacaggcatgaacaggcctgcatggagaattcatcacttaggaaccaagaaatccccaaagcttcctaacactgctgagaaataacaaagttatctttttctctttcttctcagcttaagaaatctgattaaatatcctcacaagaagccttcttaggtgaatccatgtgagaaccactctcctcacagaacctgtgaaaattatgatgaatgactattacaccacttgatatatggtttgatttctaaatataagtacacgtatttcaaaaacgtgcagtcctcatgagccagcatcccatattgcttagtctccattcactcctttatttgtttgatgagtatkgagtgcttactatgtggcagcactgtcaggaccacccaggatgccacagtgaccaagatagacacacatttgctgatctcctggagcttatattctggtgaagggagacagagaaaaagtttatatattca

SEQ ID NO: 50080 - DNA, 614 bp, Homo sapiens
attatcagcactattcttactttcaatgacagagtcttggcatggctaaagatgtcccactggcagagacacaaataaatccagacccatgggaaggctttccaaacccccttcacacccaaaggaggaaatgaacacacaggcatgaacaggcctgcatggagaattcatcacttaggaaccaagaaatccccaaagcttcctaacactgctgagaaataacaaagttatctttttctctttcttctcagcttaagaaatctgattaaatatcctcacaagaagccttcttaggtgaatccatgtgagaaccactctcctcacagaacctgtgaaaattatgatgaatgactattacaccacttgatatatggtttgatttctaaatataagtacacgtatttcaaaaacgtgcagtcctcatgagccagcatcccatattgcttagtctccattcactcctttatttgtttgatgagtattragtgcttactatgtggcagcactgtcaggaccacccaggatgccacagtgaccaagatagacacacatttgctgatctcctggagcttatattctggtgaagggagacagagaaaaagtttatatattca

SEQ ID NO: 50081 - DNA, 614 bp, Homo sapiens
attatcagcactattcttactttcaatgacagagtcttggcatggctaaagatgtcccactggcagagacacaaataaatccagacccatgggaaggctttccaaacccccttcacacccaaaggaggaaatgaacacacaggcatgaacaggcctgcatggagaattcatcacttaggaaccaagaaatccccaaagcttcctaacactgctgagaaataacaaagttatctttttctctttcttctcagcttaagaaatctgattaaatatcctcacaagaagccttcttaggtgaatccatgtgagaaccactctcctcacagaacctgtgaaaattatgatgaatgactattacaccacttgatatatggtttgatttctaaatataagtacacgtatttcaaaaacgtgcagtcctcatgagccagcatcccatattgcttagtctccattcactcctttatttgtttgatgagtattgwgtgcttactatgtggcagcactgtcaggaccacccaggatgccacagtgaccaagatagacacacatttgctgatctcctggagcttatattctggtgaagggagacagagaaaaagtttatatattca

SEQ ID NO: 50082 - DNA, 569 bp, Homo sapiens
caattccaactcactaggttttccaggtttttcaaaaatcacctttcgttctcatggtgaataattttaattggagaaagaaaaaaaaatctcaaatgcacaaaatcttttaccatgtttcatctttttaataatgtatttatttttattctmagtccaacaggcaaagaccaagtcaatttcagtatttggcacaaagcctgctgcaatattgatgatataatatcaatcatgattataagttactctgttattatgtgaatattattttataagctttaataagatgcttgagcatttaagatgaatggtttaaagtctaaattcatattcatgccaaatatgtaggacatatttttcataattgttcttgtcccttgggtcagtaatatactttataatcatcataaaatttcattcttaattcattttaatttatcagaaggaaaatatggatggttattgcccaattaaaatactcctgatgcttttaaggtagatattattggggttttggagtttcactgaagacaatttaaaaaaaaaaaaagagcagctgcatggcttca

SEQ ID NO: 50083 - DNA, 1507 bp, Homo sapiens
tgcttccacatatccaaaattcatctcatgatctagttccacagatctgttccatggctctacgtagcaactaaaaggcatcaccctccattcagtcatataaaagtcatcctagggggtcattcttcatactcaatcttgctcagtcatcatatccaagtgatgtcagtgtcaccgtgatgttgtacaagcttgtcaatgtcaaaaagtgacctagaagaatcttcagactttaaatgtataaaaggattaaatgcaaaccttaattgtgatcctgtagtacatagtattttttaatgtgaaaaagaaatgtacatgcatgtcatgcagtatttttgtttccccaaaatctgttattttattgatagagtatcttatgatcaattgtacaaccaattcaacgcaataagagaagtatttttacatacagaaaactccccttataaaaaacaataaacaacaacaataatgcacacacaaaaagtgagaatcagaaactatagattcgggtgttgaaaacagcccaattgtcccatagaaatgacatttaaggctttttcaataaacatagaaattgaccctcctggtgcttaaaacttgaaacttacgtttgtcacatctgagttccttcctcaggaactgaaacccatcagctctccagatccagacaatgaggcaccagattcttcactcatcatgattgcttcctaaccctctctaattcctctccctatgtagctacatcacttcctccactatataaaggcccccaattttagtcagtcagagagacagatttgagaatgatcttccatctccttggctgcagcaaccgattaaagccttcttccctgtcaatacttgttgtctcagtgattggctttctgtgtggcaagtaatgggacctagattgaacccttggcatttcaataacagtatcagttcatcacctctcatggactgaagcaggtcagttcacacaaaccagaaactctctttcctaagtaactatactgcccaagacatattagcctgatgaacaattacagatggtgaattaccccaaacaaattatcagtcttcagacagtcctcattagtgaatcctggagtcaatctgttcccatctattagcatggctcctgacatcacttctggagtaactgtggtgcccatcctaccgacattttcatccacagttttcccatttccaaggccactacaataacatgagccttttctccctgattatcacctccccctacccccttccaggcctttgggtcatcaaaggcttccttgtagtctaaatgtctgtcatacacctatagtggtaacttttttttyccctatagttctttatcctcaattttccttctttatgaatcaggcccggttttcctttgaactaggctgaaagtccacttaaatgtcattgccttagaatatgctcagaatccttcctctgtaaaaataggtcacttaaaatctaagctgttggaacttta

SEQ ID NO: 50084 - DNA, 1007 bp, Homo sapiens
aaaactgaaggtaggaaaagtagaaagaacactgtggcaaaagtctctataagccaatcagataccaggaaaagtaaatcaagatctgattggaaattaatacataccactgttaatgttattgtacggttattagcattgttattaagctactttttgttgaacatctacatggaggtgacacactttacttccactcaaagcccattggctgaatctggacacagaaaccacctgccttcatgggagtggggaggctgtggatggcacatgggtctgtgtgacagataaagaactctacaacagtagaagtgttcatttgcattccaacagatgagcacatggactcagagaggccaggaatgcatttttaataaaagacatttagacagttctgaaagatattaactgtattgaggttttatatgagattgtttcacaaaatagcatctgtttttaaagtgatgcccattgaaagatatttttacacacaggtggagcattcggctaatatagtttagtcctgctaaacagaggggctggtgcagctcagtactaacactcatgtcattaattccttatagtttatgattccaaggaaagccctatgaatatcacatttatttgtgtagtttacataaatacctttagctgtcataattttagatgaatatgtcattgataaaaattacrgaaatcatatactaggcatatgcatgggtcatactgccaaaaataaatatcagttcaaaaatgtgtggaatacaagaactatgaaacttttagtactgaaaactttagttcataggaaagagaatttgcttcattattttcacaaggcatcatgtcgtagtgaaattagcatgggatttgaaattatagggtcctgggtttaagtctaagcattttcctctaaaataaaatatggagaagtttaattaatctctttgaaattcagttttttgactcataaattgagataatagtctctgccttattctccaatc

SEQ ID NO: 50085 - DNA, 582 bp, Homo sapiens
ggccgtcactgttactattattatttttagtctgccaagagagcactcccactgtccttcctctagtcacaagcccaccatctctggctgtgtatgggtaccaggtgtagctactaacactccttcatccgcgggacgtaagttgagcatgtgatacaagcagaaccaatgagcatccttccctgtgattcatggggtggtgcaaggctgaggctgctagtagccatgtctcctgttagcagagaaggccaacttccagaagagagtgaagccaacatatgmggaggagggatgagaggcaaatggagagagaatccaggaggtaaggagttcctgggggtgttggctccagcagctttcttcaatgctgagcctaccccagtaaacataatagtttcctttttgctttagtttgagttgagcctctctgttgcttaaatagggtcctaacccaggtgactttcttaactccagactctcctcactcatcattacagctggcaaaccgtggcaggaaaatcttttaaaaatgctattttctgaatattcttttcataaaaacttgtatgatactactctcta

SEQ ID NO: 50086 - DNA, 540 bp, Homo sapiens
ggcaaagtgtctggaccattgtaaatctaagacaaatctatgctggagatatacttgtatgaagaaatgaataaataaaagacctgggtcagcagttggaaatacaaaaacacagtctggagcacaagagaggagtttgtaatattttaagttttttgaagtaatatcgaatgcttaagagtacagaatttgaaacccatatttacactttcactcattcattrgccagatatatagagagtgagcccacaatatgctaggcttggtgaggctgcagggaagaagctgatcgtatagtgatgagcctggctttgactgggacgtacacgtcttagctctgtgaagctatataagcactctgctttttaagtctttttctctctccaaaatgggtaaacagcctttccaatggggttgctaaaagaatcaaataagattatgacatggtttaatgtagcatctagacatagaaggtatttagtaaatggctaaccatatgtggtggctttaaactacgtctacacattcattgacacacat

SEQ ID NO: 50087 - DNA, 540 bp, Homo sapiens
ggcaaagtgtctggaccattgtaaatctaagacaaatctatgctggagatatacttgtatgaagaaatgaataaataaaagacctgggtcagcagttggaaatacaaaaacacagtctggagcacaagagaggagtttgtaatattttaagttttttgaagtaatatcgaatgcttaagagtacagaatttgaaacccatatttacactttcactcattcattagccagatatatagagagtgagcccacaatatgctaggcttggtgaggctgcagggaagaagctgatcgtatagtgatgagcctggctttgactgggacrtacacgtcttagctctgtgaagctatataagcactctgctttttaagtctttttctctctccaaaatgggtaaacagcctttccaatggggttgctaaaagaatcaaataagattatgacatggtttaatgtagcatctagacatagaaggtatttagtaaatggctaaccatatgtggtggctttaaactacgtctacacattcattgacacacat

SEQ ID NO: 50088 - DNA, 617 bp, Homo sapiens
cttagctaattctagtatttttttgtagagacaagttttttctgtgttgcccaggctggtctcaaactcctggggtcaagtgatccatctgcctcagtttcccaaggtgctgggattataggtatragccactgtttgtggcctgaaatcacattttaaaaaaaattcttatatgtcacattctgaagattattaaaggatagactactaggatttttgtccaaggtggtggcaccaaatacaaatttgagaaggtttaagacattgtgaacaatgacttcagtacatcttataaaatcgatagttatcacacattataaggtggaaaatagcatcacttgatctatgctgaagaaagacgagtgaatactagccaaacaacatgttcatgctgttgcttttttcataattattctagaagtagactataatcacaatcctaatcttttatctcactttattcttccaataacaacttaaaaaatgtaattggataacatttcagacttctgcttcttattaatggtaaaagcagatattttaaccggtacccaaatattagtttcataagaaaatgaaaccttttttccacttcttgtgttacaaaagagaagaaa

SEQ ID NO: 50089 - DNA, 617 bp, Homo sapiens
cttagctaattctagtatttttttgtagagacaagttttttctgtgttgcccaggctggtctcaaactcctggggtcaagtgatccatctgcctcagtttcccaaggtgctgggattataggtataagccactgtttgtggcctgaaatcacattttaaaaaaaattcttatatgtcacattctgaagattattaaaggatagactactaggatttttgtccaaggtggtggcaccaaatacaaatttgagaaggtttaagacattgtgaacaatgacttcagtacatcttataaaatcgatagttatcacacattataaggtggaaaatagcatcacttgatctatgctgaagaaagacgagtgaatactagccaaacaacatgttcatgctgttgcttttttcataattattctagaagtagactataatcacaatcctaatmttttatctcactttattcttccaataacaacttaaaaaatgtaattggataacatttcagacttctgcttcttattaatggtaaaagcagatattttaaccggtacccaaatattagtttcataagaaaatgaaaccttttttccacttcttgtgttacaaaagagaagaaa

SEQ ID NO: 50090 - DNA, 630 bp, Homo sapiens
tgcatagatatgcaaatgaataggcacaaacactttctaggtctgccgtccaatttggtagccagtggtcacatgtggctctcaagcacttaaaatggtgccagtcctttagatcctgaggcagaacttagaaaagaaaaaaakaaaaaaataaaatggtgccagtccaaattggattgtgctgtaagtgtaaaatatacaccagattgcctgtaatcccagcactttgggaggccgaggcaggtggatcacgaggtcaggagatcaagaccatcctggctaacacggtgaaaccctgtctctactaaaaatacaaaaaaataaaaaaattaaaaaatacatatatacaccagatttagtcttagctgaaagaaaggaatgtaaaatatctcataaataatttttatattatgttttgaaataatattttagatacatgggttaaataaaatattttattaaaattaattgtacccgcttatttttcctttacttgatgtggctactagaatattttaaagcatatacttggcttatatttgcagctcatgttctagttctgtgcattctatttctattgggcagcactgcttcagaccacagactgctaggcccatgggatgaggatgc

SEQ ID NO: 50091 - DNA, 501 bp, Homo sapiens
ccccatgcatatgccagcrtcactcatattttttgttcttaagctttccctgcccgtagaagctttaatctgtaacttcttcctgtttgcttgtttctcaggattatacctccttctaccctagagggagtgatgagtccttcctcgttcacagtcactcaaacgaggaagcaagcttcagtgcattttctggaagaagcatcttttaaattcatctttgaggatgagacatttctcactgtcatttatcagtgtcgacatctaagattgactgagccaggtgaatttgttccttgtagtgcacagaaaataaatctgaggggtaacaatccttatgttgccaggactatccccaaaattatgctcaccccataggtaggtttcctgccacagtcttacaaagttaaccgccctggaattcattaaaatatttaaacgctttgctgaaaagggcaagtgatgggcctcaggctgacacaacaaaaggggttgtttggaagt

SEQ ID NO: 50092 - DNA, 2124 bp, Homo sapiens
ggaacaaaaccaaagctcgtcttgcaatgagcagagccaagcaaagggttacttgccatcagttttagggtaggaggtgctattttacaaaatactcgtaagtcatatatacctatcagtatataaaaagtccaggtgtaaaaagaatgaattacaaaatgtctttaatatttgtaatgaggaaatgatatgtaaaataaaacaatagccctcccctttctctgaaagcactctgaccacaaattccacttagcctgccagctcacacctttcaacttcctttaccaaaatttccctcctttacatcacaatattaaaaggggaatctgagaaagcacttttcagacaaatcaatatgtacccaggatgacagcatagattagtaaaccacagcaaagtttattcatgtgccagggacataaagatacattaattgtttgtttttctaggctgccagtataagcttttcaaaatgtttaaagtaaataaaaccaataatacagctagataccacattgcaaagaaccctaatgctatttatcagctttaaaatactttcaactgaaatcaattacattttaatatacacatattatayagaaattacctatagctcttttaaaaatcctatgacattaacatgaaactttattagaatttaagattctatatgcagacctgataaagccttaaatttaattattttggagtaatgtcttcttaagaaatggtagataggataaaataatttacagatttatctgcctttgaactggaaggaattttaggtaatcacctggttcaacctactccctaaagtcacacagctctataatttccccctcactcagctacttttttctgtctaaagatatgtcaaagcgatttcatatgtaatcatgagacattcaagtgcaagataatttaccaagaaatcccactccaagatccactgtacttatttaacaagacaaattaagtttgtgtaatgaaaatacacaacaaacattgcatttagcgttttgactccacttttaattaatgaatcatagctcctatgctgaggaaacatattatgtatagattaatataaataaattactggattggctaaatgaaatgcatccagttcaatggaaaatgtgcattctattcagagccatactttagaaaaaaagaaaagaaatataaataagcaaaatataattcagagaaggttggtatatttgcagttggagcatcttggcttgaatgtctttatatatgactcagaagcctatcaaaagggctctgagcctcagacacaagatcaatgccttctttgtaagtgttccttacccaaaaatggctctgcaggagtgtccttgggcagccaggacacatagacagcctctgcaggaacacttggctctagaatttgggactgagggagatgcagcgagcccatcatgacgagtgcaaccagatgtggaagaagccaatgtgggcatgtcacgatctcatcagcatgccagtgtaggagaagcagaggctccggggtctccctgctgatctggaagatcttgtctgctgcttctgtacacctggtgctgtctgagtaagacaggtcttccagatatttggtagtgattaagtgaaacatatgttccaagaaaatgtttactatgccaggaagaaagcaatcgctggcctctcactggaacatgatgagagggacctttgtgatgacgggtccatcagtcagaagagggtacgatggctgaagtaaaattaagatgcctggtctccagttttctgccacacaacatgcttgtagaacagaaatttgggaacactgcataacaaatggtggatgtagatgtttcaaacaacatctaatctagttagacgtggcacctggccagagtaactacggttcactaaaactattctggattaggcttaataccgtctgcaggaccttttctctggaggggctggcatcaaccacatggcagccaggattctccatccgctggtaggacatttctaccctggggacaggcaaaacacaaagagttggtctactttttcacacagctatttgcattaatgttcttttcctaccatagtataaatagcttg

SEQ ID NO: 50093 - DNA, 607 bp, Homo sapiens
tcgtatgatctttttctcatttgcctttagctcagcagagcgtggtgctggtggagctcagtcgcggccttgttttggtgctggttgattcacatgtgcccttggtctcatgtacagacatgacctgactagaagtcactcagtaactggctggaccaggatgagagaagccagttcttagttcccaagcatcctcctctcccactgtcccacaagtgatacacacctgcagtcacaggtggatttaaggaacctgagagagaaatcggggtatctcttccactgagatgaattatgcagcatctacatcccctcaacacagacttgtaatcagggagaaaaatttgtctgggtagggagccttgaaaattggtggtagaacttggagagtttaggatggctctagggctcaagagagagatggtggtatgaggaaggaactctaaggacattgagaagggtgtggtgtctgatggatttcatgttagtcttttctatctctacttacttttcctttaaaattttctaaaatgtagtatcwttatgacaggagagagaactagttcttctatattcttctatatgcactgagaaatttttttttttt

SEQ ID NO: 50094 - DNA, 607 bp, Homo sapiens
tcgtatgatctttttctcatttgcctttagctcagcagagcgtggtgctggtggagctcagtcgcggccttgttttggtgctggttgattcacatgtgcccttggtctcatgtacagacatgacctgactagaagtcactcagtaactggctggaccaggatgagagaagccagttcttagttcccaagcatcctcctctcccactgtcccacaagtgatacacacctgcagtcacaggtggatttaaggaacctgagagagaaatcggggtatctcttccactgagatgaattatgcagcatctacatcccctcaacacagacttgtaatcagggagaaaaatttgtctgggtagggagccttgaaaattggtggtagaacttggagagtttaggatggctctagggctcaagagagagatggtggtatgaggaaggaactctaaggacattgagaagggtgtggtgtctgatggatttcatgttagtcttttctatctctacttacttttcctttaaaattttctaaaatgtagtatctktatgacaggagagagaactagttcttctatattcttctatatgcactgagaaatttttttttttt

SEQ ID NO: 50095 - DNA, 519 bp, Homo sapiens
taaaaacatttttccttgcaatgtttaccctgactttctcctgctttacctattacctcttgaatgaagtatctactgctatataacaagttatctcaaattcagcagctgaagatagtaatcaagatttattgtgtcattcattttccgtgagtcggtttctgtaaccccatagcctttagggctgcaatgcctatggcactaaaagtcttgttatttgtttgaggggggaatgtcccatttcacttggcacatttcacaccctttccatgttcaccaagtagcacctggggacaggcagagaccccatttagactttcagttcaggagcagctttagctgaggagccaggcttgttagcatttcagaggtgtagcagcctgccttggccagggcagtgctactccattgccrggattcttttttttttttctttgagacggagtttcacttttgttgtccgggctggagtgcaatggtgtgatcttggctcactgcaacctctgcctcccgggttca

SEQ ID NO: 50096 - DNA, 1187 bp, Homo sapiens
tgaaaatctgaaatctgaaatgttccaaaatctgagatcttttgagtgtcaacatggtgctcaaaggaaatgctcattcgagcatttcagattttgaatttttggatttgggatgcctacctggtaggtataatgcaactatytcaaaatctgaaaaaatcagaaatatgaattgcttctggttctccaaggattttggataaggaatactcaacttgtataaattaatctctggaagttttgctttattgttgttatgtgtacactaagaaacttacaaggatctattgtcccttaagttttatggagcacttatgtagcagtcccagtgctagagtctccttttcatgtaaagtctcatgataaccctaaagggtaggcattgttcgtatccccattttacagatatggaaatggacacatggaaagactaaacaatttgcccaaagtctcacaggtgacaagcagaggaggctgggtgtaaactcatctttgactccagaccttactcctaacctttgacctatacagtgtgctactgagtcaggcattcacggcctcccaaaacttggaaccagtcttttcttctagtttgcctctcacttgagccagtgtgataacaagaagagtgagagcctggtctttgaagtgaatctgagctctgctacttgctagtaatattacctaggctacttaagataacccatcccttctgaatctccatttcctcatggagggagttgacactagatattcaggggtaaagaactgatggagaaattggaggtacacctatactagatttggtggtgcagaaaataagagactgagggaacagagagattgtcatagtgtttttgtttgttttaaagtaggggagggctaggtgcagtggctcatgcctgtaatctcagcactttggaaggctgaggtgggcagatagatcgcttgagcccaggagttggagaccagcctggccaacatggtgaaaccctgtctctataaaaatacaaaacttagccaggtgtggtggcatatacctgtagtcccaactacttgggaggctgatgtgggaggctagcttgagcctgggaggcagaggttgcagtgagctgagatctcaccagtacacttcagcttgggtgacagagccagaccctgtgtcagaaacaaacaaacaaacaaac

SEQ ID NO: 50097 - DNA, 1187 bp, Homo sapiens
tgaaaatctgaaatctgaaatgttccaaaatctgagatcttttgagtgtcaacatggtgctcaaaggaaatgctcattcgagcatttcagattttgaatttttggatttgggatgcctacctggtaggtataatgcaactatctcaaaatctgaaaaaatcagaaatatgaattgcttctggttctccaaggattttggataaggaatactcaacttgtataaattaatctctggaagttttgctttattgttgttatgtgtacactaagaaacttacaaggatctattgtcccttaagttttatggagcacttawgtagcagtcccagtgctagagtctccttttcatgtaaagtctcatgataaccctaaagggtaggcattgttcgtatccccattttacagatatggaaatggacacatggaaagactaaacaatttgcccaaagtctcacaggtgacaagcagaggaggctgggtgtaaactcatctttgactccagaccttactcctaacctttgacctatacagtgtgctactgagtcaggcattcacggcctcccaaaacttggaaccagtcttttcttctagtttgcctctcacttgagccagtgtgataacaagaagagtgagagcctggtctttgaagtgaatctgagctctgctacttgctagtaatattacctaggctacttaagataacccatcccttctgaatctccatttcctcatggagggagttgacactagatattcaggggtaaagaactgatggagaaattggaggtacacctatactagatttggtggtgcagaaaataagagactgagggaacagagagattgtcatagtgtttttgtttgttttaaagtaggggagggctaggtgcagtggctcatgcctgtaatctcagcactttggaaggctgaggtgggcagatagatcgcttgagcccaggagttggagaccagcctggccaacatggtgaaaccctgtctctataaaaatacaaaacttagccaggtgtggtggcatatacctgtagtcccaactacttgggaggctgatgtgggaggctagcttgagcctgggaggcagaggttgcagtgagctgagatctcaccagtacacttcagcttgggtgacagagccagaccctgtgtcagaaacaaacaaacaaacaaac

SEQ ID NO: 50098 - DNA, 1759 bp, Homo sapiens
tgataactgagaaagtacacaattacaatgacacttcagatgaatgtacacttcacgtctcttaagtggaagggacctaaattgatcagcttggatatatggttggtgaatcctagtagatagtattcattatttataatacccatgtggtgtaataatctgcctacatttcttgtatcctctagtttagccttcagaaattttcttcatccactaatggcaggaaggtataatatataaacctcatctaaaagtacaataaattacacatatttatacaaaatgcaatggctcctggcattagatattaataagcttttacatttggctatcagtccaatattcattgaaaataaccattttaggattcaattaatacatttaacattatttttgtctgcaaaattagtctactctggaatatcattgtattataaagaattttcactaaatagctattttaatgaaaaagcattcggaaaatgctttggaaaaaagctttggaaaaaagctaatatagtcatattaaattttaactcatttgaataactaataaaaaatatatgtctgatgtctgatactaataaacaggaatgaggcactgtggtttatcccaactctagcactccttcctgattccggtagtcatcggagcagtcagaaatcaaatcttctggtatgcaaacattctaaatgcatctgaggtgagttcactcaggtttcctcagcagaaaccccaaaattacagaaataacttcttccttcccctctttcttgccttgcaatccctctttcttgatgaaaatagttactacatcagtggtcactttgtttctcattctccagtgtctacgggttattatgacaacttcctccctctggttttagcagtaccatctgacatctataatttctgttacttcttctctttctccttcccctctccatagaaacatgctctgaaataagagaaaaattatgctgtcccctgatcctcttatgtcttcaactgttttccaatggttcttctatccaatttcaatgtagggaactctataagcttgttactaagatcatgaccaaggaccagcagcatcagcaccacctgacaacttactagaaatgcacaatctcaggcctgctgaatcagaaagtgcattttcaatgacaccccactgatctattcaggggtgggacgttctcttctgtcttgagtgcacatgacattaaatgtgtattgccaaattacctgttccagatttcccaccgcccattattcttgtggcaatattcaaaagagaaactttctttttaaatataacctgaatggaaagagaaacaaaatagtcaatacataatatatatttcataggctatgcaataaataattcaaaatataaatgaaagagtaactaccttctgggccgattgtttctgaggagacactgaaaagtaaaagaaatatataattcatcatatgtaaatatgacaaagtcgtccatacattcatgcagtgttagcatcaagctgtatcctcccgcctgcactagtgtaggatttgatgttttacagtttgtgtctttgggacgggaacatgaggaaatacactgaagaaaataggaatacacgcttccagaaaatatacagtcagaaattacaaagaggtattatgcatcatgtgtgtattactgaaataaaaagtgtcaatatcaatgtggatatgcygaatgatgaaaagaaatgtgatctaaaatcagag

SEQ ID NO: 50099 - DNA, 617 bp, Homo sapiens
ccaacattgttggtcagcttacagttagtgtggctggcccagaaacattctgcctcttacaggcagggatgcttgttcctttggcattggggcacccaggggagtgcacaatggggtgtcgatgtgtgaaagagcagatgagcatttttccagggagaaggcctgtagctgccagcagagtcttaggtctgtgactcaaacagtgtttttccactgacatagcgagatgtctactcactactgtagaagccatatcttaaaaaattagtctagccaggcgtggtggctcacacctgtaatcccagcactttgggaggccgagacaggcagatcacctgaggtcaggagtttgagaccagcctggccaacatggtgaaatccggtctctactaaaaatacgaaaatcagctgggcgtggtggcaggcacctgtagtcccagctactcaggaggctgaggcaggagaatctcttgaacccagggggcagaagttgcagtgagctgagatcacaccattgcactccagcctgggtgacaagagcraaactctgtctcaaaaaaaaattaattataaaagtaatatatacttattgtagaatatttggatattataaagaa

SEQ ID NO: 50100 - DNA, 605 bp, Homo sapiens
ccagatagtaacttctatctgtgaaaaggcaaggcacctctctggtgcctgttttataagggcactaaccccattcattagggatgcaccctcataatctaatacctcctaatatcacattggtgatcaggtttcaaaatatgaatttgggggtgggggcacaaacattcagactatagcaagtatttatttactttgagacagggtcttgcactgtcacccaggctggagtgcagtggagcaatctccgcttactgcaacctccgcttcccgggttcaagcaattctcctgcctcagcctcccatgtagcttggactacagttgtgtgccaccacacmcagctaattttttttatttttagtagagacagggtttcaccatgttggccagacacatctcaaactcctgacctgaagtgatctgcctgcctcggcttcccaagtgttgggatacagccctgagccaccatgcccagctacaaatatgtatttaaagattccttcctgtctgtgaatggtggctcacacctatattccaagcactttgggaggctgacttgggaagatcatttgaggccaggggtttgagaccagcctgggcaaca

SEQ ID NO: 50101 - DNA, 605 bp, Homo sapiens
ccagatagtaacttctatctgtgaaaaggcaaggcacctctctggtgcctgttttataagggcactaaccccattcattagggatgcaccctcataatctaatacctcctaatatcacattggtgatcaggtttcaaaatatgaatttgggggtgggggcacaaacattcagactatagcaagtatttatttactttgagacagggtcttgcactgtcacccaggctggagtgcagtggagcaatctccgcttactgcaacctccgcttcccgggttcaagcaattctcctgcctcagcctcccatgtagcttggactacagttgtgtgccaccacacccagctaattttttttatttttagwagagacagggtttcaccatgttggccagacacatctcaaactcctgacctgaagtgatctgcctgcctcggcttcccaagtgttgggatacagccctgagccaccatgcccagctacaaatatgtatttaaagattccttcctgtctgtgaatggtggctcacacctatattccaagcactttgggaggctgacttgggaagatcatttgaggccaggggtttgagaccagcctgggcaaca

SEQ ID NO: 50102 - DNA, 605 bp, Homo sapiens
ccagatagtaacttctatctgtgaaaaggcaaggcacctctctggtgcctgttttataagggcactaaccccattcattagggatgcaccctcataatctaatacctcctaatatcacattggtgatcaggtttcaaaatatgaatttgggggtgggggcacaaacattcagactatagcaagtatttatttactttgagacagggtcttgcactgtcacccaggctggagtgcagtggagcaatctccgcttactgcaacctccgcttcccgggttcaagcaattctcctgcctcagcctcccatgtagcttggactacagttgtgtgccaccacacccagctaattttttttatttttagtagagacagggtttcaccatgttggccagacacatctcaaactcctgacctgaagtgatctgcctgcctcggcttcccargtgttgggatacagccctgagccaccatgcccagctacaaatatgtatttaaagattccttcctgtctgtgaatggtggctcacacctatattccaagcactttgggaggctgacttgggaagatcatttgaggccaggggtttgagaccagcctgggcaaca

SEQ ID NO: 50103 - DNA, 562 bp, Homo sapiens
ttttttctgagacggagtttcactcttgtcacccaggctgggatgcaatggcacgatctcggctaactgcaacatctgcctcctgggttcgagcgactctcccgcctcagcatcccgagtagctgggactacaggcgcccgccaccacgcctagctaatttttgtatttttagtagagacagggtttcaccatgttggccaggctggtctcgaactcctgacctcaagcaatcygctcacttcggcctcccaaagtgttgggattacaggtgtgagccaccatgcctggccgaggacctggtgtttaagaggaatggcacaagtttgcaatggaggtatgtgacttctcccagtcacacactggtctatctctctactctctgcaggacagcctgtcacactgatgcctcctgaagtaaggcagcccaaagtcacagcatcactgacaagggattcctgccaaaaaggtttaacctggaatctaaaccagcctctaacttcaacttctcatttgctaaaaacacagaggagaggggaacaaatttaatgactccatgagaaa

SEQ ID NO: 50104 - DNA, 562 bp, Homo sapiens
ttttttctgagacggagtttcactcttgtcacccaggctgggatgcaatggcacgatctcggctaactgcaacatctgcctcctgggttcgagcgactctcccgcctcagcatcccgagtagctgggactacaggcgcccgccaccacgcctagctaatttttgtatttttagtagagacagggtttcaccatgttggccaggctggtctcgaactcctgacctcaagcaatctrctcacttcggcctcccaaagtgttgggattacaggtgtgagccaccatgcctggccgaggacctggtgtttaagaggaatggcacaagtttgcaatggaggtatgtgacttctcccagtcacacactggtctatctctctactctctgcaggacagcctgtcacactgatgcctcctgaagtaaggcagcccaaagtcacagcatcactgacaagggattcctgccaaaaaggtttaacctggaatctaaaccagcctctaacttcaacttctcatttgctaaaaacacagaggagaggggaacaaatttaatgactccatgagaaa

SEQ ID NO: 50105 - DNA, 1111 bp, Homo sapiens
aggaacagagacctcactgggaactaaattcttttttttttttcggagacacagtcttgctctgttgcccaggttggagtgcagtggtgcaatctggacccactgcagcctttgcctcccaagttcaaatgattctcccgcctcagcctcccaagtagctgggactacaggcaggcaccaccaggcccggataatttttgtattttttgtagagatggggcttcaccatattggccagtctggtctcttactcttagcctcaagcgatctgccctcattgacctcccaaagtgctgggattaaaggtgtgagccaccacgcccggcctggaactaaactcactggcatcttggacattccagcttccagtactctgagaaataaattggttgyttaagctacccacgctatgatactttgttatggaagcccaagcatctaatgcattgccctaaagaagttcttagtttaatggaggagacacacaaataattgataaatgcaatatagtgttaggtgctttgatataagcaggcaaggtactgcagaagcattttggtatcaggagtggttctagaggaacagaatcttaaaaattgtaaaccaaaaattaaattctaagctccccaatcagccgaatggacctctcctctcagtggagaggattccaaagtaaacctgaaaaactagttcaggccatgatgggaaggaggaattggagatgtcttattttaccttactctctctggaattcaggcacaactgaccagcattaacattaaaacagagatcttaagactgacaaaaccgattcttggtaacagtaggataccaaattccaacctgacactagcatagcatcacacgacagatagcgggccctgaaagagattattttaccccaaaatatatttctttgacatattttgaaatggtgaagctgtgtcttgtggggacaatttacactctatagcaaatcctcttctttttccaggtctttttcttttcttttctttttttgagatggagtttcgctctgtcgcccaggctggagtgcagtggcgcaatctcggctcactgcaacctctgcctcccggattcaagtgattct

SEQ ID NO: 50106 - DNA, 2110 bp, Homo sapiens
aaagcatccatagacaatacataatgaatgggtgtgccttgagttccaataaaactatatttacagaaataggtatggccacatttgactcacagcctatattttgacaaccccagctttagagcatctgtattccatgcaaaataccttaatcactatagatttaaaatgccatatgttttcttactatgcttatagtaaattttgtttaaaaatgttgttacctttgaagtttattttatagcatgagatgagattaagattcaaaatttcatttttttgattttttttcccccaaacatggaaccaattgccataacaaattttaccaaagaaaccctctatatttcgtcctctggcataaattttatgccaatatttatcacataataaaatctttttatctttgtatctgttttccaaatgctcttctgtcctgcttctctatttcctttgagcattgctctattttgactactataactgacaataccttaatcagaggtgtccaatattttggcttccctgggccacattggaagaaaaattgtcttaggccacacataacatacactaaaactaatgatagctgatgagctaaaataaataaataagtcttataatattttaagaaagatcgtgaatttgtgtggggtcacattcaaagccgttgtgggctgcatgcagccagtgggccacatgttggggaaacttgccttataaactgataggaaatgtccacaatatttttttcattgtttctcaaaaatttttctagctattttacattttcagatgaactttaatgcattttatgaagttaaaaatgtactaaaatttcaaattatatattgacttatgggaaatttaagaatatgacatatttacaacattgaatttttctatacaagaaaaagaacttttcgtctacccaagaattcttttatgtattttggatcacttaatagagtatcaggtttccgccatatgtattctatacattgcttaatgttttcctggcatcttagtatttttgttattatatgttttagttttttgctgtggctataacaaagtagcacagactgtgtaatttataaagaaaataagtctatatagctcacaattctggaggatggaaagtccaagagcttgatacaggcagctggtgagggccatcttgttatgtcataacatggcagaagacatcacctggcaagaaggcaaaaacaagagagccagagagagcttccttttctaacaaagctattcccacaaatctaattccatggcaacattaatccattcatgaggacacagctgacattaatccattcatgaggacacaacacttatttctaatgtgtaagttttgtaacacatgaaataaatattcttcggcattgcaattataaaaattttattatattttctcattgatcactttggtgtataaaaatgtatatactaattttattcatttaattttaaaaatctattaattgttcaaaagtattgctgaaatttagaatatatacataagttaaaatatgcatataaaatacccatttcctcttacccaaagattagtacagttaatatctaatgttacatgtttccagatgtttttctgtatttatatcaatatctaccaacttatctacatctacaaacatgcatgcatacaatatacccattatatatatcayatgtatgtgtatataccatttaccaaaatgatatcagtcaaatgacatcacacaatatgtgctattttcagtgaatattttccatttttcccagttgagaaattttttatcatctctcatcaaattttcccaattgagcaaaaatgttatttacactggtttacccaatccaggaagcaatcagtgaccacatattatatttggttattgggtcatttaaggctcttttaatctggcagtcttttttcccttcctgttcatggttagctgtcctgccatgtatcccactcttgcaaaatgtttggttgattcttcatgatgctgtttagccttttcttctatctcatatatgaaacaatttttgtaaccagctatctttctgaattccctcattgttttca

SEQ ID NO: 50107 - DNA, 531 bp, Homo sapiens
actgcaacctccatctcctgggttcaagtgattctgctacctcaacctcccaagtagctgggactacaggcacgtgccaccatgcccagctaatttttgtatttttagtagagacagggttkcaccatgttggccaggatggtctcagtctcttgaccttgtgatccgcctgccttggcctcccaaagtgctgggattacaggcgtgagccaccacgcctggcctagtcaaccagaggcttatgctgagggtactgttttgtgtttatagagcatcttcaattctactatctaaagtaggcccgtaagagttcagttgtaaaatatagaatatactctaacaactttaagcagaaggggcttatttcagagtaatagataggtagcttccagaattatcagagacttgaagaaaatgactctaccttaagttttctagaatggcagaaatggaccaccaaagactgctgcttctcctatgacaaggaagcactgcctgatctggaaacttgcattataactgttgacctca

SEQ ID NO: 50108 - DNA, 825 bp, Homo sapiens
cttatcacattaagggtattggctccaggttctgccccatagaaaccgtgggatcttagaaaagttacctattatccttgaatctcacctgtaaaatgggtttggtaaaattcatcctaccagacaactgtaagaattaaagatagaccctgacagtgtgagcatagtgtttggcacagagcaggggcttaataaatgtggaaytggaatcgcaccgtccgcctaggcaaattggccatccaaatagatcccattttttaaggcttaagttcaaactttcattcatgggtcacatatttattgagcaatggctatgtatatcaatgcaaataaagagatgaacaagacctcagcatctacagacggtgacagacatcgattcactaattacataataattaaagtaaaattgtggttggggcagggacatagaagtctatcttccacagctagcccagcctagcccaaccaataaaggcttcctttggaatccctacttattttctgactttggccttttccatttactgtctagtattgctatttaaatgcttcccaagttcacaatcatttcctaaagctgactgtaggcaaggacccgggttcttgggctgcctttgcctttgttccacacagaacaaatatgcgaggctcagtcaagaataaaacacgatgtcagatccacatgtctcttgggaatggcgatttggaaatgctacagtgacttagaggtctccttccaacttagaattatctagtatttagggtttatgaacaaacagctatttgagggtggacagaagccaggatcagggtggggcggga

SEQ ID NO: 50109 - DNA, 825 bp, Homo sapiens
cttatcacattaagggtattggctccaggttctgccccatagaaaccgtgggatcttagaaaagttacctattatccttgaatctcacctgtaaaatgggtttggtaaaattcatcctaccagacaactgtaagaattaaagatagaccctgacagtgtgagcatagtgtttggcacagagcaggggcttaataaatgtggaactggaatcgcaccgtccgcctaggcaaattggccatccaaatagatcccattttttaaggcttaagttcaaactttcattcatgggtcacatatttattgagcartggctatgtatatcaatgcaaataaagagatgaacaagacctcagcatctacagacggtgacagacatcgattcactaattacataataattaaagtaaaattgtggttggggcagggacatagaagtctatcttccacagctagcccagcctagcccaaccaataaaggcttcctttggaatccctacttattttctgactttggccttttccatttactgtctagtattgctatttaaatgcttcccaagttcacaatcatttcctaaagctgactgtaggcaaggacccgggttcttgggctgcctttgcctttgttccacacagaacaaatatgcgaggctcagtcaagaataaaacacgatgtcagatccacatgtctcttgggaatggcgatttggaaatgctacagtgacttagaggtctccttccaacttagaattatctagtatttagggtttatgaacaaacagctatttgagggtggacagaagccaggatcagggtggggcggga

SEQ ID NO: 50110 - DNA, 825 bp, Homo sapiens
cttatcacattaagggtattggctccaggttctgccccatagaaaccgtgggatcttagaaaagttacctattatccttgaatctcacctgtaaaatgggtttggtaaaattcatcctaccagacaactgtaagaattaaagatagaccctgacagtgtgagcatagtgtttggcacagagcaggggcttaataaatgtggaactggaatcgcaccgtccgcctaggcaaattggccatccaaatagatcccattttttaaggcttaagttcaaactttcattcatgggtcacatatttattgagcaatggctatgtatatcaatgcaaataaagagatgaacaagacctcagcatctacagacggtgacagacatcgattcactaattacataataattaaagtaaaattgtggttggggcagggacatagaagtctrtcttccacagctagcccagcctagcccaaccaataaaggcttcctttggaatccctacttattttctgactttggccttttccatttactgtctagtattgctatttaaatgcttcccaagttcacaatcatttcctaaagctgactgtaggcaaggacccgggttcttgggctgcctttgcctttgttccacacagaacaaatatgcgaggctcagtcaagaataaaacacgatgtcagatccacatgtctcttgggaatggcgatttggaaatgctacagtgacttagaggtctccttccaacttagaattatctagtatttagggtttatgaacaaacagctatttgagggtggacagaagccaggatcagggtggggcggga

SEQ ID NO: 50111 - DNA, 825 bp, Homo sapiens
cttatcacattaagggtattggctccaggttctgccccatagaaaccgtgggatcttagaaaagttacctattatccttgaatctcacctgtaaaatgggtttggtaaaattcatcctaccagacaactgtaagaattaaagatagaccctgacagtgtgagcatagtgtttggcacagagcaggggcttaataaatgtggaactggaatcgcaccgtccgcctaggcaaattggccatccaaatagatcccattttttaaggcttaagttcaaactttcattcatgggtcacatatttattgagcaatggctatgtatatcaatgcaaataaagagatgaacaagacctcagcatctacagacggtgacagacatcgattcactaattacataataattaaagtaaaattgtggttggggcagggacatagaagtctatcttccacagctagcccagcctagcccaaccaataaaggcttcctttggaatccctacttattttctgactttggccttttccatttactgtctagtattgctatttaaatgcttcccaagttcacaatcatttcctaaagctgactgtaggcaaggacccgggttcttgggctgcctttgcctttgttccacacagaacaaatatgcgaggctcagtcaagaataaaayacgatgtcagatccacatgtctcttgggaatggcgatttggaaatgctacagtgacttagaggtctccttccaacttagaattatctagtatttagggtttatgaacaaacagctatttgagggtggacagaagccaggatcagggtggggcggga

SEQ ID NO: 50112 - DNA, 1471 bp, Homo sapiens
tgtaggttgctgttcctggctaccagaaggataatggggttaaggcatgtttctctcttctcttgaaggaaaagagcccagaccccaactctgaacaaaacctgctctgatcaaggagcttcctgtctgtctgttccaactggtccggaagaatcaattttattaagtcagaggaaaaggatgcacaaagtagacaatggtgtgtgtgtgtgtgtgtgtgtgtgtgtgtgtgtgtgtgtgtgtgtgtccgtcygtccgtccgtccgtccgtccgtccaggttctgcagggcttcaggacaaagaggaactgaccattcctgaggaaagcccagtcctgggcaccttggcccccctgcaccccaccctctgaaccttgtgaccacattctggtcacaagacagacagcctgagtcctcctcagcctttccaacatcaagctacaaaacggtcacaaaacaaatgtctattctgtagccttaccgtgaagattaacaaaaaaaaaaatattcattaatccttcccccaagcatttcacaggaaagcagactttctggtatcatcttgttatacatctttaagctgattaaaatatcatatcaaggataggcataggctcaagtgggtaagcagaacagatttggagaactgtaaggtccgctttttttttttgagacagagtctcactctgtcacccagacaggagtgcagtggtgcaattatcagcttgctgcaacctccacctcccgggttcaagcgattctcctgcctcagcctcctgagtagctgagattacaggtgcatgccaccatgcccagctaattttttgtatgtttagtagacatgggattttgcaatgttgcccaggctggtctcaaactcctgagctcaggcaatcctcccgcctcggtctccgaaagtgctaggattataggcgcgagccaccacgcccggccaggtctgtatttttcaggtgactctcatctacctccctcttaataattactgagcctgcagacaatccatactaccactcctcaccccaaaacagagaagtgaaaactcccagcttgctcaccccaggtcggctgcctctgtttccagaatgatgctgttggtcttgttgtcgaggacgacgttgcctatgtcgctgccgtagaagctggaccggggggtgctgacgcagctggacaggagggagttcatggccgaggactggttggagccggggatgttcatgggagaaggggtcagagatctctgcttgacaacctggttgatgtttcttactgtctcaaagacacgcttctggtgactagggagaatgcacggcatccgtgagtgagcaaatgcgggcacaaccctggagtttaaccctccaaaaatgatcaactgagccaaaagggcacctggcctatgacgagtcccccagcagcctgctatcctgtgcctgccacctgtttcttagggtat

SEQ ID NO: 50113 - DNA, 1471 bp, Homo sapiens
tgtaggttgctgttcctggctaccagaaggataatggggttaaggcatgtttctctcttctcttgaaggaaaagagcccagaccccaactctgaacaaaacctgctctgatcaaggagcttcctgtctgtctgttccaactggtccggaagaatcaattttattaagtcagaggaaaaggatgcacaaagtagacaatggtgtgtgtgtgtgtgtgtgtgtgtgtgtgtgtgtgtgtgtgtgtgtgtccgtctgtcygtccgtccgtccgtccgtccaggttctgcagggcttcaggacaaagaggaactgaccattcctgaggaaagcccagtcctgggcaccttggcccccctgcaccccaccctctgaaccttgtgaccacattctggtcacaagacagacagcctgagtcctcctcagcctttccaacatcaagctacaaaacggtcacaaaacaaatgtctattctgtagccttaccgtgaagattaacaaaaaaaaaaatattcattaatccttcccccaagcatttcacaggaaagcagactttctggtatcatcttgttatacatctttaagctgattaaaatatcatatcaaggataggcataggctcaagtgggtaagcagaacagatttggagaactgtaaggtccgctttttttttttgagacagagtctcactctgtcacccagacaggagtgcagtggtgcaattatcagcttgctgcaacctccacctcccgggttcaagcgattctcctgcctcagcctcctgagtagctgagattacaggtgcatgccaccatgcccagctaattttttgtatgtttagtagacatgggattttgcaatgttgcccaggctggtctcaaactcctgagctcaggcaatcctcccgcctcggtctccgaaagtgctaggattataggcgcgagccaccacgcccggccaggtctgtatttttcaggtgactctcatctacctccctcttaataattactgagcctgcagacaatccatactaccactcctcaccccaaaacagagaagtgaaaactcccagcttgctcaccccaggtcggctgcctctgtttccagaatgatgctgttggtcttgttgtcgaggacgacgttgcctatgtcgctgccgtagaagctggaccggggggtgctgacgcagctggacaggagggagttcatggccgaggactggttggagccggggatgttcatgggagaaggggtcagagatctctgcttgacaacctggttgatgtttcttactgtctcaaagacacgcttctggtgactagggagaatgcacggcatccgtgagtgagcaaatgcgggcacaaccctggagtttaaccctccaaaaatgatcaactgagccaaaagggcacctggcctatgacgagtcccccagcagcctgctatcctgtgcctgccacctgtttcttagggtat

SEQ ID NO: 50114 - DNA, 565 bp, Homo sapiens
gaggatgaagaggacagattatttgatgtgagcatatagggccctcagctccccaggctgggctcactcagcatggaaggcaggcacatggtttgcaacccctgccatccattctgaggaaatttccatccaagtcaaaggaaggartgaatccaccatctttctgagtatgagagttctagtactgagctcaaagaacccaacatagagtgacagcagagatgccctgcctgaaggtacccctacatcagcaaggcttacagttcccctgtcctgatgaccaggaagaaaggtgaaagggacaggcttgctagcctacagcaatcaagtccacacttcccattcaaccttagtcattgcacagtcttgccctagggcccagtcatgccacctctcgggttcctctcccagcacttccaaccacaccagaggtgactgcttaggtgcagagaagtgcaacatccagatgtgggggtggttggttctagtgggatcatcccagggaggaccaggaaactcccacatcctaggagggaaagtagaggagagggggtaggttgagcct

SEQ ID NO: 50115 - DNA, 630 bp, Homo sapiens
atggctactaagagcaatcactattttttgttcacattaagggcaaaagcacttgactctgccatagcctccctagagccacgtaccaggaagtagacaatagtatttacatggcaaagcgcagtatgcagtctctgtactacccaagagtacaataatttaacaataatccttatcagttaatcaattaattacttaactcaatcaataattcaataatgaaagattattaattttataatattaaataattattattaatatttatttgataatttaatataaaatatttatttttaaaaaaattttaaattttaatattctaaaaatttaatattaactatttaatattaatattattaaataattgttattaatgatgaatagcatagaaatatgctatttctatagcatagaaaaccttggcaataatattcaggacacaggcatggacaaggacttcatgtctaaaacaccaaatgcaatggcaacaaaagccaaaattgataaatgggatctaattaaactaaagagcttctgcacagcaaaagaaactaccatcagagtgaacaggcaacctacagaatgkgagaaaatttttgcaatctactcatctgacaaagggctaat

SEQ ID NO: 50116 - DNA, 631 bp, Homo sapiens
atagcagagaaaaagagttttatttttagtccctgagctgtgtggatatctgtcacattgtcagtcaaataaaatatgtagagatgaagatctaaatttaacatttcaaaattcaagcattgcaattcagggcatacacacagaccccacagaccagatggtctttggtatgtttgaagaacaaagaggaggttggaagttttatgaaaaggagaagtggtgtgtattgtttttccagaaaattgattgacactagtaaggttctggggagctggcttgctctgagtggtgagtgatgaaagtggtgggtaaaactattcttagaatcacagcacgttgtttcagatgattacagaagacagtktcagcagccagggttacagagaatgacattcttggagcaattttatgtgccctgagtgcttttccccactggcttctggactctgggttagttaggtgtcagaagaatgacccagttcatctggtcagttttcacaacgttcagtcatggacatggttctgtatcttaccaagtttcacagtgaacagtgaggagaaatctaaaaagaaagaaaaagagagggaaggagggagggtgggaaggaaaggagaaagggagggagggagg

SEQ ID NO: 50117 - DNA, 631 bp, Homo sapiens
atagcagagaaaaagagttttatttttagtccctgagctgtgtggatatctgtcacattgtcagtcaaataaaatatgtagagatgaagatctaaatttaacatttcaaaattcaagcattgcaattcagggcatacacacagaccccacagaccagatggtctttggtatgtttgaagaacaaagaggaggttggaagttttatgaaaaggagaagtggtgtgtattgtttttccagaaaattgattgacactagtaaggttctggggagctggcttgctctgagtggtgagtgatgaaagtggtgggtaaaactattcttagaatcacagcacgttgtttcagatgattacagaagacagtgtcagcagccagggttacagagaatgacattcttggagcaattttatgtgccctgagtgcttttccccactggcttctggactctgggttagttaggtgtcagaagaatgacccagttcatctggtcagttttcacaacgttcagtcatggacatggttctgtatcttaccaagtttcacagtgaacagtgaggagawatctaaaaagaaagaaaaagagagggaaggagggagggtgggaaggaaaggagaaagggagggagggagg

SEQ ID NO: 50118 - DNA, 539 bp, Homo sapiens
gatccctcctggcacgcggtggagtcmcctgtggatggatccctcatggtacatggcagatccccctgtggatccctcattagactccaggttcattcatcctgcataactgtaactttcaccctttacctctgctgaggtccaggatgttcatcctagcctccttctcattccccttatgtacattcttgttattctgcattgatgagtctgattctcttttcctaccacttcatcacaccctgttctttcctttttctctaagcccaccctgttctctgtcatcaaaaacttcttagttcattttcccctagatttcttgcatcctactctttctgtctactgaggccttcatatcagccaggaatccccatcccaaaagaggcctctctcaccctgacagcttccgggagacccacaggctgcaccccactccctcccgtggttcctggagggtggcctgccccctctttgcaagtcctcaccaaccctgacgtcttgaactccttgaagtcagggtcacaagtctcttgaaactg

SEQ ID NO: 50119 - DNA, 539 bp, Homo sapiens
gatccctcctggcacgcggtggagtcacctgtggatggatccctcatggtacatggcagatccccctgtggatccctcattagactccaggttcattcatcctgcataactgtaactttcaccctttacctctgctgaggtccaggatgttcatcctagcctccttctcattccccttatgtacattcttgttattctgcattgatgagtctgattctcttttcctaccacttcatcacaccctgttctttcctttttctctaagcccaccctgttctctgtcatcaaaamcttcttagttcattttcccctagatttcttgcatcctactctttctgtctactgaggccttcatatcagccaggaatccccatcccaaaagaggcctctctcaccctgacagcttccgggagacccacaggctgcaccccactccctcccgtggttcctggagggtggcctgccccctctttgcaagtcctcaccaaccctgacgtcttgaactccttgaagtcagggtcacaagtctcttgaaactg

SEQ ID NO: 50120 - DNA, 539 bp, Homo sapiens
gatccctcctggcacgcggtggagtcacctgtggatggatccctcatggtacatggcagatccccctgtggatccctcattagactccaggttcattcatcctgcataactgtaactttcaccctttacctctgctgaggtccaggatgttcatcctagcctccttctcattccccttatgtacattcttgttattctgcattgatgagtctgattctcttttcctaccacttcatcacaccctgttctttcctttttctctaagcccaccctgttctctgtcatcaaaaacttcttagttcattttcccctagatttcttgcatcctactctttctgtctactgaggccttcatatcagccaggaatccccatcccraaagaggcctctctcaccctgacagcttccgggagacccacaggctgcaccccactccctcccgtggttcctggagggtggcctgccccctctttgcaagtcctcaccaaccctgacgtcttgaactccttgaagtcagggtcacaagtctcttgaaactg

SEQ ID NO: 50121 - DNA, 539 bp, Homo sapiens
gatccctcctggcacgcggtggagtcacctgtggatggatccctcatggtacatggcagatccccctgtggatccctcattagactccaggttcattcatcctgcataactgtaactttcaccctttacctctgctgaggtccaggatgttcatcctagcctccttctcattccccttatgtacattcttgttattctgcattgatgagtctgattctcttttcctaccacttcatcacaccctgttctttcctttttctctaagcccaccctgttctctgtcatcaaaaacttcttagttcattttcccctagatttcttgcatcctactctttctgtctactgaggccttcatatcagccaggaatccccatcccaaaagaggcctctctcaccctgacagcttccgggagacccacaggctgcaccccactccctcccgtggttcctggagggtggcctgccccctctttgcaagtcctcaccaaccctgacgtcttgaactccttgaagtcagggtcacaagtctctygaaactg

SEQ ID NO: 50122 - DNA, 563 bp, Homo sapiens
tgtggttcacttcttttgtggttcttcagttgcttcaggccatctggatgtatacatgcaggtcacaggggttatgatggcttagcttggccatcatatgtattagaggtatgtgttagaggcctgacacatactacccaaagtgatatacacattcattgcagtctctatcaaaataccaatgacactcttcacagaaatagaaaaaataatcctaaaattatgtgaaaccagtaaagacccagaagagccaaatctaccttaaagcccccctccaacaamaaaaaaaaaaaagctggaggaatcactttacctcactttaaattatactataaagctagagtaaacaaaacagcatagtactagtatataaacagatacatagactatggaacaaaatagagaacccagaaacaaatccacacacctacagtgaactcatttttgacaaaggtgccaagaacatacaccgggggaaaaagtagtctcttcattaaatggtgctgagaaaactggatatccgtatgcagaagaaggaaactagacctttatctcttgccata

SEQ ID NO: 50123 - DNA, 563 bp, Homo sapiens
tgtggttcacttcttttgtggttcttcagttgcttcaggccatctggatgtatacatgcaggtcacaggggttatgatggcttagcttggccatcatatgtattagaggtatgtgttagaggcctgacacatactacccaaagtgatatacacattcattgcagtctctatcaaaataccaatgacactcttcacagaaatagaaaaaataatcctaaaattatgtgaaaccagtaaagacccagaagagccaaatctaccttaaagcccccctccaacaaaaaaaaaaaaaaarctggaggaatcactttacctcactttaaattatactataaagctagagtaaacaaaacagcatagtactagtatataaacagatacatagactatggaacaaaatagagaacccagaaacaaatccacacacctacagtgaactcatttttgacaaaggtgccaagaacatacaccgggggaaaaagtagtctcttcattaaatggtgctgagaaaactggatatccgtatgcagaagaaggaaactagacctttatctcttgccata

SEQ ID NO: 50124 - DNA, 645 bp, Homo sapiens
ttttagaattaacaagattggaagattgctgacataaaaatcaatttttagtagtctattaaattcacacaaaacagcaaaacgagtgtagaaaagtgttattaagagcacattttagtgtattttttgcaattttgcaactaaaatttaaaagtagctagaacaagactaagagaagaattgcattttatggcaaaattatttaaaaattgttgaaaaccataaaagacctaaaaataaagaggaagagaatatatctatggatcagaagactcaatatggtaaaggtagaaaatcacctctattttaatcaatatgtaaattcaagtgattccaagtaaagttgcaaaaaatactttcaaaaaaattggcagctataatatttgtatggagccaggcatggtggtacactcctgtagtctcacctactcaagaggctgaggcagaaggattgtttgaacccaggaatttgagatcagcattgggcaacatagcaaaccctcrtctcaaaaaagtaaaaaattacaaagaaaaaagatgaatacagtaaataactataaaatgtgaatatgagttataataaaaaatcaagacataatcaaatatggtatgtaaaatagtgtaactttatcctgattaaacaat

SEQ ID NO: 50125 - DNA, 628 bp, Homo sapiens
aaaaatattttatttggtttggctctgtgtccccacccacatctcaccttcaattgtaataacccccacatgtcaagggccagaccaggtggagataattaaatcatgaggttggttttccccatactgttcttgtgatagtgagtgagtttgcacgagatctgatggttttattaagggcttccctttttgctcgactctcgtactctctcctgctgccctgtgaaggggtgccttctgcmagtttcccgaggcctccccagccatgtggaactgtgagtcaattaaatctcttttctttataaattactgagtctcagatatttcttcatagcagagtgagaatggactaatataatattattgtccaatttgattactatctttgtcaattcagcctaacaaacatgttttaaagactcttgtatattgatgaatgttcttggttctgtgataggtcagaattcttcatgagaagtataaaatgttctaaaaaactaactattacacaagtccgtatatgaaagttgcctaagcagatgtatagtcttagcatactatgctatgaaaatagtttatatgctttcataaaattatacaaagtccatatgtaaacttactggaattt

SEQ ID NO: 50126 - DNA, 561 bp, Homo sapiens
atgttgtcgcatggctactcttagctatgaaagagtctgagaggtgtacccttttagctggacatactgccaacccttaacaaaatcaccattctattactaaagtgaaaatatatattggagagacaactggcaagwccaccacaacagctgagctgaccataccacacacaactacaagcagcagccaaaacaacgagcctgccattcagtgcaagtgttgtcatctacaggacagctgtgtgaagaacacgggcactttatgttaatgtattatacaaatgtataatgctcatatgtttgtatgtgggttagatttgtcagtagttcagtttttcaaacctataaaatggatctaagcagagttggaattatttggtgcagagaacaggcaaataacgctccttaaaatgtgggatgtgcagctaatttaagttttctcctcagctgcccatagcctaccacttgtgattatttgatcccataattacccaatttccagttccattcaaaggaatggttatggaacaacataatagctcttggagtcctggccacagg

SEQ ID NO: 50127 - DNA, 490 bp, Homo sapiens
ggaaagctgatttgtaaatatggaaaatacaacccataagaaatgggagataatttagacccagtgttggcaacctctcagaggtggcacgccaagggagtgtttattcactcttgtgagcaggcagtacagctgccctagcttcaagaaawaactcatgttttttgagttcctactatgcactgatcagtgtgctaacttgtggggggaggaaggagagtggtccctaccttttgaagaccttctaatttgtggcgatgggcaggggagtgcaccaatactataaagcagtagttctcacactcaagtgtgcatcagaaacataggacccgaaccccaccttcagagtttataactcattaggtctgggatagaggcggtgcatctgcattgccatcttgttcccaagtgatctgattctgctgcctgcatactttgagaaccccgctctaagaaaataagtacaaggggcaggcaaggagggttcaat

SEQ ID NO: 50128 - DNA, 653 bp, Homo sapiens
gactatgccaatatatataattaaatttaaatttctgaatcctgcagaatgactccaaggaattattatttcaaaatgacaaaaaaagttttggaaataggcctttctatccaatttttaggatacatatattttgtgaatggcttttcctaggaacagaaaatatctgatggtcaggcttcttgtattcaattactagtgttcctgcttatattacaatggacaaatttcactaagggcaggaagtgtggtcattaccagtttcacctgctgggaaaaaagctagcacagtgcctgcacattgtggagctaccataaatgtttgctgatgttcaatctggaatatctgaaaataattataaacaccaatgctgatcaacagaaatataatgtgagccacacatgcaatttctaatattttagtattcacacttaaaaagtaaagaaagataaaattaattttaataatctattatcagcctgacatgaagacaaaataaaaaattattgacaaattttacattcattttttcatactaagtcttcaaaatgcagtgcatattttwtactcacagcatacacttcaagagctcagtggctacatgtggctaggggataccatgttagacagcaagggtataaactaacgaaca

SEQ ID NO: 50129 - DNA, 634 bp, Homo sapiens
gatctcagctcactgcagcctccgcctcctgggttcaaatgattgtcctgcctcagcctccaaagtagctaggatcacaggtgctcaccactttgccaccactcccggctcatttctgtatttttagtagaggtagggtttcactatgttggccaggctggtcttgaaattatgacctcaagtaatcttcccaccttggcctcccaaagtactgggattacacgtgtgagccacgcgcccagcctggggcatgcattctgtccagggttttagttgtattcagtggaaggaacaggtaatggtattcagwggaaggaacaggtaatgtcacgtttcatggaccgtgggtgatggtagcaaacattgaatgctttccctgtaccaagcactgttcaaaatgctgtatgtgttttaattcattttacttttaaacagctctgtgaggtagagactgtggttatctccattttatatttgggcaaagtaaggcattacaaagttaaggaatgtgtaagaagggcacactgataggcaagaggtaacgtcagagttgttacctagtgtgactgtctccagggtccgttataaccaccagaataacactgcctgtatatcattgttttaacatttatta

SEQ ID NO: 50130 - DNA, 549 bp, Homo sapiens
tcacaggccacctggtagtacaaaataagagcaaataccttttccttagttttccaaagcctttctgaaatgctttatattaaagcacataagtgtggggcttggggtgggggagtttcaacyatacagaaaaatgctatctttcatattgtcacctactacacagttttaaactgtttcaaactataccagagcacacttaatagttttatgttacaatagtccttagtatagttttatgttacaatagtccttagtgtgtttcagcatagaaacatcagaggttttaacataattaatactgagaagtttaatttctaccacaaattgaattaatacctttaagatataaaggtaaaacactgccaaaattttggcaataactctaccaaattttcttctctgtgtcagagtctagctttctgacagtaaattatcaactaaacttcccttatacgatcagatgtaagaaacgctttgattttccaaatatgtttttcttcagtaatattatcagtaaatcctagattccttaattaagataaatca

SEQ ID NO: 50131 - DNA, 549 bp, Homo sapiens
tcacaggccacctggtagtacaaaataagagcaaataccttttccttagttttccaaagcctttctgaaatgctttatattaaagcacataagtgtggggcttggggtgggggagtttcaaccatacagaaaaatgctatctttcatattgtcacctactacacagttttaaactgtttcaaactataccagagcacacttaatagttttatgttacaatagtccttagtatagttttatgttacaatagtccttagtgtgtttcagcatagaaacatcagaggttttaacataattaatactgagaagtttaatttctaccacaaattgaattaatacctttaagatataaaggwaaaacactgccaaaattttggcaataactctaccaaattttcttctctgtgtcagagtctagctttctgacagtaaattatcaactaaacttcccttatacgatcagatgtaagaaacgctttgattttccaaatatgtttttcttcagtaatattatcagtaaatcctagattccttaattaagataaatca

SEQ ID NO: 50132 - DNA, 549 bp, Homo sapiens
tcacaggccacctggtagtacaaaataagagcaaataccttttccttagttttccaaagcctttctgaaatgctttatattaaagcacataagtgtggggcttggggtgggggagtttcaaccatacagaaaaatgctatctttcatattgtcacctactacacagttttaaactgtttcaaactataccagagcacacttaatagttttatgttacaatagtccttagtatagttttatgttacaatagtccttagtgtgtttcagcatagaaacatcagaggttttaacataattaatactgagaagtttaatttctaccacaaattgaattaatacctttaagatataaaggtaaaacactgccaaaattttggcaataactctaccaaattttcttctctgtgtcagagtctagctttctgacagtaaattatsaactaaacttcccttatacgatcagatgtaagaaacgctttgattttccaaatatgtttttcttcagtaatattatcagtaaatcctagattccttaattaagataaatca

SEQ ID NO: 50133 - DNA, 1510 bp, Homo sapiens
attgatttytttttcagattaaacattactaatgtatagaaatgctagtgacttttacacatcagttttatatctgaaactttactgaagttctttatcaggcctaaaggtcttttggcagaatctttagggttttctatgtaatgaatcatattgtcaatgaagaaagataatttgacttatttttttcccctttggatgccttttatttctttctcttgcctggcagaaaagaaaactaagattaacaacttgctgaagttatcagagttaggaagtaggagaattataatctataaaccctaattgattaattgtacattatatatctgtttcaggtgggggctttttcattagtaggaggcaaactacccccaaaacttagtgtcttaaagcagcaaccacttatttgctcacaattcagtcagttacttgggctggactcatctggacagttctactagtcttgcctagattaccatggtgattgcagctatcttgtggtccaactgtgtcaggattagctaagatggtttcaactaacatgcctgaagataggtgctggcttgctactaggctatcctctgtgcatattgttttacatagcatctgtattccaagagggagagataagatgttccaagactcttgaggtttattctggtaactcccctaatatgacttctcccacatgttattgatcaaaacaaatcacaaggccagcctagattttaaatctgggaagtagatttaaactctagagaggatgagctgcaaagcatttgtggccttttatcatttatcacaatttccgcacttgccagagaatgaagttagatgccaagtaattttcccagttactgcattgggttcctgggccacttctggactaatgcccttctgcacccttgcacacatttgaaaagcagagagtaggctaaattacagattccagttgcccattcccctccagctggctggaagcctattgatatggcacaaactacacaagcacatgcaatactcctaaatctactgattttgtctgttggttggttaatttggaaaatatttatgttttatttcaaaataaattacttgtaaacgttgtataagaaaacacttgccagagcctggcatagcaggcactctaaatgttgctatatatttctttttctaagcgtagcttcccttgaatgaaaattcagtcactaaaccagcaacagatagatgctgtctgctcatgtgtgcacagacacacttatcctgctgtaatcatgcctcaatttatcaatctacctgggaaagctggagccatgcctactctaattttatcatggaatgaaaaactctactgagggtaatttatacaccaaatatggtacataacaagcatctgaataggtaaaaatattaccattttagagcagaatattttggttaaaaccagtgtcttgtttgtgtcaatcacagaatctgggcctataaaatgccacaaaaaaatgatcac

SEQ ID NO: 50134 - DNA, 545 bp, Homo sapiens
tgtcccgcatcttttccttccgatttatttttgctaaactactccatttttaagtcatatctgtattcttgaattttactccatccttaacagtcattagaataattgcacctttttttttttttgcaccgtgcttttttttttwttattattattccatcctcacccttgatatctaggaacctagttctgtaatattgtctcctatcagagtcctggccaatagacggcagctgcccctgagagtcttgatgatgctcatgtccctttcattagtgaatttcttattgcttcagtaaatgagtgcccttttatggaaaaatttctgctttataatatgttttgatgtttagtaacattaatcctaccatttttgtctcttttttcacaatttttgtatttccattttaactttagattctgtttttctttctttattttttgagatggagtcttgctctgtcgtccaggttggagtgcagcagtgtgatctaagcgcactgcaacctccacctcctgggttcaagcaattctttcacctcagc

SEQ ID NO: 50135 - DNA, 545 bp, Homo sapiens
tgtcccgcatcttttccttccgatttatttttgctaaactactccatttttaagtcatatctgtattcttgaattttactccatccttaacagtcattagaataattgcacctttttttttttttgcaccgtgcttttttttttattattattattccatcctcacccttgatatctaggaacctagttctgtaatattgtctcctatcasagtcctggccaatagacggcagctgcccctgagagtcttgatgatgctcatgtccctttcattagtgaatttcttattgcttcagtaaatgagtgcccttttatggaaaaatttctgctttataatatgttttgatgtttagtaacattaatcctaccatttttgtctcttttttcacaatttttgtatttccattttaactttagattctgtttttctttctttattttttgagatggagtcttgctctgtcgtccaggttggagtgcagcagtgtgatctaagcgcactgcaacctccacctcctgggttcaagcaattctttcacctcagc

SEQ ID NO: 50136 - DNA, 545 bp, Homo sapiens
tgtcccgcatcttttccttccgatttatttttgctaaactactccatttttaagtcatatctgtattcttgaattttactccatccttaacagtcattagaataattgcacctttttttttttttgcaccgtgcttttttttttattattattattccatcctcacccttgatatctaggaacctagttctgtaatattgtctcctatcagagtcctggccaatagacggcagctgcccctgagagtcttgatgatgctcatgtccctttcattagtgaatttcttattgyttcagtaaatgagtgcccttttatggaaaaatttctgctttataatatgttttgatgtttagtaacattaatcctaccatttttgtctcttttttcacaatttttgtatttccattttaactttagattctgtttttctttctttattttttgagatggagtcttgctctgtcgtccaggttggagtgcagcagtgtgatctaagcgcactgcaacctccacctcctgggttcaagcaattctttcacctcagc

SEQ ID NO: 50137 - DNA, 545 bp, Homo sapiens
tgtcccgcatcttttccttccgatttatttttgctaaactactccatttttaagtcatatctgtattcttgaattttactccatccttaacagtcattagaataattgcacctttttttttttttgcaccgtgcttttttttttattattattattccatcctcacccttgatatctaggaacctagttctgtaatattgtctcctatcagagtcctggccaatagacggcagctgcccctgagagtcttgatgatgctcatgtccctttcattagtgaatttcttattgcttcagtaaatgagtgcccttttatggaaaaatttctgctttataatatgttttgatgtttagtaacattaatcctaccatttttgtctcttttttcacaatttttrtatttccattttaactttagattctgtttttctttctttattttttgagatggagtcttgctctgtcgtccaggttggagtgcagcagtgtgatctaagcgcactgcaacctccacctcctgggttcaagcaattctttcacctcagc

SEQ ID NO: 50138 - DNA, 431 bp, Homo sapiens
aacctgggaggcggaggttgcagtgagccgagatcacgccactgcaccccagcctgggtggtagagggagactccgtttcaaaaataacaaaggtttgaaactttaaaatttttaaattttgatatctgaactcttaccagtcatatgttagtgctgcatatctcatgacatatgattctatcagggtaattgagaattcctttcccaggctaccgcttaggtaaattgaagagagactgtgcaccagaagtgtcaaagattgatgggcacatgatatttatgaatccagtctatgtctaggactaagaactgataacaggtactgtgagttttcaaactatatscccttggcactcaatgccttgagaaggcaaatactttcaggttttactccaaaggttttttatggctacagggtcttgaggaaggg

SEQ ID NO: 50139 - DNA, 647 bp, Homo sapiens
aaatacagatccacttgctttaagcctctcaaaaggctcttcactaagtagcctttgggtcaagtccaaagtctttaacatgatctgacacttacctgtttaattcatcttcccagattcatctttcattctcctaattttatgttccaggcatattaaacttttcctgggtcctcaattatgatatgctcatcgtgcccacaagtctttgtgcttgctgttccctctgccacctgccattttccctttactttgctgactcctattagcccttaggacttattttaaaggtcactgcctctgggaaacctttcctgattgtctaggctmcgttagattctgtttgtcatggtgtattgctttagcataacatgtttcttagaaagagtatctattacatcacagtgtgtatgcccaaggaggtcagacaccacggcagtcctatccaacagagactactcaatgcttagtgcaatgcctgacactccacagaaggcactcattttatatttcttaaatgttaaatgaattcaaggcatgttccttgccagtgagtctccctgagtctctcttagtagatgggtatataactgattagtagatatataataattatgcaaacattatcaagtgttatgcaccatgaa

SEQ ID NO: 50140 - DNA, 600 bp, Homo sapiens
ttggtcatctaatccgaaaatagtttagggtgcttaaaaggcttttaagcatcagtcatacaccaaagatctttattcactggagccaagaggcagaaagtaagttccagttttyatttattcatcatttcactctgcccttggactcaaaagagcccatgccacctcctgatggaaaagcccaagttacgtttgggaattataatttctctttttctgattctacttactggcagggtaaaatatgtagaaaaaaagtgttcctccatttgccttcttaaatactttctcttgtttataaacctaacaatcatctatcagcaatgctgtttctaccctgccagaacaaggcctcaggaaaccatttcctctggagcaattccagaagggctcagtgagcactcaataccttttacactgatggactgtatgggtttcttgctctcagcccctgtaggatttgcacattttgttttcatgcccatcactcatggacagaagtaaaaatatgctatttacctctttccacttatgtagacctcacattttgtttcaccttagtggcagtgaggggggagttttgttcacatttagcaagtc

SEQ ID NO: 50141 - DNA, 600 bp, Homo sapiens
ttggtcatctaatccgaaaatagtttagggtgcttaaaaggcttttaagcatcagtcatacaccaaagatctttattcactggagccaagaggcagaaagtaagttccagttttcatttattcatcatttcactctgcccttggaytcaaaagagcccatgccacctcctgatggaaaagcccaagttacgtttgggaattataatttctctttttctgattctacttactggcagggtaaaatatgtagaaaaaaagtgttcctccatttgccttcttaaatactttctcttgtttataaacctaacaatcatctatcagcaatgctgtttctaccctgccagaacaaggcctcaggaaaccatttcctctggagcaattccagaagggctcagtgagcactcaataccttttacactgatggactgtatgggtttcttgctctcagcccctgtaggatttgcacattttgttttcatgcccatcactcatggacagaagtaaaaatatgctatttacctctttccacttatgtagacctcacattttgtttcaccttagtggcagtgaggggggagttttgttcacatttagcaagtc

SEQ ID NO: 50142 - DNA, 589 bp, Homo sapiens
tttttctcagcaatatgaattaaacatttactcttttccctgtgatgtttatgcctcttgtatcayttgaaaatgtacatacgcatattgtgtctgtgtgtgtgatatttgtttcattgctttctgttttattaatctatttgcctataaacagatcagtactacattttttattaatatatttttatagcttgtattagtatctggttagtctttaacttctattttattatttcttaagtagcctttgctattcatgaaactttgtctctcataaacattttagaatcagttttcaagtctgccttcaaaggtttgctatattttgagcagaattgttttgaatttttaattcttctggaaaaaaattaacatctttacaatgtttcataatttaattgacaaagacagtattgttctccctttgttctgatacttctttttataagtttaataattttttaaattgtttctatagagtcattttgcatttttaataaggtaaatcctagagagcttatacatttttaatgttcttattaaaatagtatttttattttctgtatatccttaataaagaaatttggcc

SEQ ID NO: 50143 - DNA, 614 bp, Homo sapiens
ttctttctgtaataacaactccctcagaataacactcccacttccttcatctgtattaccctgaaattttcaactggaaaagacagatgttgtcatacttttataaatcttattcttaaattacttgtaaaaaccctataaaacctgtgccttatttgaaccatctacatatttaaaaacctcttcaggtgtgccaatatcctaggagtttcaaaacaaactaatatgactattaatatacaactgacataaatctataatttcaggttgattattcatacaaaaatgaagtttaaacttggcagggattgtggctttgtctagctactcaataaagcactgtmtgtaattgtaaatcctttctcctgcataccttcagtgcaaatgtatatcatggacagaccctctttaaggtgcatatatccacattgcatgacgttgttagggaagactcttagttttcttttagtcttcactaggaacagtggagaatattttaaaaacaaccaactatcttaccagctgaaaataagacttttatataagccatgccatgaatttgaagaaacatttgtttttgggaaatatctcaaaataaatggttccatgctttt

SEQ ID NO: 50144 - DNA, 1729 bp, Homo sapiens
caacaatcccttcttggcctgtgtggatatagcagatgaggcctctgttaatctcatcctgggtaaagttcattcccagagtaagattgttcctcacttctcctctgggttttctcagcctctgtagaagcccttgttgaggcccagaatggaggacaaaactgaggcttttatcatctgagtcaagatctgtggccttgagkatccgatttgtgatgatctcagagtgtcctttctctaccttcagcccattgttgacagtcaggtgaggagtttcatcatccactagggtcactacaatgggtaccttcctgtgggttgtgtgcttgccgtcactcagccagacctcaaaactgtcctcttttgtctctgagtcatcatgctcatacacaatggtggaggcctcctggatctccttgagggtgaagctgtggatgggctggctgcctgtagccagctgctgtatgattcgtccatgccgagggagggctgtgagttgaaagtggagctcatttggtggcaggtcagcatctgctccattaagcagctgggtgtctatgaccaggctcatcccctctagtaccttaaactcatgggcaaaaagtttaggctgctcatcattggtgggtaggatgattatagggaagaagacatttggggagaagttgatgccatcagagcaataaaaggtgaattggtcctcttgtggctctactcccttgtgaatactctgtacataattgatatgcctcacttggatatctctgagggagaaagcactgatagggctaccagactgggacatttttgaaccaggagctgatgcaatcttttccaggtagccagaggctggctgactagtcactgtgcagaggagttcatcttgatgagtgtccacatcttcaacatggagatgttgtaaggtcaaggagttcttctcaccttcatagacaatgaaggactccccgacgaagaccttgggtcccacattgtccacaggcagcacagttacttgtacctgtactttctctattatgctattccccactacccattggtaagaatctttggagaggatgaggctgaaggcatcgtgctgcttttgaaaaccaacttcacctgcagtgtgggcataggctactctcccattgatgagatcctcttgggtgaatcgttctgtgggcaaaccatttaccagaatagtgcccagtttggggctgtcctttacaatgaaagacagcatcaagtcacctacatccttccttttgccatggatgacacccatggtaatttcagtggctttattctctagtacgtctatagaaacatccaataatgaactacttctgagagagatcctaggacttctgttagccacattgggatgcacagaaattgggatggtgatgggtatatggtgcaccccatcacttacttccagatggaaagtgtcactggtagtcgtctggtctctgccatgctggtaagagacactcccgttaataacatcagcttgcatgaaagattcccctgggaccatacatcttttaaagtactgcaagtgtccatgttggggaccccggactaatatgaagacaatttggtcaatgtctgtgtctgggtctgtaacatgcagctcattactgctgaggttaaagctgcctccctctaagatagcaaagcctctgttggtgacttctgggggctggttgtccacaggttgcaggaa

SEQ ID NO: 50145 - DNA, 611 bp, Homo sapiens
tgtgtatgaagggagtgaagggtattagcattccagcaatagctgatctctccttctgagcctggagacaactcagtatcaccttatgttaatctctaggtcaatgcaattagtttcaccctgagaaaaactgctttctttaaatttatataacttaacaccacaagctagaagtcagcagaagttaaatttcgatttataaaagtatacttttaatcatcttgcagtataaagaaagaagcttagaggttctttataccaaagctaggcagaagaaaatcttcctgagtacaagatttgctcaatgcagtagactatttctgtgaagaagatcggataattcttatttatgaaagtctgggtaccatttaggatatgtacagctacagaatctttaaatccttcagacactggcttcagaaacaggaacttacagacttatgtaagaagaaacagaggtggagagtaggttcaggacaacttaacagattggtttgatgatattagagcttccagtcagcttctctgtgarcttccctcaaggttttaaaatgactgctagctaataagcatcatatgctaaaaaaatagagtgggtgggggggatttta

SEQ ID NO: 50146 - DNA, 580 bp, Homo sapiens
tgctcaaagtgtccccgatttggccaggtaggagcccctttatacaggatcgtatgtccttttgatcatatccttactttccttactttttggcaaaacaggttgttgcaggctcatgctgtagtttcttgctccagtcctggaattagccatttctcctaggagctctggtttaatacattcttttgccttcgggctgaattgtattaatttagatgaaaatgtagcccgtaagctcaataactcaggtttaataatattttcatgtgcactctgaggaactgtggacccaaacatatattactgactcttacatgagaattccaagttgatgatattataacgtatcataatttggaaaattgactgatacacaaaaattgcattgttcattaattgaccacctcaagccatttaagtggtattcatcataacagaaaagaygttacctgcagattccaccttatacaaaacaggcacataattatcatacactagacactaattcctggaagctttttttttttccaggaagaaaattataaatgaatggtgagacatagagaccatcaattcctgt

SEQ ID NO: 50147 - DNA, 612 bp, Homo sapiens
ccggaaagcagaggttttaacttattaaactgagagagacattggcattaaaaaaaaaaaattcattcatttactcagcaagtgctgatgctagccagaaactgtgctagatgtttacattataataaaaattgcatggaaattacaatctaagagataactcaaatgagttaatacttacaaactgaagggcaagctgtagtgaaagttacaatagaggatcctgggatctgagggatgcaagaagaaggcaaatggatataccaaagcatcaccttgaatttgttataaaatcccccacaagctgtggtatgaagggcccaagagttgctcttctgcttcagaaccagccatccatgaactctcatgctcttgtagaaaagactacgctgaaakgctcaccccaggtgttcagagggtttcccatttggcctaacattccaggaagctcaagctgatgctattactggagattgaagattctttgagtagcacggtatacagcaggcttcgaggagtgtccaatatgtttttgtatttcaactctctccaaaggttgtgcaatcttgttcaatttacttaacttactgtcataattttttctttgtataa

SEQ ID NO: 50148 - DNA, 634 bp, Homo sapiens
actaatataggttacaataaaaattaagcaaggtaaaggtgagtaggagaccacacaggtattttagatagggaggtctcaggggcctgtgtgaggacgtgacatttgggcacagactggcatgaagtgagggaacaagccattcagtgatataragcaaaactatcacaggagaatccagagtgaaggcaaagtcacagaggctgaaacatgtttcctatatccaggagcaacctgagaggatcccatgccgggacaggtgtgactacaacagaatgagagcaagagagagtgacagcagatgaagtctgagaattagccaacagctaccaggtaagttcctgggaaacaaagttctatgtcggagcagaactcacagcaagagatgaattaggtgaagcatcccttttattgtgtcccaattaaagttgttctagtggctctagatcagtgcttttcaaaggttaatatgtatatgaattacctgaggatcttatgaaatgccacttctgattatctaagtctggggtgggttgtgatcacagaacaagcttctatactgttgttcctggtctactttgaggtgcaaggctccagagtatagatcatcatcagactgaagtccacactcctt

SEQ ID NO: 50149 - DNA, 581 bp, Homo sapiens
ttgttgtttttaacatgaactgactcaagttaagctcttgtaattagatcatcagaagaatcctgagctgttgttacatcaagtacacttaatttttcaattagcaccatggttgattcatgttaaacgtgcccgtttatatgttcctcattaccatttctgtcttagttaaaggaatttatctttcagtttgttayattagaagggcataggacttggaatctgatcaagaaggcttgggcttcactatttatacaaactctgagatccaaatcacacaccttagatcagcccattgtgttcataatagctgtgcaagtatttaaaaagttatcatgttatctatgacatttcatgtgatttcatatgtctttacgtcttatcagtaatataagcataaccataagccagatagaggaacctgtctggtacagtccgaagctttaatggaagtggaatccattcagcctcggaggtcttcagtgagactccaggaggcacaaggtcaaagaatgaatttggaggaatctttagaatggatttggaggaaactttagaatggatttggaggagttcattat

SEQ ID NO: 50150 - DNA, 581 bp, Homo sapiens
ttgttgtttttaacatgaactgactcaagttaagctcttgtaattagatcatcagaagaatcctgagctgttgttacatcaagtacacttaatttttcaattagcaccatggttgattcatgttaaacgtgcccgtttatatgttcctcattaccatttctgtcttagttaaaggaatttatctttcagtttgttatattagaagggcataggacttggaatctgatcaagaaggcttgggcttcactatttatacaaactctgagatccaaatcacacaccttagatcagcccattgtgttcrtaatagctgtgcaagtatttaaaaagttatcatgttatctatgacatttcatgtgatttcatatgtctttacgtcttatcagtaatataagcataaccataagccagatagaggaacctgtctggtacagtccgaagctttaatggaagtggaatccattcagcctcggaggtcttcagtgagactccaggaggcacaaggtcaaagaatgaatttggaggaatctttagaatggatttggaggaaactttagaatggatttggaggagttcattat

SEQ ID NO: 50151 - DNA, 550 bp, Homo sapiens
ccctaaccctgtagcattgtcmtaaatgttccttggatttttcacctctaacctgcctcttgcagaattcatagatccctagaggagcagaagctccaaatatgagatttgtctctctggacttgcctttctttcccaagtcctaagcccttagtttttctctgcctttttatctctctgatgccttgaagattttttttcctaattttgttcatctttttacagttgagaagtgagtttaatttcctcatctatcatggctagaagtgaaagttctaagttctatttttattttcttcccaactatttatttaaaaatgacactttttagaatgagattcagtcatctgcaacaacatggatggaactggagcacatgttaagtgaaataagccagacatagagagagaaatatcacatgttctcacttatttacaagatctaaaaatcaaaacatttgagaacccatggagacagagagtagaaggatgattatcagaggctgggaagggtagtgcaggaattgtgggggagtaggagggaggtgggg

SEQ ID NO: 50152 - DNA, 550 bp, Homo sapiens
ccctaaccctgtagcattgtcctaaatgttccttggatttttcacctctaacctgcctcttgcagaattcatagatccctagaggagcagaagctccaaatatgagatttgtctctctggacttgcctttctttcccaagtcctaagcccttagtttttctctgcctttttatctctctgatgccttgaagattttttttcctaattttgttcatctttttacagttgagaagtgagtttaatttcctcatctatcatggctagaagtgaaagttctaagttctatttttattttcttcccaactatttatttaaaaatkacactttttagaatgagattcagtcatctgcaacaacatggatggaactggagcacatgttaagtgaaataagccagacatagagagagaaatatcacatgttctcacttatttacaagatctaaaaatcaaaacatttgagaacccatggagacagagagtagaaggatgattatcagaggctgggaagggtagtgcaggaattgtgggggagtaggagggaggtgggg

SEQ ID NO: 50153 - DNA, 1885 bp, Homo sapiens
tcttaaggtcagctgattagcagcattaatttttatttgcaatcttaatttacctttgtcatattcacaggttctaggaattacgatgtggacagctttggaggggaaacattattttctgtttaccccaatatgtaaactcctttaatccacacaacaacgtcattaacagatgaaaaaaattgaggcatggaaagctaatgcaactttcccaagatcacacagctagtaagaccagcagtctcactctagagaatatattctttacctatttgctatattttatagcatgtatactatacacactttaatggaaaaaaggagtttaagaatagaggaatatgtaggctaaagtagttagtgcagtttcctaaaaggtttgagcctagaatgatagatgtgtccatctaacatttgtaagtacctagtatctaccaagctaggtgccggggaaccaacaggaagtgagacatggtttgtaaccccaaaacttttacaattgcctagaagaattggaagagaaatgaacaaataagtatgaaacaggaggtatattctgttacagaagtatgttcaggatggtgagacgacaaatgggaaggaggcctgaactctacctgacaagaagatgtggttttaatttttcccagctgcctttccaggcatagctcagtatttgtttttttacaactcatccaaagcactctttttgcagctgcacaaagaaatgtaatttctgcttttgctctggtcattttccagccctggcaggccctccttctgcttctagttgtggaattctacccaacttttaatattgagagttctgtacctgtgtgtatcttcctgagtggatggttgactctgttcggaaaggactcaagttcctgaggcctgatggtgcttgtcacctatgggttcttaataaacattgaaataataaatggatgaaaggaggtcacctcagatcccactgagatctcatttgcctcctaatttgtgaaggactcgttggacatccttcgttgtttggtttatcaattttataggtgtttctgtcttacccccctctccacttctaaaccatctctgtgaagacagagatcacaacttccaagttttgctagtcaactctcaaatgattgttaaattccaaatgatttattctagactcagtaaatagtattctgcccaagagtaaccttcatcctaaaaggtgaaatttatcttagaatgaaagtgatgatgataaatttccttcattcatctcttcactcatcctagaatgaagtaaaacttatttgacataaaactaatgctgatagggtcaccacctctgattacgcaggttgtttgttgttcacaggtgcctggcatgggaggagaatggggataaaatccatcctgtgttcctctccccaagctatgagaccctggggttcacgtgcacacagaaagctgtgtctttttctaatttgcccaaaggtgccctctctttactaagctctgagtccatggagctgcattcacctggaatttgcctttttctaattcacccaaagatgccatatgaatagtagcagaggctctgtcttctgatgattaaaaagtgctttaggctctttcattgcccttataaaaagccacagctacccttatgctacagaaaaattattagaatgtaaatcttggggaaaagggcctttaattgttttgaccagtgccatatttaaaaataaaatttttattgactttggcacaaaaaaatattatttcccaaaacctacgggtatctattacttgattcactttattctataatgtygattccccttattgccatgaatgaagttcatttgcaaacaagaaaaaagaacaatagaat

SEQ ID NO: 50154 - DNA, 1317 bp, Homo sapiens
ttctttgaacccttacaggatctagctgactttctgtccgaccactcctggacggtgatctgctcctgaggccccccgatggagtactggtcttcaaaggtggagttttgaggaatgtcaagaggatcccagggctgtgtcagggtcatctttgagcactgcttggtggcttggtcaatctgaaacatcactccatccttatacagcaaaatatattcaaataatctgaaacacagatggaaagaagtagtttgggacttcatgttaccatcctcgtgccttttaacagcacaaacacctttgatagatattacttttaaaatagaaagaaattactagctaggcaatcacttaacgtttataaacactaggcacrtgaaacaacctgcatatgaaataattagaattcacaggtcagaccgagcatgatggctcatccctgtaatcccagcactttgggaggccgaggatggagtacgttttgagcccaggagtttgagaccggcctgggcaacatagtgagacccctgtctctagaaaaaaaattttaaaaattagccagacatggcagtgcacagctgtagtcccagctacttgggaggttgaagtaagaggatcacttgagcctgggagttcaaagcttcagtgagccatgatcatgccaccgcactacatacagcctgggtgagatcccgtccaccatcaaaaaaaaaaaaaaaaaattgaggtcaaaagtgtatattcactgggcaaattttgaccaaggacctagtatatgccagaccctgtgcttagcatacaaacatggggaagatatggctccggctgaagagctggtttgtgaacttttgtttacccacagagacacaggaggacttgactcttgtgtggtgcattttctctcacagcactcagtcaaggaattatgggggtatactgaacataggacaagaacacactgaggactggatggaccgagtgcctgtgcttcactgcctccactgccgagcagtcatgagtaaggggctttgatgcgcatagctgatccggcacgggcgcagcccacataccctgcagtggctgagatgagagcaaagacaaaagctgaggcgaccccagagcaaatgactcccttagctgagtttctctccatgctctcagcctcctcccgtgaccacctgctcacccttcctggggagtgacagggagatattcagaggctgagcccaggagtcaccagccatgcagtattggcatcagtcctgtatcttccttaaagctgagacatcttggtgttgggggaagcctgctgtgttt

SEQ ID NO: 50155 - DNA, 543 bp, Homo sapiens
cttatgaaatggatatgaagtctaaaggctcttttcgatttgagttccaagatgtttgtaaataacatgtcattggtgaggttgtatactttggactttatcatatctgaagacaggtgatgtaccttcccactattaatgctgctaactttgatcaccaagttatatggtgactccagatatctgttataaaagtgtttccttttgcaattggcaagtaattgatgagtgatactttgtgatgttggaaatgtcctgttacccaataactgtcacctaatggttttaggcaaatccrtttcctgaatcaattatttcactgggagttaggatcatagtaccaatggtatagtaaatgacatccatctatcttagtctattgagtaccactctggactcatggatttattatttattcaatgtatgacaaacaattaaagtcattattccttttgatgctaaaatttacccaagtttggccagagggagctccttcaagttggtacatgtatcttctgacataatcctattagtctctgagtg

SEQ ID NO: 50156 - DNA, 689 bp, Homo sapiens
ctcctgcctcagccttccaagtagctggggttacaggttcccactgccacacccagcttatttttgtatttttagtagagacagggtttcaccatgttggccaggctggtctcaaactcctgacctcaagtgatcctcccactttggcctcccaaagtgctgggaatacagatgtgagccatgcacccagccgaaatccgctaatgttaatcatccgattgtttccaattttcattattataaacgttaatacatggcctgatacctaaattctttcattcacagttctgatcatttttttttctcatatttttagagactatgtctcactaggtcttgctaggctggtcttgagctcctagactcaagcaatcctcctgcctaagcctcctgagtagctggaattacaggcgtgcaccactgcacctggctctgatccctttttttagtgaaagattttgagtgaaatgattcaycgcttgagtgaaataatgaattaaagaatatgagcattcttgaggctaccaggattttccaaggcccctttgcacaccgcatttacacggcattctccttcagccaaattccctaaattcacaagaggcctgatttagggaaggtcactgattcagctggagagttaattattcatttgaattggtttatgcaaaaagctccagagagcccac

SEQ ID NO: 50157 - DNA, 637 bp, Homo sapiens
atgacttayatcaagaaaatacaaaaagtaactcttaggtcgggcatggtggctcattcctgtaatcctaggactttgggaggccacggtagccaggtcacctgaggtcaggagctcaagaccaacctgggcaacatggtgaaactccagctctccaaaaaaagaaaaagataaagaaaaaaaatacaaaaaattagctgggcatggtggtgcacatttgcggtcccagctactcaggaggctgaggtgggaggatctcttgaacctgagatgtggaggctgcagtgagccgagatggtgccactgtactctaacctgggtgacagagtgagactctgtctcaaaaacaaaaaccaaaaaacagaaaaacaaaaaacaaagacagattaaaaaaaaagtaacccctacaactcaacaataagaagacaaataacccaatttaaaaatgggcaaaagatctaaatagacatttatccaaataagagataaaaatggccaaaaagcaaacgaaaagatgctcatcattagtcaccaataatcatcgaggggtgaattttatggttttcgagttagagttcacataaaaagcagctgtgtaaaataacatgtatggaattatatttttaggacgatgaca

SEQ ID NO: 50158 - DNA, 637 bp, Homo sapiens
atgacttatatcaagaaaatacaaaaagtaactcttaggtcgggcatggtggctcattcctgtaatcctaggactttgggaggccacggtagccaggtcacctgaggtcaggagctcaagaccaacctgggcaacatggtgaaactccagctctccaaaaaaagaaaaagataaagaaaaaaaatacaaaaaattagctgggcatggtggtgcacatttgcggtcccagctactcaggaggctgaggtgggaggatctcttgaacctgagatgtggaggctgcagtgagccgagatggtgccactgtactctaacctgggtgacagagtgagactctgtctcaaaaacaaaaaccaaaaaacagaaaaacaaaaaacaaagacagwttaaaaaaaaagtaacccctacaactcaacaataagaagacaaataacccaatttaaaaatgggcaaaagatctaaatagacatttatccaaataagagataaaaatggccaaaaagcaaacgaaaagatgctcatcattagtcaccaataatcatcgaggggtgaattttatggttttcgagttagagttcacataaaaagcagctgtgtaaaataacatgtatggaattatatttttaggacgatgaca

SEQ ID NO: 50159 - DNA, 996 bp, Homo sapiens
tttttcatgcacccttcacactaatcctaggagatggtgattattctacccattttaagtgagcacctgaggctcacacagagtataaatgacttgcccaaggtgatttttaaagcacatgcctacaggcttaaaatttctttacattttagctagtaaggggtaagactaaaatacacacttaaatctctctgatcccccrtaacttttcctctattacataattctcctaaatattattgttactttgttagttttctaaccagagtccacagcaaaattctgaatatcctcaatggtggctttagtgcaaatacaagagacgtgttaaaattactggtggacttccagaagggtagggtttggctggtagtgagaggaaacgtggctctgagaaagagcattggggaaatgggggagattaggggtcctggtgggagagggagaaaggggagctgtctggaacagtagaaggaggattgaacttgactccggattcgatgaggcatcagggactaaaacaaaagaatcaatgaaatggctttataccttttatattctgatgcagcagttgaaatcctggaaatgtatctatcctaagggataatttagcaaatatataagcacacacatatacacaaaaatgttcattgcaacatatatttataaagatttagaaatgtcatacaagtccaagagtatagacataaattagcaaatctttatacttttccatcatgccatgttctattttaaatgtataatttgtatgtatttaaataaagaaaaatgcttataagattcacttttaaaaatcagaaaatagagaagcagggaaaaatcttcacaaaacatatacgaaagatagtgtcttgggctgtggaaagaacaggcttctgctgctgtgagtccctccttaccggcagagagagactgatcccctgaaccagcgtccacaacacagcacatatctcccagcccctaagacgggcaggc

SEQ ID NO: 50160 - DNA, 996 bp, Homo sapiens
tttttcatgcacccttcacactaatcctaggagatggtgattattctacccattttaagtgagcacctgaggctcacacagagtataaatgacttgcccaaggtgatttttaaagcacatgcctacaggcttaaaatttctttacattttagctagtaaggggtaagactaaaatacacacttaaatctctctgatcccccgtaacttttcctctattacataattctcctaaatattattgttactttgttagttttctaaccagagtccacagcaaaattctgaatatcctcaatggtggctttagtgcaaatacaagagacgtgttaaaattactggtggacttccagaagggtagggtttggctggtagtgagaggaaacgtggctctgagaaagagcattggggaaatgggggagattaggggtcctggtgggagagggagaaaggggagctgtctggaacagtagaaggaggattgaacttgactccggattcgatgaggcatcagggactaaaacaaaagaatcaatgaaatggctttataccttttatattctgatgcagcagttgamatcctggaaatgtatctatcctaagggataatttagcaaatatataagcacacacatatacacaaaaatgttcattgcaacatatatttataaagatttagaaatgtcatacaagtccaagagtatagacataaattagcaaatctttatacttttccatcatgccatgttctattttaaatgtataatttgtatgtatttaaataaagaaaaatgcttataagattcacttttaaaaatcagaaaatagagaagcagggaaaaatcttcacaaaacatatacgaaagatagtgtcttgggctgtggaaagaacaggcttctgctgctgtgagtccctccttaccggcagagagagactgatcccctgaaccagcgtccacaacacagcacatatctcccagcccctaagacgggcaggc

SEQ ID NO: 50161 - DNA, 549 bp, Homo sapiens
tctggttttatgtgactgtgttcaaattgaggaaaccagaatccagttattcaacaacaataattttctctatactatgatttatttacattttttcatatagttctctcaattatatataaagtctaggaaagtatgacttatgtgtgaatttccttacctattctttaaggctgttttgttttttaagagcctatttattgttgtactgctggttcctaaatagaacagttaagtaggccactgagcaggaaaaaatactgcaaaattttatagtcttctgagtttattactaccagaagaccttatctcagcccagatrtgtgtatctgaaaataaaaattacactatgggcatctgattaatatacttacgtcttacataaaagtaaaatgtgtctgtcctggccctatcagcctgttttttttttccttctcattctaggtagaagatgtgttacaacgttgtcgagaatatttaattaaaaaaataaatgcagagaattgtgtacgattgttgagttttgctgatctcttcagttgtgaggaa

SEQ ID NO: 50162 - DNA, 592 bp, Homo sapiens
aacctcatgtactgttattttccaaggtctgactcatgggtagaaatggccatgagacagactagtaggtcctttgcttcagctgcagcttttggtgataaaattttctatattggagggttgcatattgctaccaattccggcataagactcccctctggcactgtagatgggtcttcagtaactgtggaaatttatgatgtgaataaaaatgagtggaaaatggcagccaacatccctgctaagaggtactctgacccctgtgttagagctgttgtgatctcaaattctctatgtgtgtttatgcgagaaacccacttaaatgagcgagctaaataygtcacctaccaatatgacctggaacttgaccggtggtctctgcggcagcatatatctgaacgtgtactgtgggacttggggagagattttcgatgcactgtggggaaactctatccatcctgccttgaagagtctccatggaaaccaccaacttatcttttttcaacggatgggacagaagagtttgaactggatggagaaatggttgcactaccacctgtatagtggggaagttcagggagtgcacgcctga

SEQ ID NO: 50163 - DNA, 593 bp, Homo sapiens
tgggctttgtacattaggctagagtaagtaaggaaataagattatcaaatcattctaacagctttttatcaaggaaaatgaggttggcttccctatcagaatgtcttggggggattttaattttctgccaaccaaccactgctagttttctccactatgatgaaacagtgtacttaagagtggtgtcaaaacagccycgaagagtgatgggtcggaaaattgagaagaactttggagggggtctaagattatagattatacacagccgagaaaggtgttggacaactgttgtgttttttttttcttttctgtctttttccttccttccttccttctttcttcctttctttcttccttcctttcttccttcctttcttcctttcctcctttctttcttctctctttctttctttttttgcagtcaaaatcttgctgtgtcacccaagctgaagtgcagtggtgcattcatagttcaccaggctcaagcaatcctctcgcctcagcctcccaattagctgggactgcaggcaagcaccaccattcccacctaatagcacaattgttttaatagtccatttgggagggttacatta

SEQ ID NO: 50164 - DNA, 593 bp, Homo sapiens
tgggctttgtacattaggctagagtaagtaaggaaataagattatcaaatcattctaacagctttttatcaaggaaaatgaggttggcttccctatcagaatgtcttggggggattttaattttctgccaaccaaccactgctagttttctccactatgatgaaacagtgtacttaagagtggtgtcaaaacagcctcgaagagtgatgggtcggaaaattgagaagaactttggagggggtctaagattatagattatacacagccgagaaaggtgttggacaactgttgtgttttttttttcttttctgtctttttccttccttccttccttctttcttcctttctttcttccttcctttcttccttyctttcttcctttcctcctttctttcttctctctttctttctttttttgcagtcaaaatcttgctgtgtcacccaagctgaagtgcagtggtgcattcatagttcaccaggctcaagcaatcctctcgcctcagcctcccaattagctgggactgcaggcaagcaccaccattcccacctaatagcacaattgttttaatagtccatttgggagggttacatta

SEQ ID NO: 50165 - DNA, 593 bp, Homo sapiens
tgggctttgtacattaggctagagtaagtaaggaaataagattatcaaatcattctaacagctttttatcaaggaaaatgaggttggcttccctatcagaatgtcttggggggattttaattttctgccaaccaaccactgctagttttctccactatgatgaaacagtgtacttaagagtggtgtcaaaacagcctcgaagagtgatgggtcggaaaattgagaagaactttggagggggtctaagattatagattatacacagccgagaaaggtgttggacaactgttgtgttttttttttcttttctgtctttttccttccttccttccttctttcttcctttctttcttccttcctttcttccttcctttcttcctttcytcctttctttcttctctctttctttctttttttgcagtcaaaatcttgctgtgtcacccaagctgaagtgcagtggtgcattcatagttcaccaggctcaagcaatcctctcgcctcagcctcccaattagctgggactgcaggcaagcaccaccattcccacctaatagcacaattgttttaatagtccatttgggagggttacatta

SEQ ID NO: 50166 - DNA, 593 bp, Homo sapiens
tgggctttgtacattaggctagagtaagtaaggaaataagattatcaaatcattctaacagctttttatcaaggaaaatgaggttggcttccctatcagaatgtcttggggggattttaattttctgccaaccaaccactgctagttttctccactatgatgaaacagtgtacttaagagtggtgtcaaaacagcctcgaagagtgatgggtcggaaaattgagaagaactttggagggggtctaagattatagattatacacagccgagaaaggtgttggacaactgttgtgttttttttttcttttctgtctttttccttccttccttccttctttcttcctttctttcttccttcctttcttccttcctttcttcctttcctcctttcyttcttctctctttctttctttttttgcagtcaaaatcttgctgtgtcacccaagctgaagtgcagtggtgcattcatagttcaccaggctcaagcaatcctctcgcctcagcctcccaattagctgggactgcaggcaagcaccaccattcccacctaatagcacaattgttttaatagtccatttgggagggttacatta

SEQ ID NO: 50167 - DNA, 593 bp, Homo sapiens
tgggctttgtacattaggctagagtaagtaaggaaataagattatcaaatcattctaacagctttttatcaaggaaaatgaggttggcttccctatcagaatgtcttggggggattttaattttctgccaaccaaccactgctagttttctccactatgatgaaacagtgtacttaagagtggtgtcaaaacagcctcgaagagtgatgggtcggaaaattgagaagaactttggagggggtctaagattatagattatacacagccgagaaaggtgttggacaactgttgtgttttttttttcttttctgtctttttccttccttccttccttctttcttcctttctttcttccttcctttcttccttcctttcttcctttcctcctttcttycttctctctttctttctttttttgcagtcaaaatcttgctgtgtcacccaagctgaagtgcagtggtgcattcatagttcaccaggctcaagcaatcctctcgcctcagcctcccaattagctgggactgcaggcaagcaccaccattcccacctaatagcacaattgttttaatagtccatttgggagggttacatta

SEQ ID NO: 50168 - DNA, 631 bp, Homo sapiens
gtctcccaggttcaagcgattctcctgcctcagccttcatgagtagctgtgattacaggcatgcgccaccaygcccagctaattttgtatttttagtagagatggggtttctccatcttggtcaggctggtctcgaacttccaacctcagatgatccgcttgcctcagcctcccaaagtgctgggattacaggcgtgagccaccctgcctggtaccacccccctttctttggatgcctcctgtagccagactgcccaacagcacacccagagtgtctgccacttccagtttgggaagaacaatgttggtgggctctggcatcctgcccagcgggtgcatcataggaaaagaaaagaagccgaagctgagcagagaattccccctctgctcccaccaactaggaatatgccagatgattagttctcttctgtaggcctcgaaaaaaagggctgtgtgctgtgtagctgcacctgctcagcctcttcatggctcttggaaagaggcactcccaggtgcaggcagcaccactctgcatggcctcatatattcccttggttgctgccctttgtcctcaccctcccttccctgagtttgtgttctcaaacagccatcactttaatccttgccccag

SEQ ID NO: 50169 - DNA, 558 bp, Homo sapiens
aaggagaaagcacattctagtgagagaaaacagcatacaggaagcctccttacgatacgacacaccatggcactgtctgggaccttcatatatgatcaagaaggtgagcttgggagagtgatagaagacaataataatctttcttggctgtattcctgttcactggataccctttctcaatctccttggctggttcctatttttcttcgyaagttcttaacttcagagtttacaagagtacaatccttggtcctctcctctttctgcagtcatgccttagtgatttcattcagtctcgagaccttctaccatgtcaggacacagggatcctcccttctggaggacacagcaacaaggtgccatcttggaagcagagagcagcctgcaccagacaaccagacctcctggcactgtgatcttaaacttcccagccaacagactgtgaggaaataaatttctgttctttataaattacccagtctcaagggttttgttatagcagcataaaacatactaagacaaatttgactaagacagagccatgccaacagctctcaa

SEQ ID NO: 50170 - DNA, 520 bp, Homo sapiens
agccacaaatccaacttactttgttttaaaatattcctgttttaatttaagtatttatatctggctttgtctgttttagtwaagagcttcatctctctggcaagcacatgctgtcatactgactatatactgtgttttgtattcacatcctttagatagctaaaacgttagagaaatgaactgctgtggattaaaataccttgcctgttttaaaaatcttctttctgatttgataagtcaagaaggggggccgaaaaacacagcaacagcctggaaatttttggcagagaaacccctattccagtttgaaaccacatacaaagaagacacatgtccgagatactccctgtttatgcctggtctttgctgcaaagaaaggtgttgttcggaatccagtgtactttttgggggtcatatttgccagaagagtcaactcttgatggttcaggatcaggaatatgtgaaatatttgtgaaattcatctagaatctcagtcttattttaactactgattttgatt

SEQ ID NO: 50171 - DNA, 589 bp, Homo sapiens
tgcataatttgctattgttgttctaaacagaacattaagatctgatctctttggtttttaaatgagtstctattgaattacacattttaatgacttagaaatatagattcttttagcagttgaatttgactgcttgtggtattaatcaatgtatgaaatcaactttaaattttatataattagaattgcttgaaggagaattaaagattttccaaaaagaaaataattaaactgttaaaatctttggcaaaaaaattaacacagtgaattattctaactttgctggtattatatgatttgatgacagcttttgtgcatgacagaaataatagactaatatatgtagaatatatacttttaaaaacctaattattgtcagtttgattagctaggctaatctcagaaaacaataagatcgataatttaaatgaaaacaattcccaaataattaatattttgctttccaaagttgcttttccttgcagatttaacattccaattattctttctacccttaaggtaaaattaaaactaatttataattgagttcaaatgacttcaccattaacctatttttaacttatttatt

SEQ ID NO: 50172 - DNA, 553 bp, Homo sapiens
gggatctattccaacagctggatattacaagaaaccacctgctaacaagagggctggacaacttttgggtcaggagaggataaggggggaaatatttggcacagaaagcccaartgccccatcacttacagagagatgtaaggtgtctttaaaaataattgattctcagtaagattaaaagtttgaactgtttctccaaccatgtagttctgttaagttaatcttgaaatcattctttgaaaactgacaggaaagatacaacttagaaaacattgtggatgaatacttcccccttttgcaaatgatattttggaagcacaaaagaaaaagctctaatacaaatattcataatgaaaatatgaacttaataataccaatggcaagacagaataattaggagaaatcgggtaacgagcatctctcctatttttagtttgtaagccttttttgcttttttttttttttttttttttttggagacagagtctcactctgttgcccaggagtgcagtggcatgatctcggctcactgcaagctccacctcccgggttc

SEQ ID NO: 50173 - DNA, 553 bp, Homo sapiens
gggatctattccaacagctggatattacaagaaaccacctgctaacaagagggctggacaacttttgggtcaggagaggataaggggggaaatatttggcacagaaagcccaaatgccccatcacttacagagagatgtaaggtgtctttaaaaataattgattctcagtaagattaaaagtttgaactgtttctccaaccrtgtagttctgttaagttaatcttgaaatcattctttgaaaactgacaggaaagatacaacttagaaaacattgtggatgaatacttcccccttttgcaaatgatattttggaagcacaaaagaaaaagctctaatacaaatattcataatgaaaatatgaacttaataataccaatggcaagacagaataattaggagaaatcgggtaacgagcatctctcctatttttagtttgtaagccttttttgcttttttttttttttttttttttttggagacagagtctcactctgttgcccaggagtgcagtggcatgatctcggctcactgcaagctccacctcccgggttc

SEQ ID NO: 50174 - DNA, 592 bp, Homo sapiens
tgtgacaatacagtcatccattggaagtgtcgtgttctagtaacacatgctgtgacccaaactggcttcctgggcctgtgacctgggccggcaccagggccctgccctcagaatgaacttgtacttgttttgatgctcaactgctgccatcttgaaattcttaatgtttgaacaaggctcacacaattttattttgctgtgggccctgcaatttgtgtagctggtcccgcttgtgaaccctcactaagcattttctcttgggtgaagcgtgtctaaaatcaaaacaatgtcagtcagcattaatagaaaaaagacattgtggatggcagcttattgctacagaagtgtcggtggactgacragagggacagcccatctaccttctcccaagtcatggcattctctataggccattatagatgcagatgagtctctgatatgttttacattaactcaaatatcctttgttgcctgatttctgcttgctgctttcttgcctgacaggacccctacataggactcccagggattatccctgtttgcacaagaatgattactcttagggaaagtcttctaactcaaaatgcagcaa

SEQ ID NO: 50175 - DNA, 592 bp, Homo sapiens
tgtgacaatacagtcatccattggaagtgtcgtgttctagtaacacatgctgtgacccaaactggcttcctgggcctgtgacctgggccggcaccagggccctgccctcagaatgaacttgtacttgttttgatgctcaactgctgccatcttgaaattcttaatgtttgaacaaggctcacacaattttattttgctgtgggccctgcaatttgtgtagctggtcccgcttgtgaaccctcactaagcattttctcttgggtgaagcgtgtctaaaatcaaaacaatgtcagtcagcattaatagaaaaaagacattgtggatggcagcttattgctacagaagtgtcggtggactgacgagagggacagcccatctaccttctcccaagtcatggcattctctataggccattatagatgcagatgagtctctgatatkttttacattaactcaaatatcctttgttgcctgatttctgcttgctgctttcttgcctgacaggacccctacataggactcccagggattatccctgtttgcacaagaatgattactcttagggaaagtcttctaactcaaaatgcagcaa

SEQ ID NO: 50176 - DNA, 598 bp, Homo sapiens
tgatatatctgaaactatttctatgtcatctgggtttgcttccagaaatatattcataaactctagtcatttgtagggagcttcatatctcatagtaacagctcctatatgtgagatttcaagtaaatgcctagcaacataggtactcaagccctagatagaacttaattcatggaaacacacagctgatgcttgaattcctataatcttcctaatcttcctgccactcagttttcaagcctacattttcacatctcctgtgatgaagaatgcactatcttccaaaatagctcattgtaattctggagagagagatatataacatatatacatatacacacacaataatttatataaatataatatatataatatgtaaatatctatttatttatggtgcaaayaaatatgattctatagggtggcattcatatgtatatttatttatgatgcaaataaatatgattctatggggtgacattcatatctctctcaaattattttatttggtgtgtgttgaagtgtagcgatgatgatttctaatttcaatggtgtgactcagcaccaagatggaaagaccacaggttttcatgacaaa

SEQ ID NO: 50177 - DNA, 1560 bp, Homo sapiens
ttagaaatattttaattcaacattcaaaatgatttttgtgtgtttaagttttgccgatcaaattgatcagctgtagttatctgcaaaatttgtgtgggtttgagtacagcgccttcccatgcctggggctggatgaatgaagtatcccccaaacagccttaagcaaagggataacaacaaatgaacgcagactctcatgaagggtgagttacaggatgtttcagagtttccgtgaagctgagtataattgtgtttaaaatcatctcggcgtcatgcatgttgaactggaactggccatggtgctggaagtagacatcatgatcatagggaaacggcaatggtactgggggaggtgggctacactgaccattttatttatgatttggaagaaaaagcaatgacgcaattgatttaaaacctatatttctagattactcaagaggccaaaacactcaggtgatgaactcttacactgtagagaatgcccagtgtgaccatgtgcatttcatcctcttcctgcctccctctgtgaggaaggaaggacaatgccaggcatggagatgacagggattttcctgaggccagcagcgtggctagagctcactccttgaacccttcactatgggcttgttccactccagagagagaaataacacacataaccttttgcctcccactgtggaaggaggtaggcaactggcattggatgaacaattgctatgtggctgtctgacttgcctatctgaggctactttacaaaagtaatttatttcaaatatcataacaactctttgagacaagtattactgtcttgtttttaaaatgagaacagagtagcctagagacattaactttctcaagtaaacagcaaaatgtatacactgtaattaagtaaggcatttattaattcaattaaaacttctaattctaccagggaggaagcactaccctaggcgctggagacatgaggaggaaggatgtttctgattgccttctccatggtgcaggagtgatacacaggcaattaactgcagagccagggagaacatcgtgcaggcagtcaacagcgtgagccgccacttggaggtgagagggaaggtggctcattcgagaattgagaggaactggctgtgcttcagcagagtctacgtgggtctgacagcaccaagttgaaaggcgtttctctgagaagcatgaaggttcaagtcaaggagggcatcatctcagccctgtgagacactggggggctgctcccgagggcagtgtgggggggttaagctgctgagtgacactttggagggactgttgtgctgtcaggtgcagaaagtcttgaatgacattaagagtggagacagaaaaactgattcggaagcaattgcaacaatccaggcacaaragtgtgttgttgaggtaagatattgtagagaagatggtaacattttaggtgaacttctccattcttgtatactcagcacctagaacagagcctggtacacagcaggtgctggataaatgtctgtcaaagaaaccaaggagacagtagtcaagcagtggcatgca

SEQ ID NO: 50178 - DNA, 644 bp, Homo sapiens
ggtgaacaagcaggtgcattgctctgtgcattctgtatttgccgtcaaagttgcttcacacacagccctggaggcagagtaatggccctcaaygacgttcagctcctaatccctggaaactgcaaatatgtcacctcctgtggcaaagggaacttggcagacatgcttctgctacagtcttgagacaggagattcacttggatcagccaggtggcccgaggcaatcactagggcccttagaggggacagaggcaggagggtcagtggcaggggaggagaagcgagagcagaagcagaggcagaaggggtgtggggcaggaactgggagagtggcagcccttcctgcaccacccaggagcacagtgcaagtcccagttacacccaagctttgtttctcaagcacaccccatgtttcataggtgtgttatttgcaaactgcttctctctgcctggaaaacatgtccttgaaggctcagttcaaacccctgctccctggggaagcttccccttacggctcctcctgcagagctgggccccccaccctgcagcattctcagcagctcctgaccacacacctgccctcaccatccctccagtggacacagaggcagccctacctatctctctcggggtcccacagcctg

SEQ ID NO: 50179 - DNA, 565 bp, Homo sapiens
gccagggaggagggtcatgctagccatgtcaccggtagtgtcgcccgcagggacgccgacatgctggaggttcatgtcagcatgggctctggcagccacgtgggccagcaggagggtcccgctgcacagctgtccggtgaggatagcctgggtggtgatrtcagccattacaggggcctcttctgctggcaagagtgtgacagtagcaagtagatggacaggcctgtgtgtgaggatggaatgcaggagggactcttctgcggctgggtgtggggccctcacgagaaatgtggagaaatggccaggtaactgcgtcatgttggctggtagattggccagggcttcgaagtgaaggacagtaacggggagtagctgtcaggccctgggagtgtctgagtgtaagtggagatgtgtttggggtcactgagggatacgtgggagccatccctgtatagatacaggtcatagggagatagtctcatgaggcctgtgagtgtctatggttctcctgagtgcctggggctgactgcggcagaaatctggggaagtctggagaggagctggg

SEQ ID NO: 50180 - DNA, 607 bp, Homo sapiens
taacttaatgtaaataagtatataaaattgatattatatttgttaatacataattatacatatatactgtgtaaaaataaaattacatattgtatatgcataattatatttctataagtacaattatatactatgtataattatgtataaaataattgtataataaaattatataataaattttgaaacgttataaattattatacatagtattttattgtattaaatttagaaatgygttatatgtaataaaattttattataataaatgtagattatataaaatcttatttataataaattaccttatgtataattataatatgagaaaataattacatatcattgtattataataaatttagagatgttatacattattatatataaaatttcattatattaaatttagaaatatatataataaaatggtattatgttaaaatttttatgtaacattttattatacatgtataattttatataatgttttataatatatagaatataagtacacagaatataagtacaaaaatatttatatacagctacacgtaatataaatacatcagtgtaagatgttttgtgtgtgtgagatggagtctcg

SEQ ID NO: 50181 - DNA, 607 bp, Homo sapiens
taacttaatgtaaataagtatataaaattgatattatatttgttaatacataattatacatatatactgtgtaaaaataaaattacatattgtatatgcataattatatttctataagtacaattatatactatgtataattatgtataaaataattgtataataaaattatataataaattttgaaacgttataaattattatacatagtattttattgtattaaatttagaaatgcgttatatgtaataaaattttattatartaaatgtagattatataaaatcttatttataataaattaccttatgtataattataatatgagaaaataattacatatcattgtattataataaatttagagatgttatacattattatatataaaatttcattatattaaatttagaaatatatataataaaatggtattatgttaaaatttttatgtaacattttattatacatgtataattttatataatgttttataatatatagaatataagtacacagaatataagtacaaaaatatttatatacagctacacgtaatataaatacatcagtgtaagatgttttgtgtgtgtgagatggagtctcg

SEQ ID NO: 50182 - DNA, 607 bp, Homo sapiens
taacttaatgtaaataagtatataaaattgatattatatttgttaatacataattatacatatatactgtgtaaaaataaaattacatattgtatatgcataattatatttctataagtacaattatatactatgtataattatgtataaaataattgtataataaaattatataataaattttgaaacgttataaattattatacatagtattttattgtattaaatttagaaatgcgttatatgtaataaaattttattataataaatgtagattatataaaatcttatttataataaattaccttatgtataattataatatgagaaaataattacatatcattgtattataataaatttagagatgttatacattattatatataaaatttcattatattaaatttagaaatatatrtaataaaatggtattatgttaaaatttttatgtaacattttattatacatgtataattttatataatgttttataatatatagaatataagtacacagaatataagtacaaaaatatttatatacagctacacgtaatataaatacatcagtgtaagatgttttgtgtgtgtgagatggagtctcg

SEQ ID NO: 50183 - DNA, 649 bp, Homo sapiens
aaaaaaaaaaaaagaaaagggaaactatgacttttttttaatgaggactccaaggaaagattatgttggttctggctgtacttctcagtgattttttttttcttttcgtttgttggttttgtttttaatgggcttgatgattcgtgtaacagttcacactttctttttctttcctttgcagccaygtgctttcaagcctctgcccttggtttatgctgttctctccacatagaatgctttgcttctctccttggccaaccatgactctacttttccttcaaaaaaccagataaattaccacttccatcctttttagttttttctcatgtataaccctcatttcatcctgtgtcatagttagccatcttcatgtttgtctgttctcttaacccaatattttgcaagtgagaggtgataaatatatacccattgaatgaatggacagacctaatctaaataatgagatctccagcttcttatttgtaacacctgatttaacttcaaaccctgcgcacttgattgtggaagaaatattccactcccccttgtacatgttcaaaattctgctaggtcattcaatgttattgatttctagtgttttcttctctgtccttcctatcagggtaaattccacatcactattaggttg

SEQ ID NO: 50184 - DNA, 592 bp, Homo sapiens
tgtaacacatttggagctcccttggatttttagcaagttaaaggtagcacttagcatatgttaagcattgaggtgccagcggtggttacaatctgctctgtagcttcagaaatgtctcggttcacacccattcaacagatgcgatctgaacaacagctacatgccagttcgtatactaatatgagcaaaacctacttgccaatctcaaagatctcctggtgagtggtacgtgagcaacaagatgatgtcatagtttcaagaaaggggaactcacccagaaatgactagtataggtaggaatggtgcaggcttcccaaaatcattgccaagaccagacaccacttactaagagtgagaaatgtaactttcaacrtgaccaacattgtgttggctggtcagtgtattctctccctacagaaagtgtctatctgaagccaaattattctcagaaggattatccataagcctagcattgtggcacaaagaaataactggaccattgtggctctgaagtcagacctgcctagacaaacagagtttagctcggctgagacatcctctcccttataaaggacggaaacacccacgtagg

SEQ ID NO: 50185 - DNA, 1655 bp, Homo sapiens
tttttaaaagtaaaagaaaactagaagagagtgtagattaactgtttttcagatttcagggtagataaacatttataaccaaatgaggaaagggcagagtacaaaaaaatgttgatattgcaacagaataaaaatgttaaagttttgtaggcaaaaacacaataagcaaattgaatagcaagtgacaattcagataaaaaacctatcagaaaaacaaataatggaaattcaaaaaagaaacatgcaaaagcaaacaaatatatacaaattgttttgtatatattcaaataaatatacaattaaagaaaatggaatcctcttttctgtttatcaactaatagcaatggaaaaatgataattccttgtgttattaaagttgcaaggagagatgtattcccaaatatgctggtgaaagtataaattgctgtaaaaawttgtgaaatacaatttggtaatatagtgaaagacttgaagaaatgcatgcactttgattcagcaatattgctttacaaatttattcttataaactaaacatgctcataaaatcattgacaagaatgtttgtcatcgttttcattataatagtaaaaaatcatatcaacctaaatatcaatttagaatgcttaaattaattgtagtctattaattttgtggaacaatgtgtaattgtctaaaaatgacattgtggaaaaataagcagattgggaaggttcataaaaaagcagattataaaacagcattatatcatgatttacttaaaagataattatatcattcataaaaaatagaacctacttcaaaatattaacaatgggtattgctaggtgggtgggattgtggatctttttgcttatggctttctgtttttacaaattttataatgagcatacacaattttgcaatcatataataaattaaaagtctacttttatcctttggtatctgaactagtgttggcaaggaaggatggtagtgtcagtcacatggattttgaagttagatatgggtgtgaaacccagtttcttcacttactaatttaatttttgcattgaccacattacttgatgagccttggttccctaatgtataattgaggatatgaatatggatccttataaaaaatttatgaaggttaaatgtttcaaatatgtactatttctgagacatagttccaatgaatgtacctgcacttctgcctcttttcttgcagtgatgtgtttctctcaggtatttatttactcttcagttcttatcttttccagagtagagagtgaggcgcctcctagatctcgcagttgctctgctagaccttaaataagaagaagagtaagagagaaaaggaagaacaaaatggaagtgagatttcagtagaaaatttgtaattatatatcgtcaaaaccaaatcagaggccgggcgcggtggctcacacctgtaatcccagcacgttgggaggctgaggcgggcagatcacgaggtcgggagatcgagaccatactggccaacatggtgaaaccccgtctctactaaaatacaaaaaattagctgggcgtggtggtgcatgcctgtagtcccagctactcgggaggctgaggcaggggaatcgcttgaacctgcgaggcggaggtcgcagtaagccgagatcgagccattgcac

SEQ ID NO: 50186 - DNA, 603 bp, Homo sapiens
taaaggaaagagatttaagtggctcacagttcagtttgtctggggatgcctcacaatcatggtggaaggcaaatgaggagcaaagttgtatcttacatggcagcaggcagaagagagcttatgtaggagaactccccttttttaaaaccataagatttcatgagacttattcactattatgggaacagcatggaaaagactcacccccatgatttaattacytcccaccaggtccctggcacatgggaattatgacacatgggaattatgggagctacaattcgagatgagatttgggtggtgacactgccaaaccatatcacacatgttgattttgctatagtgaagcacaatttttctaaaaaattggtattgtgtactagagggatacttgcattctggctggtcacaggatttgaactaggagctaaatagcaaattaaaacaaaattcaacttttatgttagattcaagaggtacatgtgaaggttttttacatggatatattgtgtgatgctgaggtttagcatatgattaatctcatcacccaggtagtgagcatgggaattaatagtttttcaacccttgcctccctgcctcccc

SEQ ID NO: 50187 - DNA, 606 bp, Homo sapiens
cacaccaacatggcacatgtatacatatgtaactaacctgcacgttgtgtacatgtaccctagaacttaaagtataacaaaaaatatatatatattataaaatctattcatttttctgtttttctggtcgacagagcaaatacaatcttttttcaaaaaaagtcttgaaattcatactcaggataagaaaaaattatattctctgcacatttttcaaaaactgmcactaaaagaaattttatacctattgtttttattccaaaatgtgtactgcagaaatgaaatatgtcaggagtattactgttaatgctgggcaaataaaataagagtggcagtgatattcataacagacatatagaagtgttgtgaaaaattttactgccagctgagatgagcaaaatataagcataaggtgtaactcactattccttattgagaagatgagagatatgggtttaagggattccagctcagtttaattcaaaagttcaggatcactttgcattaaattcaggatcctgctatgaaaggtatactggggcttccttaactatcactattttaactttatttttaccttttccaaactttcgtttttctcacttt

SEQ ID NO: 50188 - DNA, 603 bp, Homo sapiens
agaactgattccccttgatcatctgaggctacattaggcgggtcattcttacttccagaattacacatacaattctattttctgaagtgctcttctatttataaattgtttctccttcaaaactactaaaaagtcacacattatatgtagcattcttaacatgagtttcagttcccacaattgaattgaagccatcaattcccatatataactatacacttacagatgtaattgcatttgtttaccacaatagctgtgctattggtaatgaaaatgcacactcacaaggatcaagtaacctttctgggagaaatattttgggtagaaataccttagataattagtcacactgtacagaaatgagttgaggtataaagttaagaaaatacattactgtggrtctttactaaagaactgattgttgtacatacatcaaaacgaaaatgtcttaaaaataatgatcttaattgcttccaatgtaacacttcttatatgtaatataatatgtattattatattgcatatgtaatataatatgtattatattgcatatgtaatataatacgtattattatattgcatatgtaatataatacgtattat

SEQ ID NO: 50189 - DNA, 603 bp, Homo sapiens
agaactgattccccttgatcatctgaggctacattaggcgggtcattcttacttccagaattacacatacaattctattttctgaagtgctcttctatttataaattgtttctccttcaaaactactaaaaagtcacacattatatgtagcattcttaacatgagtttcagttcccacaattgaattgaagccatcaattcccatatataactatacacttacagatgtaattgcatttgtttaccacaatagctgtgctattggtaatgaaaatgcacactcacaaggatcaagtaacctttctgggagaaatattttgggtagaaataccttagataattagtcacactgtacagaaatgagttgaggtataaagttaagaaaatacattactgtgggtctttactaaagaactgattgttgtacatacatcaaaacgaaaatgtcttaaaaataatgatcttaattgcttccaatgtaacacttcttatatgtaatataatatgtattattatattgcatatgtaatataatatgtattatattgcatatgyaatataatacgtattattatattgcatatgtaatataatacgtattat

SEQ ID NO: 50190 - DNA, 603 bp, Homo sapiens
agaactgattccccttgatcatctgaggctacattaggcgggtcattcttacttccagaattacacatacaattctattttctgaagtgctcttctatttataaattgtttctccttcaaaactactaaaaagtcacacattatatgtagcattcttaacatgagtttcagttcccacaattgaattgaagccatcaattcccatatataactatacacttacagatgtaattgcatttgtttaccacaatagctgtgctattggtaatgaaaatgcacactcacaaggatcaagtaacctttctgggagaaatattttgggtagaaataccttagataattagtcacactgtacagaaatgagttgaggtataaagttaagaaaatacattactgtgggtctttactaaagaactgattgttgtacatacatcaaaacgaaaatgtcttaaaaataatgatcttaattgcttccaatgtaacacttcttatatgtaatataatatgtattattatattgcatatgtaatataatatgtattatattgcatatgtaatataataygtattattatattgcatatgtaatataatacgtattat

SEQ ID NO: 50191 - DNA, 603 bp, Homo sapiens
agaactgattccccttgatcatctgaggctacattaggcgggtcattcttacttccagaattacacatacaattctattttctgaagtgctcttctatttataaattgtttctccttcaaaactactaaaaagtcacacattatatgtagcattcttaacatgagtttcagttcccacaattgaattgaagccatcaattcccatatataactatacacttacagatgtaattgcatttgtttaccacaatagctgtgctattggtaatgaaaatgcacactcacaaggatcaagtaacctttctgggagaaatattttgggtagaaataccttagataattagtcacactgtacagaaatgagttgaggtataaagttaagaaaatacattactgtgggtctttactaaagaactgattgttgtacatacatcaaaacgaaaatgtcttaaaaataatgatcttaattgcttccaatgtaacacttcttatatgtaatataatatgtattattatattgcatatgtaatataatatgtattatattgcatatgtaatataatacgtattattatattgcatatgtaatataataygtattat

SEQ ID NO: 50192 - DNA, 587 bp, Homo sapiens
tttttctaatgtaaaagtggcctgaaagtagaaggcattgaaagcctgactaataggtttggacaatgggagacactgaatgactgtgaacaggtattggataaggtcatggctatgtttggagtgttcttgtattaggtagagcagggaacaggctggagtagcacagaccagtaaataagtgttaggaacaagagaaaaaagaaatgaaaaaagagttatggcccactgaggagaagaaacctaaatggtgtctcctaagaaaaagacagaggaagaaagaggaacagtcttgggaccttgacaaaagcagagggccaatctgtatcactcagctccaaaaatcatttctttctcttagaaatgaggtcatccatcatgaactcattctgctttccacttgtctgtcatcaaaacatttatctcaaagtaattgctccttagtcatctctctccctaaagaacaagtgcatgaatcataatttctattttacagcaagaaataaggaggcatgagaagttctgaaactcacttatcattcaaagttcaggtacrggctaagataataaaccaggatattaatgaa

SEQ ID NO: 50193 - DNA, 1575 bp, Homo sapiens
tggagaggttgagttttatttctgatacatcacagggaggctcggggagagcaggagcagggatctaatcaacaggtgctcaagagagaggcctgtgctaaagactgcctgagcctctcctgcccagtgatggcctcggagctggggagtggggggattggagggcggttggaggaggagaggggagtgtgctcttgggtgtattctgtcctcccctttagcctctcagggcacttctgcccctttcgggtaggtccaggtggggcagcaggatgctaaatccccatccagtccagaagtcagcctctcaccttgtgacctcctttggtaggagaactctccagtctgtttatccatcctgaccttcaacccatcgaaagcaaaatatttggtttttagaaactgcctgtttgcttttctgcttccggaggcagccagagctttgagagacccatccagatgtgggcttggagcagtcaacccccaacctttgaggactgagtctctcagaggggaggcggccgtccctggggcctgagtcccagagtgggctaggcttgcttctcctgagagtagacaggaggcaggaatcctggggatgcttagccctgctggcccatctgaggatgggagcagtgggccccaggaacatgtctttcctgccggcaagagttgggaggagcttactgtgtgtgtgggggggtgggaagccgaggtgccctggacaagcacacctaagctggggtctcagagtcattcttagtcccccgttcaggccaccaattactgctctgcagaattcacatgtgaattacacacagctaaggggaaacagaatccggcactcttagagtttatatttccacaaggaagagaaaactggcataatcctgcctgccctgtttacccagaagtccctaagatgatcatctcgtccaccacctccctcatcttctgaagaaggaaatctggagggtgaagggacttgcccagggtcacacagcaagtacctgaacccaggcatcctgggtcctacacagcagggctcccattaccccaggctgctcagaggagttaaaggagatggaagtgcctttgtgttcgggttgtcgatcctgtatttcgggagaagaggcaggtctgaaagctctggcagcagctgctgggtgccccaacagccaagaagcctggcaaggggttgttgaccccagagtccggggtccctccctccctttcatcgctgactgtgtggccaggtgaggcccggaggtgagggaaagcaggagtagatgggaactgcctttctgttttaaggcccctcttaaacggaaggtggggaggcagagacaagtcttaaaggaggcccagctttctggggttacctctgggctgcggctgagccctggtctctttctcagaccagctcttgagaagccttggttacaaccctgagagctgatctctgagggtctgttactagaagagrccattagcagcattttttttcctgctattgcatttttacggcccacagctcctctggatagcattttgcccattaaatcagatgttttg

SEQ ID NO: 50194 - DNA, 1575 bp, Homo sapiens
tggagaggttgagttttatttctgatacatcacagggaggctcggggagagcaggagcagggatctaatcaacaggtgctcaagagagaggcctgtgctaaagactgcctgagcctctcctgcccagtgatggcctcggagctggggagtggggggattggagggcggttggaggaggagaggggagtgtgctcttgggtgtattctgtcctcccctttagcctctcagggcacttctgcccctttcgggtaggtccaggtggggcagcaggatgctaaatccccatccagtccagaagtcagcctctcaccttgtgacctcctttggtaggagaactctccagtctgtttatccatcctgaccttcaacccatcgaaagcaaaatatttggtttttagaaactgcctgtttgcttttctgcttccggaggcagccagagctttgagagacccatccagatgtgggcttggagcagtcaacccccaacctttgaggactgagtctctcagaggggaggcggccgtccctggggcctgagtcccagagtgggctaggcttgcttctcctgagagtagacaggaggcaggaatcctggggatgcttagccctgctggcccatctgaggatgggagcagtgggccccaggaacatgtctttcctgccggcaagagttgggaggagcttactgtgtgtgtgggggggtgggaagccgaggtgccctggacaagcacacctaagctggggtctcagagtcattcttagtcccccgttcaggccaccaattactgctctgcagaattcacatgtgaattacacacagctaaggggaaacagaatccggcactcttagagtttatatttccacaaggaagagaaaactggcataatcctgcctgccctgtttacccagaagtccctaagatgatcatctcgtccaccacctccctcatcttctgaagaaggaaatctggagggtgaagggacttgcccagggtcacacagcaagtacctgaacccaggcatcctgggtcctacacagcagggctcccattaccccaggctgctcagaggagttaaaggagatggaagtgcctttgtgttcgggttgtcgatcctgtatttcgggagaagaggcaggtctgaaagctctggcagcagctgctgggtgccccaacagccaagaagcctggcaaggggttgttgaccccagagtccggggtccctccctccctttcatcgctgactgtgtggccaggtgaggcccggaggtgagggaaagcaggagtagatgggaactgcctttctgttttaaggcccctcttaaacggaaggtggggaggcagagacaagtcttaaaggaggcccagctttctggggttacctctgggctgcggctgagccctggtctctttctcagaccagctcttgagaagccttggttacaaccctgagagctgatctctgagggtctgttactagaagaggccattagcascattttttttcctgctattgcatttttacggcccacagctcctctggatagcattttgcccattaaatcagatgttttg

SEQ ID NO: 50195 - DNA, 1530 bp, Homo sapiens
gggtcagctgtgtataggggcccacacagaatttggaatccaaatacatctctggatccccaggcctgtgtttgactcgccaggtagtaatgagatgtctccattttctgcaggctgaatgattccctcagagcagaagtataagcatatttattgtttttccttctatcataaacagttattagttgtggccctttctcccttccaaataggtgcccaaatttctggaagtggaaagggcccaactttcccatatcagggggtgggccccactgggcgtgagccaatcagtgtcttctgtcctgtgagctcccgatttatgctggtctataacctgagatggccttctcaggatggacctccagggattgctggaacttggactcttgtcagcctggtaaatggtatgtcttagatctgctgcagccgtcgtggaaaacttgaagctgccaggagagaggggttccaacatgtggtggctaaagaatgaatccaactcaaaggaagcagagccaagaaatggatccatgctgtttgaatcttggatcaaattgtgcctggatctccagtgagacaataaattcctgtattactcaagcctatttgagattgttttctttcacttgaaacattaaacttttaaattgatacaccctagttaaattataaactgtgtgacagcagggactgtgtctctctcttttttttctttcttttttttttgttttgaaacagagtttcactaccgtcacccaggctggagtgcagtggtgtgatcttggcttactgcaacctccgcctcctgggttcaagtgattcttgtgcctcggcctcccaagtagctgggaccacaggtgtctgccaccatgcctggctaattttttgtatttttggtagagatggggtttcaccatgttggctaggctggtctcaaactcctgacctcaaatgaccaaccaacttggcctcccaacatgctgggattacaggcgtgagccattgcgcccggcccaagactgtttctcttgatcacttatgtgtcccctggcacgtggtaaggattcaataaataacttttgaatggatgcattttagctgcaaggaacacccataaactctcttttactcagctgacagctaaggaatctggtgttatataagaaagtgatgatgtggatctataagttggaccttaccccaacactgggatttttctaatcacaggaaatcttccagtaaatatgttggggtctttgaggaggccccaaaatagcagtctgctcccttctctgtgaattttgaattgaatcagaagatagcagcaagctagatgaggaccaaaaataaccttttctactgataaagctgatattagagaacgtggcttatatcatcagacaatcgagcttcccgatactcaacttcagagttaggcagacttggcggctcgatgacaggcagctgagctggaatgggcctactcttcccaccccaygggagcgaagcttgctcccaagaagaaaagagagg

SEQ ID NO: 50196 - DNA, 607 bp, Homo sapiens
atagacatataatattaaaataaatgacagtgcaagataactaaaatttaaaaaagaaactagtaaggtcaaatacatacacaaacaaaataaagcctgtwtttattgagagccaagaaacagttcagaaatagaaggaacatccccggggaagcatatggacttcactctatatgctctagagggaatatgcttattcagtcaggcatatggcagaactttctccatattaatatagggacggggtaagagtgacgcctatcacataaattaaccatgttatagcaagttttcattatatgctctttgattttaggcccatagatttatcctataaagtatccaagctcatttaattagaatgtccaatgtcaaacttcccattcacaaaatggcatttgccctccaagttacagaatttacaaatggcttgatttatttctaagtgtcttagtttcagtaacatcattctctagcctggaattaaatacttaaacacatttgcattgagatggtattttttctatcaggcaccgaggtacattccttggctctgattaagtcttctttatgtgggattgaatgttgtcataattgcagtggacag

SEQ ID NO: 50197 - DNA, 607 bp, Homo sapiens
atagacatataatattaaaataaatgacagtgcaagataactaaaatttaaaaaagaaactagtaaggtcaaatacatacacaaacaaaataaagcctgtatttattgagagccaagaaacagttcagaaatagaaggaacatccccggggaagcatatggacttcactctatatgctctagagggaatatgcttattcagtcaggcatatggcagaactttctccatattaatatagggacgggktaagagtgacgcctatcacataaattaaccatgttatagcaagttttcattatatgctctttgattttaggcccatagatttatcctataaagtatccaagctcatttaattagaatgtccaatgtcaaacttcccattcacaaaatggcatttgccctccaagttacagaatttacaaatggcttgatttatttctaagtgtcttagtttcagtaacatcattctctagcctggaattaaatacttaaacacatttgcattgagatggtattttttctatcaggcaccgaggtacattccttggctctgattaagtcttctttatgtgggattgaatgttgtcataattgcagtggacag

SEQ ID NO: 50198 - DNA, 566 bp, Homo sapiens
ggaacatctgcctataccccagctcccagatccagcctaggggcagaagagagaggcaaacacttccagccctgggccccacaactagcactcactgcgcaatgatgctttgagcaggcaaagaggagagcgacgaacacgcagattcctgcgaaggacaccagttgctcaggccgctgggaggtgtccagagacagccacaggaccaggcccaggaaagcagcaagagctagacccctgcaggcaagagacagaaagccattaccctcagcattgcacccccaccccacccacacacaatagcacccggggacccagagaaagggtgctcagggctgggaggargagaacagcacagcagactggaaagagcacagctctggaaccacatgctgggaagggctgaccctcgctgtgtgacctcaggcagatcaccttgcctctctgagtctagtttcctcatgggtcaaatgaagccagagacccctcatttctcaaggttgttgagaggattatataaggggatatatgtaccaagctgagcatagtgacaagcacctggctcc

SEQ ID NO: 50199 - DNA, 550 bp, Homo sapiens
agaagccgtttcagcaggcggtggcccaggaaggtgaggaccacacaggtgaggacaaacacgagccagggccctctggaaatccaggaggcaggccaccagcaggaaggcagagagccctgggggatgagacagaggaggggtcaacagccaggacaccacctcttcagaaccctgcagccccgcccgcggactccaccttactccacccagagcgtggagggcaggaaagtcacccaacctcactgagcctgtttcctcatctggaaatgaaaacaaccaccgctactgtgccaaaaagtagttaggakgtactggcagaaagtgttgtgaaagggccttgcaaactgtaaagtgcttaccaaatgtgagggagatgtgtaaggaggccgtgaagccaaacagcaagaggcgctgggcatcagtggagcatctgctgtggtccagcgccatgctaggccccacggaggaaggagacgagcccatcagctactccgtgaaggagtttacacatgtgtgctcggactgcgttctgaaatgttcatcaatg

SEQ ID NO: 50200 - DNA, 550 bp, Homo sapiens
agaagccgtttcagcaggcggtggcccaggaaggtgaggaccacacaggtgaggacaaacacgagccagggccctctggaaatccaggaggcaggccaccagcaggaaggcagagagccctgggggatgagacagaggaggggtcaacagccaggacaccacctcttcagaaccctgcagccccgcccgcggactccaccttactccacccagagcgtggagggcaggaaagtcacccaacctcactgagcctgtttcctcatctggaaatgaaaacaaccaccgctactgtgccaaaaagtagttaggaggtactggcagaaagtgttgtgaaagggccttgcaaactgtaaagtgcttaccaaatgtgagggagatgtgtaaggaggccgtgaagccaaacagcaagaggcgctgggcatcagtggagcatctgctgtggtccagcgccatgctaggccccacggaggaaggagacgagcccatcagctactccgtgaaggagtttacacatgtgtgctcggactgygttctgaaatgttcatcaatg

SEQ ID NO: 50201 - DNA, 572 bp, Homo sapiens
ttagatgaaccattaaggagctcgatgcaggtgtctaccacaaacagggatggcctgaactgaggcagtgggagtggcagtggcattgggagtgggagtggggatggagagaagacaggcagagaagagagactgaaggcatagttcagcagaatccgccaggtgactagacaagggaggaagagccgagaagggctccgctggcgttttttccttgagcaactgagtagacaagtgaaccattaactaaggtgggacaggaggagatgcatggggccagagggagagagtcacaggaggagctaagactyagatgcctacagatctatgtgccgttcccaagaaaactctggaagtggttggagtctggctcaggaggaacgtctctgtggctctctaatgtgcacagtgtgtgcagtgtgtgtgcagtgtgaagctgcaaagaaatgtggctctcacatttactgctgtagcaaagaatatagaaatatcttaaacgtaataaatgttccaataaaatgagaatactttcaagtgtcctcttataataaaattttaaagcaacagtctcc

SEQ ID NO: 50202 - DNA, 594 bp, Homo sapiens
cattcatttggatgatcatttgaatattgtctatctctccccaaattgtgagctctatgagaagacatcaatttctgttgaatgaatgaataatgaatgaatgagtgggagacatcttttatcttttccagatgaaggaaaggtcactcaaggattagacatgtctaatatagtccaaagatttaataccataaaagggttctgaggattgactttatcctatgactaaatggcttcaggtcaacttaatgggctacaaagctcaaaagagagctggctcacctgatcctaaaataatttttaaaaagatgcaacaggctttgaactcttccaccttcttccttctttcattttcaaatggtttcctttctggattcctaactaaggcttgtggcagaaattgctgtatatcccctaggagctgttcttttcttccacagtaataagaattttagcygggaatatgattgctcagaataaagatgatattttcctgacatccttgtagctagatgtggcttgattgggttctgtcaatgagaggcgagtggaggagctgcatggtagcctgctatggtttgagcatgatcccca

SEQ ID NO: 50203 - DNA, 2237 bp, Homo sapiens
ttcaccatagttgagtaaagatccgatttgatgatatttctggccgtcgacttttcttatacctggctagttcactcatttatgtgacccgcctggcccctgtaggcatgtgagtttccgatccctgccctggaactgttggatccagtsgggggagggcgggggtctgggagtcgtgtgagcaagctctctaggcgatcctcaggaatgtgagtgtggagcaggaggcactggtgacagcgaagaagtgcaagtgggtgatttcccaggcagcctgtgtagcaggggtttttgaaaactcagatggcttcagggaccaggcaggtgatgaaaatgtgtgaagcggacgggtgtaagacaacagggaatgatggggactgtggcgaacttggagagtgcttgccccgcctaatggcattcaaattgaaaacaaaaacactgtgaggaccaaacaaaatctgcctgtgggtctaatgaggccgccaggccgccattttgcgactggaagaaggagaagactcgagaacaaggacagaaccctgagaaagagccacgcgtaagggttgggcagggagccagaagacaggagaaccaggcaagtgtggcgttctggaagctgagtgtttgaggagggagcaatcgactctgtcagaagccgctgagaggagcaggaagcagccttcagtgtttccaccagggtggccatgtcccccggcaagggaaacgcaggtttggatcagaaacaaattggttaaaaggaaaggtttccagtcgccagtttggccatctcatgccagtggcgccctcttgaccttaacactcaaattagaggaaccagagggactgtcgtggcctaatcacacggtttacaggagtgaaccggggcttgcttattaatagtagcagacctgttaggggtgaaagaaaatgcccacccaccagctccaaagaggaattaggagaaaaaggacacctcaaaaggggtgttaagaatgtatttgtttcaaggtacgcaaaacactaacatattttctcaccatcttggcatttaaaaaaaaattaacttttaaaatgtattaagttacacacactagaacagtttcctaaaatgaaaggccactgaaatgtgtggaataaaaaggaggcccaggctgggcgcggtggctcacgcctgtaatcccagcactttgggaggctgaggcgggcggatcacctgaggttgggagttggagactagcctgaccaatatggtgaaactctgtctttactaaaaatacaaaattagctggccatggtggcacatgcctgtaatcccagctacttgggaggctgaggcaggagaatcacttgaactcgggaggcaaaggttgcagtgagccgagattgcgccattacactccatcctgggcaataagagcaaacctccatctcaaaaaaaaaaaaacccacaaaaaaaaaaccaaaaaggaggcccaaggaatgaggccagatctaggcacatgggactcacctccccatttcataggtcaggtgacgataaggcctaagaacttcacatgccccttagaaccagccaacaccaacagagcaaatcttttgggaaagtttttccctgaatacaaggttctcctaaggcaagaaatagtgaaaaccctagaacagcagggtttaatcccaagattctgcgctgattagctctgtgacctcgggcaggtccctgcatgtctctgagcctcactttctccatatgtcaaatagtgactaccccagaggattctcataaggaatacaagatctggcccagctcagtcctggacacaggagagctgctggtagccactgttgtcatcttttggctgaaatgcactctaagaaggtaaaaggtgggcaaaactgcttctagaaatgcatgccaagctggacctcacgcctgtgatcccagcactttgggaagccgaggtaggagaatcgctttgaggccagggtttcaggaccagcctggccaataaggtgagaccccatctctatttaaaaaatgcatcctgactgggcgtggtggctcacgcctgtaatcccagcactttgcgaggccgaggcgggcagatcacttgaggctgggagtttgagattagcctggccaacacggtgaaagcctgtctctagtaaaaatacaaaacttagttgtggttacgcacacctgtaatcccagttacttgggaggctgaggcataagaatc

SEQ ID NO: 50204 - DNA, 2237 bp, Homo sapiens
ttcaccatagttgagtaaagatccgatttgatgatatttctggccgtcgacttttcttatacctggctagttcactcatttatgtgacccgcctggcccctgtaggcatgtgagtttccgatccctgccctggaactgttggatccagtcgggggagggcgggggtctgggagtcgtgtgagcaagctctctaggcgatcctcaggaatgtgagtgtggagcaggaggcactggtgacagcgaagaagtgcaagtgggtgatttcccaggcagcctgtgtagcaggggtttttgaaaactcagatggcttcagggaccaggcaggtgatgaaaatgtgtgaagcggacgggtgtaagacaacagggaatgatggggactgtggcgaacttggagagtgcttgccccgcctaatggcattcaaattgaaaacaaaaacactgtgaggaccaaacaaaatctgcctgtgggtctaatgaggccgccaggccgccattttgcgactggaagaaggagaagactcgagaacaaggacagaaccctgagaaagagccacgcgtaagggttgggcagggagccagaagacaggagaaccaggcaagtgtggcgttctggaagctgagtgtttgaggagggagcaatcgactctgtcagaagccgctgagaggagcaggaagcagccttcagtgtttccaccagggtggccatgtcccccggcaagggaaacgcaggtttggatcagaaacaaattggttaaaaggaaaggtttccagtcgccagtttggccatctcatgccagtggcgccctcttgaccttaacactcaaattagaggaaccagagggactgtcgtggcctaatcacacggtttacaggagtgaaccggggcttgcttattaatagtagcagacctgttaggggtgaaagaaaatgcccacccaccagctccaaagaggaattaggagaaaaaggacacctcaaaaggggtgttaagaatgtatttgtttcaaggtacgcaaaacactaacatattttctcaccatcttggcrtttaaaaaaaaattaacttttaaaatgtattaagttacacacactagaacagtttcctaaaatgaaaggccactgaaatgtgtggaataaaaaggaggcccaggctgggcgcggtggctcacgcctgtaatcccagcactttgggaggctgaggcgggcggatcacctgaggttgggagttggagactagcctgaccaatatggtgaaactctgtctttactaaaaatacaaaattagctggccatggtggcacatgcctgtaatcccagctacttgggaggctgaggcaggagaatcacttgaactcgggaggcaaaggttgcagtgagccgagattgcgccattacactccatcctgggcaataagagcaaacctccatctcaaaaaaaaaaaaacccacaaaaaaaaaaccaaaaaggaggcccaaggaatgaggccagatctaggcacatgggactcacctccccatttcataggtcaggtgacgataaggcctaagaacttcacatgccccttagaaccagccaacaccaacagagcaaatcttttgggaaagtttttccctgaatacaaggttctcctaaggcaagaaatagtgaaaaccctagaacagcagggtttaatcccaagattctgcgctgattagctctgtgacctcgggcaggtccctgcatgtctctgagcctcactttctccatatgtcaaatagtgactaccccagaggattctcataaggaatacaagatctggcccagctcagtcctggacacaggagagctgctggtagccactgttgtcatcttttggctgaaatgcactctaagaaggtaaaaggtgggcaaaactgcttctagaaatgcatgccaagctggacctcacgcctgtgatcccagcactttgggaagccgaggtaggagaatcgctttgaggccagggtttcaggaccagcctggccaataaggtgagaccccatctctatttaaaaaatgcatcctgactgggcgtggtggctcacgcctgtaatcccagcactttgcgaggccgaggcgggcagatcacttgaggctgggagtttgagattagcctggccaacacggtgaaagcctgtctctagtaaaaatacaaaacttagttgtggttacgcacacctgtaatcccagttacttgggaggctgaggcataagaatc

SEQ ID NO: 50205 - DNA, 1344 bp, Homo sapiens
ggaaagatgaggggagttgagacagattttgctgcttaaaattaacaagacttggctgggcatggtgactcacgcctgtaatcccagcactttgggaggtcgaggcaggtggatcacttgaggtcaggagttcgagaccagcctggcctacatggtgaaaccacatctctactaaaaatacaaaaaatagccaggtgtggtggtgcacgcctctcttcccagccattcggcaggctgaggcaggagaatcgcttgaacccaggaagcagaggttgcagtgagctgagatcatggcattgcactccagcctgggcaacagtgagactgtcttacaaaaaaaaaaaaaattaacaaaacttgatggacatcataaggcaaggggctatggctgtcttgctaataactatatttattttctgcatcttgtaagagtgcaacacatatgtagtaaatccatgaatgaataaatgttgaggccacgagtaggcagattttagattggagttgaaagtgtcaagctgtcatagttcagtaacacaaagaattaagatgacttttaataatctgcccctcttcaactcagtatttattaaacagatttctgatttttaattttgcttattaataagcacttagtgctggggtatggaaagttttactcctcattacacgtgaacatactgacgtctggtttctacatcaaaccccaaagagtctggtcatttgcagacgaggcatctgtgggtctcacagttgagcttttggacctaaaaatattaggttggtgcaaaagtagttgtggttcttgccattgaaaagtaacagatatagtttacaatgaagagactgcctaactagtcagttagataccaggtgctatctaattgactagttaattggtctctgcactgtaacctatatctgttactactgtaagattcaaatggarcgagtgataatagacacactttgcagctctgaagcaaagattacatcaaccaaccagcccattggggacccatgaaagacagagttaagaaatggcagtaataacatggagggaaacaacacacactggggcccaatggagggtggagggggaagtggggagaggaacaggaaaaataaaaataactaatcggcactaggcttaatatttgggtgatgaaataatctgtacaacaaacccccatgacataagtttacctacataagaagcctgcacatgtacccttgaacttaaaataaatgttaaaaaattataagcaacccgaatttccattaacaaagaatagatattatgtagcctttcaaaagaaagaaagaaagagaaagaaagaaaaa

SEQ ID NO: 50206 - DNA, 1344 bp, Homo sapiens
ggaaagatgaggggagttgagacagattttgctgcttaaaattaacaagacttggctgggcatggtgactcacgcctgtaatcccagcactttgggaggtcgaggcaggtggatcacttgaggtcaggagttcgagaccagcctggcctacatggtgaaaccacatctctactaaaaatacaaaaaatagccaggtgtggtggtgcacgcctctcttcccagccattcggcaggctgaggcaggagaatcgcttgaacccaggaagcagaggttgcagtgagctgagatcatggcattgcactccagcctgggcaacagtgagactgtcttacaaaaaaaaaaaaaattaacaaaacttgatggacatcataaggcaaggggctatggctgtcttgctaataactatatttattttctgcatcttgtaagagtgcaacacatatgtagtaaatccatgaatgaataaatgttgaggccacgagtaggcagattttagattggagttgaaagtgtcaagctgtcatagttcagtaacacaaagaattaagatgacttttaataatctgcccctcttcaactcagtatttattaaacagatttctgatttttaattttgcttattaataagcacttagtgctggggtatggaaagttttactcctcattacacgtgaacatactgacgtctggtttctacatcaaaccccaaagagtctggtcatttgcagacgaggcatctgtgggtctcacagttgagcttttggacctaaaaatattaggttggtgcaaaagtagttgtggttcttgccattgaaaagtaacagatatagtttacaatgaagagactgcctaactagtcagttagataccaggtgctatctaattgactagttaattggtctctgcactgtaacctatatctgttactactgtaagattcaaatggaacsagtgataatagacacactttgcagctctgaagcaaagattacatcaaccaaccagcccattggggacccatgaaagacagagttaagaaatggcagtaataacatggagggaaacaacacacactggggcccaatggagggtggagggggaagtggggagaggaacaggaaaaataaaaataactaatcggcactaggcttaatatttgggtgatgaaataatctgtacaacaaacccccatgacataagtttacctacataagaagcctgcacatgtacccttgaacttaaaataaatgttaaaaaattataagcaacccgaatttccattaacaaagaatagatattatgtagcctttcaaaagaaagaaagaaagagaaagaaagaaaaa

SEQ ID NO: 50207 - DNA, 1217 bp, Homo sapiens
gtctcttccttagtcagattgatacaattggggctaagtcaatataatctaagttaaacctgtctaggttttgttacagttctagttagattcagttcacaactggcttaaaatattttgggagtaggatcaggacttccccttcaacagtttgggatctgagcactggctacacttttaagatctctctatacttaactgatgagccaccagctttggggtcatttaaaagctctttttactcctcagcccaccccatctttctctgcctcaagtgatttctactcaccacactattctgctcccagcttcatcaggctaccgtcttgtacctggtgaagaccccatgtttcttgggggatgtgtctcagttctgctgtgctgccccaacctttgtccgaccacaactaaacagtctgtgcctcaaggttttctctcaaccaatctgaccatcagcaggccattgccatgcactcagagaaaaatctgtactccttgagactcctttaagcctttctttgctactcccagactcagcaatctcccactgtgcactcagtgaagccatcccacccaaggtgaagagctgccaggttaatgcagactgcgtctttcactggggcttcatagatttgaatctaccatgccagaccacaaggcctattaaaggtttggctgatttctcctttcaatctatggtgggtttgctgcctctctgcctttcccagggatgagagaactcatgggtttctgggtttcttctttttcataaatatcttagccctttgtgcagtttagtttatttagggttttatttttctattcttagatattttttctctctcttattctctccctctctgtaaataaagctaaatttcacatcctgccctcctcaaggacattttgttacctcttccccagaggaaataatakattttttttcctatggcccatcttttgtataaattgactaatcataaaaatatacagagtatgttagtaatctagataaattgtatcctactatgcatatcatgctgaaactgaatttgttcattcaaggattctgttttttcaatatccatgtaaatgctaacagatatagttcttggatttcatcttctgtatagggttccactctatgaataagctactatatacttaattaatttgttatcctccttatggacatataaattgttctttattagggg

SEQ ID NO: 50208 - DNA, 574 bp, Homo sapiens
tgcctcacacctgtaatcccagctctttgggaggccgaggcaggcagatcacgtgagctcaggagtttgagaccagcctggccaacacggtgaaaccccgtctctactaaaagtataaaaattagccagatgtggtggcaggtgcctgtaatctcagctacttgggaggctgaagcaggagaatcacttgaaccaggcaggcggagattgcagtgagccaaggtcaagccactgcactccagcctgggcgacagagcaagactcagtctcaaaaaaaataaataaataaaataaaaataaaaaaataaataaaagcattggcctgtkcttcctcatagatatttgagaggcaccagtgtggagggttttttgttattgggtagaaaggctgggctgcacccacattaaggccccttcctagtaagattgaattatatacattttaatgaataacatatgaaaattgcctagcacagttccaggcacataattggtactcagtacaatctttcttattttaattgcataattgttataccttgaaagtcaaccatttgtgcacaaaaatgaaaat

SEQ ID NO: 50209 - DNA, 563 bp, Homo sapiens
aaagactctgagtagttctctagtcaggaactctgctcctttgcacagatatttgagcaatggacccttttattcacatcccaatccacaagttctcaggatgaccagcttgtggattgggstgtgaataaaaggtaaataagaaagtgtctattaagtgtctggtgtctatcatcagtgctcctcaataagtggttattatacatatcattatttcctttaatccttgataatgcctgtgagatgagtagtatgccaccacttccacagttgaagaaactacaaagcagtgaaactgaaaaggacattgctcaggcacacagccaggatgcaacagggattcggctctccacttcctgtggtgctggaagagctgcgaatcacactccctaggtgtgagacccggaccaatccctgatcccacccacagctgttgtgattggctcagggttggcacatgatcccaggcaaggccaatcattctcccctgagatgaatgttgagataagggcattttctactccatggctactggtagccatcttgcctaccatggagtgatt

SEQ ID NO: 50210 - DNA, 533 bp, Homo sapiens
tggagtctcactctgtcattctggcttgagtgcagtattgccatctgggctcactgcaacctctgcttcctggttctcctgccttagcctcctgagtagctgggattacagggatgcaccaccatgcctggctaatttttgtatttttagtagagatagggtttcaccatgttggccaggctgatctccaactcgtgacctcaggtgatccactggcctcagcctcccaaagtgctgggattacaggtgtgagccactacgccaggccccaaaccttgaattctatagtaatcccttatttgttcatgatatattttcctttcttaaaatacatttctgatttgacttgctcatttttttaaattattaatattaatctttttttaagagtatcttgttttgctgctagaacaatgctggcctcaaaaaayaaatgagatgtgttatctgatatactaatttcagagtttcaggataaatatgaagaaaaactctagctcttcacggtcaaatgattaagaaaacaaaggtaa

SEQ ID NO: 50211 - DNA, 533 bp, Homo sapiens
tggagtctcactctgtcattctggcttgagtgcagtattgccatctgggctcactgcaacctctgcttcctggttctcctgccttagcctcctgagtagctgggattacagggatgcaccaccatgcctggctaatttttgtatttttagtagagatagggtttcaccatgttggccaggctgatctccaactcgtgacctcaggtgatccactggcctcagcctcccaaagtgctgggattacaggtgtgagccactacgccaggccccaaaccttgaattctatagtaatcccttatttgttcatgatatattttcctttcttaaaatacatttctgatttgacttgctcatttttttaaattattaatattaatctttttttaagagtatcttgttttgctgctagaacaatgctggcctcaaaaaataaatgagatgtgttatctgatatactaatttcagagtttcaggataaatatgaagaaaaactctagctcttcayggtcaaatgattaagaaaacaaaggtaa

SEQ ID NO: 50212 - DNA, 550 bp, Homo sapiens
tctgagtgatccagggttgaaaagttcatcagagagtctttgttagggagcattgtctgcaggacttcccaagttaaatttggcagcaatcatctaggcgtcttggttcctttctaagggtcttaaaaggagggtttaattacgcgactggattagtggattctttgctggctcagaagccaatttattaagtaaataatttcaaaatactttctaaaccattttaaatttgatgcttacagatttggatgaactaaagttaccaatctagagattcaagtggagtctttatcagtgaaatttactrtactattaatttcctggtgtaaaagatactcccttagatgatgctggcattctttttgattttttcaaatctctgggtttttattagaatattttaaaggagtcagatacattttcaaaccattttagatgtgctttgttgttgaataagtggatagcagataacatattaagtataaattacagattattctcaatgtaggtaaagttgcatatcattatgaaataagttttgggtagttct

SEQ ID NO: 50213 - DNA, 525 bp, Homo sapiens
cccagctacaaggaaggctgaggtgggacgatcgcttgagcccaggggtgtaggctgcagtgaactatgatggcaccactgcattccagcttgggtaacagagtgagatcctgtgtcaaaaaaagaaaactaatatttaaatattatatgtttcaatatttcgaacattttggattgaaaaatacagttctttcattgtctccaaattttttcatatgaatactaatagaagcataatttgattgcatctattttccatattattctaagacaaaagtatatttgctttactatcaaatttagagatgtctactgacacagcttttttccttyaaagttagcaacaactgttatctaatcaaagttactactgtaccataaatgtgttttatattttaaagatttataaattagtagaagataaatgtgatccctaagaacactacctttttgtttgcttgttcttcaggcttcatggtaggaaaattatcccctggctgcctactgatctgtcaatatcattga

SEQ ID NO: 50214 - DNA, 553 bp, Homo sapiens
gctgatgcggggtgagtatctgcacacactcccctcatgctgcaagcaaaggactcagctctctccatgttgggaatagatatcgtagtgtggtcggccaggtaccaaatgatacaccagcttaggcaaacacaggagtccatattgagtgaaaagggaggtattcccacacaaggtgataagcccagcacagctgtgagggctctttaaactctcagtaaagaagtgctccaggcccaaagctcatgcttatgtgtccaggcagatgtctcaggaccgcttgcacgtgacggcctttcccaacaattatctcacagaatcttgcagggcttacarttgaaggaagtctttagggtcattccatctactttcctatccgtgtcattttgtccactgtctatttagatttggctgccagacatcaggatgctcagttagctggcccaactcttatgctgtgtgccagtgaatttacccagttcccagccatccctgggactggtccaaacagctattacatcacatttttgacacttgagagattgaatataca

SEQ ID NO: 50215 - DNA, 553 bp, Homo sapiens
gctgatgcggggtgagtatctgcacacactcccctcatgctgcaagcaaaggactcagctctctccatgttgggaatagatatcgtagtgtggtcggccaggtaccaaatgatacaccagcttaggcaaacacaggagtccatattgagtgaaaagggaggtattcccacacaaggtgataagcccagcacagctgtgagggctctttaaactctcagtaaagaagtgctccaggcccaaagctcatgcttatgtgtccaggcagatgtctcaggaccgcttgcacgtgacggcctttcccaacaattatctcacagaatcttgcagggcttacagttgaaggaagtctttagggtcattccatctactttcctatccrtgtcattttgtccactgtctatttagatttggctgccagacatcaggatgctcagttagctggcccaactcttatgctgtgtgccagtgaatttacccagttcccagccatccctgggactggtccaaacagctattacatcacatttttgacacttgagagattgaatataca

SEQ ID NO: 50216 - DNA, 603 bp, Homo sapiens
tgcatcaaactctcccacccttcacaaagatcctctgcctggaatgatattcttctctcttctgtttattccattctattctaccccatttctaaggctgagctcaaagacagcctttgctgacttaggtggttgtaccccgtgcttctcagcatctaaatgtaatttttaataataatataatatgcaatgagttatgttttacttgtgtgctctgctagagcaagggttctcaaagtacatggtacctggaccaagagcatcagaatctcctgggaaattgtcggggatgtaactcctccagacytactgaatcccacactctggatgtggggcccagcatggagggttttaagcaggcttcatgtcattctgctgcatcctgaaatttgagcaccactcagacagagtcttaactccttgagaggcaaggagcacatctgcttgttgtattgccacatcctcattgtctacctcagcatcctatgagagatatgcacctgataagtatttgttggataaatgagtacatggcccatgaacctgaggcggagctctctgcacttagaggtagggtgcatgttcatttaggttaaaaataaa

SEQ ID NO: 50217 - DNA, 603 bp, Homo sapiens
tgcatcaaactctcccacccttcacaaagatcctctgcctggaatgatattcttctctcttctgtttattccattctattctaccccatttctaaggctgagctcaaagacagcctttgctgacttaggtggttgtaccccgtgcttctcagcatctaaatgtaatttttaataataatataatatgcaatgagttatgttttacttgtgtgctctgctagagcaagggttctcaaagtacatggtacctggaccaagagcatcagaatctcctgggaaattgtcggggatgtaactcctccagacttactgaatcccacactctggatgtggggcccagcatggagggttttaagcaggcttcatgtcattctgctgcatcctgaaatttgagcaccactcagacagagtcttaactccttgagaggcaaggagcacatctgcttgttgtaytgccacatcctcattgtctacctcagcatcctatgagagatatgcacctgataagtatttgttggataaatgagtacatggcccatgaacctgaggcggagctctctgcacttagaggtagggtgcatgttcatttaggttaaaaataaa

SEQ ID NO: 50218 - DNA, 514 bp, Homo sapiens
tttagttggtcaagattggggcctaaatgccaaaataagactgttaataacaaaagaaagaaaaattatagactggctaaagtgtcattaagcactgtgttacccattggcaaggagggactcarcattgtatagttttgataaaatatatacctaattcatgtgtaaattatacaagcttagattccccaatacatggttagctacactagtggatatttttagctattagaataatctaagttaatcacaaaagctatgtacattgaaaatcccattagctgaaactttaatttcagaaattgggctaacccataattaaatttataaaatatattgattttacctctttttaaaaactcatttgagacagggtctcattctgtcacccaggctggaatgcagtggcacgtttgtggctcactgcagccttgacttcctgtgctcaagtggtcctctcacctcagcctcctgagtagctgggatcagaggcatgtgccagcatgcccagcca

SEQ ID NO: 50219 - DNA, 1572 bp, Homo sapiens
taaagacattaaatatgaaattattgttaaataagtgataattaaaggcaaggraatgggatagcattcaatgatttgcaacaggtcaatgctcatatagaggacaactagaaagactgggttaaaggataaaagtcaaaaagaggcaaaggactaaagggatcaaaattccggagagagcagaagctttcagaggtgaactgggcatctaaaactgcccctgaggtacttgccaaattcttgatgcacgctagatgctggcaatctgcactaggcccaggttgggggtcacaactggaagacaagcaaacgggcagttttcagtgatcacatggggctaagaatgacaaaataatttttcttcttgagaaatttgctgaaatctgaagcagtgaagggcttcagtataaacagaaaagaatcatgatgtatctgtatctttccatcaagaggctcatttagaaaactagttcttcaacattttcccttctgtcttcgttattttaacatatttatgtctccttaattgtggtagtcactgtggattcaaataagagagtggaggagcactttaaggaaaaaagtggaataaaagaggaacacaaatgaccaggtctctactcctctgatgcatgttagatgtaacaaggtagacagaaaaaaaaatgtagttttactaataaatattgaattgtactattaaaatatactccaaacaaaatagaaaaacacaatgagaaaattacatgatagtctaacttattctggggattcggggagggtattcctgaagaaattacatttgaaccaaaccctgaaggatggaagataagtatttcacacagtgggaacaacagatgcaaaaagtctggagggagaagtagctttgtaagcatgtcatattacagaatgtaatgagcatggagggtgatgggggcaaaagttgagaagtggcatgaaataacactgattagatcaggctgaccattttaaattttctttgcaattctagatttaattcttagaacaatgggaagccattgaaggatcctaatgtgaggcattagaataatcagaatttcatcttaaaatatcactttcgttcttatatggagaatgcacagaagggataagggtggttattgggagataaattgtttcatttatttcatgaagctatacgcttgaaattgggcagtggtattagagataaaaaaagagatatgaaaaaaattttttaatgacagtattggatctactgattaggtgtggtgaatgagaaaaaaaggtcattttgaaaatgcctttttccaagatttgggcttgagaagtgcgtaaacaaatgttccatgtttttttattttgaaacggggagctctaggggaagaataaattttgtgcaagacagcaacttatatttagaaccgatgtcttataagaaagatatggattaaaaatataaatttagaggccatataaaaagagtgaaagcttccttttacatgttgggagagtattgacaagttttttttttgttgtttatttcatgaaattcttaactattctattata

SEQ ID NO: 50220 - DNA, 1572 bp, Homo sapiens
taaagacattaaatatgaaattattgttaaataagtgataattaaaggcaagggaatgggatagcattcaatgatttgcaacaggtcaatgctcatatagaggacaactagaaagactgggttaaaggataaaagtcaaaaagaggcaaaggactaaagggatcaaaattccrgagagagcagaagctttcagaggtgaactgggcatctaaaactgcccctgaggtacttgccaaattcttgatgcacgctagatgctggcaatctgcactaggcccaggttgggggtcacaactggaagacaagcaaacgggcagttttcagtgatcacatggggctaagaatgacaaaataatttttcttcttgagaaatttgctgaaatctgaagcagtgaagggcttcagtataaacagaaaagaatcatgatgtatctgtatctttccatcaagaggctcatttagaaaactagttcttcaacattttcccttctgtcttcgttattttaacatatttatgtctccttaattgtggtagtcactgtggattcaaataagagagtggaggagcactttaaggaaaaaagtggaataaaagaggaacacaaatgaccaggtctctactcctctgatgcatgttagatgtaacaaggtagacagaaaaaaaaatgtagttttactaataaatattgaattgtactattaaaatatactccaaacaaaatagaaaaacacaatgagaaaattacatgatagtctaacttattctggggattcggggagggtattcctgaagaaattacatttgaaccaaaccctgaaggatggaagataagtatttcacacagtgggaacaacagatgcaaaaagtctggagggagaagtagctttgtaagcatgtcatattacagaatgtaatgagcatggagggtgatgggggcaaaagttgagaagtggcatgaaataacactgattagatcaggctgaccattttaaattttctttgcaattctagatttaattcttagaacaatgggaagccattgaaggatcctaatgtgaggcattagaataatcagaatttcatcttaaaatatcactttcgttcttatatggagaatgcacagaagggataagggtggttattgggagataaattgtttcatttatttcatgaagctatacgcttgaaattgggcagtggtattagagataaaaaaagagatatgaaaaaaattttttaatgacagtattggatctactgattaggtgtggtgaatgagaaaaaaaggtcattttgaaaatgcctttttccaagatttgggcttgagaagtgcgtaaacaaatgttccatgtttttttattttgaaacggggagctctaggggaagaataaattttgtgcaagacagcaacttatatttagaaccgatgtcttataagaaagatatggattaaaaatataaatttagaggccatataaaaagagtgaaagcttccttttacatgttgggagagtattgacaagttttttttttgttgtttatttcatgaaattcttaactattctattata

SEQ ID NO: 50221 - DNA, 1572 bp, Homo sapiens
taaagacattaaatatgaaattattgttaaataagtgataattaaaggcaagggaatgggatagcattcaatgatttgcaacaggtcaatgctcatatagaggacaactagaaagactgggttaaaggataaaagtcaaaaagaggcaaaggactaaagggatcaaaattccggagagagcagaagctttcagaggtgaactgggcatctaaaactgcccctgaggtacttgccaaattcttgatgcacgctagatgctggcaatctgcactaggcccaggttgggggtcacaactggaagacaagcaaacgggcagttttcagtgatcacatggggctaagaatgacaaaataatttttcttcttgagaaatttgctgaaatctgaagcagtgaagggcttcagtataaacagaaaagaatcatgatgtatctgtatctttccatcaagaggctcatttagaaaactagttcttcaacattttcccttctgtcttcgttattttaacatatttatgtctccttaattgtggtagtcactgtggattcaaataagagagtggaggagcactttaaggaaaaaagtggaataaaagaggaacacaaatgaccaggtctctactcctctgatgcatgttagatgtaacaaggtagacagaaaaaaaaatgtagttttactaataaatattgaattgtactattaaaatatactccaaacaaaatagaaaaacacaatgagaaaattacatgatagtctaacttattctggggattcggggagggtattcctgaagaaattacatttgaaccaaaccctgaaggatggaagataagtatttcacacagtgggaacaacagatgcaaaaagtctggagggagaagtagctttgtaagcatgtcatattacagaatgtaatgagcatggagggtgatgggggcaaaagttgagaagtggcatgaaataacactgattagatcaggctgaccattttaaattttctttgcaattctagatttaattcttagaacaatgggaagccattgaaggatcctaatgtgaggcattagaataatcagaatttcatcttaaaatatcactttcgttcttatatggagaatgcacagaagggataagggtggttattgggagataaattgtttcatttatttcatgaagctatacgcttgaaattgggcagtggtattagagataaaaaaagagatatgaaaaaaattttttaatgacagtattggatctactgattaggtgtggtgaatgagaaaaaaaggtcattttgaaaatgcctttttccaagatttgggcttgagaagtgcgtaaacaaatgttccatgtttttttattttgaaacggggagctctaggggaagaataaattttgtgcaagacagcaacttatatttagaaccgatgtcttataagaaagatatggattaaaaatataaatttagaggccatataaaaasagtgaaagcttccttttacatgttgggagagtattgacaagttttttttttgttgtttatttcatgaaattcttaactattctattata

SEQ ID NO: 50222 - DNA, 663 bp, Homo sapiens
tgatgtctgtcgttgacaaactaatgaatgtttagacaaagtacagatataaaaattttgtaggctgggcgcagtggctcacgcctgtaatcccagtactttgggaggccgaggtgggcggatcacgaggtaaggagatcgagaccatcctggctaacacggtgaaaccccgtctctgctaaaaatacaaaaaattagctgggcgtggtggcaggcgcctgtagtcccagctactagggaggctgaggcaggagaatggcgtgaacccgggaggtggagcttacagtgagccaagattgtgccactgcactccagcctgggggacacagcgagactgtctcaaaaaaaaaaaaaaaaaattataaagggacatgttggagaaatggcaagttatatttatygaatatccttgaatatattgtttaacatatgtaggataccaacagtcaccttgtttacacattttaaaaatgggtttcacccgcattctaattggtattagagatatttacactccccaaagcttgtacgctccttaggaacaagataccattttagatttacttctatagtacattctagggagtagaaatagaactctttgtaaataaatgaattagaactcagcacgacttggtcattgcgctgtgaaactacaaagaa

SEQ ID NO: 50223 - DNA, 628 bp, Homo sapiens
cgaagaatcacagagcctgcggtaataggcaccaattctgaattctggccctgtttrtcacaccttataagccccagactagtcattgctttttctgcaaccgtgcatttgagagttgtgagaattgattgaatatgtaaaatcttagtacacagtgtgtgctcaaaaactgcatgcacttcccttactatgattccaaagactgcgtctcaaacaatagagggcatagctcaagtgcctagatgagcaagcccctctccaaggagtgctaatagaatgttcttccccaaactcacactttgataggaaactacattgtcattttcccatttgtgagcctttgttctaatcattagagctgttacaaactcaacaggcttcccgagttcacaaagtatgtcaagttcatatgaaattagaaaatctttttttcttttttttctttttttttttgagtctcgctctgttgctcaggctggatgcagtggtgtgatctcggctcactgcaacctctgccttctaggttcaaacgattctcatgcctcagccaacccagtagctgggattacaggcatgcgccaccacgcccggctaatttttgtatttttagtagagacagggtttcact

SEQ ID NO: 50224 - DNA, 821 bp, Homo sapiens
aaatgggagacgacacttcaaaatactatatacttgtaatgaaatttcaattaaagttttaagacaaagtttgagaaagttaatgagattatgataaaatctagattaacaaaacaatgtctatacatatctttgtaaattataaaattaagataaaatcaaatacagtgcatttaatagcatttcarttttatgttttataatttgtaactctaccaattaattcttgcatcaaaatacagcatgaacatttataatcaattctaagaggatgtgaagtgaatgtttatactaatatatattccattccgatataattcataagtaataagtatttaggtttgcagtacaaatttatttatcactcaaaaactccaaggcatagaggtcccaggaagtcaaatgttactcaaacttcaataaggttaggcagtatcaaaggcaatatagcaaataattgtgatcaagagatattcagtgttattacagtgaaaatgtcacaaaaaaccatctacatgaaatattctataaggttttatctcaaataaatccaaaaaatttttttccgtttagagatttggctgtcatctcccttaacagattgtagattaaggaggatgacagaggaagagtcagagaacaaaagtcaggggtgagagagacagagagagaaagagagagagagaggtcactaataatgcaaaccagaggactgaggtttgagacacaaaatgccaacatgaccaccacacccagtgttcagcacacatacaaagagctctgttagttcatagcagcttttgtgttaatgtattatgttc

SEQ ID NO: 50225 - DNA, 1866 bp, Homo sapiens
aattgtgaattgtactgctgtaaacatatgcatgtaagtgtcttttttttgtttttgtttttggcttttttttttttttcgacaaggtctcactctgtcaccgagactggagtgcagtggtgcgatctcagctcactgcaacctctccccatctctggactcaagagtcagtcttcccacctcagccttccgagtagctgggaccacaggcgcgcagcccacgctcagctgtttttttttttyctttgttttttgtattttattttatttttttagtagagacggggggcgtctcaccatgttgcccaagctggtctcgaactcctgaactcaagcgatctgccagcctcggcctcccaaagtgctgagattacaggcatgagccaccgtgcccagcctcaagtatctttttcatataataacttttcttcctttgggtagatatctaggagtgggcttgctggattgaatgtagatctactttcagttctttaagggttcttcatactgttttctatagaagaatttgagatagaagaaaagtctaagtatccaacagcatgtcacccacacatgactggaaaaaaatccctaatgagttcagtcataattctttctctctctcttttttcttactcattcacatgcgtataaaaaatccattcataatctaagatttgatgcagatgttaaaattcactttcagtctttgggaaaaacattcaggtcagcagttcctgaatgttactaatcattttagaattagaattttgttttctaagctcatgcatccaatttttacattgtatatgtagttttgttagaatcaactaagaatgaaagactgaaaatcagtcatagaaaggttcagattatgtagcaaccactatgtagggaaatgcctggatataatcattattacagagataaacagatgctgagataaataatttgaaaaaatccattatttcactgcttcagctgaatacagttactcactatgtatttgtgttccactaaatattccattaagacgattcgaatagcttcaaaaatctattcagtgccattaaacatatgataaatatgtaggaaatgtataataaaaggctctttatagaaaataggaattagttaccattgattgtaagaccattacatttaacagtatctagttggacaaaactgcagattaaaaaattgaatgtaagaagtttagctaagaggtcatttaataataatttgcacatgtagcctcatgtaggaacgacctccacaggctgaggtgggaagatcccttgagctgggtagtttgagaatgcagtgaacagtgatcacaccactgtacttcagcctgggtgacagagtgagagcctgtctccaaaaggaaagaaagacacaaagaaatgagtaaaggtttcacattcatctttttataattcagttaatagaatcttgtattaacattgtcaaactatttaggtaccttttgaaatcactagtcatagtcatatgtcttaatttgtgatttaactaaaaaatactttttaaaatatggaaattttattacaaggataataacatatacatttttacaatagatattaaatgttttaatttcttaatgactctcactaccttttctgataattttggaaaacaaaatctatttgtgtacttcttttatgtagtatttatgggaaaaatgacatttgtctctggtagaagttatgttgctgttttttttttttctttttcagtctaagcagacgtttcttcttccatgatgttattttatttggaaaaaaaagtcaacgttaatgccataaaatctcattcactctaatttttctgatttagaatgca

SEQ ID NO: 50226 - DNA, 1866 bp, Homo sapiens
aattgtgaattgtactgctgtaaacatatgcatgtaagtgtcttttttttgtttttgtttttggcttttttttttttttcgacaaggtctcactctgtcaccgagactggagtgcagtggtgcgatctcagctcactgcaacctctccccatctctggactcaagagtcagtcttcccacctcagccttccgagtagctgggaccacaggcgcgcagcccacgctcagctgtttttttttttcctttkttttttgtattttattttatttttttagtagagacggggggcgtctcaccatgttgcccaagctggtctcgaactcctgaactcaagcgatctgccagcctcggcctcccaaagtgctgagattacaggcatgagccaccgtgcccagcctcaagtatctttttcatataataacttttcttcctttgggtagatatctaggagtgggcttgctggattgaatgtagatctactttcagttctttaagggttcttcatactgttttctatagaagaatttgagatagaagaaaagtctaagtatccaacagcatgtcacccacacatgactggaaaaaaatccctaatgagttcagtcataattctttctctctctcttttttcttactcattcacatgcgtataaaaaatccattcataatctaagatttgatgcagatgttaaaattcactttcagtctttgggaaaaacattcaggtcagcagttcctgaatgttactaatcattttagaattagaattttgttttctaagctcatgcatccaatttttacattgtatatgtagttttgttagaatcaactaagaatgaaagactgaaaatcagtcatagaaaggttcagattatgtagcaaccactatgtagggaaatgcctggatataatcattattacagagataaacagatgctgagataaataatttgaaaaaatccattatttcactgcttcagctgaatacagttactcactatgtatttgtgttccactaaatattccattaagacgattcgaatagcttcaaaaatctattcagtgccattaaacatatgataaatatgtaggaaatgtataataaaaggctctttatagaaaataggaattagttaccattgattgtaagaccattacatttaacagtatctagttggacaaaactgcagattaaaaaattgaatgtaagaagtttagctaagaggtcatttaataataatttgcacatgtagcctcatgtaggaacgacctccacaggctgaggtgggaagatcccttgagctgggtagtttgagaatgcagtgaacagtgatcacaccactgtacttcagcctgggtgacagagtgagagcctgtctccaaaaggaaagaaagacacaaagaaatgagtaaaggtttcacattcatctttttataattcagttaatagaatcttgtattaacattgtcaaactatttaggtaccttttgaaatcactagtcatagtcatatgtcttaatttgtgatttaactaaaaaatactttttaaaatatggaaattttattacaaggataataacatatacatttttacaatagatattaaatgttttaatttcttaatgactctcactaccttttctgataattttggaaaacaaaatctatttgtgtacttcttttatgtagtatttatgggaaaaatgacatttgtctctggtagaagttatgttgctgttttttttttttctttttcagtctaagcagacgtttcttcttccatgatgttattttatttggaaaaaaaagtcaacgttaatgccataaaatctcattcactctaatttttctgatttagaatgca

SEQ ID NO: 50227 - DNA, 1866 bp, Homo sapiens
aattgtgaattgtactgctgtaaacatatgcatgtaagtgtcttttttttgtttttgtttttggcttttttttttttttcgacaaggtctcactctgtcaccgagactggagtgcagtggtgcgatctcagctcactgcaacctctccccatctctggactcaagagtcagtcttcccacctcagccttccgagtagctgggaccacaggcgcgcagcccacgctcagctgtttttttttttcctttgttttttgtattttattttatwtttttagtagagacggggggcgtctcaccatgttgcccaagctggtctcgaactcctgaactcaagcgatctgccagcctcggcctcccaaagtgctgagattacaggcatgagccaccgtgcccagcctcaagtatctttttcatataataacttttcttcctttgggtagatatctaggagtgggcttgctggattgaatgtagatctactttcagttctttaagggttcttcatactgttttctatagaagaatttgagatagaagaaaagtctaagtatccaacagcatgtcacccacacatgactggaaaaaaatccctaatgagttcagtcataattctttctctctctcttttttcttactcattcacatgcgtataaaaaatccattcataatctaagatttgatgcagatgttaaaattcactttcagtctttgggaaaaacattcaggtcagcagttcctgaatgttactaatcattttagaattagaattttgttttctaagctcatgcatccaatttttacattgtatatgtagttttgttagaatcaactaagaatgaaagactgaaaatcagtcatagaaaggttcagattatgtagcaaccactatgtagggaaatgcctggatataatcattattacagagataaacagatgctgagataaataatttgaaaaaatccattatttcactgcttcagctgaatacagttactcactatgtatttgtgttccactaaatattccattaagacgattcgaatagcttcaaaaatctattcagtgccattaaacatatgataaatatgtaggaaatgtataataaaaggctctttatagaaaataggaattagttaccattgattgtaagaccattacatttaacagtatctagttggacaaaactgcagattaaaaaattgaatgtaagaagtttagctaagaggtcatttaataataatttgcacatgtagcctcatgtaggaacgacctccacaggctgaggtgggaagatcccttgagctgggtagtttgagaatgcagtgaacagtgatcacaccactgtacttcagcctgggtgacagagtgagagcctgtctccaaaaggaaagaaagacacaaagaaatgagtaaaggtttcacattcatctttttataattcagttaatagaatcttgtattaacattgtcaaactatttaggtaccttttgaaatcactagtcatagtcatatgtcttaatttgtgatttaactaaaaaatactttttaaaatatggaaattttattacaaggataataacatatacatttttacaatagatattaaatgttttaatttcttaatgactctcactaccttttctgataattttggaaaacaaaatctatttgtgtacttcttttatgtagtatttatgggaaaaatgacatttgtctctggtagaagttatgttgctgttttttttttttctttttcagtctaagcagacgtttcttcttccatgatgttattttatttggaaaaaaaagtcaacgttaatgccataaaatctcattcactctaatttttctgatttagaatgca

SEQ ID NO: 50228 - DNA, 596 bp, Homo sapiens
tttttattaggctgcaaagaagagatgcactttgtagttgcttgggtaaaaagatatttgtattttattcacttattgtagaccctcatgaggtagcccatttgtttagggaaagtaggcataatgtatattttccttaaaagttggcaaacttcatgtgaacccgccaagagaaatagagtatagtagttcataatttttttaaattattttttatttttttattttttgagatggagtctcactctgttgcccaggctggagtgcagtggtgcaatcttggctcactgcaacctccatctctcatgtcaagcgattctcctgcctctgcctcctgagtagctagtattacaggcactcaccaccgcaccaggctaagttttgtatttttagtagagatggggtttcatcaagttggtcrggctggactcgaactcctgacctcgtgatctgcccatcttggcctcccaaagtgctaagattacaggcgtgagccaccatgcccagcctatagttcagaatttttaagatgtatgaactcgaaaggaatcaatactaagaactgagggtgtgaaagcacaagcatggaacatcct

SEQ ID NO: 50229 - DNA, 553 bp, Homo sapiens
ttaactgaaaatcactacttcagactaatctaaattcatttgtaattagcactaagtggggaaagggggctttctttcttttttgtagaaatacttcccttgaacttgttggtgcaatctaaaggtaaagaacctacatggaaaattcttgactagtgagataatagaaacagagtttcaaaagctttgaggaattatttataagtggttgaagtcttatatataattaaagattcaaataaaattttcagtagtgaatagatgaatagatttagaaactatgggcaatggaaggttgtgtgttttgcaaatttgttttagttctttaaagctcagattccttatcttcaaaaatggagaaagtaaggcaaacttgatgaattttgggggatcaatcaagatagtcacatataaaggaggattattctgtatgaattattttgcccaaatttggtttccattaagatttttcccccaggtagtcttatctttcttttgtcttcttctcagagcagtggaacmatgcttaatctcagtttgcaaagatactaca

SEQ ID NO: 50230 - DNA, 552 bp, Homo sapiens
tttggaaactgtgaactcccatagtataacatttacatcccttataatgtcatatgatttatccaatttaggcattttaagcttcaaaactgctgatttctcaaatataccgtgtcctttatctcagagttcactaaaatcagtttgctatgataccgtgtctgtgtgaggtaggaaagaacaaggaatagttgttaaygcagtgtcttataaggatggttcttaaggcctggtctacaaaaatacactgtagccagagatgggtaggccagaagattaccctgattttcaaaactccatggaaatcatcagtgtaggtcattttgaaaaaggcctaattatttggggattcaaatcccacaaaaatttgcttggaaaaactaaacaaatcctgagaaaagctagacttttagaatgtaaagtatagtacagcagttccctcttacccacagttttgcttttgatggttttagttacccacagtcaaatgcagtctgaaaatgttaaatggaaaattctagaaataaacaattcttaagtttaaaactgtgc

SEQ ID NO: 50231 - DNA, 543 bp, Homo sapiens
agataaggttgcatgagtgctaagggatccttgcagtgatcaaatttgtactgttgaacatttcaaataaaattaccatagtgaaaacctttttgcacaggctaatgagactttaagtgagatcaagcaggaggcaratccaatcattcacgtaagccttcatatgtaactcagggctctctggtttaagaaacagactgctcaatgagaaaaagaccaacaacccaatggaaaaacgagtatagcacttgggaaaaaacgctcaacttcacttataataaaataaaagtaaacttcaagaaactatttttacctgtcagattgataaagatcaagaagttgtgataggcaagagtcctgtacgtcgttgctgagaatataaattgaaagacaggttttggaaggacggttgacaatgtctatcaaaaatttaagtgtaatgaaatagactcagcaatttcacttctatgaattctttattcttttagaatgtatgcacagtagtactagcgttctttataatagtaaatgtctggaaacaat

SEQ ID NO: 50232 - DNA, 543 bp, Homo sapiens
agataaggttgcatgagtgctaagggatccttgcagtgatcaaatttgtactgttgaacatttcaaataaaattaccatagtgaaaacctttttgcacaggctaatgagactttaagtgagatcaagcaggaggcaaatccaatcattcacgtaagccttcatatgtaactcagggctctctggtttaagaaacagactgctcaatgagaaaaagaccaacaacccaatrgaaaaacgagtatagcacttgggaaaaaacgctcaacttcacttataataaaataaaagtaaacttcaagaaactatttttacctgtcagattgataaagatcaagaagttgtgataggcaagagtcctgtacgtcgttgctgagaatataaattgaaagacaggttttggaaggacggttgacaatgtctatcaaaaatttaagtgtaatgaaatagactcagcaatttcacttctatgaattctttattcttttagaatgtatgcacagtagtactagcgttctttataatagtaaatgtctggaaacaat

SEQ ID NO: 50233 - DNA, 2269 bp, Homo sapiens
gctccttctttacagtgcacttccccgatatttgacgtggttaacgcctcccttagtgttttactgtatctacctcaagagcaaggtcagaaagtcctaacatgacacaaacatgcatgttactcagtaagtcttcctcccactccatctcctctctctccaggtctcagtggaataaatgacgtttcctccgggaggttttccggcttcccacaycccaaccacacttccccatgatgttacgtcatagatcttatcacaatttttaatgatctgtttttctgtggctattgtgggcaaattgctagtagagaaacatcacgtcttttgttcacctcttttctcagcacccagtccagagcctgatgcttatgtgttccatcaatgttggctgaattaataattgctgcagtctgcgctcattttattgcttcaggaatgaagactgctgtattaatttccttgggctgctgtaacaaatatccacaaattgggtggcttaaaaaatgggaatttgttcttgcacagtgtggaagccagaagtctgaaatcaagatgtcaacagcacccggccccctctgaagtctacaggggaggacccttcctcacctctcagctgctggtgttgccggcaatccttgacgttccttggcttgcagacacatcgctgtagtctctgcgtctgctgtcacttggcattctccctgtgtgtctgtttctgcctctttttgttttctcgtgaggacaccagtcgtaatggattaaggacccaccatactccactataccctcggctttactaattatactacaacaatcatatttacaaatgaggtcacattctgacactccaagaagaatgcgaatttggcgggggctgtgggggagattatttcacccactgcagttgagaagtctccctgtctgccttcagggattgcctgggtgatgtcccttgcatggcgtctagtgctgctgctctgatggctctgtccagtactccctgcgtggtgcctcatcacctatcacagaaggttgtgacgaagcatggacggggtgaggattcccaagaggggaagcccagacttgcattggtaattaagagagaagagtctggagcccagcttccctggaagtcagcaagcacttatttcttccacccaatctgcaagccactgtgacatccccaaagatgggagggtgtggccctgaatctccggagggaccctgcatccttttctgagaatgagtgatcatcttactgtgtccagagtctgttcctgccataaccctcccggtctgcctgacttcaagaatggagccgcggaccttccccgtgagtgttacagctcttaaacatgacacggacccaaagagtaagcggtaacaacttttattgtgaagagtgaaagaaggaagcttccacagcgtgcaagagcactaacaagtttgctgctggtgatgggggcgtggggtggccaacctttattctgttatttgtcccctcccatgttccgtttctgtcctatcagagtgcccttttttcaatcctccctgtgattggctacttttaggatcctgctgattggtgcattttacaaagcgctgattggtgcattttacagagctctgatttgtgtgttttacaatccagctacagagtgctcgttggtgcgttttacaattcagctacagagtgctcattggtgaattttacaatcctcttttaagacagaaaagttcttcaagtcctcactcgatccagaagtccagctggcttcacctgtcattactatggggccttggcattgtcctctgggccttccctcatcatgtggtctgaactgccaggagtctgctgaacaggacgctgatcctcctctgctttgccagcattaggggcctgagtgtgtgaccttaggcatggaagtgtgaccttgcacagagcacatgggccagagcagtgtgagtgggctccagacaggctcctctcacaccttggggtcagacatgtcctggggcaactggcaagccctagcctctaaacagactcacaccccatcacactgggcctctgccagtggggggtgggcttggctagatttccaggaagcagaaagaatcaacacaaaagcaatcatactgacagagacttctggggctgggggtggtaagggcatggggaggtcagagcttcatgtccagttgtttcctaagcacgtaagccctttagcagcagggctgctggggagataatgcaacaagcttg

SEQ ID NO: 50234 - DNA, 884 bp, Homo sapiens
tttctctctggtgctcctcatctcacccctaccttggaatttaataagcttcaggcatttccaattgcagactaaaaccacttctaccatctcctctagtattttccatgtatcaggacagagatgtcttatgtagggaaggggcaggtatgaagtgaggtagattatctatacctctcactcattcaggattctcgctcccatgctgctgtcccttcaktctcacactcacaggaatgctatgtgatggccagctgcttcccttcttggttatccactgcagctgctagttagaaaggtttgcagggatgacttttagtaaatcatggggattttattgatttattatcacttataggattttgtggggtgggagtggggagcaggaattgcactcagacatgacatttcaattcatctctgcaaatgaaaagggttcttcctcttgggggaaatctgtgtgtcagttctgtcagctgcaagttcttgtgtaatgaagtcaatgctgtcaggccaagtgaagggaaaagagagatcagactgttactgtgtctatgtagaaaggaaagacataagagactccattttgaaaaagacctgtactttaaacaattgctttgctgagatgttgttaatttgtagctttgccccagccactttgacccaaccactgtgacccaacttggagctcacaaaaacatgtgttgtataaaatcaaggtttaagtgatccagggctgtgcaggacgtgccttgttaacaaaatgtttacaagcagtatacttggtgaaagtcatcgccattctctagtctcaataagccatgggcacaatgtactgtggaaagctgcagggacctctgcccttgaaagcggggtattgtcca

SEQ ID NO: 50235 - DNA, 884 bp, Homo sapiens
tttctctctggtgctcctcatctcacccctaccttggaatttaataagcttcaggcatttccaattgcagactaaaaccacttctaccatctcctctagtattttccatgtatcaggacagagatgtcttatgtagggaaggggcaggtatgaagtgaggtagattatctatacctctcactcattcaggattctcgctcccatgctgctgtcccttcattctcacactcacaggaatgctatgtgatggccagctgcttcccttcttggttatccactgcagctgctagttagaaaggtttgcagggatgacttttagtaaatcatggggattttattgatttattatcacttataggattttgtggggtgggagtggggagcaggaattgcactcagacatgacatttcaattcatctctgcaaatgaaaagggttcttcctcttgggggaaatctgtgtgtcagttctgtcagctgcaagttcttgtgtaatgaagtsaatgctgtcaggccaagtgaagggaaaagagagatcagactgttactgtgtctatgtagaaaggaaagacataagagactccattttgaaaaagacctgtactttaaacaattgctttgctgagatgttgttaatttgtagctttgccccagccactttgacccaaccactgtgacccaacttggagctcacaaaaacatgtgttgtataaaatcaaggtttaagtgatccagggctgtgcaggacgtgccttgttaacaaaatgtttacaagcagtatacttggtgaaagtcatcgccattctctagtctcaataagccatgggcacaatgtactgtggaaagctgcagggacctctgcccttgaaagcggggtattgtcca

SEQ ID NO: 50236 - DNA, 884 bp, Homo sapiens
tttctctctggtgctcctcatctcacccctaccttggaatttaataagcttcaggcatttccaattgcagactaaaaccacttctaccatctcctctagtattttccatgtatcaggacagagatgtcttatgtagggaaggggcaggtatgaagtgaggtagattatctatacctctcactcattcaggattctcgctcccatgctgctgtcccttcattctcacactcacaggaatgctatgtgatggccagctgcttcccttcttggttatccactgcagctgctagttagaaaggtttgcagggatgacttttagtaaatcatggggattttattgatttattatcacttataggattttgtggggtgggagtggggagcaggaattgcactcagacatgacatttcaattcatctctgcaaatgaaaagggttcttcctcttgggggaaatctgtgtgtcagttctgtcagctgcaagttcttgtgtaatgaagtcaatgctgtcaggccaagtgaagggaaaagagagatcagactgttactgtgtctatgtagaaaggaaagacataagagactccattttgaaaaagacctgtactttaaacaattgctttgctgagatgttgttaatttgtagctttgccccagccactttgacccaaccactktgacccaacttggagctcacaaaaacatgtgttgtataaaatcaaggtttaagtgatccagggctgtgcaggacgtgccttgttaacaaaatgtttacaagcagtatacttggtgaaagtcatcgccattctctagtctcaataagccatgggcacaatgtactgtggaaagctgcagggacctctgcccttgaaagcggggtattgtcca

SEQ ID NO: 50237 - DNA, 544 bp, Homo sapiens
aattattatcttcatataatgtcttaggccagtctccaagggaaataggcttgagagagatttgcctggtcccaaatgacgggagtgaacaartaagagaagcaggattgaacagaaaaaaaagttaaaaagtgatacaactgcaacagacacttcagataaccctaggaggtgctcaggggttggaatggtccttcagctatttctagaattaaagcaagaagccagctctataccgaacccaaccccacccccacccccattgatcagttattggattcaggctacccatggaggaggtttgtataattcccaagaaaggactcacaagcaacactgagcagcagggtgtagaggaatgagtgcctccctattggaaggggaatctgggtggcagaacagagcatccatcacacacataaatttcaaaagccactataaaataagaacgtgatgacatattggtataagacaaaaacagtgagaaagaagaaaaaagttaattaaaaattaatttaatgtagtttaaaagaaaaataaagtg

SEQ ID NO: 50238 - DNA, 544 bp, Homo sapiens
aattattatcttcatataatgtcttaggccagtctccaagggaaataggcttgagagagatttgcctggtcccaaatgacgggagtgaacaagtaagagaagcaggattgaacagaaaaaaaagttaaaaagtgatacaactgcaacagacacttcagataaccctaggaggtgctcaggggttggaatggtccttcagctatttctagaattaaagcaagaagccagctctataccgaacccaaccccacccccacccccattgatcagttattggattcaggctacccatggaggaggtttgtataattcccaagaaaggactcacaagcaacactgagcagcagggtgtagaggaatgagtgcctccctattggaaggggaatctgggtggcagaacagagcatccatcacacacataaatttcaaaagccactataaaataagaacgtgatgacatattggtataagamaaaaacagtgagaaagaagaaaaaagttaattaaaaattaatttaatgtagtttaaaagaaaaataaagtg

SEQ ID NO: 50239 - DNA, 544 bp, Homo sapiens
aattattatcttcatataatgtcttaggccagtctccaagggaaataggcttgagagagatttgcctggtcccaaatgacgggagtgaacaagtaagagaagcaggattgaacagaaaaaaaagttaaaaagtgatacaactgcaacagacacttcagataaccctaggaggtgctcaggggttggaatggtccttcagctatttctagaattaaagcaagaagccagctctataccgaacccaaccccacccccacccccattgatcagttattggattcaggctacccatggaggaggtttgtataattcccaagaaaggactcacaagcaacactgagcagcagggtgtagaggaatgagtgcctccctattggaaggggaatctgggtggcagaacagagcatccatcacacacataaatttcaaaagccactataaaataagaacgtgatgacatattggtataagacaaaaacagtgagaaagaagaaaaaagttaattaaaaattaatttaatgtagtytaaaagaaaaataaagtg

SEQ ID NO: 50240 - DNA, 2042 bp, Homo sapiens
ttgtattcagctgtttgtccccctcaatgggatcatctataaactcacatgaaatttccagcaaagaaaaatttaaacaacctggcagcaactaccaaagccaaagtacaagctgcggtgatgggaatttggctgaaacttgtctcagatgatctctatctcaccctcttaactccaattgataatccgagtctgcattatgctacttccctgggggaaaacatatttcattgttgcatgatgtgatattccttgcctaacaatggagcctatggaagtgttgggactccagattaggagyacaagtgtacaggcaattgggctgagcccagacatcatgaaacattgcaggcagtggcttgtaggaccttatttctgactctgtaattagacacagtaatggatttagatgcaaaagctttgaccttgcacatgttatttcctctagctagaaggttctttagcttattctccatccttccagattttgcagtgtgatctactctgcaaagcttgcctttaacctgaaaccctactgcctgccagcagatcccattacttctttttctatgatttgtgcttatctgtgaaccccaatcttatgcctgccttggagccttgcactttgcacttgcttttttttggtctgtgatattcttctgaattttgtacgtctgattctttctcatcacatatagctcactcaaatgtttgtaccttagagaggccttcgaccatgctggatgcagatccattcctcaacacttttcatgacattatccttataaaactgttcagcacaacatttgtcactgtctgaattatgttacttataaacatatttaatgatcactaatttatggccgtgattttgtatgtttatttactaattgcctatgaccgtctcgcatctttaaaatatatgctccaggaggtcttgcttctcttgttcactgctatatccctagaccccatagtagatgttctataagtattttacaaatgaagaaatcaatggctccaatattgtcccgtacttagtgctattaaaactcttaccacattttcttgcagtgacttcattagagatgagtcttttaacaatcctgaaatctcttgaaggtcaagttctgtgtcatcttcatgtgtataatactagcaacttggtacacagcctggcatatagtatgtgtttactaggaatctgctaaataaaataacaaccaggctatgtattctttactttattcatattttgttctgtggtaataggtctgctcaagctcacaagcaagagaccaaagaaagcatctaagtccttccaagggcttggcctcagtgggcaccgtgcagagccactacctcaaactccatcaacttctagatcctgttcttttccctccggccttagcaactggccagcatctcccatttcctcatccttctactttataaaaagttgatgtacatttctttgttcccttacttgactttcttatgttcaagaaggtggccttcaaaaagatgcaccacagtttcatggaacttattttcaatgcaattaaatagcaagaattagtgttcaaaatatatagactctttgaaatcaacatttaaaaaaatcaaaaattcaaagaagaaaaaaaagatgtaagtattgataaaacattcttggaagaagaaacctaagtgaccacaaactcggtagtaattgagaaaaatgcaaattatccatatgacccagcaatctctctgctggacatatccccaaaagacatgcaataagaacctcaaaaatatatctgtgctgtcatgttcattggaggactattcatattaggcaaaatatggaaacaaccaaagtgtccacatacatatgtatacaaaggaacattatccagcattaaaaaagaagatcctgacatttatgaatgaatctggaagacgacatgctaagggaaaaaagctagacccagataaaaatactgcatgatttcacttatatgtggagtctaaagaaaaagttgaatacatggaaacag

SEQ ID NO: 50241 - DNA, 2042 bp, Homo sapiens
ttgtattcagctgtttgtccccctcaatgggatcatctataaactcacatgaaatttccagcaaagaaaaatttaaacaacctggcagcaactaccaaagccaaagtacaagctgcggtgatgggaatttggctgaaacttgtctcagatgatctctatctcaccctcttaactccaattgataatccgagtctgcattatgctacttccctgggggaaaacatatttcattgttgcatgatgtgatattccttgcctaacaatggagcctatggaagtgttgggactccagattaggagcacaagtgtacaggcaattgggctgagcccagacatcatgaaacattgcaggcagtggcttgtaggaccttatttctgactctgtaattagacacagtaatggatttagatgcaaaagctttgaccttgcacatgttatttcctctagctagaaggttctttagcttattctccatccttccagattttgcagtgtgatctactctgcaaagcttgcctttaacctgaaaccctactgcctgccagcagatcccattacttctttttctatgatttgtgcttatctgtgaaccccaatcttatgcctgccttggagccttgcactttgcacttgcttttttttggtctgtgatattcttctgaattttgtacgtctgattctttctcatcacatatagctcactcaaatgtttgtaccttagagaggccttcgaccatgctggatgcagatccattcctcaacacttttcatgacattatccttataaaactgttcagcacaacatttgtcactgtctgaattatgttacttataaacatatttaatgatcactaatttatggccgtgattttgtatgtttatttactaattgcctatgaccgtctcgcatctttaaaatatatgctccaggaggtcttgcttctcttgttcactgctatatccctagaccccatagtagatgttctataagtattttacaaatgaagaaatcaatggctccaatattgtcccgtacttagtgctattaaaactcttaccacattttcttgcagtgacttcattagagatgagtcttttaacaatcctgaaatctcttgaaggtcaagttctgtgtcatcttcatgtgtataatactagcaacttggtacacagcctggcatatagtatgtgtttactaggaatctgctaaataaaataacaaccaggctatgtattctttactttattcatattttgttctgtggtaataggtctgctcaagctcacaagcaagagaccaaagaaagcatctaagtccttccaagggcttggcctcagtgggcaccgtgcagagccactacctcaaactccatcaacttctagatcctgttcttttccctccggccttagcaactggccagcatctcccatttcctcatccttctactttataaaaagttgatgtacatttctttgttcccttacttgactttcttatgttcaagaaggtggccttcaaaaagatgcaccacagtttcatggaacttattttcaatgcaattaaatagcaagaattagtgttcaaaatatatagactctttgaaatcaacatttaaaaaaatcaaaaattcaaagaagaaaaaaaagatgtaagtattgataaaacattcttggaagaagaaacctaagtgaccacaaactcggtagtaattgagaaaaatgcaaattatccatatgacccagcaatctctctgctggacatatccccaaaagacatgcaataagaacctcaraaatatatctgtgctgtcatgttcattggaggactattcatattaggcaaaatatggaaacaaccaaagtgtccacatacatatgtatacaaaggaacattatccagcattaaaaaagaagatcctgacatttatgaatgaatctggaagacgacatgctaagggaaaaaagctagacccagataaaaatactgcatgatttcacttatatgtggagtctaaagaaaaagttgaatacatggaaacag

SEQ ID NO: 50242 - DNA, 667 bp, Homo sapiens
ctgcagattttgactagagtcttgagattgccactatctgatggccccacgtgagcaagtccttttattttggggggtttcagcttcttcatcagcaatgtcagtgtcagtctaaatgagctctaagatgctggcagttctagaattccatagtccttttaaaatgattttattagtagttatttttaagcatttagtgaagtactgaaaattgccccagggttattgggatgaaatttatattaggttaatcaaagcaagggaaagatgtaattatcaatatggctatattacatagagagtccctcattatcttttgtacaggttaagaggtggagtgttgtacagcttgaaatgcatattttttttccagcaaactcctggagaaaatgttgcttataccggttacattttggctttcacaaaaattttttaaccagtatttaagtaagaatgtaagagatataacatatctgatgtctgatagaattggggtagaatagacggaactaggccttcacagggtgaaagaagcatattgttttgccagtcaggctcaagagttacttccatgattcatttttacataaggtattcsatttttatttagttggtaatttagtgaaaaacattttgtttaacgaaacctaaattttacatatgttaa

SEQ ID NO: 50243 - DNA, 622 bp, Homo sapiens
cactacactgagacccaaatgagcttttttttttttttttgagatggagtttcactcttgttgctcaggccaagatcatgccactgcactccagcctgggtgacagagtgagaccctgtctcaacaacaacaacaacaactgcagatcaaagttaaagaaagtaagaactaaatggagcatctttttagttttaccaagtagactatttctttgtctaggatgtctttctagaacccagaaacagaaaatggctcttttatcctgttggcttcaatataatcattcttcctaggaggcatatgatgtgggtgatgggtgggtatgtggtggggagaggccctgtgatacttaatgagctgcaaataactcactcccatgtatttgtgtgagtggagtcaccctacctacttatgctagcctgttttcacactcagttgattcaaaaactgttgaatcagaccactctggagcytctgaaaaagtcctccagacaacggtgggcaagagcaggttgcaaccaggttccatttacggcagtgtttctgaatgttgttttgtacatttttattacaaaacagttcacgatcgaacttattcacactttcatgttggagcactcga

SEQ ID NO: 50244 - DNA, 599 bp, Homo sapiens
tgcaaatcaaaaccacaatgagatatcacctgaaaacaatttagtggctactacgaagaaacagaaaataataaatagtggcaaggatgaaatgttaaaatgccagatacaccaaatcatgcaaacacaacatcaaaacacagcttggtggagatggagggacagatggggaggggaagagtgtggaaaggctggaaaacagtcccaaacagacacacgtctccatgtgacactttttttctttttttaggcagggtcttgctctgttgcccaggctggagtgcagtggtgtaatctcggctcactgcaacatccacctcccgggttcaagcgattctcctgcctcagcctcccgagtagctgggactacaggcatgtgcccccatgccaggctaatttttgtatttttagtagacatggggtttccccatgttggtcagtctggtctcgaactcctagcctcaagtgatccgcccgcctctgccttccaaagtgctgggattacaggcrcccgccaccacgcccagctaagttttgtatttttagcagagacggggttttaccaggttggccaggctggtctcagactcctgacctca

SEQ ID NO: 50245 - DNA, 593 bp, Homo sapiens
ggcaggatgactggggccctctttgctcatccccgggggctgctctggactgcagggaacgcccctgtccttctagctggtgctgtctgtccagggctgccctgtgctgtaattggctgtccttgggctggggaggaaggctgcccaggggccaccagccagcctgcccaggtgtcgtggccctcactccaggaggctcctgaggtgctctggccttgcctagattcctggggctggtacgggtgggatcttctacaggaaagcagggctggcagatgacagccccaggtgggccccggagcagagagctgcagtctggccccggttgtgctgtgtggcctcctccactcagactgtgattcccctcctgtcccagactccaccacrtttgcccagcctccgcaaggctctcaggggtcctcttaggttctgggctccatcaactgtcatccctttgatggcatctccaaggtttggattcgtgggaaggagccagcagcctgtattaattaatcccctcataaaggaaccaaaagccaaatttacaaacaaaaatcataacattagatgctgtcaggggcagaggaaatgga

SEQ ID NO: 50246 - DNA, 593 bp, Homo sapiens
ggcaggatgactggggccctctttgctcatccccgggggctgctctggactgcagggaacgcccctgtccttctagctggtgctgtctgtccagggctgccctgtgctgtaattggctgtccttgggctggggaggaaggctgcccaggggccaccagccagcctgcccaggtgtcgtggccctcactccaggaggctcctgaggtgctctggccttgcctagattcctggggctggtacgggtgggatcttctacaggaaagcagggctggcagatgacagccccaggtgggccccggagcagagagctgcagtctggccccggttgtgctgtgtggcctcctccactcagactgtgattcccctcctgtcccagactccaccacgtttgcccagcctccgcaaggctctcaggggtcctcttaggttctgggctccatcaactstcatccctttgatggcatctccaaggtttggattcgtgggaaggagccagcagcctgtattaattaatcccctcataaaggaaccaaaagccaaatttacaaacaaaaatcataacattagatgctgtcaggggcagaggaaatgga

SEQ ID NO: 50247 - DNA, 628 bp, Homo sapiens
aaaaatacaaaaacaagccgggcatggtgctacacgcctgtaatcccagctactcgggaggctgaggcaggagaatcacytgaacctggtaggtggaagttacagtgagccaagatcgcaccactgcactccagcttgggtgacagagcaagactctgtctcaaaaaaaaaaaaggaaaaccatagaaggggagagacctgcctcctggcagggctgggactggattcctggatttctgacttcctgccaggttctttccacccctcctagagtttatgatgccagcagtgaggtcgtcatactgcagaaatagttacaggcacctgctggtatgtgcagggcaccttccgggaagggctgtcagctgtgtcctcctctgctcatgccctctggggttcttttcctcgcaggcttgtcggacgcccagccgggatgaggccagggtggaactgctgatgacatacttcatccagctgggctttgttgagaattgattcttcccacccacgcggcagatgggactcctgttcacctggtaggtgcttgaggtctgcgctggtgcttcacgtgttatggcagccacagtttcggagcctcagcatcacagacgcccctctgcgggcacct

SEQ ID NO: 50248 - DNA, 628 bp, Homo sapiens
aaaaatacaaaaacaagccgggcatggtgctacacgcctgtaatcccagctactcgggaggctgaggcaggagaatcacctgaacctggtaggtggaagttacagtgagccaagatcgcaccactgcactccagcttgggtgacagagcaagastctgtctcaaaaaaaaaaaaggaaaaccatagaaggggagagacctgcctcctggcagggctgggactggattcctggatttctgacttcctgccaggttctttccacccctcctagagtttatgatgccagcagtgaggtcgtcatactgcagaaatagttacaggcacctgctggtatgtgcagggcaccttccgggaagggctgtcagctgtgtcctcctctgctcatgccctctggggttcttttcctcgcaggcttgtcggacgcccagccgggatgaggccagggtggaactgctgatgacatacttcatccagctgggctttgttgagaattgattcttcccacccacgcggcagatgggactcctgttcacctggtaggtgcttgaggtctgcgctggtgcttcacgtgttatggcagccacagtttcggagcctcagcatcacagacgcccctctgcgggcacct

SEQ ID NO: 50249 - DNA, 628 bp, Homo sapiens
aaaaatacaaaaacaagccgggcatggtgctacacgcctgtaatcccagctactcgggaggctgaggcaggagaatcacctgaacctggtaggtggaagttacagtgagccaagatcgcaccactgcactccagcttgggtgacagagcaagactcygtctcaaaaaaaaaaaaggaaaaccatagaaggggagagacctgcctcctggcagggctgggactggattcctggatttctgacttcctgccaggttctttccacccctcctagagtttatgatgccagcagtgaggtcgtcatactgcagaaatagttacaggcacctgctggtatgtgcagggcaccttccgggaagggctgtcagctgtgtcctcctctgctcatgccctctggggttcttttcctcgcaggcttgtcggacgcccagccgggatgaggccagggtggaactgctgatgacatacttcatccagctgggctttgttgagaattgattcttcccacccacgcggcagatgggactcctgttcacctggtaggtgcttgaggtctgcgctggtgcttcacgtgttatggcagccacagtttcggagcctcagcatcacagacgcccctctgcgggcacct

SEQ ID NO: 50250 - DNA, 628 bp, Homo sapiens
aaaaatacaaaaacaagccgggcatggtgctacacgcctgtaatcccagctactcgggaggctgaggcaggagaatcacctgaacctggtaggtggaagttacagtgagccaagatcgcaccactgcactccagcttgggtgacagagcaagactctgtctcaaaaaaaaaaaaggaaaaccatagaaggggagagacctgcctcctggcagggctgggactggattccwggatttctgacttcctgccaggttctttccacccctcctagagtttatgatgccagcagtgaggtcgtcatactgcagaaatagttacaggcacctgctggtatgtgcagggcaccttccgggaagggctgtcagctgtgtcctcctctgctcatgccctctggggttcttttcctcgcaggcttgtcggacgcccagccgggatgaggccagggtggaactgctgatgacatacttcatccagctgggctttgttgagaattgattcttcccacccacgcggcagatgggactcctgttcacctggtaggtgcttgaggtctgcgctggtgcttcacgtgttatggcagccacagtttcggagcctcagcatcacagacgcccctctgcgggcacct

SEQ ID NO: 50251 - DNA, 635 bp, Homo sapiens
tccaaagtgctgggattataggcgtgagccaccatgcccggccaatttttgtatttttcatagagacagagtttcccactgttgcccaggctggtctcaaactcctgggttcaagcagtcctcctgcctcagccttccaaaatgctgggattataggcatgagccactgtgcctggcttattttactttccatgataatcctcttagttggctcatcttggactacttttagtttagaaaagaaaacatcttatgacattttgactgttacttttttttttctttctttctttctttttttttttttttgagctggagtttcgctcttgttgcccaggctggagggcagtgatggccatctcagctcactgmaacctccacctcccaggttcaagtgattctcctgcctcagcctcctgagtaggtgggattacaggcacctgccatcatgcctggctaatttgtgtttttagtagagatggggtttcactatgttggccaggctggtctcgaactcgatccacccgccttggcctcccaaagtgctgggattacaggtgtgagccaccgctcccagccaactactacttttaaaagcaattggttaatactttggaagcacttgaccttcattc

SEQ ID NO: 50252 - DNA, 545 bp, Homo sapiens
gatttttgctagatgcagggaatgattctcgtccatagtcactgaaagctcctgtggaaatagacgcattttaaagcaatgatttcaaaagaggaacataggcccaaagtgccatttttcaatgtaagctgtaaacttacttagtatctctcaacaggaaaataagattcagggaatgctgagaccaggttcctttgatatttcttcaactaagcgtatggctctaagaaaaagcargagatttataatagcggttctgttaggcaatatcaaactagattgcagtcctaagttacaggctgtaagacggctgaggcaaacttgctaaaatcgctctgctataaattagttgtgtggccttgggcaagatgtttctcttttctgggacttggagttttgtggggtttttcttccctctataatttttttctcacatttatgtaagatgaaattaataagttctcagatataatttcattcatccatttgctgaacaaataaatgtatattgatcgtctactttggtaccaggctatgaccaggtg

SEQ ID NO: 50253 - DNA, 498 bp, Homo sapiens
tatgatataactgtttaaaagtctaccaaatttacccctgtattcctgtttattttggctactgaacgtaaccaaaatcaatatggatactgagaaatactatttaataaagacataaattagactgctaaaaaaaattaaagaaatttcaaaagagaatccacctcttttccttgccagtgctcaaaagtgagtgtgaatctggtggctgyggggctgtttttggtgtggctctttggaccagcctgcctggtaattcaagcctgcctctcatttctgattcctggctctaaactcgggattttttgcttccatgcaatagtcagtagagagggctgaccaaggtagtctgatagtgtgaaaatgtgtgaaaaggactctgcccctttttctttgcctcggaatcttcttttattttttataacttcaggccaggtagtagattttggaggataaggatttttactctaaatttgattagggaaaatgtatcattca

SEQ ID NO: 50254 - DNA, 1379 bp, Homo sapiens
tctagactaaatcaatgcttcctactcatggattttttttttttttttttttgagatggcgtttcgctcttgtttcccaggctggagtgcaatggtgcagtcttggctcgctgcaacctccgcctcctgggttcaagtgattcttccgcctcagcctcccaagtagctgggattacaggcacccaccaccatgcccggctaatttttgtatttttagtagagacaaggtttcaccatgttggccaggctggtcttgaactcctgaccccaagtgatccgcccgcctcggcctcccaaagtgctgggattacaagcatgagccactgcrcccggccctactcttggattttaagatgccaccaaaaaccagcctggtcataatgactaaggataatgccaccaagatatttaatttcataagtgattcagatatgccatcaccattggattaggagatgcccaagatgcttttgatttctaaaatgcaacaatttttttgtccatacaacttaattcttacttaaatcataagtttcagataattatatagtttaaaaagacctcatagatatctatgcaagttccctgatttcatagatgataaacttcaggccccaaacagtttaggttatttgcccctaattacacagctagttcatgacagatctgggactagaacttaggtccagacttgaaatttggtctttctgtcactggatttaacctcaagtacctcaagaccacgtgctgaaagtgcacacacatgcaaagccacggatctcaaattagtcactgactactgagccttggccttaatatggtgtcctcaatcaatagcattcccgggatactgtcttaccaacaccaacacatttggacttgctatagtggctgtactgcaaacatcctatcttcaaaatcctgaaaactttttatgccatgccagtgtgttcatcattttgcaaccccctttgaaagttcaaatatatagcatgattccatgcatgaatctagctcagtgtttcccagaatttcctgataagaatcacctgggagacttattaaagatacccatttctgtgttaccatggactgggtggggccctgaactctttatgtttaacaagcgctacactgacttatatcatcaagcaagttgagtaaatactgcctaggttaaaaaccccttctgccatgtcagtatagcctctcccctttcccgcccccacccagcaagactctatagggtatttgtgtctgaaatcatctttctttcacaagcccttcaagattttcttggcaaattaatgtctacgcttaaaagttgaaaagtatacaggtcagaacttgatatctaacatgccgttactgatggaaaa

SEQ ID NO: 50255 - DNA, 537 bp, Homo sapiens
aattagaaccttgtgaaaattaacattgacacaagcaaggctgcaaatatttcattaagacagcaacaattcattctttttaatgttcattattttccctaatttaacactatccagttcatgttgacctgttataggtgaagtccaactctactgccagaaatattttacatgtctaattctcagaagtatagaaaatgagaggaacggagaaatgaaaaagatagaattgagtcactgagggaaaaaaacacagtctacaaatgagccagaaaaagccaggaaggggcaggaggttagtcactgggttttaaaaaatgatcattatactcctgacaaaaatagcaacaagaggaaaggttttgagatatcaagttgaaagtgaattataaatagcggaacaatattattaaatcctgattatccttaggagagagcacagctcttctgtccataaatacagtgctgggagagcagtagagaggcactcatggttaggagagactttagctaygagtgtaaactctaaagtctttc

SEQ ID NO: 50256 - DNA, 603 bp, Homo sapiens
gctctagctcagttctcccatagtcctccagtgccatgtttctccctgtccactttatttatatctctgtggattctgaaggaatcttaaactcaacatgcctcataaagaacccattatcaatttatccccctttatcaactttctctacttcctctagttgataatagtaccacagagtcatctaaattcaaaagcttggcattatctcagattcttctgaacttctcacaccaaatctcaccaggccctaaggctattctcctttttaaatgtgcttcaaagcccatccctagctctaggtcactataatgatttgggtcccagtcccctctcatctcatagaaacgaagaatttcccaagtgatctttgaggcttgagatatttgtctttgctacaatctccattcacattcattagaatgttttttctaaaaaccagtgttaattttgtaatttttttactctaaaaatttccattggttttcarctggatcgagtatttgatcctatataaagctcttaatgcaggtttccctttttacctttacttgtatgcgttctccccatctccaccttcacatgtgctatatgtacagcacc

SEQ ID NO: 50257 - DNA, 1691 bp, Homo sapiens
ccatcttcctctcctgcccctctgtcttccttctgcccttcctctgtcttcttctttcactgtctccttctttacttttcttgctccccctccacctccttctccaccttcccttcctcctcctcctcttaattctcctcctctttttcattcttctttttgaaaatggatctttaatgagaggagaaagggtataattaggaagtcatggcaactgtgaaaataaatctgctgagaaataaaataatttcatatttttgaagtgtaagtacagtggcataagtgtttataacacagttccttcctgtagaagcttagtggacaaaattgagataactcacacagcttccagaactttccaatgggagcagctggataagaaagataatatgcacagaacaagtaacttatatcagaacttcctcaagagttggttcccagcagctcaaaatcttaaaacacaaaggaacaagtcagtgttctgtttggtcttgtttgaagtgatgatgagcaagatgttgcatttgaaccttcctcaagttgtcaccatgttaaaggtaggatcaggacccaaggttccattagtctttatgttaataatctttagattttccagttgtttgaggcacattctctttgtattcttagaaaagactcacaggaacaatattttatgtttcttctatttcaaacaggttatctgcggattttatgtttaaagataagtttggcataggtataaaatttgtgaattctattttatttttttcagtatttaaaatatgttacaccattgacatctagcataaagtgttgctttttaaaaagactaaaagcaatccgattttatcgctttaggagacttgatttgttttttgccagtaagaaaagatttttaaagttcaatagttttacaaaaatatgtttggtgttggccattttaggtcaattttcccacttaagtagtttcaagttttttattactgggacttttgttgttgttggttttttttttttttttttttttgaaacagagtcttgctctgttgcccaggctggaatgcagtggcatgatctcggctcactacaacctctgcctcccaggttcaagcaattctcctgcctcagcctcctgagtagctgggattacaggcacccgccaccatgcccagctaatttttttgtatttttagtacagacagggtttcaccttgttggtcaggctggtcttgaacccctgacctcgtgatccacttgcctcagcctcctaaagtgctgggattacaggtgtgagccaccgtgcccggcctgggacttttttttgatctatgattttcaacattgttgtgttccattgctatgggtttggaggacatttgttatatgtttcttgaatttccgtgttttctacctttatcattatatccaaattcttcttattctttcttcatgcattttgcttttaaattttttctcctttccatctttcatttttctaaaagcttcatctgttatgcttttgtgctatgttggttttttaaaaaaataattggtttattaaaaaaataatatttatttctaattcttgcctwaatgctgtcacccctctttttatattttcctcttccccaaacatcttagttttgagtttttttctaaattataaatttctgttcttttccagtttctac

SEQ ID NO: 50258 - DNA, 586 bp, Homo sapiens
taggggtgcagtaaaaataaaaaggtgcctcctttcaccaaccaactctcctctccgyccctgctctccattatgcagaaacctctgctttcctgattgtcgaattcctcttacttgattaccttccccaggaacagactcctctgagagacaagaggatatctgacccatggcctgatgccctggaggggtgggaagggaagcagttcctagcaagagaaacataaccaacttagctaagcaaactgctaagggccaagctttacaatggcagtgcatagacagtcagatgagaaagtgttatccccattttgcagataaggaaattaaatctcaaaaagtgaaagaatttacccaagaccacaaaagcggtacaaatcttggcttctttgtgtttcctttccatcccctcaaaaagactcttactgaccgtttactttgcactgatcactgtaccatgccctgcagagtcaaagaccaatgaagcaatgttgtatagccttcaagcagtcgcagtctagaggggagacagacatagagtgtaatgagtgacacatgggaggcatggacaaagtcctgtgggact

SEQ ID NO: 50259 - DNA, 586 bp, Homo sapiens
taggggtgcagtaaaaataaaaaggtgcctcctttcaccaaccaactctcctctccgcccctgctctccattatgcagaaacctctgctttcctgattgtcraattcctcttacttgattaccttccccaggaacagactcctctgagagacaagaggatatctgacccatggcctgatgccctggaggggtgggaagggaagcagttcctagcaagagaaacataaccaacttagctaagcaaactgctaagggccaagctttacaatggcagtgcatagacagtcagatgagaaagtgttatccccattttgcagataaggaaattaaatctcaaaaagtgaaagaatttacccaagaccacaaaagcggtacaaatcttggcttctttgtgtttcctttccatcccctcaaaaagactcttactgaccgtttactttgcactgatcactgtaccatgccctgcagagtcaaagaccaatgaagcaatgttgtatagccttcaagcagtcgcagtctagaggggagacagacatagagtgtaatgagtgacacatgggaggcatggacaaagtcctgtgggact

SEQ ID NO: 50260 - DNA, 595 bp, Homo sapiens
gaatgcattttgcaagcctgaggtattaatcttgcaagctactcactcctacacttctctggcaagtgtctatccacaacaaggaaagggttaaacctgccttcttatttgtacagtttctcatgtccctaggaggagcaaagaacaaggcttataaataggaccagggtctttgcaaacaacagtagcaacaacacatttgtctgagaggctaggttgagaattggtgcttgctccatcttatgccctagagacaaatctcggactgctgaatttctccactctcatggcattgcccatmaagagggattgcagttctgaacatgatggatcagatgcaatatgaggtgcttcatgtcagcaggcctgtcccaggtgagttctgcgcaggtatgtctgaaagccagaggatgaatgggagacccgagatcctaaatgctcaaagaatgtatgttctcagtggtgcttcccaccatcctcagcacatcatcccttcctcctggccctgtggggttgggaagcagaaatagaaggcactttcctttgtccagaccttttttctggctcctccacccagtcactggcagagccaaag

SEQ ID NO: 50261 - DNA, 595 bp, Homo sapiens
gaatgcattttgcaagcctgaggtattaatcttgcaagctactcactcctacacttctctggcaagtgtctatccacaacaaggaaagggttaaacctgccttcttatttgtacagtttctcatgtccctaggaggagcaaagaacaaggcttataaataggaccagggtctttgcaaacaacagtagcaacaacacatttgtctgagaggctaggttgagaattggtgcttgctccatcttatgccctagagacaaatctcggactgctgaatttctccactctcatggcattgcccataaagagggattgcagttctgaacatgatggatcagatgcaatatgaggtgcttcatgtcwgcaggcctgtcccaggtgagttctgcgcaggtatgtctgaaagccagaggatgaatgggagacccgagatcctaaatgctcaaagaatgtatgttctcagtggtgcttcccaccatcctcagcacatcatcccttcctcctggccctgtggggttgggaagcagaaatagaaggcactttcctttgtccagaccttttttctggctcctccacccagtcactggcagagccaaag

SEQ ID NO: 50262 - DNA, 1019 bp, Homo sapiens
agtgcttggctcacagcagatattcccatgtgcacatgtacccattgttgttattgctgttgttatagttaacatcacttacctagaaatagaatcagaagagaccaaaatgccacattctttctttcagtgaagtgacacccaggaaggggtgagccacaagccatgtctgtacagcatcacaagcttttagttggtaaaacatcaattcagccaactccttgtgtgtttggtcaacaaaggctttaacaactgacttgttgttgttgtttttttttttcattggtgagatcaggtggttgtttgaattggatgaaccaactgattgttctaattgaatgaatcaattcattgttctaatgtcatggtgacccaaactaagattggttacaattttatctaaggccctgggtgctttctytttcacaacgagccttttggcctggttctgtcttagttttatagctgttaaaaatacgtgattgagtgtgaggatgcacgtgtgtacatgtgtgcacatacacacatatatacacagaagacatgccaacccatcactatccctgctgagttgagaccaagagaatgcgaactttatattttgccaaaagcttttacctcttctcagccagttttttttttttttccagagcagaagccaaagagccaaatggcatagtctgaatgtggtcactttcctgccagccactgggccagactctggctgttggcacagggttctgctgcctgttgtgagctagcatcagctctgcctggcatggaaaagggagagttggcattgtcagcctgtaggtgcttgtggggagaggtagaggatgttggttactggcaggcaaacctgttgccactaaaacttggcacgtctgggcggcttcagcagtccagagagagaattagcagggaggaagagctccacagaagtgcccgtctggctccttggtactgtccacggaaagagatttcttccttggtagagaacttggtaccttgcagaggca

SEQ ID NO: 50263 - DNA, 502 bp, Homo sapiens
ccaggtccctgctcacagcaactgttgcacttcccatgcactgaaccggagagcttgtagttcccagaatgagcgatgctgtgtcacccctaggcctttctgtgagcaggttcttctgccgggatgccctgtgctcagctgtctcagctgtgccttgtgtgcagggcacagctcacaaacgaccctcctctgactgccctcccagtgctgccctcaccagcccttctgcagagttggccaatcccagtcgctgcctctagagcacaaatcccactgtttactcccactgtgtttktgctgacctctttacttgtctttctttccagactcaacttcttgagccaggaaaagtggcttgcttgaagtgcatccctgccccctggaacacagcaggtgctcaataaacatctgataaggaatacatgaagggtgaatgaacaacagcatggaagagttctctgagaaaagcggtgggaatgtactaggggaggaggggaagggt

SEQ ID NO: 50264 - DNA, 548 bp, Homo sapiens
gagcacccctgggcagacatcctgtgctcagcactgagggtggggagggagcccctggatcccaggggatagcggggctgtcacaccagccctgactggcttccagactcagataacactgggaagaatgaaacaggctgttttgccacggcctcagccgctgttcctgggggtttatgttgctcacggctgagcctaatctcaactgatgcacaggctcacacggcttccccattcgcgcacaccgtcctctttcacagacaagctgggtctcagtctccttcccgcaaggtctcccagtggctcctgttccacattcccattccctccacaggggtgcatctgggcctgtctcctccctcagtctccctgttgcyggcagaggcggctccccaccgtctcatcacacccctctccgcagtccccacgcccaccccccctgtgaattccccatctcatgcccagcgtcagggcacaccccgcatcaccctcctcacttgctcgattctcctcacacgcctcctcccgatgccacttctcataacgtg

SEQ ID NO: 50265 - DNA, 548 bp, Homo sapiens
gagcacccctgggcagacatcctgtgctcagcactgagggtggggagggagcccctggatcccaggggatagcggggctgtcacaccagccctgactggcttccagactcagataacactgggaagaatgaaacaggctgttttgccacggcctcagccgctgttcctgggggtttatgttgctcacggctgagcctaatctcaactgatgcacaggctcacacggcttccccattcgcgcacaccgtcctctttcacagacaagctgggtctcagtctccttcccgcaaggtctcccagtggctcctgttccacattcccattccctccacaggggtgcatctgggcctgtctcctccctcagtctccctgttgccggcagaggcggctccccaccgtctcatcacacccctctccgcagtccccacgcccacccccccygtgaattccccatctcatgcccagcgtcagggcacaccccgcatcaccctcctcacttgctcgattctcctcacacgcctcctcccgatgccacttctcataacgtg

SEQ ID NO: 50266 - DNA, 646 bp, Homo sapiens
tgagtcattttttcttgaagaaatgtaactttgtctattcccactgcatttttggtttggtaggagacatctttattccacaggattttaaaagcatgtttaagattccataggtttagtattacatcactaatggttcctaatgagatccaggcaatagcaagacggggggaaaagaacacacaaaggctgaattctacaacaccaagcaccatgtaaaatgtggaaaaatctccatgctttrtctattgctgaagctatctggataaaaagggggcaattcatattcaatcaaccagacatgtggatgacatgatacccaatgtttggctcttcacaaccagtcatctaacaggctgaattctttacttttcacgcagatgtttgctgccctgtgggtacggtcaaaatgaaccatgtaaatatcgagatattttattcatcccattcagtgcttcgggccttagctacttgtttggctttgttctcataggcatcttttagatgaaaattacagaaattttccttttgagatgatatgtacgtacatatagaggcatacatcttccccaagcttccagcaattttgcattttaagggggcatgtggagggacaggtggggtgggcagggtgacccacggagaa

SEQ ID NO: 50267 - DNA, 533 bp, Homo sapiens
tgagatagagtctggctctgtcacccaggctggagtgcactggcgcratctcggctcactgcaacctccgcctcctgggttcaagctgttctcctgcctcagcctcccgagtagctgggactacaggcacacaccaccatgcctggctaatttcttttgtatttttaggagagatggggtatcaccgtattgcccaggttggtctcgaactcctgagctcaggcaatccacccgccttggcttcccaattaaaatttctttaaaggacataagctttatttcttcatccattatcttttcttttcactccgagaaaagaagttcttatagtaaatactgatttttgatgatgatgatgatggtgatgatgacaatgacaatagttaaataggacaatgaaaacaatttcaagtttttcattgttcaccaaactttgcacagcccctgatgcataatacactggagctctgggctgataaatacagtcctctaacaagttgaggttcttctcaggtcagatataactagcacat

SEQ ID NO: 50268 - DNA, 581 bp, Homo sapiens
ccttgtattccaccatctggctccacatagaattggtcctttctgagtgctgtacagaagaatctagtcttttgctcttggtggttttctggcaatctttagcattccttggcatgtagaagcatcacccagatcttgtctttatcttcacgttgcattctccctgtgttcatgtctatcttcacatttcccctcttcaaaaggaaactagtaatgttggaccaggggcccaccctactcaagcatgacttaactaattaygtctgcagtaactctatatctaaatgaggtcacattctgaggtgctagaggctattaggacttcaacatataaatggggtgggagggcagaattaattatataacattcatagaacacagtatagacatatatagaccaatgaaaattggctgttataaaccaagaattccattgtctctactgttttcttgtaggtagtgctgcttcatctatagcctatagccaataaaaacaacattacacaacatattatttactatattttagaactcagaactattatttttgctcagataggattgtattaagggattatatt

SEQ ID NO: 50269 - DNA, 574 bp, Homo sapiens
gagctccagcccctttgaatgctgtaccctggctgggaatgggctcaccccttgtggtgtcccaacttccctgaactaacttcatttccctttttttctttgtcctctgtgagcccccatcctattgactggctcatttgtcctggaagaggacagcccagtgacacctgccatgctcaccccatcactgatgcttctgcagaggctgggttggtttctgccttggccagctccctggagaccttgggaaagtcacccscctctccaaggtgctaggttctccttggaaaactgtgatgatgaatttggaagccaaaggtggttgtaagaattcacagtaccatgggagctattattatcagcagcatcagatattggaaataagtggatgcccagcccacattcaccagttatgaatggagcagggtataggggagaaccatggacacatggcttgggtagcgtggatacaaacatctttcccctaaacagacccaaattctaacaaattgccacaattttgtggtaactgagcctaataactactaggattgaggttttaccatgtaccaga

SEQ ID NO: 50270 - DNA, 635 bp, Homo sapiens
tgcccatttccgctggcctctctccctcattggggagagttgatataataactagatgtcataagacatcaaaagaggaagcaacattttcacagcactttgtaaaggataaagctgttttggcaggtgatcttgcttaatactcctaatagccctaaggtgaggtaattattcttctcattttggaaatgagaaaactgaagttcaaagcagtgaagtagcatcagtgtctgagggtgcccagctcacagctgggatggagcaggattccagccccaggctgcctcccagagaggtgaggcacagattcccatgggcaaagcaagccccagactctgtttctgtttcaacagaaacgcagcggcatgctgcttgatggtgcrcaaaacacaccacgttcattatcctgcttgatcatgacacagcttgcatttcaggcaggaaaccttaacctcactttgcagacagaaaagcaccatctagagagattgaatcacatccctgttttccatagccagcaggtggcacggggccatcatcctccaagctcagggctcctggttactgctatatgaccatgggtacaactgtactattcttagcctcagtttcctccttgtctccaagggcgcagt

SEQ ID NO: 50271 - DNA, 570 bp, Homo sapiens
atttttttttttttatttttagtagagacggggtttcaccrtattagccaggatggtctcgatctcctgacctggtgatccacccgcctcggcctcccaaagtgctgggattacaggcgtgagccaccgcgcccggcctacatcgtgctttcttggtcatcacagaatcctcagcagtcaataaactttgaataagtgaaagtgtgggtattgggagagtaaggattaagttgatgcaacatttttagcctgactggttgggcacatggcagtggcatttgctgagatttgaagcaaagccagaagaaagggctgagcttgattttgtgttttaaatatgcaagggagaagatgctaagtgcggttgtagatatattaagtttgatgctctttttctgattattctgtaagtacagcgttgtcttcaaagtccactccaaatactaccaagtattacttggtgttgatcagaagtagggtttcccctcaactttgtatgcttgacaatatgatagaacttgaaaaaaagaggaaatctaggaatttaagaaaaaagtctgaacagcatca

SEQ ID NO: 50272 - DNA, 594 bp, Homo sapiens
cttgaaaatatagtctttatcaaaaaggaataagtgcctatgcttttaagacatacagaaatgtaagagactgatggggaattatccctcaataattcattttcctattttccatttctcagtgtttattttttccctttccacactatctctctgcacttatgaccaaaagcaacaaagaataaaatgttcattctgttattttaagtcttaatgataaatttgggccagctttacagctgacatgataatttgtacaggaattggccattaaggctgtcaaaaataataatcatgcaaaaaacaatcttctggaagaagttctcccttagaaccaaggtttgaggatcaaagagcacaacctgacttggttaaagcctgacaaakatagtcaggaactagagaacttagggctcaatttcaggagaacagattcagagtcaagagaggtagctgagcatctgtaactgtggcagctgtaactctaaagtaaagaattggattatacaagaaactgcttaaggactggcatcctggatattttctgcttggcatttccctgaggtccatttttcatccttttggcctctctat

SEQ ID NO: 50273 - DNA, 645 bp, Homo sapiens
ctgaatgtgtttcttcacttggtacctgacagtccacggaactgatctactagagatccactagatgtcactatccacaccgggttttaggagccagccccagccacagacaaatgacaaaattacagctgtcattgccaagtaaaatttctaactgcagggtgtggcctcagtctcacagagctgattcacttcggagaaccagcggtcaccagtgccttgctatatgcctgtgactcgagacacatatgggtggagtaaacagaagaatatacaagatttaatctttgagggaaactttgttttttgtattaaaatctcacawcatcagcctaagagaattgaaagactatctcctgcacagagatcaccccaggaagcagcaccgatcaaccttctgctgaggttcagttcatgaagctatgagtacaagtggagtatttgttcatttttaaagaaatcagtgttcatttgattgtgtgaagttcattgtgaagttcctaccaaagcaggaaattggataaataagtgtgactatttcattaatctttaaatactatatattcagtaaaacctcaaatacctagacccttcaattaaacacaatttcaaatacttttatagcaagagataaaccagtccagt

SEQ ID NO: 50274 - DNA, 552 bp, Homo sapiens
tccccatagtgttaaagtgaaattgatgctgtaggacagctgtttattcatatcaccttctgcacagtactgtgtaataccacgtatgggaataagcacacgaggaacatgggattggtcctaataaagagtcctgcaccattaagctctgcagcccaatactgcatggggtagtgcaattccattttgctgataaaagaataggggtagatcatcatccaaagagttttgatgttaggtggttatacgatggctttcaagacaaagagatctctttgctttgggaattggggggaaggaagaggaaagttttaggatagaaacctggaatgtggctcttagcttctcacccagtttgggaggagaaattgaagaagatggccaaatcgtttcctttatttccatcactgatgtggttcactgtgcttctccatgatgtttggtgtcgggttcatgactgcttccctcagaaaaggagggagaccgtctatactttatagtagattagtcatyaactcaacagggttggagtgggtcttaaagtggtttcat

SEQ ID NO: 50275 - DNA, 611 bp, Homo sapiens
ttcatagtgagctaaaatccattcccgtaatctcaaaccactagccctaatttgcttttgaggccatacaggacaaatctaactgctcttgaataaacagattcacaaatacacgtgctttgctattatgtccccctagtgttctttccttcaggctaaacatctgcttgttcagctcttcatgtcttaaatatataaatataaaatatataactaatatagattttaatttaatatacacgtgcccattaacttacttgcactttatatataacttctaatatagaaatatatcatccaattatacgtaattacatatgtatataaatagctgtaaaacatccttttcatattagtctaygattttggctcatccatcagtcatctgtcttagaccagtgtacatggctagtacattctcagtacagggaacgattttgccttacagaaagtcttttccttaacgagacatgttaaggagaacatgcccagaatttttgaaacataccatcagatgaatgcttattaacttacttttataaaatgacaatattctacaaattgtttcaccagcagtgaacctggttttgcccaggcatgaggcacagcca

SEQ ID NO: 50276 - DNA, 581 bp, Homo sapiens
atattcttttgtttttttttcaactttttacaaagtacaaactattcttaggttgaaggccatacaaaaatagtcaataggccagatttagaattgcagctatcatttgtctacccttgacataccttcttgagaktattggagtttatatattactctcaggtaattcacctccagtgtttgtatcccaaaacactgtaatctaaagaaatacttctcatacttgaatgtacataggcatctctttaaaatgtgcttctttagattaccataaaccctcctagacactggaagctacacatccagtagtatgctgctgttcatgatcagacattcgaaagctcatgacttccaagcatactttgagaaataagatttacccctgtcacatggggatgtcaatttacctggtaaattaaaaaaaaaaacaaaactttagattacgtagtccacatattgtcagtcctaagggaacattagcatgaaatttacatgaaatactgtgtgtgtgtgtgtgtgtgtgtgtgtgtgtatataaatatacaatacatatattatatataatatatataatatataac

SEQ ID NO: 50277 - DNA, 581 bp, Homo sapiens
atattcttttgtttttttttcaactttttacaaagtacaaactattcttaggttgaaggccatacaaaaatagtcaataggccagatttagaattgcagctatcatttgtctacccttgacataccttcttgagattattggagtttatatattactctcaggtaattcacctccagtgtttgtatcccaaaacactgtaatctaaagaaatacttctcatacttgaatgtacataggcatctctttaaaatgtgcttctttagattaccataaaccctcctagacactggaagctacacatccagtagtatgctgctgttcatgatcagacattcgaaagctcatgacttccaagcatactttgagaaataagatttacccctgtcacatggggatgtcaatttacctggtaaattaaaaaaaaaaacaaaactttagattacgtagtccacatattgtcagtcctaagggaacattagcatgaaatttacatgaaatactgtgtgtgtgtgtgtgtgtgtgtgtgtgtgtrtataaatatacaatacatatattatatataatatatataatatataac

SEQ ID NO: 50278 - DNA, 617 bp, Homo sapiens
ccccaacgcccagtctggggcctggcacagaggacatgattgttgaccaaagggtcagggccatgggccacaggggtacccacaggagacagggactggtgctggaaaggagccaggagtggagctgakacagtgcagttagggctggcccagggctggagttcagggagaggcgcggcaggggacagggctgggacaaggccaggactgagattggggctgggtgggacctggggtgagcatgtgataagtgagaatgggggctgaggctgggacaaggacagggactgggtcctgtggggtgaagaagttggagccccagggaccccgagaagagaagggcagatcgccactgctcctcactctcagttacagttgcagccttaggcaggtgtcagaccagggtccctcggaaaggacccttctcccttttcccaccccatgacctctcaggagtgaggaggcttgaggggagccgggaagggcttggcaggctgcccacctgaatccactttcctggtctagaggcagctcccttcccccactatgccctggctcagagccaccccaggaggctgggaggcaccccaggcctgacatcacaccaacccgaccag

SEQ ID NO: 50279 - DNA, 560 bp, Homo sapiens
agtaaaggtcataaacctattggttttgactaaaatgtcactgcaggctccatcatacaataactgtctatggcatttacttcaatgcctaccccatagtaggtgcatagtgaatatttgttaaaagaataaatgaacatgatgtttcagaataaattgtaaagaacagttagaatgcagtttaaagaataaaatacagcacttcagagtataatttataaaaagacatcaaaaggaaatatacaaaagcccttgatatactctaaagwcttctacaactttgatcaggcattgtggaaagaatatcaaggaatcagaactcataattcaaaccatgagctcctctctgagacttgcttctgtaatctataaaacaagagggttggacttgagctatagaatgatctcattttgtaaattagagtacaggccgtctgggaacatgggctcaacgaaaggcataaaatgagtgagcaggtccagccctacaaggtgtgggcctctcagaaaggcaagatgtcacccttcttgcaagagcattggcaaaaaccacactgata

SEQ ID NO: 50280 - DNA, 564 bp, Homo sapiens
cccaattaacttgctgtgtgctagctctggatgtatgtctccgctgtacagttgttaatataatgcagagcaaccaagataagggcttccttcaggtttaaccagcttccrtgcaacgtatcaccagcccggtctccctttatcacatcatgtgcttgcattatatggcccgatatctctaattgttttgtctacatgggccttatctccccagcacaactttcactctttaaagggcacgaggcagcttagcacactgctgctgcacagaggaccaagcctcggagaggactgttgaatgagctgaacagctaggcctaggttagtaagagaagaatccacacattgtgctagcagcacagcaccaatgtgccactggtggtgtgcttaaaagcccaggcattagcaatttggctggccaagttccaatcccaatgctgccacttgctcactgtgactttgggcaagttgcctaattgctccaaatctattgcctttttctgtaaagtgaagttcagcgtacctaccactggatgactgtaagaaatgatgagatagctcaaa

SEQ ID NO: 50281 - DNA, 564 bp, Homo sapiens
cccaattaacttgctgtgtgctagctctggatgtatgtctccgctgtacagttgttaatataatgcagagcaaccaagataagggcttccttcaggtttaaccagcttccatgcaacgtatcaccagcccggtctccctttatcacatcatgtgcttgcattatatggcccgatatctctaattgttttgtctacatgggccttatctccccagcacaactttcactcttyaaagggcacgaggcagcttagcacactgctgctgcacagaggaccaagcctcggagaggactgttgaatgagctgaacagctaggcctaggttagtaagagaagaatccacacattgtgctagcagcacagcaccaatgtgccactggtggtgtgcttaaaagcccaggcattagcaatttggctggccaagttccaatcccaatgctgccacttgctcactgtgactttgggcaagttgcctaattgctccaaatctattgcctttttctgtaaagtgaagttcagcgtacctaccactggatgactgtaagaaatgatgagatagctcaaa

SEQ ID NO: 50282 - DNA, 582 bp, Homo sapiens
ttgtttttgtacttacgtatytcttccaaaattcttgtttaatatcagtaatttacacatttaaatggaaaattcctttttaatgttgggaatttacgaaaccttgagctacttttgatattgctcttcaaatggaagatggcacatggaaaatggcaaaaatccaagttttctcaactgaggcttaaccagtttttaaaaaactttttataataaaataattatgatggaatcaacttacgtgtttgctgttctaggcatatttaattaggtataatcctgttggtctctttgaatttgttaagtatgcaattatttctcatcagattttcttgagtgactgtgtttctctcataaggaggagaataatctaattcctgttgatcagctgggccagaaacttttgaaaaagataggaatatcttggaacaagaagtacagaaaacagcatggaccactgcggaaggtaatacatggcatcgttttgggaagtcctagtcccaagaaatttcattatgatcgcaacaacatgaattcctttgcagaaggatatttaaaataggtgaaaataaaatcaccgta

SEQ ID NO: 50283 - DNA, 582 bp, Homo sapiens
ttgtttttgtacttacgtatctcttccaaaattcttgtttaatatcagtaatttacacatttaaatggaaaattcctttttaatgttgggaatttacgaaaccttgagctacttttgatattgctcttcaaatggaagatggcacatggaaaatggcaaaaatccaagttttctcaactgaggcttaaccagtttttaaaaaactttttataataaaataattatgatggaatcaacttacgtgtttgctgttctaggcatatttaattaggtataatcctgttggtctctttgaatttgttaagtatgcarttatttctcatcagattttcttgagtgactgtgtttctctcataaggaggagaataatctaattcctgttgatcagctgggccagaaacttttgaaaaagataggaatatcttggaacaagaagtacagaaaacagcatggaccactgcggaaggtaatacatggcatcgttttgggaagtcctagtcccaagaaatttcattatgatcgcaacaacatgaattcctttgcagaaggatatttaaaataggtgaaaataaaatcaccgta

SEQ ID NO: 50284 - DNA, 558 bp, Homo sapiens
aatcccaattctgctattaaaaacactctgaaaaatatagtcccttctaccgagggtacatctaaagaaacttattctttattggcctgtttttcatttaactaataaaaattagttccctgaggaagacatacattaatgttattaaataactaataataatattaacaataatgatgacaatgatagctacatttctatggtgatgttttacaacttataaagaactctcacatcaatcagctcacttatttctcactataacctctttttttggagacagggtctcactctgttgcccaggctggagtgtagtggtgtgatccttgctcactgcaactccacctcccaggctcaagtgatcccttctcctcagcttcccaagtagctgggaccacagggatgcaccaccacacccggctaatttttgtattttttgtagagacagggttttgccaygttgcccagactggtctcgaactcctgacctcaagcgatcctcttgccttggcctcccaaagtgttgggattacaggcgtgaggcactgcgcccaacca

SEQ ID NO: 50285 - DNA, 1432 bp, Homo sapiens
tcctaatgtctgtcacttttggttatgtatatttctaactaaaggcagctactctatctttccctcgtaggatagagaccactgttaaattctggcactgatatgaaaacaaaacttagcagaaaaactgagggagtttaatcatatctggtggtaatacctcctaaatgatatcatactctaagagcctttgcaagattatatgaagaatgaattaatttctctctaataatgcagcactgtcattacgaacagcagttactcactgtgaaaaccragtgtgggcccagaccatccggcttcttgagctattgtgtttgagtatcagtattccacagacccctcagctcaaaccaggctatcacttctggctgctctcaaggaacctgccatagcatcctcactaacgtgccaaagctggaaaaacctcattttgttgtctaaattaagaataaatgatccaggtgagcttgaactttagacatctgttttggctgttcagaggcccatctccttccttcctgcttctcagctgggttagtaataactgaggtaccaggtaaataacccctggagggccaaggtaccattgtatattattcttactttgtctctaaaaggattaaagggagaaacagtgattatctgctggatctttgtggagacactaatccacctctttggaagtccaaggccaagttgagaacatgaagagaacacacaccagaagcggagccaacgcattctgcatttattttaatattctactccaaatcacttatgtgggaggaaaaagaaagtaacatttataaaaggataatgttacaagcttcgtatacttcctttaattatatactgtgaggtaggtgttattccctttttatagatgaagactgaggttaggtaatttattaattccaaacctctcatgaatattaagtgataaaaactagcttataatccatctgtttatctcaaacccatgctcctcaaaattttcactttattaaagaatcacaatatcaatacatgcttgctgtaaaagtcaaatacagacgtgttaatatctcctcccccagcccaaatctgctctcacggtaacaaattttaatagctgaggtggcatcttgccacttctttctccaggctcatataatcatgtatacacacgtatgaagatttccttatttttctccaaagtaagatcttactttaacattttccattaacatcactctgcaatgtttatcacttacgaatgtatcacagcttttcaagtccacataggtaatctcaactcatttttaaaaaattgcatgatatattctatactatactatagatgaaccatactttttaaaacacttcctgataaaatttaaattatctctaggtttttgctattacaaacaaagctatagtaaactttctt

SEQ ID NO: 50286 - DNA, 1432 bp, Homo sapiens
tcctaatgtctgtcacttttggttatgtatatttctaactaaaggcagctactctatctttccctcgtaggatagagaccactgttaaattctggcactgatatgaaaacaaaacttagcagaaaaactgagggagtttaatcatatctggtggtaatacctcctaaatgatatcatactctaagagcctttgcaagattatatgaagaatgaattaatttctctctaataatgcagcactgtcattacgaacagcagttactcactgtgaaaaccaagtgtgggcccagaccatccggcttcttgagctattgtgtttgagtatcagtattccacagacccctcagctcaaaccaggctatcacttctggctgctctcaaggaacctgccatagcatcctcactaacgtgccaaagctggaaaaacctcattttgttgtctaaattaagaataaatgatccaggtgagcttgaactttagacatctgttttggctgttcagaggcccatctccttccttcctgcttctcagctgggttagtaataactgaggtaccaggtaaataacccctggagggccaaggtaccattgtatattattcttactttgtctctaaaaggattaaagggagaaacagtgattatctgctggatctttgtggagacactaatccacctctttggaagtccaaggccaagttgagaacatgaagagaacacacaccagaagcggagccaacgcattctgcatttattttaatattctactccaaatcacttatgtgggaggaaaaagaaagtaacatttataaaaggataatgttacaagcttcgtatacttcctttaattatatactgtgaggtaggtgttattccctttttatagatgaagactgaggttaggtaatttattaattccaaacctctcatgaatattaagtgataaaaactagcttataatccatctgtttatctcaaacccatgctcctcaaaattttcactttattaaagaatcacaatatcaatacatgcttgctgtaaaagtcaaatacagacgtgttaatatctcctcccccagcccaaatctgctctcacggtaacaaattttaatagctgaggtggcatcttgccacttctttctccaggctcatataatcatgtatacacacgtatgaagatttccttatttttctccaaagtaagatcttactttaacattttccattaacatcactctgcaatgtttatcacttacgaatgtatcacagcttttcaagtccacataggtaatctcaactcatttttaaaaaattgcatgatatattctatactatactatagatgaaccatactttttaaaacacttcctgataaaatttaaattatctctaggtttttgctattacaaayaaagctatagtaaactttctt

SEQ ID NO: 50287 - DNA, 586 bp, Homo sapiens
tgttatcaggaagagtagtgagaaactgttaaaggcaataaccttttagggttaagacaatgtgtatttcatacttttctgtactactttaaatttgtgcttatatacactttatatttattttaaaggtaaataacttaaatgctttcaatgaatatttagtaacataaaaaaatgctcagaaatgagagaaaacaatgtctatctggtcactgtttatttacatataaatttctgccatataaaagaaactgaaaatatattaaaaggttaccggtatttgttgccaaacaatgggattatggcttactttatattctttaaaaaatgtttttctgtatttttcaacatcttaaaatgagagttcaaatttttaatgmcaaaaattaaaagtaagtattgttaaaaatagagatgaacaagatggtctctatcccaggtaagactcaaaacctcaatgatacaaaaatctaacatggaaagccctgagacagctacaatttagctaactccacggggctcttctagcaaagggctacactgtgactgagacaaaggagaaaacaaatggaataaaaataaaagg

SEQ ID NO: 50288 - DNA, 631 bp, Homo sapiens
atggaaagatgaaggcctggtttatgctactgtcaaagattgcatctgctggggatttgacagtatattacttgccattctaacttgcttttatttaaaaacaataacaaaaagcccaaacagattgcttaccaaccatctttaacttacagatgagcatcacattcaaataactgtcaggtggaggatcaggaggaggaagtgctgggcttggtcttctcccagagtttgctgcacattggccatggatacaaatgtgcagagggtaggaaggcctgtcatctttctaatctaatggccttgatcacaaaccacataatgtccagctgttacttttatttatatttgtcttgggttagagaaatatggaaacaacaggcaggggggaaaacagtcttttggttatcttaatggagagaagggtagattagggctcaagaaacctcartttaaggccttataagaactgatgagaaatgtgtccttggaacatacatgaacctcattgatctgacctatagcatgtggccaatattacctgtcagatttttctgagtattaaataatatgcccagggttagaaaaaaatatatataatatactcaggggttggaccagaaatggcaagtgc

SEQ ID NO: 50289 - DNA, 556 bp, Homo sapiens
tcactttgtgggatcaggtttttctattttgccctgagagaatggtaccctttgggaggccctgtttcagtgtcatgaggattgtctcttacccaacctccttcactgtctttttctcctaccctttatacaggcccattaaactcagccttaggccaccagggtttagtagatccctcctaggaaaatgctggccccagcctactatcttcttaggtttttgctttcttattatctctgtacctttaggaatttatgttctttctcactggctaagccatggaaaaaatgtgttttagattttatctagcgttcttagtagtttctgtgaatgtataacccactctattcccagaaacatgtctacaaacaatatttttatgaaaaccttggtaacttcaacttatcactggccagtttttctaaaagccccaagctctttgattttcttatattttttttcctaatatggctaaattttccttaaaagcaaggcacgatagatagttaatgttactgagggcatactctatcccaggtgctattataawtcctt

SEQ ID NO: 50290 - DNA, 580 bp, Homo sapiens
tttgagatggagtcttgctgtctkgcccaggctggagtgcagtggcatgatcttggctcactgcaacctctgcctcctgggttcaagctattctcctgcttcagcctccccagtagctgggattacagatgtgtgccaccacgcctggctaatttttgtatttttagtagtgacggggtttcaccatgttggccaggctgatctcgaattcctgacctcatgacccgtggcagcctcccaaagtgctggggtaataggcgtgagccactgcgccccgccaagagcttatcattacattcagtgtttgttaggtactggttggttagtgcatgattgaactgtctactgacctccttgttctcatattcaggatagtaaagcctaaaatgttcctccatggtgggtgggggcaatgtccttcgacttctttactctcaactttgatccatgaatttctagtatcatgtggaggagggtgttctggaaagtggtgatggaaggctgtggttctcgctccagtgtggaggagagaaaaagacagtgaccccttctgagaggcagcctacactgtctcattaga

SEQ ID NO: 50291 - DNA, 1236 bp, Homo sapiens
ctcacaccgaataaactacatttctgtatctctctcttttttttgagacggagtctcgttctgtcatccaggctggagtgcagtggtgcgatctcagctcactgcaacatccacttccagggttcaggtgattctcctgcctcagcctcctgagtagctgggattacaggcaccggccatcatgcccagctaatttctgtattttggtagagacagggtttcaccacgttggccaggctagtgaactcctgacctcaggtaatctgcctgcttcagcatcccgaagggctgggattacaggcgtgagccaccgcacctggcctctgtatcgctcttaacatgagtctccccaatatttaacacccacctttcttgtttctgtcagtgagatgatcaccttgactctgaagcatttaatatacctgaaaagataatatacctgaaaaaagtcaaattatttatatgtaattagtaacaacatttcaatttcagtatacataaccttaaccttagctagcaggttgatggctttagtttcttcctctgatcctgaaactccaaaaaaaaaaattggatgctattagatacagtgcatgacagaagattgttgacattaattcttgaagattttgtctaaaggtagagccctttggaataccagatatcttggtgtctgctccactttcaggagagaaagggccgactcaaggtatcacatctttaaaattcttccattgtgtccctgtcttatgcccaaatccctgaggctcatgcttaatttaagaatcgcaaagagaatgttattggacaagagagtggaaattaagtggctgattttgccgttggtartggagttttaatgggagttattaaaatgttaccaaagcatgcacatgtacacacagacacatacaggcacattttggttggtgtccaagttctttagaggcaatagaagaaatctatccccttgaccacagttcactaaaagctttgttaaaacgttccgagtgctatgccagcaagactttgagtccaattttcacagcttgcaatgctcagaggacaccatctacctgggtttcaactagattgccaaaaacctaggagaactggacctcaaataatttgctaccagtccagtttctaattatacacagaatggtcgtagctccatgacatttctataagcatccacataaatagaatcacaatttagacaatgtttggtggatg

SEQ ID NO: 50292 - DNA, 442 bp, Homo sapiens
gtgtgtgggtgtgttgagrcagagtcttgctctgtcgcccaggctggagtgcagtggcgtaacttggctcactgcaacctccgcctcccgggttcaagcaattctcctgcctcagcctcccgagtagctgagattacaggcatgcaccatcatgcctggctaattttgtatttttagtagagatggggtttcaccatattggccaggctggtctcgcactcctgacctcgtgatctgcccaccttggcctcccaaagtgctgggattacaggcgtgagccaccgtgcccagcctgcctttactctttaggccacagagggtgatgttaaaatattcatagccctggattaaaatctgatttggaaccatcataatcagaattttaagatatttgcaaacccatttataaattaatttcaatattgctttcatttttatgtaa

SEQ ID NO: 50293 - DNA, 442 bp, Homo sapiens
gtgtgtgggtgtgttgagacagagtcttgctctgtcgcccaggctggagtgcagtggcgtaacttggctcactgcaacctccgcctcccgggttcaagcaattctcctgcctcagcctcccgagtagctgagattacaggcatgcaccatcatgcctggctaattttgtatttttagtagagatggggtttcaccatattggccaggctggtctcgcactcctgacctcgtgatctgcccaccttggcctcccaaagtgctgggattacaggcgtgagccaccgtgcccagcctgcctttactctttaggccacagagggtgatgttaaaatattcatagccctggattaaaatctgatttggaaccatcataatcagaattttaagatatttgcaaacccatttataaattaatttyaatattgctttcatttttatgtaa

SEQ ID NO: 50294 - DNA, 596 bp, Homo sapiens
gaaaattaaaaataaagcagaattttaaataagccaatccatactaggtgatatatgatgaacattggaatgggtgaagcctttttaaacagaaaggaaaacaatggaataatatttaaaagacaaaaaagtgatttttgactgctaacagttaagaacataatgtatatcaattataaatatgcatatcaacrcatattcaaatgcacatttacctatttatatatacatacacatacttatgtacatgtaatatgtgtttttgtatgtgcaaatagagctatattcttaataaataactcgtaatttagataaacgctacaaaaataaatgttgtatgggaaatctgggcaaagaacagaaaagacattaataccaacatgaaagtcatggaagaatttttaaaaggcaaagaaatgcttatccttaatgattaaaatgcatatgaaaatgagattttttagaaaactcaattgaaaatgatgtagaaattgataatatttactggaggaaagactgatgagattggatagctcacatatacctcaactctatgtattttctcaaaatcagtctatacaaaccattcagtagaa

SEQ ID NO: 50295 - DNA, 596 bp, Homo sapiens
gaaaattaaaaataaagcagaattttaaataagccaatccatactaggtgatatatgatgaacattggaatgggtgaagcctttttaaacagaaaggaaaacaatggaataatatttaaaagacaaaaaagtgatttttgactgctaacagttaagaacataatgtatatcaattataaatatgcatatcaacgcatattcaaatgcacatttacctatttatatatacatacacatacttatgtacatgtaatatgtgtttttgtatgtgcaaatagagctatattcttaataaataactcgtaatttagataaacgctacaaaaataaatgttgtatgggaaatctgggcaaagaacagaaaagacattaataccaacatgaaagtcatggaagaatttttaaaaggcaaagaaatgcttatccttaatgattamaatgcatatgaaaatgagattttttagaaaactcaattgaaaatgatgtagaaattgataatatttactggaggaaagactgatgagattggatagctcacatatacctcaactctatgtattttctcaaaatcagtctatacaaaccattcagtagaa

SEQ ID NO: 50296 - DNA, 535 bp, Homo sapiens
aaaatagagagattaacaatatccagctcatagatctgtggtgccaattaagtctacactatggtgaatatgaatataccacatccccttcaaggaagaacttgctgaccagctgcaggagggcacgcagcagctgctatagctgataattctctccaagttagcctcagatgtagagagcctcccttaaggtcaggcccttcctggggcagcctataccccacggctgagcaaggcagagtacaagagtgtggctattccagtttcatacaggacctcctggtagtcaacactcaactcacaactccccagcaagttggctgagaatttttygagcctgaatcacagtttttcttcctctgcccattcctgcttcctcctccttcctttcactttgttaatccctaataaacatcttgcaccccaaactccatttcaccatctgcttctgaagaacccaacctggaacatatgccagctgctcagaacagcacatggatcttaagcattcaaaaaaaattagtcagtattacta

SEQ ID NO: 50297 - DNA, 551 bp, Homo sapiens
  misc_feature (1)...(551): n = A,T,C or G
tggcccttatagacttggcaagagaatgcagagctagactcagacacaggtgggcagcaaggcaaatctgggcaatggagataggaaccaggaaccaccaaccaccaggtcttgttgcaggaaaggttgtcagaggctgtcnaatgggatgaactggactctgtgacatttcagtctggactctgttacatttcagtctctttgcctctctgttcaaggagtctccaacagcctaaagcagatcatgaggagtctttgcctgggcatctgtccacagttattaatgtacacagactgtatccartggtaataccctccacttggaagtgctattgagaaaaagaaatgaatgctgggaagtgagaaaacaacaaatgtgcattgcacaacctggggaggatccatgctactgagtttatttctcaaccttgctaaagctccccttcttgtgttttttgaataaagattgaaaaagaaatggtgatcattcaataataatccttttactttaacctctaagtctctattaatcatatcccgaaacacaggag

SEQ ID NO: 50298 - DNA, 551 bp, Homo sapiens
  misc_feature (1)...(551): n = A,T,C or G
tggcccttatagacttggcaagagaatgcagagctagactcagacacaggtgggcagcaaggcaaatctgggcaatggagataggaaccaggaaccaccaaccaccaggtcttgttgcaggaaaggttgtcagaggctgtcnaatgggatgaactggactctgtgacatttcagtctggactctgttacatttcagtctctttgcctctctgttcaaggagtctccaacagcctaaagcagatcatgaggagtctttgcctgggcatctgtccacagttattaatgtacacagactgtatccaatggtaataccctccacttggaagtgctattgagaaaaagaaatgaatgctgggaagtgagaaaacaacaaatgtgcattgcacaacctggggaggatccatgctactgagtttatttctcaaccttgctaaagctccccttcttgtgttttttgaataaagattgaaaaakaaatggtgatcattcaataataatccttttactttaacctctaagtctctattaatcatatcccgaaacacaggag

SEQ ID NO: 50299 - DNA, 562 bp, Homo sapiens
cattttggattcccacttccgtctcacaaggatgcatgagtatcctgagaccaccacagaagatagctaggtgggagtctgcttgttgatacatcaaccaaaaggacygccctgggggcaagtagagtgcttcttccagctcaaggaattatgcggtgagcaggctttccttgcaggcccacctagctcccccagggaggacattccaataaccagttttggattaccccaaaagacatctatctatctatctatttaaatggtctttcctgtaaataacacttcacttctgataccaaatgtgtagggtttatttccagttcctagcagacaccaacttggtgtcctaaaatgcaattaaattctaacactatctatcagaaattagatcccacaagattgtccacacttcacatgccaatagcaagtcccagcctcctgtacttctgactgaccagctatacactgggagtttccataactctcatctcagtttcagtaatttgctagaatagcttacagaactcaacatttactcaatttaccagtctattaaaaatag

SEQ ID NO: 50300 - DNA, 562 bp, Homo sapiens
cattttggattcccacttccgtctcacaaggatgcatgagtatcctgagaccaccacagaagatagctaggtgggagtctgcttgttgatacatcaaccaaaaggaccgccctgggggcaagtagagtgcttcttccagctcaaggaattatgcrgtgagcaggctttccttgcaggcccacctagctcccccagggaggacattccaataaccagttttggattaccccaaaagacatctatctatctatctatttaaatggtctttcctgtaaataacacttcacttctgataccaaatgtgtagggtttatttccagttcctagcagacaccaacttggtgtcctaaaatgcaattaaattctaacactatctatcagaaattagatcccacaagattgtccacacttcacatgccaatagcaagtcccagcctcctgtacttctgactgaccagctatacactgggagtttccataactctcatctcagtttcagtaatttgctagaatagcttacagaactcaacatttactcaatttaccagtctattaaaaatag

SEQ ID NO: 50301 - DNA, 574 bp, Homo sapiens
ataaccagctgggccacccggaatgcgagggtgctgcctgaggggatggtgaccgtcttcttctggctcagatgcccctggccctcaccctraggcatggagatgggcctcgggctgggccctggcaccgggccgtggggtgcgggtgcgggccgggtgccggggcagcccgccgccaggtgacttcgctccgcagccaagcgcagggctgggagctgctccgaggggccttgcggagcccagcccgccgcctccgtcacccgccgccgcgtgcccacgtgggggccaggcgtggcccggggctggctacacacctgcaagcacgtggctccgggcagggaaaaccggcccgagccctcccgcttgtgggtgcgcgtgacttccacctccttctgtgtctgcagcacctcagtcaccacgtacacgttgtccccgcggctgcgcagctgctgcaggactttgtgttctggctgccgcaggtgcctgtgtccgaggagcagcaaagctcgctggccgcagcccctgaaggcgtcttccctcccctgacagccccacgccaccgggggaggtggtg

SEQ ID NO: 50302 - DNA, 554 bp, Homo sapiens
tacaagggaaactctgatttggggccttggtcagatacgaatggaaccaaggattcagttctctggtttcctctgcatgctgcsttcagctttccccaccattgcctgaactcctcagtgtgactgggtgccattagctccctggcctcattcacatcccacctgccactggcagagagggactggtctattctcactctgctctgcgaagggactttggcctggcttggctcagagggagacccccaaactattggtggttgggctgtgaagagatctgatgagacctcttgattcaagtctgccactggaccaattagctatatgccatggggacagggtcatatagtacagacctggtcattgggcactcaccctatgtaacaaggacaatttccagggtagaaggatgtgtaagaatattagaatttggggccgggcacggtggctcacgcctgtaatctcagcactttaggaggccgaggcgggtggatcgtctgaggtcaggagttcaagaccagcctggccaacatagtgaaaacccgtctctacta

SEQ ID NO: 50303 - DNA, 641 bp, Homo sapiens
tacaagacaggattaattttgtgctaacattgttttttttttcctttgtttaatctaaaaaattcccaacccaggcttttctgaaagtttcaaataattctcttcttttattggttatatctctgcccttaagaccaaaacaaaacaagaaacaaagaccaaaaaaaaaaaagcaacaaacaaaaaaccctcaaacctcaacttctagaggtttgttcctgatttattatctcattttccaatgtgtcaataaaatctccartccaaactttctaacttgcctttgttatatttattaaaaagtgtccattttaaaggatagttatcaccttgattagattgtaaatctccttgagggcaggagactgtgtctaaccagtaataagcacccaaacatttattagagagctgtgcaacctctgggaggtcaataaatactcgttgactcactgactctataaatataaatagcaaaataatcagacattctgctggcacctaatttgctccctgtaggtaagtttgtctctttggtagcattgattcttttaggccaccagggttccatttagagaattacaattgccatgtgctaactggtactctggtagcctgaatgagtttcagagtctccccaaatg

SEQ ID NO: 50304 - DNA, 529 bp, Homo sapiens
cagtactgtgagaaataaatgtttgttgtttaggcctcccagtctaaggtaattggttataacagcattagctgactaacacaccatccatttcctcttgtcctgtacctttaatctcactttctccatgacttttttctctgtagcctttaaacaagcatattttctcctcatttaaaaaaaagttttctacwctattcttcatcacagtaccaccctatcttgtccttctccaaactccacacttttaaagtctatatttatatctactttttaaaaattctctttcctgccacagcacattataccattatcccaaactcctcttgataaaagtcaccaatgacatcctaatcaccaacaccaaagatctacttcaatttttattctggcagatttcccacagcatttgaaactgttgactcctcctgaaaccattttgataaatgaattaaaaactaaaataaaatggcactaactaggagataatagagaaaagttaactaatggtggaggtttgggcatagaa

SEQ ID NO: 50305 - DNA, 529 bp, Homo sapiens
cagtactgtgagaaataaatgtttgttgtttaggcctcccagtctaaggtaattggttataacagcattagctgactaacacaccatccatttcctcttgtcctgtacctttaatctcactttctccatgacttttttctctgtagcctttaaacaagcatattttctcctcatttaaaaaaaagttttctacactattcttcatcacagtaccaccctatcttgtccttctccaaactccamacttttaaagtctatatttatatctactttttaaaaattctctttcctgccacagcacattataccattatcccaaactcctcttgataaaagtcaccaatgacatcctaatcaccaacaccaaagatctacttcaatttttattctggcagatttcccacagcatttgaaactgttgactcctcctgaaaccattttgataaatgaattaaaaactaaaataaaatggcactaactaggagataatagagaaaagttaactaatggtggaggtttgggcatagaa

SEQ ID NO: 50306 - DNA, 604 bp, Homo sapiens
aatttagaactaaactgaattttctttcataggaaatatgtgaacctagaaattctgttgcatttgtttcttttttttacaaataaaaaatttaagctatatgtgaagttaaaattatttcaaatacttttagaatcaagtggaatataaattatgaatatgtaaaatagctaatggtactatacatcttccaggtcatcctggcagaaatggcttttacgcaractcagcactgatactggtttgtagccatatccgacagatctttcaaaatattctttgattgaaattaaaatgcaatgaatcactcaacagagggttgacagtgacttgggtcacatggtgcaagaccctctgtattgttcatggtacttgccatcaaaatgttcaaattaatggagcctgtgaaagcacaggttgtatggagtataaagcctatagagtttttttaaaatcttttttcttcttgaaacgtgtgcatgctgtttttgggaacaatacaaactgcatgttgaagtcagacaaattcaggtgctaaataatttgtttctctaatggacttagattgtatttgctatcaggttttataagagggctttttgtg

SEQ ID NO: 50307 - DNA, 529 bp, Homo sapiens
attttacaattctaacagtttttccttagattccttccttttaagctgcaatataacctgaatactggaagggttcttcttccccctccctagttgctttagctgatgaatcatagaaatcagagaaggggaagaccagtgaagtcatctgattcatctccaaatcagggagtggagcattggaatttggggaagaccaacctctcattttaagagaaaagaggtttttttggtttttttgtttgtttgtttttccagcttgagctgattagagcagcttacccatctgtttgccttttgcttctaacacaattctgagaccccaccctattagaaagcaatcaggccttcttaccaaaaaccccargaaaaccagatgccaaaatgttaagtagttgaactaaaattctactacctgagtaataaagttggtttatgaatctctcagtgattgttttaactgagtcttacagaatttgagactgttttagcagggtcttacaaatgtaagagctagcaaggaatttac

SEQ ID NO: 50308 - DNA, 564 bp, Homo sapiens
tggggtgattatgttgatgacctgtcttgtctctgttgagataaatttaccaccaattgagcactccttattggcagggattgggtgtatcaattccgagaactgtatgattgcaaagstggaaagccaattcatcaggctattgttttgctgccccattaagtatattaactggaagatgacttcatttcaaccatttcaaatcttaaatacaacagattcagtcctttatggaatgagttaaggtcagaaaatctgtccatcgtctttctcataaatactttaatatcttccaagtatcattggactaagaaagtaattatgggtaataataaagattccaattaagaattagggcaacatgaaaatgctactaatttcgattcacatcgtagctttcaggtccttctcaatatgtttaattacttgtgagaaatacagaagtagtggctggttcggcaagcccatcaccttttatgagaagtagaagactcagttttatcctgtctgaacaggttgcattagccatggggaacattttgtttttgcattcacacatcagtc

SEQ ID NO: 50309 - DNA, 1419 bp, Homo sapiens
tgtatgttgtattgcattgtggttttaattttttcattgtcctaatgactaatgacactaaggttattttccatttgtatattttctctggtgaagcattttttaaaaacctttgaccattttaaaaattgggagattttttaaaatgttgaattctgagagtcatatacatatatattctggatacaagtcacttgtcagatatgtgatttgaaaataaattacttaaatatgcttgctgttttattctcttaacactattaagagaataagccttatttaacaattttttattttgggtctcatgcttttggtgtcatacctaaaatccctttgcctaatccaaggtcttaaaaaatttctcctgtgtattcttgtagatgttttttaaaggatggcttaatgttcaagtcatcctagacagaaccttgctgattctgttaggtctttggacactgaacctgattgtctaggtttctatcttggttttgagacaacccaagtgaaagtgctacgtaaattctagaatgccgtagacttttacttatgtttccttacgtttaacattatgaaaacaggaactgctatttacttatatgtggatcacaaccttgtgcatcatttcccaagttccctgcacctctgctctttctagctcagtaaaatacaccatggtgcttatgagttctggatctaagtagatctgccttttgataaatctggctctgggacccactagctgagagaatttgggaaggctatgtagttcaagtttcagtttcctctatgaagtacaagactcaatccttcccagtgttttagcaaatctattattgttagtaattgttgtcatttgtattgaaatgctgccttgctccttccattctccttcagttattaaatcacacaacagtccaggagttgaggttctttccttgttgccagtcttccctgttgttggccagcatcccagataycccattgcatgcaccctctacctacagagacttcaccccacccagttgcctctctgatgatgataatcaccagttgtgccaaaagacaccatgtgtctctagacattaaattccacctgcccaatctgtccctctccaccacctactcttccctgacattcactacaagttacagcaaatgctgattcccaggtccgagctcttcgtaaggttgcctgtactccactctccaactcagaaactctctccaatagatctattttgcctcttctcactttcaaaaaaactttgtcaactcttttttaagttcttaattaaaagacaaaactcatatcataaattcaccactggtttctccttgcatgggattgaaatatcttacttaagtttaggaagttcataacagactgtataggtaacttcctgcccctcttgatttaaa

SEQ ID NO: 50310 - DNA, 1419 bp, Homo sapiens
tgtatgttgtattgcattgtggttttaattttttcattgtcctaatgactaatgacactaaggttattttccatttgtatattttctctggtgaagcattttttaaaaacctttgaccattttaaaaattgggagattttttaaaatgttgaattctgagagtcatatacatatatattctggatacaagtcacttgtcagatatgtgatttgaaaataaattacttaaatatgcttgctgttttattctcttaacactattaagagaataagccttatttaacaattttttattttgggtctcatgcttttggtgtcatacctaaaatccctttgcctaatccaaggtcttaaaaaatttctcctgtgtattcttgtagatgttttttaaaggatggcttaatgttcaagtcatcctagacagaaccttgctgattctgttaggtctttggacactgaacctgattgtctaggtttctatcttggttttgagacaacccaagtgaaagtgctacgtaaattctagaatgccgtagacttttacttatgtttccttacgtttaacattatgaaaacaggaactgctatttacttatatgtggatcacaaccttgtgcatcatttcccaagttccctgcacctctgctctttctagctcagtaaaatacaccatggtgcttatgagttctggatctaagtagatctgccttttgataaatctggctctgggacccactagctgagagaatttgggaaggctatgtagttcaagtttcagtttcctctatgaagtacaagactcaatccttcccagtgttttagcaaatctattattgttagtaattgttgtcatttgtattgaaatgctgccttgctccttccattctccttcagttattaaatcacacaacagtccaggagttgaggttctttccttgttgccagtcttccctgttgttggccagcatcccagatatcccattgcatgcaccctctacctacagagacttcaccccacccagttgcctctctgatgatgataatcaccagttgtgccaaaagacaccatgtgtctctagacattaaattccacctgcccaatctgtccctctccaccacctactcttccctgacattcactacaagttacagcaaatgctgattcccaggtccgagctcttcgtaaggttgcctgtactccactctccaactcagaaactctctccaatagatctattttgcctcttytcactttcaaaaaaactttgtcaactcttttttaagttcttaattaaaagacaaaactcatatcataaattcaccactggtttctccttgcatgggattgaaatatcttacttaagtttaggaagttcataacagactgtataggtaacttcctgcccctcttgatttaaa

SEQ ID NO: 50311 - DNA, 617 bp, Homo sapiens
cggcagctggggtctcttctactctgtccctgctcctctgcccctcctgcgtcccaccccccccacgttattctcagagcatgggacaattcctctgttagggtgaataattgagcgttaactctaggaacagacggctatgaatagatgcgagggaagaaagcgttttgccaagtttgagctgagctgaggattgtcggcgctgaattaaagatgagcttcctggctctctgttctacttagcattgatcgagcaccatgtcttgaattttcaaaaaaagaagaaggagaagaaaaaagtcagaaaggggtttatatatttcacttgaggtcaggagttcragaccaccttggccaacatggtgaaaccccgtctctactaaaaatccaaaaattagccgggtggggtggcacatgcctgtaatcccagctacttgggaggctgaggcacgagaattacttgaagctgggaggcagaggttgcagtgagctgagatcatgccactgcactccaccctggacgacagagcaagaattcatctaaaaaaaaaaaaaagagatgagtttccttaagacattgcaaagccaacaacccccccggggagccatattaaagc

SEQ ID NO: 50312 - DNA, 632 bp, Homo sapiens
agaaatagatgtttatttggttttgtttgccgattgatctgtatgggtgatggcttttggtgacaactgaaatgttttctaattttaatgactcattttcataatgtccaaaaatttaaatctatattcattaaaatcccaatatactttgtgtaatcatatttactgtatgtgtatctatgactgcrtttgtggttttgtgggctcattacatgttttatcttattttatcatttaaacatatattcttccattgtttttatatgtatgctaccttctactttttaaaacagacaaaagaatatgacagtaaaaattttaatttctgaaaattattccatatttaccaaattgtaacaacttgccaatttataaaataataatcccagtgacacaactcataatatattgataaacatgttcagaaagctcatttttcccctactaaatcttgagattatcatcgtgggtcagtgaatgtctcccagagatgaatacacatagcccttcgaaatgattctttgttcctggatgaaaggtctgtctggctctacaaacatacaatgaatttgatttaaaaagaaatagtgtggcttctctccaacacttgacctcttcccctacagcttatt

SEQ ID NO: 50313 - DNA, 632 bp, Homo sapiens
agaaatagatgtttatttggttttgtttgccgattgatctgtatgggtgatggcttttggtgacaactgaaatgttttctaattttaatgactcattttcataatgtccaaaaatttaaatctatattcattaaaatcccaatatactttgtgtaatcatatttactgtatgtgtatctatgactgcgtttgtggttttgtgggctcattacatgttttatcttattttaycatttaaacatatattcttccattgtttttatatgtatgctaccttctactttttaaaacagacaaaagaatatgacagtaaaaattttaatttctgaaaattattccatatttaccaaattgtaacaacttgccaatttataaaataataatcccagtgacacaactcataatatattgataaacatgttcagaaagctcatttttcccctactaaatcttgagattatcatcgtgggtcagtgaatgtctcccagagatgaatacacatagcccttcgaaatgattctttgttcctggatgaaaggtctgtctggctctacaaacatacaatgaatttgatttaaaaagaaatagtgtggcttctctccaacacttgacctcttcccctacagcttatt

SEQ ID NO: 50314 - DNA, 605 bp, Homo sapiens
gcagagcaaagaatgtacattatcacagagaggaacacataggctcttgatgaagaacatttcttcacacctgcaacagtttaactgtgtaccacctcaaaaggaatgcacttcctattagtgaagatgctcacaagtctgtgacagatgctctcggaggagttcctcaactgaaggggaagctgcaatagaggactatacagtcccttccaacaccatcatttcatgattctgcaaatagtgtgtcctaattaaaacagcaccaccactaagttgcatccctaatccaaaagtgttcaagttggatagctttagtggatctaagcctttgaagaaccatctgttgtagaaactgagaattaattttattttggattctagatagatgatagatagatagttagatagacagataatgtctgtctgtttatctatctatctatctatctatccatacatacatacacacacacacacacagagacacattttccagacttttattttaggttcagggkgtatgtattcaagtttgttacatgagtaattcaagtgtcactaaggtttggtgtacgaataatcccatcaccaaggtagtgaacata

SEQ ID NO: 50315 - DNA, 1673 bp, Homo sapiens
gataccacacactgcctgtggtgaatatgattttaattttctatgagtaatcatatatatttttaccatctttcctttaatttttttcagttattgatgtacatgtgttagtttgtgtattattgtgcatgataaataaaatgcctaagagcttaactatgttaggtaatataataagtcaactttttcccacaaaattagtaaatrttaaggcaattagacattcagtatatatttattgaatttgaattaatcaactaatgctaatgctttatattaaaaacctgggattttttttttcagtggcaatacacatttatttctaacttgaaagtgaatatatgggactgtgtttttatctgaacaaatttccaagtatatattaaccagttaagcaattctaccattcccttctctccatgattgaatttattttagaacaagttttgagttccttttgaatgtgactgatgttagaagtttgaatctaaatagagagctttcttggaaacaaggacatgtttagtatgtcctttatagtgatgaatatctttaaaaaaacatctgtcataagttagctaaattattatattccatcttagagaaatgtcatgctgaggtaactttttttaaatgaagtcatttcttagatatccgtgctgaacttattttcaatgactaaaattttaaaaagtattcattccagaaatgacccaaactcctttgaataaaattactaaaatctcactagctgggaacatgcattcatttttaaaatgatcataaatgtgtgaggcagttttctacctgacaggagataaaaacggattagtgagcagagatcagatcatgcagagcattgcaagaaatattagaaattttttaaaactttaacaaagaagaagcttctgaagaacttgataaagggaaattatataagactatatccattttaaaaaaggataagtcaaggtacaatttgaagactagactaggagtaaagaagaatggatttcatttatccagatggaagtgtgttactataatccagaaaatagacaactgtattaggatagtgaagtgagggtgaaaaggtgtttaaataaaggttgaaataaatgtacttacagattcaatagaagtaggaggcaacacaaatgactctcagatttcaagtttgagcaaatgcgtaatgagtattgccattttatgagtatacagaactaaaagagaagatgctgggaaatatataatgtatatattttagacattccaaatttgagattcttgcagatattcaggtgaaaatatacattattatgtagctaaaaatatcataactcaaaaaaagaagactggaaaaatagatcaaatgttgcatacctatagattaattaaaactgttgaacatatgagatcactttgtatggatgaagaagagacctgagacaaaattctgtaaattgcctacattctgaagaagtcagcagaaaagactgagaagaaccagccaaagatagaaagggcaaacttagaaagggtggtgtcttggaagatatgaaaagggagtcattctaaaaaggaagtcatttaaagatttcatagtatttgcttgaaacttagaagtttcaagtttattagattatctaatggcgagctcagaatgagcaacc

SEQ ID NO: 50316 - DNA, 1673 bp, Homo sapiens
gataccacacactgcctgtggtgaatatgattttaattttctatgagtaatcatatatatttttaccatctttcctttaatttttttcagttattgatgtacatgtgttagtttgtgtattattgtgcatgataaataaaatgcctaagagcttaactatgttaggtaatataataagtcaactttttcccacaaaattagtaaatattaaggcaattagacattcagtatatatttattgaatttgaattaatcaactaatgctaatgctttatattaaaaacctgggattttttttttcagtggcaatacacatttatttctaacttgaaagtgaatatatgggactgtgtttttatctgaacaaatttccaagtatatattaaccagttaagcaattctaccattcccttctctccatgattgaatttattttagaacaagttttgagttccttttgaatgtgactgatgttagaagtttgaatctaaatagagagctttcttggaaacaaggacatgtttagtatgtcctttatagtgatgaatatctttaaaaaaacatctgtcataagttagctaaattattatattccatcttagagaaatgtcatgctgaggtaactttttttaaatgaagtcatttcttagatatccgtgctgaacttattttcaatgactaaaattttaaaaagtattcattccagaaatgacccaaactcctttgaataaaattactaaaatctcactagctgggaacatgcattcatttttaaaatgatcataaatgtgtgaggcagttttctacctgacaggagataaaaacggattagtgagcagagatcagatcatgcagagcattgcaagaaatattagaaattttttaaaactttaacaaagaagaagcttctgaagaacttgataaagggaaattatataagactatatccattttaaaaaaggataagtcaaggtacaatttgaagactagactaggagtaaagaagaatggatttcatttatccagatggaagtgtgttactataatccagaaaatagacaactgtattaggatagtgaagtgagggtgaaaaggtgtttaaataaaggttgaaataaatgtacttacagattcaatagaagtaggaggcaacacaaatgactctcagatttcaagtttgagcaaatgcgtaatgagtattgccattttatgagtatacagaactaaaagagaagatgctgggaaatatataatgtatatattttagacattccaaatttgagattcttgcagatattcaggtgaaaatatacattattatgtagctaaaaatatcataactcaaaaaaagaagactggaaaaatagatcaaatgttgcatacctatagattaattaaaactgttgaacatatgagatcactttgtatggatgaagaagagacctgagacaaaattctgtaaattgcctacattctgaagaagtcagcagaaaagactgagaagaaccagccaaagatagaaagggmaaacttagaaagggtggtgtcttggaagatatgaaaagggagtcattctaaaaaggaagtcatttaaagatttcatagtatttgcttgaaacttagaagtttcaagtttattagattatctaatggcgagctcagaatgagcaacc

SEQ ID NO: 50317 - DNA, 1673 bp, Homo sapiens
gataccacacactgcctgtggtgaatatgattttaattttctatgagtaatcatatatatttttaccatctttcctttaatttttttcagttattgatgtacatgtgttagtttgtgtattattgtgcatgataaataaaatgcctaagagcttaactatgttaggtaatataataagtcaactttttcccacaaaattagtaaatattaaggcaattagacattcagtatatatttattgaatttgaattaatcaactaatgctaatgctttatattaaaaacctgggattttttttttcagtggcaatacacatttatttctaacttgaaagtgaatatatgggactgtgtttttatctgaacaaatttccaagtatatattaaccagttaagcaattctaccattcccttctctccatgattgaatttattttagaacaagttttgagttccttttgaatgtgactgatgttagaagtttgaatctaaatagagagctttcttggaaacaaggacatgtttagtatgtcctttatagtgatgaatatctttaaaaaaacatctgtcataagttagctaaattattatattccatcttagagaaatgtcatgctgaggtaactttttttaaatgaagtcatttcttagatatccgtgctgaacttattttcaatgactaaaattttaaaaagtattcattccagaaatgacccaaactcctttgaataaaattactaaaatctcactagctgggaacatgcattcatttttaaaatgatcataaatgtgtgaggcagttttctacctgacaggagataaaaacggattagtgagcagagatcagatcatgcagagcattgcaagaaatattagaaattttttaaaactttaacaaagaagaagcttctgaagaacttgataaagggaaattatataagactatatccattttaaaaaaggataagtcaaggtacaatttgaagactagactaggagtaaagaagaatggatttcatttatccagatggaagtgtgttactataatccagaaaatagacaactgtattaggatagtgaagtgagggtgaaaaggtgtttaaataaaggttgaaataaatgtacttacagattcaatagaagtaggaggcaacacaaatgactctcagatttcaagtttgagcaaatgcgtaatgagtattgccattttatgagtatacagaactaaaagagaagatgctgggaaatatataatgtatatattttagacattccaaatttgagattcttgcagatattcaggtgaaaatatacattattatgtagctaaaaatatcataactcaaaaaaagaagactggaaaaatagatcaaatgttgcatacctatagattaattaaaactgttgaacatatgagatcactttgtatggatgaagaagagacctgagacaaaattctgtaaattgcctacattctgaagaagtcagcagaaaagactgagaagaaccagccaaagatagaaagggcaaacttagaaagggtggtgtcttggaagatatgaaragggagtcattctaaaaaggaagtcatttaaagatttcatagtatttgcttgaaacttagaagtttcaagtttattagattatctaatggcgagctcagaatgagcaacc

SEQ ID NO: 50318 - DNA, 651 bp, Homo sapiens
tgtctcaaaaaaaaaaaaaaaagaaaagaaaaaaaatcagtattacaaacgtgcttgtaaagtagatgtgttgcccacatcttccctggtgctgttatttggcacaacactgacatctagagtccgttgtggcttatttgttctgaagttacctctgtttaaccttcagctttggattttctgtattttggcttttatggtcttactctagccactatattattctcattttgctgatagcatgatgtaagttactttgcataccctggcaggcaaatgtgcgttaccccactgccccattacaacatcagaggaaataactttactaaggtgcttttcaaaatgaatgtctctaactcaaattttgtcacgttgtccctcccaacttattttaattgtgccatgatttccacaaaccataaaggtgattcttccactcaagactgaggcacatggtttggcttcagatcttcaggatggcagtcatcacacatctcatgttgaatgaaacagactcaggatacaagtttaaaatagaattttttttcttggcaaatttggaaggtatttttcagttgcattttgttgggttttagtattttggtaatgactattagttatagtttccttacattctgrcatccttctttg

SEQ ID NO: 50319 - DNA, 637 bp, Homo sapiens
catggatactaagctgatgtgtttgttgttctttttctccctgcctccgctcctagtgagtaaccacactggccgcatcaaggtggtctttactccgagcatctgtaaagtgacctgcaccaagggcagctgtcagaacagctgtgagaaggggaacaccaccactctcattagtgagaatggtcatgctgccgacaccctgacggccacgaacttccgagtgggtgagttcctccacggtccctaactgtccttactgagtcgagttttatgagattgtagcatttagacaccccctccattcacactgctgtctgcttcartgggtgtctgtctatgagtacgagtatgtttctttcatgggatcttttaaattgcttttggaataatttttaacctgattcttggtttcttaggggaatggcaactagaatattttcccttattgcttagcatttacacagccatgtggtaatgggaatatatatagtagaagagaagagagtaggttttagatttagaccctaaggcatgacttgtgctgataagcttcaaattttatcagcccagtgataagtggaatttgtcttagatttgactcatgtaataaattttggaaggtggtgatgaaatttga

SEQ ID NO: 50320 - DNA, 637 bp, Homo sapiens
catggatactaagctgatgtgtttgttgttctttttctccctgcctccgctcctagtgagtaaccacactggccgcatcaaggtggtctttactccgagcatctgtaaagtgacctgcaccaagggcagctgtcagaacagctgtgagaaggggaacaccaccactctcattagtgagaatggtcatgctgccgacaccctgacggccacgaacttccgagtgggtgagttcctccacggtccctaactgtccttactgagtcgagttttatgagattgtagcatttagacaccccctccattcacactgctgtctgcttcaatgggtgtctgtctatgagtacgagtatgtttctttcatgggatcttttaaattgctttyggaataatttttaacctgattcttggtttcttaggggaatggcaactagaatattttcccttattgcttagcatttacacagccatgtggtaatgggaatatatatagtagaagagaagagagtaggttttagatttagaccctaaggcatgacttgtgctgataagcttcaaattttatcagcccagtgataagtggaatttgtcttagatttgactcatgtaataaattttggaaggtggtgatgaaatttga

SEQ ID NO: 50321 - DNA, 637 bp, Homo sapiens
catggatactaagctgatgtgtttgttgttctttttctccctgcctccgctcctagtgagtaaccacactggccgcatcaaggtggtctttactccgagcatctgtaaagtgacctgcaccaagggcagctgtcagaacagctgtgagaaggggaacaccaccactctcattagtgagaatggtcatgctgccgacaccctgacggccacgaacttccgagtgggtgagttcctccacggtccctaactgtccttactgagtcgagttttatgagattgtagcatttagacaccccctccattcacactgctgtctgcttcaatgggtgtctgtctatgagtacgagtatgtttctttcatgggatcttttaaattgcttttggaataatttttaacctgattcttggtttcttaggggaatggcaactagaatattttcccttattgcttagcatttacacagccatgtggtaatgggaatatatatagtagaagagaagagagtaggttttagatttagaccctaaggcatgrcttgtgctgataagcttcaaattttatcagcccagtgataagtggaatttgtcttagatttgactcatgtaataaattttggaaggtggtgatgaaatttga

SEQ ID NO: 50322 - DNA, 480 bp, Homo sapiens
cttcaccaggagacaataactttttttcctctgtaacctgtgagtatatgccttaatagaaggagtcattcattataaataagaactttctaacaattagagctgaccagtgttggcacaaactaccctgggtcttaatgaaccctctgttcctggaacaaattaaacaaaggtttgacaaacaattgcccacaatgtgctggataagaactgaacttgatgatttttaagttctcctytcatgcagagtttctaggtactgccttgtattttctgttaaaataaaatacagctgttatggaacacctttaatatttacttttgcatgtcttttatagagagagaccattcatttcttttccatgtttagaccaccttgtacaaaagaagtgttcaagaaaatggatggattggacaatgccagatgatttttgaaaggggcttaagaaagggaagggaggacaagctggagacaataaa

SEQ ID NO: 50323 - DNA, 1667 bp, Homo sapiens
atttcctttgaatatatagttctatcacacaaaataaatccatttaaaatatgggctaataataaccaataaatgttatttctcctcactgggtaatagggcttatatttsaacaggcaatgtcccagagaaattcaaggttaaagtggatgacacaggttagtacttttattttgggtaaaattgtagattcaatgaaagcaaagggctcaataatcctgaggcagcagaaactgcagaagaaaaatagtcaagtcaaccatgggttagaatgcgaaattgcggaaccttcacacaaggatgcaggaaagtcaagaaatcgacccccatccaacaggaaatagacactgaatagaaacgcctgattctttaatctgttccctttctacacagtccattgcattcctaatgccttcagttccttccctaaacagattagaatctatggtgctttatttccataattctcaaacttttaggtctcaagacccctttgtaatcttaattgatgactccaaacaatttttgatgttgtgggctatctttaattaatacttagtgtgttaggaataaagactgaggtagggcacggtgactcacgcctataatcccagcagtttgggaggcccaggctggtggatcacctgaggtcaggagttcaagaccagcctggccaacatggtgaaaccccatctgtattaaaaatacaaaaattagccaggtgtggtggcatgcaactgtagtcgcagctacttgggaggctgaggcaggagaatcacttgaacccaggaggcagaggttgcagtgagccaggatcgcaccactgcactccagcctgggctacagagcgagactcaaaaaaaaaaaaaaataaaaaataaagatagaacatttcaaagttatttatgtatcaactcactttaacaaaataataaacccactacaggctaacaaaaaccaaacaaaaacaacttagaaaactgagtggtatcgttttactatttttgtgtatctctttaatgcgtggtttaacttttaaaaaacagattcttatctttgcttttgcattgaatccactgcttattattttggttcaagtatattaagacatttcaccctcacacgtagttagaagtgggaagaccctatgatccccaaaaggatcctccatccatactctgagaaccactgcttcaactatttgctttccaccactcccaataacttgattcttttgtcccctgaccacattcttaatccccaaccttggatcaattcaaccacttacgctgagattactcaagggactagttgagaaaataatgcaaccaaactgagctattaataaaatatgaaggggaagctattacaaaaaggaggaagataccctcttgccataaaaaactagaaaactggacaaagcatgaaaaaactattttcagactttggacagcaggtaatgcaaagctaggttctctctagtaaggcactgaggtgctttccagaatgaggtacagaaaaatgggtagcccaagtcttgctgaacttgaggagacaaagctggagttcatggatgctaaactgacacattcagaaaagaataccaaagaaaagggagctacactaacaaagggctccaaaaatctgcctttaagattttggctttg

SEQ ID NO: 50324 - DNA, 1667 bp, Homo sapiens
atttcctttgaatatatagttctatcacacaaaataaatccatttaaaatatgggctaataataaccaataaatgttatttctcctcactgggtaatagggcttatatttgaacaggcaatgtcccagagaaattcaaggttaaagtggatgacacaggttagtacttttattttgggtaaaattgtagattcaatgaaagcaaagggctcaataatcctgaggcagcagaaactgcagaagaaaaatagtcaagtcaaccatgggttagaatgcgaaattgcggaaccttcacacaaggatgcaggaaagtcaagaaatcgacccccatccaacaggaaatagacactgaatagaaacgcctgattctttaatctgttccctttctacacagtccattgcattcctaatgccttcagttccttccctaaacagattagaatctatggtgctttatttccataattctcaaacttttaggtctcaagacccctttgtaatcttaattgatgactccaaacaatttttgatgttgtgggctatctttaattaatacttagtgtgttaggaataaagactgaggtagggcacggtgactcacgcctataatcccagcagtttgggaggcccaggctggtggatcacctgaggtcaggagttcaagaccagcctggccaacatggtgaaaccccatctgtattaaaaatacaaaaattagccaggtgtggtggcatgcaactgtagtcgcagctacttgggaggctgaggcaggagaatcacttgaacccaggaggcagaggttgcagtgagccaggatcgcaccactgcactccagcctgggctacagagcgagactcaaaaaaaaaaaaaaataaaaaataaagatagaacatttcaaagttatttatgtatcaactcactttaacaaaataataaacccactacaggctaacaaaaaccaaacaaaaacaacttagaaaactgagtggtatcgttttactatttttgtgtatctctttaatgcgtggtttaacttttaaaaaacagattcttatctttgcttttgcattgaatccactgcttattattttggttcaagtatattaagacatttcaccctcacacgtagttagaagtgggaagaccctatgatccccaaaaggatcctccatccatactctgagaaccactgcttcaactatttgctttccaccactcccaataacttgattcttttgtcccctgaccacattcttaatccccaaccttggatcaattcaaccacttacrctgagattactcaagggactagttgagaaaataatgcaaccaaactgagctattaataaaatatgaaggggaagctattacaaaaaggaggaagataccctcttgccataaaaaactagaaaactggacaaagcatgaaaaaactattttcagactttggacagcaggtaatgcaaagctaggttctctctagtaaggcactgaggtgctttccagaatgaggtacagaaaaatgggtagcccaagtcttgctgaacttgaggagacaaagctggagttcatggatgctaaactgacacattcagaaaagaataccaaagaaaagggagctacactaacaaagggctccaaaaatctgcctttaagattttggctttg

SEQ ID NO: 50325 - DNA, 604 bp, Homo sapiens
attttcctgtgaaaccagtagagaaaaagtatgtttttaagatgaggttaaggctaatgggcaaatgtaacatttgtataattttatttctyccctaacttaagcatttctatgttttatttttataattgtagttgttttctagaggttgataattgcagttgttttattatgaactgaccttttattaagcctagcatatatggttctaatcttgattgccccataaaagtccattccaaaatgaaagcacgaagggacaattactttcaatcaaaacacatgttttactttttaaaaaataaactatttataaagaatgcttattcttgccctcacacccctcccagattcaaatttcactttcagattatgagcttgttatcaataacttagttcaaagagattcttttcattgttctgaatgacaactgaaatgatttagaaatttttatgattaaagagcatgcacttttcagcaacactccttaccaaattagtctgttttactttaaaaattgtttttgaggccagactttttaactgagtaacattttctgaaattataggccattcttatataaagacccagatgttttctgat

SEQ ID NO: 50326 - DNA, 558 bp, Homo sapiens
tctccctactctgtatgcagtacacccataatctactaaaatttctgtcatacatcaaatgtgcmctgtttgctcatactttgctgttctctgtaatgcccttctctccattgttcatctttgccttccaactcttgcttattttccaaaactctactcagatagctcttctctataaaacctttcatgtcctcttatttttctgaattcattttatttcctctgttctcccaaaccccttaacatctttaactatagcatttaaaacactcttcacgaagaactaagagaaggcaggatcttattcaattggctgcattcccatagcccataacatatgacaaagtagatatttaacaaatatttgcaacactaaactgaataaaccaaattgaatattttatcaagactgttcttaagtaacacctactaagggaaacaaacaaaaagcgatagaaactgagaaaaataataatctactaaaactgcaagcaactgaaatttcatcttcaaattatttttaaacccatgagctaattaacctaaattatattcaat

SEQ ID NO: 50327 - DNA, 1135 bp, Homo sapiens
tcctgactaggagaattacaagtacccagaaaaatgatatgattgggcttccataaatgtagtgacttgaaactgggcatctcccttgcggataccctagaagccatgccagtgcaaatattacaagaaattttagctcctgtgcttcataaggctttcaagccaggggttcacccaagttaatcaataagtatcttaattctttgcacctaagatgttaccagggaccaaaaatattttcaccagacaaatttatggactattgcaaggaataccacagaagagaaatacctgtcactgcactgacatcacgcgatgcttcctaagtgattatgctgctgagagtgacttatggtaatctatgagtctgaacatttaattgagtttaaaaagaccctttggtgaacattgaagcactatcatgagcacaatactcttcatcaggatgttaacacaggtcattattagaatcattgtggacccatggacaattctagtcttacaagtatagcacttccacactctagaacgcattacttcttgctgcttccttccacagtgtcagcatgcaatgaaggctgatgtttgtgttggtggacatttcaattttactacaactcatatttctacttctttctcttactcctgcctggagtacttgttctagctgtcttaagaaatgcccatcaccccacactgatgtccaagttttcaatttaaataactatgtttttgtatttctagaaattmtattggctatttttaaaaactgccttttttatgttgtctttttcttccattatagtgcctatttcttctttcacatttataaccacttgaataattagtatttccaaattaaataatattacttcactgacatgtttagactctcttttatctcaggtcttctaagtactatacgtggacatgttttatttgtgaactctcacttaaaatagattatttccttatgtagtttattaattatgatatcttaagttatgccttggaagcaaataatctgaaagtttaaatgtttttaaaactcctatctattgggatatgagtgtaaatcattctattggtaatacccttcccatgaggactgaggtggacattatttttcaataca

SEQ ID NO: 50328 - DNA, 1135 bp, Homo sapiens
tcctgactaggagaattacaagtacccagaaaaatgatatgattgggcttccataaatgtagtgacttgaaactgggcatctcccttgcggataccctagaagccatgccagtgcaaatattacaagaaattttagctcctgtgcttcataaggctttcaagccaggggttcacccaagttaatcaataagtatcttaattctttgcacctaagatgttaccagggaccaaaaatattttcaccagacaaatttatggactattgcaaggaataccacagaagagaaatacctgtcactgcactgacatcacgcgatgcttcctaagtgattatgctgctgagagtgacttatggtaatctatgagtctgaacatttaattgagtttaaaaagaccctttggtgaacattgaagcactatcatgagcacaatactcttcatcaggatgttaacacaggtcattattagaatcattgtggacccatggacaattctagtcttacaagtatagcacttccacactctagaacgcattacttcttgctgcttccttccacagtgtcagcatgcaatgaaggctgatgtttgtgttggtggacatttcaattttactacaactcatatttctacttctttctcttactcctgcctggagtacttgttctagctgtcttaagaaatgcccatcaccccacactgatgtccaagttttcaatttaaataactatgtttttgtatttctagaaattctattggctatttttaaaaactgccttttttatgttgtctttttcttccattatagtgcctatttcttctttcacatttataaccacttgaataattagtatttccaaattaaataatattacttcactgacatgtttagactctcttttatctcaggtcttctaagtactatacgtggacatgttttatttgtgaactctcacttaaaatagatwatttccttatgtagtttattaattatgatatcttaagttatgccttggaagcaaataatctgaaagtttaaatgtttttaaaactcctatctattgggatatgagtgtaaatcattctattggtaatacccttcccatgaggactgaggtggacattatttttcaataca

SEQ ID NO: 50329 - DNA, 1367 bp, Homo sapiens
tgattagaagaggcagttttgtattcagtactcctttagcatctgaaaatactgtcgtgtttttctccacaaacggaaagttcctggctcttgctttgctcacagtttttccctcagagatgtgtggctgcccctccaatgcctcccactggtgttcctgagagccrtgacactgttttctgttcctttatgcataatctgatgccttttatattttttaggagactttaaatttatctataattttttctgtgcactgtgctcactgcttccattgcgactttaaattcaagaatcatattcttaaactctgtgactacaacaatcatacccatcattttttgagtgatcctgaccaaatccaggcactgggctaggtggcatttacccagaatcacacagcctatcaagaaatttgaaccagggttttgaaaccaatctacccacctcgaaagcctatgctctgaccacctctctccataacattgagtactgggatcagtattagtttatctcagattgtcctattttcagaaagtctttctctagatcagaggttatgatgtttcattttatgtgtcaacttgactgaaccatgggatgtccatatatttggttaaacttatttctgggtgtgtctgtgaaggtgtttctggatgggattaaaattcaaattggtgaactgagtaaagcaccttgccctccccagtacggatgggcctcatccaatcccttgagggccaatagaacaaaaggagtgagggagaatttgcttctctgcctgtctttgagctgggtgggacactggtctcctgcttttgaactcagattcaactaaaccacagtttttcttaggtatctagcttgctgcctgcagattgtaagactcctcagcctctgtaatcatataataataagccaattccttataatacatgtatgataatatctgtatcatacatagatacagatggagaggtggtatatgtataactatagatatggatatggataggctagagctagagatataaatagttataaatacagatacatcctattggttctgctcctctggataacccagattaatacagagataacatagcatcagtagattggttttagggaggctataaaactcctcaaaatgaaaaactatttctccatgcaaaaatatgtctgtgtgtgtatattggcatctgtatttttctggttgaacatccttaattttagtaagattctcaaagtgttctctcattgaatactaagaaacaaagttagagattctgttttattttaaatcttgtggaggataagaattttgtattttcaacattttctcctttccctttagtaattcaagg

SEQ ID NO: 50330 - DNA, 1367 bp, Homo sapiens
tgattagaagaggcagttttgtattcagtactcctttagcatctgaaaatactgtcgtgtttttctccacaaacggaaagttcctggctcttgctttgctcacagtttttccctcagagatgtgtggctgcccctccaatgcctcccactggtgttcctgagagccgtgacactgttttctgttcctttatgcataatctgatgccttttatattttttaggagactttaaatttatctataattttttcwgtgcactgtgctcactgcttccattgcgactttaaattcaagaatcatattcttaaactctgtgactacaacaatcatacccatcattttttgagtgatcctgaccaaatccaggcactgggctaggtggcatttacccagaatcacacagcctatcaagaaatttgaaccagggttttgaaaccaatctacccacctcgaaagcctatgctctgaccacctctctccataacattgagtactgggatcagtattagtttatctcagattgtcctattttcagaaagtctttctctagatcagaggttatgatgtttcattttatgtgtcaacttgactgaaccatgggatgtccatatatttggttaaacttatttctgggtgtgtctgtgaaggtgtttctggatgggattaaaattcaaattggtgaactgagtaaagcaccttgccctccccagtacggatgggcctcatccaatcccttgagggccaatagaacaaaaggagtgagggagaatttgcttctctgcctgtctttgagctgggtgggacactggtctcctgcttttgaactcagattcaactaaaccacagtttttcttaggtatctagcttgctgcctgcagattgtaagactcctcagcctctgtaatcatataataataagccaattccttataatacatgtatgataatatctgtatcatacatagatacagatggagaggtggtatatgtataactatagatatggatatggataggctagagctagagatataaatagttataaatacagatacatcctattggttctgctcctctggataacccagattaatacagagataacatagcatcagtagattggttttagggaggctataaaactcctcaaaatgaaaaactatttctccatgcaaaaatatgtctgtgtgtgtatattggcatctgtatttttctggttgaacatccttaattttagtaagattctcaaagtgttctctcattgaatactaagaaacaaagttagagattctgttttattttaaatcttgtggaggataagaattttgtattttcaacattttctcctttccctttagtaattcaagg

SEQ ID NO: 50331 - DNA, 1367 bp, Homo sapiens
tgattagaagaggcagttttgtattcagtactcctttagcatctgaaaatactgtcgtgtttttctccacaaacggaaagttcctggctcttgctttgctcacagtttttccctcagagatgtgtggctgcccctccaatgcctcccactggtgttcctgagagccgtgacactgttttctgttcctttatgcataatctgatgccttttatattttttaggagactttaaatttatctataattttttctgtgcactgtgctcactgcttccattgcgactttaaattcaagaatcatattcttaaactctgtgactacaacaatcatacccatcattttttgagtgatcctgaccaaatccaggcactgggctaggtggcatttacccagaatcacacagcctatcaagaaatttgaaccagggttttgaaaccaatctacccacctcgaaagcctatgctctgaccacctctctccataacattgagtactgggatcagtattagtttatctcagattgtcctattttcagaaagtctttctctagatcagaggttatgatgtttcattttatgtgtcaacttgactgaaccatgggatgtccatatatttggttaaacttatttctgggtgtgtctgtgaaggtgtttctggatgggattaaaattcaaattggtgaactgagtaaagcaccttgccctccccagtacggatgggcctcatccaatcccttgagggccaatagaacaaaaggagtgagggagaatttgcttctctgcctgtctttgagctgggtgggacactggtctcctgcttttgaactcagattcaactaaaccacagtttttcttaggtatctagcttgctgcctgcagattgtaagactcctcagcctctgtaatcatataataataagccaatkccttataatacatgtatgataatatctgtatcatacatagatacagatggagaggtggtatatgtataactatagatatggatatggataggctagagctagagatataaatagttataaatacagatacatcctattggttctgctcctctggataacccagattaatacagagataacatagcatcagtagattggttttagggaggctataaaactcctcaaaatgaaaaactatttctccatgcaaaaatatgtctgtgtgtgtatattggcatctgtatttttctggttgaacatccttaattttagtaagattctcaaagtgttctctcattgaatactaagaaacaaagttagagattctgttttattttaaatcttgtggaggataagaattttgtattttcaacattttctcctttccctttagtaattcaagg

SEQ ID NO: 50332 - DNA, 1730 bp, Homo sapiens
ttaaatatttccactttaaaatgtaaatatttattaataaattataatgtagttatttgaagatgacaaacaggaagacttggaaaagaagaactaggattgcaaatatacaaaaatgcttttaaccctttctcccagtgggtccagttagacattcatccctcagcaattagactaaaatgtaaatctgggttcccaagactcaattcttggctataagtcagaatttgttaatgatcttagcttagtctctctgtagcataatgctacaaagtaaacttatctagccacaaatattaatcctgaattaaagagttctgagaattcgactacaatctgatcctgaatagatgccctctcttcttcactttcccctcatcctgcagacacaccagaccaatctggttcaacttttatataacagtgtttttcttttgccatgggccttcaggtcatgtaagccgaagatgtccagatgaaccaagcatgcaaccactgggggaacctaagtgctgggaccaaggagtggggactgacttaagtggacaccataaggtaagatctattgtccaatcagatggagctctggcatcacccccgtggcaggatccaatcagatcctgcctccctgcatcacttcatcagttcattgcaagatctagtcagaccatacctcattaccctatgcttataaaacctgacccagcccctagcttgggtagacactactttgggagctgtccctggtattctcttacttgttacaagtaataaaatctccttgctaaatcctccttggttgtgatcattgggttgatacccaccaggcaactgaaccaacccattttgtgggtgacaatccctttattcatgaaaacagtaaattcccaaactttttccaaggttaatgggaacccttggctgtaggatgtggagcttactgggaactgccactccaagttgtacaaaaatatttactgaatcacyactaagtaaagctctcagtgcttggtagtttgatacataagtcaatgagtattgcagacaaaatgagctactgtggggaaaggtttctctgaggagtgtgactttggtttagtcttgaaggttagacaggtggtaaagaagtgggagaacaatcttggcaaaggcacttagatctgtttgcgcccaacatgtataacagactgagagggaaggaggaggaatctgataagagcaaggcactagtgtggtgcagaattgggagtggcaatgcagacagcctgggggtccagaccatgggatgccttctatcgcacggtgtgcatgaactttcactaagtggtgatgactccttggaaaattaaaggagtgtcatataagatgtcttgcaaacgtaccttttgagaatcttcttttctgttggatttttgaagaaagattaatgactaataagagtgtgtgggaggaagggggaactgaagtcatatctttattgagagcttcatgtgaatggtaaagagtcaaatcaaaagcactggaccagattctcccaattgattcaggttatccatcaaactaggggtcattttcaacaaggtaaataaatgcaaatgcctgcctctacttgacattatctatctgacctctacattgatccctattttgattgacatgactttaaaatccatgatccaattctctttccactagtagtgtgctgaaaaactggctctccaaaaaaaaaa

SEQ ID NO: 50333 - DNA, 1880 bp, Homo sapiens
tataaattatataaattatctttaatttatattatataatctttatatttatataatttataattatataaattatatacattacttatgtaaatataacataatttgttatatttatatttatgttgctatatttatgtaatttatataattataaatttacttatgaaaataattataacaatataatttgttatgaatgctggtctgataacagtattaaataaacatctgtttaatgaatgagccaatattcacagaactatcttcagggaaaaaatacctaattcagtatatgagagagctaaccatggaagacataacaatataatttttaattggccaagagtataaaaatataccttaaacaacataatttttggagaaatgggctgcaaattagaatgaagatggaaatattttagactgtcatagcaaaatatgctcaggttcacgagttgatacatataaggagaaaaaatagagtactaaggaaaattatcccttagtagctcaaaaaaaaaaaaaacccatttcaggaaaggactcttggggctagacacagtggctcatgcctgtaattccagcactttgggaggctgaggcaggcgaatcacctcaggtcaggagttgaagacaagcttggccaacatagtgaaacccaacctctacgaaaaatacaaaaaattagctgggtgtggtggcacgtgctggtagtcccagctactcaggaggccgaggcacgagaattgcttgaacccaggaggtggaggttgctgtgagctgagatcacactactgcactccagcctgggtggcagagtgagagaaagaaaggaaggaaagaaaggaaagagagaaaaagaaagagaaagaaagaaaagaaagaaagaaaaggaaaggaaggtaaggaagaaggagaagaggaaggaaagaaagaactcttttctgttaccaaaaacccacaggacaatcgctgttgacatgcgcatgtatcccttgcctttcatttgtcaccattggcctgcaagggtatttactaagcagtttgactgagatagcagcagtggggcaatgaaaaatgttttgtctctactacttattatctgtgtagacttgagtggtttacttcattcctcagtctcagtttccccctctgtcaaatgggaatgagaatttcgatgggatgtctcatgggatggttgtgaagattaatgtgagccaggatatgtgacaccattttaaaatccatacattcctataaatcataagttgtttgtgatgacaatccattcataacatcattttcaaataatggacaaattaatcgattcagttatcttttactgagatgaagcatgggaagaaaatacatgggttctgctttaataggccttaaaaatctaataattacaattagcgtttatatagcatcatagaattcacaaagtgctttcatcctctgtatcattcattcattcgttcaaccatggaactacaatggtgttaaattagagcccctgaccttgtggttagggaaaaaccaatacataggagagtaaataaaatacttaaaagttataatacttctgatgaaggaattaagcatagggtagaatggtaaaccataggtatgagtgcagagggtgaattttaggagaatgattggagagtgtctgaggcagtcatagtcaagtggagacctaaaaagatcaagagggcttggctatgtacagaattgggaagagtgttccaagcagaagaatcaagtggctaagtggtcctgcagcagaacagagtagaaagcactaggcwcaaacccagggaggagacacagaaccgggctggttgacagagggctggcgaggccacattaaggag

SEQ ID NO: 50334 - DNA, 601 bp, Homo sapiens
atgctaagggtgtgtgtgctcaggccaggctgccgcggccctagccctggttctagttctcgatagctgggtaaccttgggcaagtcacttaacccttttgagcctcagcttcctcatctgcaaaatgggaacagcagtgatctctacctcacaggcttgacgagagggttggataagatgaccacacacggaaagcccttaggacaatgcttggcccgtagcaggataagaaatgctggtcagccattcttttttttttttttcaagacggattctcactcagtcgcccaggctggagtgcagtggcrcaatctcggctcactgcaacctctgcctcccaggttcaagggattctcctgcctcagcctcccaagtagctgggattacaggtgcccaccaacacacctggctaatttttgtatttttagtagaggtggggtttcaccatgttggcctggctagtcttaaactcctgacctgaggtgatccacccgcctcagcctcccaaagtgctgggattacaggtgtgagccaccacgcacagccaacggttcttactgatggtcatgtgctgagattctagctcttctgtccctgcat

SEQ ID NO: 50335 - DNA, 605 bp, Homo sapiens
ttctgacacagacctatgcaacacaacagaaaaatggtgcacatccactagattgctgagtctaaaggaaaaaacatctgggccccagctggttctactgctggtgccaactggccatgatcttcaggctatgtgaagttctctaggtctcagtttccttgcctataaattaagagggttggtctgcagtaggagtcagttaacttcgacgtgtatataattctctaggaatcttgttaaaatgcagtttctgattcaatagatcttggatgaggatagctttaggattctgcatttttagcagtcttttggggtgatgttgatgttgctgatttgtgaagcacatttgaatagagagaatcattaaaaaaattgttgatttcattacaccatctaatttaaagatgacatgtaaataaataggagaacttcttccaatattactrttgggggaaataattcactttaaaattattgtattctttgtgacttttaattgtcctcagtgtcaaacaatttctccctctttctaaaactcctttgcccttgataaagaacaaaactgatatgtattgaatatcacgtgccatgtgtgtacctttagt

SEQ ID NO: 50336 - DNA, 613 bp, Homo sapiens
gtacacataccccagaacttaaaagttgaagaaaaaaataaaaaagaaatgtagctagttcaatttaaagacttagtaataaaaaagtaaaataacccatttaatgttattatatccacattcattacacactgaaataatatattttcatgttttgaatgaaagaaaatatattatttaatttttttaaaaatgctgtccatttcgatattcttagaattgtgtccctttgataagtttccagtgtaagacgcataggtgtaaaatccaattcaaataggaaaaaaaaaaaaccaacaaaactagagtatataaaacttcacaatcacaacattccaatgtcccctgtccctagtgttaacaaaaaattaaatatatgctgtaatatgtcttgcgtattttattagtttttaaagatgtgtctcaagggagcccactatttgttttattgggtaggttaaagaaaaaattggccaggtgcagtggcttcagacctgtaatcccagcactttgggaggccaaggcaggaggattgcttgagcctaggagtttgagaccagcctgggtaacatactgagaccccmtctctacaaaaaatcaaaacattagctgg

SEQ ID NO: 50337 - DNA, 1810 bp, Homo sapiens
ggtatgatatattctttaaggccagagtctaaaagaaccaaggttttttgagagctattcatatatggctagcaactagcctaagaatagaaagaaaattccctcattgtgagaagtgggttggtggtactggtggtagtaatagacctggaggtaggaaactggttggcatggaaagtaaacttggctcatccagatagcaccaatgaaggtatgacgatgatagtaccccttatcaaagactgatcactcatgtgagcagggactgcgtaaaggaaggtcaccagccaagccctccttggcagtaacagcttcatgaaatcyagtgtagctttgttccctggatcaccctcttgcccactttatgtggcatttacctatagtgcctgtcctgtgtcattttgattgtttgcttttatggcctgagtccccagatacttaaagcatgtataaaggtcaagtagagctgccaaatattaagactttagtacaatagactgctatttaacactaaacattgctagcaaaggtgacagtctccatgctcaaaagaagtgaagacctgatccaagtgtctctacctgtcataaaattgaataaccgtaaacttgacttgagtagtttcattacagttttggaagaggaaaaaagttgttacaagccccttctgctccaggagaggtatcaaattgataagacttaacaagaactcctagagtagaacatgaccataagatcaagggaacacatagtacccagccgtgtggcttcgggttttgatcccaaaccttgaagacttggcacacagcatagaaatacagctaattcattttaaatatctagcccattttctgtttctcacagaatgtaaatttgttcttttcagtgcagggaaaagtgtttaagacaaggcagttgcctacgtgacttaaagtaatgattgcattcactttggatactgactttcatttggaaaaccaccttcacatactagcctataagaaattaaatgtattaaagggcttgatgaggtctataatgatgttcgttgtaaatgtacctgccttagggagctccttgtggtggctaatacaactgccctctacatggttagttgataaattcaaaattgcttagtttggtccctactaatttaatctcaaaagaatacttggacaacagagtgatagactactttcaaggcaaacagtccaaaaatactgtctgctgaggttatgggcgagatatacttgttaagcggaagtaagtagtccagggacaattttttctgccacctaaagagttttgggctagaaaatctgaggactgatagtttttctgaagagttggggcagagtctaacctagctataggcgaatctggcttttaagtaaaaatcatctcaattttactgtctgcatttttcaaactaaatcagtgtctctttgctaagttcgtctattggcttgcaacaaaaactctaaacactgttaataccacttagttaagtacactaactgcactgcaggaaccaaatgagatggcaggtgataacacaggttaagtgtcctttatctgaaatacttgaaaccagaagggttccacagagtttagattttttcagattttgggacattcacacatacataataaggtatcttggggatgggacccaagtctaaacatgaaattcgtttatatttcacatacaccttatacacatagcctgaaggtaattttatagactatttttaatgattttatacaagaaacaaagttttgactgcaacttgtcacgtgatgtcaggtg

SEQ ID NO: 50338 - DNA, 1810 bp, Homo sapiens
ggtatgatatattctttaaggccagagtctaaaagaaccaaggttttttgagagctattcatatatggctagcaactagcctaagaatagaaagaaaattccctcattgtgagaagtgggttggtggtactggtggtagtaatagacctggaggtaggaaactggttggcatggaaagtaaacttggctcatccagatagcaccaatgaaggtatgacgatgatagtaccccttatcaaagactgatcactcatgtgagcagggactgcgtaaaggaaggtcaccagccaagccctccttggcagtaacagcttcatgaaatccagtgtagctttgttccctggatcaccctcttgcccactttatgtggcatttacctatagtgcctgtcctgtgtcattttgattgtttgcttttatggcctgagtccccagatacttaaagcatgtataaaggtcaagtagagctgccaaatattaagactttagtacaatagactgctatttaacactaaacattgctagcaaaggtgacagtctccatgctcaaaagaagtgaagacctgatccaagtgtctctacctgtcataaaattgaataaccgtaaacttgacttgagtagtttcattacagttttggaagaggaaaaaagttgttacaagccccttctgctccaggagaggtatcaaattgataagacttaacaagaactcctagagtagaacatgaccataagatcaagggaacacatagtacccagccgtgtggcttcgggttttgatcccaaaccttgaagacttggcacacagcatagaaatacagctaattcattttaaatatctagcccattttctgtttctcacagaatgtaaatttgttcttttcagtgcagggaaaagtgtttaagacaaggcagttgcctacgtgacttaaagtaatgattgcattcactttggatactgactttcatttggaaaaccaccttcacatactagcctataagaaattaaatgtattaaagggcttgatgaggtctataatgatgttcgttgtaaatgtacctgccttagggagctccttgtggtggctaatacaactgccctctacatggttagttgataaattcaaaattgcttagtttggtccctactaatttaatctcaaaagaatacttggacaacagagtgatagactactttcaaggcaaacagtccaaaaatactgtctgctgaggttatgggcgagatatacttgttaagcggaagtaagtagtccagggacaattttttctgccacctaaagagttttgggctagaaaatctgaggactgatagtttttctgaagagttggggcagagtctaacctagctataggcgaatctggcttttaagtaaaaatcatctcaattttactgtctgcatttttcaaactaaatcagtgtctctttgctaagttcgtctattggcttgcaacaaaaactstaaacactgttaataccacttagttaagtacactaactgcactgcaggaaccaaatgagatggcaggtgataacacaggttaagtgtcctttatctgaaatacttgaaaccagaagggttccacagagtttagattttttcagattttgggacattcacacatacataataaggtatcttggggatgggacccaagtctaaacatgaaattcgtttatatttcacatacaccttatacacatagcctgaaggtaattttatagactatttttaatgattttatacaagaaacaaagttttgactgcaacttgtcacgtgatgtcaggtg

SEQ ID NO: 50339 - DNA, 1810 bp, Homo sapiens
ggtatgatatattctttaaggccagagtctaaaagaaccaaggttttttgagagctattcatatatggctagcaactagcctaagaatagaaagaaaattccctcattgtgagaagtgggttggtggtactggtggtagtaatagacctggaggtaggaaactggttggcatggaaagtaaacttggctcatccagatagcaccaatgaaggtatgacgatgatagtaccccttatcaaagactgatcactcatgtgagcagggactgcgtaaaggaaggtcaccagccaagccctccttggcagtaacagcttcatgaaatccagtgtagctttgttccctggatcaccctcttgcccactttatgtggcatttacctatagtgcctgtcctgtgtcattttgattgtttgcttttatggcctgagtccccagatacttaaagcatgtataaaggtcaagtagagctgccaaatattaagactttagtacaatagactgctatttaacactaaacattgctagcaaaggtgacagtctccatgctcaaaagaagtgaagacctgatccaagtgtctctacctgtcataaaattgaataaccgtaaacttgacttgagtagtttcattacagttttggaagaggaaaaaagttgttacaagccccttctgctccaggagaggtatcaaattgataagacttaacaagaactcctagagtagaacatgaccataagatcaagggaacacatagtacccagccgtgtggcttcgggttttgatcccaaaccttgaagacttggcacacagcatagaaatacagctaattcattttaaatatctagcccattttctgtttctcacagaatgtaaatttgttcttttcagtgcagggaaaagtgtttaagacaaggcagttgcctacgtgacttaaagtaatgattgcattcactttggatactgactttcatttggaaaaccaccttcacatactagcctataagaaattaaatgtattaaagggcttgatgaggtctataatgatgttcgttgtaaatgtacctgccttagggagctccttgtggtggctaatacaactgccctctacatggttagttgataaattcaaaattgcttagtttggtccctactaatttaatctcaaaagaatacttggacaacagagtgatagactactttcaaggcaaacagtccaaaaatactgtctgctgaggttatgggcgagatatacttgttaagcggaagtaagtagtccagggacaattttttctgccacctaaagagttttgggctagaaaatctgaggactgatagtttttctgaagagttggggcagagtctaacctagctataggcgaatctggcttttaagtaaaaatcatctcaattttactgtctgcatttttcaaactaaatcagtgtctctttgctaagttcgtctattggcttgcaacaaaaactctaaacactgttaataccacttagttaagtacactaactgcactgcaggaaccaaatgagatggcaggtgataacacaggttaagtgtcctttatctgaaatacttgaaaccagaagggttccacagagtttagattttttcagattttgggacattcacacatacataataaggtatcttggggatgggacccaagtctaaacatgaaattcgtttatatttcacatayaccttatacacatagcctgaaggtaattttatagactatttttaatgattttatacaagaaacaaagttttgactgcaacttgtcacgtgatgtcaggtg

SEQ ID NO: 50340 - DNA, 1810 bp, Homo sapiens
ggtatgatatattctttaaggccagagtctaaaagaaccaaggttttttgagagctattcatatatggctagcaactagcctaagaatagaaagaaaattccctcattgtgagaagtgggttggtggtactggtggtagtaatagacctggaggtaggaaactggttggcatggaaagtaaacttggctcatccagatagcaccaatgaaggtatgacgatgatagtaccccttatcaaagactgatcactcatgtgagcagggactgcgtaaaggaaggtcaccagccaagccctccttggcagtaacagcttcatgaaatccagtgtagctttgttccctggatcaccctcttgcccactttatgtggcatttacctatagtgcctgtcctgtgtcattttgattgtttgcttttatggcctgagtccccagatacttaaagcatgtataaaggtcaagtagagctgccaaatattaagactttagtacaatagactgctatttaacactaaacattgctagcaaaggtgacagtctccatgctcaaaagaagtgaagacctgatccaagtgtctctacctgtcataaaattgaataaccgtaaacttgacttgagtagtttcattacagttttggaagaggaaaaaagttgttacaagccccttctgctccaggagaggtatcaaattgataagacttaacaagaactcctagagtagaacatgaccataagatcaagggaacacatagtacccagccgtgtggcttcgggttttgatcccaaaccttgaagacttggcacacagcatagaaatacagctaattcattttaaatatctagcccattttctgtttctcacagaatgtaaatttgttcttttcagtgcagggaaaagtgtttaagacaaggcagttgcctacgtgacttaaagtaatgattgcattcactttggatactgactttcatttggaaaaccaccttcacatactagcctataagaaattaaatgtattaaagggcttgatgaggtctataatgatgttcgttgtaaatgtacctgccttagggagctccttgtggtggctaatacaactgccctctacatggttagttgataaattcaaaattgcttagtttggtccctactaatttaatctcaaaagaatacttggacaacagagtgatagactactttcaaggcaaacagtccaaaaatactgtctgctgaggttatgggcgagatatacttgttaagcggaagtaagtagtccagggacaattttttctgccacctaaagagttttgggctagaaaatctgaggactgatagtttttctgaagagttggggcagagtctaacctagctataggcgaatctggcttttaagtaaaaatcatctcaattttactgtctgcatttttcaaactaaatcagtgtctctttgctaagttcgtctattggcttgcaacaaaaactctaaacactgttaataccacttagttaagtacactaactgcactgcaggaaccaaatgagatggcaggtgataacacaggttaagtgtcctttatctgaaatacttgaaaccagaagggttccacagagtttagattttttcagattttgggacattcacacatacataataaggtatcttggggatgggacccaagtctaaacatgaaattcgtttatatttcacatacaccttatacacatagcctgaaggtaattttatagactatttttaatgattttrtacaagaaacaaagttttgactgcaacttgtcacgtgatgtcaggtg

SEQ ID NO: 50341 - DNA, 602 bp, Homo sapiens
gttgaataagtgactaaattcattttatttgagaagaactaaaacttgaataatgaaaacaattgtttaagatcatacacctagcagagtcagattcaaaattagctctaagtccaaaccttgtttattgtcttttattgttttcctctaaatcagaagtacagagaaaacactatttkatttgccaagaaagaaaactattagttcccttaggagaataatattaatagagaggtgaagcattgttgaataggtggaaacaggactgagagaggaaaggtgcatatgggtgagagtgtatgagtctgtgtgtaagtaggcgtaagcttactcattctgtgtgtctgcatgttgtgtctgagaggggttgggagtggaggagtggaaggcaattgatggaaactgaagttggcagtgaaccattcatgcaatgcagatatagtcaatgcttttctctgaagtgcgattcatatagaaatggcatgaggatagtgcacctccccagcgtgagcaacacattttcttttcttccaacggaattgggcacattctggctctctggcacgcgtgtcagttctcagtaccgtagttatgtcatatta

SEQ ID NO: 50342 - DNA, 641 bp, Homo sapiens
agcctcatgctttagacctgtatcacttcatgactgggtccctgacaaggtaatgaacttatatcaaaatataaatttatattcrtttcttcagcaagttatcctaaggaaaaaagaaaaatatcaggtgaaataaacaaacagcatgcttagtgatatactttgtttacattctggtgacactccttatctcatcatgaactagtagtcagtagttcatgaagtccattggaggaccacactttgagtagcactgttttagaggttctccactctggctctcctccagccatgtcccccgccctccacagggataagaatctgaaggacttaggaaacatgcctaaccagaaccacaccccaacttctagacaatgatgctggcactcaagatcttagaatttcttgcccaaattacctgagcttatttgagccttttccccagtccttccttccaaaggtggaccacagtactgtgtgactctttgtgggcatagagagatcttggatatgtgaggctggcaagtccatattggtaaacagtctctcatggtcaatgggagttgaggcagaaaaaggagttttctattgttcaggggccaggggctcttcttcaggcattatcacctttctagcaattc

SEQ ID NO: 50343 - DNA, 641 bp, Homo sapiens
agcctcatgctttagacctgtatcacttcatgactgggtccctgacaaggtaatgaacttatatcaaaatataaatttatattcgtttcttcagcaagttatcctaaggaaaaaagaaaaatatcaggtgaaataawcaaacagcatgcttagtgatatactttgtttacattctggtgacactccttatctcatcatgaactagtagtcagtagttcatgaagtccattggaggaccacactttgagtagcactgttttagaggttctccactctggctctcctccagccatgtcccccgccctccacagggataagaatctgaaggacttaggaaacatgcctaaccagaaccacaccccaacttctagacaatgatgctggcactcaagatcttagaatttcttgcccaaattacctgagcttatttgagccttttccccagtccttccttccaaaggtggaccacagtactgtgtgactctttgtgggcatagagagatcttggatatgtgaggctggcaagtccatattggtaaacagtctctcatggtcaatgggagttgaggcagaaaaaggagttttctattgttcaggggccaggggctcttcttcaggcattatcacctttctagcaattc

SEQ ID NO: 50344 - DNA, 641 bp, Homo sapiens
agcctcatgctttagacctgtatcacttcatgactgggtccctgacaaggtaatgaacttatatcaaaatataaatttatattcgtttcttcagcaagttatcctaaggaaaaaagaaaaatatcaggtgaaataaacaaacagcatgcttagtgatatactttgtttacattctggtgacactccttatctcatcatgaacyagtagtcagtagttcatgaagtccattggaggaccacactttgagtagcactgttttagaggttctccactctggctctcctccagccatgtcccccgccctccacagggataagaatctgaaggacttaggaaacatgcctaaccagaaccacaccccaacttctagacaatgatgctggcactcaagatcttagaatttcttgcccaaattacctgagcttatttgagccttttccccagtccttccttccaaaggtggaccacagtactgtgtgactctttgtgggcatagagagatcttggatatgtgaggctggcaagtccatattggtaaacagtctctcatggtcaatgggagttgaggcagaaaaaggagttttctattgttcaggggccaggggctcttcttcaggcattatcacctttctagcaattc

SEQ ID NO: 50345 - DNA, 557 bp, Homo sapiens
taaaatttggaattttttcttaaaacaaaacaaaataaaaacctgacaacccttgttcaaggctgccaaaacttgagaagaagcaaactgtcaagggaaacaaatgttaaaatataaagcccttttctgagaaagtaactccaccagtccaggttaatccaattctgaatcactaatgacaccagacctgccgggytgtctcaactactacaaagaagtccaaagggacaggcagaggttcacaggcaaattattttcactgctgtcattgaaattttaaatatagccacacctctcccatcccaacaccctttctactcctctactgttgttgactggcactaacccttttcagacctcaaaaaacaagggccgacatattgatacataatttgagtactgagcatagtggaaaaatcacttgactaaaagtcaagagattggattctggccccaaccctgacccagctctaggtacttgggccagtcactttgcttctttggttttctctctttaaaacaaggatggattagatgggtggttccccacacaagat

SEQ ID NO: 50346 - DNA, 592 bp, Homo sapiens
atttccagcaaagtgttttgctragtagtcttgctgggtggagtaggttttgtagttgagtaaggcaaaggtataagcaagccacttagagctctgtactctaggaagagtgtgtgtctcccctacaaaagcagaaaataaaaacattcctgttttacttggaatatgttttagaacaaatatttaaatatctaagtggatatgtacatgggtccttgtgtatgtgtgtgatatttctgcaattccttccaaaaaaatgatgtagtcccattgtgaaaacctaactacagaagagctagaaatttatttattccatcttgacctgtgctcaacttttccatgataaaacactcctcaaaccttcctttgcaagaaaacttgctaaactaaaatatatctctcctctctcctgccttctcagtaccaaagtgtaggatttattctagagtattttgtgtatatgtgtgtgtgtgtgaactgagatgtctaataatacaaataaatggcatttaccaaattcatactgtgcattttgcagtgagctaggttagctagttacatacgttatttcatttagttctcattatgaaag

SEQ ID NO: 50347 - DNA, 648 bp, Homo sapiens
ctcaatttgtgatatttttgttacagaagcctgttgaatgggctaagagagtattcttcaaaaaagaaaaaagagagagaaatgatatatattgtatcaaataggattctttgggatttctcactggaaatgttaaacctcaaagaagtaaatatagcatgcaaatttatccaaaataatttgacaatagggcacttgctttcgtaaatagctattaatacgttttaaaattcaggcttcaaatttcrgggctaaaaaagccactccaaacacaacacagttgaaaaaaactggagatgatgtttggtagaatggaaagtacaggagagtatgaatcagaagatctggttctaattgcacctgtaaatgctagttcctcatccataatataggaatgaaaatacaatatttttacttccaccctaaagactgcagtgagagcagacaaaatcaacatatgttcttcaaacctttaaaactatagaacgtaaaacaattcctggaatcatcgtttaacatctcagttggagtactgaaagatagctaaatgctaaggactatattatatcaacatactaaataaaacaaaacacctattattttgtaatgttggcatcttgctctcttgttaggtattacttgaaagtg

SEQ ID NO: 50348 - DNA, 586 bp, Homo sapiens
ctataaattaataaaagtaaaatatttagtttttatggcctagggtattttaccgttaggtatgtgactggtttattaatttcatgaggtttagcaaggatttcttggttctatttatatagcaaaaatgaaaagtattttcagggagcctccagctaaagaatatcagaggtccactgaggcctgcttccaagatttggttatctctgataggtttctcaaaatatttggattaaaaagtatttgtttgaccctttggaataatgaggcaaactttaaattcagtaacatgggaggctagtaagtaaaaatgtgaaaaaaagagttttcttctttcttctgaatctcaataggaaaattagatgtatcctataagaagtgtttttgatctggtttttacatatcactgcgtttactatgaatttaggttagggtaaattcaacaacttccacttccacccttctgtttaggctcctgtagctgtcacctggattatcacatttgctgcctgaactaacccccaccacakcttgtctctatcttattcaatctatattgatgccatctatggcattaccaaattac

SEQ ID NO: 50349 - DNA, 1389 bp, Homo sapiens
  misc_feature (1)...(1389): n = A,T,C or G
taacacaacatttgattggtacaaaaggtcttatatggtggcttcttttcctctcattttataaatgaagaaaatgaagtcataaaactagaagctataagccattataaataatggaactgaaatttgaacacagaccctgtgcttttgatgaccatatttactaccactttttaattatatagtatatgtttttatttatgtacatacctcactactttgcaattaactgttcatatgtctgtctttcctgatagattttattcttcaaggctgaggggttttctttgctttttgtttccacagcctaacagtaactggttagcagatacctgatattaaaacaatgttggtcagaataaattttaaaaatattagccttcagtaaatcactcccagaataagagagtatcacttcctgtagtttctggtgctctattctgagaatagaatcaatttccagatgaatattcatgatatactacaaaatgagctaaacatctttatcctattttttagataaactgaagattgaacatttatgacatatttatattggtctttcctgacatctttcttgactgacttattcaaggaaacatctcgagctgaatttccaaagtatttaatatgtcaatttattaacgttttaattatcagtcagaacagagtaatgaaagcaagaatcttgaagagcatctagtccactgctaaagaaagagattaacaannnnnnnnnnnnnnnnnnnnnnnnnnnnnnnnnnnnnnnnnnnnnnnnnnnnnnnnnnnnnnnnnnnnnnnnnnnnnnnnnnnnnnnnnnnnnnnnnnnnaaacagttggaaaaactataacagcttttcatgagaataaaattaattttaagacctcattagtatcattcaatatttaactgaaaatatgtttaattgtgaagtttagcagacttctatgcctgcacagggatattgatggaaatggtcaggctatcaacagtgcagtagaagaaattcataagttttacrttacatatgaacatgtgaatatctttgatatgtagctgaataacattttgaagagaacggggttaggtgaagggaaataaggaccatctgtagtcgtaatttcactgacttgacttctgtctattctagagtcacaacctggcctgttgtttatgccagtcattcactggaaacacaggttagaaaaatcgtatgaaaactgtaccaccctgaaagtgctcctctcactatatggagtggcaattctatctaagcaaggctacatggacagcacagttgtgctttggaaagtccatacacaactccagaaataccatgtgctacatggaatgtgtccattttcatcatatccccaggcctttggaaa

SEQ ID NO: 50350 - DNA, 1967 bp, Homo sapiens
tgcgccaccacgcccggccaattttgtatttttagtagagacggggtttctccatgttggtcaagctggtctccaactcccracctcaggtgatccacctgcctcggcctcccaaagtgctgggattacaggcgtgtgccaccacgcccagccttgggtgtttttctttcagctcctccagtactttcatactattctaataaatatattttgttggtatgaagctatgaagcaaaagtagctattaccaatgcatacatacagtacactggttttaagttccacctcaaagtgaatcttagagcctggtgtaagtgctccactttagagatgtaccttaattactactgtatttgcaaattaagggaaatttaggtcatcatttgattttctgaaatctaaaaggaactgaccatcattaccaagtctttctagataatcaagggtagatggctgtttttaatgtaggaattaatgtaggcattcctgctttcaggtttaagtatgaatcaaagcatattttaatttgctagtgcaaatggacccagaattggaagggctatgtaactacacagtatgcacaccacagccatgtcagtgtcacagatcctcttgtgcattcagctttcttaaaaacacatcaaaggctgcaaagaagctcagaaaaaactaaattgaaggacaggtggaatacaatgactctatgtgaggaacttgccaactcacatctttcaaagccagatcagcttatatagtacatgcattatagtcatatgaaatgttgtcttggtgctttcttcttggaggactatggcagcagctttaagactactaacaaagattattacacaggtcatcttatccacaggcaaactgctttgcacaactagaacattaacagttgtttttaagttaagttcagatgaaactgtcacaagacagacttgatgtattttatatatactgggaaactttagaaacagccatttattatttggattaaatgtgtgatgtgttctgcaatttggaatacacttttcagtttatagccagtctccacatgagcagattcataccattgcaatacacaggagttcataaataagattctactcaggtaggcagtaactagcaagttttgagtcaacaaagtctcagtattacatagttctcttcaccaaagatgagtctcccggatttcagcaataatttgactggctccttgtaatgcctgcattaaaggaaaaaaaattttaaatgcttattataaagttatgaaattaatctgaattacgcagggtaatttttccaatatatatgtggtaggtttataactaaccagtttatactaaccaatatcttctctggaattagaatctaatcaagtaccggccaggcgcagtggctcatgcctgtaatcccagcactttgggaggtcgaggcgggcggatcatgaggtcaggagttagagactatcctggctaacatggtgaaaccccgtctctactaaaaatacaaaaaattagctgggtgtggtggtgggcgcctgtagtcccagctactcgggaggctgaggcaggagaatggcgtgaacctgggaggcggcgcttgcagtgagccgagattgtgccactgcactccagcctgggcgacagagccagactcccactcaaaaaaaaaaaaaaaaaaaaaaaaagattcttatcaagtaccaacaggaaacaagcctagctagaatataaagactatacatatccaagaatcaaactgcatttaaaactatttctatgtttctatctactacccaagtataaaaaatcaaaaggtccacaatacctttagcatatcagctgcttctttcctgcgctgtgccatgtcctcagattctgtcagaagatcatccaataaggatgatttatacagctggcctactagctcactctgaagagtgtctttcacatgattaa

SEQ ID NO: 50351 - DNA, 1967 bp, Homo sapiens
tgcgccaccacgcccggccaattttgtatttttagtagagacggggtttctccatgttggtcaagctggtctccaactcccaacctcaggtgatccacctgcctcggcctcccaaagtgctgggattacaggcgtgtgccaccacgcccagccttgggtgtttttctttcagctcctccagtactttcatactattctaataaatatattttgttggtatgaagctatgaagcaaaagtagctattaccaatgcatacatacagtacactggttttaagttccacctcaaagtgaatcttagagcctggtgtaagtgctccactttagagatgtaccttaattactactgtatttgcaaattaagggaaatttaggtcatcatttgattttctgaaatctaaaaggaactgaccatcattaccaagtcttwctagataatcaagggtagatggctgtttttaatgtaggaattaatgtaggcattcctgctttcaggtttaagtatgaatcaaagcatattttaatttgctagtgcaaatggacccagaattggaagggctatgtaactacacagtatgcacaccacagccatgtcagtgtcacagatcctcttgtgcattcagctttcttaaaaacacatcaaaggctgcaaagaagctcagaaaaaactaaattgaaggacaggtggaatacaatgactctatgtgaggaacttgccaactcacatctttcaaagccagatcagcttatatagtacatgcattatagtcatatgaaatgttgtcttggtgctttcttcttggaggactatggcagcagctttaagactactaacaaagattattacacaggtcatcttatccacaggcaaactgctttgcacaactagaacattaacagttgtttttaagttaagttcagatgaaactgtcacaagacagacttgatgtattttatatatactgggaaactttagaaacagccatttattatttggattaaatgtgtgatgtgttctgcaatttggaatacacttttcagtttatagccagtctccacatgagcagattcataccattgcaatacacaggagttcataaataagattctactcaggtaggcagtaactagcaagttttgagtcaacaaagtctcagtattacatagttctcttcaccaaagatgagtctcccggatttcagcaataatttgactggctccttgtaatgcctgcattaaaggaaaaaaaattttaaatgcttattataaagttatgaaattaatctgaattacgcagggtaatttttccaatatatatgtggtaggtttataactaaccagtttatactaaccaatatcttctctggaattagaatctaatcaagtaccggccaggcgcagtggctcatgcctgtaatcccagcactttgggaggtcgaggcgggcggatcatgaggtcaggagttagagactatcctggctaacatggtgaaaccccgtctctactaaaaatacaaaaaattagctgggtgtggtggtgggcgcctgtagtcccagctactcgggaggctgaggcaggagaatggcgtgaacctgggaggcggcgcttgcagtgagccgagattgtgccactgcactccagcctgggcgacagagccagactcccactcaaaaaaaaaaaaaaaaaaaaaaaaagattcttatcaagtaccaacaggaaacaagcctagctagaatataaagactatacatatccaagaatcaaactgcatttaaaactatttctatgtttctatctactacccaagtataaaaaatcaaaaggtccacaatacctttagcatatcagctgcttctttcctgcgctgtgccatgtcctcagattctgtcagaagatcatccaataaggatgatttatacagctggcctactagctcactctgaagagtgtctttcacatgattaa

SEQ ID NO: 50352 - DNA, 877 bp, Homo sapiens
tattgggcatttgaaagsatgttcactactgaggaagtatatcataaaaggagaaaataaaaactgtggctctataatggtaccttctcaagagccagatcctcttgaaaatgcattcaccaaacacattaaaatagatcggggcatcgtgcatgtgacttgcaaattgagattttgcttattaggaaatagtcacaactcgttaccatttacatttcacttgttatttcttcaaaaaaaagtgtgtgtgtgtgtgtgtggctttgatagtgggaaatagaaaactaaatgtctggaaaaaatggggccaaatagatataatttagttttatatagaggttattctaaaagtctcagaaaatcacgagccaaaggttcaaaatcatgctttccttactaattgcttataaggatcaaacacttatagagagaattgcaatcaataaaaagggtcatttccatgagtagcctgtttacaaccattttgtacacaaacagaagaaccgtttgaggattggtggtcagttcactagcactccaagaaaatgtccaaacaaattcttctgtgttgacatggaagaacatcagttcttcagagacgccaacacagtgcagaaatccttcctttaagtgtttgcattcatcactgatgaaacactggggctgacttgctgacatctgagttactacagttatcagatacagttcatgaactgtctgtcatattctaactaagcgctaaactatttcctcatctttgtgagtaaaaaggaacacgtcattgatagtggaaagttcaaggcatcccatttaaaaagaaatagttatattaactcatcttaatattttctttagcacaagagttttatttatatag

SEQ ID NO: 50353 - DNA, 559 bp, Homo sapiens
tttagtgcttttataccaaaaacaatcgtaattgtacattaaattatatgtagagaaacataatatatggttagagttcaccgtcaataaaaagtgtgggaaaatggacactactcaggaaaatattttaaaaattctcaaatgcattatttgttgatattaacacacacaacaacataaaaactgaaaataaacrttctctattccttgaaataagtctaaaagccacaccagaaatagtaaatgatgtaatttatgaaatacaatgacgaaaactttacctaacctgatatattttaatatacctcacttagtgttatttggtactcacaaaaatttttcctactaatatatcacgaagattaaacatattactatatgactattaaatttcagccaagatgaggattttaatatggttttaaggcttggtgcagtttttcataggtgtcggtggtaaaccatatatttttttctacacagtatagcacaatgtttttaatacctaaatgtcagtatttaaaggtatttctcaaataattgaaaataagagaacaca

SEQ ID NO: 50354 - DNA, 516 bp, Homo sapiens
taaaaaaattaaagttcattctcagccagataaactattatattaagaaaaattgaggggctgggcaagrtggctcacacctgtaatcccagcactttgggaggctgaggtgggtggatcatgaggtcgggagatcgagaccatcttggctaacacagtgaaaccctatctccactaaaaatacaaaaaattagccgggcgtggtggtgggcacctgtagtcccagctactcgggaggctgaggcaggagaatggcgtgaacccaggaggcggagcttgcagtgagccgagatcgcgccactgcactccagcctgggcgacagagcgagactctctcaaaaaaaaaaaaaaaaaagaaactttgagttatgcttttcaaaatgtttgctcacagattttcaactactttcagtaacgtatattgtttcccaaacatgcactttattgtatgtagcaactgagtatttttacaactaactataaataaagctattgtaaccagcttatttacttcct

SEQ ID NO: 50355 - DNA, 534 bp, Homo sapiens
attcattcatttctctcctgtacctgctttgccaactttgtacagcaggagtatggaaagtagatgtttaatgaaagtggggtgttctgaaccatcccggataataccaaaagcctaagtgtggagactaaattaaaactaagaccttaatttgccagaacaataaggactgaaaggggcttcagatgtcactgtgtccaaacctccatcttatgcccaacttccctgacagcaacctgtaagtggcttgtcagtctttgctgcttgwtactgtatagtaaggggcaacgtcctcatcttggttgttagctgcaattttagacagctccagttgtcaaaaagactttttgtacattgagtcctaatctaaccctcagaaactattagaattgcttgaatccttttattcttacacctgcaggaaggctcatggacatagacttgtgacaactccaaggctcggaaaccaatttgtgagcctctgagtgttagtgattctgatcttcaaggaactattttagggcttaatttccc

SEQ ID NO: 50356 - DNA, 552 bp, Homo sapiens
atgataggtaattaatctctaacaatctgctatcaaattcatttcctttaggaatgaccaatttgcaaagaggaccaatttgcaaagagaaatgagagtaaagacttagagaaacggcattggaaggaatctctttgggaacagaagtgtccagttgggtgttctgaacatctgtataggggatacctatttagttagcagtgactccaaaggcccaaaattgtatccatagctgattaatgagcactccaaaatacgtgaatgggtacacatgctggggtatagctcaataagatcatgaaaaatcagtgtcagtatggacacaacaaaactaatgattatttagtaaraaatgatgatttatggaaattgttcaaagaaacatagaatttcagagcaaaaaggaactagggtccaaaagcctttcctgtcaactctgtagcaacactatccagttgaaatttctgtgacgatggaaaggttctgcactgcactaattgatagccactagccatgtgtgactaatgagcatttgaagtgtggctaatgcaa

SEQ ID NO: 50357 - DNA, 552 bp, Homo sapiens
atgataggtaattaatctctaacaatctgctatcaaattcatttcctttaggaatgaccaatttgcaaagaggaccaatttgcaaagagaaatgagagtaaagacttagagaaacggcattggaaggaatctctttgggaacagaagtgtccagttgggtgttctgaacatctgtataggggatacctatttagttagcagtgactccaaaggcccaaaattgtatccatagctgattaatgagcactccaaaatacgtgaatgggtacacatgctggggtatagctcaataagatcatgaaaaatcagtgtcagtatggacacaacaaaactaatgattatttagtaagaaatgatgatttatggaaattgttcaaagaaacatagaatttcagagcaaaaaggaactagggtccaaaagcctttcctgycaactctgtagcaacactatccagttgaaatttctgtgacgatggaaaggttctgcactgcactaattgatagccactagccatgtgtgactaatgagcatttgaagtgtggctaatgcaa

SEQ ID NO: 50358 - DNA, 463 bp, Homo sapiens
agaaatagtaaaaaaaggagaaacatattcaacttgaagaagacatgaatttcagatttaaaaagactattaggtgctggacagaaagaatgtgaaatattccagatttaaacatatttaaaaatttttaaaccacttaaaaaaaaaaggaggaaatcccaaacttttcagacaaggaaaaagaaagttccctataagagagaataaattatattggcataaatctttcatttacaacactggatgcaagaggaaaatataacagtataactggatttctatacccagccaaactattgttcacttcaaatggaaatacaaaataggcacttatcactaacttggatagtttatcatctttaatctgtaactgaaaaaatcactagaaattgtacttgaaaaaaaacaaacraacaaaaaacaaacccaagaggaagatgtgaggtaaaaggagaagagagaa

SEQ ID NO: 50359 - DNA, 655 bp, Homo sapiens
gatcttctttttttacccatgcacttgcccaagctgactttctggctcaaacctttcccctggccttgcatcctctctatccatctgcccaaacctccctcactctccaaagtctcatttcaaatgttgcctttccctgaagcttctcccggaatgacccatctctccctcctcattctgatcatttcctctttgaattcccgtagtgttaggtatgccctcctcttccagcactgaatccagccttgcctcgcattagagtcatttgtacacctgaccttaatccccctgagggcagggatagtttgtgtttatcccaaagtcctgaaacaactagtacagaacctgagacacaggaaggccccagaattgcctgccgaatagaacagtgatagtgctgaatttggttcctcctttaacctgtgtgaccccagacgtttgttttctatgaagyctcaaaacatggttatgtttcctaatttacaacgaacacatggaaacccatgttttgaaaacgggggtggggaggatgaactgaaggcagcctcttcagccaagttccaaaggccaggtggcccactgtgaaccttgtttaaccacacagaacatatgaatagctacaacaagggatctaacagttaccagaatgttttca

SEQ ID NO: 50360 - DNA, 655 bp, Homo sapiens
gatcttctttttttacccatgcacttgcccaagctgactttctggctcaaacctttcccctggccttgcatcctctctatccatctgcccaaacctccctcactctccaaagtctcatttcaaatgttgcctttccctgaagcttctcccggaatgacccatctctccctcctcattctgatcatttcctctttgaattcccgtagtgttaggtatgccctcctcttccagcactgaatccagccttgcctcgcattagagtcatttgtacacctgaccttaatccccctgagggcagggatagtttgtgtttatcccaaagtcctgaaacaactagtacagaacctgagacacaggaaggccccagaattgcctgccgaatagaacagtgatagtgctgaatttggttcctcctttaacctgtgtgaccccagacgtttgttttctatgaagtctcaaaacatggttatgtttcctaatttacaacgaacacatggaaacccatgttttgaaaaygggggtggggaggatgaactgaaggcagcctcttcagccaagttccaaaggccaggtggcccactgtgaaccttgtttaaccacacagaacatatgaatagctacaacaagggatctaacagttaccagaatgttttca

SEQ ID NO: 50361 - DNA, 576 bp, Homo sapiens
aaaatcttttggagatatttttatataaaatggaaagtgaagacacagagacagaatgggagaaacagagagagtggaagaaagaagaagggaaggaagggaggaaaggagggagaaagaaaggaaagaagaagatgaaataatggtataagcctgaagtcatgtagagccagtagagatggacatttttgaagatttaaaagtataacctgaagattaggtccccaaattagataaacatgagcaataaataaaggtgaaataacatgatccaaccaaggtgaaataacatacccaagatcatgcagagaaaaactatattttgatttccccagctttccctgccttattccaggttacattggaagctttgtcagtggactagccatgctttattattcctgccacaactccatcatagtactcaggatatagtagttaataaatgagcttatctggaaaaaaaacaacgaggcatatcaatcttggaatgggtcctgatgtgggggaatttctgatataggaaattgagctggatatttagtrattgtaagcaatggtttatttatctcaaaa

SEQ ID NO: 50362 - DNA, 975 bp, Homo sapiens
ccaaataatttttgttttcttctagaaattttataagttcagtctttacatataggtctacaacccattttgagttaattttttaatgtaacgatggataagggtcaaggattaccattgtggatatggatattcaatttttcaagaagaaaaatctttctcctatgaattgccttggtatgcttgtcaattgaccatattatgtgtgggtgtatttctagattctcttcttttcttttgatctatatatctattaccatgtaaataacaagttgtcttaataacagtggcttcaaagtaagtcaggtagtgtgatttctgtaacttggttttttgtgttttaactaytccagttccatgagatttccatgtaaatttcagaatcagcatattgatttctgtaaaataaaagcctgctggaattttaggatttcattgaatctgtaggtaaattaagggagaattgacataataacaatatcgagtcttccaattttttaaaaatgtaaatcatctaggaaagggtttgagcattctaatgcaggggttcccagctcccggaacacagaccagtactggtcctaacggaactgggctgcacagcaggtgagctgtgggcaagtgagcgttactgtctccagttcagatcagcaatggcattagattatcacaggagtacaaaccctgtggtgaactgtgcatgcgagggatctaggttgtgtggtctttatgagaatctaactaatacctgatgatctgaggtacagcagtttcatcccaaaaccatccctccccacccaccctgtggaaaaaattgtcttccataaaaccagtccctggtgccaaaaaagttggggactgctgttctaatacatgagcacagtatgcttctttatttcttaggcattttgtgtttctctcatcagtgctgtatagtttttaataaatcttgtacatactttgttagatttatcc

SEQ ID NO: 50363 - DNA, 662 bp, Homo sapiens
tttatgtttctgcccttggatttttctaggattgtggacttactgttgtaggcttgaggttcagatttctccagtctgctaaatgagaaaactgcagtctactttgcattcgagcttccaaaattttattgtagaatgttatttgtatattatgtttgtcattattttattcacttttggttgttgctaagtttttactgttctattattttagaagaatttcttacatataaggcaacaagagtttggactcaatacacyattcttaaacaaaaatcttatcacctcaatgtaattttaaaaacaagtattagaaattaattaccatgttttgagtacttgcaatattgtataactatctaatgtaatatcagatgtattatttaatttgacctttattataagccctgcaaattaccattattgtagtatttgacagttgaagaaatcatagatgataaagaatttgaccataagtctgtctgactcaggtcttttctttcttattttttcgtttcttattctttctttctttctttattttgaaataaagtctcgttctgtctgccaggtgggagtgcagtagtacaatcactgcagccttgacttcctaggcttaagcggtcctcctacttctgcctcctaagtagtgaggctacagg

SEQ ID NO: 50364 - DNA, 600 bp, Homo sapiens
caaacattacacagtactcctatttaagcttttgtattgggcttcagggacacacctgccagttgcctgccaataacatttacatcctcattctttaattacagaatctacaacttatttagaaatgcaaaaacctagctaaaagacggcatttctgtgcttcaccagcagcaacgtatggcatgaaactaccttcagaccaatgagatctaagcagaaatgtgtgggatttggggaaaacccacatgcargacactaagttgggaagtgtgctattgtgtttctcctacattcttctttctgccactctagatcccagaacagttagagcttcctcagttatctgtgagcatcaaataacttttaagatggcagccagtgctagactagtgtagtgaaacagaaatgaagtcgcctgatttccgcagagctgctaaataacccaagtttcactttactttttttgtaagagacaaaataaagctaatattatttgggggctaatgttaactaaattaaagcatacacaattcccttatttattttgtctccacgtcttgtatttccaaaacaacatatctctcattagagaaactccgt

SEQ ID NO: 50365 - DNA, 1864 bp, Homo sapiens
gcgtatactgctcaggtgatgggtgcaccaaaatctcacaaatcaccgctaagtaacttacccatgtaaccaaataccattggttccttaaaaacctatggaaataaaaaaaaattgttttaaaaaagaaataactctcctgcgttcactcccccttttggagaggaaagtgaacacattccctctggttttgttttatattttatggtggatggcagatgaaaaacaaacatcaaatgtttgtcaatttttgttgtgacagcaccactcaacatgcataaacttatattttctaatgacaataaaattcagataacatttctgtaattaaaaaacccttgaaaatcagagctgttttgtgggtttttaaacccagtttctcaggattaaatttaagatgagacacagaatgcatttgtactccccagtatttgtcctttactgtttaaaaagaaaactctccaacaggaaatcaattttcttattatgatagttgtaaaatctttatcaacgtcatgactgatgaaaagtcattgttataaccactgtgaaaaacagtttggatattttttagtaggcatttactcaagggaaagggaaacgtatgtccatataaaaacctatatgcaattgtttatagcagctctattcataatctccccaaagcagaaacaatccaaatgtccatcagctagtgaatgaatgaacactctgattcatccatccacacaatggaacacaatttatcaattaaaaaaagcaaactattgatacatgaaacaacatggatgaatctcaaatgtgtattgctaagcgaaagaaatcagactcaaaaggttatatactgtttgaatccatttataagatattctagaaaataaaaaaccacaaggacataaatcagaccagtggctggtgggaggggagctgggaagttctaactacaaagggacacaagggaaatttttgaatcatgattgtgattatacagctgtatgcatttttcaaaattcacagaactgtacaccaaaaggggggattttaatgtatctaaattaatctcacattaataaaacacattgtaagatattatttaactatttccattaacaattactcacaactgattaactattcggtgaaatttccaagcccatttcttcttctcttgttgacattttggctggtttctggcatattcacacttctaccagaaagtgatagatgctaaaatgagaatgggataaaccttaaatcagttgatatttattaattacaaaaaatatagatgtaagtataggaaagccaaggtctcaaattagttttgggggtgagcatgttaagaattacaatgatttatctccagtgattctgaaacataaaagcttaaagagcttttgtttatgtaaattatatcctccaatatttaccatatcaataattaaaactgagaaatgttaaaaatattttttattaattcatttaagatgaacaataatatatctattatatgttaacataataatataagtatgaaaaacccctacattttcagaaacaaaaaagataaccatagtatgggggraggggccaggatagtcgactagaaatagctgcattcagaagctctcacagacaagaaagaaaacggcaagtgaatcctgcactggcaactgaggtatccaggttgtctcaatgagtctgaccagatggttggtgcaacccaaggagagcaaggaaaagcagggtggtgcaatggcccacctggaagccacatggggcaaggggagctcccacccccagccaagggaggtagtgagtgatagtgctaccctgcccaagaaaccacactttttccatggat

SEQ ID NO: 50366 - DNA, 1864 bp, Homo sapiens
gcgtatactgctcaggtgatgggtgcaccaaaatctcacaaatcaccgctaagtaacttacccatgtaaccaaataccattggttccttaaaaacctatggaaataaaaaaaaattgttttaaaaaagaaataactctcctgcgttcactcccccttttggagaggaaagtgaacacattccctctggttttgttttatattttatggtggatggcagatgaaaaacaaacatcaaatgtttgtcaatttttgttgtgacagcaccactcaacatgcataaacttatattttctaatgacaataaaattcagataacatttctgtaattaaaaaacccttgaaaatcagagctgttttgtgggtttttaaacccagtttctcaggattaaatttaagatgagacacagaatgcatttgtactccccagtatttgtcctttactgtttaaaaagaaaactctccaacaggaaatcaattttcttattatgatagttgtaaaatctttatcaacgtcatgactgatgaaaagtcattgttataaccactgtgaaaaacagtttggatattttttagtaggcatttactcaagggaaagggaaacgtatgtccatataaaaacctatatgcaattgtttatagcagctctattcataatctccccaaagcagaaacaatccaaatgtccatcagctagtgaatgaatgaacactctgattcatccatccacacaatggaacacaatttatcaattaaaaaaagcaaactattgatacatgaaacaacatggatgaatctcaaatgtgtattgctaagcgaaagaaatcagactcaaaaggttatatactgtttgaatccatttataagatattctagaaaataaaaaaccacaaggacataaatcagaccagtggctggtgggaggggagctgggaagttctaactacaaagggacacaagggaaatttttgaatcatgattgtgattatacagctgtatgcatttttcaaaattcacagaactgtacaccaaaaggggggattttaatgtatctaaattaatctcacattaataaaacacattgtaagatattatttaactatttccattaacaattactcacaactgattaactattcggtgaaatttccaagcccatttcttcttctcttgttgacattttggctggtttctggcatattcacacttctaccagaaagtgatagatgctaaaatgagaatgggataaaccttaaatcagttgatatttattaattacaaaaaatatagatgtaagtataggaaagccaaggtctcaaattagttttgggggtgagcatgttaagaattacaatgatttatctccagtgattctgaaacataaaagcttaaagagcttttgtttatgtaaattatatcctccaatatttaccatatcaataattaaaactgagaaatgttaaaaatattttttattaattcatttaagatgaacaataatatatctattatatgttaacataataatataagtatgaaaaacccctacattttcagaaacaaaaaagataaccatagtatggggggaggggccaggatagtcgactagaaatagctgcattcagaagctctcacagacaagaaagaaaacggcaagtgaatcctgcactggcaactgaggtatccaggttgtctcaatgagtctgaccagatggttggtgcaacccaaggagagcaaggaaaagcagggtggtgcaatggcccacctggragccacatggggcaaggggagctcccacccccagccaagggaggtagtgagtgatagtgctaccctgcccaagaaaccacactttttccatggat

SEQ ID NO: 50367 - DNA, 518 bp, Homo sapiens
tgagggcataggacttaataaactcagacagggctttagacttacttgcttcctccttcctccttttatgcagtggcattgaaacaaaaagttaattgtcttcctggacatatggcacaccatttgaaacccactaaccaagcagagatcatgctgaacacttgtgttcccatctccatattatatttgagttaatcccagttgtgccatggtttaaaaaaatttaaaggcaatagttagaaaacagagcattgatatattttgagaaaaatacaagttgtgcattgcatcatgattatttattttttcttataggaaattgccaaacaacttttaaattattttcttctacatcatctcatacttgacactggtaygaaaagatatatttaaatattttaactataatatttttagagtattacatgcccagagtgataaattatatgagaaagcacatttcaatttttttaatcagcatttttttactcaaattgtgctcttttcctttataagga

SEQ ID NO: 50368 - DNA, 518 bp, Homo sapiens
tgagggcataggacttaataaactcagacagggctttagacttacttgcttcctccttcctccttttatgcagtggcattgaaacaaaaagttaattgtcttcctggacatatggcacaccatttgaaacccactaaccaagcagagatcatgctgaacacttgtgttcccatctccatattatatttgagttaatcccagttgtgccatggtttaaaaaaatttaaaggcaatagttagaaaacagagcattgatatattttgagaaaaatacaagttgtgcattgcatcatgattatttattttttcttataggaaattgccaaacaacttttaaattattttcttctacatcatctcatacttgacactggtacgaaaagatatatttaaatattttaactataatatttttagagtattacatgcccagagtgataaattatatgagaaagcacatttcaatttttttaatcagcatttttttactcaaattgtgctcttttcctttwtaagga

SEQ ID NO: 50369 - DNA, 1826 bp, Homo sapiens
  misc_feature (1)...(1826): n = A,T,C or G
tatgaaatagctgctgaaattacttacattaaaaaaacagtgtcaataaatgaaaaatactctcagcannacctttggcatatagttacatttctggtaattacagagattggggcttctcatcagtcttctcaatttgaacatgttccaaaagaaaacatctggaatctagtagatgcaaaatcagtgtgtgaatacagctataaagtagcaacacactatcctgtccgtgaagttcatcactctaaaattattcctttgttgaaattattcaaaacactaaaccatggtttattaagcatagtctgtagggtactacaaaaaagacattcttagggtagaactaatgttacccacaacataccagtctataaattccaaccaagttagcaaactgttatgtgacttgggaaatatgaattcatgcagcagtaaataagttatctcttttacattcttccttcagaaacagccagtgaaatatatggccataagtaagcatgtacaggatgactgcactggatgagatttgccagattttctgaggaacagaaataggaaatgaaataagaattttaaaagaaaatgaattctcagtagagctttgttaagtattgtttgtataatttaagggaagttatttcaatatgtttggcttttgttagacatagagttttcatttcagtaatgatttttcggtcataaaaataatttaattttctctagtttcaagtgaacctggatatttcaaataatctttcttttgccgtaaattacaagattttccagtttgaccactggcgcttaacctaactacatactgaaggtaaataaaaggacttattaaaaggagttgagaagacatggaaatcacattcttgttccagtgttgaactgtttcataaatagttactagcatttagaattgtttcaacaaattgcactatttgcatagagattttgtaatttttttacttcagtaatttttaaaatttatttcttttattctgaaaaaaatacttataacagattttaaaattttgcttatatttaaaaattaccaatgcaaaggtaaacatgttctccaaaagctttaaaaatgagtttccaaacacaaattcaaccttttttttttaatataggaatgatagtaaaaatagtataatttaacattcaaccaccttattgcctcttctaaggtagaagagtaaaaacaaagagaaaaaaaaaaaaaaacaaactttttttcttgtttgtgtcttcaggaatgctcttaccaaaaatgaacttagtttttctgtatcacatattccacatctataatatcaggaatatagaagaaaaatttgaaatgtggttaaaggtcaaaagaatatctttgtttagttcacttatagtgtcactggacatatcatagctaatggtatcctttgtccttttcagtgttgtaaacctgggacaatatccaccaatgttaaggatcttgtgatgactcaaaatatctaaagagctccccctttgaaatatcttctcaataacattacacacacacacacacacacaaacacacacaaacacacacaaatgaaacatcttattacattaaatattatttgcctacaatgctatcatttattttgatgttcacctcaacacaataaatacttttgaaattttttttcttgtttgcaaaagtcaaatccagcatccaaaataaagacttgctgcctgaaaagtcttttcagattgcctggcaattacaatatatcttaagcacaggcaatatccgtggtttaagtggctactttgaaragctgatgcccctt

SEQ ID NO: 50370 - DNA, 577 bp, Homo sapiens
ggccacagactgcagtcactggcgtagaagccaagaggggggtgtcaaagtttctgatcaggcttaattaaaaaaagaaaaaaaggccgggcatggtggccactttgggaggccgaggtgggtggatcacctgaggtcaggagtttgagaccagcctggccaacatagtgaaaccctgtctctagtaaaaatacaaaaattattcgggcgtgttggtgggtgcctgtaatcccagctactagggaggctgaggcaggagaattgcttgaatccagaaggtggaggttgcagtgagccaaaatttcaccattgcactccagcctgagcaacaagagcacaactccatctcaaaaatmaaaaaagaaaaaaaacaaaagatacaatgtccaaacagtttcatgaatttagataagtgaaaaagcataaagctttcctatatcattgtcattttaattatttattcattggttttcaatttctcagtaaattattggctctgtattcaattttaacgaaaagaaatatcacttgctagagcagtgatcctcaactctcaatacaataagaacccctagga

SEQ ID NO: 50371 - DNA, 577 bp, Homo sapiens
ggccacagactgcagtcactggcgtagaagccaagaggggggtgtcaaagtttctgatcaggcttaattaaaaaaagaaaaaaaggccgggcatggtggccactttgggaggccgaggtgggtggatcacctgaggtcaggagtttgagaccagcctggccaacatagtgaaaccctgtctctagtaaaaatacaaaaattattcgggcgtgttggtgggtgcctgtaatcccagctactagggaggctgaggcaggagaattgcttgaatccagaaggtggaggttgcagtgagccaaaatttcaccattgcactccagcctgagcaacaagagcacaactccatctcaaaaatcaaaaaagaaaaaaaacaaaagatacaatgtccaaacagtttcrtgaatttagataagtgaaaaagcataaagctttcctatatcattgtcattttaattatttattcattggttttcaatttctcagtaaattattggctctgtattcaattttaacgaaaagaaatatcacttgctagagcagtgatcctcaactctcaatacaataagaacccctagga

SEQ ID NO: 50372 - DNA, 577 bp, Homo sapiens
ggccacagactgcagtcactggcgtagaagccaagaggggggtgtcaaagtttctgatcaggcttaattaaaaaaagaaaaaaaggccgggcatggtggccactttgggaggccgaggtgggtggatcacctgaggtcaggagtttgagaccagcctggccaacatagtgaaaccctgtctctagtaaaaatacaaaaattattcgggcgtgttggtgggtgcctgtaatcccagctactagggaggctgaggcaggagaattgcttgaatccagaaggtggaggttgcagtgagccaaaatttcaccattgcactccagcctgagcaacaagagcacaactccatctcaaaaatcaaaaaagaaaaaaaacaaaagatacaatgtccaaacagtttcatgaatttagataagtgaaaaagcataaagctttcctatatcattgycattttaattatttattcattggttttcaatttctcagtaaattattggctctgtattcaattttaacgaaaagaaatatcacttgctagagcagtgatcctcaactctcaatacaataagaacccctagga

SEQ ID NO: 50373 - DNA, 543 bp, Homo sapiens
atcaggagacttttccatttgatgtatgtactcaaaattagatgaagataattttctgcaacttaaacgtggaactcaaaaattcctgtcaagataaaatggaaacttatcayccatttgcttgtatatttttaagaagaacaaggcaattaatttagacattttcttcctcaaattacaatgaaggtctgatgcaagactaaactgcatcctagaatcagcaatgttattacctttagagacgatatctttgaacatagagctttatggacgtcaacaattctgggaaaacgtacatttaaacacatgtctttgattttaaaaagtattatgcagtagctacaaaataatatttcctaaacgcacagtattaaagtatcatgctatggcagtagtttgacaactctatatgtcaattgatgtccccaaatatgtgcatggccatgtatcttgtttgtctttgttcaaaaaatttccataaaattgctcttatttctcgttctctagaacgtgtgttgaaatatgaatgtactgtacttgcac

SEQ ID NO: 50374 - DNA, 546 bp, Homo sapiens
attttgctgtctatcatttgccatctttgtgattctgcagagtttaaaatttagtttgattgcattggacttttttatcactgaacttcttattcaaaaagaaaaaagaaaaataaagaattagagaagggacatgtagcaaagaacgaaatgaaaggaaaggcttatttattattgtctttatgtgatattactcaaattggctagatttgtctttgacacagagcaataaaactgtgatggtagttcagcacagctacaaacgccagcttcaattcctgagtgacaattctccaacccaaaaggaaaatggagaatacaagagtgattccagtaggttatgcgacatgtcaactgtaataggacataagagagcaatamctcagtgatgctctgaatgactcacttactcttcttggtactgatacctagctctgatcaaatggtatttattacggatgttatgattagatggaattgcttaaatgggaacactctcaccagaaatgaatacgaatagagaaaccagccatgaaatacttgtta

SEQ ID NO: 50375 - DNA, 546 bp, Homo sapiens
attttgctgtctatcatttgccatctttgtgattctgcagagtttaaaatttagtttgattgcattggacttttttatcactgaacttcttattcaaaaagaaaaaagaaaaataaagaattagagaagggacatgtagcaaagaacgaaatgaaaggaaaggcttatttattattgtctttatgtgatattactcaaattggctagatttgtctttgacacagagcaataaaactgtgatggtagttcagcacagctacaaacgccagcttcaattcctgagtgacaattctccaacccaaaaggaaaatggagaatacaagagtgattccagtaggttatgcgacatgtcaactgtaataggacataagagagcaataactcagtgatgctctgaatgactcacttactcttcttggtactgatasctagctctgatcaaatggtatttattacggatgttatgattagatggaattgcttaaatgggaacactctcaccagaaatgaatacgaatagagaaaccagccatgaaatacttgtta

SEQ ID NO: 50376 - DNA, 501 bp, Homo sapiens
ctatctaaagaaaggagcttgttgcatcatcaatgtttctcatgcaataaagcaattcttttagctggtcccagtagaragcaaaacatttaaaggtcctggatgcagctgggagaaggttttagatagctcagcctaaagacatcaacaaaggaaaacagtgatgcaaacactaagctgagaactctcttcagttcagagtaggaaatacataaattacatggccatataacgtgttaatgataaattcagagtagacacatttcatgatgtgcaataactataactttcagagccacaaatgaacccctgcggaaaaaaccttgacaattttctggcagagagaaaggacacaaagagtctcaaagaagaaaaactcaaattatttatttaataagtaaatacaaaacagccctgctgcttatcaccttttaaaaatagacttgattaattaggacaaacacattttctgaatgctgctaaaatgagctttggcaaatt

SEQ ID NO: 50377 - DNA, 501 bp, Homo sapiens
ctatctaaagaaaggagcttgttgcatcatcaatgtttctcatgcaataaagcaattcttttagctggtcccagtagagagcaaaacatttaaaggtcctggatgcagctgggagaaggttttagatagctcagcctaaagacatcaacaaaggaaaacagtgatgcaaacactaagctgagaactctcttcagttcagagtaggaaatacataaattacatggccatataacgtgttaatgataaattcagagtagacacatttcatgatgtgcaataactataactttcagagccacaaatgaacccctgcggaaaaaaccttgacaattttctggcagagagaaaggacacaaagagkctcaaagaagaaaaactcaaattatttatttaataagtaaatacaaaacagccctgctgcttatcaccttttaaaaatagacttgattaattaggacaaacacattttctgaatgctgctaaaatgagctttggcaaatt

SEQ ID NO: 50378 - DNA, 501 bp, Homo sapiens
ctatctaaagaaaggagcttgttgcatcatcaatgtttctcatgcaataaagcaattcttttagctggtcccagtagagagcaaaacatttaaaggtcctggatgcagctgggagaaggttttagatagctcagcctaaagacatcaacaaaggaaaacagtgatgcaaacactaagctgagaactctcttcagttcagagtaggaaatacataaattacatggccatataacgtgttaatgataaattcagagtagacacatttcatgatgtgcaataactataactttcagagccacaaatgaacccctgcggaaaaaaccttgacaattttctggcagagagaaaggacacaaagagtctcaaagaagaaraactcaaattatttatttaataagtaaatacaaaacagccctgctgcttatcaccttttaaaaatagacttgattaattaggacaaacacattttctgaatgctgctaaaatgagctttggcaaatt

SEQ ID NO: 50379 - DNA, 549 bp, Homo sapiens
ttataatgttttctagacgtacactcagtccacagagtctgaacatttattatgtaaattcaaggtctacagagaaaatcttccatataaatgttggcaagataatgtacaaatccatagtcttatcctgctatttgtttggctgaaatatttttattwccattagtataactgtgtattgtatcaaaattataaaataaaaatatatgagaacaattaggtagcatatgatgtatctcttaatgataaatattcttaaaaagcagctaaaattttttctgatctacttagttgcgcgtaacttggttattatcactgatgtgatcaaggtagcatttgagatacattcacgataatttaaatcctcaatacctttttaatccacataataactgttattctaattgctagttacgaattacatgattcctaataggagaatattattttatgctttaaataaatattttaatttaaaatggcatatgatattgagagaaataaagggcatcatatatattctgggtggaacaacatctggcaaacaca

SEQ ID NO: 50380 - DNA, 549 bp, Homo sapiens
ttataatgttttctagacgtacactcagtccacagagtctgaacatttattatgtaaattcaaggtctacagagaaaatcttccatataaatgttggcaagataatgtacaaatccatagtcttatcctgctatttgtttggctgaaatatttttattaccattagtataactgtgtattgtatcaaaattataaaataaaaatatatgagaacaattaggtagcatatgatgtatctcttaatgataaatattcttaaaaagcagctaaaattttttctgatctacttagttgcgcrtaacttggttattatcactgatgtgatcaaggtagcatttgagatacattcacgataatttaaatcctcaatacctttttaatccacataataactgttattctaattgctagttacgaattacatgattcctaataggagaatattattttatgctttaaataaatattttaatttaaaatggcatatgatattgagagaaataaagggcatcatatatattctgggtggaacaacatctggcaaacaca

SEQ ID NO: 50381 - DNA, 549 bp, Homo sapiens
ttataatgttttctagacgtacactcagtccacagagtctgaacatttattatgtaaattcaaggtctacagagaaaatcttccatataaatgttggcaagataatgtacaaatccatagtcttatcctgctatttgtttggctgaaatatttttattaccattagtataactgtgtattgtatcaaaattataaaataaaaatatatgagaacaattaggtagcatatgatgtatctcttaatgataaatattcttaaaaagcagctaaaattttttctgatctacttagttgcgcgtaacttggttattatcactgatgtgatcaaggtagcatttgagatacattcacgataatttaaatcctcaatacctttttaatccacataataactgttattctaattgctagttacgaattacatgattcctaataggagaatattattttatgctttaaataaatattttaatttaaaatggyatatgatattgagagaaataaagggcatcatatatattctgggtggaacaacatctggcaaacaca

SEQ ID NO: 50382 - DNA, 562 bp, Homo sapiens
gggttccacagaacacactttgggaacaccaccccaaccatcccgcctttccctcaagttagccttaagtaagattttagacgtaagatatgctccccagtacccaggggctctgtaaaggaggctcttgaagataagaaaagccgcaaggccccatggaaggaaaagcgggctggcggccggctagctggtagtaggaggggtgtgttctctctcctcagggtgattgacacctgtcacctgagaaatccagacacagcctgagccttccctccctggccatcagtctgctctctcagggggtgactcctgtcggaggtgaaagagaaggtggcccagcacccagtcattcctggtccgctkggaccctccagaaagtctggaggtacctgtgccccagagagaaagagagcttcgttcagctgctgagtgcagagaccggggcaggggctcactcccagggccggcgaccatgcaggtaagggggtgctggtgctcttcagggcagcgactgagaacagggctcccaaccagctctgctcgctggtcccttcccttctct

SEQ ID NO: 50383 - DNA, 457 bp, Homo sapiens
  misc_feature (1)...(457): n = A,T,C or G
aagaaaaaaaaaaaaaaacracagaaagaaaaaagaaagaaaactaggtctggtgagagtaggtatctcactcggatcaaacagctgctaagttggagagctgggattcagtgtcaggcctgtcttccatcccagtgatgtttctaccatccctcatctcagggacaacttaggaatagccattttaccacacttgcctgccttgtgtgcctttagttttactttagtttattttcaggatcttttttttttccaattttaggagatatttccatcaaacatagaaaagtctttttatttgttgtaagagtagaagcttttgaaagtcccttctaagtgctaaaatcctannnnnnnnnnnnnnnnnnnnnnnnnnnnnnnnnnnnnnnnnnnnnnnnnnnnnnnnnnnnnnnnnnnnnnnnnnnnnnnnnnnnnnnnnnnnnnnnnnnncttcctt

SEQ ID NO: 50384 - DNA, 1914 bp, Homo sapiens
ttctatgaggctaggactatcttgataccaaaaactggtggaggtcaggctcagtggctcacacctgtaatcctagcaatttgggaagccaaggcaaggggatcacttaatgtcaggagttcaagaccagcctggccaacatgatgaraccctgtctctattaaaaatacaaaaattagcagggtgtggtgatgcacacctgtagtcccagctactctggaggctgaggtgggagaatcacttgaacccaagaggcagaagttgcagtgagccaaggtggcactgctgcactccagcctgggcaacagagcaagactctgtctcaaaaaaaatacataaaataaatgaataaatcatgatattctcttttatttctttcaaagctgccttgagtattctagatctttgcattccacatcaagttatcaaattctgtaagttcaatctataagtcaaattctgtcagttctataagtcatattctataggttcaatcaagctgtcaaattctataaagcttaccaagattttcattagaattgttttgaactgctaaattaatttgggaagattgacatcttgacacagtaatacaatcaatggacatagtatatccatctatttatccacatgtctttggaattccctgtaatgttcccatgtttccagggtcaatatattgaaagtatttggttagtttttacatatttgatttttatgctatataaattatattttattttaatttatttttaactctcattttatacttaggaatacatgtacaggtttattatataggtaaattgtatgtcacagggctgtggtgtacagattatttcaccatccaagtaataaccatagtacccaataggtagtttttcagtcctcaccctcctccctcactctacctttaagtaaattccagtgtctcattagcttctttgtgttcatatgcactcaatgtttagctccaacttttaagtgagaacatttgttatttggttttctgtttctgcgttagttcacttaggataatggactccgtcttcatccatgttgctggaaaggacataatctcattcttttttatgactgcatagtattctatagtatgtatgtagcacattttctttatccatctaccatttatgggcatttaggttgattccattctttgctatcgtgaatactgctgcgacgtacacatgtgcatgtgtctttatggtagaacaatttatattcatttgggtatatgttgggattcactcaggatggcggcaggaatattaaagggaaatattagggaatgttataaggaatagtcatgaacctttttggaaggccaaaaggttacatagcttgtaataattgaacaggctgaaggcagccggttcttaccttagagcattaggtcatacggtaaatgctagggacaatagaggcttccccagttaagtctggttaccctacctccattaactaacctttgagccagatggccctctgggtgggaggtcagccagggaaactgcccccctggtggtatttacttcagaccaccttagctgagctttaatcattcctagaactactctcttaaccatgttaattatccacaagtgtgttgactcagagcttctgttgttaattgtatactaaataaatgtctggagtgcaagcttctcaaggccagccgcagtgacaaacctctcttggtgtgcaggtggtcggacattcagcaggactggcataacagattatctgtgtgtcaatgtacattttattcatccatcgtttgggtcagggtctgcaggcagacccctgcagctaatgccctcttgtgaggagcaattcctcagatatatacctaataatgcaattacttggtaaattgtattttcaaattaattt

SEQ ID NO: 50385 - DNA, 1914 bp, Homo sapiens
ttctatgaggctaggactatcttgataccaaaaactggtggaggtcaggctcagtggctcacacctgtaatcctagcaatttgggaagccaaggcaaggggatcacttaatgtcaggagttcaagaccagcctggccaacatgatgaaaccctgtctctattaaaaatacaaaaattagcagggtrtggtgatgcacacctgtagtcccagctactctggaggctgaggtgggagaatcacttgaacccaagaggcagaagttgcagtgagccaaggtggcactgctgcactccagcctgggcaacagagcaagactctgtctcaaaaaaaatacataaaataaatgaataaatcatgatattctcttttatttctttcaaagctgccttgagtattctagatctttgcattccacatcaagttatcaaattctgtaagttcaatctataagtcaaattctgtcagttctataagtcatattctataggttcaatcaagctgtcaaattctataaagcttaccaagattttcattagaattgttttgaactgctaaattaatttgggaagattgacatcttgacacagtaatacaatcaatggacatagtatatccatctatttatccacatgtctttggaattccctgtaatgttcccatgtttccagggtcaatatattgaaagtatttggttagtttttacatatttgatttttatgctatataaattatattttattttaatttatttttaactctcattttatacttaggaatacatgtacaggtttattatataggtaaattgtatgtcacagggctgtggtgtacagattatttcaccatccaagtaataaccatagtacccaataggtagtttttcagtcctcaccctcctccctcactctacctttaagtaaattccagtgtctcattagcttctttgtgttcatatgcactcaatgtttagctccaacttttaagtgagaacatttgttatttggttttctgtttctgcgttagttcacttaggataatggactccgtcttcatccatgttgctggaaaggacataatctcattcttttttatgactgcatagtattctatagtatgtatgtagcacattttctttatccatctaccatttatgggcatttaggttgattccattctttgctatcgtgaatactgctgcgacgtacacatgtgcatgtgtctttatggtagaacaatttatattcatttgggtatatgttgggattcactcaggatggcggcaggaatattaaagggaaatattagggaatgttataaggaatagtcatgaacctttttggaaggccaaaaggttacatagcttgtaataattgaacaggctgaaggcagccggttcttaccttagagcattaggtcatacggtaaatgctagggacaatagaggcttccccagttaagtctggttaccctacctccattaactaacctttgagccagatggccctctgggtgggaggtcagccagggaaactgcccccctggtggtatttacttcagaccaccttagctgagctttaatcattcctagaactactctcttaaccatgttaattatccacaagtgtgttgactcagagcttctgttgttaattgtatactaaataaatgtctggagtgcaagcttctcaaggccagccgcagtgacaaacctctcttggtgtgcaggtggtcggacattcagcaggactggcataacagattatctgtgtgtcaatgtacattttattcatccatcgtttgggtcagggtctgcaggcagacccctgcagctaatgccctcttgtgaggagcaattcctcagatatatacctaataatgcaattacttggtaaattgtattttcaaattaattt

SEQ ID NO: 50386 - DNA, 1914 bp, Homo sapiens
ttctatgaggctaggactatcttgataccaaaaactggtggaggtcaggctcagtggctcacacctgtaatcctagcaatttgggaagccaaggcaaggggatcacttaatgtcaggagttcaagaccagcctggccaacatgatgaaaccctgtctctattaaaaatacaaaaattagcagggtgtggtgrtgcacacctgtagtcccagctactctggaggctgaggtgggagaatcacttgaacccaagaggcagaagttgcagtgagccaaggtggcactgctgcactccagcctgggcaacagagcaagactctgtctcaaaaaaaatacataaaataaatgaataaatcatgatattctcttttatttctttcaaagctgccttgagtattctagatctttgcattccacatcaagttatcaaattctgtaagttcaatctataagtcaaattctgtcagttctataagtcatattctataggttcaatcaagctgtcaaattctataaagcttaccaagattttcattagaattgttttgaactgctaaattaatttgggaagattgacatcttgacacagtaatacaatcaatggacatagtatatccatctatttatccacatgtctttggaattccctgtaatgttcccatgtttccagggtcaatatattgaaagtatttggttagtttttacatatttgatttttatgctatataaattatattttattttaatttatttttaactctcattttatacttaggaatacatgtacaggtttattatataggtaaattgtatgtcacagggctgtggtgtacagattatttcaccatccaagtaataaccatagtacccaataggtagtttttcagtcctcaccctcctccctcactctacctttaagtaaattccagtgtctcattagcttctttgtgttcatatgcactcaatgtttagctccaacttttaagtgagaacatttgttatttggttttctgtttctgcgttagttcacttaggataatggactccgtcttcatccatgttgctggaaaggacataatctcattcttttttatgactgcatagtattctatagtatgtatgtagcacattttctttatccatctaccatttatgggcatttaggttgattccattctttgctatcgtgaatactgctgcgacgtacacatgtgcatgtgtctttatggtagaacaatttatattcatttgggtatatgttgggattcactcaggatggcggcaggaatattaaagggaaatattagggaatgttataaggaatagtcatgaacctttttggaaggccaaaaggttacatagcttgtaataattgaacaggctgaaggcagccggttcttaccttagagcattaggtcatacggtaaatgctagggacaatagaggcttccccagttaagtctggttaccctacctccattaactaacctttgagccagatggccctctgggtgggaggtcagccagggaaactgcccccctggtggtatttacttcagaccaccttagctgagctttaatcattcctagaactactctcttaaccatgttaattatccacaagtgtgttgactcagagcttctgttgttaattgtatactaaataaatgtctggagtgcaagcttctcaaggccagccgcagtgacaaacctctcttggtgtgcaggtggtcggacattcagcaggactggcataacagattatctgtgtgtcaatgtacattttattcatccatcgtttgggtcagggtctgcaggcagacccctgcagctaatgccctcttgtgaggagcaattcctcagatatatacctaataatgcaattacttggtaaattgtattttcaaattaattt

SEQ ID NO: 50387 - DNA, 1598 bp, Homo sapiens
ttaataatgtttcattatacatcattcttcaaataaactagatttatattatcttctctttagaagaaaagtttacacctatttacagttggtcagacaggagacacatgtaagtaatctttaagtaacaatgtactctactaaacatttcacagatgtttttcatgttctaataatgtattttatagtcaaactcttcatttttttccaaccatcattttactttttgttttcatgccctacaagaaaaatacaagtaagcgtcaatgacaaaagcattggaaatgtgtctcgatttccagttttccctcagctatttaacctacgtaaaacccactayaggaaatatatggttgcaataataaaaatagagatggggttctgaagggcagatttctaagtaagaaattatttttcatgagcaaaaactgaaagcacaattcacataatatgcttttttaaaataaaagttttacttcaaaataataaaactgatctttgtgtagggtaggctgcatgtgtccaatgtaatacaacaagttaaataacgacatttggataggttacatagcaacccaaggtaacatctgaaagtggcattttccttgcctgcacctcaaacccatgctaacacttacatgataggcatatctgtggtagataacagaatgtggttaattatcatagactatagaatgctataaacagaataaatagtcactttatccagataatcattactagatttgtaactataatgttatgtcttatttcccttaagagaactggtattttcccaaccatgaaagagagtagggtctagaaacgatgactcatacctgtaatcctagcactttgggaggctctggtttgcagatagcttgagcccaggagtgagatatcagcctgggcaacatagtcagactttatctctacaaaaaacaaaaacaatagccaggtgtggtggtacactcctatagtcccagctacttaggagactgaggtgggagaatctcttgtcccctgaagtttgaggctgcagtaagccaaaatcgtgtgactgcacgacagagcaagatgttgtcaaaaagaagaagagaaggaggaggaggaggaagaagaggaggagggggaggggggaggaggaaggagaaaagaagaagaagaagaggaggaggaggagaaaggataattgtttttcttcttgattttcgtctacacctatctcaccctcaaaagatgcccacaccatcaaagacaataaatataatcctgtttgaaagaaataatatacatagccctaattcaatccacttcctttattctatactcttaaaaacactaaataaatattaacaattatgattgcctattacttttattattattaaagtataataaaattattgcaaaatatcagattccaaattctgctaattggtataagtaacagaggcaacaactaatttttaccaaccaattagcagcatttctaataataataaaaatggacattattttaattttattttatttgttacaactttcagcacataaaatttataatcatttatacaaacagctctataattcatatg

SEQ ID NO: 50388 - DNA, 1692 bp, Homo sapiens
tcagatatatcaattcctatttcmtattctccaaagacctcccattgtccttagaataaaatccaaactattcaccaagaccctgtatgaactgatgcctacctgcatttagtgtcatctcttgcaacttttcccttagtcaccatacatcaggtacattagctttctttgttcagaaccaccaagctttttctcgcctggggcctttgcactttttgtctggaacacttttccagagcattgcaggactgactgcttcttttcatttatgttgcacttcagctgccctatataaaaggacaacaccctttcccctaactctccctattcctttgaccctttatcttatctatagcatttaccatctggcctgtatttaattgggtttggtttgctcattctctctcctctctcattatttgattcaggctggttacagagattttagcctgggaaaaatgagtagcagctcctctgaaggaaatgattgtccattgctatatgggtgggtgatgtgttaggcagcaaataatctatttggcctactcattggctgaggcacatgcaactcactcctcctatttgctactttgtacccatccctatcacacagatgtgccattttgatcttttcattgctcaagagaaaactcaaaacaactttttctaaatgcttggttacagttcttaaaacaacaagaagagttaaattgtcagctagctctctgtggaccttcaggaacccagatatgaaaactcgtgtgtaaaagttgcctgtagaagtttagacatctggttcagtcctgcaagatgcctgtctctcacaaaatgtgtttgtggtatctagggtgaaattctgtatagttaggaaaatagagaaggtcaaagaggtagttatgcagaagaaatccactttcttcatttgactactatgtaaaagctctgaacttttctatttctggtcctttataattcactttgcttaggttgcactattttgcaagaaggctcaaaataaggagtggatagagtctatacccaatatccatggctttagaatgaccaaagccaggcttctttaaacccagagataagacccaggacatgagatcacagaagtctctcaaacagagaccagagtatagaaatgaaggtagaataattctgcagaagagaattctgcagagtatagaaatgaaggtagaataattctgccgaagagagtaattcctttccattctcacgacaactgctgaattctggagtcacatgggagcctggggctgccctccagttactccagtgcaaccctggtgaacgactgtggctgctactgttcttgaaacatgaatgtcagacttgtttcccatacagttccactatggtaactcctgttttaggagcaaacttctaccccactagggctcatatcatggagttatgccaaaaaataaaagatattccttctgaacagctgtgatccagttatacctaacattacacattatactcaccatgttatttcagccaactctcagcatttgtcacagtcctccatacagatggtcctcaacttacactggttcaacttacagtttttcagctttacaattgatttatctggacgtaaccccactgcaaatagaggagcatctagactttcaatggctcaacttgcaactttttcgactt

SEQ ID NO: 50389 - DNA, 609 bp, Homo sapiens
tggtctttcaaaaagtttgtttaattgaagcaaaagaaatagtggggccattgttcaggattatcagtgagaggtcatttacatgaggggactatggcatggtgggagaagaaaatgtggctaagtataattcattctgggtcccttgagcccacacaaaagatttaactttaagaggctaagttcccaagcccctagtttttagagagtaaatccaaactatagaacctctaaatcttttatcaattcataaaataatactatgtttgaagctaaaattagatagacttccataagctttaagattctgtaattatttggrgtcagtgcaacaaaaaaaatgctggaaaataaactcttagcacaaatggagggggatttgggtttttaaacacatacatggccacattgaatgccatttagggaaaaataatttgaaattgaaaaaaacttatttgacagcagaccatgtcaagttttctgccctttaaaaaattcaaactaaagaccataatttattgtctcaaatagcatagcataaagttaagctacctctcatatcctctgatttctattttaaatcctaagtcaatttcattcaaacatctt

SEQ ID NO: 50390 - DNA, 617 bp, Homo sapiens
ctgtaacatctgcctcctgggttcaagcaattctcctgcctcagcctcccgagtagctgggattacaggtgtggccaccrtgcccagctaattttgtagtttttagtagagacgggatttctccatgttggtcaggctggtcttgagctcccaacctcaggtgatccacccacctcagcctcccaaagtgctgggattacaggcgtaagccaccatgcccggccgaaaacacactttgtaatgggctaagcattcagtaagaacatgataaatgcctgttgaaggagtcaatgcttggaaatgtctggttttgaaagttgaataagatttatataatagagatagggaaggatcttgagaacaaagagaagaacaaagtctgaattaaatgcttcctcctttgtgttctcacagcactttacgtcttttatagaggctttcccattgcatgatagacctgctttgagggtagcacttttgtgtcttatttaccttttgaaccccagcacatattccaatacctatttcttaattggtagttaataaatatttaataaatcaatgaaagattgaatgagttaatgaataaataagaaagcccaaaggttactctgagt

SEQ ID NO: 50391 - DNA, 622 bp, Homo sapiens
gccaaggttaatgtacagtctacacgtggtctttaccttaacgggaagtaaaaagcacttttgagggtagaggactcgtggtctctttctttatgttgaagaaacagtgaaaagagaagctccgtagacttgtaagctacatacgattagtaaattgcatttgtgtttacagggaaccctgggcacgtattgtgaaaccagtgagctgtggtagtagttaagcattagtacggttgggttcttagttgccatcttgggcgggacatttaatcgttttttggtttgggtttctggtctcgaatatattaaaagtaattggtactgccacgaggtagttaaactttccgatgctgatgcaagaagctgtgtaacactttcaggtgctagggactgttamatcttaaagagtgtgtgactgtaaatcggctattagaaagttaaatttacggtaggagagaagcttgcgtttacagttctgagaaacatcataactcgttttctacttgctttctctaatccgactgtttatgccatttggtgaacgatgtacaccaaaataattaattcataattagtaatggtcttaacagacatcgtttagttacatagaaactttggtgag

SEQ ID NO: 50392 - DNA, 554 bp, Homo sapiens
acacctttatttattatgaacttaaatacagcatccatgttcattaaaagaaaataaaagagcaacacacaattttatttgatccacagggctttcttgtgagctctctgataaataattatttcaataaatactaagagatttcaatgtatgaatacaaacaagtatgtaagcaagtgaactttaatatttgtagkaatataaataaattatatatatgaatactgcaaagcatatttagagatagaaaagttgtttaaataattcttaaattcttaaataattctttttaaatgtcagaccacatcttcaaaaatctccttagtcaaaatattttcattaatcagcaatgtgaataaaatatatggaaaggactttaatatatacatttgtagtactttctggaaattaattctattcttgtgtcactgttaagaaggaaatattgacaaacctcatatgttgctgggcctggagtaatctctttggactcttcaaagcgctttgatgctttcacaaataagggtatggggcaagatttccttaaaacagga

SEQ ID NO: 50393 - DNA, 571 bp, Homo sapiens
  misc_feature (1)...(571): n = A,T,C or G
tgtagctaatttgttagtcctacraaggcagattggtccctagggaagaagaggatttgttttcgaaaagggctgttatcatctttgtttcaaagttaaactataaactaagttcctcccaaagttagttcagcctacacccaggaatgaacaaggacagtttggaggttagaagcaagatggagtcggttaggtcaggtctctttcactgtcatcacttcctcagttacaaattttgcaaaggtggttttatgatctcttttgcttctcattttgaccctgtaaatagcagggtggggtgcacaaaggtcagatgccaggtaagacactgggcaggtcctggaggtcccaatgcacccggcattaaacccttcagttggtggccatgaaaaatgtgtgccaggagtttcaggggagccacaccaccaggcnagctctgagcagtggctacttcccgatctgtatggaacaccctgatgtctttgtcctggaagagcatccctgctgaagaccagccctgcccaggacatggaggaagtggatgctttggttccaaatcacagatgggaaa

SEQ ID NO: 50394 - DNA, 1453 bp, Homo sapiens
acttagaaataatgccttctcaataatgactttgccaacartggccatagcagccacaccctcagcaaaagcaacttagtgcagatttcttagcaaagcacgccaaaacacactaacaaacatactaagaaaacacaaaacacactaatactaacaaagaaagtgcctttctaaaaactgcctaacatcaacaatcttatcaacacatttcatagcaaaaatttccttagcacctttgcccctagcaatgttgtctttagcaacagttttcgtggcagtagtgaccatccaaccttgatttagcaaatgcatccttagcaaaaactttcttgcaacaccacccttaatactaacacctttaagaacgatgtctttagcataagggccctctcaacaatatcattagcaaaagcttggcaaaatgtgcttagcaaccgcactctttgaaaaagttccattaatagcaacatacttaataacaatgtctttagcaacggtggccataggaattgctccttctgcaagagtggctactgtaattgtgaccagagcaataatggccatatcagccatgcatttagttacagtggcagtaacaactatgtccttggtggcagtatgtgtggggaacatttcttagcaacaacacccttatctaagaggccctaggagcaaaatccattgcaacactatatgcagcaacaatgtccttaattattaggttgatgcaaaggtaattgcgatttttgccatttcagtggcaaaaaccgcaatcacctttgtaccaacctaatacaattcccttggcgacaatcttcttagcaacaacacccttggcaacaaagctcttagcaatatccttagaaacattgtctttagcaacatttcttagcaatggtgcccatagcaacagttccctagtaacagcaaccttaggagaaactccctttgcaagagcacatttaacatcactgcctttaatgaaaaaccacttaataaagaagtcctggctgggcgcgctggctcacgcctgtaatcccagcactttgggaggccgaggtgggcagatcacgaggtcaggagatcaagaccatcctggctaacatggtgaaaccccgtctccactaaaaatacaaaaaattacctgggcgtggtggcaggtgcctgtagtcccagtactcgggaagctgaggcaggagaatggcgtaaacccgggaggcggagcttgcagtgagcggagattgcgccactgcactccagcctgggcgacagagcgagactccatcgatggcctgatggcctgcaggtgtctgttggcctgctcttccgccagtgtgctttcgatgaccagctgcttgtgtcttcttctgctgatgtgttccttatgatgtccagctgcttgtgtccatgccttgctaaggtctctggtttttataggcccatgatgggggca

SEQ ID NO: 50395 - DNA, 1453 bp, Homo sapiens
acttagaaataatgccttctcaataatgactttgccaacaatggccatagcagccacaccctcagcaaaagcaacttagtgcagatttcttagcaaagcacgccaaaacacactaacaaacatactaagaaaacacaaaacacactaatactaacaaagaaagtgcctttctaaaaactgcctaacatcaacaatcttatcaacacatttcatagcaaaaatttccttagcacctttgcccctagcaatgttgtctttagcaacagttttcgtgrcagtagtgaccatccaaccttgatttagcaaatgcatccttagcaaaaactttcttgcaacaccacccttaatactaacacctttaagaacgatgtctttagcataagggccctctcaacaatatcattagcaaaagcttggcaaaatgtgcttagcaaccgcactctttgaaaaagttccattaatagcaacatacttaataacaatgtctttagcaacggtggccataggaattgctccttctgcaagagtggctactgtaattgtgaccagagcaataatggccatatcagccatgcatttagttacagtggcagtaacaactatgtccttggtggcagtatgtgtggggaacatttcttagcaacaacacccttatctaagaggccctaggagcaaaatccattgcaacactatatgcagcaacaatgtccttaattattaggttgatgcaaaggtaattgcgatttttgccatttcagtggcaaaaaccgcaatcacctttgtaccaacctaatacaattcccttggcgacaatcttcttagcaacaacacccttggcaacaaagctcttagcaatatccttagaaacattgtctttagcaacatttcttagcaatggtgcccatagcaacagttccctagtaacagcaaccttaggagaaactccctttgcaagagcacatttaacatcactgcctttaatgaaaaaccacttaataaagaagtcctggctgggcgcgctggctcacgcctgtaatcccagcactttgggaggccgaggtgggcagatcacgaggtcaggagatcaagaccatcctggctaacatggtgaaaccccgtctccactaaaaatacaaaaaattacctgggcgtggtggcaggtgcctgtagtcccagtactcgggaagctgaggcaggagaatggcgtaaacccgggaggcggagcttgcagtgagcggagattgcgccactgcactccagcctgggcgacagagcgagactccatcgatggcctgatggcctgcaggtgtctgttggcctgctcttccgccagtgtgctttcgatgaccagctgcttgtgtcttcttctgctgatgtgttccttatgatgtccagctgcttgtgtccatgccttgctaaggtctctggtttttataggcccatgatgggggca

SEQ ID NO: 50396 - DNA, 769 bp, Homo sapiens
ttgccttgttttcttagcctctgtcaatctggaatgcctccttcctcactccactcaacctctgacaacttgctataggtcaccaccagtgctgtctcctgtctctccaggtccccacccttgctatactgtggatgctttccttaccctgctggtttctgaatgctctgccatggtcctgggcctccccactacccagcatggatgcctaagctgaactgaatgaccttggactgaattgttcaaaaagagaaggggaaaggaagaggaagaagaatgccaagtaatttgatttttcttttttcatgatcaaaccaatgtcttggaattgattatcatttccatgggctacttcrgctccgtactgtttgtatagagtttggtgaaaatgaataaaggcatgtgaactacattttttgtttttttttttttgtttttttttgagacagagtctcactccgtcacccaggctggagtgcagtggcacgatctcagctcactgcctcctcacaggcacctgccaccatgccctgaaattttttcatatttttagtagaggcagggtttcaccgtgttgtccaggctggtttcgaactcccgacctcaagtgatccacccgcctcagcctcccaaagtgctgagattacagctgtgagccaccgtgcccagcctgaactccattttttatagagtaccatttgacactaaaattaagagtctgttactcatctgcagaatctctcttaaaatggtattactaaaaggtcca

SEQ ID NO: 50397 - DNA, 769 bp, Homo sapiens
ttgccttgttttcttagcctctgtcaatctggaatgcctccttcctcactccactcaacctctgacaacttgctataggtcaccaccagtgctgtctcctgtctctccaggtccccacccttgctatactgtggatgctttccttaccctgctggtttctgaatgctctgccatggtcctgggcctccccactacccagcatggatgcctaagctgaactgaatgaccttggactgaattgttcaaaaagagaaggggaaaggaagaggaagaagaatgccaagtaatttgatttttcttttttcatgatcaaaccaatgtcttggaattgattatcatttccatgggctacttcagctccgtactgtttgtatagagtttggtgaaaatgaataaaggcatgtgaactacattttttgtttttttttttttgtttttttttgagacagagtctcactccgtcacccaggctggagtgcagtggcacgatctcagctcactgcctcctcacaggcacctgccaccatgccctgaaattttttcatatttttagtagaggcagggtttcaccgtgttgtccaggctggtttcgaactcccgacctcaagtgatccacccgcctcagcctcccaaagtgctgagattacagstgtgagccaccgtgcccagcctgaactccattttttatagagtaccatttgacactaaaattaagagtctgttactcatctgcagaatctctcttaaaatggtattactaaaaggtcca

SEQ ID NO: 50398 - DNA, 508 bp, Homo sapiens
acgaaagaagactgaaaacacccacagtagtagtattgaaattttacgtgtcactcagcaactcgcgagagtcccgtctggtgctgagtccrtttggaatatctgtccctgccctcccctcctccaaaaagaatgttcactgtaaatgagaagagcttaatttctatgggctttgtaatccttccactggattccaagcaaaataactatcaatacaactaatcctgagaataaaaagtaatcacaactatgcaacaaaaacaggaaaggtggtggcaggatctcagatttcatttttctccaggaaggtctttttgaagccctgtttattcaatagtaagagtgacctctagtgacttattttgttgtattttgccagttgattggtcaattactctagcatgcctttctataagtaactcatttatgtgtttatttaagccaaacggcagtttccattacaagacccaaggattttaatttaagtaacaacgttttattcacaaag

SEQ ID NO: 50399 - DNA, 508 bp, Homo sapiens
acgaaagaagactgaaaacacccacagtagtagtattgaaattttacgtgtcactcagcaactcgcgagagtcccgtctggtgctgagtccgtttggaatatctgtccctgccctcccctcctccaaaaagaatgttcactrtaaatgagaagagcttaatttctatgggctttgtaatccttccactggattccaagcaaaataactatcaatacaactaatcctgagaataaaaagtaatcacaactatgcaacaaaaacaggaaaggtggtggcaggatctcagatttcatttttctccaggaaggtctttttgaagccctgtttattcaatagtaagagtgacctctagtgacttattttgttgtattttgccagttgattggtcaattactctagcatgcctttctataagtaactcatttatgtgtttatttaagccaaacggcagtttccattacaagacccaaggattttaatttaagtaacaacgttttattcacaaag

SEQ ID NO: 50400 - DNA, 508 bp, Homo sapiens
acgaaagaagactgaaaacacccacagtagtagtattgaaattttacgtgtcactcagcaactcgcgagagtcccgtctggtgctgagtccgtttggaatatctgtccctgccctcccctcctccaaaaagaatgttcactgtaaatgagaagagcttaatttctatgggctttgtaatccttccactggattccaagcaaaataactatcaatacaactaatcctgagaataaaaagtaatcacaactatgcaacaaaaacaggaaaggtggtggcaggatctcagatttcatttttctccaggaaggtctttttgaagccctgtttattcaatagtaagagtgacctctagtgacttwttttgttgtattttgccagttgattggtcaattactctagcatgcctttctataagtaactcatttatgtgtttatttaagccaaacggcagtttccattacaagacccaaggattttaatttaagtaacaacgttttattcacaaag

SEQ ID NO: 50401 - DNA, 591 bp, Homo sapiens
tataaatctgtaaaaaaaaaaacctcttataaaaaccttataaaaaaaggcacaggaaatgtatgtaggcaattgargtagattataaaagcaattttagggccattgtattctagggatatttgaagtcaatctctctcatttatagatgaggaatctaaagtccagggaggcatatataaaagttaaagttttttactctccattaagtactttaaacactataggttacttatttgtttctactaagtaacgaagttacccaaatcagatttatagtcaaatatatacgaatatgtcaaatatgtatatttgacaaatatatatgaatacatgacaaacatatttgacatatatttagtcaaaaacaaaatatgaatttttctttttttttttttttttgagacagagtctcgctctgtcacccaggctggagcacagtggcgcgatctcagctcactgcaagctccacctcccaggttcacaccattctcctgcctcagcctcctgagtagctgggactacaggcacccgccaccatgcccggctaatttttttttgtttttagtagagacagggtttcaccgtgtt

SEQ ID NO: 50402 - DNA, 591 bp, Homo sapiens
tataaatctgtaaaaaaaaaaacctcttataaaaaccttataaaaaaaggcacaggaaatgtatgtaggcaattgaggtagattataaaarcaattttagggccattgtattctagggatatttgaagtcaatctctctcatttatagatgaggaatctaaagtccagggaggcatatataaaagttaaagttttttactctccattaagtactttaaacactataggttacttatttgtttctactaagtaacgaagttacccaaatcagatttatagtcaaatatatacgaatatgtcaaatatgtatatttgacaaatatatatgaatacatgacaaacatatttgacatatatttagtcaaaaacaaaatatgaatttttctttttttttttttttttgagacagagtctcgctctgtcacccaggctggagcacagtggcgcgatctcagctcactgcaagctccacctcccaggttcacaccattctcctgcctcagcctcctgagtagctgggactacaggcacccgccaccatgcccggctaatttttttttgtttttagtagagacagggtttcaccgtgtt

SEQ ID NO: 50403 - DNA, 654 bp, Homo sapiens
gacatcagaaaccttccacctgtgaagactccaatataaaatccataaaggacttaagttattgaatgtaaaatcttaagaaaaatggacttagtgaatcagttatagggagaacatgaatgttaccttaaatatattctaagttcaaatttcaaatgtctattggacacgttaacgtagatgtccataggcaccataaaaagcaacatgtccaaagcagatttcactgtatttctcaaatgtgcttttacttctgagttccctacctcaagtaacagcatctcatctacccaattaggaacaaaatgtaagtgacattttcaattccaccctgaccctcaaccacctcatgagttcttatggtctcctagtatcttcaggatacatgcttctacaayttaaccaaacaggttcatagaacataaagatgctgcaatagcaaggtatacttaactgcaatttttttaaaaacctaatcatagaaactttcttcttctttttttttttttttttttttttgagacggagtcttactctgtcacccaggctggagtgcatggtgcaatctcggctcactgcaacctccgcctcccgggttcaagcaattctcctgcctcagcctcccaagtagatgggactacaggcgcatgccac

SEQ ID NO: 50404 - DNA, 579 bp, Homo sapiens
atagtatgtttcagacactactttaaatatttatgtttattaagaaatttaatgtcagaacaattttatgaggtaggtaccactattctgcccattttacagaagaggaaactggaacacagagaagttaagcaacttaattaaggtcacacagttggtaaatgccataactgggattcaatcccaggcagtcagtgtggctcccgggctcacactcttaaccattaaactgtattgcttcattcacttggccattagaacatactgtttcattggtacctgtctccaatgagtatgtctcggatcataaagatgcagattaaccttcatatgtcttttgggttcctctctggacatagcacaatgtatgtgctaataggtccacaacaaatacttgttgaatgagtggcctggggcacagacccactgcrtagctatggagtcattataagtagtctgtgaccccatgaaaaggcactgaacattgtctggtgataaaataaataggttattaattacagctattgtaattttcacagatatgcagttcctcttattattcataaaatacaaattcat

SEQ ID NO: 50405 - DNA, 545 bp, Homo sapiens
gtactcagaaaacaagacataacataaataagtgcatcgcctcaagcactatcacctagaacttgacaaagtttgactgtgagtttcaagaaaagggctgacgaggccaagaagttccttcccctctccccttacctcccattttggtgacaaacttaatgcagagaaattcctgtttcaggtttgccrgcattggagcaatcctggcatttattcacccaggacactagaaggctgaagtctgcagggtgcacatatttaaaatcacgggagcactggagtaatggaaagaggtgcccgcgaaggcatcatcctttccaggacaggctctaattccgcctccgggcccttttgcaaaaagccatttctacaaacccacggccaccaggaggaaacacacaaaagaccccactgccctcctggcttcccagaaggcctcagaaggacgagacacggagcccgcacacaatcctggaccctcctccttgcattcagtttgatgcatgtcacctgcctgcatgatggaggtcccacaatgggcacaa

SEQ ID NO: 50406 - DNA, 545 bp, Homo sapiens
gtactcagaaaacaagacataacataaataagtgcatcgcctcaagcactatcacctagaacttgacaaagtttgactgtgagtttcaagaaaagggctgacgaggccaagaagttccttcccctctccccttacctcccattttggtgacaaacttaatgcagagaaattcctgtttcaggtttgccagcattggagcaatcctggcatttattcacccaggacactagaaggctgaagtctgcagggtgcacatatttaaaatcacggragcactggagtaatggaaagaggtgcccgcgaaggcatcatcctttccaggacaggctctaattccgcctccgggcccttttgcaaaaagccatttctacaaacccacggccaccaggaggaaacacacaaaagaccccactgccctcctggcttcccagaaggcctcagaaggacgagacacggagcccgcacacaatcctggaccctcctccttgcattcagtttgatgcatgtcacctgcctgcatgatggaggtcccacaatgggcacaa

SEQ ID NO: 50407 - DNA, 651 bp, Homo sapiens
ttttttttcttttttgcagagatgaggtcttactatattgcccaggctggtcttgaattcctgggctcaagcaatcctcctgcctcagcctcccaaagtgctggaattacaggcatgagccacagtgcccagcctctatttggatttctattgctggattctctaactaaacctaaactcccaatttttctctaaacagagttgccgtctagattaatctaccagtcagacactcccaacactcagaccagcttcagactctcccacttttttttctgagtccagccggtcagcacctcctgcaggtccttattgcacaacatttttcacaccaccccttcttttcactcttgtttcagccttttgttccttcatacctgcactactctgattgcatcttgaaagatttctgtttttccctgtaagctacccagaacactataattggatcatttttctcaacactgctaacaagccacttccctggttaagaacttacaatggctccctcttgtccacagaatgaaatccagacaatctagctccaaagctcccatgatttggctttaacctgcacttcctgttttctctctcgttactttcctggggagcccacttcrgctaaaatggcttatttgctctctgtggtag

SEQ ID NO: 50408 - DNA, 547 bp, Homo sapiens
cctggtcataatcaacaacatcttgcaattcaatgttcccattccagaaatgaccaacctggtgaagcatagaactctggtgcttgcatatggaaggctctgttagcaaactggcattgggttcgatgctcccttttgtctctgggaaatatgcagtatgccctcttgaagacagaaacagagctctttctccactgctctcatatgcgctcrgcttgacttggggtcatcttctcaaagcctgtgggggatctgggtcctagggtcatgcagtggctgcagctgtataagcagggagaattactattagttctgacctttcttaaccattgttgccaccctttgtttggtaagggactgggtgacctgaatccccttcccaaacccaggaaagggaggtccatgtgatgtgatagtgaggataatgagaaaatcttatgtagccttaaaaaaatatgcttttaaaaagcgaatcacagcccttctctcctttgagccttacaaccttaaaacttcttttaaggttagcaagatggctactggctta

SEQ ID NO: 50409 - DNA, 607 bp, Homo sapiens
aatatacaaaagtgagctgggcgtggtacacctgtagccccagctactcaggaggttgaggctggaggatcgccggagcccgggaggttcaggctgcagtaagccgtcgatggaaccactgcacttctgcctggacaacagagcgagactctatcaaaaaacaaaacaaaaatcttcagattgctggtgttgagccctagagtttttaatatagtaggtctagggtggagcctgagcatttgtcttttgaacaagttttcaggtgccgctggggctgttacctacatctgaagactaccttgtagcatgatcagagtgtgttggaaagagtgtctgagatggagagaacagtggatgcaagggccggaatgctggagaaggcataatgaattggagaaataaaaatcatggttaacattgatagaatgcttaccgtgtgccaggtgccgtcctgagcactctacctgtgttagctcattcagtcttcctgacaatcctgtgaggtgggcattgtgacygtccgtgttttacacgggagaacactgaagcacagagaggtccagaagtttgttcaagttttgaagctaataggtggggcagtgggaat

SEQ ID NO: 50410 - DNA, 607 bp, Homo sapiens
aatatacaaaagtgagctgggcgtggtacacctgtagccccagctactcaggaggttgaggctggaggatcgccggagcccgggaggttcaggctgcagtaagccgtcgatggaaccactgcacttctgcctggacaacagagcgagactctatcaaaaaacaaaacaaaaatcttcagattgctggtgttgagccctagagtttttaatatagtaggtctagggtggagcctgagcatttgtcttttgaacaagttttcaggtgccgctggggctgttacctacatctgaagactaccttgtagcatgatcagagtgtgttggaaagagtgtctgagatggagagaacagtggatgcaagggccggaatgctggagaaggcataatgaattggagaaataaaaatcatggttaacattgatagaatgcttaccgtgtgccaggtgccgtcctgagcactctacctgtgttagctcattcagtcttcctgacaatcctgtgaggtgggcattgtgaccgtcygtgttttacacgggagaacactgaagcacagagaggtccagaagtttgttcaagttttgaagctaataggtggggcagtgggaat

SEQ ID NO: 50411 - DNA, 1148 bp, Homo sapiens
tttttcaagtaacttccattttcaatttactcctttcctcatttctcatcttttcatatttcatataccatatacagatatctcatgtctttttcatattcccagataaaatgtgtatttgatccctagcattaagctagaataaatgattcagaatgtctccagccaggtgcagtgctggtcacatgtggaataggatggcagagggagactccakgcaactggcagaacttctcctctgtgaaggggatagcaagagcaggttcatctacatgagggcagggcagggaggtaaaaatccatccaggctgtgtgaatatccaagagcttgtctgatctcagaaatcagtatgaaaaagacaccaaactttctggactccagtggttcttggggccagggttggctttgttataaataggaataatcacccaagaggggaggaacgctgaagccaggtcccatcttggctgatgaaatagctgcataggaatgactaggctaacttcttttcagtcgtcctaaccctccattccaccccctccccaaactcctttctgggtgctaggttggtcttcacatgcagacactagttccttagaattgacagaaatcctgcaagttggtctgattcccaactgtcggggttcctgacttaacagtcccagttttccttggtccctctgcctaactggatagacattttcatcttcctttaattaaatctgtttttgcctaagcactagtacttttttatctcatcctttaattattagtattgtaacactattgatttccactctgttgggctaaaatgtatggtgtttagctatattatggttacatggctttttgtgagctggcttgtagccctaattgccatttataaaattgcttctatgggaaagtgcattctgcctttcaaaccacagccttccaaacacacgaacacagttcatttgtgagctgggaaccatcagtattaatgtctcttggcccatggcagccccacaaccaaatgacatgtggtttaaggttcgtgtaacagccagttcatttaaataatgttagctaggactcagctttcaggttctcggatttctggttaatttcgaatagaagaggcagcagagttgcagcattcagacag

SEQ ID NO: 50412 - DNA, 1663 bp, Homo sapiens
cccccttctgtactttgagaggccatgcgggctctctcaaagtacaggtggccaatggcttcctggatgcagaaggaagcactggcctcattatatgcaggtttcacgactgctgttttaaactccaatactgctgaaccattcagaaataratccattataggtctgctttaccccagggctttcacacaggtcactagaaaatccaagattgcacagtaattcaaactcttaggaaggaaaaaacaaattctcttcagcgcttcctccctcccctcccagctcctggcctaaaaggaagcacctcttcatttctgtagtgctttggaataagtagctcttacattgaacttgaaatctaaatttttcttcagctattaattgataagagcagctcattttacttctcatgctctgaagtaagattacagtgtaaataaactgggtcaggtttagcaggatggacgtgaactgttctctaattccccttaatctccggtaaaggaataactaggatttggacatcaacattcaataagcaattatgctgctccttcatactcgatctaaattagtccacgtttccctcaaagagaatccaacgaacctccaaacccggctcttaaattgcaatctctttgtattgttctggctgatgagagacgagtcggcattgtgggaggggtttgatttgatttatattaatttttaaactatctgggatctctcgttttacttgaaacagatcagggaaaaggggtcggtaaacaagggtttcatctactgctgataaccacaccacgctcagcatttcatgagcctggcttctcattttcttagcacattagaatcattatctaattattaatctcaccctagagttcctaggagcttatgatgcctgttgaagttaatgaaggcttttacctatagatctggcgttaaatcattgtgattgcctgagtgcccacaatatggtaggcactgacagggctgacagaaaggaaagagaattaagcagaaggaaaataaggaggggaagagggagaagtcactggaaagaaggaggggcaagataccaaatctagatagtaacttcaaaacacctcattaggaaaatggggcagttaaagaagaactcaccaactaatctgcttaaactttaattaataattcatttatatatatttatgtggcacgctttctctagggaacccaatgtgcttagcaaacattttaaataattaactctctcatatctgagtgaagtggagaggcagcagagttactctataactcgttaagcagattggcaggtgacaactagatgtcttgcttgggagaggagagaccgaccatctgtaacttacctgatgccacaagcaaatgatctctctgggggcctagtactgtaaggctctgtcttagcaccttcccagaagaagcagtttttgtttagatagatagataatgaggatacatagatggagataaataggtatgaatgactgtagcaatcaagaatattttgagggggggatgttattagaagaaagtcaaacagggtacatttaaaaaaatactgccttcaagataaaaggaagtatttcaaatcaggaatattggttatggcattaaatgaaatgaatttgcagaggccaaa

SEQ ID NO: 50413 - DNA, 1663 bp, Homo sapiens
cccccttctgtactttgagaggccatgcgggctctctcaaagtacaggtggccaatggcttcctggatgcagaaggaagcactggcctcattatatgcaggtttcacgactgctgttttaaactccaatactgctgaaccattcagaaatagatccattataggtctgctttaccccagggctttcacacaggtcactagaaaatccaagattgcacagtaattcaaactcttaggaaggaaaaaacaaattctcttcagcgcttcctccctcccctcccagctcctggcctaaaaggaagcacctcttcatttctgtagtgctttggaataagtagctcttacattgaacttgaaatctaaatttttcttcagctattaattgataagagcagctcattttacttctcatgctctgaagtaagattacagtgtaaataaactgggtcaggtttagcaggatggacgtgaactgttctctaattccccttaatctccggtaaaggaataactaggatttggacatcaacattcaataagcaattatgctgctccttcatactcgatctaaattagtccacgtttccctcaaagagaatccaacgaacctccaaacccggctcttaaattgcaatctctttgtattgttctggctgatgagagacgagtcggcattgtgggaggggtttgatttgatttatattaatttttaaactatctgggatctctcgttttacttgaaacagatcagggaaaaggggtcggtaaacaagggtttcatctactgctgataaccacaccacgctcagcatttcatgagcctggcttctcattttcttagcacattagaatcattatctaattattaatctcaccctagagttcctaggagcttatgatgcctgttgaagttaatgaaggcttttacctatagatctggcgttaaatcattgtgattgcctgagtgcccacaatatggtaggcactgacagggctgacagaaaggaaagagaattaagcagaaggaaaataaggaggggaagagggagaagtcactggaaagaaggaggggcaagataccaaatctagatagtaacttcaaaacacctcattaggaaaatggggcagttaaagaagaactcaccaactaatctgcttaaactttaattaataattcatttatatatatttatgtggcacgctttctctagggaacccaatgtgcttagcaaacattttaaataattaactctctcatatctgagtgaagtggagaggcagcagagttacwctataactcgttaagcagattggcaggtgacaactagatgtcttgcttgggagaggagagaccgaccatctgtaacttacctgatgccacaagcaaatgatctctctgggggcctagtactgtaaggctctgtcttagcaccttcccagaagaagcagtttttgtttagatagatagataatgaggatacatagatggagataaataggtatgaatgactgtagcaatcaagaatattttgagggggggatgttattagaagaaagtcaaacagggtacatttaaaaaaatactgccttcaagataaaaggaagtatttcaaatcaggaatattggttatggcattaaatgaaatgaatttgcagaggccaaa

SEQ ID NO: 50414 - DNA, 1804 bp, Homo sapiens
tggtgtgggcaaggtttgtggttgactggacggatgagtcccctacctccaattgactaaggtaagagaatacacccaagtggagggtgtattttggtgcagacatgaagaggtcatttaggacaggttggtttggaggtatctgtgggacatgctggtagagatgcctggacggagggtggatgcatgggtctgaactccagggaagagatcttggagaccccagcactgatgcaaattgaatttctagaagtgggtgaggtgctccaagagagagcaagtagggggccagaaatgaagattcagggaagtctggggcacagcacccccttggcctgagcaaggggagcctacagccattccagctcttcagacacccctttgccatcctctctggagctccaactttggtaagcagaagaactaccacccaccatcactccctctggcctgcctctgtggggagcaatgcattccctgggctcctccctccctgcccttgtgcattctcttctctatttgctgtcaaggtttgcctgcctgtgggcttgctttcctttctctccagaaacactaaaaggggcagagagaccgcccaccatcccccaccacccaccataggagcatgaaacgataggagctgctgaggtgcagcctggagaccccttgggtgccttggcatctgtccgcttcctcagccgctgggtgctcagccccctgctagccccaggcctttcagagctgatggccttgttccgcttgttctccagacacggtttaggtaatgcacattcttgtgaccctgccacagtgtcttagacttgaacttctgaacactgggctctgtggaaacctctcagccctgagtagctggcactttattggtgtttctctcccctcttttgaagaagggatataatgctttcctttttgcaggatgggttttttgccaataacaggaacatgcagaggctgctcagagcagttttggttggtagtgaagttggaggatgtggaggtgagggggattgcagcctggccagcccatttgcatgggtcctcacctcctttttggtgttattgttgttgtaataaatgcaagacagcgttagtctttgttgacaacttgggtatcctctatcctctcttccacccagaccctgtctccttgaactggaaatctctctttttcttaaaatttggattctcatgtgaagtttagaatctgaattagagagaggctgctctgagctctaggacaaaaaaagggggaggtttcctgccctaatttggaattaagggaatttgggaaaagccaaagcaacaatgttgtttcagaaatatcaatctctcaaagcatttctccaraattgaaatatatttcaattatggaatgaaaatgtatccatgggaatgatagagggtttggtttgcctaaaaataactctgtagtcaaggttaatacagctatgtaataagttaatcaagaaaggaaagttttcatatagaaagcactttaaggaattactccaaactgtcatagcatctactctgagattttccagttgctttcagggtgatttacttaccagcactttggaacttactagtataaactgtagccttctggtataaaatttataccaaaaagaacagctgtgtacaaagaggcaatctgcattctcatgatgtaccattccacctgataactgggctttcattggttcattcctctgcctccagcccttgaacatgagccaactcagatagcagggcagccattcccttcccaggactcctctgg

SEQ ID NO: 50415 - DNA, 584 bp, Homo sapiens
gaaaagttccctattttcagtcctcttccttcttctcactcttatgttgaccagttatgtgaattcttgagccttttgagtgtctgtagaactaatcaatacatgtgcttttgaagatacttttctctaccatgactcattactcttaatttaaatcttctctttgatatgtcatttacatgtattgcatccattttctatcttgatacattttgattagagtcaacagctctcttctggcttaattatgggtagagtttgtgctgaatttctgatttyggttcacgttgttttgagtaaatttcaaaaaagaaggtgagggtaatatgtgtttttaccattctgctttggaattcctactgctattccatttaaaggttctcaagaaagaaatatctgtcctcttccctaaacctttgaccttccaaaacactcactgccaggctattttctacagcatgtggagtacctgacatcaatacccagttagccatttaagactacagtagtggcaagaccatgtgtgcacacatcacagtgtcatagtatttgagtgctcatttctgtctttcatgagtggatgc

SEQ ID NO: 50416 - DNA, 1280 bp, Homo sapiens
ccaaggagacacgatgactgaatgtcacctgggatcccgggtgggagcctgggagagtaaaaggccgttggagcaacgaataaagtgtgactgaagcgtggacatgggttaagagtgatgcatccgtgcgaactcattaactgtgacgaatgtaccgtggtaatgaaagaggttagtgacagggaaacgggacaggagctgggaggactckgtacagtcttcacaccttctcagaaaacctaaagccatgctaaactggaaaagtttattttaaaacataggaaacggtgggtgttgaggttgcagaatcagagatgaagagctgtaaccctaaaactttatttcccagctgaaattggatgttttacaaaagaggacgctggggctggtacggctggccttttcccaccctggccaaagtgctttcaccccaggacaacgtctgtgtgcactgagctctagggtctttttggtgttttagttttttgcttttatgtccccaaaataagacatgtctgtggtttaaaagtgtagagtataaaatacacagtggggaggaaaagaagtttcttctttgttattttggccacaatgtctctgtgttagccctcaaaggcagccgtggtcacctgctctaaaaggtctttccaaagatagtctctgctgggcagggtggcgtgtgcctgtaatccctgcgtcttggaaggccaaggtaggaggatcgcttgagcccaggaggtcaaggctgcagtgagtcatgatcgtaccactgcactccagcctgggagacagagctagactctgtctcaaaaaataaaaataaaaaactccgagatagtccatacaggaacaagtgcacacacatgcaaacatacagacatgcatatgcacatatatgcacacacacacacatgcacacatacagaaaaatggtagcacacttttttatatagcatgattcttccaagttgggaccttacagaaccctcattatttttaatggcttcagctcgtgctactgtataggggcctcataatttatttaagctattcgctatcaacagacatttatcttagtcttttgttacaaatcacactgtaatgaatatctttgttcagacatccttgcccacattacagcattatttttaatgtctgtttgatatgcgatgagaatgatgtacaataactcatataatgcatcctctattttaaacgtctagattgtctccaatgttttccaccattacaaacaatgctgttacaatataaatcttcac

SEQ ID NO: 50417 - DNA, 538 bp, Homo sapiens
tttaaagatatttagccccatatacttcttgaatctaaagtcatacaccttgctcctcatttctgagygggaaagacatttgagagtatgttgacaattgttctgaaggtttttgccaagaaggtgaaactgtcctttcatctgtgtatgcctggggctgggtccctggcagtgatggggtgacaatgcaaagctgtaaaaactaggtgctagtgggcacctaatatcatcatcatatacttattttcaagctaatatgcaaaatcccatctctgtttttaaactaagtgtagatttcagagaaaatattttgtggttcacataagaaaacagtctactcagcttgacaagtgttttatgttaaattggctggtggtttgaaatgaatcatcttcacataatgttttctttaaaaatattgtgaatttaactctaattcttgttattctgtgtgataataaagaataaactaatttctatatctctctttattaatgaattatagcatctaaaacctcaatacaattacatacaagac

SEQ ID NO: 50418 - DNA, 646 bp, Homo sapiens
atgtaaaatcactgaattatacataggatatttttaccttcagcgataatgaaggtgatcaggtttttttagtaacttctgttttaggctagttgtgttaatgctatttagttataatttagattaaaattgaaaagttaaatgctttttcatatttacatgtcctttttttgtaattttcctgtttaagcctttgcatatttttaaatcgtgactttcaatttcttattgatatataggatatattttagacacttgatttgttataattatgaatatatcacaatcacttggcaaattgatattttttctcttactggtgaattttgattaatagaatttactcattttaataatcaacaacaaaaaactttgtggtttgttgatcctttgtatggattttggtgtctcaatttcattcagtactgctctgattgtagttatttattttcttctactaactttggggttagtttgtagaaatctcagctgcttacatcttcagaaagggtgaggccgggckcagtggctcatgtttgtaatcccagcactttgggaggccgagtcgggcggatcatgaggttgggagatcgagaccatcctggttaaccccgtgaaaccccgtctctactaaacaaaatacaaa

SEQ ID NO: 50419 - DNA, 590 bp, Homo sapiens
tctctgggcacttgcccatgccggtacctactcctgagacactgtctacctcgctaagcccatcttcttctcaccttgtgtctcacctgagacatcactgactttaggaggtttcctgacccatgtgtgttccccatctcagcacccagcacctgcctcatgttcaccagggtacatgtcttccctccccgccaggctgcactgagagctcaatgagggyagggaacatctctgttccccatcttgttagaagctatctccccagagcatggtccaaatgtggtgttaagaacagaagttatcacaaagaagtgagaaagtgaaggggaaatggggagagctgtaagaaaggcatgggggagaaaaaggaaagaaggccatgttcccaggatccaatgccactccctggggaggcttctctatcttagctcagccctcagtcactatcaccctccctggtcttgtcagatttgaaatatcttcttcatttacaagagggccttatctatcttggtcacctctgtattcccagcccctactgcggacttggaacatagtaggtgcccagtaaacatgggttgaattaatta

SEQ ID NO: 50420 - DNA, 590 bp, Homo sapiens
tctctgggcacttgcccatgccggtacctactcctgagacactgtctacctcgctaagcccatcttcttctcaccttgtgtctcacctgagacatcactgactttaggaggtttcctgacccatgtgtgttccccatctcagcacccagcacctgcctcatgttcaccagggtacatgtcttccctccccgccaggctgcactgagagctcaatgagggcagggaacatctctgttccccatcttgttagaagctatctccccagagcatggtccaaatgtggtgttaagaacagaagttatcacaaagaagtgagaaagtgaaggggaaatggggagagctgtaagaaaggcatgggggagaaaaaggaaagaaggccatgttcccaggatccaatgccactccctggggaggcttctctatcttagctcagccctcagtcactatcaccctccctggtcttgtcagatttgaaatatcttcttcatttacaagagggccttatctatcttgstcacctctgtattcccagcccctactgcggacttggaacatagtaggtgcccagtaaacatgggttgaattaatta

SEQ ID NO: 50421 - DNA, 590 bp, Homo sapiens
tctctgggcacttgcccatgccggtacctactcctgagacactgtctacctcgctaagcccatcttcttctcaccttgtgtctcacctgagacatcactgactttaggaggtttcctgacccatgtgtgttccccatctcagcacccagcacctgcctcatgttcaccagggtacatgtcttccctccccgccaggctgcactgagagctcaatgagggcagggaacatctctgttccccatcttgttagaagctatctccccagagcatggtccaaatgtggtgttaagaacagaagttatcacaaagaagtgagaaagtgaaggggaaatggggagagctgtaagaaaggcatgggggagaaaaaggaaagaaggccatgttcccaggatccaatgccactccctggggaggcttctctatcttagctcagccctcagtcactatcaccctccctggtcttgtcagatttgaaatatcttcttcatttacaagagggccttatctatcttggwcacctctgtattcccagcccctactgcggacttggaacatagtaggtgcccagtaaacatgggttgaattaatta

SEQ ID NO: 50422 - DNA, 590 bp, Homo sapiens
tctctgggcacttgcccatgccggtacctactcctgagacactgtctacctcgctaagcccatcttcttctcaccttgtgtctcacctgagacatcactgactttaggaggtttcctgacccatgtgtgttccccatctcagcacccagcacctgcctcatgttcaccagggtacatgtcttccctccccgccaggctgcactgagagctcaatgagggcagggaacatctctgttccccatcttgttagaagctatctccccagagcatggtccaaatgtggtgttaagaacagaagttatcacaaagaagtgagaaagtgaaggggaaatggggagagctgtaagaaaggcatgggggagaaaaaggaaagaaggccatgttcccaggatccaatgccactccctggggaggcttctctatcttagctcagccctcagtcactatcaccctccctggtcttgtcagatttgaaatatcttcttcatttacaagagggccttatctatcttggtcacctctgtattcccagcccctactgcrgacttggaacatagtaggtgcccagtaaacatgggttgaattaatta

SEQ ID NO: 50423 - DNA, 637 bp, Homo sapiens
ctctgtcttctgtttgggtagtgcctctcctcagcatctgcctagctggcctggatagctcctgaactgcctcctgcaggaagacttctgtgattgctgggaaaaggagaaagtgtgtctgccccactgatggaggctgtaccctctagtgcaggcaactccactccttatacacctggcaaatggctccccctccacctcgggttgtgacccacccagcttatggcctggggccctctctagacatatttttttctgagatgagcacagaaatcacagctttatatgctgtctgagctgctatggccctcctaggaggaaggcagggattattgttcccatcccactgatgggtaaactgaggccctgaaagagakgtacctgcccaaagtctcacagcagcagtagcagacccagtactagaacctaagattcctggtatcctacttgggaatctctgtcctgacctagctgtctccccagtcccatctgctctcagacccagcccctggggaccaagagcttttattttttatttatttgattttattttataatttttttttttttttgagacggtctctactaaagaccgtgagagggtgggtgagaggcctcacgtgagaggccagggtgg

SEQ ID NO: 50424 - DNA, 620 bp, Homo sapiens
ttgctcctgccatgcccattgagcatgaaatagtccccaagggtagaaagaaaggaaaccaaaaagaaaaaaacaataataaaactccagcatgtacacacacacacacacacacacacacacttgcctaaagtgaatgagcatgcagagccagtattattctctttgcacaattaaaagattcttgtatttgcctttggttactgaaagcttaatcatttcagagaatcagagacttcagcactttcagctcgtgtaaatgagaggcactatcaatstgtttttaaattggttgtgggtcttctgaggtctactatttcagcttatacccaatgcctagaaattttccaaagtcccttgttcagcagtatacacagccagactggtttgatcccaattgcaattagtgataaatacatcataagattaaaaaatattttttaaggcttagagatttaggaacaaatacactccaaaaaacaagagaaacactcaatctctagaaacatcaaggtcctgagttaaaatctacctctttatagttttcagtcaaattgtaagtcctggtgcccttttttttctatagttgacttaattctgtatctgtggtcccaatcctt

SEQ ID NO: 50425 - DNA, 583 bp, Homo sapiens
gcccacacgggctgtgttctcggttcaccctcagagctacctaggagggaacccatgtagttcatgaatgtcattacccccattttatggataaggaaactgaggctctgggggcagccagcaaggggcaaagccctgcccccacctggcagcagctgtctttgcagataggagcctgcagtgcaggggagagaagggacccgtttttcccgtctgttgccccgtcgtcaccyagagacccagaggtgctcgatgctggcagcaggagcacctgtggggccccagggccaggatgccctcccagactctgccacccacaccagtgactccatcttggaggtgggagcctgtttcctcctctataaaatggggatgaggccactgaagcagttgaagggaagtttcagtgaccacccgtggccagcgccgagccacgcaggctggggcacccggggactccatgtgagtggccagggttggaatcctgatgatcctggggacctagggacacctgcaggggactgcagctcccctaccgcctcccagctgggtggggcgtctctctgtgctccccccattacgg

SEQ ID NO: 50426 - DNA, 583 bp, Homo sapiens
gcccacacgggctgtgttctcggttcaccctcagagctacctaggagggaacccatgtagttcatgaatgtcattacccccattttatggataaggaaactgaggctctgggggcagccagcaaggggcaaagccctgcccccacctggcagcagctgtctttgcagataggagcctgcagtgcaggggagagaagggacccgtttttcccgtctgttgccccgtcgtcacccagagacccagaggtgctcgatgctggcagcaggagcacctgtggggccccagggccaggatgccctcccagactctgccacccacaccagtgactccatcttggaggtgggagcctgtttcctcctctataaaatggggatgaggccactgaagcagttgaagggaagtttcagtgaccacccgtggccagcgccgagccacgcaggctggggcacccggggactccatgtgagtggccagggttggaatcctgatgatcctggggacctagggacacctgcaggggactgcagctccccyaccgcctcccagctgggtggggcgtctctctgtgctccccccattacgg

SEQ ID NO: 50427 - DNA, 503 bp, Homo sapiens
aaattctcaaagcaaagaatgggtggctgggggcactgtcacgtgtcatgaggcttcttagcattgcacccatcccttgtttatgaatgtggccattaacaataaagaggtatctctttgccaatttttcattagctggaaagataaactggtctcaataaaacaataaagccaacaggtttcccatagggcattactatgaaccagcgccatttaataagcaaatattctcattctgtttgtgtagctttgtgtttgtgtttcctttgtgcaaggattgttactagagataagaaatcaaggcatcattttggttatttatttccatggcaacacgtggattcaagtaagtgtccttggcattgttgctatttgttgtgtgcaatttttacagacatatgactcttctaagtaagaaaggttaattccctgtgatgatgccktatttgggtgtaaatatttgaggcagaaacaaggtgcacttttggctctttgaactcaca

SEQ ID NO: 50428 - DNA, 512 bp, Homo sapiens
tgtccaagattgactagaggccccacactcctatttcctcttctgtggccatakgttaggcactgtgggcacccgacccagatccctggcctgtgcacccatctcccaaattcatagagcatgactcccagaagctcatagctgtcctcttctcctgaccactgcccttagctcaggatttctcagccttggaaccattgacattttgggtccagattttttttttgatgtggggtctagtctgtgaattgtagtatggtcagtggcatccctagcctctacccactagatgccagtagcccccacacccagttttgacaagcaaaaatatctccaagcattggttgagaacccttgccttagctgacgggaagccttttctgaaacacattggaagttatacccttcttctagggtgctcaaaggccaataactgactgacgaggagtacagaagactagaccctgtcctcagaataggacaattctgatgctattcactctctggagttt

SEQ ID NO: 50429 - DNA, 512 bp, Homo sapiens
tgtccaagattgactagaggccccacactcctatttcctcttctgtggccataggttaggcactgtgggcacccgacccagatccctggcctgtgcacccatctcccaaattcatagagcatgactcccagaagctcatagctgtcctcttctcctgaccactgmccttagctcaggatttctcagccttggaaccattgacattttgggtccagattttttttttgatgtggggtctagtctgtgaattgtagtatggtcagtggcatccctagcctctacccactagatgccagtagcccccacacccagttttgacaagcaaaaatatctccaagcattggttgagaacccttgccttagctgacgggaagccttttctgaaacacattggaagttatacccttcttctagggtgctcaaaggccaataactgactgacgaggagtacagaagactagaccctgtcctcagaataggacaattctgatgctattcactctctggagttt

SEQ ID NO: 50430 - DNA, 512 bp, Homo sapiens
tgtccaagattgactagaggccccacactcctatttcctcttctgtggccataggttaggcactgtgggcacccgacccagatccctggcctgtgcacccatctcccaaattcatagagcatgactcccagaagctcatagctgtcctcttctcctgaccactgcccttagctcaggatttctcagccttggaaccattgacatttygggtccagattttttttttgatgtggggtctagtctgtgaattgtagtatggtcagtggcatccctagcctctacccactagatgccagtagcccccacacccagttttgacaagcaaaaatatctccaagcattggttgagaacccttgccttagctgacgggaagccttttctgaaacacattggaagttatacccttcttctagggtgctcaaaggccaataactgactgacgaggagtacagaagactagaccctgtcctcagaataggacaattctgatgctattcactctctggagttt

SEQ ID NO: 50431 - DNA, 1796 bp, Homo sapiens
ttttcatttttgttccttttgcctcactggcatgaggcagattgattagtagaagaaaaggcatgcaaatttactgaacatgtatacattggaactttcagttcctcatgtcaaaatgctatacttcggatattgctttctgagccccaacactggtgtattagtctgctctcacactgctaataaagacatacccaagactgggtaatttataaaggaaagagatttaatggactcacagttccacatggctggggagacctcacaatcatggcagaaggtgaagggaagcaagacacgtcttacatggcagcaagcaagagagcttgtgcagtggaatccccctttataaaaccatcagatgtctgaggcttattcactaccacgagaacagtacggggggaaccacctctatcatttgattatctctacctggctccacccttgacatacgaggattattacaattcaaggtgagatttgggtgaggacacagacaaatcataacaattggtttaagcatgtgtatgtgtgtgtggttgtcaggggggtgtatagttaataaataaagaataacttaagtgtgtcttaaaggcagaagagcatgtctacaggcagagaggcatgtctacactcactttgatggtgacaatgacttcatcattttcacttgcccaggatcactcctgcgtctggcagctgcactccaattttcctttgcagagggctctttgtctatcttcactccacgtgggttgggtgaggctgaccgcatctctttcctccagcagtggatgcagaaccttggcctctgcgatctgaccaccaacacatcagaggaaaacctgcctgagagtgaaaccagcacagaagcagcagaactgagaaaggaagagacactttgtttatgaatctgtccaaaggaatcccttgaactttccaaccaaataaaccagtagattctgttttcttttatgtgagtttgggctgagtttttgtcaataaagagccctgatgatcatcaagagtgattctggagggggctcctgcagagcaggccacaggcagtctcctttcaaaagaggctacaaaggcctgccccccaattgtccccctctcctcaccccagcttctgtgcacagtgcttgagcttggttccattaaaacctttcccagtactcctaaacctggcctcagattcacatttgccaactacccaggtgtgatctggacaccacgatgtatttccttgatcaattccacaaaattgtgaagagccccatggaattttattcctggccccatgcaaaatacagtgaatggggaaaggagttagcactggatgagaagtttctcttttgggagtgccataatttgtcacaaagtgtgctaatctgaaatgttaaaatcatattatattttaagttcactaaaaagttatctggttaaagagaactcctgtacaaaaatagattacccctttagtggagagcatttcccttcagggctcacggttcccgaacatgagtagagcttctattgcaggtctctgtgactctgcaggtgggctttccatggccgcaagagcacgacgagctcccacatgagatrggcctactgtgccaggcaaggcatgccctgcctgtgtcagtgaaaagccagtggccattgaagacaaacaccccagcttccttgcccctcagatgggacgacaacactgaggtgtgttttacacagtctcccaggggtccccggtagaccccccatcatatcttgtacatcaaaactctccacat

SEQ ID NO: 50432 - DNA, 539 bp, Homo sapiens
gcatctggtttcccaccagcctttccctgtgtccagaatgacatccccttagtgccacaggccagatggtatatcacgggcagcaatttggtgagtgacctttttggcttctggaatattccgaggagcgtggcccggctctgctcacctcttgcgctgcaggtgcccccgacacaggctctgcaggcggatgatgctctgtttctggtgccggtagagcttccgctgccagtagcccctccatgmggcctggaggtacacggcagcctgcgtcctctccagcgccctccggacccggtaggaccgccagcaggcctggatggtgacggcggcccgcttcatctgcaggaagtgccgacgctccagcaccatccggaaccagctctgcagcagcaggattttccgcaccacctcccggtgcagcgtctcctgcagggcttgccgctccgtctccttcaggaagacctggtgggcacggggtcaggtggggtcagctgcactgcccctgacaccatctctgtgcctgggaggtctgcata

SEQ ID NO: 50433 - DNA, 547 bp, Homo sapiens
acctgggagacggaggttgcagtgagctgagatcacaccacctgtctgggcracagagcaagactctgtctcaaaaataaaaacaaaaaagaaaaaagaaatgagatctcgctcggtcacccaggctgaagtgcagtggtgcaatcagggctcactgcagtctcaaactcctgcctcagcctgccaagcagttgagaccacaggtgcatgccaccacgcttggctaatttttaaatattgtatagagatggggtctcgctatgtttcccaggctggtctcaaactcctgggctcaagggatcctcccacctcagcctttcaagtagctgggactctgcgtgcatgccacctcgcttggctggaagggaattttttacaccaggtgaggccttcagggggactgaccttggcgcttgttaaacaagggtggctgagtaatgctcccatagcaagaggcaaacacatgcccagagatgggagacagtctctgaaagggaggacaagtgcaggccacctcctgcctcataccgtaaaggggactgaccat

SEQ ID NO: 50434 - DNA, 547 bp, Homo sapiens
acctgggagacggaggttgcagtgagctgagatcacaccacctgtctgggcaacagagcaagactctgtctcaaaaataaaaacaaaaaagaaaaaagaaatgagatctcgctcggtcacccaggctgaagtgcagtggtgcaatcagggctcactgcagtctcaaactcctgcctcagcctgccaagcagttgagaccacaggtgcatgccaccacgcttggctaatttttaaatattgtatagagatggrgtctcgctatgtttcccaggctggtctcaaactcctgggctcaagggatcctcccacctcagcctttcaagtagctgggactctgcgtgcatgccacctcgcttggctggaagggaattttttacaccaggtgaggccttcagggggactgaccttggcgcttgttaaacaagggtggctgagtaatgctcccatagcaagaggcaaacacatgcccagagatgggagacagtctctgaaagggaggacaagtgcaggccacctcctgcctcataccgtaaaggggactgaccat

SEQ ID NO: 50435 - DNA, 1820 bp, Homo sapiens
gagggtatgcatagaatatatgctgtacacaccatgccatttcatatcagggacttgagcatcttcagatattagtatccaaaattcgtaacccacagtaaatagattcctccaaaagtgggaatcatcatttgaaaaactggcagctctggccatgtaatcttcatgtatttttcaggcaccttacatattagtagggttggtagcttttaaaataatgtcttatttagttctgtcctgactcttggattttaattgcttattgttaatcaaagccacatatcattctcaacttgaatatcgaaaataaaataaacagaatggrtttatttacttctcttcagtctagttcccatgaaatgaaataatgttgtctgatgtcaatccactttcaaaggaattcctccaaatgatattcttggatgtatttctttcttttagaataatttcttaaactaataaacaaccactccaagctttatctgtttcacctaaaggtgtttttaaaaaattccaagagaactgattaacttctatacaccattatggctttcatctatatatttggggtattttttatctgaatttcattagacatttaatttgtgtgtgagagtgtgtgtgtgtgtgtgtgtgtgtgtgtgtgtgtgtgtgtttgtgtgtggtttggagagagtagttaccaaagaaaggtttagaatatgtacaagtctgagatatcatactcattaatattcattcagcaatatttactaagcaactgctctattccaggcactgttagaaacagaaatccctgctctcatgaagtttacatttttccgataatgtttccattccttgcgtagaaagataagtaatatatagtctaaatgcatagatatatgcagatatgaataggtaggtaggtaggtagatagatgatagatagatagatagatagatgtgtagatagatagacagaaaaaatgatggacctccgtatactcatttcattctctactgtattcaatacccagagtttgattcttaacccaagggagaatactgtaaattatattgagctgcacaaatatttgtataggatacaactcagtatgtaattggaccacacaagtctacaaggtaaagaagaccacatagtccctctgggggactgccagtgtgcttggtctgattggtgggaatagacaactgtacaagtggttgtgaaagtgggttggagaaggggccccccaaaaaagtcagcatgagttcaggaaagtggcacatctctgcaacagagtcaggtgtgatggggcaaatagagtgaatgtgaaatcgctctttcagctgcaattatacataatgggttgaatagtgtccacctcaaatgtatatctgcccagagcctcagaatgtgaccgtatttggaattagggtctttgcagatgtaaatgagttatggatctctaactaaaagtatcctaggtttagggtgggccctaaatccaatgacttacaagaacaggagaggacacacaaagaggcagagaaagctatgtgaagacagagacagagattggaaggatgcggtcacaagccagggaatgcacggattgctggagaccccagcagatgggagaggcatggggcaaattctccccaagagccttgggtaggaagtgtagccctgcaaacatcttgattttgggcttctagctttcagaactgcaggagaaagtatttctgatgttataagtcaccagttttgtggtattttattatggcagccttacagaaccaattcagcattacaggaaaatgaagatttttttttt

SEQ ID NO: 50436 - DNA, 1820 bp, Homo sapiens
gagggtatgcatagaatatatgctgtacacaccatgccatttcatatcagggacttgagcatcttcagatattagtatccaaaattcgtaacccacagtaaatagattcctccaaaagtgggaatcatcatttgaaaaactggcagctctggccatgtaatcttcatgtatttttcaggcaccttacatattagtagggttggtagcttttaaaataatgtcttatttagttctgtcctgactcttggattttaattgcttattgttaatcaaagccacatatcattctcaacttgaatatcgaaaataaaataaacagaatgggtttatttacttctcttcagtctagttcccatgaaatgaaataatgttgtctgatgtcaatccactttcaaaggaattcctccaaatgatattcttggatgtatttctttcttttagaataatttcttaaactaataaacaaccactccaagctttatctgtttcacctaaaggtgtttttaaaaaattccaagagaactgattaacttctatacaccattatggctttcatctatatatttggggtattttttatctgaatttcattagacatttaatttgtgtgtgagagtgtgtgtgtgtgtgtgtgtgtgtgtgtgtgtgtgtgtgtttgtgtgtggtttggagagagtagttaccaaagaaaggtttagaatatgtacaagtctgagatatcatactcattaatattcattcagcaatatttactaagcaactgctctattccaggcactgttagaaacagaaatccctgctctcatgaagtttacatttttccgataatgtttccattccttgcgtagaaagataagtaatatatagtctaaatgcatagatatatgcagatatgaataggtaggtaggtaggtagatagatgatagatagatagatagatagatgtgtagatagatagacagaaaaaatgatggacctccgtatactcatttcattctctactgtattcaatacccagagtttgattcttaacccaagggagaatactgtaaattatattgagctgcacaaatatttgtataggatacaactcagtatgtaattggaccacacaagtctacaaggtaaagaagaccacatagtccctctgggggactgccagtgtgcttggtctgattggtgggaatagacaactgtacaagtggttgtgaaagtgggttggagaaggggccccccaaaaaagtcagcatgagttcaggaaagtggcacatctctgcaacagagtcaggtgtgatggggcaaatagagtgaatgtgaaatcgctctttcagctgcaattatacataatgggttgaatagtgtccacctcaaatgtatatctgcccagagcctcagaatgtgaccgtatttggaattagggtctttgcagatgtaaatgagttatggatctctaactaaaagtatcctaggtttagggtgggccctaaatccaatgacttacaagaacaggagaggacacacaaagaggcagagaaagctatgtgaagacagagacagagattggaaggatgcggtcacaagccagggaatgcacggattgctggagaccccagcagaygggagaggcatggggcaaattctccccaagagccttgggtaggaagtgtagccctgcaaacatcttgattttgggcttctagctttcagaactgcaggagaaagtatttctgatgttataagtcaccagttttgtggtattttattatggcagccttacagaaccaattcagcattacaggaaaatgaagatttttttttt

SEQ ID NO: 50437 - DNA, 546 bp, Homo sapiens
ttcaggtaggaagtcaaggaactctgtaatgaaggacacaacaggctgctgtccattcttgagtgatgcttagtccaaatatctcccggttatttgatgcaggaaattcccatggtaacataatcctcattcttaaagaaaaggaatattttaagaaataaatatggttttgcaatgattataacagttatttatactctgactcaattgctattagcgaatatgaaaatagaaggtgaggggatggaaaatgatctggaaacattataaagaaagaagcactatagagggagtagctggaggtgcagggtgccttagatctactgaaggtcacttagaaatttgagaaacagaatggaaggaggggatttcaagaaatgcacatcatgaattcagtatgttgccaaagaggaasgtgccagtcatgctaaccttgtgcttcactatgttgccagaggttctgttgttgggtcttagaaagtgattccccaaaggctggctctttaaacatgtagaggcctttgaaggtgtctcagaaccaaggtc

SEQ ID NO: 50438 - DNA, 1964 bp, Homo sapiens
tgccttaaggaaggatggctctgtggtgtcattcaggtaccagaactccctgtggaatcagctgaggccagactccagctaggtccacagcttggcctggcttctttcccacccctcctttgcttcctgaacaacctcacattctccctgcgagcacccccttgatcaatcaaggcaccagcgttctagacactctgattctggagaaccctaacagagacttctgagacctcaacactctgagatttttttcttttttcttttttttttttcaaacagggtctcactctgtctcaggctagagtgcagtggtacagtcatggcactgtagcatcaaactcctggacttaagtaatttgcccacctcagactcccaaagcactaagattacaggcrtgagccaccgtgctggccccactcagagattattaacggcaggtgtaacatctttgccataagccatcccacctctgccccacatggagggtcccactgtctcccttcccagacctgccttggaacactgaggagcctagggcccaggacctgactcactcctggatgttttgttcacactcttttcaaaaaacacattctcaatagctttaatttaatcaaaacattcttgactaagatcattaaagcctctgagagaggcatttaattctaaattcaccatatccacggcatagcagttgagtaactgaaaaatcaactttatgtcataatagtttgttagaacgtttgtttactcttcatctgagacatgctaattaaaacaagaggccttcacaagcaatccagttagcaaacaggattggttaatagataaggaatggttgttaattacagggaagcccctccctgcccacatggattgggttgttcaatggggtccacggaatgcaacctttggttcatctcttccctcatcgaagacacttaggaacatctctgagaaacacttaccttggtcgggtctcgcctgtcaccagatctttctgaattcatcttgaagggaagtgattcaggacccttgtggatttctgtttccctagggcggagctattcccactctcccaccaccttgcctgttagcatgtggtcctaactcctgctgcactggctcctcacgcaggataaggagctgttgcagaaagtcccctgctaacaactggccctctgactgctgtaggagacctggccagccctactaccttcccacagacacacccccacatgttccagaagccagtcaatgggggcagggggcatgctccttactatgagttcaggaacatctccaaacatagacaccaaggggcccaggatgcatttgttaagtttcaaagtatcaaaccccttacccttccaacacggtttccactctgtctggcctttttctgcctttctgcataattgcactttcacggacaatttttcatctgcttccctccctcacaagtctaagaccaatcacccaatatcctgctttagtcctgcccagcaacctctccttctggcatattcccctcccttcagagccctgggtattcatgcacatccggccctcagccaggacatatactccctgctctccccagcccccaactcaggaacagggctcctaaccttcccgtagactccaagatgttagaatgaaaagacatcttacagacctcattttaaagtaaagaaactgaggcagagaggcagtgatggaggcgttgtcatatttctggttggaaggcgcaacccaaggccacgttgctatttttaatgtctaatccacattacaatgtacataagtcatgagctgattccaaccgtgttactcatttttgtcatccctgtgttgagttagttctcttatgcagagtttcagccttccagaagctaaaagactaatacagggagctgtcatgacaacgacaccatggtagcacttaatgaaaacttgagtt

SEQ ID NO: 50439 - DNA, 579 bp, Homo sapiens
ggctggaatcagagactggttttgataaataacttcagattaggggcacaaaaagcactccccacaagttcttccagtaagcttctctttaaaaaaaattaataaagatatcaaatttcttttaattaaactgagacagggtcttgctttgttgcctaggctggtctyaactcctgggggcccaagcaatccgccctcctcagcctgccaaaggactgggattacaggcatgagccacggtgcctggacccagtaagcatctcttgacagctagcgttgagacagcaacttttcctcagttcattttttttccccagaaactacctaaacccagaggtactctcttgcctgctatttctatgaaatatgaaaatgctgattattaatttacataacaatacttcctgtacattcacctacctaaagttttatgtctattcccatccaagtggttttatttatttatttttatttttttgagacagagttttgctcttgttgcctaggttggagtgcaatggtgcgacctcggctcactgcaacctctgcctcctgggttcaagtgattctcctgcctca

SEQ ID NO: 50440 - DNA, 579 bp, Homo sapiens
ggctggaatcagagactggttttgataaataacttcagattaggggcacaaaaagcactccccacaagttcttccagtaagcttctctttaaaaaaaattaataaagatatcaaatttcttttaattaaactgagacagggtcttgctttgttgcctaggctggtctcaactcctgggggcccaagcaatccgccctcctcagcctgccaaaggactgggattacaggcatgagccacggtgcctggacccagtaagcatctcttgacagctagcrttgagacagcaacttttcctcagttcattttttttccccagaaactacctaaacccagaggtactctcttgcctgctatttctatgaaatatgaaaatgctgattattaatttacataacaatacttcctgtacattcacctacctaaagttttatgtctattcccatccaagtggttttatttatttatttttatttttttgagacagagttttgctcttgttgcctaggttggagtgcaatggtgcgacctcggctcactgcaacctctgcctcctgggttcaagtgattctcctgcctca

SEQ ID NO: 50441 - DNA, 603 bp, Homo sapiens
ccaaggatgtcttggctgtagggaaggctggccagctgacgaagggcccagcttgattccaggccacccctggctctgggcccagcactagtaggtgttgacttaaaaggaagagtttgaggcgtaaaatataaagagtttacttgagccaaagtaaggacagctgcctggaagactcagacccaagtaagcttggaaatgagcttcattgggtctttgttataagaagttttttaaaggcaaaagcggggacaacaagtgggccgatataaatccatcaggaattctcattagtttatagaaataaccttgaggctgagtacggtggctcacacctgtaatgccagcactttgggaggccgagtcgggcggatcacttgaggtcaggagtttgagaccagcctggccaacatgccgaaatcctgtctctactaaaaatacaaaaaattagcagggcgtggtggtggtgcctttcccagctactcaggaggctgaggcaggagaatcacttgaaccagggaggcagaggwtgcagtaagccaagattgcgccactgcactccagcctgggtgaaagagtgaaactccaccgcaaaaaaaaaaa

SEQ ID NO: 50442 - DNA, 603 bp, Homo sapiens
ccaaggatgtcttggctgtagggaaggctggccagctgacgaagggcccagcttgattccaggccacccctggctctgggcccagcactagtaggtgttgacttaaaaggaagagtttgaggcgtaaaatataaagagtttacttgagccaaagtaaggacagctgcctggaagactcagacccaagtaagcttggaaatgagcttcattgggtctttgttataagaagttttttaaaggcaaaagcggggacaacaagtgggccgatataaatccatcaggaattctcattagtttatagaaataaccttgaggctgagtacggtggctcacacctgtaatgccagcactttgggaggccgagtcgggcggatcacttgaggtcaggagtttgagaccagcctggccaacatgccgaaatcctgtctctactaaaaatacaaaaaattagcagggcgtggtggtggtgcctttcccagctactcaggaggctgaggcaggagaatcacttgaaccagggaggcagaggtkgcagtaagccaagattgcgccactgcactccagcctgggtgaaagagtgaaactccaccgcaaaaaaaaaaa

SEQ ID NO: 50443 - DNA, 526 bp, Homo sapiens
tattacccatatgtctcacctatagtcatcttgggtcactttattttatttatttaacattttattctaattttccttttcttgacactgttgctaatctgtggatgactttgggcaggtcctttatcccctacattagttatctctctgtattagttatctactgctgtgtggcaaattacctccaaatttagcagcttaaaacaataaaggcttattatctcagattctttctttttatttcctttttaacaaataggatttgcaccaggatcacataatttctaagggttaggaatctggaagctgctttgctgggyggtttcagctcagggtctgtccttgctcttcccactggcctgcttacaattcccatcaccagccactacctttaataagggcactgacactaccagaaaataaaatacttttggaagagacatttggaagaagaaaagttaatgcaatgtacgattgtcagctcctagcgctcccctccaaaccagctgaacatgttttggctcct

SEQ ID NO: 50444 - DNA, 526 bp, Homo sapiens
tattacccatatgtctcacctatagtcatcttgggtcactttattttatttatttaacattttattctaattttccttttcttgacactgttgctaatctgtggatgactttgggcaggtcctttatcccctacattagttatctctctgtattagttatctactgctgtgtggcaaattacctccaaatttagcagcttaaaacaataaaggcttattatctcagattctttctttttatttcctttttaacaaataggatttgcaccaggatcacataatttctaagggttaggaatctggaagctgctttgctgggcggtttcagctcagggtctgtccttgctcttcccactggcctgcttacaattcccatcaccagccactacctttaataagggcactgacactaccagmaaataaaatacttttggaagagacatttggaagaagaaaagttaatgcaatgtacgattgtcagctcctagcgctcccctccaaaccagctgaacatgttttggctcct

SEQ ID NO: 50445 - DNA, 508 bp, Homo sapiens
ggaattttgtcattaatatacactatctgtaaaaaatgaatccatgcatttatttagaaatttgttcattaatttttcccctttaaaagtaatgtatgcttgtttttgaatcagtggatttctaaatgaagtacagatgttaaaagaataaaaaatcttaaatagctacattgtctttcacatggtagctataaacataytataatttataattaagatttatttgtcctctaagaatggcttttaaatgtcatttgaaaaaaaaatcaagagtgctatgtggagaataaaacaatgccatctatttcacaatttcagatactatttttcttactctatggcctttaataccatgccagtatatggggaacaagggtatgtgtgaatgtgtattattactgctctaggatactgtagcttctgtgttttgttcatattttatctaaaggcaaatcacaacaaagtgcaaataaaaaaatgttaccttcattctataaatattcatcaa

SEQ ID NO: 50446 - DNA, 637 bp, Homo sapiens
aacaactttaccctctcatacttcaacaagctccagaaaactgaatctgctttgtaagtagcttcagttaatgaggattattaataactaatcaacagctggggagtgctcacaaggagaagcagcaggcagcctgatttctgccagcttctcagaacaaaacaccccaaattccattaatataacagaagatccttaaaaatgtggtttccagaccctaggatttgcagagatcctctcagggtattcacaacatcaaaactgtttgcataatgatactaagatattatgtgcctttccactatgtttacagttaaactaatggtgcaaaaacaacagtggataaaactgctgcccctttacaggaatcaagatagtagactcaaattacactagaagtcattgtattcttcagggaggagggagatttgagccttttattcacaaaagtcccttttgaagcagtaaaaattctagtgtccacatttgcatatatatccttttaatattctgtgtgacaggaaatacacataaaccatgctgtacttgtgtctcacaacatctcaattttgtctgcgctctttgagttgtgagctacagtagccacttttttttcaaagaacatmatttttacttg

SEQ ID NO: 50447 - DNA, 633 bp, Homo sapiens
aaaggctgacttaaactgttctccacagggaccgctggccattcccccaaggcatgggcagttccagttaatgtttccatttggcagtatcaatcctagaacaggaagatagagagatgttctctaaagtttcagaaaatacaaaactagtccagtcctcacaggctactgagggggtgcagaacaggaactattgttgcctatggacccacacctcgatttggattaggtttaaagcctagcacatatccagcattccttggcccacctgggagagaagccaccaatgacatatttctccacgtgtgacactaatttattctaagccacctctcagtgctctgaggctgtgctccaagaattaaataccgggacccatttarcccaaagaagaggagatcacttggatggttagtgaggagctttttgaaagcccaaacactttaaggaactgaggtattgatctcctctttccaatccccctccccatatggatgatcaggaccaccccacccccatgctccctgcccccctgagcccctcttgccctgcagctgctctcagaagctcagcatagcctggggactggtgaaaaggaggaggttgctccttatgtactgacgaagaaagatg

SEQ ID NO: 50448 - DNA, 487 bp, Homo sapiens
ccacacaggccagcagctcagtgtgcctgaactggttatgtgaagacacccactgacaccaggattcccaagtatttcttgtttgatgagcagagaaggacagtattgcatactgaaaatgctggagcttcgtgtccctgaagacagtggtgtgtgattggyggtttcaggtcactctgattgtatattgactctgtccttttgatagcagctgccagataccacttgcagagtttacatcctggcatcttctccgccaggtcagcatgacatttttgttcaaagggagtcatcccatctcggcctgctgcataccactgggctctggtggcttcgactctttccctacctattggaacctctgagctgttccatttctttcccgatatgtgcgtggctccattcattcaacaatgcagacacatttctgtgagttgcatgtcagatatccaacccccagcaaaatcaggaatgctaccttaaaaga

SEQ ID NO: 50449 - DNA, 487 bp, Homo sapiens
ccacacaggccagcagctcagtgtgcctgaactggttatgtgaagacacccactgacaccaggattcccaagtatttcttgtttgatgagcagagaaggacagtattgcatactgaaaatgctggagcttcgtgtccctgaagacagtggtgtgtgattggcggtttcaggtcactctgattgtatattgactctgtccttttgatagcagctgccagataccacttgcagagtttacatcctggcatcttctccgccaggtcagcatgacatttttgttcaaagggagtcatcccatctcggcctgctgcataccactgggctctggtggcttcgactctttccctacctattggaacctctgagctgttccatttctttcccratatgtgcgtggctccattcattcaacaatgcagacacatttctgtgagttgcatgtcagatatccaacccccagcaaaatcaggaatgctaccttaaaaga

SEQ ID NO: 50450 - DNA, 572 bp, Homo sapiens
aaaaattcaaattcatttgtactctggcttcttcaagagaaatgcatctgagatccgtcacacactgtgacgaaccctgttatggccaccttcaaagactgcatccttttcgatcttggatgactttcttgccctagacccaagtgaccaaattcattattgatgtgttggcagatgtttgctcatattcttccagattaaatgggatttaaatgtgatcattcaggtaggctgctttgartttgaaggagcatgtttctactctgtggtgaagaggggctctgtgcaggcttgagaacaagagaaaaagttaaaagcattttacaacacccttttctttcttgttgatttttctgaagctattaaaaattttttggactgctttgaggaggcccattcctccctcaaatgtcagccctttttctcaattcagaatttctggtattttcttttgggacaaatataattcagaactgtgtctatacaatccagtgaagtggggaattccagataactcaaacaataaatgatgtttccctcaatgatccaaatattttagatgaatgtgttaa

SEQ ID NO: 50451 - DNA, 622 bp, Homo sapiens
tcctgattctttgctctatccattccccctagttagccagaatctggagataattaaaaggttcaccaaatcttagagagttagctaattctggaggaagccagaaagataaatagaagtaattagctcatgtctagacagctctagagttgtctcaatggcagtcatcctgatgatgccatcccttttgttcagatttcttaagggagggtctaaatggatctgtcatatccctggttgtgttttgttcagagtagcttaatgttgactgggaggtgtgtttctaattcaaatggaaaatcatatactatcagtctagagaaaatgtaaactgttcatcacttaggaaatgtatttcgagctctttgaatttgtacatttctctctaatgaacgttaagcctgggatttatatattcctttccttgcayctgagcacatgcacttccccagtatacatgttcacgtctgtgtttgcacacgcacacagatcatacacaaatatgcacatagcattgcatgatcacccttatacacgcacatactttaaacacacacacacacatcttttgattatactccccttctccaatggcaggatatgtagacatataagacatatg

SEQ ID NO: 50452 - DNA, 613 bp, Homo sapiens
tcattcttttttttttttatggctgtatagtattgtgttgcgtctatataccacattttctttatccattcatctgctaatgaacatttaggttgattccagattataatgtttatactgtgaatcatacatactttatgtacaatgtgtagcatagacaattcctcataatagaagctcaacaaatgttggtactataccattscctttcctgctctccttttctcactcctccccaggtacagagataacagaggtaactaaaatacaatccttgttcttgaggggccaatctagtggggaaatacatttgtaaggagagatactccaatgaaatttggtgtctccagagaagaatgcacaacctgccatgagaaaccagaggaggaagcagctgatattctaataaaattaaagctggagacattttaaaagtagtatagctcagcttcctcttttacagatgagagaatccaggtccagataagtcatgtgacttattcaaggtcatggcacatttgtggcagagctgggtataaagctcagaactcgatttccagcttcttgctttgtcacacagaatatgcaacagggattgaaacaggaaggaata

SEQ ID NO: 50453 - DNA, 2122 bp, Homo sapiens
gggagaaataataactcaccggtcttgtgagtttgagagcaagagctcagcaagcgtggctcattgctctctcccttgtccttgggatctaactgccaatagagagcacattcactatttcctcctagtatcataagaagtaaagatctcatccatgggtggggagacacatggttgtccggcactccctgtgactgaatggctaaaccaaattttgacattcgctattgaaagattcattttcctcacaaacctaagtcacattttcctaatgtaacaccagcagtcatacaaccaatagttttcttattttgacatacttctttgtctttttcagtgggatcagaatctacgtgggacaaagcagtacttttagttaggcacaccccatggacaacaatggtgtttagagaaaataccttttcctttcaactttaagaacaaattattaaagccatgaatgaagactattcattatttggttttctcaacagtacatccagaaatgagtaattgactcagatcagcttgtggacacattctcttcaaagaggcaggatgaaagtttgaaagtgttgatgtttcttttctttctttcttttcttttttttttttttttttagactgactcttacactgtcgcccaggctggagtgcaatggtgcgatcttggttcactgcaacctccacctcccgggttgaagtgattctcctgcctcagcctcccgagtagctgggattacaggtccccaccaccacgcccagctaatttttttgtatttttagtagagacaggatttcactatgttggccaggctggtcttgaaatcctgaccttgtgatcctcctgcctcggcctcccaaagtgctgggattacaggcgtgagccactgcacctggccgatatttcttataggttgaaaagaacttgaattccacacatatccttcagtaactaagtgcctagtcaactagtagggatcccagtttaagacactgaggcaattcttttgttgatttttgtttttgtccaatgctaggaaagcagagaattttactagtatacatatgcactgtttcacttaagatgacatagtagagtccttgcaaaagcagagggtagtacccacaggcagattatggaaatcattcgatataagctaatacaaatatttaactttagatgagtctgcttcaaaaacttcaaataattaatgaataggattaagatcaaccctgacaatttcaatattgagttttgaatccctgcattcagcatttggatcaggaaaaaaactgagccaaattgacatagccaacaaagcagatattcacaaatattttatagacatgtaaaagaccagccagtaagtatttcttttacagaaaattttaaaattttcaatcatgagaaaaataatacttatatatttttagagagatctgtctgttgaagatgtatcccacaggagcaaatgatacaaatattcattttaggaaatgagatagagcaaggtttacattacattgcatcagtcattcaagagtaatgaactatgttaaaagcaacatcagaatgattttctttggaatcacagttatttaaagtgcattccacaactgtagaggaaggtgtcttgtcatattcttacacccactggtacaacaatagaacaacacgatttgaagaaggtaagtgttgaaataaaaatttactgatcaattagaatttgactcacatgaaaaaaaaattccaaacagtgcaatattaggatgacttgaaaccagacaactcccacaaaaaaggggggaaatgatggtagtttatgcaactcttctattgttatgaagatgcaggatatagacaataataaaacccaaagatgctatctcactaaagagtctggtctattttaaattactatagaaatttttcataactattgcttaaatataagtatagttttctcctctcatttcttttagatacatgttcaaatgtcacgtgattagaaaggcttttcctgaccaytgtacctaaaatactaccatctccatatcctatttaaccaccatctccatctcctattttgtaactgtaactggttttaattttcttcaa

SEQ ID NO: 50454 - DNA, 2122 bp, Homo sapiens
gggagaaataataactcaccggtcttgtgagtttgagagcaagagctcagcaagcgtggctcattgctctctcccttgtccttgggatctaactgccaatagagagcacattcactatttcctcctagtatcataagaagtaaagatctcatccatgggtggggagacacatggttgtccggcactccctgtgactgaatggctaaaccaaattttgacattcgctattgaaagattcattttcctcacaaacctaagtcacattttcctaatgtaacaccagcagtcatacaaccaatagttttcttattttgacatacttctttgtctttttcagtgggatcagaatctacgtgggacaaagcagtacttttagttaggcacaccccatggacaacaatggtgtttagagaaaataccttttcctttcaactttaagaacaaattattaaagccatgaatgaagactattcattatttgrttttctcaacagtacatccagaaatgagtaattgactcagatcagcttgtggacacattctcttcaaagaggcaggatgaaagtttgaaagtgttgatgtttcttttctttctttcttttcttttttttttttttttttagactgactcttacactgtcgcccaggctggagtgcaatggtgcgatcttggttcactgcaacctccacctcccgggttgaagtgattctcctgcctcagcctcccgagtagctgggattacaggtccccaccaccacgcccagctaatttttttgtatttttagtagagacaggatttcactatgttggccaggctggtcttgaaatcctgaccttgtgatcctcctgcctcggcctcccaaagtgctgggattacaggcgtgagccactgcacctggccgatatttcttataggttgaaaagaacttgaattccacacatatccttcagtaactaagtgcctagtcaactagtagggatcccagtttaagacactgaggcaattcttttgttgatttttgtttttgtccaatgctaggaaagcagagaattttactagtatacatatgcactgtttcacttaagatgacatagtagagtccttgcaaaagcagagggtagtacccacaggcagattatggaaatcattcgatataagctaatacaaatatttaactttagatgagtctgcttcaaaaacttcaaataattaatgaataggattaagatcaaccctgacaatttcaatattgagttttgaatccctgcattcagcatttggatcaggaaaaaaactgagccaaattgacatagccaacaaagcagatattcacaaatattttatagacatgtaaaagaccagccagtaagtatttcttttacagaaaattttaaaattttcaatcatgagaaaaataatacttatatatttttagagagatctgtctgttgaagatgtatcccacaggagcaaatgatacaaatattcattttaggaaatgagatagagcaaggtttacattacattgcatcagtcattcaagagtaatgaactatgttaaaagcaacatcagaatgattttctttggaatcacagttatttaaagtgcattccacaactgtagaggaaggtgtcttgtcatattcttacacccactggtacaacaatagaacaacacgatttgaagaaggtaagtgttgaaataaaaatttactgatcaattagaatttgactcacatgaaaaaaaaattccaaacagtgcaatattaggatgacttgaaaccagacaactcccacaaaaaaggggggaaatgatggtagtttatgcaactcttctattgttatgaagatgcaggatatagacaataataaaacccaaagatgctatctcactaaagagtctggtctattttaaattactatagaaatttttcataactattgcttaaatataagtatagttttctcctctcatttcttttagatacatgttcaaatgtcacgtgattagaaaggcttttcctgaccattgtacctaaaatactaccatctccatatcctatttaaccaccatctccatctcctattttgtaactgtaactggttttaattttcttcaa

SEQ ID NO: 50455 - DNA, 2122 bp, Homo sapiens
gggagaaataataactcaccggtcttgtgagtttgagagcaagagctcagcaagcgtggctcattgctctctcccttgtccttgggatctaactgccaatagagagcacattcactatttcctcctagtatcataagaagtaaagatctcatccatgggtggggagacacatggttgtccggcactccctgtgactgaatggctaaaccaaattttgacattcgctattgaaagattcattttcctcacaaacctaagtcacattttcctaatgtaacaccagcagtcatacaaccaatagttttcttattttgacatacttctttgtctttttcagtgggatcagaatctacgtgggacaaagcagtacttttagttaggcacaccccatggacaacaatggtgtttagagaaaataccttttcctttcaactttaagaacaaattattaaagccatgaatgaagactattcattatttggttttctcaacagtacatccagaaatgagtaattgactcagatcagcttgtggacacattctcttcaaagaggcaggatgaaagtttgaaagtgttgatgtttcttttctttctttcttttcttttttttttttttttttagactgactcttrcactgtcgcccaggctggagtgcaatggtgcgatcttggttcactgcaacctccacctcccgggttgaagtgattctcctgcctcagcctcccgagtagctgggattacaggtccccaccaccacgcccagctaatttttttgtatttttagtagagacaggatttcactatgttggccaggctggtcttgaaatcctgaccttgtgatcctcctgcctcggcctcccaaagtgctgggattacaggcgtgagccactgcacctggccgatatttcttataggttgaaaagaacttgaattccacacatatccttcagtaactaagtgcctagtcaactagtagggatcccagtttaagacactgaggcaattcttttgttgatttttgtttttgtccaatgctaggaaagcagagaattttactagtatacatatgcactgtttcacttaagatgacatagtagagtccttgcaaaagcagagggtagtacccacaggcagattatggaaatcattcgatataagctaatacaaatatttaactttagatgagtctgcttcaaaaacttcaaataattaatgaataggattaagatcaaccctgacaatttcaatattgagttttgaatccctgcattcagcatttggatcaggaaaaaaactgagccaaattgacatagccaacaaagcagatattcacaaatattttatagacatgtaaaagaccagccagtaagtatttcttttacagaaaattttaaaattttcaatcatgagaaaaataatacttatatatttttagagagatctgtctgttgaagatgtatcccacaggagcaaatgatacaaatattcattttaggaaatgagatagagcaaggtttacattacattgcatcagtcattcaagagtaatgaactatgttaaaagcaacatcagaatgattttctttggaatcacagttatttaaagtgcattccacaactgtagaggaaggtgtcttgtcatattcttacacccactggtacaacaatagaacaacacgatttgaagaaggtaagtgttgaaataaaaatttactgatcaattagaatttgactcacatgaaaaaaaaattccaaacagtgcaatattaggatgacttgaaaccagacaactcccacaaaaaaggggggaaatgatggtagtttatgcaactcttctattgttatgaagatgcaggatatagacaataataaaacccaaagatgctatctcactaaagagtctggtctattttaaattactatagaaatttttcataactattgcttaaatataagtatagttttctcctctcatttcttttagatacatgttcaaatgtcacgtgattagaaaggcttttcctgaccattgtacctaaaatactaccatctccatatcctatttaaccaccatctccatctcctattttgtaactgtaactggttttaattttcttcaa

SEQ ID NO: 50456 - DNA, 2122 bp, Homo sapiens
gggagaaataataactcaccggtcttgtgagtttgagagcaagagctcagcaagcgtggctcattgctctctcccttgtccttgggatctaactgccaatagagagcacattcactatttcctcctagtatcataagaagtaaagatctcatccatgggtggggagacacatggttgtccggcactccctgtgactgaatggctaaaccaaattttgacattcgctattgaaagattcattttcctcacaaacctaagtcacattttcctaatgtaacaccagcagtcatacaaccaatagttttcttattttgacatacttctttgtctttttcagtgggatcagaatctacgtgggacaaagcagtacttttagttaggcacaccccatggacaacaatggtgtttagagaaaataccttttcctttcaactttaagaacaaattattaaagccatgaatgaagactattcattatttggttttctcaacagtacatccagaaatgagtaattgactcagatcagcttgtggacacattctcttcaaagaggcaggatgaaagtttgaaagtgttgatgtttcttttctttctttcttttcttttttttttttttttttagactgactcttacactgtcgcccaggctggagtgcaatggtgcgatcttggttcactgcaacctccacctcccgggttgaagtgattctcctgcctcagcctcccgagtagctgggattacaggtccccaccaccacgcccagctaatttttttgtatttttmgtagagacaggatttcactatgttggccaggctggtcttgaaatcctgaccttgtgatcctcctgcctcggcctcccaaagtgctgggattacaggcgtgagccactgcacctggccgatatttcttataggttgaaaagaacttgaattccacacatatccttcagtaactaagtgcctagtcaactagtagggatcccagtttaagacactgaggcaattcttttgttgatttttgtttttgtccaatgctaggaaagcagagaattttactagtatacatatgcactgtttcacttaagatgacatagtagagtccttgcaaaagcagagggtagtacccacaggcagattatggaaatcattcgatataagctaatacaaatatttaactttagatgagtctgcttcaaaaacttcaaataattaatgaataggattaagatcaaccctgacaatttcaatattgagttttgaatccctgcattcagcatttggatcaggaaaaaaactgagccaaattgacatagccaacaaagcagatattcacaaatattttatagacatgtaaaagaccagccagtaagtatttcttttacagaaaattttaaaattttcaatcatgagaaaaataatacttatatatttttagagagatctgtctgttgaagatgtatcccacaggagcaaatgatacaaatattcattttaggaaatgagatagagcaaggtttacattacattgcatcagtcattcaagagtaatgaactatgttaaaagcaacatcagaatgattttctttggaatcacagttatttaaagtgcattccacaactgtagaggaaggtgtcttgtcatattcttacacccactggtacaacaatagaacaacacgatttgaagaaggtaagtgttgaaataaaaatttactgatcaattagaatttgactcacatgaaaaaaaaattccaaacagtgcaatattaggatgacttgaaaccagacaactcccacaaaaaaggggggaaatgatggtagtttatgcaactcttctattgttatgaagatgcaggatatagacaataataaaacccaaagatgctatctcactaaagagtctggtctattttaaattactatagaaatttttcataactattgcttaaatataagtatagttttctcctctcatttcttttagatacatgttcaaatgtcacgtgattagaaaggcttttcctgaccattgtacctaaaatactaccatctccatatcctatttaaccaccatctccatctcctattttgtaactgtaactggttttaattttcttcaa

SEQ ID NO: 50457 - DNA, 2122 bp, Homo sapiens
gggagaaataataactcaccggtcttgtgagtttgagagcaagagctcagcaagcgtggctcattgctctctcccttgtccttgggatctaactgccaatagagagcacattcactatttcctcctagtatcataagaagtaaagatctcatccatgggtggggagacacatggttgtccggcactccctgtgactgaatggctaaaccaaattttgacattcgctattgaaagattcattttcctcacaaacctaagtcacattttcctaatgtaacaccagcagtcatacaaccaatagttttcttattttgacatacttctttgtctttttcagtgggatcagaatctacgtgggacaaagcagtacttttagttaggcacaccccatggacaacaatggtgtttagagaaaataccttttcctttcaactttaagaacaaattattaaagccatgaatgaagactattcattatttggttttctcaacagtacatccagaaatgagtaattgactcagatcagcttgtggacacattctcttcaaagaggcaggatgaaagtttgaaagtgttgatgtttcttttctttctttcttttcttttttttttttttttttagactgactcttacactgtcgcccaggctggagtgcaatggtgcgatcttggttcactgcaacctccacctcccgggttgaagtgattctcctgcctcagcctcccgagtagctgggattacaggtccccaccaccacgcccagctaatttttttgtatttttagtagagacaggatttcactatgttggccaggctggtcttgaaatcctgaccttgtgatcctcctgcctcggcctcccaaagtgctgggattacaggcgtgagccactgcacctggccgatatttcttataggttgaaaagaacttgaattccacacatatccttcagtaactaagtgcctagtcaactagtagggatcccagtttaagacactgaggcaattcttttgttgatttttgtttttgtccaatgctaggaaagcagagaattttactagtatacatatgcactgtttcacttaagatgacatagtagagtccttgcaaaagcagagggtagtacccacaggcagattatggaaatcattcgatataagctaatacaaatatttaactttagatgagtctgcttcaaaaacttcaaataattaatgaataggattaagatcaaccctgacaatttcaatattgagttttgaatccctgcattcagcatttggatcaggaaaaaaactgagccaaattgacatagccaacaaagcagatattcacaaatattttatagacatgtaaaagaccagccagtaagtatttcttttacagaaaattttaaaattttcaatcatgagaaaaataatacttatatatttttagagagatctgtctgttgaagatgtatcccacaggagcaaatgatacaaatattcattttaggaaatgagatagagcaaggtttacattacattgcatcagtcattcaagagtaatgaactatgttaaaagcaacatcagaatgattttctttggaatcacagttatttaaagtgcattccacaactgtagaggaaggtgtcttgtcatattcttacacccactggtacaacaatagaacaacacgatttgaagaaggtaagtgttgaaataaaaatttaytgatcaattagaatttgactcacatgaaaaaaaaattccaaacagtgcaatattaggatgacttgaaaccagacaactcccacaaaaaaggggggaaatgatggtagtttatgcaactcttctattgttatgaagatgcaggatatagacaataataaaacccaaagatgctatctcactaaagagtctggtctattttaaattactatagaaatttttcataactattgcttaaatataagtatagttttctcctctcatttcttttagatacatgttcaaatgtcacgtgattagaaaggcttttcctgaccattgtacctaaaatactaccatctccatatcctatttaaccaccatctccatctcctattttgtaactgtaactggttttaattttcttcaa

SEQ ID NO: 50458 - DNA, 2122 bp, Homo sapiens
gggagaaataataactcaccggtcttgtgagtttgagagcaagagctcagcaagcgtggctcattgctctctcccttgtccttgggatctaactgccaatagagagcacattcactatttcctcctagtatcataagaagtaaagatctcatccatgggtggggagacacatggttgtccggcactccctgtgactgaatggctaaaccaaattttgacattcgctattgaaagattcattttcctcacaaacctaagtcacattttcctaatgtaacaccagcagtcatacaaccaatagttttcttattttgacatacttctttgtctttttcagtgggatcagaatctacgtgggacaaagcagtacttttagttaggcacaccccatggacaacaatggtgtttagagaaaataccttttcctttcaactttaagaacaaattattaaagccatgaatgaagactattcattatttggttttctcaacagtacatccagaaatgagtaattgactcagatcagcttgtggacacattctcttcaaagaggcaggatgaaagtttgaaagtgttgatgtttcttttctttctttcttttcttttttttttttttttttagactgactcttacactgtcgcccaggctggagtgcaatggtgcgatcttggttcactgcaacctccacctcccgggttgaagtgattctcctgcctcagcctcccgagtagctgggattacaggtccccaccaccacgcccagctaatttttttgtatttttagtagagacaggatttcactatgttggccaggctggtcttgaaatcctgaccttgtgatcctcctgcctcggcctcccaaagtgctgggattacaggcgtgagccactgcacctggccgatatttcttataggttgaaaagaacttgaattccacacatatccttcagtaactaagtgcctagtcaactagtagggatcccagtttaagacactgaggcaattcttttgttgatttttgtttttgtccaatgctaggaaagcagagaattttactagtatacatatgcactgtttcacttaagatgacatagtagagtccttgcaaaagcagagggtagtacccacaggcagattatggaaatcattcgatataagctaatacaaatatttaactttagatgagtctgcttcaaaaacttcaaataattaatgaataggattaagatcaaccctgacaatttcaatattgagttttgaatccctgcattcagcatttggatcaggaaaaaaactgagccaaattgacatagccaacaaagcagatattcacaaatattttatagacatgtaaaagaccagccagtaagtatttcttttacagaaaattttaaaattttcaatcatgagaaaaataatacttatatatttttagagagatctgtctgttgaagatgtatcccacaggagcaaatgatacaaatattcattttaggaaatgagatagagcaaggtttacattacattgcatcagtcattcaagagtaatgaactatgttaaaagcaacatcagaatgattttctttggaatcacagttatttaaagtgcattccacaactgtagaggaaggtgtcttgtcatattcttacacccactggtacaacaatagaacaacacgatttgaagaaggtaagtgttgaaataaaaatttactgatcaattagaatttgactcacatgaaaaaaaaattccaaacagtgcaatattaggatgacttgaaaccagacaactcccacaaaaaaggggggaaatgatggtagtttatgcaactcttctattgttatraagatgcaggatatagacaataataaaacccaaagatgctatctcactaaagagtctggtctattttaaattactatagaaatttttcataactattgcttaaatataagtatagttttctcctctcatttcttttagatacatgttcaaatgtcacgtgattagaaaggcttttcctgaccattgtacctaaaatactaccatctccatatcctatttaaccaccatctccatctcctattttgtaactgtaactggttttaattttcttcaa

SEQ ID NO: 50459 - DNA, 2122 bp, Homo sapiens
gggagaaataataactcaccggtcttgtgagtttgagagcaagagctcagcaagcgtggctcattgctctctcccttgtccttgggatctaactgccaatagagagcacattcactatttcctcctagtatcataagaagtaaagatctcatccatgggtggggagacacatggttgtccggcactccctgtgactgaatggctaaaccaaattttgacattcgctattgaaagattcattttcctcacaaacctaagtcacattttcctaatgtaacaccagcagtcatacaaccaatagttttcttattttgacatacttctttgtctttttcagtgggatcagaatctacgtgggacaaagcagtacttttagttaggcacaccccatggacaacaatggtgtttagagaaaataccttttcctttcaactttaagaacaaattattaaagccatgaatgaagactattcattatttggttttctcaacagtacatccagaaatgagtaattgactcagatcagcttgtggacacattctcttcaaagaggcaggatgaaagtttgaaagtgttgatgtttcttttctttctttcttttcttttttttttttttttttagactgactcttacactgtcgcccaggctggagtgcaatggtgcgatcttggttcactgcaacctccacctcccgggttgaagtgattctcctgcctcagcctcccgagtagctgggattacaggtccccaccaccacgcccagctaatttttttgtatttttagtagagacaggatttcactatgttggccaggctggtcttgaaatcctgaccttgtgatcctcctgcctcggcctcccaaagtgctgggattacaggcgtgagccactgcacctggccgatatttcttataggttgaaaagaacttgaattccacacatatccttcagtaactaagtgcctagtcaactagtagggatcccagtttaagacactgaggcaattcttttgttgatttttgtttttgtccaatgctaggaaagcagagaattttactagtatacatatgcactgtttcacttaagatgacatagtagagtccttgcaaaagcagagggtagtacccacaggcagattatggaaatcattcgatataagctaatacaaatatttaactttagatgagtctgcttcaaaaacttcaaataattaatgaataggattaagatcaaccctgacaatttcaatattgagttttgaatccctgcattcagcatttggatcaggaaaaaaactgagccaaattgacatagccaacaaagcagatattcacaaatattttatagacatgtaaaagaccagccagtaagtatttcttttacagaaaattttaaaattttcaatcatgagaaaaataatacttatatatttttagagagatctgtctgttgaagatgtatcccacaggagcaaatgatacaaatattcattttaggaaatgagatagagcaaggtttacattacattgcatcagtcattcaagagtaatgaactatgttaaaagcaacatcagaatgattttctttggaatcacagttatttaaagtgcattccacaactgtagaggaaggtgtcttgtcatattcttacacccactggtacaacaatagaacaacacgatttgaagaaggtaagtgttgaaataaaaatttactgatcaattagaatttgactcacatgaaaaaaaaattccaaacagtgcaatattaggatgacttgaaaccagacaactcccacaaaaaaggggggaaatgatggtagtttatgcaactcttctattgttatgaagatgcaggatatagacaataataaaacccaaagatgctatctcactaaagagtctggtctattttaaattactatagaaawttttcataactattgcttaaatataagtatagttttctcctctcatttcttttagatacatgttcaaatgtcacgtgattagaaaggcttttcctgaccattgtacctaaaatactaccatctccatatcctatttaaccaccatctccatctcctattttgtaactgtaactggttttaattttcttcaa

SEQ ID NO: 50460 - DNA, 648 bp, Homo sapiens
tataggctacaaattattaattgagactaaagttgttttataatggctaatgctacaattcacaatgaagatgtgaattaacttataattcatgtgtatatatttaatctatgcatacaaaaaactgtaatcacttatataaagccaaaattacagtcaatgcaataaaaataatactatactaataataaaagattttagctcaacactcagtacaggacagattaaatggaccaaaaaaamcaaacaagccttctttgaaagaagtaacaaggtatgccttatggatataaatcaaatatcacattatgcttctttttttttttttttttgagaccgagtctcgctttgtcgcccaggctggagtgcagtggcgcaatctcagctcactgcaagctctgcctcccaggttcacaccattctcctgcctcagcctcccgagtagctgggactacaggcgcccaccaccatgctcggctaatttttttgtatttttagtagagacgggatttcactgtgttagccaggatggtctcaatctcctgacctcctgattcacctgcctcagactcccaaagtgctgggattacaggcgtgagccaccatgcccagcccacagtatgcttcttaaatgcatttgaaatattc

SEQ ID NO: 50461 - DNA, 648 bp, Homo sapiens
tataggctacaaattattaattgagactaaagttgttttataatggctaatgctacaattcacaatgaagatgtgaattaacttataattcatgtgtatatatttaatctatgcatacaaaaaactgtaatcacttatataaagccaaaattacagtcaatgcaataaaaataatactatactaataataaaagattttagctcaacactcagtacaggacagattaaatggaccaaaaaaaccaaacaagccttctttgaaagaartaacaaggtatgccttatggatataaatcaaatatcacattatgcttctttttttttttttttttgagaccgagtctcgctttgtcgcccaggctggagtgcagtggcgcaatctcagctcactgcaagctctgcctcccaggttcacaccattctcctgcctcagcctcccgagtagctgggactacaggcgcccaccaccatgctcggctaatttttttgtatttttagtagagacgggatttcactgtgttagccaggatggtctcaatctcctgacctcctgattcacctgcctcagactcccaaagtgctgggattacaggcgtgagccaccatgcccagcccacagtatgcttcttaaatgcatttgaaatattc

SEQ ID NO: 50462 - DNA, 623 bp, Homo sapiens
tctccatatttctctgggaaagcattgatttgaaaggcaaattgatttccaggaacatttatagtgtatattgtctatgccttctaaattagaatgtaattgggcatattcttctcaaataactacttaacatgattcagttttgcctcctgaggaatacaccttacacttcctatgtcaatgtagaagctagaaaaatactgaaataacaaatgtgtctttattgaaaaaacagcctgcagataaaatcctcattatattcatargcaaatataacacagaaaacatagaaaaaagtgaaaaaaaatctcgtgtaaaatgctcgtattttccactagagacaaagaatacattaactttccctttccttttaataaatagctaaatatttatagattccttccagtcctaccagccagatggtaattaccattgtcagaaatattaagcaatgattatatgcaatatttcctttcatctggttacgtgggagcagatgccctttcagtatgcttatagtcactgtcctctggtcagcacactaggcattgcagaaaaataaaaaacagctccattatagtggtattcagcaactctcttcttttcttagctgaattacttta

SEQ ID NO: 50463 - DNA, 623 bp, Homo sapiens
tctccatatttctctgggaaagcattgatttgaaaggcaaattgatttccaggaacatttatagtgtatattgtctatgccttctaaattagaatgtaattgggcatattcttctcaaataactacttaacatgattcagttttgcctcctgaggaatacaccttacacttcctatgtcaatgtagaagctagaaaaatactgaaataacaaatgtgtctttattgaaaaaacagcctgcagataaaatcctcattatattcataagcaaakataacacagaaaacatagaaaaaagtgaaaaaaaatctcgtgtaaaatgctcgtattttccactagagacaaagaatacattaactttccctttccttttaataaatagctaaatatttatagattccttccagtcctaccagccagatggtaattaccattgtcagaaatattaagcaatgattatatgcaatatttcctttcatctggttacgtgggagcagatgccctttcagtatgcttatagtcactgtcctctggtcagcacactaggcattgcagaaaaataaaaaacagctccattatagtggtattcagcaactctcttcttttcttagctgaattacttta

SEQ ID NO: 50464 - DNA, 623 bp, Homo sapiens
tctccatatttctctgggaaagcattgatttgaaaggcaaattgatttccaggaacatttatagtgtatattgtctatgccttctaaattagaatgtaattgggcatattcttctcaaataactacttaacatgattcagttttgcctcctgaggaatacaccttacacttcctatgtcaatgtagaagctagaaaaatactgaaataacaaatgtgtctttattgaaaaaacagcctgcagataaaatcctcattatattcataagcaaatataacacagaaaacatagaaaaaagtgaaaaaaaatctcgtgtaaaatgctcgtattttccactagagacaaagaatacattaactttccctttccttttaataaatagctaaatatttatagattccttccagtcctaccagccagatggtaattaccattgtcagaaatattaagcaatgattatatgcaatatttcctttcatctggttacgtgggagcagatgccctttcagtatgctyatagtcactgtcctctggtcagcacactaggcattgcagaaaaataaaaaacagctccattatagtggtattcagcaactctcttcttttcttagctgaattacttta

SEQ ID NO: 50465 - DNA, 561 bp, Homo sapiens
caccactctagaattcaagtgagggattggaaatgaagatttgagaaatataaaaatacatgtggtgatttgaaaacttgacagtagacatgatggccctggagggaactcagaggagataagagcaaagaacagaactctagggagcacccatttctagaytgtgggtaaaagaagggaggaggagtgagaggaagaggagtaatagtggtggttgcagcagcaaaaatagtagcattagaataatttactaagaattactatgtggtaggcattgtcataagtgctttacatgtgtttacacctctaatcctcaaaacaacccagtaagataataccttagacttagtaagttaggacttacaaggtaggtaccactattattttcatttcaaaggaaataggcacagaagttaaacagtttgcccaatatgagttccagtgcccttgcccttccctcttatactcaacttcctcaagataaatgaaggagttcaaggcttatgaagaaactcagaatagtgtaatgtcagagaaagggacaaaatttcaaagtggtga

SEQ ID NO: 50466 - DNA, 561 bp, Homo sapiens
caccactctagaattcaagtgagggattggaaatgaagatttgagaaatataaaaatacatgtggtgatttgaaaacttgacagtagacatgatggccctggagggaactcagaggagataagagcaaagaacagaactctagggagcacccatttctagactgtgggtaaaagaagggaggaggagtgagaggaagaggagtaatagtggtggttgcagcagcaaaaatagtagcattagaataatttactaagaattactatgtggtaggcattgtcataagtgctttacatgtgtttacacctctaatcctcaaaacaacccagtaagataataccttagacttagtaagttaggacttacaaggtaggtaccactattattttcatttcaaaggaaataggcacagaagttaaacagtttgcccaatatgarttccagtgcccttgcccttccctcttatactcaacttcctcaagataaatgaaggagttcaaggcttatgaagaaactcagaatagtgtaatgtcagagaaagggacaaaatttcaaagtggtga

SEQ ID NO: 50467 - DNA, 635 bp, Homo sapiens
tcaggatttttaaatcactttaattcaatcatttctaattctctctctttctctctctgtctatttctctctgtctctctgtctttcacacacacatacaaaataaataaataacttctctgaatgtgtgtgtgtggttttctgtttgtttgtttgtttgttttgtatatgaacctcaattgatttttccccctatgttttcacagcactggaattatgtgcattaaatgaaactcatttccccgtattaactcttcaatgcttaaacaattctcttgatacataggttagaaagattttaattgcatacatcaatctaggtacagttcatcacaacccccaaatcctccaaacataactggcttctgggaacatgcacaatattaaccctckaaaacaattcactgtgcattttggtaagcaattatatttctaatttggtaatggaaagggataaagatataaaaaaaattaaagagctaattataggttccatttaaatatagaaaatataatacatggtcatatactctggaaaaaatattcatttatttgctagtgaaattttagggagcaacatgtatgataaattgacaaaatatatagatattggtgcagaaaaagtttcatttcct

SEQ ID NO: 50468 - DNA, 635 bp, Homo sapiens
tcaggatttttaaatcactttaattcaatcatttctaattctctctctttctctctctgtctatttctctctgtctctctgtctttcacacacacatacaaaataaataaataacttctctgaatgtgtgtgtgtggttttctgtttgtttgtttgtttgttttgtatatgaacctcaattgatttttccccctatgttttcacagcactggaattatgtgcattaaatgaaactcatttccccgtattaactcttcaatgcttaaacaattctcttgatacataggttagaaagattttaattgcatacatcaatctaggtacagttcatcacaacccccaaatcctccaaacataactggcttctgggaacatgcacaatattaaccctcgaaaacaattcactgtgcattttggtaagcaattatrtttctaatttggtaatggaaagggataaagatataaaaaaaattaaagagctaattataggttccatttaaatatagaaaatataatacatggtcatatactctggaaaaaatattcatttatttgctagtgaaattttagggagcaacatgtatgataaattgacaaaatatatagatattggtgcagaaaaagtttcatttcct

SEQ ID NO: 50469 - DNA, 606 bp, Homo sapiens
gaaagatttaaggaaggatttttagctgataagttaatgattaggtatgtgttctagaaagctgactttatctgcaatgctgagaccaaatttctttgcatttgctttctgggatggtgatacattaaatcaaggcagttgtaaaggcaatggagagagaaaagagacgtgaaaattgttaaagctataattgacaagatagtagatattagaggccactaattaaatcccctaaaatattattgtttttaatctatattgattttgaaagggttcaggacatacgaccccaaaatatgacatcttggcatttgagaaaaaagcagaaacaggaaggtcagtctcacattccccaacccttctccctggaagcaagtcataagatcttcatttgagaagtgccctcctatacttagagaaaaggaatatccrtatctctgaagacacagggacacagagagaatctgaacacacagccttggtaggattccttccgtttatcatcattagatcataacccctttgtccagtcctatttctccaagactgcctccttcttcattaaaccttgcataaaaactcacaaatttaaccatttatttggat

SEQ ID NO: 50470 - DNA, 601 bp, Homo sapiens
tgacccagtccttgacttattcttgccctacaccattccagaaacttgtgaaaagtgaaacaactatttatgtgtaagaccctgtgctagatatattttcttcacagtaacttctcagccttgcttcccaaatcatttgaaaccayagtttctaggattaaataacgtgaccaaattcacaagtggctaaaaagtgacagaacagggccttaacccaaagtccatgcttttttcccctactgtaccccactgcaactccctggaaaagacagactggtaactgagtggaaaacaaaaggaaaacttatttattcttagaggtgggaatgtggggagtggggcagaacaggtggtggccctgggagagggtcccaaggggcagaggttggggatgtctcagtaaagaggggcaggtcatgaatagagcctccacccccagcagggggttcctgggcccgcccaagcactgggctaaaacgtggaaactgggcattgacaaagtacagcgggatgtgggcaattcggcctgtggaccagccctgcagagaagggaaagaaaaggatcagagtctgggcccaaagaagggccacctggcagagc

SEQ ID NO: 50471 - DNA, 632 bp, Homo sapiens
tttgtttttttgcctgccaccatccacgtaagatgttacttgctccttcttgccttctgccatgattgtgaggtttccccagccacatggcactgtgagtccaattaaacctctttctttcacaaatttcccagtcttgggtatgtctttatcagtagcatgaaaatggactaatacacaggttgtgcaagtagttcttttttcacatggctttctgacttcattttggagctgtgaaccgaagtgatgtcattttgtatatcacatctcatgtacaaaacactatttggcaaaactgtaaagaaggttccatgraaaagagaactccatggctgtggttggcctccctaaaacggccacatctttatctcccagaatctgtgaatatgttcttacatgactgtagggacttttcacatgtgattaaaagatgggtaagattattgcagaatatttttgtgggcccagtgcaatttactagggtccttataagacagaaacaaaaggatctgggtaagaggtatgacaatgaaagtagagggacaggaaagagattcgaagatcctgctggcttgaagatggaggatgaagtcatgactccagaaatgcagaaagcctgtggaagataaaaa

SEQ ID NO: 50472 - DNA, 632 bp, Homo sapiens
tttgtttttttgcctgccaccatccacgtaagatgttacttgctccttcttgccttctgccatgattgtgaggtttccccagccacatggcactgtgagtccaattaaacctctttctttcacaaatttcccagtcttgggtatgtctttatcagtagcatgaaaatggactaatacacaggttgtgcaagtagttcttttttcacatggctttctgacttcattttggagctgtgaaccgaagtgatgtcattttgtatatcacatctcatgtacaaaacactatttggcaaaactgtaaagaaggttccatggaaaagagaactccatggctgtggttggcctccctaaaacggccacatctttatctcccagaatctgtgaatatgttcttacatgactgtagggacttttcacatgtgattaaaagatgggtaagattaytgcagaatatttttgtgggcccagtgcaatttactagggtccttataagacagaaacaaaaggatctgggtaagaggtatgacaatgaaagtagagggacaggaaagagattcgaagatcctgctggcttgaagatggaggatgaagtcatgactccagaaatgcagaaagcctgtggaagataaaaa

SEQ ID NO: 50473 - DNA, 632 bp, Homo sapiens
tttgtttttttgcctgccaccatccacgtaagatgttacttgctccttcttgccttctgccatgattgtgaggtttccccagccacatggcactgtgagtccaattaaacctctttctttcacaaatttcccagtcttgggtatgtctttatcagtagcatgaaaatggactaatacacaggttgtgcaagtagttcttttttcacatggctttctgacttcattttggagctgtgaaccgaagtgatgtcattttgtatatcacatctcatgtacaaaacactatttggcaaaactgtaaagaaggttccatggaaaagagaactccatggctgtggttggcctccctaaaacggccacatctttatctcccagaatctgtgaatatgttcttacatgactgtagggacttttcacatgtgattaaaagatgggtaagattattgcagaatatttttgtgggcccagtgcaatttactagggtccttataagacagaaacaaaaggatctgggtaagaggtatgacaatgaaagtagagggacaggaaagagattcgaagawcctgctggcttgaagatggaggatgaagtcatgactccagaaatgcagaaagcctgtggaagataaaaa

SEQ ID NO: 50474 - DNA, 669 bp, Homo sapiens
cgatttcacaggcaacacaaagaatgcgaactgcttctaaggagtaagtgaawgaacatgcctaaacctttttaaaagtaattaagttccatgactatgaacttaaataaatgtataatctatggggtcttaagcagtgtaaaaaattaaagtaaaagcaacattttaaaaagaaagctagggaatataaagcaaggtatttggatgcagaaagttcctacgtaagcagattagcactaacctaaaagcgtacgatttttcactttcctacagtttcttcccctttcccctaaacatagtttctcaaaatctagtatcttcaaaattgacctaaaaattgaaagagaaacaagccaacaatgtccccttagatatatatacacacaaatgaccctaggaaatctgttttcaataaaaaacttctagaatttggtttaagaaagaaatgtcctttcagtatgtacatctgatagttgtataatactgttcttttgtacctcaatgctgatcaaggttggtagagaaatgaatgtttcttctaggagttgtaaccatttcatcataatatattcctcatcaagactctccagttgttctctattgtctgctatgtcaaacacaactcttgaacaggttaggggcttaggtagtagagtgtaaaataactga

SEQ ID NO: 50475 - DNA, 669 bp, Homo sapiens
cgatttcacaggcaacacaaagaatgcgaactgcttctaaggagtaagtgaaagaacatgcctaaacctttttaaaagtaattaagttccatgactatgaacttaaataaatgtataatctatggggtcttaagcagtgtaaaaaattaaagtaaaagcaacattttaaaaagaaagctagggaatataaagcaaggtatttggatgcagaaagttcctacgtaagcagattagcactaacctaaaagygtacgatttttcactttcctacagtttcttcccctttcccctaaacatagtttctcaaaatctagtatcttcaaaattgacctaaaaattgaaagagaaacaagccaacaatgtccccttagatatatatacacacaaatgaccctaggaaatctgttttcaataaaaaacttctagaatttggtttaagaaagaaatgtcctttcagtatgtacatctgatagttgtataatactgttcttttgtacctcaatgctgatcaaggttggtagagaaatgaatgtttcttctaggagttgtaaccatttcatcataatatattcctcatcaagactctccagttgttctctattgtctgctatgtcaaacacaactcttgaacaggttaggggcttaggtagtagagtgtaaaataactga

SEQ ID NO: 50476 - DNA, 553 bp, Homo sapiens
ttttttatatttttagtagagacggggtttcaccgtgttagccaggatggtctcartctcctgaactcgtgatccgcccaccttggcctcccaaagtgctgctcccagcctaaatctatggcttttaagcaatgatatttaatgtatattcaaagattggacaaaatgtaacatattaaggaattattgtcatgggaattaaaaacaggaatgtttaatcataaatagaagagtcctggtatttaccttgaataacaaaatatcattcttttttccatatttacatcagaatctgcttgaagggctatgtttccacaatgctgaatggcacaattgtgcaatgatttttgttgttgtttgtatctgaagcaatggttttcaaaaattttttatctcagtacatttttgcaaacttaaaattatggaaaatcttaaagagtttacttacacgggttatatttattaatatttattatattgtaatttaaaactgatttataaaataaatgttttaaaatcatttaaaataacagcaattaactcaatatgtatt

SEQ ID NO: 50477 - DNA, 553 bp, Homo sapiens
ttttttatatttttagtagagacggggtttcaccgtgttagccaggatggtctcagtctcctgaactcgtgatccgcccaccttggcctcccaaagtgctgctcccagcctaaatctatggcttttaagcaatgatatttaatgtatattcaaagattggacaaaatgtaacatattaaggaattattgtcatgggaattaaaaacaggaatgtttaatcataaatagaagagtcctggtatttaccttgaataacaaaatatcattcttttttccatatttacatcagaatctgcttgaagggctatgtttccacaatgctgaatggcacaattgtgcaatgatttttgttgttgtttgtatctgaagcaatggttttcaaaaattttttatctcagtacayttttgcaaacttaaaattatggaaaatcttaaagagtttacttacacgggttatatttattaatatttattatattgtaatttaaaactgatttataaaataaatgttttaaaatcatttaaaataacagcaattaactcaatatgtatt

SEQ ID NO: 50478 - DNA, 1965 bp, Homo sapiens
tttcctcatctttaaaagtgaaagggctgttgtcaggatgaaattacataacatgacgaaatgccttttctcaccgttgggtgcagagatacctgagaaagagttactcaaatctgcttaggaatttgtagcaagtgaagcgtaggttttgggggatattttctattttgagacagagttttactgtgtcactcaggctggatggagtacagtggtgtgatcaaggctgactgcagcccatacctccaaggttcaaccaatcctcccatctcaggctcccgaatagctaggaccacaggcacgtgccaccacactgagctttaaaatatatatatatatatwtattttttttttatttgtaaagatagtgtcccactatgttgtccagactggtctcaaactcctgggcttaagcagtcctcctgcctcagcctcccaaagtgctaggattataggcatgagccaccgtgcccagcctagcataagttttacaacctaatgcctagaaggttagaacaaataaaaccactgttacccccagatataagtacagctctcctatttgtagtactagtcttcatttctagccccacttccttcatctttccatttaagaaaggaaaagtgaaaaggaaggagaaagatggcagtcccatgtgccaccttagagacacaccacctccccttaggtttctctgctttagtcatgggttagattagtacaacttgcacctgtgagtgagaactgtcattgatcagactgacttctctcaccagctgaaagacaaaaaattcaattgattcagagttccttgtttattgggcactcatcaacaaaagcacagatattgcatcctgagtttgactttttagcacgccagagaacttggaggataagcaaattctggcttatttgatcctaccgtgttattgcttttctggggactgcttaattgaagcaagaatgctatttcaagtaaaatacatcaaaaggcatttcatttaaacctagttaattctttacaaggccctgtagtaaacaaaatagagcagctatattcttcactcttcactttcttctgctattaatttcagttctcaatgtgatcagcaactttttcttccaggtagttatagctaagaagaactcttcttgttgacagagggagataaagaagttgagaagaaaggttagagaagagggccaagtctggtctagtcaagtcaaatcaggtctactccggtgtctgctatacatttatatatgatcttagttaaggcaaggtatatgtctagggcagtttccttacttgtaaaataaacagattgcattacataaacttcaattaatatttttagagtaagggtccactcattgaaactctgataattcccgtagatttttcccacctatctggatatatgttaagtacaattttatatgtaatgtagcagtcgtagacccccttgaacaatgtgcacagacatacctggcttccttttccaaggtcacttcatggtccaaatgactgtttcacatccagtcgtgtctgttttatttctgttggaaagacagcacgaaggagaaaagggtgatgatgaaaaactagcaaagggcatgagcgagaagtgatttcaggaaggctcctgggaattgccacatgacattttacttacatctcattggtcagaaacttggccatggctgatatatggagtcttcattttgggtaatcatgtgccaggttaaaagttgggagttctctttctttggaaggagagacgggtgataacaggtgacatttatcagtctctgttgcaaagatgtatagataaatactcagtaaacaaacaaaaaggacggtcaatattaactccagggaaaacaagacattgtataagaaatgaaatataatcagaatgtttcacatgatgtggctatgaatcatatatacatagttaaga

SEQ ID NO: 50479 - DNA, 1965 bp, Homo sapiens
tttcctcatctttaaaagtgaaagggctgttgtcaggatgaaattacataacatgacgaaatgccttttctcaccgttgggtgcagagatacctgagaaagagttactcaaatctgcttaggaatttgtagcaagtgaagcgtaggttttgggggatattttctattttgagacagagttttactgtgtcactcaggctggatggagtacagtggtgtgatcaaggctgactgcagcccatacctccaaggttcaaccaatcctcccatctcaggctcccgaatagctaggaccacaggcacgtgccaccacactgagctttaaaatatatatatatatatatattttttttttatttgtaaagatagtgtcccactatgttgtccagactggtctcaaactcctgggcttaagcagtcctcctgcctcagcctcccaaagtgctaggattataggcatgagccaccgtgcccagcctagcataagttttacaacctaatgcctagaaggttagaacaaataaaaccactgttacccccagatataagtacagctctcctatttgtagtactagtcttcatttctagccccacttccttcatctttccatttaagaaaggaaaagtgaaaaggaaggagaaagatggcagtcccatgtgccaccttagagacacaccacctccccttaggtttctctgctttagtcatgggttagattagtacaacttgcacctgtgagtgagaactgtcattgatcagactgacttctctcaccagctgaaagacaaaaaattcaattgattcagagttccttgtttattgggcactcatcaacaaaagcacagatattgcatcctgagtttgactttttagcacgccagagaacttggaggataagcaaattctggcttatttgatcctaccgtgttattgcttttctggggactgcttaattgaagcaagaatgctatttcaagtaaaatacatcaaaaggcatttcatttaaacctagttaattctttacaaggccctgtagtaaacaaaatagagcagctatattcttcactcttcactttcttctgctattaatttcagttctcaatgtgatcagcaactttttcttccaggtagttatagctaagaagaactcttcttgttgacagagggagataaagaagttgagaagaaaggttagagaagagggccaagtctggtctagtcaagtcaaatcaggtctactccggtgtctgctatacatttatatatgatcttagttaaggcaaggtatatgtctagggcagtttccttacttgtaaaataaacagattgcattacataaacttcaattaatatttttagagtaagggtccactcattgaaactctgataattcccgtagatttttcccacctatctggatatatgttaagtacaattttatatgtaatgtagcagtcgtagacccccttgaacaatgtgcacagacatacctggcttccttttccaaggtcacttcatggtccaaatgactgtttcacatccagtcgtgtctgttttatttctgttggaaagacagcacgaaggagaaaagggtgatgatgaaaaactagcaaagggcatgagcgagaagtgatttcaggaaggctcctgggaattgccacatgacattttacttacatctcattggtcagaaacttggccatggctgatatatggagtcttcattttgggtaatcatgtgccaggttaaaagttgggagttctctttctttggaaggagagacgggtgataacaggtgacatttatcagtctctgttgcaaagatgtatagataaatactcagtaaacaaacaaaaaggacggtcaatattaactccasggaaaacaagacattgtataagaaatgaaatataatcagaatgtttcacatgatgtggctatgaatcatatatacatagttaaga

SEQ ID NO: 50480 - DNA, 671 bp, Homo sapiens
cattgtttttaagagacaggttctcactctgtcactcaccctaatcctcaaactcttgacttcaagcattcctcctgcctcagccaccagaattgctgggatagcaagtgcaaggcattatgcctggcttcttgttttttagaatagaattacaagaaggaaaaagtaaaagcagggaacaagtttggagactatctcaatcatatatgcattgaagaagctgaataattattttccaaaattttcctcagtttttctggacatgcagattaactgcaagggacactgagaaatgttaccatgaaacaggaagaaaagtaacataccaaggttttgtatggtccatatatatgcaattaatcactttcttcttcaggtgccaattgaatggagaggatgccaagttagaactgccagatacaaggaacgtggatttttttttccatttattkatttttttttcttttgagatggagtctcactccgtcaccaggctggagtgcagtggtgcaatcctggctcactgcaacctccgcctcccgagttcaagtgattctcctgcctcagcctcccccacccctccccacccttggagtagctaggactacaggcacgtgggctaatttttgtatttttagtagagacagggtttcaccatgttggccaggatt

SEQ ID NO: 50481 - DNA, 645 bp, Homo sapiens
atccttctgcctcagtctccagagtagctgggacttacaagtgtgtgctaccatgcctgactaagaaaacrttgtagagatggggtctcatactatgttgtccaagctggtctcaatcaaactcctggccttaggaaatcttcccacttctgcctcccaaagtgctgagattgcaggcgtgagcaactgtgcctagcatggtttgttttttgaggtaccatgttgctaaagaaactataaacctggactaaaagtgtcttgaaacctttgaatttttttaatgacatctaaactttcccagaaaggaaatattaaaatatctatttatattcatttttcatataaatatgaaataaaactttaatactatttaatgttaatcctagtatcctcaaaagttcttagacaaccagtcaactgtcccacatagtacctgagggatcttgttggaagtggagaggttttacaatgaagagtgattgacatcattacacttatttattcactcattgtattgctacccattgaaatttacatgtgaccatatgagtggatttataaattatatttcattttaataaattcatcttacaaatgttcctgcaaagaaaatttccaattgaaatgatattaatcatacaagca

SEQ ID NO: 50482 - DNA, 608 bp, Homo sapiens
ttattttccaactctcttaataccaaatgtaatccccatgcctcttaaaatttttttattatcgttcattaaaagtattttcccttgtgtctagaaatcctttatcctctaattcattaattcagcaaatacatatgatgtgtcagacgctatggggtaactaaagtactcctcaagcatttccatttccttaagtagaggctgccagcttgcagttagacattttgtttttattcgattgataattgtttaatgatttccaacttttctttccttgatttcaattgtaaattatagcacatttttatgtttctgataatttataataatgtgtggtctcaacaaaactgagcctgctatacaactataaaaagattcatttccataaattctttaaacaaatttataatatgatatgtaattctagtatttgataagactttcaaagatataagtagggtacctttgtgtgctttcaaaacattttcatttgttcaagaaaaaatattgctaactttatctgaatatgactttaaaaaagactatagaatgtcaatgatagctacagtrctgaaaagggaaaaaagtgggaaattattagaaagata

SEQ ID NO: 50483 - DNA, 546 bp, Homo sapiens
tttattgattataaacaataatcccaataataccttgctaagtaattctttggaggcagtaaagtgcatacaatactgtgtttgtacaagcaaatagagagacagagggtgagatcattgttgagtaagatttgattgtgaatccatcattgctgcttcctcagccttgacttctggggagcatctgaggttttcccttatgataagaaacaagattgctatgtatatttatatatcaactgtctagctgaagcrtcacacatcagaagtcatgcatgacctgttttcatgacattttaggaagaagtagtggaaaaccagctaaaagattaggaaagagggcttttcaattgcacggtcacagagagttctcatttgtgctctagtactttcttcgtaaagccccaaaagttaattaaaaagaatttaaatcttctgcctgaaatgatgctcttcttccctgagactccctataagacacttggctgccaaaggagcctcatgtctacctatgctgtgtgaacaagcttcctcttaaagaattat

SEQ ID NO: 50484 - DNA, 542 bp, Homo sapiens
tcctggctttattcagataaagaagtcccagttcttatttcttccaatttttcttactctgctgtatctatgttccccaatgaaccagcattctaagtcctgctgwattctccaacattctcttattcttctaattgagaaaaaaatctaccagcaaaactgataaaatgatttcttctcattctcattattgggcatgggccctgagtcagtttgcaaagtgggagattttcgcaggggtgaggtggagagaaaagtgaccaattgtcatttctgtagttattctgggacaaagagacaaaatgtgtagtataaaactgaaatggctttgtatggaaaaacactattacaagtaaaaaaaggaaagaaaaacacagagatgctatcactctgggttaactctaaatatagggagacaataaaatagttattaaatgttcccaatgtgcctagtactacattaattaagcactgtttatgtattatcttattgtctcctttaatcctaatggggttgctattaggtaggtcctactgttctc

SEQ ID NO: 50485 - DNA, 586 bp, Homo sapiens
ggcagaggcttcagcctgctgcagtctttatgcactcaatcatcccttccacaaatgtctaagtgcctactgtgtgccaggcactgtaagtgagcaggatgaacatggtctttattctgtgaagcttgtaggagtgaggggaagaaaacactaaagaaatatttaaactatatcatttcaattatgataagtgcaaaaaagaaacggtggatgctttgggatcatataaaaaggaacccaagctgatctgagatgccagagaaagctcccctgaggacaagaggcttaaactgagattttgaaggtaaaaggagggatmtctgaagcctgtaacttcgaaggagaaaatgaaaaaagacacttgaaagtctaaaaaaggaagttgggcctaaatattggtctaaactatacaactggttcaacttaaagacagtttttaaggagtacagcttaatactttaaaaatgagtattacaacataaataaacattatcaaagaattttcagataaaacacaaacctgtttgaaggcctgtgtagaatttattagaattacttgacaaagtcctggttgtgtctaaaaaat

SEQ ID NO: 50486 - DNA, 569 bp, Homo sapiens
tttttccttttttctttaaatttcttgcagtgattttatgcttttatttttaaaaaatccacattttctttctccagatcttccataagtattacatttcaggggtttgaaaatgttaaagtactgacaggtacactgtgaagtcaaggaccccaccaggcccctggctgcccaccctcccccactttyctgccccgctagccactggtgtgcagtgactgtcaccccgcctcaccgctgctgcaaggtcaaaccaaacactccccccaccctgccccccacctgaagcacttcctgccctgctccctgggagaccaaaccacacacactcctgtctgcacgtggctgccccgggccgtgggaacagccggtcctgccctcccctcccctacctgaccggtcctccctgcccccaaccatctcctcccgttccttcccccgcagagagctgggcaggctggaggaccgggagggttgaagagtgacccccgcagcccccatacctctagataaatctgagcctccaataccactcacacctcaaaatgtctcccgaggggacttttaca

SEQ ID NO: 50487 - DNA, 613 bp, Homo sapiens
ctttttatctgatcatgaaattgttcacgtttcatttaggcttcatatataagcacagaaatctgtataacatttaactaagactgctggtttccttatcatcctcccatactatcccttccttgtaatagaggtaaaacaattcctgacagaaaacagtgtaatgggtcagatttgactaatatctggaataatgaaatgatagcttatcatgagacgaaattttcagcttaattatgatgttgctttaggtttatcctctcagatcttgtctttcccaccatcataacatttacctcatgctatttaactttytatttacattgctccttctcactgacctttgatttctgggtcaaacaagctctgttcctaaatatgatggaccttcaccaaaagtttgttaaaaacaatttccaaattcaggattattattttttcaatgtaagaagcagtatatgtctatagtagtcaaccacaaaaaaatgtaaattgtatcctcaagttaaataactttaattaacagacaaaaatatcagtaaactggactatataaaaaatcaaaagcttctgcacgaccaaaagagccataggcaaaatcaaaaacaaatga

SEQ ID NO: 50488 - DNA, 613 bp, Homo sapiens
ctttttatctgatcatgaaattgttcacgtttcatttaggcttcatatataagcacagaaatctgtataacatttaactaagactgctggtttccttatcatcctcccatactatcccttccttgtaatagaggtaaaacaattcctgacagaaaacagtgtaatgggtcagatttgactaatatctggaataatgaaatgatagcttatcatgagacgaaattttcagcttaattatgatgttgctttaggtttatcctctcagatcttgtctttcccaccatcataacatttacctcatgctatttaactttctatttacattgctccttctcactgacctttgatttctgggtcaaacaagctctgttcctaaatatgatggaccttcaccaaaagtttgttaaaaacaatttccaaattcaggattattattttttcaatgtaagaagcagtatatgtctatagtagtcaaccacaaaaaaatgtaaattgtatcctcaagttaaataactttaattaacagacaaaaatatcagtaaactggactatataaaaaatcaaaagcttctgcaygaccaaaagagccataggcaaaatcaaaaacaaatga

SEQ ID NO: 50489 - DNA, 601 bp, Homo sapiens
cccctggtagagcatcatgagaaccagctagagtctagtgcttaagtcagtctacccttatctagtgtggtgataggtcagggctgggagccactagaccaccatatagctgcaaatgtaaggcttggaaccctgtcttctgatcactctaacgggagatttttmactccaaccaagaaaggcaaagagccaaacagggagagaagtcaagatcctgccatgtctttcttatggggatggggaaaacgtgtatagcttttgtctaactatcacctgttctctgcaaatattataaggtttccctatgccattcttttttctatttagactacttctccagactgacatattatttccaggagccaaaactccactgtttttttcaaagtccagctataataccagcatgatcattgccttccctgtataaccagtaacattgtctttttcttgctctgaattgtcataggattgccttatagcagttaaaactttctaacttttaatataataattttttaatgtaatcataattaacataatactctgtatacatttcttatctcctacataagcagaaaaccatatgatggcacagact

SEQ ID NO: 50490 - DNA, 601 bp, Homo sapiens
cccctggtagagcatcatgagaaccagctagagtctagtgcttaagtcagtctacccttatctagtgtggtgataggtcagggctgggagccactagaccaccatatagctgcaaatgtaaggcttggaaccctgtcttctgatcactctaacgggagatttttaactccaaccaagaaaggcaaagagccaaacagggagagaagtcaagatcctgccatgtctttcttatggggatggggaaaacgtgtatagcttttgtctaactatcacctgttctctgcaaatattataaggtttccctatgccattcttttttctatttagactacttctccagactgacatattatttccaggagccaaaactccactgtttttttcaaagtccagctataataccagcatgatcattgccttccctgtataaccagtaacattgtctttttctygctctgaattgtcataggattgccttatagcagttaaaactttctaacttttaatataataattttttaatgtaatcataattaacataatactctgtatacatttcttatctcctacataagcagaaaaccatatgatggcacagact

SEQ ID NO: 50491 - DNA, 1434 bp, Homo sapiens
gcagttaacgaagcctagggaagaaagctttgaaaaaccttccttaggtaatagaaggcttgttcatgttttgaatcctaaaagagagagtctcttatttaggacttagtcagttaataaaattgacgcaatttcagaaaaaaaaaattggcacatgttgtctgcaatatccagttaaacccagaaatcctctcaattattgtattgtaagaggtttaggaacagttcagtagtgtttattctatctgaagagaggccttttttttttctycttagatagatcatggcctataatggactgtgttttggtaaaattgtaatttagcttttgaaactttatgttctttcccactaaagttgagagcaagtaaatggattccttttttatgggtttcctttttctctcaacaaaataggtcatctacatattgtgtcaaagctgaatcaaaagaaaatttagaccttctgtcttgattgaaggtctggaaaaaatatgagggtgctttagttaacttctagagcataacagtgcaggcatattttcattctccccaagtaggaccagaagatatttgttgtctgctctaggggcatgctgaaaaagagcacagatctgccacaaggacttaagtaattttaggaattgacaacaaggtgatatttggattaggtactactgggaagtgagaagtgagaagtgggggctaacaattttattgatggccttgaggttttgaacaaatacatatccttggccatttgttttgcaggtggtggtgtttttcttctttcttttccttgtagaatggaagtgttacaatgttacaaaggctagttcagagtaagagaaggcctttggatataaggcctttgccaatgggtctgagactttctcttgcttctggcttcaagggatattggtgaagattgggtaacagtttggtgaggtaaaagattaataagatctgttccaattattttcccatgttagtgtgtgtcccatagtgtgtcaggtatgatgtcaagatcgctaatggaggtatgcatcaaatgtaatggagaggacaaaggtatatcaaagtataatctacaacttgatcatgaacagagaaatcctctgaaatttcaaaacatacctggaacttctggtgtgcatttaatattatgatctcatttgaaaagtaaatctctccctgtcaaatttgcagctgtgttattagagaggctgaaagaatgtttttaagtcaaatgcccaagtgttaaaaactgggagatagtaaaaacctgtgggttattgaaatacctcctacctgtgtggtaagtttattctgaggaagaggaaggatttcacatggaacaaatagtacctgtgtccaccaggaattgatgaggttgactagttttatatatatagtcaattcaacttgattattt

SEQ ID NO: 50492 - DNA, 549 bp, Homo sapiens
ccacaagtgattattaagagttaatgaaaaacattctcactaaaggaaatttttatttatatccttcaaggcaaagaaaaattattccagatataagattgaagatggaaaataagaacattggtaaatatgtaggtaaatttaaacaaacattaatcgtataacttaccagtaaaaatgactaatcgtatgttcatttagggtgggaagtaaacagctagaattaaagttctcagaaataataatacataagttgttggaagggccatagagttggagaattctaaggtatttgatttgtttcagggagaagactcaatgcaataaattatgactcaataatttggaagcctcaagtaaggtatgcatatgatgtgtgcaaaggtaatcactagaaaaacagttgtagtacacacaacattcgaaaattagaggcgaattatacaatgacaacataaatttaaawactcaattcacccaaaatgactgggttgggggcgacgtgaaaagcacaaggggagacagtgggaaaagtggcaacaataaaca

SEQ ID NO: 50493 - DNA, 2655 bp, Homo sapiens
tgcataattacacttatatgtacatgttatatatatatacacacacaaacgtgtttatattttgcctagtcaattgaaaataagttataaataacttgacacttcacctctgaatatttcagtgcatatttcatatgaattaagacattctcccaaatatccataacacctaagaaaattgacaataactcaataatatctaataaatatttcatattgaattttgaaattttccccaacatgtcttttagagctgttgttttccccaatccaagaactaatcaatgctcacacatttgcatgtgttcgttacgtctctttaatacgttctcattcggaactttttaccatttgtttcttatgatgcttttgaagaagtgaggccctttgtcttgcagggtgtcccacattctgaatttgcctgattgttccttcatttttagattcaattaaacatttttggaaagaatactacataaatgataatgtgcttttttattgcatcacacttgaggacttaacgatatccagatatattactattgatgcttttaagttggtcacttggtaatcaagtgactgccaaatcttttcatgtatgggtacattttgagcattgtaattagtaagtaatctatgatatgattctttaaaaaaccacatgaacatgatttttgcagcatttcatttgttttagcattcattgataatctttgtcctacttaattattttattagttattgcaacatggaatattctagaaataaaaaaagttgctgaaattaagaaattattacatgagtttaacaggacattagacacaaatgatgaaatgattagtgaagtagaagatcaatcaataagtagaaatatcaggactgaaacacatataaggaaaaggaaggaaatatgaagaaaacaattcaggagatacttaggacactgtaagaggtctaatatgagtgtaaaaactctgaggaaaaggagacaaatagttgggcataaataataattgaatagataatggttgacagtattccaaaactaaaaagtcactaagtcacaggttcaagaaatactcccattttccaagccagtttagtaaaataataggcacaccagagtaaaacttctaaagagcagaggcaaagaaaatatttaaacttagccaaaaagacatattcccttcgaatgagtcatgctaagacaaacagctgaattataaagcagaagaataaaatattgccttccacttattgaaagaagataactatcaagctagaattctatgcacaaaagaaatattcttcaaaaatgaagaagaaacaaaatattttcacatacatgcttgagaaaatttttcaacaacagatttgcctaataaataataataaaggaagttgttcagtcataaataaatcacagatgaaagcaaggaaaaaagggaaatgaatgaagagcaatgggaatgatcagtaagtgctaaatccaaatgaacactgattttataataataggtactgcctaaaatgcattcagaatttaaaatataatgaaaataccacacaacctgggtatatatagaattttatgtgttctaatgtmttttggttgtctgacatatggcaaaaagtgctaattatattatactgcttaaataagttaaacatgcatataatattgtaatatccaagatgaacaataaaaaatagtacagtaaatcgatttttaactaaaatttaatagaaagaaaatgggaaaataaaacagaaatacttgattaatccaaaagaagctagtggtaaaaagaagcaaacagcaggtggaaaagaaaaacaatttttaaagtattagagaaaatttagcctagtgattaaaacgtgttattgaccaatttatacttgttttaatcccatctttttcacttcttagtgagtagtaagattatataacaccctaataagtctgttttttccagctgtgtacaacaattgcctaaaaaattagatggctttattgccttgaaggaatactgaacgagaagtttaaacaagtgaattctagccttggtcttactagtgtttaatcgtggccaaaaaaaaaaaaaaaaaaagtctttattcactggacatgtcatttagctttggtggtcgttagtatgtggaatttttaaaaataattttaagaagactaactttgcctacttttcagaatttcttttaaaataaatgaaatgaaattacatacataagagaatgctgagaagtgtgtcatgttcaaatgtaaaatgtgtttgacctccttcgtaagtgttgaaatcacttgtcattattggttccctaaaggaggaaacaaataggaaaaggaaaaaaaaaaaggactttgtcatcctacaagtattgttcttcagagaggataaattgaagcctttagataaattaactgctaaagtaaagcccttcatgtttaataaacttaatggaaaggaataacttcaacaaatacacaagttattcagtctgttcttgaatagctgtttcttgattcacacacatttggtaaggtattatttagaaaacatcaataaacaaactagctttatcagaactgtaagagtatttacaaaataattttatataaatctattctcaaaa

SEQ ID NO: 50494 - DNA, 585 bp, Homo sapiens
tgccactatacacacaccagaagagctaaacttaagacatcataccatatggtggtgggaatgtggagtaactgaaaatctgatacactactgatgggaacatcatcttatagacggattttagaaaattgtttgccactatctactaatgctaaaaataatatgtcctatggcccaacaattctaggtatatatacggaacagaaatgtgtacaaaagtttaccaaaaacatgtgcagttcgcagaagcacaatttgtaagagctaaacactggaaacatcattagagttttggggtttctgatttgtttcttttgtttgtaaatgatttgtctttgatttttgctgtgttgagtgcgtgttgttttatctttccagcatctatttcctttttccttctaaaaagagtaatgtcccacatcaccattttcctatactctaataacagggtgagctcatgacccattaccagacaattagttcaaaaagggcatygtaattgtcctctgggattgtatatacggatatttgtggaaaaattcttttttttttttttttgagacagagtcttgctctgtcaccagg

SEQ ID NO: 50495 - DNA, 545 bp, Homo sapiens
gtggagaaagcaaaaaaggagaaagaaagagaaaaaaatatcaggattcaggttcttaatagatatgagtctacctttactctgacaatctagttagtatgagccaatcgatttcctttttatgttcaaagtaagttgagttgggtttcttttayttgctctcagtaatacagaaactggtactccaaagtgagtgtttcatggaacagaatctgaaatacggatttagctaaattgaagcaagattgtgggctatgaaaatcttctttctgttcctggctgggaagctagcaattaatttcacatgggaggaaagcattgggaaaactttcacttgttgacatttttgggaaacagaacaagtattcatccatgatcaagctctaaatgatatagttaaaatgacagcatcaggattttggagttgtaaagctcagaattttttttaaccattgtaggttttcagtaaagttcaaatagaaagagacaaactttggttaccctcacttaaggcgggaaggataaagcagacaaatccattaaca

SEQ ID NO: 50496 - DNA, 545 bp, Homo sapiens
gtggagaaagcaaaaaaggagaaagaaagagaaaaaaatatcaggattcaggttcttaatagatatgagtctacctttactctgacaatctagttagtatgagccaatcgatttcctttttatgttcaaagtaagttgagttgggtttcttttatttgctctcagtaatacagaaactggtactccaaagtgagtgtttcatggaacagaatctgaaatacggatttagctaaattgaagcaagattgtgggctatgaaaatcttctttctgttcctggctgggaagctagcaattaatttcacatgggaggaaagcattgggaaaactttcacttgttgacatttttgggaaacagaacaagtattcatccatgatcaagctctaaatgatatagttaaaatgacagcatcaggattttggagttgtaragctcagaattttttttaaccattgtaggttttcagtaaagttcaaatagaaagagacaaactttggttaccctcacttaaggcgggaaggataaagcagacaaatccattaaca

SEQ ID NO: 50497 - DNA, 538 bp, Homo sapiens
tttatttcatcaaccttgattgaatatcaacagttttggtaatactttcaagaaataatttcgtttgagtgagcctatttcaattttgtattccatttgattattaattttgacttttttgcttttaatttctttgggtatattgtgtcttttagttttgtcttgactttcttgagttggatgttttcaaatcatgtcttatgaggagcaggtgtcaaggtagatgtgtacaggcaagatctattctgagaaaatacctatgaagattatgtgagaaggatcaggatcaagcagagaagaacttcagattatggtacacatcttacacctgtgaaaggagagtgacaggaaggaggattgggtaaggggagcttcagactaaagtacagctctgggacagtctcaggcaggatgatgggaaacctcagagcaaagattgccaaatagagtcccatattgggcaggaacagtcccaccatcayaccactgtcataacgttattggctctgaaaagaccagggagagtgtgaccttgaag

SEQ ID NO: 50498 - DNA, 1187 bp, Homo sapiens
tgggttagggcccattcttgttttccaggattatttcatcccaagatcctcaacttaattgtatctacaaagactcttttcccaaccaatgtaatattcacagatctaaggggtttggacatatcttttggggccaccatttactccactacgatgactttgggcaaatattttaacctaaatctcaggttcctcacctgtaaaatggggagattgtagttgctatctcaaagagctgtgaggattgaatgggttattctgtgtgaagtacctggcacctgcctggcacagactatccactcaatcatggtaaactattttaataattattattattcacaagtatcagctttctttcctcacaacagtactgtgagtagggagaggcagagaggcagaggtcttgagggaaaagaatcgctgggcactggacatgaaaaggcattgaaagatggcctgagccttggtctccaaatgtactcacctacctgacaactaagaaagagccatgtgctaaacgtttctagaggtttttccactccatcctgtaagcctaacttgaagagcaagagtgggaaggaagggaaggaaagaagagagatggggagggaaggggagggaagaaaagggatggggaaggaaggggactgaaagagaaagaaaagagagaaagggggcagggggcaccaggttgttcctgagcctatttattcccattcattttctggatatttttgaaaacccaccctggraagcaatagctagtgcactgccagctcatgagtcttgatcaaaaaagtgtagcctccatttgagaagaagccatgcttgggaaatgagtctcagggagggagcccaaagggaagagaatgcccaaccctaccagagaggagggaggaagaagagccccaatcaggaggggtcctgagcctagctccaccccatctggccaagtgatctgtagggggcctctcagctttgtgaatttcttcttaaaaaggatccttcacattgattgccttcaaaggccactaaaatagactcacaaaagatctcacaagggacaagatgaataggccctctctggaagaaccaggccactctgggaaagtttggggttctgagccttgctcagggcttcagcgtcgtttctgtgagtgtcttcttggtgaagctcaagctgcctt

SEQ ID NO: 50499 - DNA, 562 bp, Homo sapiens
aatcaaacaatatctaaacaagaaaataagatacattattattccacagaagagagtccagtcttacagagatattccctgcagttgaactcttggtatatgctcatttaaaattgtggatggggtatacttggattagttcctatcaaagcaaattactacctaagtaactcttatttccttacagtatagaagttacaagtacaccctgttctctctacccttctcattcttggccaatcttccaagattcacccagtaaatatttagtaccctstctaggtcaggagtaatactgggattcatcacatttaccaagctttttgaaattatgtgtttactcatttttctctcccagtaagccagttttaatccagggatgtctggatgggtgggtctgtgtgatgacactttgtgagattatatgcaacactttatgtctttgaacatataatatgtcattttctgggcagagattcaatatacttcaccagaatttcaaaaggagccatgtgacataagaagtacctccatcataatttggatattgagcacctcagtg

SEQ ID NO: 50500 - DNA, 539 bp, Homo sapiens
tcagtgcacaatgctaacatgatacgaattctattttatcataagatcttataaatataatgaagcacttctgtttaaggcgcttgtctcaaaagccagggggtctatttttaattcttataggatttaaactgttccttaatttatataagaaaatatttcactaatgagataaaaatgttaaaccaacagttaagctgtttgcctacaaaatttagtgtctctgtgtgtaagagccattgatgactaggatttcaaggtcatattgcaaaagagcaatttgtgagagaaaattattctgatctttttcaaagcttcacttattccttaccataaaatgcattttcacagtttaccattaatctttattggttgcagaaaactgatagaaggtctggtgtcacatgctrtgctctgtacctggggatttaaaatataggaatcttgctttgatttatgcggatgattagacttttatgtaattatgaacataatgtattttctttttatatatttttatgaaaaattctgcaaaatta

SEQ ID NO: 50501 - DNA, 539 bp, Homo sapiens
tcagtgcacaatgctaacatgatacgaattctattttatcataagatcttataaatataatgaagcacttctgtttaaggcgcttgtctcaaaagccagggggtctatttttaattcttataggatttaaactgttccttaatttatataagaaaatatttcactaatgagataaaaatgttaaaccaacagttaagctgtttgcctacaaaatttagtgtctctgtgtgtaagagccattgatgactaggatttcaaggtcatattgcaaaagagcaatttgtgagagaaaattattctgatctttttcaaagcttcacttattccttaccataaaatgcattttcacagtttaccattaatctttattggttgcagaaaactgatagaaggtctggtgtcacatgctgtgctctgtacctggggatttaaaatataggaatcttgctttgatttatgyggatgattagacttttatgtaattatgaacataatgtattttctttttatatatttttatgaaaaattctgcaaaatta

SEQ ID NO: 50502 - DNA, 539 bp, Homo sapiens
tcagtgcacaatgctaacatgatacgaattctattttatcataagatcttataaatataatgaagcacttctgtttaaggcgcttgtctcaaaagccagggggtctatttttaattcttataggatttaaactgttccttaatttatataagaaaatatttcactaatgagataaaaatgttaaaccaacagttaagctgtttgcctacaaaatttagtgtctctgtgtgtaagagccattgatgactaggatttcaaggtcatattgcaaaagagcaatttgtgagagaaaattattctgatctttttcaaagcttcacttattccttaccataaaatgcattttcacagtttaccattaatctttattggttgcagaaaactgatagaaggtctggtgtcacatgctgtgctctgtacctggggatttaaaatataggaatcttgctttgatttatgcggatgattagacttttatgtaattatgaacataatgwattttctttttatatatttttatgaaaaattctgcaaaatta

SEQ ID NO: 50503 - DNA, 1733 bp, Homo sapiens
  misc_feature (1)...(1733): n = A,T,C or G
tnnnnnnnnnnnnnnnnnnnnnnnnnnnnnnnnnnnnnnnnnnnnnnnnnnnnnnnnnnnnnnnnnnnnnnnnnnnnnnnnnnnnnnnnnnnnnnnnnnnnactgaatctctttcaattcactgagaaccagatgaatctctgcttctggaacttgaaactaaagttaatccctttccacagatcagcagaatttaccatcaattttacttaaaaaatttatttaaatttaaaacacatttcaaaacaaatgcaggtcccacttttcacttttctaatacctagtttgaccagatttgctgagtagctaaaaaaaaaaaaaaaaaaaaamcctgaaaggagggagactatggccatataaaatttaaagcttatttaacacattttattatctcaaaaaaaaaccctggttccaaaaagacctatagagccagagccatgtcacatgccattaggtttccttagacaataagcatggattctagacaaggttaacataggtatgaaatgagtgggggaaaagttgtggggaccccactgataggtagggagactcagttctcgtcaccttaagacatagctaactgcctcaacttccaccagtcagggcctcattctgttcagctgattgaaaacgtaaaccaataaagtccctggttaagacattttgctctcagagctattcagtgatttttctgaattgagatccctcctctttaatggcgtgttgtaaacttttactgactcggggcacagtacctcctggtagattgtcatttattccattttcagagaggctcaccttctgtgcccccaaatcatagacttactaggacacttgacagtttacttgaatcacacacaacccacatgcctgaccaattattagtttctgttcctcaggacagttttctcataaggaattggtggcctttagagctagctgtcgtgctgcagcctctcaccacactatggtactttttaccacttcatgcaaatatctaccaggagcattttcagattatgtgcagcttctattaatttctgcttctgtgcacaggaattggttattggccaagaaacaagctcaatatagacctctctggtcatactatccctattaatgtttatacaaaaatagagtcagattactgacactagagttggcactgcttgagacgatcttttaacagagcagttaacttttccatagtttgtgttctggctctattcctctcttcttttgaactggcttctaaataatcttataagtatgtctggatatattcaattaagatcccttataatagagactatttggctgatgtaatttaagtcctgtaaacccttttttctttttctttttttttttttttttgagacagagtctcactctgttgcccaggctggagtgcagtggcgtgatttcggctcactgcaacctccacctcccaggttcaagtgattctcctgcctgagcctcccgagtagctggaattataggcatgtgccatcatgcccgactaatttttgtatttttagtagagacagagtttcaccatgttggccaggctggtctcgaactcctgacctcaagtgatccacccacctcggcctcccaaagtgctgggattacagacgtgaaccactgcgcccaacctaaatcctataaacttaagagcagcctgaataatcaacttccccctctagctaatctaccaaaaggaagggcta

SEQ ID NO: 50504 - DNA, 1733 bp, Homo sapiens
  misc_feature (1)...(1733): n = A,T,C or G
tnnnnnnnnnnnnnnnnnnnnnnnnnnnnnnnnnnnnnnnnnnnnnnnnnnnnnnnnnnnnnnnnnnnnnnnnnnnnnnnnnnnnnnnnnnnnnnnnnnnnactgaatctctttcaattcactgagaaccagatgaatctctgcttctggaacttgaaactaaagttaatccctttccacagatcagcagaatttaccatcaattttacttaaaaaatttatttaaatttaaaacacatttcaaaacaaatgcaggtcccacttttcacttttctaatacctagtttgaccagatttgctgagtagctaaaaaaaaaaaaaaaaaaaaaccctgaaaggagggagactatggccatataaaatttaaagcttatttaacacattttattatctcaaaaaaaaaccctggttccaaaaagacctatagagccagagccatgtcacatgccattaggtttccttagacaataagcatggattctagacaaggttaacataggtatgaaatgagtgggggaaaagttgtggggaccccactgataggtagggagactcagttctcgtcaccttaagacatagctaactgcctcaacttccaccagtcagggcctcattctgttcagctgattgaaaacgtaaaccaataaagtccctggttaagacattttgctctcagagctattcagtgatttttctgaattgagatccctcctctttaatggcgtgttgtaaacttttactgactcggggcacagtacctcctggtagattgtcatttattccattttcagagaggctcaccttctgtgcccccaaatcatagacttactaggacacttgacagtttacttgaatcacacacaacccacatgcctgaccaattattagtttctgttcctcaggacagttttctcataaggaattggtggcctttagagctagctgtcgtgctgcagcctctcaccacactatggtactttttaccacttcatgcaaatatctaccaggagcattttcagattatgtgcagcttctattaatttctgcttctgtgcacaggaattggttattggccaagaaacaagctcaatatagacctctctggtcatactatccctattaatgtttatacaaaaatagagtcagattactgacactagagttggcactgcttgagacgatcttttaacagagcagttaacttttccatagtttgtgttctggctctattcctctcttcttttgaactggcttctaaataatcttataagtatgtctggatatattcaattaagatcccttataatagagactatttggctgatgtaatttaagtcctgtaaacccttttttctttttctttttttttttttttttgagacagagtctcactctgttgcccaggctggagtgcagtggcgtgatttcggctcactgcaacctccrcctcccaggttcaagtgattctcctgcctgagcctcccgagtagctggaattataggcatgtgccatcatgcccgactaatttttgtatttttagtagagacagagtttcaccatgttggccaggctggtctcgaactcctgacctcaagtgatccacccacctcggcctcccaaagtgctgggattacagacgtgaaccactgcgcccaacctaaatcctataaacttaagagcagcctgaataatcaacttccccctctagctaatctaccaaaaggaagggcta

SEQ ID NO: 50505 - DNA, 1733 bp, Homo sapiens
  misc_feature (1)...(1733): n = A,T,C or G
tnnnnnnnnnnnnnnnnnnnnnnnnnnnnnnnnnnnnnnnnnnnnnnnnnnnnnnnnnnnnnnnnnnnnnnnnnnnnnnnnnnnnnnnnnnnnnnnnnnnnactgaatctctttcaattcactgagaaccagatgaatctctgcttctggaacttgaaactaaagttaatccctttccacagatcagcagaatttaccatcaattttacttaaaaaatttatttaaatttaaaacacatttcaaaacaaatgcaggtcccacttttcacttttctaatacctagtttgaccagatttgctgagtagctaaaaaaaaaaaaaaaaaaaaaccctgaaaggagggagactatggccatataaaatttaaagcttatttaacacattttattatctcaaaaaaaaaccctggttccaaaaagacctatagagccagagccatgtcacatgccattaggtttccttagacaataagcatggattctagacaaggttaacataggtatgaaatgagtgggggaaaagttgtggggaccccactgataggtagggagactcagttctcgtcaccttaagacatagctaactgcctcaacttccaccagtcagggcctcattctgttcagctgattgaaaacgtaaaccaataaagtccctggttaagacattttgctctcagagctattcagtgatttttctgaattgagatccctcctctttaatggcgtgttgtaaacttttactgactcggggcacagtacctcctggtagattgtcatttattccattttcagagaggctcaccttctgtgcccccaaatcatagacttactaggacacttgacagtttacttgaatcacacacaacccacatgcctgaccaattattagtttctgttcctcaggacagttttctcataaggaattggtggcctttagagctagctgtcgtgctgcagcctctcaccacactatggtactttttaccacttcatgcaaatatctaccaggagcattttcagattatgtgcagcttctattaatttctgcttctgtgcacaggaattggttattggccaagaaacaagctcaatatagacctctctggtcatactatccctattaatgtttatacaaaaatagagtcagattactgacactagagttggcactgcttgagacgatcttttaacagagcagttaacttttccatagtttgtgttctggctctattcctctcttcttttgaactggcttctaaataatcttataagtatgtctggatatattcaattaagatcccttataatagagactatttggctgatgtaatttaagtcctgtaaacccttttttctttttctttttttttttttttttgagacagagtctcactctgttgcccaggctggagtgcagtggcgtgatttcggctcactgcaacctccacctcccaggttcaagtgattctcctgcctgagcctcccgagtagctggaattataggcatgtgccatcatgcccgactaatttttgtatttttagtagagacagagtttcaccatgttggccaggctggtctcgaactcctgacctcaagtgatccacccacctcggcctcccaaagtgctgggattacagacgtgaaccactgcgcccaacstaaatcctataaacttaagagcagcctgaataatcaacttccccctctagctaatctaccaaaaggaagggcta

SEQ ID NO: 50506 - DNA, 1733 bp, Homo sapiens
  misc_feature (1)...(1733): n = A,T,C or G
tnnnnnnnnnnnnnnnnnnnnnnnnnnnnnnnnnnnnnnnnnnnnnnnnnnnnnnnnnnnnnnnnnnnnnnnnnnnnnnnnnnnnnnnnnnnnnnnnnnnnactgaatctctttcaattcactgagaaccagatgaatctctgcttctggaacttgaaactaaagttaatccctttccacagatcagcagaatttaccatcaattttacttaaaaaatttatttaaatttaaaacacatttcaaaacaaatgcaggtcccacttttcacttttctaatacctagtttgaccagatttgctgagtagctaaaaaaaaaaaaaaaaaaaaaccctgaaaggagggagactatggccatataaaatttaaagcttatttaacacattttattatctcaaaaaaaaaccctggttccaaaaagacctatagagccagagccatgtcacatgccattaggtttccttagacaataagcatggattctagacaaggttaacataggtatgaaatgagtgggggaaaagttgtggggaccccactgataggtagggagactcagttctcgtcaccttaagacatagctaactgcctcaacttccaccagtcagggcctcattctgttcagctgattgaaaacgtaaaccaataaagtccctggttaagacattttgctctcagagctattcagtgatttttctgaattgagatccctcctctttaatggcgtgttgtaaacttttactgactcggggcacagtacctcctggtagattgtcatttattccattttcagagaggctcaccttctgtgcccccaaatcatagacttactaggacacttgacagtttacttgaatcacacacaacccacatgcctgaccaattattagtttctgttcctcaggacagttttctcataaggaattggtggcctttagagctagctgtcgtgctgcagcctctcaccacactatggtactttttaccacttcatgcaaatatctaccaggagcattttcagattatgtgcagcttctattaatttctgcttctgtgcacaggaattggttattggccaagaaacaagctcaatatagacctctctggtcatactatccctattaatgtttatacaaaaatagagtcagattactgacactagagttggcactgcttgagacgatcttttaacagagcagttaacttttccatagtttgtgttctggctctattcctctcttcttttgaactggcttctaaataatcttataagtatgtctggatatattcaattaagatcccttataatagagactatttggctgatgtaatttaagtcctgtaaacccttttttctttttctttttttttttttttttgagacagagtctcactctgttgcccaggctggagtgcagtggcgtgatttcggctcactgcaacctccacctcccaggttcaagtgattctcctgcctgagcctcccgagtagctggaattataggcatgtgccatcatgcccgactaatttttgtatttttagtagagacagagtttcaccatgttggccaggctggtctcgaactcctgacctcaagtgatccacccacctcggcctcccaaagtgctgggattacagacgtgaaccactgcgcccaacctaaatcctatraacttaagagcagcctgaataatcaacttccccctctagctaatctaccaaaaggaagggcta

SEQ ID NO: 50507 - DNA, 602 bp, Homo sapiens
catcaggcaagagagcttgtgcaggggaactcccctttataaaaccatcagatcttgtgagacttattcacaatcatgagaacaacatgagaaagactcgcccacgtgattcwattacctccaaccagatatctcccatgacatgtgggaatcatggaagctgcaatttaatatgagatttgggtggggagacagccaaaccatatcagtgtccctttgtatttctttttctgtgaatttcagtaagaaattgctcagtgtaaagtcaaattcgctaaaatgacttaaaagctcctatctaacccagcctcattgacctcatcattcactctacttcagacacactggcatccttacggtgctttgaatacaacaaactcatgcacacctctgagattttctcttcctgatctctccacctagtatacctttcccagatatctccgtgttgctctcaacctatatctttcaattctgtgctcaacgaccactttctgaaaaaggtctttcttaaaagtcttgtgtaaaatagaaattcagctcatcactctcaccctgcttctttcctgtaacatttgtcatcatctgaaatattatatgtg

SEQ ID NO: 50508 - DNA, 598 bp, Homo sapiens
agacaagaacgagaagaggtatataggtgaagagttcatgkggcttgcttttttgaagtaaggttcccagttagttgagttgtttcattctcaaaacaaaaacataatgtaataaagaatacaggtccatgttcatatttcattatatttcaaaaatccagttcttagtctctatggcagtgatttgaagtagcaagtgaaaagcactcatgtataaagcatttaacaaacttcaacataaaatcagaaatgtgtatgtgtgtgtgtgtgtatatatgcatatatatgtaaatttattccctaagaaatatatatatttcttctctaagttcttaacctaattgctgtttttgatgtttttttatcagatttcatgtaaccaagagtagctctgtttacagaccttgcttctataatctgtaagtttttaattgaccttacctcaaaaataaaaatgcatgcacaatagccaattaatgctgaacaatcagttggcaattatatgtttatcatttttcgctttgtatcaaagtacctcactcaaaaccatcaaatctgttgattaagctactaggaatccaatctaaaagctttttta

SEQ ID NO: 50509 - DNA, 1679 bp, Homo sapiens
tccactccctgctaggggctacagtcctccttcaggtcctctgcatctcatctctttcttatctcaaaacactggcatatgctctgccctcagccttgaaagcaactccaccctctctccatctcctccccatatccatcctccagctttagtggcgtgacttatcccacaaacacagggcatgcaagtttcactgtcagaaccttcttccagtcaacttatatctgattccagccctatcatgccaggctggaggaaaattagatctccgtctttcctgaggctttcactctaccctaccctccaaattttacagaatcctggggtcttatgccgggaagcccccagcgtccagtcagcgttcatcagtctgcctctgcctgtgattgcctggaaacccctgtccagtccgtgtggtcatgggacctgcaggctccactgtttcctggagctgcctggaccacaggacactggggaaggcggggcagccgggtggccagagccctgccytctgtgtgcaccacccagacagcctctctggggtcctgccacctcctggggttgcaaggacagatggctgcatagttcgtttgttctctctccacagtcctgagacattgtttctctcttgtgcaacatctcccagtctctctctctccccgttggggacacctgtaacaactatttccgtgtgctctcctcccactaacaaaggtcctggaagctaagactcagaaagcctcacttcctgcttccagggggaaagggaaatgataacagaaaggaaacaccaactcagaaaggtatcctgcctcattccagagagccttccctggccctgcaggctacgctcactgatctgtctcttaggactcttctccttcctttctaaagctcagtgtccccgtatccacatgttcaacgtctgagtcacccaccagactggaagccctgtagggcccggagcctcacacagtgcctgccactttgtgtttattagtactggtagaataagtggacaaaggcaggaatcagcagacagtatacttgctagcccttttgtctgcacaggcaaaacctatatacttggaaaatctgttctgggttttgacaaactctgaaacacccagaaaaaaaaaaaatgcttgctctttcttgagaaactgctgtaaagcccaggctagaaaggataaaggaatcgattactggtcttggtcctgatagaaaaaattgtggaaagccaaaggaaaggtacctgttttaaaggaagggagcttaaaatgcaggcaaacagcagacaacatgtcatcgtcacttgtttttattctagctaatggtgtttaagtggctgcggtgatacagtgtctcagccctggatgacacacactctgtaaagggaagtctgaagtgtgggagcaaccactgcgcattctattgtgtcccacatcagaataacaactcttacctcctctccagcactcttgcttaggggagcggtggtggtttcaaaataggtccacaaattctctgctgaacctccctgcaagaggtggagtctaattcccatcttcttgaatatgggctggactgagtgactcaattgtaacaaggaggacaaagtggaatgaaggtgtacaattccaggatgaggtcatgagaaggcacaggggtgaatgccc

SEQ ID NO: 50510 - DNA, 563 bp, Homo sapiens
agagtgacaccttgtctcaacaacaaaaaaaaagaaattctataacaaatggtttttcttagcttttttcatacaataaagtttttaagttttcgcatatttatttacttcctaaaattctatccaattgtatttcaggttgcaacaaggacagtgtcagagcaggctgtaaaaaatgtggctaccgtaagtattctaaaagatgacatgctttgcattattcatactggaatcatggcctctttgggcaatataatgtagcaccctgatttcaggggcccagttgcatagtcctttagccctaagctaacatctagttacagaaattcctctgttagcactaaatattcacttttcttccctgctttagacccagtaacaggtagctatgtatctgatgactaccaaaagtarcatgaagatacaggtggttagtagtagattaaggagtttggagaaagtatattttttaaaaactatatacatacttattcttttccccctttccacatactaggagaaaaagtgaaggcaatgcaaactatttatgaagattttttgtg

SEQ ID NO: 50511 - DNA, 581 bp, Homo sapiens
tagttattttaaaaaatccaggttaaatattcacaaggctgagtggctcagtggtctcaaagcctgctcctgtctgattctatgaggctatctcactatttaacaaatatatacctgactgaaattctcaatagaccaggaatcaaggatttaatgagaaaggaccaaagccatctgaaggcatcagaaaagacagagatgttcttagagtctgattgggctggtgttccctgcctcyacctgacaggcttgccttcaaattaattaaaaagtcaaatttgactgtcatcccagtatctggtgaaggaacaagctgtccataaatcaccttgcgtttgcataaaaattgtatgcttttctaagtgctttatcatccattggctcatctgaacttcatggcaactctgcaaagtaggcaagcaaagaattggtgaaacagccatagaaaatgctggagccagactgtcagagttcaaactcttgctcagccttttcccagctgatgaccttggccaagtgactgacctctcagtacctctacctcctttctccataaaatgggcacaatcataatacctgca

SEQ ID NO: 50512 - DNA, 582 bp, Homo sapiens
ttattttgagatggagtctcgctctgtcacccaggctggagtgcagtggagcgatctcggctcactgcaacctctggcccctggtttcaagctattatcctaaagtaaggttcttttttcttttgataagtgttctttctactttccaaatcaataacttaacaaaaggaaggaagaaaacaatgcagtaaagaactgaagaaaagaaaaacagaacaagggtggaaagaggcaataaaagaagaaaggaataaggaaggaagraaaaaacggaaaaacactgggatcacaattacagagagagaaaaaataaataagctataaagcttaatatccttggacctaaatttttcaacatatgggatgctacttgtaaatatatttaaaactttcacaggttcatattttatctttttatcattttatatagaagagagtatggagttaagtgagtactgttgttgatgttgtatttatttgattgatcaattttctggaaacagaatctgaaatgaagactttcacaaagtacagaagaggaatgtaggagacatagctgtaagaaattagggaagaggcgca

SEQ ID NO: 50513 - DNA, 582 bp, Homo sapiens
ttattttgagatggagtctcgctctgtcacccaggctggagtgcagtggagcgatctcggctcactgcaacctctggcccctggtttcaagctattatcctaaagtaaggttcttttttcttttgataagtgttctttctactttccaaatcaataacttaacaaaaggaaggaagaaaacaatgcagtaaagaactgaagaaaagaaaaacagaacaagggtggaaagaggcaataaaagaagaaaggaataaggaaggaagaaaaaaacggaaaaacactgggatcacaattacagagagagaaaaaataaataagctataaagcttaatatccttggacctaaatttttcaacatatgggatgctacttgtaaatatatttaaaactttcwcaggttcatattttatctttttatcattttatatagaagagagtatggagttaagtgagtactgttgttgatgttgtatttatttgattgatcaattttctggaaacagaatctgaaatgaagactttcacaaagtacagaagaggaatgtaggagacatagctgtaagaaattagggaagaggcgca

SEQ ID NO: 50514 - DNA, 545 bp, Homo sapiens
tcacaaatttttaacgtttaattttgtacattagtagcattacttcaaaattaacaggaaacttaatgttaaagcaagcaaacaaacaaacaaggaagcagtcctgaggggctttctggtgaggcccctggtgccaccttctaggtcttagagttttytgatgcacagttgtgaaaaataacaaacccaatttaaagttattatttaatttgtgtgaaaactgaagcttaaagaactttattctcttatataaggtcatccagatagatggtggcagacctctcactttggtatgtattgttcttttatttctttattaattttctacactatgctgggcttcaatttaaagactgacttctaaaaatagctcttattgattttctcatcataaaaatattatattttatctcaagaaaatttattaaataaaaacagtaaaatgaagaaatgaaaagtctaattaacactccataaaagaactgtaaatatttggtggatttacatataaacacttaactctgaaattagatcctggaatctct

SEQ ID NO: 50515 - DNA, 566 bp, Homo sapiens
tgagcttaatcctaggaaaagttgtcatggcactcttcacatcaaaaacatcaagattttcagagttcttcacctgaatatctgggtttccttcttgggattaatacaatcaataataactataatgatagcaaatgcaaaacaatgaataatcaactacttaccgccttgctatgtactgtccaaagtgatttatgtaagctatttattttaaacctcaccaaaaccttgtaggtagatatttatgtcctaatgttacaagtaacaaaaactaaatgaaaaagtcaagcaacttaattcactcttaaatacgtactatagagcacctttgtttacttgttcacctctacagcagcaaayaaatcaataaaaaatatctaacagagattacaatgtaactggggagtcacagacacagacacacacacacacacacacacacacacacacacacacacactaggttggccagaagtatcttaaaacatacaaaattcctagttaaatttaagtttcagatgacataaattttactgtctcagatactgcatgtttaaaggatgtca

SEQ ID NO: 50516 - DNA, 566 bp, Homo sapiens
tgagcttaatcctaggaaaagttgtcatggcactcttcacatcaaaaacatcaagattttcagagttcttcacctgaatatctgggtttccttcttgggattaatacaatcaataataactataatgatagcaaatgcaaaacaatgaataatcaactacttaccgccttgctatgtactgtccaaagtgatttatgtaagctatttattttaaacctcaccaaaaccttgtaggtagatatttatgtcctaatgttacaagtaacaaaaactaaatgaaaaagtcaagcaacttaattcactcttaaatacgtactatagagcacctttgtttacttgttcacctctacagcagcaaataaatcaataaaaaatatctaasagagattacaatgtaactggggagtcacagacacagacacacacacacacacacacacacacacacacacacacacactaggttggccagaagtatcttaaaacatacaaaattcctagttaaatttaagtttcagatgacataaattttactgtctcagatactgcatgtttaaaggatgtca

SEQ ID NO: 50517 - DNA, 627 bp, Homo sapiens
gattttcatacttgaagttagatgagtagaaacaactggaccctctgagattaaatgatgcacctatcaaaagaaagaatgagtcaggtgaccttaatcctagggcttaaagtgttttgagggactcatggttctacgtagccaatggctgatgctaaaaatcacttttacccacttgcatgtgtgagcatcagtaaaattaatgttcatgagactactcagcaacgtgtgacaataaaaatgtttttattaaagaatccccagaccgaggggaattatcatagaactatgttagcttagattggtgagcatcactaggagatagtccatatattggccaccagggcgacacaaaggttacttttaggaagtagtaagtgaagagtctggttcasaaaaatcaatgacatggcccagccttttctatatgggatcccatgatcttcacatgtcttttgcagaacattcagagaagaggtagaagaaataaagaccaggatgtcgggccatctaaaaattcgtaatgaaattttgtttcagagggtgcgtttgtgatgacctgactttcctgggaggtggccactgacagagataaagtgaatatacaattcatattcgaatgtgaga

SEQ ID NO: 50518 - DNA, 548 bp, Homo sapiens
gcagtgattttgatgtagatgagccaattttcagttgcatccttttcaagtttaaggaagaaaagggtcttaagacatcccaataggaatactttaggaatcttaatgcccgcgccccaccaaaaaaaaaaaaaaaaacaccccaccgattcaggtctagcttcgtaaaaagatattttctccaatccaagatgaacggtaccgtctgtcagaagactgactttttaagaaggagatttayaataagtttattctttgtgtttatggcaaatcataacacccatgtcttcaaacgtgctggttccctttgctctcttctcccccaaaccagagcacaaccatccagcatctaagctatttaaagtaagtcaaacagtttagtacagttacttttcatatatactccttaaggttatgatgaagtctaaatctacatgtccagtttatctgcaagccattccttgacagataacagagaaacaaagatgcaataagaattaataaggtatgatgtaaagcaccctaagtgaagatttagaaaaacaaat

SEQ ID NO: 50519 - DNA, 577 bp, Homo sapiens
tggttagagcctgggtgcctgcatgactgcatggaggagagccctctcactccaccactggtaccccctaatggactgctaggtgagtgcaagacagctttgtgtcaagtcacttagaatttgagggtgtttgtcttaacatttagcccatcttgactttagcagtcagccaaaccaccacagggattttgtaactttctgtggctttagattgtttgaaagtttcatgaaatgagagatgaccggagacagtctctaaagcccttctcagctcagacattcaaggtggctcactgctcrctaatatgtagttaagaaatgccctgtaccctactgggaacctatgagccagcagtcctagagaagccttcatagggtcctaggaacaccacctatagggtctctctcatcctctgggtttcctaccctgggccagccctgcagcaactctccagtttcccaccaggtcaacatttaggggacagagtgtgagagagtcactaaagcccagatcatgtgagtgagccggagtgactgagtatgtgtgcgccagtgtgtaggggctgcacctaagttg

SEQ ID NO: 50520 - DNA, 577 bp, Homo sapiens
tggttagagcctgggtgcctgcatgactgcatggaggagagccctctcactccaccactggtaccccctaatggactgctaggtgagtgcaagacagctttgtgtcaagtcacttagaatttgagggtgtttgtcttaacatttagcccatcttgactttagcagtcagccaaaccaccacagggattttgtaactttctgtggctttagattgtttgaaagtttcatgaaatgagagatgaccggagacagtctctaaagcccttctcagctcagacattcaaggtggctcactgctcactaatatgtagttaagaaatgccctgtaccctmctgggaacctatgagccagcagtcctagagaagccttcatagggtcctaggaacaccacctatagggtctctctcatcctctgggtttcctaccctgggccagccctgcagcaactctccagtttcccaccaggtcaacatttaggggacagagtgtgagagagtcactaaagcccagatcatgtgagtgagccggagtgactgagtatgtgtgcgccagtgtgtaggggctgcacctaagttg

SEQ ID NO: 50521 - DNA, 603 bp, Homo sapiens
tggagtatgacttgaaaactggaatttataaaagctacccaggtgattctaaatgtgcactaaagtrtgggaaccaccattattggcaatttcttactggcccggaattgtgccttttctaggttaaagaagaggagccaaatcatcttctaattaatgagtaatctctgctggagagaaagttccctcgtatggggctgctatgcttaatctggtgtgtattcctattgtttgacctgtacagtttgctgccagtgtgcagagccatgggtccatgggacaggacaggattactctggcagggagatcacacaggaggagggctggcatgtcaatggtgggcatgtattggccactgggaagctctagctggcaagctgggtgctgccagatgaaagaatttgaagtgccttgagggtgaaccaggggtgtgggtagggcattggatagctttcagtggttctgaggagggagaaccagtgatggagcccagaaggagagactttagaaaattgaaaggtattggaacccaccaatctgaaaagatattgctttttaattggatcaaggtccctaaggattaagccagtaattctttaaatg

SEQ ID NO: 50522 - DNA, 603 bp, Homo sapiens
tggagtatgacttgaaaactggaatttataaaagctacccaggtgattctaaatgtgcactaaagtgtgggaaccaccattattggcaatttcttactggcccggaattgtgccttttctaggttaaagaagaggagccaaatcatctkctaattaatgagtaatctctgctggagagaaagttccctcgtatggggctgctatgcttaatctggtgtgtattcctattgtttgacctgtacagtttgctgccagtgtgcagagccatgggtccatgggacaggacaggattactctggcagggagatcacacaggaggagggctggcatgtcaatggtgggcatgtattggccactgggaagctctagctggcaagctgggtgctgccagatgaaagaatttgaagtgccttgagggtgaaccaggggtgtgggtagggcattggatagctttcagtggttctgaggagggagaaccagtgatggagcccagaaggagagactttagaaaattgaaaggtattggaacccaccaatctgaaaagatattgctttttaattggatcaaggtccctaaggattaagccagtaattctttaaatg

SEQ ID NO: 50523 - DNA, 603 bp, Homo sapiens
tggagtatgacttgaaaactggaatttataaaagctacccaggtgattctaaatgtgcactaaagtgtgggaaccaccattattggcaatttcttactggcccggaattgtgccttttctaggttaaagaagaggagccaaatcatcttctaattaatgagtaatctctgctggagagaaagttccctcgtatggggctgctatgcttaatctggtgtgtattcctattgtttgacctgtacagtttgctgccagtgtgcagagccatgggtccatgggacaggacaggattactctggcagggagatcacacaggaggagggctggcatgtcaatggtgggcatgtattggccactgggaagctctagctggcaagctgggtgctgccagatgaaagaatttgaagtgccttgagggtgaaccaggggtrtgggtagggcattggatagctttcagtggttctgaggagggagaaccagtgatggagcccagaaggagagactttagaaaattgaaaggtattggaacccaccaatctgaaaagatattgctttttaattggatcaaggtccctaaggattaagccagtaattctttaaatg

SEQ ID NO: 50524 - DNA, 603 bp, Homo sapiens
tggagtatgacttgaaaactggaatttataaaagctacccaggtgattctaaatgtgcactaaagtgtgggaaccaccattattggcaatttcttactggcccggaattgtgccttttctaggttaaagaagaggagccaaatcatcttctaattaatgagtaatctctgctggagagaaagttccctcgtatggggctgctatgcttaatctggtgtgtattcctattgtttgacctgtacagtttgctgccagtgtgcagagccatgggtccatgggacaggacaggattactctggcagggagatcacacaggaggagggctggcatgtcaatggtgggcatgtattggccactgggaagctctagctggcaagctgggtgctgccagatgaaagaatttgaagtgccttgagggtgaaccaggggtgtgggtagggcattggatagctttcagtggttctgaggagggagaaccagtgatggagcccagaaggagagactttagaaaattgaaaggtattggaacccaccaatctgaaargatattgctttttaattggatcaaggtccctaaggattaagccagtaattctttaaatg

SEQ ID NO: 50525 - DNA, 638 bp, Homo sapiens
tttatcttgaattcactgcattggattcatttttttgttgttgttcatttgccgatttgtatcygcattcttccctgggctttcttcccacattcttaaaccaaaatgttgtttacttttgtcttttaaataaccaaaaccaagcaaaacaaaatctattcctatcatcgtcacaaatcttcagtaggaaaccttgaaactgattctggagtcagactgatttaggtcccagtctggtatctctaatttattagctgtgtggtcttaagctatgtaatctctttgtgtcttagttgtctgttccacaaaatggtcagattcatgagaccttctaagtctttttaagtactaaatgagagagtgcttattaaatattagcatgacacataggggttccataaacggtggccgtcatcattattctgtaattatcagtgtttcacatctcactggcatcaaatctcctgtttctcatctcattgctttttttttttccatttacaatctaatgttatcttctattttcctcctggtaaagtaattgtccatttttcttagtcttttcttgacaacctggcctctcctttcataaaaggctctaataagcatttcctatagcacacctgcagccatgtaca

SEQ ID NO: 50526 - DNA, 595 bp, Homo sapiens
ggaacaccaagacgagacttctacaggttttattttaaacatatgtttctaaaacagtcagtggtgagtgccaaaaaacacagcatcaagtcgattttcctttttctgtgtacatgacttgctttggaaactgcctatacatgccctacatttttttctctcatcaaaaacaatcgaggaayggtacaaggagttctgaagcataacctagtcgtttcattcgagtggcgagagagggacgtgatgtgatgtgggtgccacgtaagtgtcgtgctgggggcagttgggaaagagtctgctcgttccatcggaatgcccagaagagcaggggcttccactgcactttgcaaaacaagcccagccggtggctgccctgcaagctgctcttggaaggaggggaaaggctctcccttaccactctggacttccctgggggttcaagcctcatgcaagagagcccagtcagcatttaagccccagaggcaggtgtgatctgctgttcccctcttttggaaatatgggtctcgtaaggtctctccctgaagctgtgtgatggaaatcaacattgtgtgtgtgctagctcagcataaagaaa

SEQ ID NO: 50527 - DNA, 593 bp, Homo sapiens
ttttagttaattgatctttgacatttatttacttggtgtatactatctttatacctttgcattatggcatataccagtgatttctggaactaggtcattattagaatcaccttggaaactttggtaaactataaatttctggctcaacccttaaaatatactaattcactagctctgggatgtagcttgtattttaaacattaatgtaaaagctccaagtgattttgatgaagctagaattgagtatgacatctaaacacattataaaaaatgcttttctttccaccaacgataaaaatgggctgggcactgtggctcatgcttgtaatcccagcactttgggagaacaaggtaggaggatcgcttgagcccaggagctcgaaaccagccctagcagcatagtgagactttgtttctaaaaaaaaaaaaataagacaaattagccaggtgtggtggtgtasatttgtagtcccagcttgcttgggaggctaaggtgggaggatcccttgagcctaggagttcaaggctgcagtgagccgtgatttgtgccactgcactccagcctgggcgacagagtgagaccatgtctttaa

SEQ ID NO: 50528 - DNA, 567 bp, Homo sapiens
ccctattccccccatagcatggctgaccttcctctgagcccctcgtggatgcccacacacggcaagacgtttcctcaaagatgctcttctgcaaagctgcactttctcggttgccgctgccaccttggcacctctctggggtaccttgtactgccctgtcctccccacgccctgaggggccgtcctaggcagcactcaccctggtcatccctgtttccaccacaagactgtttgtagccgagcttgggagttgtgttgtgtastgttgacttgagttgcatcgtgttgtgttgacttgagctgccctcccctgagtgttactgagttgaggtgactgggttgattttagcttcacaggtgatctgaacccagctgagtggcttccatggagctgatctgaacccagctgagtggcttccatggagctgatctgaacccagttgagtggcttccatgaagctgatccggactaagctaaactgagtttcattgagcagcttgtttagctggtgtgtgccaggtggtctctcggggggtccgatgggatacctagtgtcttaatctgtt

SEQ ID NO: 50529 - DNA, 1563 bp, Homo sapiens
tcttaaaccaattcaagaatggattagtccataggaaaaatattttttaaaaaatctatgataaaagctatttaagtaaaatagagtattactacatcaatatatgtttcttccttttctctattttgtctctaactggattgtttttggggttcagaattgcaactttctctatatctacatatatttctgtagaaatgctattacaggccgggcatggtggctcacgcctgtgatcccagcactttgggaggctgaggcaggtggatcacctgaggtcaggagtttgagaccagcctgacttacatggtgaaatcctgtctctactaaaaatacaaaattagttgggtatcggggtgcatgcctgtaatccaagctaccctagaggctcaggcaggagaatcacttgaacccaggaggcggaggttgcagtgagccaagatcgtgccattgcactccaacctgggcaacaagaatgaaactccgtctcgaaaaaatatatatatcataaaaggcataaatttttcatttacatggagcttgctaaaaatatcctgtatgattaacatacaattaaatttataatgttaattaaaaattagcatctgctagaacagaattcatatttaaggtcttttttatattaaatgtaacaatttgatcttgaacacgttcctaaatttttcaagttcttaattgtaaaaaggcaacccaataccattttatctcagtggtttttgctaaggactaaaaaacgacttaaaacattttgtgttatgtaaaaactaattcactcaagtagctatgctcatttttttagttagaaaagcagtaatttcataataaataagtgccagttatagtcagaagaaacaataacctgagggaaagaggaagagatggaagaattgtaacgtgttctatgtccttgtctgttgctaaatgctggttctatgggtagggcccagggcttcatctgagtgcaggctacaataggtttaatactgatatcagtttggggcctgtgtgtgtatgtycccagtctaggatttcctaattcttctcatgagaggactcccttttaatttaaaaggattattttttgcaagactcttcttccccatttaacggcgcttatatgtttgttatatatcaacgaaaaaacacatgccacaaagcgtttatgaattcaatatcaatttaaaatgaatacatgttactaattacatagagacttaatgtatgtttaaaatagtatatatatgtgtgtgtgtgtgtgtgtgtgtgtgtgtgtgtgcgcgcgctttagtctatagataattcgatttaccaaccccttggaaaggaatcccagtacatctcaaactgggaattgctgacattgctgatgtattaaagtgacttcctaattggaaaattctatatgacccggttattttcttcccaaaccattctatctttaaataagctttgtgcctttaagaggaattatgattataccgcatactatgtatatatatttaaatgaacaattaatgaaaattgttcccaattatttaaaaa

SEQ ID NO: 50530 - DNA, 1563 bp, Homo sapiens
tcttaaaccaattcaagaatggattagtccataggaaaaatattttttaaaaaatctatgataaaagctatttaagtaaaatagagtattactacatcaatatatgtttcttccttttctctattttgtctctaactggattgtttttggggttcagaattgcaactttctctatatctacatatatttctgtagaaatgctattacaggccgggcatggtggctcacgcctgtgatcccagcactttgggaggctgaggcaggtggatcacctgaggtcaggagtttgagaccagcctgacttacatggtgaaatcctgtctctactaaaaatacaaaattagttgggtatcggggtgcatgcctgtaatccaagctaccctagaggctcaggcaggagaatcacttgaacccaggaggcggaggttgcagtgagccaagatcgtgccattgcactccaacctgggcaacaagaatgaaactccgtctcgaaaaaatatatatatcataaaaggcataaatttttcatttacatggagcttgctaaaaatatcctgtatgattaacatacaattaaatttataatgttaattaaaaattagcatctgctagaacagaattcatatttaaggtcttttttatattaaatgtaacaatttgatcttgaacacgttcctaaatttttcaagttcttaattgtaaaaaggcaacccaataccattttatctcagtggtttttgctaaggactaaaaaacgacttaaaacattttgtgttatgtaaaaactaattcactcaagtagctatgctcatttttttagttagaaaagcagtaatttcataataaataagtgccagttatagtcagaagaaacaataacctgagggaaagaggaagagatggaagaattgtaacgtgttctatgtccttgtctgttgctaaatgctggttctatgggtagggcccagggcttcatctgagtgcaggctacaataggtttaatactgatatcagtttggggcctgtgtgtgtatgtccccagtctaggatttcctaattcttctcatgagaggactcccttttaatttaaaaggattattttttgcaagactcttcttccccatttaacggcgcttatatgtttgttatatatcaaygaaaaaacacatgccacaaagcgtttatgaattcaatatcaatttaaaatgaatacatgttactaattacatagagacttaatgtatgtttaaaatagtatatatatgtgtgtgtgtgtgtgtgtgtgtgtgtgtgtgtgcgcgcgctttagtctatagataattcgatttaccaaccccttggaaaggaatcccagtacatctcaaactgggaattgctgacattgctgatgtattaaagtgacttcctaattggaaaattctatatgacccggttattttcttcccaaaccattctatctttaaataagctttgtgcctttaagaggaattatgattataccgcatactatgtatatatatttaaatgaacaattaatgaaaattgttcccaattatttaaaaa

SEQ ID NO: 50531 - DNA, 1563 bp, Homo sapiens
tcttaaaccaattcaagaatggattagtccataggaaaaatattttttaaaaaatctatgataaaagctatttaagtaaaatagagtattactacatcaatatatgtttcttccttttctctattttgtctctaactggattgtttttggggttcagaattgcaactttctctatatctacatatatttctgtagaaatgctattacaggccgggcatggtggctcacgcctgtgatcccagcactttgggaggctgaggcaggtggatcacctgaggtcaggagtttgagaccagcctgacttacatggtgaaatcctgtctctactaaaaatacaaaattagttgggtatcggggtgcatgcctgtaatccaagctaccctagaggctcaggcaggagaatcacttgaacccaggaggcggaggttgcagtgagccaagatcgtgccattgcactccaacctgggcaacaagaatgaaactccgtctcgaaaaaatatatatatcataaaaggcataaatttttcatttacatggagcttgctaaaaatatcctgtatgattaacatacaattaaatttataatgttaattaaaaattagcatctgctagaacagaattcatatttaaggtcttttttatattaaatgtaacaatttgatcttgaacacgttcctaaatttttcaagttcttaattgtaaaaaggcaacccaataccattttatctcagtggtttttgctaaggactaaaaaacgacttaaaacattttgtgttatgtaaaaactaattcactcaagtagctatgctcatttttttagttagaaaagcagtaatttcataataaataagtgccagttatagtcagaagaaacaataacctgagggaaagaggaagagatggaagaattgtaacgtgttctatgtccttgtctgttgctaaatgctggttctatgggtagggcccagggcttcatctgagtgcaggctacaataggtttaatactgatatcagtttggggcctgtgtgtgtatgtccccagtctaggatttcctaattcttctcatgagaggactcccttttaatttaaaaggattattttttgcaagactcttcttccccatttaacggcgcttatatgtttgttatatatcaacgaaaaaacacatgccacaaagcgtttatgaattcartatcaatttaaaatgaatacatgttactaattacatagagacttaatgtatgtttaaaatagtatatatatgtgtgtgtgtgtgtgtgtgtgtgtgtgtgtgtgcgcgcgctttagtctatagataattcgatttaccaaccccttggaaaggaatcccagtacatctcaaactgggaattgctgacattgctgatgtattaaagtgacttcctaattggaaaattctatatgacccggttattttcttcccaaaccattctatctttaaataagctttgtgcctttaagaggaattatgattataccgcatactatgtatatatatttaaatgaacaattaatgaaaattgttcccaattatttaaaaa

SEQ ID NO: 50532 - DNA, 1563 bp, Homo sapiens
tcttaaaccaattcaagaatggattagtccataggaaaaatattttttaaaaaatctatgataaaagctatttaagtaaaatagagtattactacatcaatatatgtttcttccttttctctattttgtctctaactggattgtttttggggttcagaattgcaactttctctatatctacatatatttctgtagaaatgctattacaggccgggcatggtggctcacgcctgtgatcccagcactttgggaggctgaggcaggtggatcacctgaggtcaggagtttgagaccagcctgacttacatggtgaaatcctgtctctactaaaaatacaaaattagttgggtatcggggtgcatgcctgtaatccaagctaccctagaggctcaggcaggagaatcacttgaacccaggaggcggaggttgcagtgagccaagatcgtgccattgcactccaacctgggcaacaagaatgaaactccgtctcgaaaaaatatatatatcataaaaggcataaatttttcatttacatggagcttgctaaaaatatcctgtatgattaacatacaattaaatttataatgttaattaaaaattagcatctgctagaacagaattcatatttaaggtcttttttatattaaatgtaacaatttgatcttgaacacgttcctaaatttttcaagttcttaattgtaaaaaggcaacccaataccattttatctcagtggtttttgctaaggactaaaaaacgacttaaaacattttgtgttatgtaaaaactaattcactcaagtagctatgctcatttttttagttagaaaagcagtaatttcataataaataagtgccagttatagtcagaagaaacaataacctgagggaaagaggaagagatggaagaattgtaacgtgttctatgtccttgtctgttgctaaatgctggttctatgggtagggcccagggcttcatctgagtgcaggctacaataggtttaatactgatatcagtttggggcctgtgtgtgtatgtccccagtctaggatttcctaattcttctcatgagaggactcccttttaatttaaaaggattattttttgcaagactcttcttccccatttaacggcgcttatatgtttgttatatatcaacgaaaaaacacatgccacaaagcgtttatgaattcaatatcaatttaaaatgaatacatgttactaattacatagagacttaatgtatgtttaaaatagtatatatatgtgtgtgtgtgtgtgtgtgtgtgtgtgtgtgtgcgygcgctttagtctatagataattcgatttaccaaccccttggaaaggaatcccagtacatctcaaactgggaattgctgacattgctgatgtattaaagtgacttcctaattggaaaattctatatgacccggttattttcttcccaaaccattctatctttaaataagctttgtgcctttaagaggaattatgattataccgcatactatgtatatatatttaaatgaacaattaatgaaaattgttcccaattatttaaaaa

SEQ ID NO: 50533 - DNA, 1563 bp, Homo sapiens
tcttaaaccaattcaagaatggattagtccataggaaaaatattttttaaaaaatctatgataaaagctatttaagtaaaatagagtattactacatcaatatatgtttcttccttttctctattttgtctctaactggattgtttttggggttcagaattgcaactttctctatatctacatatatttctgtagaaatgctattacaggccgggcatggtggctcacgcctgtgatcccagcactttgggaggctgaggcaggtggatcacctgaggtcaggagtttgagaccagcctgacttacatggtgaaatcctgtctctactaaaaatacaaaattagttgggtatcggggtgcatgcctgtaatccaagctaccctagaggctcaggcaggagaatcacttgaacccaggaggcggaggttgcagtgagccaagatcgtgccattgcactccaacctgggcaacaagaatgaaactccgtctcgaaaaaatatatatatcataaaaggcataaatttttcatttacatggagcttgctaaaaatatcctgtatgattaacatacaattaaatttataatgttaattaaaaattagcatctgctagaacagaattcatatttaaggtcttttttatattaaatgtaacaatttgatcttgaacacgttcctaaatttttcaagttcttaattgtaaaaaggcaacccaataccattttatctcagtggtttttgctaaggactaaaaaacgacttaaaacattttgtgttatgtaaaaactaattcactcaagtagctatgctcatttttttagttagaaaagcagtaatttcataataaataagtgccagttatagtcagaagaaacaataacctgagggaaagaggaagagatggaagaattgtaacgtgttctatgtccttgtctgttgctaaatgctggttctatgggtagggcccagggcttcatctgagtgcaggctacaataggtttaatactgatatcagtttggggcctgtgtgtgtatgtccccagtctaggatttcctaattcttctcatgagaggactcccttttaatttaaaaggattattttttgcaagactcttcttccccatttaacggcgcttatatgtttgttatatatcaacgaaaaaacacatgccacaaagcgtttatgaattcaatatcaatttaaaatgaatacatgttactaattacatagagacttaatgtatgtttaaaatagtatatatatgtgtgtgtgtgtgtgtgtgtgtgtgtgtgtgtgcgcgcgctttagtctatagataattcgatttaccaaccccttggaaaggaatcccagtacatctcaaactgggaattgctgacattgctgatgtattaaagtgacttcctaattggaaaattctawatgacccggttattttcttcccaaaccattctatctttaaataagctttgtgcctttaagaggaattatgattataccgcatactatgtatatatatttaaatgaacaattaatgaaaattgttcccaattatttaaaaa

SEQ ID NO: 50534 - DNA, 591 bp, Homo sapiens
agaacccacccccaacaaacagggagtggcattttctcccacaggcccaaccttaaacatgtaataatcacataacaacagtaggaacaaatagtaacaagagattgttccgtcacacctaccaacagattgagcagtgttatttataattttgatcctccacaaagcataaaaacaacagtgttttgggccaaatttcacagagcccactatwataggtgaggtctgtgtacaagccaaagtcaagaaagaaccggtgctttgagagaataaaaatgctctctttactcctagggatttaatgcgtggctctgttaccttgcctgcaagctttgttttgggagaatttataggtgcttatgatatacttgtgatgtaaggaccaaacaaaaaataaaacaacatattcatattcatttagcaacatgaaaaacatgcagagaaagaaactctgaacaggcctgagatggaatcttgtaaatcaaaggaataattttttaaagtaaaaaaaaaaagtttattaaaatcaaacaaataaaacaacaaaatatcaaaataaaccaaatatttgtttttaaaaatcagcaaagt

SEQ ID NO: 50535 - DNA, 525 bp, Homo sapiens
gagtgcagtggtgcgatctcagctcactgcaacctacgcctcccaggctcaagcggttctcccaccccagcagcccaagtagctgagactacaagcatgcaccaccatgcccggctaatttttgtrttttttatagagatgaggttttgccatgttggtaggctggtctcaaactcctggcctcaggtgatccgcctgcctcaacctcccaaagtgctgggattacaggtgtgagcccccatgccaggccaaatttccagttttaagaactatatttagggtttatccataatactttccaatccacatatattttgggttaaactttcttttatgatttgagtattttcttctgtgtatttttttcctcccgtccctctttccctccctccttctcctccacctcctcctcttcttttaacgtgttggagctacagtgcaaactagaaaacattgatttatttatgtcctcagcctaatagggatctccagctgtatgtttatttcccagagaagactctcatg

SEQ ID NO: 50536 - DNA, 525 bp, Homo sapiens
gagtgcagtggtgcgatctcagctcactgcaacctacgcctcccaggctcaagcggttctcccaccccagcagcccaagtagctgagactacaagcatgcaccaccatgcccggctaatttttgtgttttttatagagatgrggttttgccatgttggtaggctggtctcaaactcctggcctcaggtgatccgcctgcctcaacctcccaaagtgctgggattacaggtgtgagcccccatgccaggccaaatttccagttttaagaactatatttagggtttatccataatactttccaatccacatatattttgggttaaactttcttttatgatttgagtattttcttctgtgtatttttttcctcccgtccctctttccctccctccttctcctccacctcctcctcttcttttaacgtgttggagctacagtgcaaactagaaaacattgatttatttatgtcctcagcctaatagggatctccagctgtatgtttatttcccagagaagactctcatg

SEQ ID NO: 50537 - DNA, 525 bp, Homo sapiens
gagtgcagtggtgcgatctcagctcactgcaacctacgcctcccaggctcaagcggttctcccaccccagcagcccaagtagctgagactacaagcatgcaccaccatgcccggctaatttttgtgttttttatagagatgaggttttgccatgttggtaggctggtctcaaactcctggcctcaggtgatccgcctgcctcaacctcccaaagtgctgggattacaggtgtgagcccccatgccaggccaaatttccagttttaagaactatrtttagggtttatccataatactttccaatccacatatattttgggttaaactttcttttatgatttgagtattttcttctgtgtatttttttcctcccgtccctctttccctccctccttctcctccacctcctcctcttcttttaacgtgttggagctacagtgcaaactagaaaacattgatttatttatgtcctcagcctaatagggatctccagctgtatgtttatttcccagagaagactctcatg

SEQ ID NO: 50538 - DNA, 616 bp, Homo sapiens
tttctggcttctctttaaatctggctgcatgtagcccatatctctgcgagcatatgctctccagtataccacggcccccygttcaccctgtgtccatccaacatgaatgcattttcctctcctgtggcaaagactgggttgattccccaaatccattcctaccccattcttacttcaggttttggcaggcatcatggcaacccagaacaaagggaactcttcctccttccttacagccaggggtagccatgtgaataagtatggcctgcctatttaatgcaaacggagttatatgtgtaacttctggaaaatgtctttaaaaaaggaaggcctgcccttcccacactttctccttctgcaggctggaatccaaatgtaattgctagagctccagcagctatcttggaccataaagtaaaactgggactggtatagcaataaagtaggcagggcctgagtccctggttctgagaatctgctgcagcagcccagagatgcctgccttaggcttttacatgagatagaagcaaactgtgatcttctttaagccattgtttgagaacttctgtcacatgcagccaaatctaatcctaaataatacaactacaaatcactg

SEQ ID NO: 50539 - DNA, 616 bp, Homo sapiens
tttctggcttctctttaaatctggctgcatgtagcccatatctctgcgagcatatgctctccagtataccacggccccctgttcaccctgtgtccatccaacatgaatgcattttcctctcctgtggcaaagactgggttgattccccaaatccattcctaccccattcttacttcaggttttggcaggcatcatggcaacccagaacaaagggaactcttcctccttccttacagccaggggtrgccatgtgaataagtatggcctgcctatttaatgcaaacggagttatatgtgtaacttctggaaaatgtctttaaaaaaggaaggcctgcccttcccacactttctccttctgcaggctggaatccaaatgtaattgctagagctccagcagctatcttggaccataaagtaaaactgggactggtatagcaataaagtaggcagggcctgagtccctggttctgagaatctgctgcagcagcccagagatgcctgccttaggcttttacatgagatagaagcaaactgtgatcttctttaagccattgtttgagaacttctgtcacatgcagccaaatctaatcctaaataatacaactacaaatcactg

SEQ ID NO: 50540 - DNA, 1996 bp, Homo sapiens
ccgtatgagctcctgtcgatgcggcaaaggaccaccttgcccaacgacagcgggaaggcagaatttaaagctggcagctgtaagcgaacgtctatgtgtgcgcacgggggcacgtgaaggcacaggtgcatcagccaagaacctccaattcacctcttaaccttctcacctcacctgaaaccccttctgccagaatcctgaaggtggcccaggaacakggctcctaacgttaggtggaaatgggaaattcattgagatgtcacaagctggaataagaaaattctgagctcacccggaaactaatgccctaaattaagattattcagcttctcaatttttaatagcaaaatggagacctgagtgtggataacttttagtatctgtgggggatcctggaaccaattccctgccaatatagaaggacaactgtctacagtacttgaagtattattaactacattcgccatgctgtatgttagatccccagaacatatttatcctgcatatctaaaattttgatcattttacaaactttctattttttttgtcaattttctccagctagacacttgtgcaatacggctattatctgatctttgccttaaatgttgtgcttcttttccatatgcacgtattttgcaaaatataaagtgtgtagagctatatagcactcagccaagtggtgggtacctgcaggtgcttcagagaagtaaattgatgctgctaatatttgttgaatggcacgaatatgatgagcaatagcaggtggtgcccttcagccagaccatcgctccgtgcgtctgatgcatcttgccaaagagtagttctgggaggtggttgcctctagagaacacattcctcctattctggggtcccgtgagagaaagaaatgcttttgcttttgatgtgggactcttactaagcctttcttcagagaaaaggaagtgaaaaatgcaccccatgataatcagtttcttacaacatactgtgatagtaccggcttcgttgtttttagctggaatcattagcttccatttttagaataacagctattggctaaattaggctacagtaggccattaagatggatgttggaattaaaaacatttttggaaaaaagcctgctttgagcctttgttataagcccttgggtagagatctgggtcctgtttctgatttcttgtgagccttcactctgacagttttgtttccagaaacacactcttagcctgctcctgaaatgggaacagacaggccaacttcccctctccagtctcccctgcgggtcaaagctttactttcctgtcatgttaagaaagaatagatttaaccttgataatccatgtagtattctgtatttttaccttttccttatctgaaaaaaagtgtatatatggcatggaattgattgcacaggcacatggcatgttggcttgtgaaccaattgttaaaatttcaagttaatcattaaaataatatctttcaaattaagttatattaaaaacaaaggtaacattctaaattcattactttctaattatttcgcccttttttttgtcgttgattatttagacttaagaaagtgatgggaaaaacgttaataacacagtacataagttgtttctgtagccattacactgtgattttcacaaacacttgaacacttgaatagtcttccattatttgaaaactattattcaacttatccaagtgaagtattggcatacaaagaagttgtttcatatttgcattgctcatgaatgtaaacaaaatgtcgatatgtgtgaactatacttgttgatcaattgcaaccataggttggctgcagatgcgagagcttggtaaacatcaacaaaagcattctctgagaatgaattgactatatggaatttgtaggaaagtgtattgtgtattttattattatttgtaaattgtgtattccacatcttttagattagtaaaatttatagtaaacatactctcacacctacattat

SEQ ID NO: 50541 - DNA, 632 bp, Homo sapiens
atcgcagccccagttttttattttgcttacaatataatgaggcaataaatcagatggttaaataatcataatgcaaggtgaaaatgtgatgagattcataagagtggttcatacaaaatagtgtagagttttggaggggatggraatttccatccagtttccagggaattaggaaaagctttttgaagaacatggaatgtgaattaagatagttggatttctatgaatagacaggaaaagcatattccagtagacaaataccaataacaatggcatgaaagatatgaaaatggatactatccttgggaaatattgaacaattcagcttgcttgtgttggtagatgtgaggagccattaaatgccctaaagaggttgcaatttatttagtaggaaatggtgtatcactgaaagttttagaacataatcatgccatgatcagagtaatagctaaggaagatttatctgaatagaaatggcatggttggtgacttgatgtatgtagggtggggagaagtgttgaaatgaaaacctagagcttaaaagatgccaacattttgagcctggggcgctgagaggataaaatcatcatgaactaaaattgtgaagttagttagaagatggaactggggct

SEQ ID NO: 50542 - DNA, 632 bp, Homo sapiens
atcgcagccccagttttttattttgcttacaatataatgaggcaataaatcagatggttaaataatcataatgcaaggtgaaaatgtgatgagattcataagagtggttcatacaaaatagtgtagagttttggaggggatgggaatttccatccagtttccagggaattagraaaagctttttgaagaacatggaatgtgaattaagatagttggatttctatgaatagacaggaaaagcatattccagtagacaaataccaataacaatggcatgaaagatatgaaaatggatactatccttgggaaatattgaacaattcagcttgcttgtgttggtagatgtgaggagccattaaatgccctaaagaggttgcaatttatttagtaggaaatggtgtatcactgaaagttttagaacataatcatgccatgatcagagtaatagctaaggaagatttatctgaatagaaatggcatggttggtgacttgatgtatgtagggtggggagaagtgttgaaatgaaaacctagagcttaaaagatgccaacattttgagcctggggcgctgagaggataaaatcatcatgaactaaaattgtgaagttagttagaagatggaactggggct

SEQ ID NO: 50543 - DNA, 1276 bp, Homo sapiens
tacaaatgtatatattgattgtatccccaaatattcaactgcacataatggaaaatcccaaaggttcaattgcacataatggaaaatcccaaagtagcagtaatttaaacaaggtagaggttcatttgtctctcatataaaaaagtctgaagatatctctacactgccttcagagatccggagacttctatttgtactctgcaatgctaacacatagcttccatcctcaaggtcacctcatagtcctagsacactgagtcagattctttcagcatctacttctgaagcctcagataaaagttatgttcagctcttattggctcatcacctggccacgtgtagcagatagggaggatgggaaattagttatttattcaaccagtaatgtacctagataaaaatttgggattctgatacttaagggaaggagagaatggattagcaggtaggcagccagcattctctgccaaacttttcagtaaatctcagaaatctttctcaaggttgcattatgaaaattctggagctttccatggacgaaataatacattttgtccaaattgtgtttttaaatgtaaaaaaaaaccagagtttgcatcatcctagaaacaggttacatgaaacagggttttaaactgctgacacttagcaaagaacttgttaaatgtgaaccgaaatagtattaaacggagtacaatagagaatagaggctgaaattaattttgtgaggcagtaacttattaagttgactttctggataaaaataaatggaatcttggaggtgaataagatactaacaaagcaatggatgaagtaaaacgaaaagatttcttttagtttttcctttgtttatacaaaaaaaagggaaaagtaaaaaaattattgatttttgaagagacaagttccataatggtattttgggaacatcatctcttagctatgctcaaactacatcgtgagggaaagcgcagaaggagagcccggttaggatgcgcctgtggccatcttgtcaatggaagttttctgtacttatgtgtagttttggggtcccaaaaggattatccaaagcaaacttcattttaaaaatttaatattcaatttattaaatttgtatgtaacaaacatagctcttctttaagctttgaaatttaacttaattattttagtatacttagacatctaagtagatttaacttaattattttattgtacttagacatctcacaaattttgaaaattacttttgaagcggtgtttaattaatgtttgattccat

SEQ ID NO: 50544 - DNA, 1276 bp, Homo sapiens
tacaaatgtatatattgattgtatccccaaatattcaactgcacataatggaaaatcccaaaggttcaattgcacataatggaaaatcccaaagtagcagtaatttaaacaaggtagaggttcatttgtctctcatataaaaaagtctgaagatatctctacactgccttcagagatccggagacttctatttgtactctgcaatgctaacacatagcttccatcctcaaggtcacctcatagtcctaggacactgagtcagattctttcagcatctacttctgaagcctcagataaaagttatgttcagctcttattggctcatcacctggccaygtgtagcagatagggaggatgggaaattagttatttattcaaccagtaatgtacctagataaaaatttgggattctgatacttaagggaaggagagaatggattagcaggtaggcagccagcattctctgccaaacttttcagtaaatctcagaaatctttctcaaggttgcattatgaaaattctggagctttccatggacgaaataatacattttgtccaaattgtgtttttaaatgtaaaaaaaaaccagagtttgcatcatcctagaaacaggttacatgaaacagggttttaaactgctgacacttagcaaagaacttgttaaatgtgaaccgaaatagtattaaacggagtacaatagagaatagaggctgaaattaattttgtgaggcagtaacttattaagttgactttctggataaaaataaatggaatcttggaggtgaataagatactaacaaagcaatggatgaagtaaaacgaaaagatttcttttagtttttcctttgtttatacaaaaaaaagggaaaagtaaaaaaattattgatttttgaagagacaagttccataatggtattttgggaacatcatctcttagctatgctcaaactacatcgtgagggaaagcgcagaaggagagcccggttaggatgcgcctgtggccatcttgtcaatggaagttttctgtacttatgtgtagttttggggtcccaaaaggattatccaaagcaaacttcattttaaaaatttaatattcaatttattaaatttgtatgtaacaaacatagctcttctttaagctttgaaatttaacttaattattttagtatacttagacatctaagtagatttaacttaattattttattgtacttagacatctcacaaattttgaaaattacttttgaagcggtgtttaattaatgtttgattccat

SEQ ID NO: 50545 - DNA, 1181 bp, Homo sapiens
gtaacttcaatgtcttctctcattctatgactggtgtggtgaggcacacatctcggatgtgatgtttttgtggtagtgtacagaaacaaatgggaatcagaaacttgccatgccttttacagccattactcaaaactggcaacatgtcacatatgcccatattctgttagccaaagaaaaccttatggctgagccgcctatcattgggtaggtaaaaatatgcttcctaatgaggtggagcaaagggagagtgaaagttagcagaaaaaggaaatctacctcaatgacactttggttattattttatttttctaaaattatggaacatttaaaacagaaataaaattgtataatataacataaaaaacaatgtaccagccaactagttttaggaaaactggtttttttttagtatctgcaacagatattttttaaaatgtatcaattccagagatagttgaagccttatgttcaagacattagtcatttctttgtcatctcttccttcccagtgttaatcaccatcttgaaattaatgtttctgttgttcgtgcatgtgtacacatttactacgtatgagcatatacaaaaataagaatgtgtagatgtgaaagttttcattgttataaaaatatattcttatattcattgcattctacaaattgattttatatcctaattatttttatatttttctatattaacacataatcctagttttgtttatttttatacaagtatttgtagatatttatgaggtaaatttaatctcttgtcagatgaatagtttgcaaatgtgctcaccrgtttaacaggttgcttctttactctattgattttttcctttgctgagcagaagctctttggtttaatttaatatagtcccattgactatttttgtttatgttgcatgtgcttttgaggttttagccataaaatctttgcctagatcaatgaactagtgtttcccctgcattttcttttaatagtttcatatttttttgtcttacatttaagtctttaatccatcttgagtaaatttttatatatggtaagaaataagggttccatttcatttttctgtatacggatatccaatttttccagcaccatttattgaagagggtgtcatttctccaaagtatattattgttggctttgtctaaaataagttggttgtt

SEQ ID NO: 50546 - DNA, 521 bp, Homo sapiens
ctggattagacaatcgatcaggcaatcccatgcttatccagttgtatgggaagattcataatacccaataaaatcctcccaaggtgaaaaacatcccatatatttttcttcaagaaggggcaataacgtcttatattccggataagtgtyattactcagagtaactggaggagcaacgcttactggtaggacagctgtgccctgagaatccaaatcccaaaactgtcaatcaaggaaacagatatgtatgttcagatactagagatacaatctgaagcctagaaattacatttaagaatgttttgcaagaacgattttttcttttttcttttgtaattcactttggagttttgatttgtcatgctgtttgtttcatactcaataatcttctatctctattttcaacttcccaaaatctcatgatttctacatttttacacgaaagcaacttttcttaaataagtaatatttgtaagaatcttgtgaaaacctttgtgcatttctcatcttatttagattga

SEQ ID NO: 50547 - DNA, 437 bp, Homo sapiens
gatgagtagtagtagtttacagaatgttatttttaaatttccttttgattccttgtagaagtttattatgaacatatatttaaaattacaaagttaaaatattaatactagaggaaacgctagaaataaaattattcagccacttattttgtgaacataatgactgtcttatatatgcaatggtctaaataattatcaatatagtgagctactatagatagttagatatttaacttaaactttctgtctctgcatggcaatagcaagtgctgtctacttagacasaagattcaatattgacaatctatagtcatatggaatacggtttgcacagaataaaaacatagaaacttgtttctaattataaactctaacaaataaaaattctgatagtatactgccaaaatgtaacatacttattgtttatgtgtactaaa

SEQ ID NO: 50548 - DNA, 437 bp, Homo sapiens
gatgagtagtagtagtttacagaatgttatttttaaatttccttttgattccttgtagaagtttattatgaacatatatttaaaattacaaagttaaaatattaatactagaggaaacgctagaaataaaattattcagccacttattttgtgaacataatgactgtcttatatatgcaatggtctaaataattatcaatatagtgagctactatagatagttagatatttaacttaaactttctgtctctgcatggcaatagcaagtgctgtctacttagacacaagattcaatattgacaatctatagtcatatggaatacrgtttgcacagaataaaaacatagaaacttgtttctaattataaactctaacaaataaaaattctgatagtatactgccaaaatgtaacatacttattgtttatgtgtactaaa

SEQ ID NO: 50549 - DNA, 545 bp, Homo sapiens
tggtaacaaatgagcgagtcatttaaaacaattcttcctcacctctttcatatcagtgattaacaaaactggaagaactaaacaaataaaaacaaacctaggagttctacttcctcaaataatagatgaataaattcctatcagatcaactcatacaccaagtgtaaaccctagacaaaatataaaatccaaactatctatggcaggggtyggtaaactatttctaaaagggtcaaatagtaaataccagcaactactgatctatgcatttgtaacaaaaaacagctacagacaataagtaaacaaatgggcatggccatattccaataaaattttctttctaaaaatcaggtgggcttaattcaccaactcctgacctcaagacactggagtgaggacaaacgcaagcagattctagaggggagagtcgatccatggaagagaggaacaccactagatacattttcctttctgcggtttctgctctgaaagcaggtctatctgcgccaagaaagatggcaaaagctacaattaaaagctcataa

SEQ ID NO: 50550 - DNA, 616 bp, Homo sapiens
ggactctgatttgaactatgaagggatcccatgtaatcccagcattttggaaggctgaggtgggcagatgcttaagtccaggagttcaagaccagcctgggcaacatgacaaaaccccatctctacaaaaaacaaaacaaaaaactagctaggtgtggtggcacacatctgtagtcccagctacttgggaggctgaggcaggaggatcgctggaggatcgcttgagcccagaagttgcagtgagctgtagtagcaccactgcactccgtcctgggcaacagagcaagaccctgtctcaaaaaaaaaaaaaaatggaatcccagtgtctactgagcacatagtcttcttgtggctcatttgaatttaacagctttgttgaggtctgctccatggcaggcactgtaccaggcacyaggatactgacatgaaggagggtcttccctgcttgctggggctccctgtctgtgggagacacaccatacacctaactcacacccagtggaaccaaggttaggctggaggaatgaacatgcctctttgagacacagatggggagccactggtttgctggactgctgaaggtttattgagagagaaatagagacagcacatgatt

SEQ ID NO: 50551 - DNA, 977 bp, Homo sapiens
cagttaccgccaggtgcggtggctcatgcctgtaatcggagcactttgggaggccgagttgggcggatcatgaggtcaggagatggagaccatcctgactaacacgtgaaaccctgtctctactaaaaacacaaaaaatgttcctgtagtcccagttactaaggagggtgaggcaggagaattgcttgaactggggaggcagaggttgcagtgagccgaggttgtgccactgcactccagactggacaacagagcaaratttcataaaaaaagaaaaaagaaaagaagaaagaaagaaagaaaggaaggaagagagacagaaagaaagaaagaaggaaggaaggaaggaaggaaggaaggaaggaaggaaggaaagaaagaaaaagttacaatataaggtgctactatggtgtcaattcagtgagatgtttaaatatagagaaactcaagaaatgaaagtgtatgaaaattgaacatattggaaacacgttatatatatacacacatatatgtatatatacatattttaatctaatggtcgaagcagccaaactgagtacagtttctacattttaagggaaaatgtttgccaacctgtcatgtatttttctgttttcttctgccttatttagataaatgttccttatgcccataacaatggcaacacagtagtactactagcgtccttcagaattaaaactaaagttattttgctagtatatcaaaataaaatattggattactttatttgcttagaaacaaaacgtaatattacagttaaaataacttttcatcattatttgctgtgacaggtatattttaatagaaggcactcaaaatttaggtagtttacacacgtttttaaaaagacttctctttttaaagcttctgtttttaaagacaatgtatttaaaagattcacagggtgctcaataatgtagggttttgtgtaaggtcacccaaatgataagaacaag

SEQ ID NO: 50552 - DNA, 592 bp, Homo sapiens
ctttaactctagtatacagcttttcttactgtgactttccaaagtttttaatatataaatgagcctggcaaattaacaagaatgtatttttctaacttattttaataccaactgcttctctttcctctagaaatttctggaaagttatttgtaggcacaaatcatttygtaaaacctgactaattgaattaagtgatatgcaaagtactcttgactctcctgttttcacattgtgaatattcatatccacttctgctttgatgggccttcctcctctgactggacacctgagattccaggactgacaacctgtgacacctggcacagcatctctttgaattgggctaagggtggagaactttcctattgtccagtggatagacaatattactttctctggttattcctaaagttgaccgtgaagagaatggccaagttattgtgtgccatgtgagaaacgggtagaaaaatatggcaataaaaatggaaagggagaggtttttctgcctcacattgagctgtttcattttcccggtcagagcatctgggaatatggcttccttttggcgaaacccagtaatgtatgttttta

SEQ ID NO: 50553 - DNA, 626 bp, Homo sapiens
ggtaaagatgattccagaattaagatggaggaagaaactcaaacagcagagtttaggcacgatattgggaaatttacagccattgcaggcttttgagcagaggagtgggtgttacaaacatttgtttagcagcagaattagagaggggagaggcagacagagaacttctggaagactgctgcattaattcaggtaagggatgacaagtgtctggggctgtctgattactgtggaacagaaaggaacaacatcacagcactaactctaaaggaaaaattttcagaacataataatttgaagcatgaagggaagcaatgagttaaaaatgccttcagggctttgaatgtgggaaacttagacaatggcaatactgctgataattgtaagtgctgagccaggaaggaagatgggcatccagatctgggacagaaaccagcaaaacctttgagttggaaggaaataaacaccccagtggaggtgccaaacggagaaacmgaatgagtttaattctaagtttattgagctccatgtgacactaggacatacaagtaacaatgtgctgcagagagttgtacaaaatgattcaacctttgggcaggaatgaaaatagaaagatgagagtcacc

SEQ ID NO: 50554 - DNA, 583 bp, Homo sapiens
acaaagtgaaagagggcaacctgtggggtcatcagggatttgttttctgttttgtttattctaacataaaggcaatggtgagtcatcaatgtatttagagtttgcacaatcactgtggaacacagacagacacgggggaagaggagaaacacagggcggtagcttgcccttggactgttctaagttcctcaaaacatagcagttttgcccaacctaagggaactttcagcagctgctcttctgccataggcctctttcctgccttgttttcatgtggctgtttctgttcctgcaggtcttagctcatcagacaggcatttattacctctgtgtcaacagtgggagcttccattactctctagcattacactccccttcctctttcaggaaacttaacatggaagtgagtttgccatcggccttctccccacagtgttaatagtggtgaggaagccagcctgttccaccttgcccctcccatgattccaacactgagttcagacttgtcacatggaacttatccttgcatgtttgccrcacagacagatggacccaaccatggattagtggatggatggatgga

SEQ ID NO: 50555 - DNA, 1600 bp, Homo sapiens
  misc_feature (1)...(1600): n = A,T,C or G
ggatctaagaaggagccatgcccagttctgcccagaccctcggccaggctgacaggagcggacgctggagctgggcctgcactgggccacataggagctcaccagtgagggcaggagagcacatgtcggggagcacccagcctcctgctgactggaggcccgtcccagagcccaggaggctgcagaggcctctccagggggacactgtgcatgtctggtccctgagcagccccccacgtccccagtcctgggggcccctggcacagctgtctggaccctccttgctccctgggaagctcctcctgacagccccgcctccagttccaggtgtggttattgtcagggggtgtcagactgtggtggatatagtgtctacgattaccacagtggggccacccatagcagcaaccaggccaagtagatgagccactgccatgcagccccaggcctccagctcacctgcttctcctggtgctctcaaggtcactgttgtctgcactctgccctctgtggggagggttccctcagtgggaggtctgttctcagcttcccagggcctcatgactgcatggaaggtcaagggctgggcctgccaggggcacggcaccctcacatgctacacctaagatagggtgggcagtctggtggggacaggacatactgctggggtgtctgtcactgtgcctagtggggcactggctcnnnnnnnnnnnnnnnnnnnnnnnnnnnnnnnnnnnnnnnnnnnnnnnnnnnnnnnnnnnnnnnnnnnnnnnnnnnnnnnnnnnnnnnnnnnnnnnnnnnntgcaccccgcaccccccagccagtccacgaaaacaggccccacatagagtcactgcctggccctgccctggggtggacccctcagcccccaccctgtctagaggactggggaggacaggacacaagccctctccttatggttccccacctggctccggctgggaccctcggggtgtggacagaaaagacgcctgcctgattggcccccaggaacccagaacttctctccagggaccccagcccgagcaccgccttacccaggacccaaccctgcccctcctcccctctgctctcctctcatcaccccatgggaatccagaatccagattcctcacgaatggcttagtgccatccacttggtaatgagtgagttctcacatagttagatcactcaggatctgattttttaagagagacttggatctccccctttccttcttccccctgctcaccatgtgacactccttcttcccctgtgccttttaccataaatataaggtttttgaagccctcaccagaagcagatrgcagaaccacacttcctgtacagccttcaaaaccgtcagccaaattagattttttataaattactcatccccaggaatacttttatagcaattaagaaatttctttttttattttatgaatgtttcattgccacttaaaaaagaatgagttgttatgttcagacatacacacacatatttctaccttatcaattacgatatttaggtattttttagtcttgcttaattttggtcctcttgatgtttaatgaactaaaacacatgaattaaa

SEQ ID NO: 50556 - DNA, 558 bp, Homo sapiens
tcaccgaatcatgatcttttttgagaggagacgaggaaggattatcagaattattgtaatttattttggtcagtgtttagcaaatagcatcacttgctatttagtgttataacttgtatagwgtaattttatttcaactttttgcatttataaggagagacaatataaaataggcaggacattctcttgactactggaattatagtcacggccacttaaacagcatacttcaagaatgcttcatgtagaagagaactgtctcactcatcatagatttttaggttatcaagtataataacattatccaaagagtccatttatggtaggattttcaaaagtctttgtcctgtattatgctctaagcttttctgcaaatcagacacagaattttgtgcaaagcacaattttgggggctcagtttgcttatattaagcgattggaatttggttccagttatattgctgcctaccaaattactccaaattttgttgagttaatgcaaaaatgctcatggaatctgtaggtcataaatgtggaactggtaaaacaggatgactt

SEQ ID NO: 50557 - DNA, 558 bp, Homo sapiens
tcaccgaatcatgatcttttttgagaggagacgaggaaggattatcagaattattgtaatttattttggtcagtgtttagcaaatagcatcacttgctatttagtgttataacttgtatagagtaattttatttcaactttttgcatttataaggagagacaatataaaataggcaggacattctcttgactastggaattatagtcacggccacttaaacagcatacttcaagaatgcttcatgtagaagagaactgtctcactcatcatagatttttaggttatcaagtataataacattatccaaagagtccatttatggtaggattttcaaaagtctttgtcctgtattatgctctaagcttttctgcaaatcagacacagaattttgtgcaaagcacaattttgggggctcagtttgcttatattaagcgattggaatttggttccagttatattgctgcctaccaaattactccaaattttgttgagttaatgcaaaaatgctcatggaatctgtaggtcataaatgtggaactggtaaaacaggatgactt

SEQ ID NO: 50558 - DNA, 1166 bp, Homo sapiens
tatacctacgtctatattccatatctatgtatatttctayatttatgtatatatatccatgtatctctctatccagctttaacagcccataagaatcacaagtgcctaaatttcagacactgtggtaagttgttaaagaaaataatttgtaaaatattttgataccctgaaaatcataacctttaaaatttagataagttctcagaatgatttcctttttcaaaaactataaaagataacccaaatatacagaaatgccatgtttaatttaatctgaaactgcatgccttatctttagtagatggtgtggcaagaaaatgtcagtcctttctgaataagcaaagctgggagttaggttctgattggcaaattttaataagcatttaaattgctgcatactgatttattagttgctattcatttgactgctaattgaagtgaaagctaaacaaatgatgctaaaactcaatatatacaaagaagtgtgtctacagatagaaatgaaagaaagtttaagaagaattatgattaaatgatctaagattaggagaggtaataaatacacttatttaaaaataaatttaaactctcaaaataagagtttaaaaagttagtttccaggcacatgaagggaaaggtagatgaaagtaattggttacttctgtaatctagtagaaattatacttggaggcaggcaaaaagggaattaagtataactagatttcttttactagaaatgagtggttctctgttttcaatatggctttagtttcacctttctatcacatggttatgtggcaagtaaaaaaattgtaaaaataaaattttaaaggcaaggaaatcaccacttttgaaaacactgtgaaaggatattatacttgctagagcacatgatttcttgatcttcatggaaagtagcttcttaaggtcaaaataagggaatgttaaaaataaaaataggcagaaggagaaaccaatggtggcttcaccagtatgtgttttgagccacatgactctgaggtgtagccacagcacctcgtataaaatggtgcttcacactgtaaatattattagaaaagaaaataaaaccaatagatacaaaacagtatctatgcattttgtaagaaatatataatatagtgttggctaaaaaatgaatattttga

SEQ ID NO: 50559 - DNA, 619 bp, Homo sapiens
ctgctcttcttactgtttgttactagcattcctgtttctacaaaatctcactcattctaatttgttttccctaatatgctatgggatgggaaatgagaaaaacaacaacaytggaatgtttaaaatagtgctaagtgggtggagattaaaaaccagggggtttccttctgggtggagcacagatgtactcaaaagactttgggacattgttttctctgcttggggataatttctctgcttactcatttccagaaacattttaggtactgaaacttcatgataaatggcctctgggttagcagactgtatttgtatccatactactttcttcagtacagttagactaaaatgattgttattaaggtgtctcaattctctttaacaaattaaacatgaacacagattcagaacaacagaggatcttcatttattccatgtctgcaaaaaacatctctaattgagaacgaaatgtataatttagttattttaactgaagaaaacattttcccagggaaagtgtagttacacacctaagctagtagacaaattgatttaatgcataatctgtgtatacatttgcaatacaatattgctaaaaatatcattacttaatttttag

SEQ ID NO: 50560 - DNA, 624 bp, Homo sapiens
tttgaaggttcttcctaaaatgttggagataaacacattagcatatttgagtttctacacaagcaacttgggcagaggatagaatactgagcaactcgttgtaacgtgtttctctcttattctgtagatacaaattaaacatttatagttaggggaaggtatcatgagatagtggaccaggaaattcctgagctcatgagcccagacrctagccaatgataccaatgataagatgtaaaggcctatcagcacatttttggaatggacgtctgatctctacatcctatgttaacaaagtcttcaatactgtacagatttataccactcaagcagaccactggaaaggaagacaaatagctggacgcaaaaaagcagagacaattggccaggtgcggtggctcatgcctgtaatcccagcactttgggaggccgaggcaggtggatcacgaggtcaggagttcaagaccagcctggccaagatgatgaaactccatctctactaaaaatacaaaaattagccaggcatggtggtgcatgcctgtaatcccagctacttgggaggctgaggcagcagaatcgcttgaacccgggaggcggaggttgcagtgagccgagatcacgcca

SEQ ID NO: 50561 - DNA, 624 bp, Homo sapiens
tttgaaggttcttcctaaaatgttggagataaacacattagcatatttgagtttctacacaagcaacttgggcagaggatagaatactgagcaactcgttgtaacgtgtttctctcttattctgtagatacaaattaaacatttatagttaggggaaggtatcatgagatagtggaccaggaaattcctgagctcatgagcccagacgctagccaatgataccaatgataagatgtaaaggcctatcagcacatttttggaatggacgtctgatctctacatcctatgttaacaaagtcttcaatactgtacagatttataccactcaagcagaccactggaaaggaagacaaatagctggacgcaaaaaagcagagacaattggccaggtgcggtggctcatgcctgtaatcccagcactttgggaggccgaggcaggtggatcacgaggtcaggagttcaagaccagcctggccaagatgatgaaactccatctctactaaaaatacaaaaattagccaggcatggtggtgcatgcctgtaatcccagctacttgggaggctgaggcagsagaatcgcttgaacccgggaggcggaggttgcagtgagccgagatcacgcca

SEQ ID NO: 50562 - DNA, 544 bp, Homo sapiens
agcccagaaaggggctcccacagtgcagcggcgggctgaagggctcctcaagcgcggccagagtgggcgcaaaggccgaggaggcgccgagagcgagcgaaggctgtgagggctgccagcaacgctgtcacttctcaataatatttcacctgtgaatactacagtatgtatcgcaatcaactagattttttttctgtttttagtcactttctaatttcaaggtattgctaaaagtcctggtgataaaggttgaaaatgaaggaagcttacatcagcccacagttggtgtactcaaaatcacttctgacccattktcttcaggccaagtcctcgctttcgttaagtgaagtgagattttccctaggaggttgatctcagtgtctcatataaaacctgtgttggactgaccctatttttctatattttccagtcttcattgaatctttgaagaaatctacctcatatttttatgtgtcatatgggtttaatggaatgaaatagcaattagagctactgtgatcaatactggggacgtggtagactc

SEQ ID NO: 50563 - DNA, 544 bp, Homo sapiens
agcccagaaaggggctcccacagtgcagcggcgggctgaagggctcctcaagcgcggccagagtgggcgcaaaggccgaggaggcgccgagagcgagcgaaggctgtgagggctgccagcaacgctgtcacttctcaataatatttcacctgtgaatactacagtatgtatcgcaatcaactagattttttttctgtttttagtcactttctaatttcaaggtattgctaaaagtcctggtgataaaggttgaaaatgaaggaagcttacatcagcccacagttggtgtactcaaaatcacttctgacccattgtcttcaggccaagtcctcgctttcgttaagtgaagtgagattttccctaggaggttgatctcagtgtctcatataaaacctgtgttggackgaccctatttttctatattttccagtcttcattgaatctttgaagaaatctacctcatatttttatgtgtcatatgggtttaatggaatgaaatagcaattagagctactgtgatcaatactggggacgtggtagactc

SEQ ID NO: 50564 - DNA, 645 bp, Homo sapiens
tacattaagagaaacaataaagaatgatagcccagaaagatgatatgtaactagaatataataaacagaaacctaagaaagttaaattttaagtaaactttcattctaagtttaatatatttagtaaccataaaaagcaagtaacagcaaatgtaataatatatattgtttgcacatctatgtgtatatacatatacacatataatacactagatataatggcaatgtaaataccttcaaaaaatatcatcttgtctagtcaaataatttcagaattatttatgaagccattaatcacaacaatttgtatgaagccattaaacacaacaattatctaaaatacttatattttagttggttctaatattgataaagttttaacagctttaaatggaagctttgtcaaaatgaaaaataatattttagtgttccaaaattaagcacttacaaatagactcagacaggatactggacatccattgataaaataagatgtacgtgttatacactatcatataataaactagagttgtactctacactgytttcatgtggaatccctgggtttataattccatatctgtatatttgttcagaattgtaatgtttactatatacattatgtgccctcgacaatgtcttcga

SEQ ID NO: 50565 - DNA, 607 bp, Homo sapiens
ccatgggcactctcatctgcaggaagcttggaggcgtgaagaagtcggccacaytcagatcttttgaaggtctgatggggacaatcaagtccaaagtctcagggggcaaaagagcttggccctgactgtctttcttctgcggagggtggggttgatctgctctcagttttggggtgtggggaagacccactccagattccggggagtgggaatgagccactcccagttctggagagtgaggatgaccatctccactttctggaaccagaatgagcccccttggtaaccttgcctggtactaaaccagtgcaaggacccccttcccttattacatttgcaactctgcccaacaaaaacaagcaagcaaaccacaatggtaaagtggttaattcaggaaattgacagaatccagttttgagaaaagaacacagatatttgctgcttttaagatagagaacccaaagttttgtacctggttatttttcacttaagtttgtagacgaaatgtgccattatattagctttcctgagactgtatctaatgggcaagtcagtggctccagaggggtcttaggccaaagcccaaactctcttttggaaaactagc

SEQ ID NO: 50566 - DNA, 658 bp, Homo sapiens
aaattttgataccaaaaatgaaaaactcaattgaaaggttaaaaataatgagatggataatacagagaaaggataaatagaggataaatataataaggattaaggaatggtagaccagaggaaatgaaagggagacataatctaaaaaataagacaggaaaatcactttgggaggctgagatggaaggatagcttgaagccaggagttcgagataagcctgggcaacatagtaagaccttgcctctacaaaaaattagaaaaaaattaactggacacggtggtgtacagctatagtcctacctactcaggaggctgatgtgggaggattgcctgagctcaggagttcaagattacagtgagctatgatcagaccactgcactccagcctgggcaacacagcaagaccctgtctcaagaaaacaaaaagacccaattcaaagcacattctcaaggctttcaaagaaagacaaygaagtcataagtaaaagataatgagtttataacattatcatatttctcaaaagcaaattagaagctaaaaaacagtggaaccctcaaaattctttcttttttttttgtttttgagacagagttttaccctgtcacccaggccggagttcagtggtgcaatctcagctcactgcaacctctgcctcc

SEQ ID NO: 50567 - DNA, 658 bp, Homo sapiens
aaattttgataccaaaaatgaaaaactcaattgaaaggttaaaaataatgagatggataatacagagaaaggataaatagaggataaatataataaggattaaggaatggtagaccagaggaaatgaaagggagacataatctaaaaaataagacaggaaaatcactttgggaggctgagatggaaggatagcttgaagccaggagttcgagataagcctgggcaacatagtaagaccttgcctctacaaaaaattagaaaaaaattaactggacacggtggtgtacagctatagtcctacctactcaggaggctgatgtgggaggattgcctgagctcaggagttcaagattacagtgagctatgatcagaccactgcactccagcctgggcaacacagcaagaccctgtctcaagaaaacaaaaagacccaattcaaagcacattctcaaggctttcaaagaaagacaatgaagtcataagtaaaagataatgagtttataacattatcatatttctcaaaagcaaattagaagctaaaaaacagtggaaccctcaaaattctttcttttttttttgtttttgagacagagttttaccctgtcacccaggccggagttcagtggygcaatctcagctcactgcaacctctgcctcc

SEQ ID NO: 50568 - DNA, 591 bp, Homo sapiens
ttgatacatttaaaggaggggtataaagctcaggcatgtgaaatgttgaattttgtctccccatatgacagataaccatcatataaatgtggtttattagactamaaaagtagaacacatatttttagattacatcttggcatttcaaagaaagtatagaacttcaagatagtttgcttcctggatattttctggagctgtctttgggcctgcattcctgaaagctgtcaatgctacactctgcatacccagagctcgtgcccttgggcttgagtactttgtggttaatatttaagaaccgcatgtggagctagattgaaggacagtcactttctttattctttgctaaaaccaatgttggttagtccatcaccttcttaaacagtaactgcattcatacccttcatcacatccatctctctgtcaaaacatgagtgaaaatcaattgtggcatatctagaaatacttcactcacttccattttgcttcttatgtgctgatgtaccttactcaatattaatttcctttagagttaaactgtgggaaaacttgaatggacctttgtggtataaaactatctatgtgaccttg

SEQ ID NO: 50569 - DNA, 467 bp, Homo sapiens
attaggtagcattttatttacaatataatgcattgataggtataaatgaggatggtttataatttttttatactatttcagccaggatttayataagaattttgctatctttgaaaaatgaattcaggacgcttttcatttcactgttggatatttatacagcacaaaaaaacttgccactaaaattgtctgtgtcatggaagtacgcattcttgtttttgagataattctttgacaacatttaaaatgtattccaatgtcatcaatctatccatgttttaaacatcttattagcccagttttgaccatctttattttcccaaaaaataatcaaatttatcaaaacctaaaaatttacaagcaggattttataatcatgtttattctcatgtttactctctaaaacttcatattatgttcatatctccttttccatttctaattttatgcatttgtattttctcttt

SEQ ID NO: 50570 - DNA, 567 bp, Homo sapiens
gataccactaagttggaatttgcgacaattcatacagaaaatagatttttcttaccctaagaatgtcctgtgttgtaactagtgaaaattaaaggtggagaaaatgtcagggaatgaagcagagaggaaagatatcttaaatatttatggcacggctcttttaagcctttcacatggaggaggtggggcttgtacrgcatcctctaagctgagtccattttggagaggtagtggaagtggggaagagcatgaatgagtagagaaaactgggccagtgtgaagggtctgaaggagtcgcatcaagcagagagtgccctgtctcgcccagccagacgacacaaagcagaagatggcatttcagatgccctccagctcagcaagtctctactcctccattcgcagaggttctttgtcacaaagagaacctcctaagccacaaaaggaacttaatggaaagatgctggaatgttcaagaaaggaggtgggctggctccaggggtctaggcagcagggaaggctgtgtgggccttcttaccagaacattgccgtggaatgggatttggctcc

SEQ ID NO: 50571 - DNA, 1498 bp, Homo sapiens
tgactttttacagggactttttgttcatcataggttaaaaaaaggtaaaaaaataaggctcatttttaagatatctcactttctgctcaagtgctattttgtgtcaaactcaattgtccacacaatgtacatacrtaatctatctgttagaactcaaaaaagaatcttatctattttgaccaacctaatcatgactgaatgaatggttccatcatttcaagagaaaattatagcgagctatcccacatataggcagttttaacatgaaccattctctcaacctaactaagcagtggagattcttattttaggatggaatgaatcttccagatcttggctctgtctttttttcttggctgccttctaactatttgtaacctcttgttggttactttatctccctttacatcttttcctacattcccactcaaccccaacctctaaaatgcaaatcttttttatatgtcagcctccatttggcaagctggattactgattcaggcatttttctgctgatttaaacaaatcgcttatcagttatttttctgtccctaaatccctatgctataatagggtaatatgaggaaatgttcatctcttactatcttttctaaagtaaaacatgcctatttattgcacaactatacacacacagcccaagtcccacaaccttctcaactttacaatgagtaataatttcttttttcaaacaatacaaatatatcttcactttgggaagacagatgaagaatttatccacatgtatttctgatgcaggtgaaaagacaacaaaatatactaagaatttaagaactttctccatctttgtcatgtgaccattctgaactgtcccagaaaaaatggcattttcactaaacacatgtgtgtttcagctctggataaatgtattcttataatatttttcatttgctatatcatctttccaaatagtttctcacagtctattagcacctctctacaaatcttagcagcccacagcccacaaaatattcccaagtatcacagtagttggtttcatacccaatgtatacaaggcttgttcttcagcactccatctcctgaaaaacacagaatagtacaaattctctggcctgtgaggcaagaatgaggttcacaaaaatttgtcaagataaattcatcaacttctacggcagaaagcacacaacagtggaaagtttcaatattcaccttctcagcttctctattccctggtgtacacaaccttcttcagaaatggagcctgctctattcagaagagaagttctctcttatctatcatttcactttctgtggtttcagttacctgtagtcaactgccatccaaaaatcttacagtattttgagagagagagagatagaaaaaaggagatcttattcacataacttttgttacagcatattattataattgttctattttattattaggtattgttgttaatctcttactgtgcctaatttctaaatgaaaccttat

SEQ ID NO: 50572 - DNA, 577 bp, Homo sapiens
tcaggctgtgcagaagggacacccattctggtgctggtcacagaagcaggaacctcaaaggcctgtctacaaaccatttattcatttattcattgaggtgcttttagcgaagtctctgcttctgggcgaatggtggcgagcaagtaaaaaagcctgggtcttgtggcagatgacgaacaagtcattctacagaaggcggccgtatgggcataatagggaccrggcggcgggatctgttctggggagggaggatagctgttcctgaggaaaggacctttgagctgagacctgcaggataagtctgggtggcacggagcaaagtggaggccaagagcccaggggcagcccagtttctccagcaggagggaacaggatgctttttggaaataaaagtgaggcacggtggcttgcacctgagtcccagctacgctactcgggaggccaaggcagtaagagcgcttgagcccagggagttcgaggacagcctgggccacagagtgcgacctccgtctctaagaacaaacacaaacatggtcaggaggctgtcactcagagacaggcagaatcaagagctggt

SEQ ID NO: 50573 - DNA, 531 bp, Homo sapiens
cttgaatatatattttattaaaacaagaaatcatttctttaaaatataaaaatatttaagtagtaattggctatgttgacatttctacttatgagagatgtccatttggaataaaacataaataaaacccttttacatggaggcatcaaaaatatattcttaaaaattaatagcttttaagtactaatataaaccttctctcacttgtaagttttctgacattgaatgctgcttccggttttcaatgatgcctcactcctgcaggctgcgttgaataaacatagaaattgatcccccaacattggtattaaagctctcaagccatgtggttccttaggagattgaaatmggcccagttgtcccacagaactgatgttcatagtgtcttattagaaatttacagcccccactccctccccaagtcttaaaacttaaaaaagttacatttttcttctctgagttcctttctcaggaaaccaaccatcaggtctcccagacagtatcaaagaactaaaactcaccaggtcacca

SEQ ID NO: 50574 - DNA, 608 bp, Homo sapiens
ttaacatgagtctaaggagtttagggtggtttgtaccagcttgtcggcactgttcattgttaacattgagattaatgatttagagttggttccagtatgaccactgaagagctctgtcactgggactggttacatagcaagaatatgcctatgtgaccagctgggcacaagaagcaccagcaaaattccatctggggatcccagagcctaaatattcaatgtgtatgttaatggtccgaaagaaagtgtatccaatatgatgctacagaggtaagacaattggaacctgcatctggtctctctggacatcttgctgggaggcagcctggccctgatgtgtagccttacttcagtgctactgccatattgtatgttcttctggaacagattgcatttttgtaagctttgtcagtttgggtcctgtcaatttctttagcaattgaaccttgtytaattgccatgattagtccatgggttcacataagtacaggaattcacaataaatattcagaaactttattttaccaagtaattttatgcctgttggatataataatttaaaattttgacctggattttgtttatctttgttccttctcttctatttt

SEQ ID NO: 50575 - DNA, 661 bp, Homo sapiens
tttctaacctgactcaggagcaaacgcaaattagtctaatcttatcatgaccaccccgtgccccttgtcagcaatgagtttggggtgatctcatcctggtcacttgggcgtgagtagcccaactctgggtctgatcctgcaaatgacgttctggtgtagcccaactctgggtctggttacatcagtgacttcacaatgtcatcgggaccctgggctcctgtcttcctgccctgtcaccttcaaggtactagcattgcttccactgggccctccagggctgcaaggtggccactatggttctaggcaccatatcctgacacaataacaaccaatggaaaaagaggaacaaatgtttgcattactgctcttcaaaatcaaggtaacatttccaagatggtccccaacaggccactgctcacgcagtgatctgggctacaccagaacctcctggcactccakcctgggcaacagagtaagatcctgtctcaaaaaataaaaaataaaaaaggactaaaggctgccaacgaatatcagaaacaaccatttgttataaactgccactgactggaagccttactgataatataaacagttgatgaacacacactttgtatgttactgtattatatactatattcttacaataaagtaagctagagaa

SEQ ID NO: 50576 - DNA, 661 bp, Homo sapiens
tttctaacctgactcaggagcaaacgcaaattagtctaatcttatcatgaccaccccgtgccccttgtcagcaatgagtttggggtgatctcatcctggtcacttgggcgtgagtagcccaactctgggtctgatcctgcaaatgacgttctggtgtagcccaactctgggtctggttacatcagtgacttcacaatgtcatcgggaccctgggctcctgtcttcctgccctgtcaccttcaaggtactagcattgcttccactgggccctccagggctgcaaggtggccactatggttctaggcaccatatcctgacacaataacaaccaatggaaaaagaggaacaaatgtttgcattactgctcttcaaaatcaaggtaacatttccaagatggtccccaacaggccactgctcacgcagtgatctgggctacaccagaacctcctggcactccagcctgggcaacagagtaagatcctgtctcaaaaaataaaaaatawaaaaggactaaaggctgccaacgaatatcagaaacaaccatttgttataaactgccactgactggaagccttactgataatataaacagttgatgaacacacactttgtatgttactgtattatatactatattcttacaataaagtaagctagagaa

SEQ ID NO: 50577 - DNA, 578 bp, Homo sapiens
tgacacagaacatatgcaacatgaatatgtcatggttatgaacatgtagccaaaagaaaaaagctggagggctcatgctacctgacttcaaactatactacaaggctacagtaaccaaaacagcatggtactggtaccaaaacagagatatagaccaatggaacagaacagagccctcagaaataatgtcgcgtatctacaaccatctgatctttgacaaacctgacaaaaacaagaaatggggaaacaattccctatttaataaatggtgctgggaaaactggctagccatatatagaaagctgaaactggatcccttccttacaccttatacaaaaattaattcaagatggattaaagacttacmtgttagacctaaaaaccataaaaaccctagaagaaaacctaggcaataccattcaggacataggcatgggcaaggacttcatgtctaaaacaccaaaagcaatggcaacaaaagccaaaattgacaaatgggatctaattcaactaaagagcttctgcactgcaaaagaaactaccatcagagtgaacaggcaacctacagaatgggaaaa

SEQ ID NO: 50578 - DNA, 608 bp, Homo sapiens
gacatacccgagactgggtaatttataaagaaaaaggtttaatcaactcacagttccatgtggctggggaggcctcacaatcatggcggaaggcgaaagccatgtcttacatggtggcagcaagagagagaatgagaatcaagcaaaaggggctttcccttatgaaaccatcagatctcatgagatttatccactacctcgagaatagtttgggggagaccacccccattatccaattatctcccaccaggtccctcccacaacacatgggaataatgagagctamaattcaagatgagatttgggtggggacacagccaaaccgtagcaacataaaacaagcatgggagaaaagatgtttccaaaggatcgtccatatttagttagccaagactataaccacagctgaaatctaaggtttctgatggagaagaagaccttagtaatttggtttttgttttgtttcatagaaagaacactgaccataagatctgccctcttaacacatttttaagagcgtgatacaggattgttaacaataaggaacatggttgtttgtttttctcttaattgcttttttattacgaagctaaatgatttttaagagc

SEQ ID NO: 50579 - DNA, 645 bp, Homo sapiens
cagagtgtagccctgaggatcaaatgtggtcacgcgcgtgcacgcactgtgaagatggggccagctttcccggggagaggcatgacagtggcaaacactgtcctacttttaacagacaccgtcctacttttaacagacaccacacatcggctctgtcccaggtacatgctcgtgaatgagccgaaagtacagaaacttccaaatgatagaacctcagcttagtgytgggaaatgagtgaaaaccaaacaccctcgacacacacccttaaagaagacagtcttaatctgttaagcgttgcagtcccaagtgagagcaaatgttgcaggcaagggaaagggataacttggattttcgggtggatcacctgaggtcaggagttcaagaccagcctggccaacatgggaaacctcatctctactaaaaatgcaaaaattagctaggtatggtggcaggtgcctgtaatcccagctactcaggaggcccaggcaggggaattgcttgaacctgggaggcgggggttgcagtgagcctagatcatgccactgcactccagcctgggtgacagagtagggtctttctcaaaaaaaaaaaaaagtaactgaaagaaagtaccaaatcaatattttactcaatgatttatgttc

SEQ ID NO: 50580 - DNA, 645 bp, Homo sapiens
cagagtgtagccctgaggatcaaatgtggtcacgcgcgtgcacgcactgtgaagatggggccagctttcccggggagaggcatgacagtggcaaacactgtcctacttttaacagacaccgtcctacttttaacagacaccacacatcggctctgtcccaggtacatgctcgtgaatgagccgaaagtacagaaacttccaaatgatagaacctcagcttagtgttgggaaatgagtgaaaaccaaacaccctcgacacacacccttaaagaagacagtcttaatctgttaagcgttgcagtcccaagtgagagcaaatgttgcaggcaagggaaagggataacttggattttcgggtggatcacctgagrtcaggagttcaagaccagcctggccaacatgggaaacctcatctctactaaaaatgcaaaaattagctaggtatggtggcaggtgcctgtaatcccagctactcaggaggcccaggcaggggaattgcttgaacctgggaggcgggggttgcagtgagcctagatcatgccactgcactccagcctgggtgacagagtagggtctttctcaaaaaaaaaaaaaagtaactgaaagaaagtaccaaatcaatattttactcaatgatttatgttc

SEQ ID NO: 50581 - DNA, 645 bp, Homo sapiens
cagagtgtagccctgaggatcaaatgtggtcacgcgcgtgcacgcactgtgaagatggggccagctttcccggggagaggcatgacagtggcaaacactgtcctacttttaacagacaccgtcctacttttaacagacaccacacatcggctctgtcccaggtacatgctcgtgaatgagccgaaagtacagaaacttccaaatgatagaacctcagcttagtgttgggaaatgagtgaaaaccaaacaccctcgacacacacccttaaagaagacagtcttaatctgttaagcgttgcagtcccaagtgagagcaaatgttgcaggcaagggaaagggataacttggattttcgggtggatcacctgaggtcaggagttcaagaccagcctggccaacatgggaaacctcatctctactaaaaatgcaaaaattagctaggyatggtggcaggtgcctgtaatcccagctactcaggaggcccaggcaggggaattgcttgaacctgggaggcgggggttgcagtgagcctagatcatgccactgcactccagcctgggtgacagagtagggtctttctcaaaaaaaaaaaaaagtaactgaaagaaagtaccaaatcaatattttactcaatgatttatgttc

SEQ ID NO: 50582 - DNA, 645 bp, Homo sapiens
cagagtgtagccctgaggatcaaatgtggtcacgcgcgtgcacgcactgtgaagatggggccagctttcccggggagaggcatgacagtggcaaacactgtcctacttttaacagacaccgtcctacttttaacagacaccacacatcggctctgtcccaggtacatgctcgtgaatgagccgaaagtacagaaacttccaaatgatagaacctcagcttagtgttgggaaatgagtgaaaaccaaacaccctcgacacacacccttaaagaagacagtcttaatctgttaagcgttgcagtcccaagtgagagcaaatgttgcaggcaagggaaagggataacttggattttcgggtggatcacctgaggtcaggagttcaagaccagcctggccaacatgggaaacctcatctctactaaaaatgcaaaaattagctaggtwtggtggcaggtgcctgtaatcccagctactcaggaggcccaggcaggggaattgcttgaacctgggaggcgggggttgcagtgagcctagatcatgccactgcactccagcctgggtgacagagtagggtctttctcaaaaaaaaaaaaaagtaactgaaagaaagtaccaaatcaatattttactcaatgatttatgttc

SEQ ID NO: 50583 - DNA, 1983 bp, Homo sapiens
tgctgagttgctgcaacaaaataccatagactgggtggcttataaacaaccgaaaattatttctcatggttctggagactgcaggttcaagatcaagacgctgggcarattctggaggctgcaggttcaagatcaagacgctgggcagattctgtgggtggtgagggcccatttcctgcttcgtagttggaggcttctcactgtgtcctcacatggtgggaggggcaaagggtttttctcaagcttcatttaaaagaacactgatcctagtcatgtggattccatcttcatgagctgatcacctccctgaagccctgccctttaatataatcaccatggagggtaggatttcagcatgtagattttgtggggcataaacattcatttacagcacgacgtgacgagtgagcaggaggtggccagggccagtgtgccagggagagccgtgcaggcagggggagcagcatggtggaggggagtgtggtggggtggtaagtgtgaaagaggtgttcatagactgtgaatattagagtttttagaaattagcaatgccactcttatcatatttcttagcgagatcttgttagtctcatactttacaatggaatactgaagcgattggatgtagaaagtactttttcaccttcctaatctctcctttaaaaggtcctttggaaattagtgactcattcctcagcttgtgagtttctgtggcatgtgtgatacatcagttctgtaattaaggaccattagttaactttgcttttgccagatgtgatttgtgatgcttggtgcctggtgagtctgtttcctgggccccaggccattggtcatgacattcggaaccctgtttccagtcgagcagctggagatctgtattaacttgtatttctaccccggggcagtgttgggaaagacaccactttcataggcagttctacagggagtgggctttgcactcatttttccctatgagtaaaagaggtcgagacccaccaggggcatgcagtcagttggaggtggaactgggctgctgagcaccagccacctgttctccaccgcccgcctttctgtgggagttgcccatggttccctaggctgcgttcccagaatcggccttccctcctcgtccattttccatgcacaaccggaaacagtggatgtctctccttagtgaaaccgcatgaactttcttaggaaaatacagtgttggcagcagcagcagcaaatttactggaaaattaagatacgacaattgtgggtttttttgcctaattatcaaaccattgaaattaaatttcatgacaaccctcatgtatgcataaacctctttataatgtatgataatagatgttatctcattacatgctttaagatgcccggctctgtccccctcgcttgctgcagggacaccgcatttagagggtgcagcggacctggcaccgaagcacccaaacgctgcggctgctggggagatggaccgccggcaggatctgagcggccagctctggctgtgtcttgatagagcatccacgtggatcatggcatggctctgctgcgagaggggcagggaagagccccacaggcaatggccaacctgggggctccacaacttctcctcgaggatgctttgagaaagtggtttctgggcaaccccatctcctgggggttatgtgggtgctgcactttcctgtttatcccaggtcagagcagcccccaactcaactatctggctactcctctcgcctgtctctttttgtttctggtttaattccttcaaacattccaaagaaccttgtgaatcatcaaagtgatgcttaaccgtgtggcgcccagtcttcttgcaggttgttattgaggcttatttatactgtgttggcattgctcatccctctgtgttccttctgcagtatgagttacagatgagtttttgcgtggattttctttgtacctcgtttttcaatctgaaaggaaatgaggaga

SEQ ID NO: 50584 - DNA, 1608 bp, Homo sapiens
cagttgccgtttcaggacccaccatggcctctaagttttgaggtaatgaaagggatatctacyagctggttcctggcttcgccaagggaatgtcacttccaaaccagacgttggtgaaggtccaggaacgtaggtcctgaagacgagccctgtcctcagagcccgagatagtttctagcccatagtcagaggcttcttctgttttgtcctactagggaaagggggaagggagaaacactcttgaccttaaccttggcttctttacgtcacaatagtgaaagtcttgttattgtctaatcaagggcacccactttacctgggatgatcctggggctggagaggggaagtgacttgattgactcacacactgaggaagtccagggctctccaggcctggacccgtgtctccctggctttctgccacaccatcacattgtttgagtcttcatttggcacaatttagggaggtttgggcagttaatttggggctgggatgagcagggataagactccaattccgttcaaagccgattccaaataaaccatccttctccaaaccagaaccacccctccctagaaggtcagggacattccaaggaaattcttgggaattaaatatacctcatggagaggtgaggaattgaatgatttccaattttccctcctcaccaaacatatatccttgaaaccttggttcctacttctggacaatgaccttgaacttgattagacctgttctctcctggagtggaatcactcctttactccttcctttgcatttcctgagtacctactaggtgccagaccccatgttaagtgaggtaaatcagagctgcctaagacatatgcctgtccttgaagaattcagccaaccaggaaggacacaaatgattcatatccatgatacaatggcaagagcttctccacccacaaactagatccactcttctaggatggggtctcaccacaccagataccaagggtgggagcaaaagaagacgaagttcccctgggggctgcaccccacccaccggcagcattctccccaggaagacagacccccggcctctttacctccagcgtcatgcatctagtacatattcattcacacttggtctggggagtagggggtggggggggggttgctgaacaatgtcagaaatagttctcatcaagcagctaccatgtatgaaatgtgggagtacaaataagggggaaagtaaggggaaatccaaatgccagtttctgccatcccaaagggaacaatttatttatatgccagaaaaactggaggcctaggctgggtgcagtggctcacgcctgtaatcctagtactttaggaggccaaggccggcgggtcgcttggggtcaggagttcgagaccagcctggccaacatagcgaaacctcgcctctactaaaaatttaaaaacatagctgggcgtggtggtgtacgcctctaatcccagctacttggaggctgacgcaggagaatcacttgaaccccagaggcagaggctgcagtgagtgaagatcataccactgcactctagcctgggtgacagagaaagactctgtctcaaaaaaataaaataaaataactggaggc

SEQ ID NO: 50585 - DNA, 658 bp, Homo sapiens
gcagatatttaccaaaaaactactttcatccataatccacttttatttccttatactgtgctatttttcttcataatagagataactttctaatattgtattttaacacttttactaataattaaaatataataagtggtatgtaccaacatgtaacatttgataagttttatcacttgtatgccacctttgagagaacttctacaatcaaggtaatgcaactatcaatgactccccaaagtttttcatgtgctgcttataaaccttccttatggccccttcttgtatcacccactcttcttgtacaaggaaaccgccacattctttgtcacaattaaatagttagcgttttcttgaactttgcatatgtggagtcatactyaatatacttttccttcccctaggcttcattcagtccatataaatactgtgagatgtaactattttcttgcaaattacaataggaatttccatttctactgctgagtagtatttcattgaaagtatacaacaatgcatttattcattccctgttcatgggcacctcgatttattttattttattgtttgctattacaagttgttatctatatgtgtgtacaagtctttgtacatgcatttgtcaattagcacacaactaaatagtcaaatagaagct

SEQ ID NO: 50586 - DNA, 623 bp, Homo sapiens
tgagctggtgaggagtctgcctgcctggagtttagagaagttcaaggacagttaagttgacaatggactagagctactttgcrtaagaggtgcgctgaaggcaggattttgtcctgccctcaattccaggagatatttggtaaagtctggagacatttttaatgtcacagttggatcggaggcgctcttgtatctagtgggtagaggccagggatgccactaaacaccctcaaatgcacaggtcagctcccacgaaaaacaatgattcagtcccaaatgtcaaaagcactgcatttcggaaaaccgtcctagtggtagagaaagaagatgggagaaggactttttgcaggaaaattctcttactgtaatgtttcttactccaacacaaaacacatacacacacatatatacatgcacacccacacagataaaacagacaaatcagtgcattgctttgtgggcctcacatcagcctctgaggagacttgcatctctcagtggtgggggacacattcagggtttctagacgtgtcccaaaccactcactttccctgaattttcagcatttaggagaaatttccatggagaagaagaatcgctgtctggtcatccatgcaatttcc

SEQ ID NO: 50587 - DNA, 659 bp, Homo sapiens
ctagcctgggcaacatagtgaaactgtatctctaaaaaaaattaaaatcagccaagcatggtggtgtgcacatgtagtcttagctactccagaggctgaggtgggaggactgcctgagccccggagttcaaagccctggagttcgtggcatggagctatgatcatgccactgtactccagcagcagagaggtgacagtgacagaragaaggagggagacagggaaaaagggagggacggagggaggaaggaaaaagaaaaaagaagtatctattgggaacagagttggaagaaagggcaattccattacccttgccagttgactggttaggtatagaatgtgccccaatcctggccaatgaggctcgaaagacatctgcttgggggtttctggaaacagttcctcttattcctttggatactgccctgtctggatgggatgcagcagccaaactgggacaaggggctaactgcaggcttgacctcccaggctcaagtgataccccaacctcagcattctgagtagctgggactacaggtccacaccaccgctcctggctcctttgcagcagccaaattgagatgggtaagggctgtcttagtatgaagttaatagggaaaatcacagggaagagagttggaaagagaaggagtccttga

SEQ ID NO: 50588 - DNA, 1849 bp, Homo sapiens
tgcatctgccctgtatttcctccttctattaagttttccctaaaagttcatgtctctcggtctcaagaaacaagtatagtatgattcttccttttctcttgactctcacacattcaactagttgtcacatcctattttatctctgaatctctaatcgctctccagcctcttctattcccagtatgtcctttcctaactggtctattctgttcccatctgtctattcttcacaatctgtcttatactagaatgaggttttatcctgaaacacaatttgaatcatatcatatttttgtctaacatctttcaatggtccaaattccctcatatgaaattcaagatccattacaactatattttaatctctttcttcactatgtcacactgttcctttctatgcaacatattgaatgtatttctttcttggtctaaatatgtgtggtattccactacaggcatcactgtacactcaaacaccagaccaactttcaacgcccagctcaagaacttctgcctccaccatactttccaacttatgggcaaaaaatactttctcataaaaacaaatgacaaaataagccataaggtaacaagaacagagagaaccacagccaatggcctttaaatgtgaaaaaagtacaggtggtaaaagaagttgattttgtttggttactcttctccatgcttgaggatgcccatatgccagaaagaaacacacttttttaaaatataaaatttaaaaactgtgaaagaaaatatctaatgaatgattattctaagaatttgttcaacatcttataactctaaaaagaatgttttggtgacaaatgtgcagcatatgtcttgaagcacttgataaaaatgaaagaattcaaaactatttaatgtaatggtgaattacttaagaaaaagggaacacaaaactgcttaattctgatgtacttcaggattcaaaggccataaatatgataaatgtttaatttccacatcaaattccctagaactgaatggcagataagtcaggatcacattcctataagcacagtttgggtttacttaccttctggtttcctaccctgtcactttcttgcccactcatatcaatccacagttttatgaaatagattaaaccagtgataattcattcacccattttaatacaactggctacaaactgaatactgctataaatgctgtcatatcttcaaccaaccggttttctgaccaacataacttttaaaagaatattaaaagcagacgatgttagggacacaaatgtcaataagactgaatcctatggtcctattcatcaagtactgggaatgtatcatcattgatctaatccaaagctgctcaaatatccaatattagtaatattatcataaaaatgggtggatgttaacaaatacaacaaaaatagtaaatatcctaaatatttattcctttaagctagattaacatatagtcatatgacagttacatatgtactacactacataccastatatttaaaacaaaatagcttattataaaaacaaggcttggctagtgcggtggctcatgcctgtaattccagcattttgggaggccgaggcaggtagatcacctgaggtcaggagtttgagaccagcctggccaatgtggtgaaaccctgtctctactacaaatacaaaaattagctgggcctggtggtgtgtgcctgtaatcccagttactagaggggctgagggaggaggattgcttgaacctggcaggcggaggttgcagtaagccgagattgtgccactgcactccagtctgggcaacagagagagactccatctgaaaaaaaaaaaagctccctcttaca

SEQ ID NO: 50589 - DNA, 1065 bp, Homo sapiens
ggataactaatacaagagtgaaataaggacaaaagaaaccttaattaactggttatcttctcactttgatcaatgtgtaccacagtcttaaagacacattttggagtgtttttaacgtttctttagcactgttaacaataagcttccaaatcacaaaattcaaaaattatctattttccccattaaacatgttgcttgctccaattatggttaaaaatacatcttggggccaggtgtagtgactcacacctgtaattctaccactttgggaggctgaggtgggaggattgcttgaggccagcaatttgagaccaacctgggcaacatagctaaacctcatctcaaaaaaaaaaaaaaaaaaaaaatcttggtaatgaaaataatactggggaccaagttaggtataaaatatatttcayacttaccatatttagatgcaaggtctagaagaattgttctgaagatatgacggagttggtattttaggtgtaaatcactgcctgaatcagagtgcttctctctttcctggaggccactcctcagcagctggttagccctggaaagttctcaaggagcccctgcacttttgctaacatcacattgcttatttgaagagctgtggatatgcctgaaaaagatataacaaattcctattttataatcacatttagaaagagaaacatttccatattctatcccctacccatccactcagcctgtgatcaagttcagcctgaaagatggaggtttagaggaaaatagaaatcgattgcagtaacaagcatgacgaatagtgtgccaggagaaacaaacctagactgaaggtgtgagcgctcgagtttacaaagtcaagttttgcattggtttggctggtggggaaactctagaatgccatgcagcagaaatgaaaaagtaacatctcagaatctctgatcattttggatgtctatcaataaacctagcatggcagattagcagagaataagtcaagaagaattatgaccagagaagattaattgaagtcaaggttcctatgactaaatttgtttatatctgggtgctgag

SEQ ID NO: 50590 - DNA, 589 bp, Homo sapiens
tgctataattgatgtggaacacatcttttaatacccttctcaatatttctagtgtcaagtaatacgaatgcatcaaatgtgcgtctcagttcaccacagagaacagccaacttcttcaaaacaatattaaagacacactgtaggcactttttcttgaagactgagaggatcttcctgcaagagtatctaaatgaagggtgtacataggttcagtgagttcaacatagagcagggagagtctcccattttactgagacaagaaagtgtccaaacaggaatagaagctttgatgacagacagtaggagatgctcttctcccaatacccttgatggtgcatgtaacctttctggttttactcattccaaagactaatcattgtcatgaggacgatcaagtgactcagtgacaatccacttcagtatgttcatctkcagtatgttagagccagaagaaatcttagagatcatttcgttcaaaccactaattccactgtaaagaaatcaaggcccaaatacttgagtcatatgtctaaggttatatacatgagagggctaagtgtaagttttgtactgagttttatgtcctatg

SEQ ID NO: 50591 - DNA, 617 bp, Homo sapiens
ccctgccctcatctgcaaagatgaccatggctaataaagggatttggaccaacataaagcagagtgaaactctactacccctggaggaatcawaattcactgaatccaggtacacctttgatttagacactcttacaggaagatcctcttagtcttcaagaacaagtgcctacaatgtgtcttcataattgttttgaagaagttgactgttctctgtggtgaactgaggtgcacgtttgatgcatttatgttacttgacactagggatattgagaagggtattaaaagatgtgttccacatcaattatagcaaaaacatcatactgagagtattcaaaaagtgactttgttatagagagttctcggtactacatgtctattaaaatttatataaagttcaatttgactagcatcaagggattttttttcctggggaagagagaaaaagacactatccaacttcaatttaccaaaggctgaaaatgacaaaaataaatagagaaatttaatctaataaatctaatgaagttgaaaaaagaatatcatagaacacatatgatgataactaccaaccacttttcaggacctatgacaggttatgaatttcctggtatttt

SEQ ID NO: 50592 - DNA, 1364 bp, Homo sapiens
tgcatyttctgtggtctaagccaggccctgtctctttctggaattcggtttcccaaatgcacaatgaggggatgggtgtgaaactgcctcagtgtgctcagtgaggatgcagcgtcaagttccatcaatacaggacggggtgtcagggtggggtggctcaggtgcatatggtgaagaagcctccctaactcgggcagatgctgagggacaccacatataacagccaggcctagtgcccatggccaggcatgctcaaggggccctgtgtctggaccaagaagagaacatgctggtgagttcctccttcactgtgtccacaagtgcagtacacaagggagccccaggcaaggttggtctcatgcagccagctctgtgcctcccacacttgcaggggcctgggtcacatgttcaccactggagccaagaagtggtgtcagtctcacttaagcactaagagtgagggcagggaggggtagtttcttaagaaaaaaactgaggtgctgtcttcaatagaagatgagttggatgtcagaaagataaaagcacccgatctcagaatcatacatatagaccccatatctacctctgccactaggcacacggggatatatatgtcccagagaaggtaggtgtcttgtccaaagtcacacaatgagcaatggcaaaactcataatttggttaacattcactatggctacatatactagaatccctaaaataatagtgacatgtattagttagggttctctagagggacagaactaataggatagatgtatacataaaggggagtttattaagcattaacttacacaatcacaaggtcccacaataggctgtctgcaagctaagagtgaggagagccagtccaaattccaaaactgaagaactaggaatctgatgtttgagggcaggaagcatccagcataggagaaagatgcaggctgggaggctaggccagtctctcttttcacatttttctgcctgctttatattctagctgtgctggcagctgattagatggtgcccacccagattaagggtgggtctgcctttcccagcccactgactcaaatgttaatctcctttggcaacaccctcacagacacacccaggatcaatactttacagagacaggccatccatactgaccttgaactgaccaccacagaagtttataaatcatgtgtttctgttcgagcatcttgtatgtgctttccatcctcaatgcggtctcatggtccaatgtggctgctggagctccagcctcgaccggccaccatttttgcatttcagagagcaggcaaggcagggcaaagggggccctctcagctgggtcacttccatctgagcagtctcccca

SEQ ID NO: 50593 - DNA, 581 bp, Homo sapiens
cacccaggctgcccaggagaatgtggaatctccagcagttctgacttaactggcctggtgtggatgtctgtgatgggtgaacattcccagacccttttaagaacstgatagaagtggtggacccacttcccagaaaaagggacgcacaacaaaataattgtcctgagtgggtctgacagaatcaagtgaaccctttaaatctggatctagaggtcagagactgagaatgtcagagatgcaaaagagattcagtgcaagagaaatcctcctactggttttgaagatagatgttggcagcctgtgtcaacaacctgagagtggccttgagttgctgggagcaccccagactgacaaacagcaagaagaatatggggacctcagtcctacaaccacaggaactgaattctactgacaaccagtgagcttgcaaagaggacttggagccccagatgagaagcaaccctggctaccccgatctcaaccctgtgagatcctaaacagacaatccagccatgcaacacccaaacttctgacctatagaaaccctgagataataaatgggcattgctctaaatcaccaa

SEQ ID NO: 50594 - DNA, 581 bp, Homo sapiens
cacccaggctgcccaggagaatgtggaatctccagcagttctgacttaactggcctggtgtggatgtctgtgatgggtgaacattcccagacccttttaagaacctgatagaagtggtrgacccacttcccagaaaaagggacgcacaacaaaataattgtcctgagtgggtctgacagaatcaagtgaaccctttaaatctggatctagaggtcagagactgagaatgtcagagatgcaaaagagattcagtgcaagagaaatcctcctactggttttgaagatagatgttggcagcctgtgtcaacaacctgagagtggccttgagttgctgggagcaccccagactgacaaacagcaagaagaatatggggacctcagtcctacaaccacaggaactgaattctactgacaaccagtgagcttgcaaagaggacttggagccccagatgagaagcaaccctggctaccccgatctcaaccctgtgagatcctaaacagacaatccagccatgcaacacccaaacttctgacctatagaaaccctgagataataaatgggcattgctctaaatcaccaa

SEQ ID NO: 50595 - DNA, 581 bp, Homo sapiens
cacccaggctgcccaggagaatgtggaatctccagcagttctgacttaactggcctggtgtggatgtctgtgatgggtgaacattcccagacccttttaagaacctgatagaagtggtggacccacttcccagaaaaagggacgcacaacaaaataattgtcctgagtgggtctgacagaatcaagtgaaccctttaaatctggatctagaggtcagagactgagaatgtcagagatgcaaaagagattcagtgcaagagaaatcctcctactggttttgaagatagatgttggcascctgtgtcaacaacctgagagtggccttgagttgctgggagcaccccagactgacaaacagcaagaagaatatggggacctcagtcctacaaccacaggaactgaattctactgacaaccagtgagcttgcaaagaggacttggagccccagatgagaagcaaccctggctaccccgatctcaaccctgtgagatcctaaacagacaatccagccatgcaacacccaaacttctgacctatagaaaccctgagataataaatgggcattgctctaaatcaccaa

SEQ ID NO: 50596 - DNA, 2020 bp, Homo sapiens
cacagttcttatagttctctttaacccttgctctcctgggctcccatgtcttccctttaatccgcagctccacattcaaatggctctgtctacacatacaacaggtgtataaacagttctttgtctgagcctagagcctgtggggccagccagataggactcggtttaattgttcacctcgttagcatacagctgacaggctgcygctgttaggggagtagcagggcaaggcaaaccccaaggcctgctaccctccacgtttcaatgattatgaagagctccatttcagaataaaaggcccatgccattaaatgacaccatcctgcatactcaatcttcacaatctatgtatggccttacttttctggaagcacccaacaagggacttgttttcatttaatttggccgatggctttagcattcacaatggaaaaatgttaaatctaattagttgatgaataagagaggtcttgtgaattgagggacaaactggaaaacagcatgaattcctcttgattttgaatcgtattctaataatttgtaccattcactgaatactaatgatttaaattaatcactattaatacacagattgcttaaaggatctttacatactgtctactccaagattttgatttatctgaagagaggttttactagaaacttggtagtattacatttgttacagttccttttacatatttccataaatgtatataacctctatggctttcaaattttaaaaaagttgccattttgaacaattttatattttaaaatgttaccaaaacccttaaaaaagcactataatgtcgtcttaataaaaataaaaatttaaaaaattgcccatttaggaaaaaattacttgcagaaagcaaaaaagtggttaaaagtaaaatctttctattcagttgaaacatagacacataatttctaccgtattacaaaccccattactaaaattaaatactgtccaaatggaagattaaaatgatttcaaatttattttgataaatgacaaaaatgccaagataattttgaataaaatattaccctatttgcctgtcagtctttacttaaagtctcctgtaactaagaaaaatatagtttctctaattgctttaaaatttagaaaacagacatgatttatatttttaaatcattatatagggtagccttacactttacaatttaacattagttactacgctctcatacaagaatatgtcacttcttcaaccaccccttaacaacaaaaaacccaagcaataccaaaaaataactaagagaaatacctgtattaaattttatcaggacttataacaatgaatcaaaagatctcacaaatgaaattttatcctatgtcatgaataagaaactgtttagatctgcatcaagcttccattagtacaaaatgcttcgaatttcatttagttttggtttgaagttgaagttactgtctgactgaggaataaccgtacttttcattaaagagaaaggtgttttgatggagttaccttgttgggcctaggtacttaggtattacggccataaatcaatgggatgtcgctaactttatattgcagagagctctttttattgctccaatgaaattcacgattccccttttttttaaattgatacagggtctcactttgtcactcagggtgaagtatggtggtgtgatcacggctcactggagccttgaactcctggctcaagtgatcctctcacctctttctcacaagtacctgggattacaggcatgcgccaccacatgtggctaagatgaggtctccctatgttgcccaggctggtcttgaactcctaggctcaagcagtagtcccaccttagcctcccaaagtgctgggattacaggtgtaagccaccatacattgctaaaattcatgattccttttattttcagttttctactaaaaaattttccttcttctcagcagtttattctaaaagtttagccttacgctaaataaatgggaacaaaactaaagccaaatg

SEQ ID NO: 50597 - DNA, 564 bp, Homo sapiens
cccrctagcccacaatctccatgaaggcagagaccagatcttcttagcccacattgtatgttcagcaccaaacacagagtcagacaaagaaggcacttgttgaataactaaattaactgttttctgttatttcaagagaaattccaaagtctcaaacagtcctcaaaacgaagtcaattttcttgcactctaattctttttaattattccattctttaagagtgataggaaaaaagttgtaagtcatgaaatctaagttgttggaagggccttttgtgtcttaattcaacaaattcaatatccagataatggcacgtccatctttgattagttaactccagatgcagggagctcattccttcctaaggatatgctttccctttatgggtagatcactggctttcttctagctattacaaaataatgtatcattttgacccttagtcttctttttttcccataagcccctcctgtgaacagggtctttttccctgttcaaaggttccccatggctgcacaaaaagaacaaagaccaaatgccttaatagagtttacctggccatt

SEQ ID NO: 50598 - DNA, 1941 bp, Homo sapiens
cattttggacagaaaacaggcagttgtgggcttggaaaatgacaccccaaagtatggagctttgacatactaaatacttagaactgaaaaagcagtctcagaaccaagatctctctgaccttcccctactcctctgtctctccgttctctttctctcctgaagcacagggaggggctgtctgtgaaatttcccttgtctgactgagggaagttcctcaggaagaatcccattgtcatgaaccctgctccctggagttaacattaaccagagaagattaagtcctattgtaggggaaggggaggaaactaagggtctccaygcccaggagcttatgcccagatagacttttcactcagtcttctgagggctgctacctgagagactttatctgcataataagacaatctttgtttccagtgtagttcctctcctcacattcccatagcttgtaaaatgtcaaaactctaaagatagccaagagggttgaaaatacgggtgaacagagctaattttgttgattcacatcttacttctgtattataataatattgattgttataggatattaactccattagatttatattgatacttctatttgttaagaaatttcataatttttttactcaattgtctcaataaatatgtaaactaattaactttattcttactctctatgtaaatatactaaggaatatagtgaccaagaagggcttaacattaccctcggcctgactatacaggcttcttcctgactataggctccggacctctcttttctttgagtatttactttagaaaatttgcaattgtaaattctttctctgaccctttgagatgtcagtcttctacaactcaggaacgtctttctcaaggacctagtaataattcccttgaattgtaatcatcaagaaagataggtctcctgtctctcagtctctatgagattataggatcataacttccagaagggacaatttgcaaacacatagatggcctgattacattgaccaagcttctcccttaacatttgccaagacttttccattgactcatcccagaatttaaaaattctcttttctttttttccggtggaatggagttcaatatctctctctctgtctctctctctctctctctctgtctctcctatcacatagtcttaaatagaatcttccttctcatttttaacaagtattcagagcaatatttattttttaatagatgttaaataatttgccttggttcaggtagttatttaatagctcagctgagactataacttttctactacatcaaaattgcttggaatgcttatgtgtaggcattgtatcacttttaaaataagtagagagagagagagagaataattgggtttccttttatttcaaaatgtagttctattcaacaagcattggtaacttgtaatgacttctgtatcagttcttcagctttggttacaatgcacaacaggtgatatgaatggcaggtaatctgagcctcaatatgtatcattcaaagctttttttttttttttttttttttttttttgaggcggagtttcgctcttgtttcccaggcaggagtgcaatggcgcgatctcactgcaacctccacctcctggtataacgcctaaggtccttgcctagccacaccaaagaattggtgcggctgctgaccacagcaagtgatggagacacagaccgagagagaggaaaaagttgtaggctttactgagcagagtgaaagtacaaagcttccacagcgtggaagggttcccaaacgggtagccagagttagattatacgattgccttttaaactccttaaggcgggaaatacgtggggtgggaagatgttaccagagcgagaaacaaagacaattaaccatttgtgacatgtcttagatcttgaggaaaactggaattgcaacttaggttt

SEQ ID NO: 50599 - DNA, 1941 bp, Homo sapiens
cattttggacagaaaacaggcagttgtgggcttggaaaatgacaccccaaagtatggagctttgacatactaaatacttagaactgaaaaagcagtctcagaaccaagatctctctgaccttcccctactcctctgtctctccgttctctttctctcctgaagcacagggaggggctgtctgtgaaatttcccttgtctgactgagggaagttcctcaggaagaatcccattgtcatgaaccctgctccctggagttaacattaaccagagaagattaagtcctattgtaggggaaggggaggaaactaagggtctccatgcccaggagcttatgcccagatagacttttcactcagtcttctgagggctgctacctgagagactttatctgcataataagacaatctttgtttccagtgtagttcctctcctcacattcccatagcttgtaaaatgtcaaaactctaaagatagccaagagggttgaaaatacgggtgaacagagctaattttgttgattcacatcttacttctgtattataataatattgattgttataggatattaactccattagatttatattgatacttctatttgttaagaaatttcataatttttttactcaattgtctcaataaatatgtaaactaattaactttattcttactctctatgtaaatatactaaggaatatagtgaccaagaagggcttaacattaccctcggcctgactatacaggcttcttcctgactataggctccggacctctcttttctttgagtatttactttagaaaatttgcaattgtaaattctttctctgaccctttgagatgtcagtcttctacaactcaggaacgtctttctcaaggacctagtaataattcccttgaattgtaatcatcaagaaagataggtctcctgtctctcagtctctatgagattataggatcataacttccagaagggacaatttgcaaacacatagatggcctgattacattgaccaagcttctcccttaacatttgccaagacttttccattgactcatcccagaatttaaaaattctcttttctttttttccggtggaatggagttcaatatctctctctctgtctctctctctctctctctctgtctctcctatcacatagtcttaaatagaatcttccttctcatttttaacaagtattcagagcaatatttattttttaatagatgttaaataatttgccttggttcaggtagttatttaatagctcagctgagactataacttttctactacatcaaaattgcttggaatgcttatgtgtaggcattgtatcacttttaaaataagtagagagagagagagagaataattgggtttccttttatttcaaaatgtagttctattcaacaagcattggtaacttgtaatgacttctgtatcagttcttcagctttggttacaatgcacaacaggtgatatgaatggcaggtaatctgagcctcaatatgtatcattcaaagctttttttttttttttttttttttttttttgaggcggagtttcgctcttgtttcccaggcaggagtgcaatggcgcgatctcactgcaacctccacctcctggtataacgcctaaggtccttgcctagscacaccaaagaattggtgcggctgctgaccacagcaagtgatggagacacagaccgagagagaggaaaaagttgtaggctttactgagcagagtgaaagtacaaagcttccacagcgtggaagggttcccaaacgggtagccagagttagattatacgattgccttttaaactccttaaggcgggaaatacgtggggtgggaagatgttaccagagcgagaaacaaagacaattaaccatttgtgacatgtcttagatcttgaggaaaactggaattgcaacttaggttt

SEQ ID NO: 50600 - DNA, 641 bp, Homo sapiens
gagaagaaaatggaccgtaaggtctaaagacgttattgtagaagtctaggcaatagattatagtgtcatagggaagggtggtaattattgaggaggatatattttggaaatataattgacaggaattacttatggatggtatctagggatacacttgtgttttaggaccaatcaaatgaatggatgraggtgtcatttactgagatggggaatattaaaatacgcagagctttggtagagagagtatctgtggatcaagatttctgatttagtaatgtaacatttgggttgcagggcagcaatcaaatggaaatgtcaagcagaaagttggatgtagaagtctggccttattgcagaggccatacactgaacaatatatttggaatccattagcatacagataacacttaacttcgtaagactgtatgatattacctaggtagaacatttaaaacatgaaggaaagaaggcccatggctgtgcctcgaggtcagactctccctaccttttcacagggattaaaaactgtggctactcaaagaaactccaactatattctagagtcggctctgtcttagctcttatgttctttaggctccttaagactcaggtaaacagatcctgaggagaggttcattaca

SEQ ID NO: 50601 - DNA, 641 bp, Homo sapiens
gagaagaaaatggaccgtaaggtctaaagacgttattgtagaagtctaggcaatagattatagtgtcatagggaagggtggtaattattgaggaggatatattttggaaatataattgacaggaattacttatggatggtatctagggatacacttgtgttttaggaccaatcaaatgaatggatgarggtgtcatttactgagatggggaatattaaaatacgcagagctttggtagagagagtatctgtggatcaagatttctgatttagtaatgtaacatttgggttgcagggcagcaatcaaatggaaatgtcaagcagaaagttggatgtagaagtctggccttattgcagaggccatacactgaacaatatatttggaatccattagcatacagataacacttaacttcgtaagactgtatgatattacctaggtagaacatttaaaacatgaaggaaagaaggcccatggctgtgcctcgaggtcagactctccctaccttttcacagggattaaaaactgtggctactcaaagaaactccaactatattctagagtcggctctgtcttagctcttatgttctttaggctccttaagactcaggtaaacagatcctgaggagaggttcattaca

SEQ ID NO: 50602 - DNA, 641 bp, Homo sapiens
gagaagaaaatggaccgtaaggtctaaagacgttattgtagaagtctaggcaatagattatagtgtcatagggaagggtggtaattattgaggaggatatattttggaaatataattgacaggaattacttatggatggtatctagggatacacttgtgttttaggaccaatcaaatgaatggatgaaggtgtcatttactgagatggggaatattaaaatacgcagagctttggtagagagagtatctgtggatcaagatttctgatttagtaatgtaacatttgsgttgcagggcagcaatcaaatggaaatgtcaagcagaaagttggatgtagaagtctggccttattgcagaggccatacactgaacaatatatttggaatccattagcatacagataacacttaacttcgtaagactgtatgatattacctaggtagaacatttaaaacatgaaggaaagaaggcccatggctgtgcctcgaggtcagactctccctaccttttcacagggattaaaaactgtggctactcaaagaaactccaactatattctagagtcggctctgtcttagctcttatgttctttaggctccttaagactcaggtaaacagatcctgaggagaggttcattaca

SEQ ID NO: 50603 - DNA, 641 bp, Homo sapiens
gagaagaaaatggaccgtaaggtctaaagacgttattgtagaagtctaggcaatagattatagtgtcatagggaagggtggtaattattgaggaggatatattttggaaatataattgacaggaattacttatggatggtatctagggatacacttgtgttttaggaccaatcaaatgaatggatgaaggtgtcatttactgagatggggaatattaaaatacgcagagctttggtagagagagtatctgtggatcaagatttctgatttagtaatgtaacatttgggttgcagggcagcaatcaaatggaaatgtcaagcagaaagttggatgtagaagtctggccttattgcagaggccatacactgaacaatatatttggaatccattagcatacagataacacttaacttcgtaagactgtatgatattacctaggtagaacatttaaaacatgaaggaaagaaggcccatggctgtgcctcgaggtcagactctccctaccttttcacagggattaaaaactgtggctactcaaagaaactccaactatattctagagtcggctctgtcttagctcttatgttctttaggctccttaagactcaggtaawcagatcctgaggagaggttcattaca

SEQ ID NO: 50604 - DNA, 600 bp, Homo sapiens
cgttccttaaaccatttcaataaatttttactttagcatctagtacttctatttttaaatacaaaacaaagtgttttccaaagcaacagctcttgaagtgtgaaatgaagttaccctccagaaaaatagtttgatttggcgtgtttctctcagcatgatttacaagtgtatcccaaacctgtaatcttccccaaatccttcagtactgtgaatgacagcaaaaataatttagcataatcatgtataatgtatgactaaacgtgtcacagtagatattaagagctttctgaagttgtaatatgaagccyactctagcgcatctcttgcagatcacaaaaaaagcaaaaaaaaatctattttgtgtagacattattatgcagtcataaatgtgacttagaagccattgtgtgtgtgtgtgtgtatgtgtatgtgtgtgtttgtgtgtgtgtgaaaacaaatgcccaccacctatcactggtgtcaataagtgtagttttttagggagaatacatttgctagggtgctctgccataccaagctgcataattattgtaaaagggaatggatagaaatttctatattcctctttctttacttttt

SEQ ID NO: 50605 - DNA, 629 bp, Homo sapiens
ttctttcttttttcaccttccaggacttgacctcttgcccaccagataactcttgttaaaacagatttcaagtcataatctctcctgaagactcttgrttcattgtcatgcatcccctggtactattatacacatccattataagaagaaagctaacagaaaatatgcttccttgccagagtatactactaagttggaatcacagcagtattttcttctatgaactctatagcttagcttattaatatgctgatgaagtcattagcagtttcaacatttgcaatgaaatcaatttggttatactcataataaattaaaattaaaatatttcaaaaagtcatatttctactcaccttccattcttcagaatcctcagattcattattttgatacctggttacctagaaaatttagtacacatggtaaatccaaagagaaatttctaaagcaatagttattaacacatttcatacataggagtagggatagtcaaattttaggctgcatcagaatcactgggaggccttgttaaaacactgatttctgtttcctatccctaaagagtctggcttagcagctctgaggtagggtccaagaatttggatttctaacaaggtcctagttgatgc

SEQ ID NO: 50606 - DNA, 559 bp, Homo sapiens
ttggtttacackctaccctccacctcatctgctgcatcataaaatttgttccatagctttattacagttcttattacattatactgtaacttatgtttgggtgtttatccccacattctaatacttatccctactaacaaagcacccaatttagatcctgtgttataatagaaagcctatgggcagtaaatggataaattaataaataagtgaattatgttagactccaggtaaacctagaagagaaagaaacatctttctctaaagcaagcgggaaggattcagaaaccattcattaaaaacagcaacaacaacaacaaaaagaagtaacaaaagtgtccttctccacaatgctgttttattttccttaattaggaggcacattcattgccttagtgtgaaaaggaaaggagctgaggcagttgtatagtggcaaagtaagaactgctgagcagaaacatgagcttagcagaagttgaaacatgaattagctgtagcactattcttcatgattggatattttactccattaatgcttgaaaatcaactaattcattca

SEQ ID NO: 50607 - DNA, 2108 bp, Homo sapiens
tctgttgcccaagctgttaccagtccacaaggaaataagtataaccactgagtttagaaacttctatagccacataatcacagtgtctaagaaactgcctttgtcattgaactcagatgttgttgaactgacgtgatggttcacatttgatgaaagctgtgtcatagacatatgtgtggtagaaccacattacattaaatattttaagattagttcatgaactaaacccaaatgtttaaataaaatctaaagctctaaaatccatttccttcaayaaaagatcattttactataactttacagggaaatttttagaaatgattatcagtgaacacttgaagatgaattttgaaactatagaatcatttattttattttgaataaaagttaaaaataataacttcggcttgccgaaatgcttggaaatgtcttctattcctgtcaacatatttatgaagtgcatttctctcctctaaatgttactaaaacaaaacataggagagttatatgtacattacttcttgggagtagcattgtcatcaatccagcctagattatgtaaattcattagctagaagcaggctcatttgtcacattgaaaactttaaatcgtgatatacacagtgtcttttagaatgttcatataggcatctagtatgaggaatcaccatttcactcacgtgatcgttaattgcctatacttacactttcaatgactaatttagggttttggcaagtaaataatttttttcctatgatgtttgttctcattatatttattaaaatgtaattttgggtctgtttaatctaataaaagtgtaggcttttatttcatcttaccccaaccaaactatgccaccctatgagggtttcctttgggtgaatgcattcctcatcctacttaagctcctccacagagatgccctcttcaccctgttcatgctgtaacatcccatacagtcctgccatgcagatgccctctttacccctctaggctctcacacctctgtaccaccacagctccctatccaatcaggctcagacatttatatttctgtgccctacttagtggactcaagagtgaatttttcaggaagaaaggaaggaaagaacatgaaatggaagaaatgcaagggatgggtagaggaagggaagggaaaataaaaaggaaagttatgattttttattttaaagaatcagaacagaatgatacaatttgttttgaactatcataagcacatatgcttccatcaccgctttcctgcacattacaccaataatgctttgtcatgggaagatattttctaggtggaaggacagtcctatctgaaagctccttcactttttcaatcctctaatcactataccctatcgcagtgccacacaggaacacatctccaaaaacctgctcacagctgcaacatggtgaatgggtgattgcttgtctccaagtccctccttggagaatggaaaatgttaaagagataaagttataaaaataggcataggccgggcatggtggctcacgcctgtaatcccagcactttgggaggccaaggtgggcggatcatgaggtcaggagatcgagaccatcctggccaaaatgatgaaaccccatctctactaaaaatacaaaaattagctgggggtggtggtgcgtgcctgtaatcccagctactcgggaggctgaggcaggagaatcacctgaaccagggagtcggagtttgcaatgagccgagatcgcgccactgcactccagcctgggtgacagagcgagactccgtctaaaaaaaaaaaaaatacaaaaattagctgggggtggtagtgcatgcctgtaatcccagctactaaggaggctgaggcaggagaatcacttgaactagggagtcggaggttgcagtgagccgagattgcaccactgcactccagcccaatgacagagcgagactttgtctcaataataaaataaaataaaataaaataaagacaaaattaaaaaataggcactatacaaatatcagaatgtattcttttctgtacttcaaagatgtttaaatggttttgataagaaataagtttcattctcacagacttcaaatccattggtg

SEQ ID NO: 50608 - DNA, 548 bp, Homo sapiens
tatgacattactttttatctactttatacaatatattactattattttagctttacatggttaactataagtaattaaaagtgaaaaaaattatctttccaacattmttctttgatttaatggatttatatttctgtctaatctgatatttctctactggaagaaatttattgaataatttttacagcgtggtgttttttgtctgagaaagactttgtctctctttcaattttgagacatactttgtagatcaaagtccattgtgttttgggattgcatgattttttattgttagttttatttctatgtatttaatatagatatcttcaagatttcccatttatcttttgtcttcgggtgcttaaatattatgggccttatttttcttttgttgctgttacttaatttggtttggtttgacatttcttctgcttggtgttctctgagcttcttgaatttatggatctctatttatcaataattgcagaaatttctcaatcatcagtcttaaatatttctcttgttctatattacctctcttttcctct

SEQ ID NO: 50609 - DNA, 548 bp, Homo sapiens
cattctggttctgcataaaatccattgcaacctgacttattgcaaccattctatgggtttttttttaaagaaatagttaccacttacctggcaaaaggacacatcttagttcttagcctcctaarcttaccatttagcatcattaaccacacctatgctgaaattctttcctctctctccaaagctctgctgtttgttatttctctttctacctccccaaccactctccttcccactcttcttcttttaccttctcaagaatttagcactgacttcacctagggttccaacctgagctctcttctttctacacttttcacttctgagacatacagcattcgtaagagaaaaggtttcagtgtcagggagtcccaggtcttagtctgacctctgctacttatcccgtgtggcctaagtcaccatttcttcattagcaaaatcaggatactacgacctacacctcaaagacttgctggcaatattaaatgagaaaatctacatgtagtgtatagctttgtgcttagaacataacaagcatgcaatacatt

SEQ ID NO: 50610 - DNA, 548 bp, Homo sapiens
cattctggttctgcataaaatccattgcaacctgacttattgcaaccattctatgggtttttttttaaagaaatagttaccacttacctggcaaaaggacacatcttagttcttagcctcctaaacttaccatttagcatcattaaccacacctatgctgaaattctttcctctctctccaaagctctgctgtttgttatttctctttctacctccccaaccactctccttcccactcttcttcttttaccttctcaagaatttagcactgacttcacctagggttccaacctgagctctcttctttctacacttttcacttctgagacatacagcattcgtaagagaaaaggtttcagtgtcagggagtcccaggtcttagtctgacctctgctacttatcccgtgtggcctaagtcaccatttcttcattagcaaaatcaggatactacgacctacacctcaaagacttgctggcaatattaaatgagaaaatctacatgtagtgtmtagctttgtgcttagaacataacaagcatgcaatacatt

SEQ ID NO: 50611 - DNA, 523 bp, Homo sapiens
tgtctgtatgtattcccttagatatgggtttccagaaaaagcttaagcgaatggccccaacaaattatcattaggtttagatactacacttagagtttcatttcattctgtaataaggtgagttgatggtggtgttatttcaagttataactgagaaaaccaaaatctggatgcattgtcaaaggaactgcactagcttcttctgcctctcagtatttagagaatgctcaggtattgtgatggtgaaacaattatttaccatcttaaagtactttgccatgttgttagtcacaaatcatctataggytgcattctttatgtcatgcacttacttttaattaagctcctaaggaagcagaaccagcaaaggctattgctgttattattcatggtgcattgttggctaaggctcctataacaaatgtgtaacacaatatcacacattgtaaatatttatgaactgtgctacaaagaaattgagattttaaaaatattaacaaatattatttcatgagaaaaatct

SEQ ID NO: 50612 - DNA, 1456 bp, Homo sapiens
gtgattctgaatggcttcagctttctttgagtggcaattttgcttttctgggggccctactaattgaaggaaagcatagaggagccagagtaaattggttcttcagaagctttaagaaatattgtgggggtcatattaatacagcttttgtaatatattctctttctaattagtttttttctctctttaatgggaattttaaggactgcagtggcatgagccaacagagatttttaaacagcacaaatataaatggttattctaaattatatttggaagaaactctacttgaggtatttaagttagtaagtaaaggcaccaaattaatataggctattttaagaataaatatggaatgctataaaactttggtgatctgtatactttctggtggctggccaataggatttttaattgaattactacagaaaattcagcacaaaatattatcagatttaaccacccactcaatatgttatttgttactgttttattaggctaaatcaaaggttatagcatctcatcttctgcactgatttttagcccagaggggtaaagttttaaaatgagatcatgaaattttagtaaagagcaggtacttaacaaaaggatgatactcaattattttatttagaaaagtaaaactattttgtgactgctttatatgtgcattcctagcctttaaatagttagacaacttcattgacattcgcattttggagctttgtaactagtctgaggttgaacctgggaggggagatgttgggtgctgaggtcctcatggagaaaagacctgttggcaaatccaatgtcaaaagtacccacatttcaggcatattgcctttggctatattctctgaaaagccccaagatggtggacagcatggctggagtttacaattccccagataatcatttcagaatctatgcatctcacatttggtcattgtaagtggttagaaattcctgtttttttaattattttgtgtcagtgtgcctcatcttgcagctgttctcagagtgcagtctgcagaccagtagcattacccaggaacttgttagaaattcaaattctcagatttttgttggctgcctacatgtcttcgagaagtgtctgttcatatccttcacccactttttgatggggttgtttgttttttcttgtaaatttgtttaagtwccttgtagattctagatattagacctttatcagatgggtagattgcaaaaattttctcccattctgtaggttgccatttcactctgatgatagtttcttttgctgtgcagaagctctttagtttaattagatctcatttgtcaatgttggttattgttgcaattgctttcggtgttttagtcatgaagtctttggccatgcctatgtcctgaatggtattgcctaggttttcttccagggtttctatggttttgggttttacatttaagtcttcaa

SEQ ID NO: 50613 - DNA, 675 bp, Homo sapiens
tacatatatatcaatatatctaaatcttatagatctaccttcatctatatctatagctctctatgtgtatatacacacgtaatttacttcyaactgttatccaaggactttgacaaagtggaaagctttgaatatttgcatctagccaaaaacatccttcaataatgtaaaccactagtatcagaactggtcagaaccagaacttgaaaggctctaaaacagatagcattgaaagactagatcctaagagtcatcagcatatatataaatggtaattcaaataatgcatgtatatgagaccacctaggaagaaagaacaacgtaaaacaaagcaacagagcatagttgttaaaaacaaggccactgcaatcagaatatctagactcaaatcctgactctaccaccaactagttatataaaactagtgaagttggggttaatttggggcaaatgattgtacattgatcacagaatacttgcaaggattaaatgtaataactaagagtaagcattctacatatattgactcttattagactgtaagaaaaaacaaaaaactagcactaattccttaaggactccaaaactgaaagacagagaaaagtggagaagtttttacctcttatacagtgagaggtaagaggtaaaacttgaataaatgatgctaaggaagac

SEQ ID NO: 50614 - DNA, 1221 bp, Homo sapiens
gctgaatataaaatagagaataaaactgcaaaataaattaaaatttaggtgaggagttaatctggggaataaattgagggtaacagtagcctgagagtggtattgaagaccaaagggacatgaagcatgagcttctgctttaaaatattcgttcaaaatatttacttttagatgcaataaataggtcttctttgataaaaatgaacatcgcatttagaaaaatggaaagggaatatggtagagacggaggaaggaagatagaaaagagacagagcactacagtaagttgcgttattgtacagataatgactgtaaccttgcaggataaatgaactaaaactagctaaatgttatgcaaatgaatatttattacttgagatgaaaattgaaccgacagcctcttaaacttgtaaaataatctcaaatgatttaggcaaaaatgaagatgcttgttacctgatttcatatgtcactattgataatcgagattagaacataagatgcacagacagaaaggaattgtcatggctaagacttacttggcacttactatatgccatgcaattgttctaaatatgtatttttaagagctaaatcatgactcaattttatgatagtaactattattatcaccattttacaggtgaggaaagttgttcaaagtcacaactattaagagacagagttaggattcaatgccaggcagtctgatattccatgaagatcaaatgcaacaaagccatatttctgatgttgcttattattttgcctaatacattgtaatataggtgattatatwaattgatgaatgaaataataaaagtaaacttttgattatatattcaagtttacatattcgagtaaattaaaagatattttggttgatggagggtagggaatattattattgggaaaatcagaggtaatttttatccagctatgctatattttatgtcatgtctgttaatttaggaaacttttcctggccaacagcacaagttacacattttacattatatgctttcatagcattccatatttttcctttacaacaacttgctataattcaaatttaaaattacatcataaatgtctgtataatttcttaaataataggtttcacactgatgggtgccttatcttttttcactgatatgctccctggtatccatcacagtgatgtcacatgacatatactaaatatttgctaaataaatgaat

SEQ ID NO: 50615 - DNA, 1018 bp, Homo sapiens
ccactcctattctgagtcttggtttcttcacctagaaagtgagggtttggactagatgagtggctttcagggtgttctgtgaatctcctcatgaatactttagggtaggggagggaagggagtgagtgatgctcaggggctgtcaaagtgactgcgttcatcagttttacactggggctgctacataatattttcatttgaacgaagaacttcaaaaagcacaggactagatgatctctgttccttttggctctaatatgctacaactgtaggccaattatcactttaccaattaagagttaggccagataagtgaaatttaacttaagggcacacagctaataagtaataggcctaaactggatttccttattccaaatcctgtcttttccccactattccattagaccccacaaatgttagttgtgtgtgtgtgtgtgtgtgtttttaatcactgtaaccggatgcatttttttaaggcaaaatttctcccttatctactatgatgacttcagaagatacaatggtcccaggggccaagtagaaagcatttttaaagattaatctgaattaagctttatcagtgtactctttatctgtgttactagtgcctggtatgtagtaggtgctcaataaatgcatattgaataactaagtgaatttcttttggcaactttttaaggacatgtgctcttagtacttaagaggctgctcaaggaccttcctatctatttctgtggtcaaattcagactacaggaggtctttttgaatcattatagttagaagaagaatccagtttctgcctgtgaacttatttgactttagattgtctcatcttgtgactttataatgcctgtcccctccactggtcaattcagcatatggaagtataaatgcagtctttttactaggcagatatatatgctatcttacagctaattatgaaattgaatgaaaatccattgttatcttagggattagttttgaaaagcccccrtttatatacatttgccctaa

SEQ ID NO: 50616 - DNA, 1446 bp, Homo sapiens
attgggtgcaaggagttcagttatgtgtttgggattttttagatgacaggtgtcgagcttgaacgctttcttaattggtggctgcttttaggcctackgtgggtattaaattttttactctctttacaaggttttttcctagtgtccaaagagctgttcctctttggactaacagttaaatttacagggggatttggagggttctgtgggtaaatttaaagttgaactaagattctgtcttggacaaccagctatcaccagactcggtaggtttgtcgcctctacctacgaatcttcccactattttgctacatagacgggtgtgctcttttagctgttcttaggtagctcgtctggtttcgggggtcttagctttggttctctttgcaaagttatttctagttaattcattatgcagaaggtacagggattagtccttgctgtattatgcttggttgcaatttttcatctttcccttgcggtactatatctattgcgccgatttacaatttctatcgcctatactttatttgggtaaatgatttggttaaagctgttcggtagtaaggtggaatgggtttggggctaggtttggctcagagcggtcaagttgagttgaaatctcctaagtgtaagttgggtgctttgtgttaagctacactctggttcgtccaagtgcactttccagtacacttaccatgttacgacttatctcctctatataaatgcgtaggggttttagttaagtgtcctttgaagtatacttgaggagggtgacgggcggtgtgtacgcgcttcagggccctgttcaactaagcactctactcttagtttactgctaaatccaccttcgacccttaaatttcatcagggttatcgtagttttctgaagtagaaaatgtagcccatttcttgccacctcatgggctacaccttgacctaacgtctttacgtgggtacttgcgcttactttgcggccttcgtcagggtttgctgaaggtggcggtatataggctgagcaagaggtggtgaggttgatcggggtttatcgattacagaacaggctcctctagagggatatgaagcaccgccaggtcctttgagttttaagctgtggctcgtagtgttctggcgagcagttttgttaatttaactgttgaagtttagggctaagcatagtggggtatctaatcccagtttgggtcttagttattctgtgttcagatgcattaaagccactttcgtagtttattttgtatcaactggagttttttacaactcacatgaattttagctttattgaggggaattgatctaaaacactctttatgccggtttctattgacttgggttaatcgtgtgaccgcggtggctggcacgaaattgaccaaccctggggttagtatggcttagttaaactttggtttattgctaaaggtttatcac

SEQ ID NO: 50617 - DNA, 579 bp, Homo sapiens
gagtctgaaaaagaactgcttaacagtcatcaggtattagggagccttagcatgctaattctgwaaagtctttggagattatctataggcatcttcccgttttcctcctattttacagttggaggaatttaaagtccaagtagggtaagtcttccttgcagggaaacagtggtgctctctgtgtgtgctatcatgtgctatcacacctatttattcctggaagcacacagtgtccagttgaaccacaagggctgtctactttttgaatctagcaattatgcttctggatgccttcctggtgatgaataaactgttcacactttcccttccccaattaaatcttgaggtattttctccctccattagtttattatacatcattctgagctaaagggaagactgttaacagggcattgagtgtggtgtatcctcttctatggatggcatgcagctatcattaatcataaactcaaaacagtgggttgaataaggaacaattttaggtacatacttagacattaaaaaaatctaaatgtgcattttctgtaaggtagttgtaatcttagcgttggacaactg

SEQ ID NO: 50618 - DNA, 575 bp, Homo sapiens
taatgacagtaaccgcctattaactgtttaaactctatattgcataygaaaacaccacaagttctggttgccatgcacagccgtacactatagaaaacaagtggctctacctcttactctccatcctgtagaaagtgctgtcacatgtttgatggggaagatgggaatcaggcagggtcgggtggcacagttgtagttagcaagcctgcttcaatgaaactgccactctgacacagtcttactcagagatatcccagaaaaccacggtcctctcctatggctccacgtgtgccctggagagacatgtaagagtagagggcaccccaagcacagaagacaacaatgatggaggcctctgagaacagtgttggcctctgtacagtttcctgccactctacattctctctgcatggttgcagccatatcctgactatgtgcagggaggatttaaggccgtcgaactgaacacttgacactttgttctcacactgtactgtgccccgatgtgattaaattagcaggatcaatctcttcctgagtccggttactgactgtatgccacaatttggccacta

SEQ ID NO: 50619 - DNA, 544 bp, Homo sapiens
gcactgtacttcagtatgaggcaaacatactttatgtatgtcttcartttgtcaaatgaatatgaaaagacacatattcaaggtcaatatttaataatattaataactttcaaagcctcatcaatacaattacatccatgacattcttagatggaacagccatttttgtgttgattgaaagtatatcgtggtaaaatacaattaatgctattacaaatggtagctaccaacatgataagcgctaagttaccagcaactttattcaccacggattttacatcattagtgcaaaagtctatatagttaaaggacaaaaaatgccttactgttgttatgagaagagttatgaactagcagaatcctaaaagcatatcaagaactcccaatggcccatgaaccagcttttcaaaatcttgctttaacagttcccccacaagtagtagttacaatacagaacaatacagttcaatgacagttttatttctttaatgcctgaaccttttatattgcctgacccgttactaatgtaagaaaatgagacaat

SEQ ID NO: 50620 - DNA, 620 bp, Homo sapiens
ttctcactctaatgggcagatagatgtgccatattgtattcataaagtgtgttaagtgcttttttttttttctttttgagactgtctctgttgcccaggccagagtgcggtggcttgattatagctcactgtgaccttgacctcccaggctgaagtgatccctccacctcagtctcccaagtagctggaactataggagcttgccaccactcccggcttttttattttttgtagacacggggtctcaccatgttgcccaggctgtcctgggttcaagtgatcctcccgcctcagcctcccaaagtgctgggattacaggcgtgagccaccacacctggcctgttaagtgtcacagtagtgtgtataagttaattaatactccttgcagcagcattttaagcacagtattctgtgctgtgagttctggatgtttcttgcttcctytgtttttttttctttgttaaatcttcctgttgtttttgtaaattgactgataatcttttaataagttaaccagagtgggtatttttgtttataacaaaaaatcctggtgagtacatggaataatgtggatgcattaatgcaacgtaaggacccttgtttttttttttttttttttt

SEQ ID NO: 50621 - DNA, 550 bp, Homo sapiens
atggtttaataggaaaaaataagccctttaaaaataattctaaataataatttaatcttgatattcttatcttgacttgcttagtgtgtttaatctgagtaaactgctacttggattaccatctgaatgtctaatatgataatgagtaaatggtaaactttgaggtttgcatttatcttggtgagtattgggaatatggcaatgcrgtggatatatattgacttgctgtatatgaaattatgaatagttctactttaaaaaatcccttcacaaaatcaaagccttttggaggtaacaatactatggaataacattaatatttatttttatttatatatttattatttttttttattttactttaagttctgggatacatgtgcagaatgtgcaggtttgttacgtaggtatacatgtgccatgatagtttgctgcgcctattgacccatccatcgtctaagttccctccccttgccccccagcccccacaggccctggtatgtgttgttcccctccctgtgtccatgtgttctcattgttcaactcccac

SEQ ID NO: 50622 - DNA, 541 bp, Homo sapiens
atatccagtttgagatgtcatactttaaaagcttgggttttttcataaaggcagagtttttccagagcaatacttggcctacagagatagaacgagggggaaacaattagcgtttattcagtatttgtcaagmaagtgacaattgttaccatctcctgtggaggagtccaatgaggggaggatagtaaagaggataacagtgcctaccactgggagcagcagtcatggaatgttaacctactgcatggttcgcaggtgttgggatctccaagaaagactcacacgagtactggatggaacaatgctttactatcatatagaagaaacagagaaagcccagtttcaacagtgagtatcagttcagtttcttatgatcagcgggtctcgtcccacagtcgacacaggagatgacttgcacgcacccgtcttgggcagcaggtgaaggaccccatttcctcccaaccaggaagagacatagcaggggatgccatatgatgaacatgcttaagcagaacagaagaatacacatcacgtctggaac

SEQ ID NO: 50623 - DNA, 619 bp, Homo sapiens
agggatctgctgctttggagagacaggaaagggaggatggggacttcaggacagagatggtaggaatgaagggcaagggcagacatctctcagagaggttaatgaggtgattttgttggttccaagtctttgctagtgtgaatagtgctgcaataaacatgcgtgcatgtgtctttatagtagaatgatttataaccctttgggtatatacccagtaatgagattgctgggtcaaatggtatttctagttctagatccttgaggaatcaccacactgccttccacaatggttgaactaatttacactccaacagtgtaaaagcattcctatttctccatatcctgtccagcatcartgatagactagataaagaaaatgtggaacatatacaccacggaatactatgcagccatataaaaggatgagttcatgtcctttgcagggacatggatgaagctagaaaccatcattttcagcaaactaacacagaaacagaaaaccagacaccgcatgttctcactcaaatgtgggagttgaacaatgagaacatatgggcacagtgagggaaacattacatatgggggcctgtcagggggttgggggggaaggggagggata

SEQ ID NO: 50624 - DNA, 598 bp, Homo sapiens
ggggaggtttatagtttgcccagggtcatgggattttggggtggtggaagcaggattcaaacccgtgcctgccagatgccaagtccaggcccctgtgccatcccacctcacttctggtttatttccctcagcagctaagcccagattcctgaaaaattgtgaacttttggaaaatactgtttctaacgtgctgtgaggggttggtcataggggttgccctagtttgagagatgagcccggctgtgctcagacagggaaatctgctgtccgggagtctcccagccagctgccggcagtmctgccactgaagtttgcctgtgctcagttgtacctcctgcccctgagccccctccctggtggggacagctgttagtagctgcagtcacctgcctggaactggcaaacagatggacctgggtttctgggacagttccaatttcaaatgttctctggttgtcagacaaatgtactgctttttagttcagaaattatggggcaccttatgcatggctataaatcctgtcagctctagtaggttctgtcccagaagggagtggcctccagaaaggtagcatggtaatttttaaaggctggccaa

SEQ ID NO: 50625 - DNA, 623 bp, Homo sapiens
ttttttttgtgatggagtctcgttctgttgccaggctggagtgcagtggcgcgatctcggctcactgcaacctctgcctcctaggttcaagcgattctcctgcctcagcctcctgagtagctgggactacaggtgcccaccaccatgcctggctaattttttgtatttttagtagagacgggatttcaccatgttggccaggatggtctcgatctcttgacctcatgatccacctgccttggcccctcaaagtgctgggattacaggtgtgagccgcagtgcccggccaatttaaaaacttttaagctttaataatattctccattatctccagaataaaattctrccttgttatcaatcaatatcttcctccatcagagcccagctcacctttccaaccttttcctctctctttcctggcagttacattttgctctagctgcccatggcacgtatccctcgagtgtgccatgtgcctcctatcactgtgccatgtcactcccctctctctagtactttcttttcactgtgccaaattctactcatttatttaggcttggctcaggtgtcaccacttttatcaaacattccctgatacctttgcagacaaaatgaatgtgttg

SEQ ID NO: 50626 - DNA, 2162 bp, Homo sapiens
gtaccttggtgaatgttacatgacacttgaaaatatgtatattctgcaattgtatggtggaatgttctataaatgacaattagatcctatttgttgattgtattgttcagattctctatacctctgctgatattctgtgtagtcattttattagttgttgagagagatttctgaaatcctcaactataattcctgacttgtctgtttctcttttcagccctacctgtttttgcttcatgtgtttggaagctgtgttgttttactaatactcatataggatcattatgtcttcctgatgtattgatccttttatcattatgaaatttccctccgtgtctgtgttgggtttctatattttatttcattttgttttgttctgaagtgacatctctgatattaacatagctactcttaggtattttttaaaaactactatttccaagttacttttttccatccttttattttccattattttatttgtgatagatggcaatcttaattgatgatctgaggaagtgagtttcttgttaagttccttactaatagcatataacttgctcatgctttttgtttgtttgcttgtttttgttttattcaccctgccaatctctgacttctacctcgtctatttaggccatttacatttacagtaattattgatgtgttagaacttatatctgccattttataatttgttttctttgtgtcctctctttctcgtccctgcatttcttcttttgctttcttgcttgttatttgaatttttgtttggattccacctggctgatatatgtacagtattttttagtttatcactttgtacagttttcatacttattaaaatacacaaatgtaacagccttatctactggaaatcaacatttcatcacttcaagtgaagtatggaaaacttatttctctttaggtcattttaccttctctatcattaaatatcactttcttgagtataaaatgattttataattttcatttcaatcattaaatatgatttataaaacaaatgagaaagatattctatcttatagattcatatttctatttgattgttctttcttgttttttgatgctacaggattcttttatcattttgtttctgtttatagaatttcctttagccaatttttaagggtagttctcgcttttaatagcatcttatagctttccttgatctggtgtctttactttccattcattccccaaaggatagttttaccagttctataattatcacttgatttttttttcaacacttaaaaatgtaccatctccttgtagcctttgtggcttcaggtgagaaattcactatcatttgaattgatattcctagtgttgacattttgtattagaagttcaacattggttacatagtaatgtaaatactatggcatataaatctttcattttaactcttatccataaatttcaaatatagattatagctatgtaacaatgaatgtgatcaatcaggtgctaataaatgccaataaaaagagagattacggtcatgacttcaaaccttgtaattatattttgttttattcttgatatgtttccttaacctcagaataattgggtaaaatggaaaagaaaaaaattcaaattgattttcccagtgtgtttgtatatcgttttttaaaaataaaaatatagacacacttctaaaatgtccctcacttatcccctcttttggtattcacagccttgtctaattcccttcctctcagtgggggctggccctgtgacctgcttctaacgtataatatgttataaaagtggtaagatgcgacttctgaaatcaggttatgaaagaatgagatttctatgctgctagcattctttttattgccttctctcttggtcactgatgaacccaagagccatgtcataagcagttgtttggagaggcccacgtggcaaggaaatgaggaaggcttctggccaccagctcccagaaactaaatcctgcccacaaccatttgtgaaatcttggcagcagatctaccccaagttgtgtcttcaatccactgcagatctggctgacgccttccctgcagcctatgagagagactcagggccagaggattcaattaagccacacatgtattccacagaaacyatattgctgcataacaaattac

SEQ ID NO: 50627 - DNA, 572 bp, Homo sapiens
gcccttttcagggctcacattttgcagtgtctgaaattcagcatggggacacaataaaagaaccaaaacagaggactaagcagtgaacggagtcagtttgcaaatgaaacaaaacagtgattaaaatgcaaagaaacaaaaggagctttaatagcaaaaacattgataacagggtatgttcaaaggtcaaagcaaaaaggttaaagacaaaactagacaaatttatatgataaattttataatggaaaatggcttttaaatagtaaaagyaattaaagctttagatttttaaaatcagaatttttcttttgaggctcaccagagcagagtggttatattctaggaaagcaaagcttgtgcatggggggagaggttgagagcgggatgatgtaaaccatcattctgggacaccaccaaagacaaccaaacctcaacattttgaaagagattctgaacaaaagaatattctaaagcagtttgaaaagaggaagccattgtctctttttgtgtctggaaatgaaaaacagggactacatttaaattcatctgaaacataaggtttcgaaagaaaa

SEQ ID NO: 50628 - DNA, 584 bp, Homo sapiens
agagttacatattctgggcgtatcacttttcagattttacatctcatagcctccattctgccatgtctaaaaccgagatgcaggcatgtattgcagaggactatggggaaggagatgcgatcaggtgcctcatgttcccgccacagaggaggcattggataaaagggagctattatcgttactgaacggcaaggttcatttgtggaagtgtggttctgatgatgctgtttagttgctcagagcctgcattgtgtcctcagggccactagattcactctggtgtctctgaagcccttagcaggatccagggcgacctccacaatcaccccaaaagtttgctcacctcctgcctttgtttgcacgtgggagtgacatcttcaacaccgccctgcctgaggtcctgagcacagtggaatacacagttggtgctcagcagatgctgggwagtgcgtgaattcatgctctcaatcgggtcctcaagcccccctttaatgccataatgaaaaaacaaaggtttgcaatgggaaatagaaaataatgcttttgcagtgcttgaaactaaacatgactgaattttaaaaata

SEQ ID NO: 50629 - DNA, 577 bp, Homo sapiens
gtggcttgtgtcagtaatcccagcaacttgggaggccaagatgtgttgatttcttgagctcaggagttcaagaccagcctggtcaacatgatgaaaccccgtctctacaaaaaaatacgaaaattagccagcatgatggtattggcctgtagccagctactctggttgctgaggtgggaggatcgcttgagccttggaggtgaggtcgaggctgcagtgagccgagatgaaatttactgaaattggggaaatatacttcataatgataaattaattttccaaaccattagtaatatattttttatcattgcatatacctaatgatacaagttcaacatatarttgaataaagtgaacaagtaaacaatcataaatgggatttttaaagactcttctcttgatgcttaatacaagacaggccagtgagcctatagaaagatttaaactagacaagtaaccatcactcatatgaatgcattcacacacatatactcacacggatactcaatttcaatgtagtaccgctagccaagcttggctaggagacagttgaaatgtagctattcaaatttaacat

SEQ ID NO: 50630 - DNA, 577 bp, Homo sapiens
gtggcttgtgtcagtaatcccagcaacttgggaggccaagatgtgttgatttcttgagctcaggagttcaagaccagcctggtcaacatgatgaaaccccgtctctacaaaaaaatacgaaaattagccagcatgatggtattggcctgtagccagctactctggttgctgaggtgggaggatcgcttgagccttggaggtgaggtcgaggctgcagtgagccgagatgaaatttactgaaattggggaaatatacttcataatgataaattaattttccaaaccattagtaatatattttttatcattgcatatacctaatgatacaagttcaacatatagttgaataaagtgaacaagtaaacaatcataaatgggatttttaaagactcttctcttgatgsttaatacaagacaggccagtgagcctatagaaagatttaaactagacaagtaaccatcactcatatgaatgcattcacacacatatactcacacggatactcaatttcaatgtagtaccgctagccaagcttggctaggagacagttgaaatgtagctattcaaatttaacat

SEQ ID NO: 50631 - DNA, 619 bp, Homo sapiens
ttttgttytttgagtttgagttttgctcttgttgcccaggctggagtgcaatggtgcgatctcggctcactgcaacctccgcctcccaggttcaagcgattctcctgcctcagcctccaagtagctgggactacaggcacacgccaccacgcccagctaattttttgtattttagtagagacagagtttcaccatgttggccaggatggtcttcatctcctgacctcatgatcctcccacttcggccttccaaagtgttgggattacaggcgtgagtcaccgcactgggctatagtttacttattcatacttctacaagtttatcctcttagaaaagaatcaaatttatcttactaaaacctgcttgtttcagttgccaatcttatataagaaacatcatttcccttttatttaatttgtcatcatttaatagtatctatcaggaaggaccaaaataaaatttagcattattgtaacaggagaaagaaatattgtaagcatataaaaataggagatgggtaaagaagttgaactaataaatatactttcacgatttttgttgaagaaaacttcagcagattcatgaatttcacccatcctgttcgtatgtagggaagtt

SEQ ID NO: 50632 - DNA, 596 bp, Homo sapiens
cacacttatcctccttgtgcctcggttttccacctgtgaagtgaagtggggtttctgagagtagctgtgtcatgggatggttttgaggatcaaatgggttcacatgtgcagacagcttagaacgagtgcctggcactgcgtcctcagagcttgtctgttgttaggtccgtcgccatcagtcgggagctgccagagaggaagggagaagagacacagagtaggaggccactgggaatcttcaggaggggaagagtcgagggcttggcagactttactgkcacgttcttctaggacgtgggtatgaagatgctggcgatgctggagtgagagaaacagaaaaggaaagtgtgtggccgtgaaccctcatcagccacccacgtgcccagaaggcctcgagcagagctgggcttctgcccgtcacgctgtttgcacttgttactaaccaggctcaaactgcctggacattgtcaggaacattccagaatggtatcatccttttcgttttctttttgtgtctttttggatccttgcagaatattgcagagacattgtgcttggtttccaaggatgggcactgtacttgcaatgtcgggtga

SEQ ID NO: 50633 - DNA, 562 bp, Homo sapiens
tcctgggtatattttattttacaaaagagaaaatgaggtttagaagtgttatgaaccattgcttccaggggaaaaataaaattatatatatataaaatattattttgtaaaatgaaatctcagctattttatatatatatacacacacacayatatataaacacatatatatatagatacatatatatatataaaataatcctaaaaacagcttatcctgggtagattttattttattttacaaaagagaaaatgagctttagaagtgttaattaagcctaatgtcactccattaacagctgcagcttcttgtacattactgtgctgccccttctgtctccatcctctggtcttctctgtatgagaggtgaaacaagaagccagagtattgccttgttctaactcaactgagaatgtgcacatgaggtgacacatttttgctactctgtgtgtgtctgcaaataattgcaaaagtgctgtcagtattgattttggggttataaatggattttagcaagtaggtgaatttgcagatgcagaatttgtgaataatgaagatcaa

SEQ ID NO: 50634 - DNA, 495 bp, Homo sapiens
taacaaatagtgcagccaggattctctgtattgatttaatgaatccaccctctgacaatgcctcactgctcccctgggaaaaagcacatatcttttttttaaaaaaatgatttaataaacttattctaagagcgcctatactttgttctgagtcaataatgccttccttctgttggatggcatgatgtaggttgctaggctggacttgttaaaygttgggtaaggaaggcatgattgcacccaggcgaagtgaatggctacgcagagggcacagataatctgaataggggttgggctgagatgacagatttagagacagaggccaggacttcctacaggggccacacgtcacggcgtcttgtatagaaccaagcataaaagaggcatcaataaatgtgtgtggatcaaatgatgagatggtcaaattatttttgtgccttcagaggaactgagttctcagggatacattaatgacaggtaccatctggatctcta

SEQ ID NO: 50635 - DNA, 571 bp, Homo sapiens
tcccagctcagagacgtctccccaggccccagctcagagacgtctccccaggccccagctcagagacatctccccaggccccagctcagagacatctccccaggctccagctcagagacatctccccttgtcccagctcagagataatcttcccccatcccagctcagagacatctcccaggtttccagctcagagacatctcccgtggtcccagctcagagataatctcccctggtcccagctcagagacatctccctggtttccagmtcagagacatctcccatggtcccagctcagagacatctccctggtttccagctcagagacatctcccctggtcccagctcagagacgtctcccaggtttccagctcagagacatctccccggtcccagcttgtggtgacttctggttcctttcgtggaccctttgacagctcacaactttgttgaagagatgaatgttgaaaatgttcaaaatattttcatttttagatgtatgaataccaatgaaagtgatcaaccaggtagattttttccttttcacattcttagtttcctttcagtgac

SEQ ID NO: 50636 - DNA, 2130 bp, Homo sapiens
tttttttttttttggaatctgttcaatgaaaataaggtatgacccaagtttttactagtctgactagaagtattccacttcaaggtctgaagtaggacttttaccttaaaaaacaacaacaaacaaaactatcacacaggatagataagaagattggttaaacagttttgtgtagatctttttggtgctgaactatgacatgagccttatagattgtaaaatagggatagttggaactaatgtacagaactaaattttttaaactttatttgctgttaaattctgtgaagtttcagttatctaaaataaatatacacaaatatgaaatataatgtttcagattgcaaggtaatatgtaatagtagtgtttgtaagatactcttgtctaatattaactagtagtattttgatttgtacagtcataatttgttaaaatgacttcatttaacattcactgatgtagattaataatgtaagttctgatttaaagaatggtggcaaaatggtgcatgtaatacttttgcaagtgttggggagatcggtatgttttgaaaagagtaatttaacttttgggtgccaggaaatgggttttctcaaagtccattgccggcaatgggcaggcctgcaaatactggcacagagcattaatcatacaccttattaacggtgaggtgaataactttgaaataaagttttagagaaatgtttcagatacttgagtattctttttcactcttgaactaacaacttcggcaagaaatcagctaatattctatttttaaatatgggcattaatttcatttcagttcgttcactcattccattcatttatcatttcacaaacatttgaaatcctaatataagcaaggtgctctgtttaaggcagaaatttgaaaatgtacaagatatatggtcttgtctttaaggagctgttcatctagaatggaggaatttacactgataattattcctacacttgaaacaaagaaattaactctcaaattgcgtggcaagcatatatagactttgctataaatatttatgaaatgagttactgttttccttaaaaaagctaagactaagggctggcaatcaaataagagcaaatttagtggtgaacgtagaactgcccactaccagctagagtctccaacctaaaagtcccatgttgctagtgatccccaggggttttatagaaggaatccctgcattggcagtaattttggattagatgatccctaagagcaccatcaagtcttaggattctatgaattaggaaataaaccaaattatatattttctaatactgatcagctcatattttatcatcatgtcatgtctggctttcatacttagtcataatttactttctgggtcatttagaggctagcgttctctaaggtcacttctgcttgcacattgtaggatattatttagtatggctttaagaattcaatctttccccctctcctttatggaatgtgtgtttcctctatttgtacacttaaccttttgtcctaagtttttatttttatggatactaatgagtaactttgaggttgacactagacccaaacagatgcaaacagccactttctgtcctcttgtgacacagttgaaacactttatctcttgtctgctgtttggagtgtcctgaaagaaacactgaagtggcagtcaacagagcaagggtaacaggatctttaaataatttaaagttgtctgatcttgacataaaagtgaaccctttctttaaaatttctagcaactgctcttaagtcataggttcctcattttttctttgctggtagtgggagaaaatagttgatctgtgatttttsttttcatctccccaaactatgttataaaggcagtaatttgatgctgaagattatgattagaaatcctcagatgggttatatattggggctttatcttttaatattaaaaagaatgtctttcctggactactttattcagtacgtaagcactattcattctatgtatattccttattcagccttgcagactcctgtgggatctgatctcttcctgcttcaactcagtaccatactcaccaaggcttagtatgtcttcacccactctcccttctcttgcattcctcaaaca

SEQ ID NO: 50637 - DNA, 650 bp, Homo sapiens
gcattagatggtcttgatagtgacactgggcaggcaggtggggcaagggagactatcccaattctccatgtactctcagcacaggacagcctgaaagcaccagtgtcttgtgtaatgactggtgctaaggcaactagtgaaggaggatagaggcaggcccagaattccctctacactccaagccctggttttattgtaatgtcaagagccagtaagtagggtgcatgatcttccattctgatttggcttcccctaccctccacctatccatcagggaataattgatttctcactgtacagtctagtccccccattatatacttactcttagaaartatgtacagataatgggtgcagtttcttcttccctgtaggagggttgcaggaagagctcctcccataggctctcacagccagttgttttttcacaggtccaagaacacagcagctctgttccacagttgtcctgcttggggagtggactgagggctgatggcattctgaaggcgttttttctaggattggacatggcctactggaacacacaggtcactggaggaagatgaagtagtatgcccagccctgtgccccagtgcatcttcagaagctggtggccaggcagccaacatctaggggcaggtgtatatcct

SEQ ID NO: 50638 - DNA, 578 bp, Homo sapiens
cccgcctcggcctcccaaagtgctgggattacaggcatgagccatggtgtctggccctaatgtgagtgatctttaacactgagcacttgaaaaagaaaaccctgaagaaacctaattattcgatgtctggacgacaaggaagaagatagaaatggcatcagataataaacagtgtaaatgtttgtttatcagaaaggggctggtggtcgggacaagtaggaggatcgcttgagtccaggagtgcatctctacaaaaaagttaaaggattttttaacattggccaggcgtggtggcacacatctgtgatcccagctacttgggaggctgaggcaggaggattgcttgaagcccaggaggttgaggctgcagtgagctgtgatcgagccactgcactccagcctgggtgacacagcaaaatccagtctcaaaaaaaataataataawattttacataaccaaccacttctaaagattaaaaaaaaacccctatgattaaaaacctcaggtccctcaggcaatcataccagatatcgaaacaaagcaataacataaggactgcagtatttattttattttt

SEQ ID NO: 50639 - DNA, 1530 bp, Homo sapiens
gtctataatccatgttcaataactggctgcctggtgaatacagcwcacctcagagctgttcatgagcataggatttatacagcacagtcacacgatatgacataggcagtttttatttccttaactactttcagacactatgtggccaggcgcggtggctcatgcctgtaatcccagcactttgggaggctgaggcaggcagatcacgaggtcaggagttcgagatcagcctggacaaactggtgaaaccctgtctctactaaaaatacaaaaattagctgggcatggtggcgggcacctgtaatcccagctgctcgggaggctgaggcaggataattgcttgaactggggaggcagaggttgcagtgagccgagatagcgccactgtatccagcctgggcaacagagaaatgctccgtctcaaaaaaaaaaaagagacactaggctatagctcagattccacaagtatctctatctaaaggatatgaatgagtgaatgaggcaaaatagggaagagaagaagggctttatttatttatttttttttttgagatagagtctcgctctgttgtccaagctggagtgtggtggcgcaatttcggctcactgctacctctgcctcccaggtcgcggttgaagcaattctcctgcctcagcctcccgagtagctgggattacaggcacacgccaccatgcccagctaatttttgtatttttagtagagatggggtttcaccatgttggccaggctggtcttgaactcctgacctcgtgatccacccaccttggcctcccaaagtgctggaattataggcatgagccaccgcgcccagccgggttttaatttttatctactgctttaactttcacttcagtgtgttggagtgtggtggacaagcactcttcctcactctgccatcctgtttctgttgatattttcaaccattcagctatggatgtctgaagcctctctttgacagtgatagacaatttccttgatattcttaattgcttatttttccattgacttataaatgagaaaaatataataaaaatgggaagctatcaacaaattctgctggatattgattataatcacagtgactaagttaggcatccattttaaaatccagagttactatgtatttgtttctgtatgctgcctatctgaagtaaatttctgtctctaccgcttgcttctactgtaacagcctcatgccatttcccttcctgtttcctttcacaacccccagtatattttataaaataataacttttactaaatactgctgtaaatttaacatgtattatgacaaatgcatgtaacagttctaaaacaaagaattacctccctttaacatctgagaaaattgagttcagaaaggatagtaattggcccacaaaaattctggacacttagtacacaaagggaaattaacaaatcatggtgcatatacaatggggtcctgaaaacaataagaatgatgatgggaaaattaggcttataaaacccttagcataaaacgtcat

SEQ ID NO: 50640 - DNA, 601 bp, Homo sapiens
ctttaatgttttcttgaaatgtaaaatgaaagccacctgttctattccccccatactcatggaccatatttatgtctaggtgaataatcttaaagaataattatttcttctcattttatctttgttacatggaagaatctactgcaaacaacagagttttgagaatttttaatgttttacacaatatgcacgtaagtttgtgccttggggtttttaagaattttcttccacaagtcacaaagatttttttccacattttcttctatttgctttatggttttacctttcacatttatgtctttaatgtatctgggcttcacttctgtatatagtatttggtgggaattcatttttaacttttttctccgtatatggagccactcccaagggtttgttgtttcctcactggtgtatggggcagccttaattagacagtgggtttgcttttgcacctggatctggccagtcttctgtctgattcatctttttctgaatcccagcgccatacatgttygttatctcataaaacaagttccccttgtcttttttctcagtttgatacagagttagttttttgtgcacgattattctttcatatgca

SEQ ID NO: 50641 - DNA, 656 bp, Homo sapiens
tttttaagaaacagagtctcactctgtcacccaggctggagtgcagtgatatgatcgtgactcactgcagcctcagtctcctgggctcaagtgatactcctgcctcagtctcctggagtaactagaactacaggtgcatactgccatgcctggctaacttgtaagttttttgtagagatggggtctcactgtcttgttcaggctggtctcgaactcctggcctcaagtgatcctccctcttcagtctcccaaaatgttggcattacaggtgtgagccactatgttcagccagagactattttctttcccttattttatcgtttgttattataacccttgtaaatcccagactattaagaattatatttggaaaacagaggctttgggaaatttctgcttcwttgcatagttgtgacgatatcttcatagtgctctccacaaatgtggatttttgtagccctatcagagataaaactgtagtggttttcttaaaaggtataggggagaaaagcctggttatggtaatgaatgtattaggtagagacaatgttagatgaagaaaacagacatagttcaggaaaaacacatgtctttaaacaggtttcattcagaagtagacctctattttggcagataataactattttcctttaaaa

SEQ ID NO: 50642 - DNA, 546 bp, Homo sapiens
agtcccagggtcttagtatatatttattatttatttatttatttattttgagacggagtttygctcttgttgcccaggctggagtgcaatggctcgatctcggctcaccacaacctccgcctcctgggttcaagcaattctcctgcctcagcctcctgagtagttgggattacaggcatgggtcaccatgcccggctactttttttgtatttgtagtagagacgggggtttctccgtattggtcaggctggtctcaaactcccaacctcaggtgatctgtccgcctcggcctcccaaagtgctggggttacaggcatgagccagcgcgcccagccgggtcttagtatttattacaataaattgtagttcattcggaggccagagactctgttttctttatcttagtgcttatggcagaaagactggcaaatattaataataggtcctcagaaagtgtgttttaaatggaattttgagaaaggggcctgaataacaataaggacaatcgtgagctttttcatgagcttccccagatttgcctgactg

SEQ ID NO: 50643 - DNA, 586 bp, Homo sapiens
ttttgagcatctctcggcttgttcatgcctctggtgtcgtcagatttacacatgacacacagtcatggttgaatttcaaacaataagtgcacgcttgtcccatgcggtactcgtgtatactggaaaatcatctggtgtttatctggagtgcaaaggtaactggcatctgtattttcgtttcttaaacrcggcagccctcttcgggccccttggtgtcctctaaggacgaggactcctgctgtccccacctctggtcaccgctgtcaccctaaggccctcagtgctccctggtgctgggctctgtgctgggaacttcactctcactgtttccttttttttttttttttttgagatggagtttagctctgtcacccaggctggagtacggtggcgctatctccgctcacttcaacctctgcctcctgggtccaagcagttctcctgcctcagcctcccgagtagctgggactacaggcatgtgctatcacgtttggctaacttttttgtatttttagtagagacagggtttcaccatgttggccaggctgctttcgaactcctgacctctaatgatccacccacctca

SEQ ID NO: 50644 - DNA, 586 bp, Homo sapiens
ttttgagcatctctcggcttgttcatgcctctggtgtcgtcagatttacacatgacacacagtcatggttgaatttcaaacaataagtgcacgcttgtcccatgcggtactcgtgtatactggaaaatcatctggtgtttatctggagtgcaaaggtaactggcatctgtattttcgtttcttaaacgcggcagccctcttcgggccccttggtgtcctctaaggacgaggactcctgctgtccccacctctggtcaccrctgtcaccctaaggccctcagtgctccctggtgctgggctctgtgctgggaacttcactctcactgtttccttttttttttttttttttgagatggagtttagctctgtcacccaggctggagtacggtggcgctatctccgctcacttcaacctctgcctcctgggtccaagcagttctcctgcctcagcctcccgagtagctgggactacaggcatgtgctatcacgtttggctaacttttttgtatttttagtagagacagggtttcaccatgttggccaggctgctttcgaactcctgacctctaatgatccacccacctca

SEQ ID NO: 50645 - DNA, 586 bp, Homo sapiens
ttttgagcatctctcggcttgttcatgcctctggtgtcgtcagatttacacatgacacacagtcatggttgaatttcaaacaataagtgcacgcttgtcccatgcggtactcgtgtatactggaaaatcatctggtgtttatctggagtgcaaaggtaactggcatctgtattttcgtttcttaaacgcggcagccctcttcgggccccttggtgtcctctaaggacgaggactcctgctgtccccacctctggtcaccgctgtcaccctaaggccctcagtgctccctggtgctgggctctgtgctgggaacttcactctcactgtttccttttttttttttttttttgagatggagtttagctctgtcacccaggctggagtacggtggcgctatctcmgctcacttcaacctctgcctcctgggtccaagcagttctcctgcctcagcctcccgagtagctgggactacaggcatgtgctatcacgtttggctaacttttttgtatttttagtagagacagggtttcaccatgttggccaggctgctttcgaactcctgacctctaatgatccacccacctca

SEQ ID NO: 50646 - DNA, 2534 bp, Homo sapiens
tcctctcctaactttactttttgaaattagatccacataataaatcccgactctatgattttatacaattagaatattgatttcacattgttttgttttgtttttgaatttgcctttttatttttcacaacatagacatttaagtttctcaatgaaggcttaaaagtcatttgatgstttgaggtgaactatgatgggctcttttatattttcctaaatgaagaaaatgttggaatccaccctatgacagattattgcttaagcttaagaatgactgttctggctcttgataattaaactctcctttgctagtaatttcaggtctattaatcacctgtttgaaaactgcttcttataaaatgtttctatagacttctatccttatgcatttcaggttatgaaacaccagaggttagcaatgccccctccaggagttttggggagtgtcttttttgatgttatatgctaggcattcaattgatctgtcaaccctaaagtcagtggggctgtggtttgtgtcataatgatagtttttctatgatgaaacaaaaattgtatttgggaataatcagaaaactgtgtgaaagtagtgctgaagtagatactgggttgtagcccactaagacagtcttcatgttcaatgcaaggtgtgtcagccagtttctacagacataaagtctctgcatttctattttctcatctatcaaaacataattgtaaagcttagtgtgcatttttggatctcttcccatccatcccacaaccttttatctgagaatgtctcccttataagatccatgaagggacctccaaaaccacatggtggcaagcaaagtccctattccctcctacattggtcatgtgcatttggaccaaaaaccatcacttgccccagaaagaatctttggtagttagctggactaataagatccttccctgcttcagaaaataaaattgggacgtaagcatactgagtcttaagctgtggacattgagaatgtagtctgcaatggtctagtcatgtttgtaccgcatgcagtgagacagagaagagggcagagagagacctgtagagaattaaactcaaaagctgatgtgatggcaggaaggggtgatttcttcacttccattggcaatattccagtcttggctcccattcctcttatgcctggcttccacttcttcctcttggcttccataaaacccttctgtatctttctacttcaccctcctttccttttgtttaatgtgatctttcctactgaataccttaagacaaaaagataaaaggagatgtgtatctaacatgcctcctcgaatgactcagatttagccaatactttagtttctcttgccatgtgcaggctggcatgggatatgcatacagcagacagggtttgtattccgagaaatgctatagcaataaaaatttaaatggagtgatattatctataggtttccaggtagtcagtgtagtttagacatggagaaaaaagcctcctacaagaataacgtctgagtccaagcttgtatcattttaacttcaatgtgtgtgtgtttttgtgtgcttgggtgtacacattttttaaaaacattttcagattccttaaatctgtgttcatctgatcgttggttcaagccatcagacctgccctcttgcccacaattcacaaaaatgactctttgtttccaccttcttttccaccttctcctcatttctatggttttataagagcctgggggatgaaataattcattctgattccgctagaggcagacagtaaggaccattagtattggcttttccaggataactaggtgattacatggggcaaggaacaatgaagacattttgtaaaatgagtgctttatagacataattttatatattaaaagagcatagtagtttgaccctgggaagactgaggctagattgtgagaagctttgataattatgataaagaatatgggttttagctcaaaagcaaaaaggtccccattgaactgagagactccaaaaacagccctcagtaaacttcaccttcctagtattcgtgccctggtatggttgcctcccacatggcctctaggctgctcctatattcactttcactaatacaaaacagcggaaatgacttctggcagcgttcatttttgtacttttgaaagccataagtcaccttgtgagaagtttctctacattgatggagagaccacatggggaggctccttgctaaggtgctagacatgtaagtgaagccttcttggcaattctatcccaagcctccatctgattagtgctgcatgtaaggtcccaagtgagatcagcggaagagtcttccagctcagccctagtcaatccagaagactgtaaggcataatataacagttttgttttaaaccagtgagataacctaaatagctccctttgcttctccctctcttactttgtttttctgcataccttttctgtgttgtcttgttgtctatttcactcatacccgaataccttccacatgacattattgcatgca

SEQ ID NO: 50647 - DNA, 2534 bp, Homo sapiens
tcctctcctaactttactttttgaaattagatccacataataaatcccgactctatgattttatacaattagaatattgatttcacattgttttgttttgtttttgaatttgcctttttatttttcacaacatagacatttaagtttctcaatgaaggcttaaaagtcatttgatgctttgaggtgaactatgatgggctcttttatattttcctaaatgaagaaaatgttggaatccaccctatgacasattattgcttaagcttaagaatgactgttctggctcttgataattaaactctcctttgctagtaatttcaggtctattaatcacctgtttgaaaactgcttcttataaaatgtttctatagacttctatccttatgcatttcaggttatgaaacaccagaggttagcaatgccccctccaggagttttggggagtgtcttttttgatgttatatgctaggcattcaattgatctgtcaaccctaaagtcagtggggctgtggtttgtgtcataatgatagtttttctatgatgaaacaaaaattgtatttgggaataatcagaaaactgtgtgaaagtagtgctgaagtagatactgggttgtagcccactaagacagtcttcatgttcaatgcaaggtgtgtcagccagtttctacagacataaagtctctgcatttctattttctcatctatcaaaacataattgtaaagcttagtgtgcatttttggatctcttcccatccatcccacaaccttttatctgagaatgtctcccttataagatccatgaagggacctccaaaaccacatggtggcaagcaaagtccctattccctcctacattggtcatgtgcatttggaccaaaaaccatcacttgccccagaaagaatctttggtagttagctggactaataagatccttccctgcttcagaaaataaaattgggacgtaagcatactgagtcttaagctgtggacattgagaatgtagtctgcaatggtctagtcatgtttgtaccgcatgcagtgagacagagaagagggcagagagagacctgtagagaattaaactcaaaagctgatgtgatggcaggaaggggtgatttcttcacttccattggcaatattccagtcttggctcccattcctcttatgcctggcttccacttcttcctcttggcttccataaaacccttctgtatctttctacttcaccctcctttccttttgtttaatgtgatctttcctactgaataccttaagacaaaaagataaaaggagatgtgtatctaacatgcctcctcgaatgactcagatttagccaatactttagtttctcttgccatgtgcaggctggcatgggatatgcatacagcagacagggtttgtattccgagaaatgctatagcaataaaaatttaaatggagtgatattatctataggtttccaggtagtcagtgtagtttagacatggagaaaaaagcctcctacaagaataacgtctgagtccaagcttgtatcattttaacttcaatgtgtgtgtgtttttgtgtgcttgggtgtacacattttttaaaaacattttcagattccttaaatctgtgttcatctgatcgttggttcaagccatcagacctgccctcttgcccacaattcacaaaaatgactctttgtttccaccttcttttccaccttctcctcatttctatggttttataagagcctgggggatgaaataattcattctgattccgctagaggcagacagtaaggaccattagtattggcttttccaggataactaggtgattacatggggcaaggaacaatgaagacattttgtaaaatgagtgctttatagacataattttatatattaaaagagcatagtagtttgaccctgggaagactgaggctagattgtgagaagctttgataattatgataaagaatatgggttttagctcaaaagcaaaaaggtccccattgaactgagagactccaaaaacagccctcagtaaacttcaccttcctagtattcgtgccctggtatggttgcctcccacatggcctctaggctgctcctatattcactttcactaatacaaaacagcggaaatgacttctggcagcgttcatttttgtacttttgaaagccataagtcaccttgtgagaagtttctctacattgatggagagaccacatggggaggctccttgctaaggtgctagacatgtaagtgaagccttcttggcaattctatcccaagcctccatctgattagtgctgcatgtaaggtcccaagtgagatcagcggaagagtcttccagctcagccctagtcaatccagaagactgtaaggcataatataacagttttgttttaaaccagtgagataacctaaatagctccctttgcttctccctctcttactttgtttttctgcataccttttctgtgttgtcttgttgtctatttcactcatacccgaataccttccacatgacattattgcatgca

SEQ ID NO: 50648 - DNA, 2534 bp, Homo sapiens
tcctctcctaactttactttttgaaattagatccacataataaatcccgactctatgattttatacaattagaatattgatttcacattgttttgttttgtttttgaatttgcctttttatttttcacaacatagacatttaagtttctcaatgaaggcttaaaagtcatttgatgctttgaggtgaactatgatgggctcttttatattttcctaaatgaagaaaatgttggaatccaccctatgacagattattgcttaagcttaagaatgactgttctggctcttgataattaaactctcctttgctagtaatttcaggtctattaatcacctgtttgaaaactgcttcttataaaaygtttctatagacttctatccttatgcatttcaggttatgaaacaccagaggttagcaatgccccctccaggagttttggggagtgtcttttttgatgttatatgctaggcattcaattgatctgtcaaccctaaagtcagtggggctgtggtttgtgtcataatgatagtttttctatgatgaaacaaaaattgtatttgggaataatcagaaaactgtgtgaaagtagtgctgaagtagatactgggttgtagcccactaagacagtcttcatgttcaatgcaaggtgtgtcagccagtttctacagacataaagtctctgcatttctattttctcatctatcaaaacataattgtaaagcttagtgtgcatttttggatctcttcccatccatcccacaaccttttatctgagaatgtctcccttataagatccatgaagggacctccaaaaccacatggtggcaagcaaagtccctattccctcctacattggtcatgtgcatttggaccaaaaaccatcacttgccccagaaagaatctttggtagttagctggactaataagatccttccctgcttcagaaaataaaattgggacgtaagcatactgagtcttaagctgtggacattgagaatgtagtctgcaatggtctagtcatgtttgtaccgcatgcagtgagacagagaagagggcagagagagacctgtagagaattaaactcaaaagctgatgtgatggcaggaaggggtgatttcttcacttccattggcaatattccagtcttggctcccattcctcttatgcctggcttccacttcttcctcttggcttccataaaacccttctgtatctttctacttcaccctcctttccttttgtttaatgtgatctttcctactgaataccttaagacaaaaagataaaaggagatgtgtatctaacatgcctcctcgaatgactcagatttagccaatactttagtttctcttgccatgtgcaggctggcatgggatatgcatacagcagacagggtttgtattccgagaaatgctatagcaataaaaatttaaatggagtgatattatctataggtttccaggtagtcagtgtagtttagacatggagaaaaaagcctcctacaagaataacgtctgagtccaagcttgtatcattttaacttcaatgtgtgtgtgtttttgtgtgcttgggtgtacacattttttaaaaacattttcagattccttaaatctgtgttcatctgatcgttggttcaagccatcagacctgccctcttgcccacaattcacaaaaatgactctttgtttccaccttcttttccaccttctcctcatttctatggttttataagagcctgggggatgaaataattcattctgattccgctagaggcagacagtaaggaccattagtattggcttttccaggataactaggtgattacatggggcaaggaacaatgaagacattttgtaaaatgagtgctttatagacataattttatatattaaaagagcatagtagtttgaccctgggaagactgaggctagattgtgagaagctttgataattatgataaagaatatgggttttagctcaaaagcaaaaaggtccccattgaactgagagactccaaaaacagccctcagtaaacttcaccttcctagtattcgtgccctggtatggttgcctcccacatggcctctaggctgctcctatattcactttcactaatacaaaacagcggaaatgacttctggcagcgttcatttttgtacttttgaaagccataagtcaccttgtgagaagtttctctacattgatggagagaccacatggggaggctccttgctaaggtgctagacatgtaagtgaagccttcttggcaattctatcccaagcctccatctgattagtgctgcatgtaaggtcccaagtgagatcagcggaagagtcttccagctcagccctagtcaatccagaagactgtaaggcataatataacagttttgttttaaaccagtgagataacctaaatagctccctttgcttctccctctcttactttgtttttctgcataccttttctgtgttgtcttgttgtctatttcactcatacccgaataccttccacatgacattattgcatgca

SEQ ID NO: 50649 - DNA, 2534 bp, Homo sapiens
tcctctcctaactttactttttgaaattagatccacataataaatcccgactctatgattttatacaattagaatattgatttcacattgttttgttttgtttttgaatttgcctttttatttttcacaacatagacatttaagtttctcaatgaaggcttaaaagtcatttgatgctttgaggtgaactatgatgggctcttttatattttcctaaatgaagaaaatgttggaatccaccctatgacagattattgcttaagcttaagaatgactgttctggctcttgataattaaactctcctttgctagtaatttcaggtctattaatcacctgtttgaaaactgcttcttataaaatgtttctatagacttctatccttatgcatttcaggttatgaaacaccagaggttagcaatgccccctccaggagttttggggagtgtcttttttgatgttatatgctaggcattcaattgatctgtcaaccctaaagtcagtggggctgtggtttgtgtcataatgatagtttttctatgatgaaacaaaaattgtatttgggaataatcagaaaactgtgtgaaagtagtgctgaagtagatactgggttgtagcccactaagacagtcttcatgttcaatgcaaggtgtgtcagccagtttctacagacataaagtctctgcatttctattttctcatctatcaaaacataattgtaaagcttagtgtgcatttttggatctcttcccatccatcccacaaccttttatctgagaatgtctcccttataagatccatgaagggacctccaaaaccacatggtggcaagcaaagtccctattccctcctacattggtcatgtgcatttggaccaaaaaccatcacttgccccagaaagaatctttggtagttagctggactaataagatccttccctgcttcagaaaataaaattgggacgtaagcatactgagtcttaagctgtggacattgagaatgtagtctgcaatggtctagtcatgtttgtaccgcatgcagtgagacagagaagagggcagagagagacctgtagagaattaaactcaaaagctgatgtgatggcaggaaggggtgatttcttcacttccattggcaatattccagtcttggctcccattcctcttatgcctggcttccacttcttcctcttggcttccataaaacccttctgtatctttctacttcaccctcctttccttttgtttaatgtgatctttcctactgaataccttaagacaaaaagataaaaggagatgtgtatctaacatgcctcctcgaatgactcagatttagccaatactttagtttctcttgccatgtgcaggctggcatgggatatgcatacagcagacagggtttgtattccgagaaatgctatagcaataaaaatttaaatggagtgatattatctataggtttccaggtagtcagtgtagtttagacatggagaaaaaagcctcctacaagaataacgtctgagtccaagcttgtatcattttaacttcaatgtgtgtgtgtttttgtgtgcttgggtgtacacattttttaaaaacattttcagattccttaaatctgtgttcatctgatcgttggttcaagccatcagacctgccctcttgcccacaattcacaaaaatgactctttgtttccaccttcttttccaccttctcctcatttctatggttttataagagcctgggggatgaaataattcattctgattccgctagaggcagacagtaaggaccattagtattggcttttccaggataactaggtgattacatggggcaaggaacaatgaagacattttgtaaaatgagtgctttatagacataattttatatattaaaagagcatagtagtttgaccctgggaagactgaggctagattgtgagaagctttgataattatgataaagaatatgggttttagctcaaaagcaaaaaggtccccattgaactgagagactccaaaaacagccctcagtaaacttcaccttcctagtattcgtgccctggtatggttgcctcccacatggcctctaggctgctcctatattcactttcactaatacaaaacagcggaaatgacttctggcagygttcatttttgtacttttgaaagccataagtcaccttgtgagaagtttctctacattgatggagagaccacatggggaggctccttgctaaggtgctagacatgtaagtgaagccttcttggcaattctatcccaagcctccatctgattagtgctgcatgtaaggtcccaagtgagatcagcggaagagtcttccagctcagccctagtcaatccagaagactgtaaggcataatataacagttttgttttaaaccagtgagataacctaaatagctccctttgcttctccctctcttactttgtttttctgcataccttttctgtgttgtcttgttgtctatttcactcatacccgaataccttccacatgacattattgcatgca

SEQ ID NO: 50650 - DNA, 788 bp, Homo sapiens
tgccctctttggggaggcgcatcagaaactcagaagaacgcagccatttgtctcttatccacctatgacccaaaagcctcctccccacttgggagtcctcccacctttgcttctagttgtcctgcccttccagaccaaaccagtgctcatcttatrcatgttaactgatgtctcagatctccctaaaatgtataaacaaaatgtgctctgaccccctcgggcctttctctctgttaatgggcttgtcctgaacattggcaaaataaactttctaaattcactgagacctgcctcagatattcaggattcacacaccttaatctcatagacagtaattaatgaataaaatgatctttgtcaaacacaaaaaaatgtatgttctcattttcttaccagaagttttagatttttactttgagggtaattttaaaacaccaggtcatgtgattcatggtctaacctcccatgccagtttggtagtctatgacacaatttcactcaactacttttcactccttgagtgttacacgtgttctccccgtcccctctctgtcttgtcttggatcagtttccaaacctctgcacctaagggctcatatctttatgtaatttgttcctcaaaaaaatattacatgttaattcttctaggaaatcttccttgaatacccatcaaaatgagtcaagggtccttacagtgagctcacctaccaatctatataattggtaatcacagaactcatactaccaaaattattgatatgtttgtttaaatcctttctggagtatgt

SEQ ID NO: 50651 - DNA, 788 bp, Homo sapiens
tgccctctttggggaggcgcatcagaaactcagaagaacgcagccatttgtctcttatccacctatgacccaaaagcctcctccccacttgggagtcctcccacctttgcttctagttgtcctgcccttccagaccaaaccagtgctcatcttatgcatgttaactgatgtctcagatctccctaaaatgtataaacaaaatgtgctctgaccccctcgggcctttctctctgttaatgggcttgtcctgaacattggcaaaataaactttctaaattcactgagacctgcctcagatattcaggattcacacaccttaatytcatagacagtaattaatgaataaaatgatctttgtcaaacacaaaaaaatgtatgttctcattttcttaccagaagttttagatttttactttgagggtaattttaaaacaccaggtcatgtgattcatggtctaacctcccatgccagtttggtagtctatgacacaatttcactcaactacttttcactccttgagtgttacacgtgttctccccgtcccctctctgtcttgtcttggatcagtttccaaacctctgcacctaagggctcatatctttatgtaatttgttcctcaaaaaaatattacatgttaattcttctaggaaatcttccttgaatacccatcaaaatgagtcaagggtccttacagtgagctcacctaccaatctatataattggtaatcacagaactcatactaccaaaattattgatatgtttgtttaaatcctttctggagtatgt

SEQ ID NO: 50652 - DNA, 561 bp, Homo sapiens
tgtttcaacctctggttttattttatttttaaagggtgtaaatatgcatccctgagagcaggatttaacagggcttcacaaactactccttcttttataattttttctttttttttttttaagatggagtctcgctctgtcaccaggctgcagtacagtggcgcaatctctgctcagtgcaacctccgcctcccaggtctaagtgattctcttgcctcagcctcctgagtagctgggactacaagtgctcaccatcacgcccagctaatttttgcacttttagtagagacgggggtttcaccatgttggccaggatggtcttgrtctgctgaccttgtgatccacccacctcggcctcccaaagtgctgggattacaggcgtgagccaccgtgcctggcccagaaactcctttttaaacgatctgtctagcatctttcattcttctttaaacccattttacgcaatgctcctgcaagactattctttgtaaatcatggcctgattgtataacctctctttgggaaaccaaacacaacagagaaaaaagaagaagaaaaaaa

SEQ ID NO: 50653 - DNA, 561 bp, Homo sapiens
tgtttcaacctctggttttattttatttttaaagggtgtaaatatgcatccctgagagcaggatttaacagggcttcacaaactactccttcttttataattttttctttttttttttttaagatggagtctcgctctgtcaccaggctgcagtacagtggcgcaatctctgctcagtgcaacctccgcctcccaggtctaagtgattctcttgcctcagcctcctgagtagctgggactacaagtgctcaccatcacgcccagctaatttttgcacttttagtagagacgggggtttcaccatgttggccaggatggtcttgatctgctgaccttgtgatccrcccacctcggcctcccaaagtgctgggattacaggcgtgagccaccgtgcctggcccagaaactcctttttaaacgatctgtctagcatctttcattcttctttaaacccattttacgcaatgctcctgcaagactattctttgtaaatcatggcctgattgtataacctctctttgggaaaccaaacacaacagagaaaaaagaagaagaaaaaaa

SEQ ID NO: 50654 - DNA, 561 bp, Homo sapiens
tgtttcaacctctggttttattttatttttaaagggtgtaaatatgcatccctgagagcaggatttaacagggcttcacaaactactccttcttttataattttttctttttttttttttaagatggagtctcgctctgtcaccaggctgcagtacagtggcgcaatctctgctcagtgcaacctccgcctcccaggtctaagtgattctcttgcctcagcctcctgagtagctgggactacaagtgctcaccatcacgcccagctaatttttgcacttttagtagagacgggggtttcaccatgttggccaggatggtcttgatctgctgaccttgtgatccacccacctcggcctcccaaagtgctgggattacaggcgtgagccaccgtgcctggcccagaaactcctttttaaacgatctgtctagcatctttcattcttctttaaacccattttacgcaatgctcctgcaagactattctttgtaaatcatggcctgattgtataacctctctttgggaaaccaaacacaacagagaaaaaagaagaagaaraaaa

SEQ ID NO: 50655 - DNA, 632 bp, Homo sapiens
tactttacaagctggkgtccaagcattccacactcaacaaactgtggcaggagaacagggagttagagtaaacgggggttcagcatatgcagccagttcacataagcaaaagaacagcaggtgccgccagtttgtataaataggagagcagtaggggctgcatagaggccacgtcctcccgcccatggtaacaagccactctggcctctgatggactgcaagctgggtctccactgcagcctctgatggactgcaagctgggtctccactccagcctctgatggactgcaagctgggtctccactgcagcctctgatggcctgcaagctgggtctccactgcagcctctgatggactgcaagctgggtctccactccagcctctgatggactgcaagctgggtctccactgcagcctctgatggactgcaagctgggtctccactgcagcctctgatggactgcaagctgggtctccactccagcctctgatggactgcaagctgggtctccactgcagcctctgatggcctgcaagctgggtctccactgcagcctctgatggactgcaagctgggtctccactccagcctctgatggactgcaagctgggtctccactgcagcctctgat

SEQ ID NO: 50656 - DNA, 645 bp, Homo sapiens
tgtgtaaataaaaatgatcaatgaaaaaaaaaatactttttacagtgtagaccaggatgtgtattcaatataattacctaaatataaacaacagaatggaascaatttccaaaacttagtctgtaatttagtcagcatttatccactttcctaagaatcattataatagccctactttcattttataatatttgcaaagggatgtcttttatgcagaacatgattgagctatttagattaaaactataattacaaattgctttatcaaatttataatcctctgatgagaaaaatgagttatttactaaccattctaatgacctcactgctcacatagacatttttggcaaaccttcaaggtaagtttcaccaaaattcagaaacacataatattgtagttaataagcaaactaagcctggaatataaatatatctatccaaatagcagaattttacagagattatggatgtctctggttttatgagtagattcttttattaaaatatttgtttttacattgaattatattaatatttgaaccatactttaaaaatcaaaagatgatttagccatgtaataatcaagtgcagtgttttattatttcacctgctagtttttcttcctcatgtcaaattctaattatg

SEQ ID NO: 50657 - DNA, 549 bp, Homo sapiens
taaaaagctaaagatatactgtacatactcttgtactcaaaaattcgtccccttggtatatttccctcttccttccatggaaactcccaaggaagcttcctttctttgttccgtgaaagggccatatgtgcaaagtggcccccaaatgctgaaggagctgagaaggcaaagaaggaggcagacaaatccagtttgtcagttttgagtgatttattaggggaatgtacagacagaaatatggttctgggcagctgcatgacaggtagatctctgcatcgaaaccttccagacccagggcttatatcttagggaaagtatatgtgatctggaaggagtatgtaggtggctgtggrcatcacagcctatgatttctgcaattgcatcaagtgtggtttaggaggaaacttacagtgaatagaagttcttacataaagactaatacatcatttagacattctggaggcattcccagactcggggttagtcagaagttacgtggcagattagcatttaaaataaagtcactcttgtccccacacttgttattag

SEQ ID NO: 50658 - DNA, 613 bp, Homo sapiens
ggagctaagaaggatactgaatattagtatggtattagagataattagaggaagtctgatgaaggataggtattaaaatacaaatctttcaatgtttgaagaaatagaatgtgacaggaataacttccctgggttccctcagacaagatgaattagattcagaacttcaaccacctatcagggtacaaggacagggattttcttctaagggatgtaaatatgcacatgtgtggatgtgtgtgtataagacagagaaaaataaagagatatatagagagatgatctttgtggctgaacaggttaaagggtggcctgcctggaaagaaggaaatggctacaatattctcaggtgaaatgataaaagccagcaggagagcaattcagggaatctgaaccaagattgctgagagagaaactgaggggaaggagttctcccctgccccctccaaccctgtccatgttccagcrgccaaggtggcaggagaaacataccgtgttaccgggctgtttggagtgggcaagagtaaacttgctatgatttttcttgctcctgctcttggacttccggagctcttcacacttctcatagtcactcaggtcaaatacctcttga

SEQ ID NO: 50659 - DNA, 1034 bp, Homo sapiens
aacagaaggttgagaaggaaggattttagaagattttaattcaaatttatcgcaaatttttaaaagtttttttggattaaaaaagtaaatttttaaaaatccactaaacttgagtatctaagaaacctcattcatgaataccaaatgggtaagatcttttggcatcaattaaggtgatgatcagattacttcaataaagttgaaaatcttctacatagggctatgaatggtctgattatttatttatgattgctactaaaattgctcatcatcatactattttattatatttgagtgtgtttttttgttatgagaaagcaagatgtgtgaaaatctgaaatcagatacattagactataaattaatttacataaagattataaaattctatttttagattacaaaaagattttaattaaaaaaagcatttgttagttttacaaaaagcgttaccacaagtacatttctccttccctgtgttgattatttaatttagaaaattttgatctacccacaattttccaagcaaaaacctattacataaaggaaattgcaccaacattatatgttaccatgacaacaccagcgattactcaatgcatgaaatgagcctccaattccagaagatgccctgagtttaataattagagtttaaaaattcactttaggcacattaagatatgcgtgtaggagaagggttacrttttaactacacgaaattagtatttgcaacacttatgtgcatttttaaaaattaggatagcaatgatcagatattcaaacatctatcaaatgcacctggaggaagttaactctgggcttttgtctcctatgctacttatgtatgacagaaaaataattagaaaaccttgattccaaccaccccagcagcaaagccacgatgcttcctggggaaatgattgaatggaccgctactaaaagtgatgccagaaatactcaccaatgctgagtttaagctaacaatttttaaaagacgatctgagtagaaaattatgttattaacaataaccaat

SEQ ID NO: 50660 - DNA, 629 bp, Homo sapiens
caaaagtactaccaccctacttctctgtccttttacttgcttttctttttgttttttattactgtccaatatgtatttgttgattatttgttaatctcttactggcacaaatagaatacaatgacttctcacagattctgtctaaatgttccaccctaccttccctgaggagtgtcttagttttaagcttcttctcacataaacaaaagtaagttcttttatttaagaacttactttgtagttttcttcatacgttgaacttctctgatagttgctatatgagataggatctaataaacaaattttaatataaacaagattagtaattttgtacctacaatatattcacatgttttaagcttaatgacttaaaataaggatggataaagtttcagacatcagaaacaagatagtttgtcagatgctgggttctcttcctccaagrccagttgagagaagcctaagagtctcaaccacaagccccactactcaatcgaataagcatcagcctcacttcttgtgttttgattactagtgattcagatctgccttatttttcctaaagaaacattttcttcactgttagcttatatactgatctttctgtctaactagaaattgcatctacc

SEQ ID NO: 50661 - DNA, 1617 bp, Homo sapiens
acaagatatctgattcctagttcttattattctcttgccttttcctctcctcatggcactgtggctgcttctgtcctgactgccatttgtttctctctgacacttgtcccgactgccgttcattttgttagactcctatcaagcagtggccctgagagtcaaggccataactttttatatacatatgtttactacgtgtaatcttctaacttagttcatactattacactttattatactcaaggaagcagttatttgtcacgtgattattttggttagtgctaattgcaaatatggctctagagtcatggactgaagtagagtgtcctgtcttcaaggatattttgagtttctttatctcctcttatatcctgaaatttatgagttattccattctcctttattgatttccaatagctctacctcttaagtttgattagcttatcatcaacaacgttataaatagagactattcctttttcctctcacgacctagtgtcttctagcaattcgtctttactttccctaccccctgttccataacctaattgatttcttcatcagagaataatagcaggttctattttattttttaatgtcttagtttttcaactcatacgcattctaatttcatgccatcttcttagtttaatgccatgtttaggttgattcagtcctaccatacgatatgttagcataaaaacaatttttcctgaaattatactgtgaggtacggaaaacttccatgtcagtgattcaataattgttcacgtatttctcttcagcaatgtcttttttcgcaaacagaaatgtctgtgttgcttacaatttaaaaattaggggcaggttgtcaaaggaagcttgataataaaaatatagtaaagaagtcaccaaaatagatgacaaaatgtgtttggccacatctttattgtcctttaattgtgactctgggatctgaattgatatgacatagccatgtggtactcacatgttctttggttcaaacttgtggccttaaaagcttcaaagttgctgtgatcatttatctgggctgatttggaagacccacatcccggcagtagtatggatttttcttctgggcaatatattgtggcaatataatagggtgcacatgacaacttatcaccaggatagtatatggagtaatggatcatagttgctgtcttggaatacaggcagaaacttcattagagtctggatttaggataaccaatggcattgtattcttccatactgttcaactgcttrgagttagaaacaggtttacattcattcagtcactcaacagatattcactgagtgcctctgccctgcattggtatgaagcactgtacatacaggggtgagtcaaagtctttgctgtcaggtaaattaaattcttgtaaggagacgcaaatgaatatctatagtatgttcagtagggtagctgctctgctgatgaataaaataggataaggtaaaaaagagccaaaagagaatggccagggaaggcattctgtgataggtgactttagagctaaaatctgactgcagtgaggactggcccatgtggatatttgcggaaggagtattataggtaggagaacattcagggta

SEQ ID NO: 50662 - DNA, 596 bp, Homo sapiens
tgattatcaggctgttgatcttgatgagctgcaggatcagccrcctgctgagcaggatgaatgggctgtgggtgattttgtgaccctggggtggcaggtactggagggtgtaaaattacaagaaattaccaggcaccaggatccccatattcccttgcctgaactatagccctcataagcggagtgtcatttccagggatgtatgtaacttgttgcttatgagtggcaatggtagtattggcaacagcagtagcgaccagacgaggagcagaaaaacggttggaattttgaaagaaggaagagttgagaacccgaaggccaggatgagaccagattacctgctgagcaggtctttcatgggcctgaaatccaggctgccacggcaactgtggaccacgcttcaagagagcctgaggcttcaagggagcctgatttgtagaaaaggaaccaggcttcaagggagcctgtgactccaagggagtccgattagcagaaaaagaaccaggcttcaagggagcctgtgactccaagggaatccgattagcagaaaaggaaccaggcataagaaaactaggctgtggagggatagggctgag

SEQ ID NO: 50663 - DNA, 598 bp, Homo sapiens
attggaatatgttttataatttttgtaaaaaagaaaaatgcagccattaagcagaagaatgtgtggcaacataacttctctttgcctgtggacatacatgtgctcatatctgtgttcatacctatgttcatactactgttacctgatttggattactttgttaacgtgatataaaattaaagtttgacttaaattttgatccccaattgtcatttaaaatgtcttcagaaagattatacagtgctaaaaagtccaytgaaatgaacagttattgtgtatgccaaagattgtctgtcatgcagcaggcattgcaattacagtcagtagaaactgtcacatttctgggaatagataatggtattttcagccctagaagaggttagtatgaccaatttattcatcatgaaggactaccactcaggaacataacatctatctgtcaaaagcctttggctaacttgcaaacagagctacttcacttaccgtaatatgtaatacagttacagaaaatttcaaaatgctaagttcatccaaatgtgaaaaaatccaggttttctttatttgtctcaaaattattatatcagcctaaaatttgaca

SEQ ID NO: 50664 - DNA, 651 bp, Homo sapiens
aaatactttttctagcattcctggttatgtcagaaatagagggtagagacctttaccttagatattgctgtaagaaggagacaggggaggaggaatagagagaggaagaggatggaaggacatggggccaaaaggaaggatgaagagaattacgtttgaaatcgtaactgacagaaaatgctatataatgcgtacagcaattaataagcatatagttgcccaagtccacacaaaaagtcttggaccaccacagctgtgtatgtcccttcaagcacatcaacactctgctcgtctctcaaattagaatgtgagacagaattgtgttttcttctctgttcaggacacattgtttaacagtctcactctaaggactgcaaatgctaattttagtcwccttcaagacccatatgggatatacctttctagtctgtagtcccagctacttgggagactgaagcaggaggatcacttgggcccaggagttgtaggctgcagtgaaccatgatcatggctgtgaatagccactgcactccaaccttggcaacactagccctgtttagtggcatatgtatgatatgtttttttctttcttccttaccacacattttcacaagctttaaatagcaaatcttagaagaagaaaaacaatgg

SEQ ID NO: 50665 - DNA, 651 bp, Homo sapiens
aaatactttttctagcattcctggttatgtcagaaatagagggtagagacctttaccttagatattgctgtaagaaggagacaggggaggaggaatagagagaggaagaggatggaaggacatggggccaaaaggaaggatgaagagaattacgtttgaaatcgtaactgacagaaaatgctatataatgcgtacagcaattaataagcatatagttgcccaagtccacacaaaaagtcttggaccaccacagctgtgtatgtcccttcaagcacatcaacactctgctcgtctctcaaattagaatgtgagacagaattgtgttttcttctctgttcaggacacattgtttaacagtctcactctaaggactgcaaatgctaattttagtctccttsaagacccatatgggatatacctttctagtctgtagtcccagctacttgggagactgaagcaggaggatcacttgggcccaggagttgtaggctgcagtgaaccatgatcatggctgtgaatagccactgcactccaaccttggcaacactagccctgtttagtggcatatgtatgatatgtttttttctttcttccttaccacacattttcacaagctttaaatagcaaatcttagaagaagaaaaacaatgg

SEQ ID NO: 50666 - DNA, 624 bp, Homo sapiens
taattagaaaagatagaaatgcagtaaatacagaccaagttttgttttgtctcacagagcagctagcagaattctgttcatgataaatgttatagtgcttatgaattggttaatttacaatagggaaaataaataataaaaaatgaattttcactgtgaagagtaccacagcctctacaattttgcttttgttaattttaagrttatgtatcctaagttaagaatacaaatgaattaagtagttttaagcatttaaattgtcaattctaatagtcatactataatagtatttacaattttaactagtttgcatgaatttagcttttaaatatctaaatgtcctattataaaattggatagtgtttggaagattaaatactaaaaatatgaaatgataaagcaccattatgtaatattggttgtcccttctctctcctgtatcataggtttttgctctatttactgaatctttctcattagcatacgagcatggtataatttttctacatatgtaccttcttataaagtttgcttgatcacacaactttcactagctactgtaaaacacctcagtgtagttgtctgttctagcacttctcaaactctaatacacatacaaataat

SEQ ID NO: 50667 - DNA, 603 bp, Homo sapiens
atatatatacacacacacatatacatatatatatakagagagagagagagaaaggatttgattcaagaacacacatcattttcacctcctcagaagtgaaatcctcaagtatttttaggattttaataagtaaggaaagcaataactagatatggatccatgcagtggtttcatgtgtaattccattcataccgaatgccaaacagaatctgggaggctgctgatactacatcaacatctgtgaactgatccacatactcatggaaaagaatggacagcaatattcttcagattatcttttctatctgtctagtcaattttctctgctgtgtctggctgtgctgctactaatttactcttatattgtttaaatgatatacattctagtactcaagagaggctcagcaaccacattttgtgggtttccattccacaccatatttcagctgttatatatttcttaaagaaaaaacgatctttatgtccaactaaaagcttctctttcagaaacaggagatgttaactcaatttacaatgattaggtcccttaaactgtgtttctattttttttcctgttgagtacatttaaagtctctagtttag

SEQ ID NO: 50668 - DNA, 603 bp, Homo sapiens
atatatatacacacacacatatacatatatatatatagagagagagagagaaaggatttgattcaagaacacacatcattttcacctcctcagaagtgaaatcctcaagtatttttaggattttaataagtaaggaaagcaataactagatatggatccatgcagtggtttcatgtgtaattccattcataccgaatgccaaacagaatctgggaggctgctgatactacatcaacatctgtgaactgatccacatactcatggaaaagaatggacagcaatattcttcagattatcttttctatctgtctagtcaattttctctgctgtgtctggctgtgctgctactaatttactcttatattgtttaaatgatatacattctagtactcaagagaggctcagcaaccacattttgtgggtttccattccacaccatatttcagctgttatatatttcttaaagaaaaaacgatctttatgtccaactaaaagcttctstttcagaaacaggagatgttaactcaatttacaatgattaggtcccttaaactgtgtttctattttttttcctgttgagtacatttaaagtctctagtttag

SEQ ID NO: 50669 - DNA, 575 bp, Homo sapiens
tgagaaattatactggcacgatgctcaattcataattctttttttgtgcttaatagaaatgtgaagatatttggggcccttggagctcaaaacattttaaaaatctatcctttactttggtgcctagaatgagatgttttttcccatctgtgccagtactctgaattccttgatttcctgtgacatctttaatttctacttgcaacagcaaattctttctgagcttttcttytttttttcctttctttttatcatgaaatgccttgacaacagatactaaagctctgacctttgctgaaatctcaactagagctaaaagtttagaagaccaataatccactttccaagttactaaatattaccaatttgccaccacatgtaacaaatcattatgatttaagactctaaattttattttctctttttgtcatatgtatataactatcaaaacaactatcatgtatttacttatttattattattattgttcgatttcaaaagaacttcagcagtgcccaatttctattgcaagttctatattagcctagaggaaaaaaattgctttatgaataaaa

SEQ ID NO: 50670 - DNA, 2428 bp, Homo sapiens
attctgcagtgaagagaggccactcattacctttaccaaaagctacaaagtgagtaactgagtgaagctgtgggcagacactgttattctgaggaatggaggcatgtccttgcttaagggaacaggtgcccctcagctcaagcagatgggtaatgtggaacacagatccagggttgcaggggcatctacgacttttcaaagaaaagttgaaaatataactgtattttgaaaatctcctaagttttaagtattgaaaattagttcaaaatactttttaaggccaggtgcagtagttcacacctgtaatcccagaactttggaaggccaagatgggaggatctcttgaggccaggagttcaagaccagcctgggcaacatagcgagacccccacctttacggaaaatttttaaaaatcagcctggcatggtggtgcacgcctatagtccctgctactcaggaggctaagacaggaggattgcttcaacccaggagttcgaggctgcagtgagccataatcactccactgcattccagcctgggcaacagagggagaccctgtctcagagaaaaaaaaaaattaaacactgtatgactcaagtaaagccaaatttccctctggtgctgaaggattgcaacatgaagttagtaaaacagaactctcaactgtggttcctctcatccactcatcccttctcccacccatcctgccagcccgccatgtgtgaatgtatatgtgaagcatcttctgcttgccagacacaaggtgaagcactgggcccatcaagaggaacaaggcacagtctctatcctctagagtctctttatccagtaggggctgttactgagaatttcatataattgcaatatgatatcccgttatcaaggaaggaggaaactttttgtttggcaatcttcacaaaggaggtgagcttcccttggggtctgaaagatgagcagagtgctacctattcatcagtcaatcaaataaaccagaaatttatggaaccgggagatctcattctatttacaactctggcaggaacttgttatgtggtcctaggtagaccactccacctagcctctctttgaatcttgtttcaagggaaaactcctggttaagtaaatgaaacttctttgaaaactctgcagcaccctacattgccagatgttactgtggtctcaacttgttattttagctttcatgtaaaaaaatatattacatttatattatttttaaattgacaaataataattgtatatatttatggtatacaatgtgatattttgatatatgtacacactgtgggagccccaatatttttaagctgaaaataacctgaagtttctcatcttactcccacttataagaaaaacactgtgagcaaacacaggcttacatgaaaacatgggccaacacaagctacttaataatgggctcttagcgttaatttacaccatgtgatcactgcaaagcctgtatgtttaccagggagctaacagaaaatgaacaagcatcattagagaactcgcctttcttttgtgcccttaaatagcttagtttctgatagagctggacttaatatattgtgaagacaaaagggactcttaacttcggatctgctgatgtggcagaaagctggccgtatctctaattggatatgttcagatactcttctgacatgcatggtgattaggccattttagatcaacaggacgtgctgatcaatgaaaactattaatgtcttaagcaaatgatcagggtattaataattaattttgtgagagaaatgtcatctcggacctcgggattgatctacaatgttaagcagtttctggaagcaattaaaattagcttaggaaatgtatccaattacctgataaagatttagttcatgatatgatagtatttacagtgcatgttctattaagggctgtagatttttaaggatgaagaatttcacgaatcctattggcatttatttacattcaggtaggtaaggttcacctttgctaatcagaaataatggggtcgtggacagtaatttgtcagtgggcagtggtaaccaaagcatccggttttctgaagggagctgaagattcatgaatctcaygtgggactctggtgcaggatacgaagtttcataatttcaatttttctgtcagagtcagaaagaaagctgcaggatgagccaagagttatggtggcaatagatctcccctgcagctgtgagctctctctggcttatccaacagtggctgtagcaaaggtagtgtactcagcactcattttgagatcctgcccaagaatgagactcgtaaatcctaagaaggaagctacacaataaaacaggcctcgattgctttctctcattgagccaggaggagatgaataactgagaattgtacagggtggtttttttttttttt

SEQ ID NO: 50671 - DNA, 2428 bp, Homo sapiens
attctgcagtgaagagaggccactcattacctttaccaaaagctacaaagtgagtaactgagtgaagctgtgggcagacactgttattctgaggaatggaggcatgtccttgcttaagggaacaggtgcccctcagctcaagcagatgggtaatgtggaacacagatccagggttgcaggggcatctacgacttttcaaagaaaagttgaaaatataactgtattttgaaaatctcctaagttttaagtattgaaaattagttcaaaatactttttaaggccaggtgcagtagttcacacctgtaatcccagaactttggaaggccaagatgggaggatctcttgaggccaggagttcaagaccagcctgggcaacatagcgagacccccacctttacggaaaatttttaaaaatcagcctggcatggtggtgcacgcctatagtccctgctactcaggaggctaagacaggaggattgcttcaacccaggagttcgaggctgcagtgagccataatcactccactgcattccagcctgggcaacagagggagaccctgtctcagagaaaaaaaaaaattaaacactgtatgactcaagtaaagccaaatttccctctggtgctgaaggattgcaacatgaagttagtaaaacagaactctcaactgtggttcctctcatccactcatcccttctcccacccatcctgccagcccgccatgtgtgaatgtatatgtgaagcatcttctgcttgccagacacaaggtgaagcactgggcccatcaagaggaacaaggcacagtctctatcctctagagtctctttatccagtaggggctgttactgagaatttcatataattgcaatatgatatcccgttatcaaggaaggaggaaactttttgtttggcaatcttcacaaaggaggtgagcttcccttggggtctgaaagatgagcagagtgctacctattcatcagtcaatcaaataaaccagaaatttatggaaccgggagatctcattctatttacaactctggcaggaacttgttatgtggtcctaggtagaccactccacctagcctctctttgaatcttgtttcaagggaaaactcctggttaagtaaatgaaacttctttgaaaactctgcagcaccctacattgccagatgttactgtggtctcaacttgttattttagctttcatgtaaaaaaatatattacatttatattatttttaaattgacaaataataattgtatatatttatggtatacaatgtgatattttgatatatgtacacactgtgggagccccaatatttttaagctgaaaataacctgaagtttctcatcttactcccacttataagaaaaacactgtgagcaaacacaggcttacatgaaaacatgggccaacacaagctacttaataatgggctcttagcgttaatttacaccatgtgatcactgcaaagcctgtatgtttaccagggagctaacagaaaatgaacaagcatcattagagaactcgcctttcttttgtgcccttaaatagcttagtttctgatagagctggacttaatatattgtgaagacaaaagggactcttaacttcggatctgctgatgtggcagaaagctggccgtatctctaattggatatgttcagatactcttctgacatgcatggtgattaggccattttagatcaacaggacgtgctgatcaatgaaaactattaatgtcttaagcaaatgatcagggtattaataattaattttgtgagagaaatgtcatctcggacctcgggattgatctacaatgttaagcagtttctggaagcaattaaaattagcttaggaaatgtatccaattacctgataaagatttagttcatgatatgatagtatttacagtgcatgttctattaagggctgtagatttttaaggatgaagaatttcacgaatcctattggcatttatttacattcaggtaggtaaggttcacctttgctaatcagaaataatggggtcgtggacagtaatttgtcagtgggcagtggtaaccaaagcatccggttttctgaagggagctgaagattcatgaatctcacgtgggactctggtgcaggatacgaagtttcataatttcaatttttctgtcagagtcagaaagaaagctgcaggatgagccaagagttatggtggcaatagatctcccctgcagctgtgagctctctctggcttatccaacagtggctgtagcaaaggtagtgtactcagcactcattttgagatcctgcccaagaatgagactcgtaaatcctaagaaggaagctacacaataaaacaggcctcgrttgctttctctcattgagccaggaggagatgaataactgagaattgtacagggtggtttttttttttttt

SEQ ID NO: 50672 - DNA, 587 bp, Homo sapiens
tgcttactagatgcaatgacaaagaaaactagcttcttgtattcctttttccttcctttcttccttttcttaaaaaaatcctatcatcagataattagctctacaactaaaaataagacgcccaaagacacagaaaatatgcaagtctaaaacaaacattccaggtgtctcatttaaagcatcactttcctctgcacaaaacacaactgcagtgatgcctgatttgttccctgaatggttycccaactagaactatggtaatgatacttcatggggaaggttacttaactttatctagttgaggaccttctgggagaaccagttgaaaaagtagatttttgtgaatacccccaaataatgagtgtaaacaggctgttggggcctggaaatctgcattggcgattggactcatacattggttcttattcaaatgtcccatcgaagatactttgagaaacactgatttccagtgttgaggtgaacttgcaatatttcaaatagcctgttcttctgattaattatgtttccctattgacatgctgaaggcagaattcagctgcttacctatttttggtgaccaaaatttt

SEQ ID NO: 50673 - DNA, 602 bp, Homo sapiens
ttttaatacgattaatgtggaataataccaggggctcaaaatactaccaggggcgcaaagataatatttgatgtctttttaaaatggctacacgtttattattcaatttgatttttagtcactcatttaatgcatgaggaatccaagataaaggttaaactacttcctaaagaccacctggctagcaacaggcagagccaaaatcagaacttgggtttctagactaagtgcattatactcttctgtcttaccctaaatatgtaataatttaaataaattacatttatttgaaataagactagcagttgtacattttctattaaatatatagtgtgtaaaataaaataaataatatgtaaaatggaaaaaaatcctttttttttttttttttttttttttttttttttggggagacagagtcttgctctgtcgcccaggctggagggcagtggcgcgatctcggcttactgcaagctccgcctcccgggttcacgtcattctcctgcctcagcctcccgagtagctgggactacaggcgcccaccaccacgcccacctaattttttgtatttttagtggagasggggtttcaccgttttagcc

SEQ ID NO: 50674 - DNA, 602 bp, Homo sapiens
ttttaatacgattaatgtggaataataccaggggctcaaaatactaccaggggcgcaaagataatatttgatgtctttttaaaatggctacacgtttattattcaatttgatttttagtcactcatttaatgcatgaggaatccaagataaaggttaaactacttcctaaagaccacctggctagcaacaggcagagccaaaatcagaacttgggtttctagactaagtgcattatactcttctgtcttaccctaaatatgtaataatttaaataaattacatttatttgaaataagactagcagttgtacattttctattaaatatatagtgtgtaaaataaaataaataatatgtaaaatggaaaaaaatcctttttttttttttttttttttttttttttttttggggagacagagtcttgctctgtcgcccaggctggagggcagtggcgcgatctcggcttactgcaagctccgcctcccgggttcacgtcattctcctgcctcagcctcccgagtagctgggactacaggcgcccaccaccacgcccacctaattttttgtatttttagtggagagrgggtttcaccgttttagcc

SEQ ID NO: 50675 - DNA, 648 bp, Homo sapiens
tactggcctcatgctcctgcttcttcctgttcatcgcaaaggctgggagatgattaatatcataatgtgacaccatcacaatattacctctcccaaggatacaggttttctaaccaccaattgataactggagaatgaaagactctgttccctattctagaagtygtttgttagattacaggtggaggggcggctagtgggcagggagccccttctcctcatttctgaaatcaaatccagctgcacactgcaaaacagggaggtgcaaagcaaatgtgcttcatgaatagaatcgattgtccaagtcggggtataagtgggggagatgtgggatttttgtgcttggtctgtaacagaaacacgtctggctctctctgaggtccaagaggcagacctgtgggcaggtgggccactaagagccagcatcatgaggaagccttcagatacatttcacggggcagccataaaacatattctaacaatacagctaaacaggaaaccaggtaggaaggctttggagacatgactacatattttagttctgatacttattactaaggctttccttggataagttccttggccttgttgggactcagtttcctcatctgcactatagggcaatgatgtctcttgcctacccttatt

SEQ ID NO: 50676 - DNA, 648 bp, Homo sapiens
tactggcctcatgctcctgcttcttcctgttcatcgcaaaggctgggagatgattaatatcataatgtgacaccatcacaatattacctctcccaaggatacaggttttctaaccaccaattgataactggagaatgaaagactctgttccctattctagaagttgtttgttagattacaggtggaggggcggctagtgggcagggagccccttctcctcatttctgaaatcaaatccagctgcacactgcaaaacagggaggtgcaaagcaaatgtgcttcatgaatagaatcgattgtccaagtcggggtataagtgggggagatgtgggatttttgtgcttggtctgtaacagaaacacgtctggctctctctgaggtccaagaggcagacctgtgggcaggtgggccactaagagccagcawcatgaggaagccttcagatacatttcacggggcagccataaaacatattctaacaatacagctaaacaggaaaccaggtaggaaggctttggagacatgactacatattttagttctgatacttattactaaggctttccttggataagttccttggccttgttgggactcagtttcctcatctgcactatagggcaatgatgtctcttgcctacccttatt

SEQ ID NO: 50677 - DNA, 606 bp, Homo sapiens
tcttatcaaatgttatatactgtacatcattactgtattgctacacatttatacagctgatagtttagtgggcttgtttacaccaacatcatcacggacacgtgagggtgttatgtctgctacgacaccactaggcaataggaattaggttataatctcgcaggaccaccattgtatattgagtccattgttgaaatatcgttatgagttgcattactgtatcttaaawtgagtaatttataagcaacagaaatgtattgctgacagttctggaggctgagaagtccaagatcaaggtgccagcaggttctgtgtctggtgagggcctgttcctcatagatggcaccctctctatgtcctcacatggcagaaagtgcaagggagctcactggagcctctttaataaaggcattaatcccattcatgaggatgaagccccactgacttagccacttcccaaaggccctgcctcttcatactatcacattggatgttagattccaacatatgaactgttgggagacatcagcattcagaccatggcaataacaaaaagtacgtagatttgatgaacctggtatctgtttactttgttaaattaacaga

SEQ ID NO: 50678 - DNA, 1464 bp, Homo sapiens
tggagataaaaataataactgtacactgcagataagaatatgggtggaaaataactacaaaattatattaacacaaaaattattattccaactgagttcaattgaattggatctctataatattgatataagaattcatatttattgaaaccttgaaacataaagaatcttagcaaaaagcaagggttttattttattttattttatttyattttattttattttattttattttattttttgagacacagtcttgctctgttgtccaggctggagtactgtggtgtgatctcggctcactgcaacctccacctcccaggttcaagtgattctcctacctgagtttctcgagtacctgggactacaggcgtgcaccaccatgcccagttaagttatgtattttttagtagaggcggggtttcactatatgttacccaggctggtctcaaaactcctgacctcaggtgatctgcccacctcagcatcccaaagtgctgggattacaggcatgagccatcatacgtagccaagtgttggtttttatagaaagcttaagtgctggtatagcctagaattaatacggtaaacacaaataatactatacctgaaacaatcaatgcataaacagcattaagtggcatccttagacaactaaaaataagattctggatcatatcaacctatgccagcaaagaagcttaatctttcttagaggcagtatggtataccaggaaaaataactactgtgtagagatataaaacagtgacattttcaaacttgggctccacaactttgagcatgttactgaatttttctgaacatcaattaatgcatgcacacgtctaacagtgggaaaaacaatagctgtttaacctgctaatgttggattttttcagtcgcttatgttttaatcttctacatgttaatgtaaaagctgctagaaaaagttaatacacaagaatatctaaaaaaagcataagattctttccagttagaattagaaggctgaaacatcttggagacacctagctagacaagaagttatccagttattggggcaactcaatagcaaaagaatgtgctttatttggtctccttctggaaactagactctgtgggtttgttctcctgttttgcaagaatgaagtagaatactgaatacagaaaatactaaggaaaaaaatttaaaactattctgtaactttatccataagggatatagacgtaactgattcacaaaatgtacgaaggttactctaaaccaatgagagctgtaatcaagaaaccatttccaggtatctgcagctgggaagacacaataatctttccaccatgtttatgtaaataaatataatcactatccgtgggaagtgaaaaactgtttgggggaggaagtagactaaattatattttgaagaaacacatgggcatatttttttactgatttattgccactatacaga

SEQ ID NO: 50679 - DNA, 730 bp, Homo sapiens
aaagagttrattcttcattagggttgatgtcttgaaaacaattttcttctctgagttcactcagaagcgggctaatcagtctaaactgtgatgctctctgctcactcccaagttcattgttctgtgttataagcaggagagcccaccaaggtctgcccaggggttctactcccttcaatccttaacctagttcctccactttctcatctataaaatgggatagaaagaaagtcatccacaatgctaattttgaagtgttaagtgagataatgtgtttatagtgattagcatagagcctgttctatatggcatctttacacggagccctggaagcaaatatcagatgcagaccacaaaagcatcagggattctccaaaatgaccactggagaaatcatcctttcttcctagaaaatgcagatggtcacaataccccataattatcctactaggaatatccacagcagggtgcatttatctaactggtaaaataagtttcaatttaacttgcatccaagtttctaggggtatcattttactccatttgtgctcatccaaaggaaaattatcttctaaatatgattttatcagagtttacatgaagctgtctttttatcagctcatattctgtaaataagtagttaagatttactgctctaaaagatagtagtagaaacatttatttaatctaaagttctcacatcatgaatgatgtatttggaacatgcaca

SEQ ID NO: 50680 - DNA, 1949 bp, Homo sapiens
acatgaatcaacccaaatgcccatcaatgatagagtacataaagaaaatgtggtacatatacaccatggcatactatgcaaccataaaaaggaaagagatcatgtcctttgcagagacattgatggagctgaaggtcattgttctcagcaaactaatgcaggaacagaaaaccaaacattgcatgtttcttacttataagtggtagtggaacaataagaacacatggacacagggatggtaacaacacacactgaggcctgttgggggtgtgttgtggggaggaagagcatcaggaaaaatagctaatgcaygctcggtttaatacttaggtgatggagtgataagtgctgcaaagcatcatggcacacgttttcctacataataaacctgcacatcctgcacatgtacccaggaacgtaaaataaaataaaattaaatttaaaaagcgatgcagatatttaagccagtctgaaatctgaaataaaaaggttagtgtgtgtgttttaagaagtgcgatattataatgtttggatgtggataaaatgatctaatatcaagttaaaatcatgagttaggaaacgacatctttaggatggaagacagctatggatccagactgcaagaagaaactaaccataggcaagagaaataaaataccttccagcataaaaggattgaagagcaatgggagggctataggtcgaacttcagattgtgtattgggaagatgcattaaattcatttaaatagtatattttcttgacaacggtataaggcaagacaatctactatgtgtgaggaagaaggtgtgtggaaattgagaatagaagctaaataatcacttcagaatttgatacatcaaataacagaatgcgggacattgcttagtgtccatttgaggtttacaaatatgaattttaaatgaacttatgtaaaaacatcattgttttaaacgagtatgaatgggaatagataccacggatttatttagatatgccttttatatcatttccaatagtttgttaaaagcatgctagtatcttagcttcattaaatatttaatgattccacgtcttatgatttgaggagtggctatttccttgtcttataaattttatgaagttcttattatcaatttatatcagtaatgacaataattccataatgattaccaggcaatattatattttgcctatatttacccagttaattcacacaagaaaaatatgaagtaggtactatatcttcttgacagatgaataagtagaaataaaaagagttaaataactttctcaaagtcatagttagtaattgttggaagaattatggcatgttgacaagtgggccaaaaaaataattgttttgaacaaaatgtgatgtcctcgttcagtgttatgcaaatgtctatcacattttgaatatcatgtgccaaataaacatgcttgaaataggtaagatatttaacaaatttaaagtatttttggattttaaatcaactgaagaattcttaagcaatagcttgcatgaagacacaacataaaacattgaataaattagcaaagtttcggactccagagaaaagaaaaaggtagccatagagattatgaaggtcagaccatttaagtttcaaaaccagtttattgaaaaaaaatttaaaaactggagtaaatagtatgaatagattggtaatgctgtgagcatgaggaaacactattaaggaagatatagtgatagaattttgaatttaaacgaaagaaggaaaaatggtacatagttataatgtgaaaatacaccagtagaaaagcttattcatacagtttttaataaatattgctgcttttctaatctgctcattcttgatattggattcgtagctgcagttggtatttatggatcttccaactccatagtcattatgttaaagtagctaaatatacttttatttaaa

SEQ ID NO: 50681 - DNA, 1949 bp, Homo sapiens
acatgaatcaacccaaatgcccatcaatgatagagtacataaagaaaatgtggtacatatacaccatggcatactatgcaaccataaaaaggaaagagatcatgtcctttgcagagacattgatggagctgaaggtcattgttctcagcaaactaatgcaggaacagaaaaccaaacattgcatgtttcttacttataagtggtagtggaacaataagaacacatggacacagggatggtaacaacacacactgaggcctgttgggggtgtgttgtggggaggaagagcatcaggaaaaatagctaatgcacgctcggtttaatacttaggtgatggagtgwtaagtgctgcaaagcatcatggcacacgttttcctacataataaacctgcacatcctgcacatgtacccaggaacgtaaaataaaataaaattaaatttaaaaagcgatgcagatatttaagccagtctgaaatctgaaataaaaaggttagtgtgtgtgttttaagaagtgcgatattataatgtttggatgtggataaaatgatctaatatcaagttaaaatcatgagttaggaaacgacatctttaggatggaagacagctatggatccagactgcaagaagaaactaaccataggcaagagaaataaaataccttccagcataaaaggattgaagagcaatgggagggctataggtcgaacttcagattgtgtattgggaagatgcattaaattcatttaaatagtatattttcttgacaacggtataaggcaagacaatctactatgtgtgaggaagaaggtgtgtggaaattgagaatagaagctaaataatcacttcagaatttgatacatcaaataacagaatgcgggacattgcttagtgtccatttgaggtttacaaatatgaattttaaatgaacttatgtaaaaacatcattgttttaaacgagtatgaatgggaatagataccacggatttatttagatatgccttttatatcatttccaatagtttgttaaaagcatgctagtatcttagcttcattaaatatttaatgattccacgtcttatgatttgaggagtggctatttccttgtcttataaattttatgaagttcttattatcaatttatatcagtaatgacaataattccataatgattaccaggcaatattatattttgcctatatttacccagttaattcacacaagaaaaatatgaagtaggtactatatcttcttgacagatgaataagtagaaataaaaagagttaaataactttctcaaagtcatagttagtaattgttggaagaattatggcatgttgacaagtgggccaaaaaaataattgttttgaacaaaatgtgatgtcctcgttcagtgttatgcaaatgtctatcacattttgaatatcatgtgccaaataaacatgcttgaaataggtaagatatttaacaaatttaaagtatttttggattttaaatcaactgaagaattcttaagcaatagcttgcatgaagacacaacataaaacattgaataaattagcaaagtttcggactccagagaaaagaaaaaggtagccatagagattatgaaggtcagaccatttaagtttcaaaaccagtttattgaaaaaaaatttaaaaactggagtaaatagtatgaatagattggtaatgctgtgagcatgaggaaacactattaaggaagatatagtgatagaattttgaatttaaacgaaagaaggaaaaatggtacatagttataatgtgaaaatacaccagtagaaaagcttattcatacagtttttaataaatattgctgcttttctaatctgctcattcttgatattggattcgtagctgcagttggtatttatggatcttccaactccatagtcattatgttaaagtagctaaatatacttttatttaaa

SEQ ID NO: 50682 - DNA, 1949 bp, Homo sapiens
acatgaatcaacccaaatgcccatcaatgatagagtacataaagaaaatgtggtacatatacaccatggcatactatgcaaccataaaaaggaaagagatcatgtcctttgcagagacattgatggagctgaaggtcattgttctcagcaaactaatgcaggaacagaaaaccaaacattgcatgtttcttacttataagtggtagtggaacaataagaacacatggacacagggatggtaacaacacacactgaggcctgttgggggtgtgttgtggggaggaagagcatcaggaaaaatagctaatgcacgctcggtttaatacttaggtgatggagtgataagtgctgcaaagcatcatggcacacgttttcctacataataaacctgcacatcctgcayatgtacccaggaacgtaaaataaaataaaattaaatttaaaaagcgatgcagatatttaagccagtctgaaatctgaaataaaaaggttagtgtgtgtgttttaagaagtgcgatattataatgtttggatgtggataaaatgatctaatatcaagttaaaatcatgagttaggaaacgacatctttaggatggaagacagctatggatccagactgcaagaagaaactaaccataggcaagagaaataaaataccttccagcataaaaggattgaagagcaatgggagggctataggtcgaacttcagattgtgtattgggaagatgcattaaattcatttaaatagtatattttcttgacaacggtataaggcaagacaatctactatgtgtgaggaagaaggtgtgtggaaattgagaatagaagctaaataatcacttcagaatttgatacatcaaataacagaatgcgggacattgcttagtgtccatttgaggtttacaaatatgaattttaaatgaacttatgtaaaaacatcattgttttaaacgagtatgaatgggaatagataccacggatttatttagatatgccttttatatcatttccaatagtttgttaaaagcatgctagtatcttagcttcattaaatatttaatgattccacgtcttatgatttgaggagtggctatttccttgtcttataaattttatgaagttcttattatcaatttatatcagtaatgacaataattccataatgattaccaggcaatattatattttgcctatatttacccagttaattcacacaagaaaaatatgaagtaggtactatatcttcttgacagatgaataagtagaaataaaaagagttaaataactttctcaaagtcatagttagtaattgttggaagaattatggcatgttgacaagtgggccaaaaaaataattgttttgaacaaaatgtgatgtcctcgttcagtgttatgcaaatgtctatcacattttgaatatcatgtgccaaataaacatgcttgaaataggtaagatatttaacaaatttaaagtatttttggattttaaatcaactgaagaattcttaagcaatagcttgcatgaagacacaacataaaacattgaataaattagcaaagtttcggactccagagaaaagaaaaaggtagccatagagattatgaaggtcagaccatttaagtttcaaaaccagtttattgaaaaaaaatttaaaaactggagtaaatagtatgaatagattggtaatgctgtgagcatgaggaaacactattaaggaagatatagtgatagaattttgaatttaaacgaaagaaggaaaaatggtacatagttataatgtgaaaatacaccagtagaaaagcttattcatacagtttttaataaatattgctgcttttctaatctgctcattcttgatattggattcgtagctgcagttggtatttatggatcttccaactccatagtcattatgttaaagtagctaaatatacttttatttaaa

SEQ ID NO: 50683 - DNA, 1558 bp, Homo sapiens
caatatcatacggaatgggcaaatcctggaaacattccccttgaaaacgggcacaagacaaggatgccctctcttgtcactcttattcaacatagtattggaagttctggccagagcaatcaggcaacagaaagaaataaagcgtattcaaatagggagagaggaagtcaaattttctttgtttgcagatgacacaatcctatatctagaaaaccccattgtctcagccaaaagtttcttaagctgataagcaacttcagctaagtctcaggctagaaaatccatgtgcaaaaatcactagtatttctatacaccaacaacaagcaagcagagagccaaatcatgaatgaactcccattcacaattgctacaaaaagaataaaatacctaggaatacagctaacaagggaagtgaaggacctcttcaaggagaactacaaaccactccccaaggaaatcagagaggacacaaacaaatggaaaaacattccacctcactctttgtataaggtttcattagatgaacactgtccttgtattttatgctgttttttttaagcgctaaggaggtccattgaatatttgctaattggttgtgatatatgacgttggtttcctaaggtctttattaaagtttccaaattatttattaactgatttagtgaggaaataaatgagaagcattaatttttactttattgaaaatatctctatcttcaattatcaatgcatcttttatccccaagactgaaggcctgtggaaggcatggagagtgtggtgtgcaggggtaaatggcgaaggggattaaacaaaagttgatccattgtaacaattttatatcactttcttcccagggaagatttgtattggtggccctgaagcagaaagctctgtatcccattactagcaatgagtcattcagtctcccacagatccaaataaagttttacagaataccctatggcatgcctttcaaaatatatgaacaccataaaatatatcatttattttaccatatgaactgactctgtcccttattcaccatttgggatagcaatcttaccatgtgcttttggctcttaggttatcatcagatatattggagttctctgagcttttccattctaagtccccatggtattttcaggagttttataacttggttgtaaaaattcactctaaactgaaacttggcaaacaatatattaatctgggaagttaatttcttttataaagtccagaatctgtttagcccctcttttgagttctcagagaccttggaaaaataaagtcagcaattaaagtttttttgtgtcytaaaaaaatgcaattacatttctccaaaatcctttcaaccctatttttacaggtgaatagcttatattttggatcaagttctgatatattttgaaacagtttttttttttcttttggcacagtgaaatagagtaattaagaaaggaactaggctgatcttaccctgttacatcactggaataacaacgtatctttagagagtggagcctgtctgaatttacaaaaaggactaagaattta

SEQ ID NO: 50684 - DNA, 560 bp, Homo sapiens
ttcaggatttttttttttttaagaggcagtgtctcactctgtcgcccaggctggagtgcagtggtgtgatcacagctcactgcagcctcgacttcctgggctcaagtgatccctctgccccagcctctctagtagctgatattataggcgcacatcaccacatcattcaggattcttgatttttttttttttttgagacggagtttcactcttgttgcccaggctggagtgcaatggcgccatctcagttcaccgcacctccacctctcgggttcaagcaattctcctgcctcagcctcctgagtagctaggatgataggcatgcgccrtcttgcctggctaattttgtatttttagtagagacggggtttctccatgttggtcaggctggtctcaaactcccgacttcatgtgatccactcacctcggcctcccaaagtgctgggattacaggtgtgagccactgtgcccagccaggattcttgagtttaatccctgggctgtcctgctttgttggtgaggtgtttagccctggcaaccagtgcccacgtgtcgcacaa

SEQ ID NO: 50685 - DNA, 641 bp, Homo sapiens
ctattacaagcttgtagcctttattcctaattcgtggccctttttgaaactcagcagaaagtctggggtatacctcaaaaaacttccagcttgtcaggaattgaacatcatagttttcccagcaacacacaactgctgcaatctcagcttttctgttcggcccctgagatgctgcagcctgctgaacttttggactcttagtctgctgcatttagcttaggaatcagccaatgactttaaagaaattagatcagagatttcagcgtttacttctcggcacttctctattctctgtgattttgcccctcatatcccagccaatgtcgcagcttggaatcctggctttggtatctttattgcagtaagacaaccactttttgcttcattttggctttcctccacagaaaattagaaaatgctttcatgaaaaaatccaagataaatatggagtgctgtctctgcttctctcttctcagggaccagagttgtataagccgacctctgttaatttatcttcaattacttacaagagttgttccatacatagytgttagtggaaagtttagtcttagccaagccaatccatatgtcccctaaccagaattatgtgattttcctaatgtattatctggcaatttgaa

SEQ ID NO: 50686 - DNA, 1119 bp, Homo sapiens
aaaccccgtctctactgaaaatacaaaaattagctaggcttggtggtgtgcccctgtaattccagctactcaggaggctgagtcaggagaatagcttgaacccaggaggcagaggttgcagtgagctgagatcacaccattgcactccagcctgggtgacagagtgagactccctctcaaaaaaacaaaaacaaaaaccaaaccctgaagcagcatggaagacatcaggctaccctaccaaagagaccacatagaaagagaggtcagtcacatggagagaggtcccagcccccagtcatccttgccaaggctgcagacatatgaatcatgccatcttgaaggtcccagccatgccaccatctgactgccttattcagccactatatttggagtgccttattaggtgactatagatagctgaaatagagcgtgttgtcctacatgaaattcacagagaaaaaggataggctaccccaaagatgagctttctacctctcatctcttatctgcttaaagttgtgtattagtccattctcacacagctatgaagaactacctaagactgggtaatttataaaggaaaggggtttaattgactcacaattccgcattgctggggaggcctctggaaacttacaatcatggtggaaggcaaaggagaagcagataccttcttcacaaggctgcaggatagagtgagtgcaagcagggraaatgccagacacttataaaaccatcagatctcaagagactcgctcactatcatgagaacagcatgggggacacagccctcatgatctaatggcctccacctggtcttgtccttgacatgtggggatcatggggattatgaggattacaattcaggatgagattttgggtggggacacagccaagccatatcaacttgtaaaatatttttttcccttttgatacttcagatatgttaggactcatttataacgaatgttcaagtccaagtaccatcactttctagtccccttagcagactcagtgtagctcaaagccttcacaggagagtttagccctgaagttagggccataggagacctccttcttccttccacttataactccaagggtcacagcctttctcca

SEQ ID NO: 50687 - DNA, 1490 bp, Homo sapiens
tgtctacccagctcccgggagcacctccttcagcctcctatgacgtccactctcccctcacaggagagctgcccagtaatcatcttttgtgtgtttgctgcttcgttttgtgttttctgtttaatttgtatcttcctgttcctccttccgaccctacacacatcttccaactggattccagggccctgaaaaggcagccagtgttggactggctcatggctgccgcagaggagctaccctccttggagaagcaaggctgcatccccttttttttgctgacttaacaacgtcctgtttctacttcgtgagatggcactgactcaccactagtggtcgctattattcacacccttactttcataattcaaactaattgggaaacacgtatctgtcagcttctctatgggactggattgctagaggcaaaaaaaagtgctagagtcaataagtttaatcagtaacagaagtaaagtatagagtccccagggaaacctttaggaaagatcttcatgagtctgcttataaggaaaggaagaggcctcccaagcaacaggtcccagacattcctactccacatacggattgaatgtttattaagttctgacaacatgcaggactgaaaatttctctaggcatttatgagggtcatgctgttaaaatgagataaagaatgaaatatgtttgatatcattatacagacgtatacataactctgtgtgtgtgtgtgtgtgtgtgtgtgtgtgtgtgtgtatactcttttttgttttattttattttcttttttgttgtatggagtcagaaagatctagctgggttcagatcccagctttgctacccgccggctctggggccttggatacatctcttaacctctcttgcccattgatcatttataaaatgtgagcaatattccttccttgaaggggtgttgagagctataactgagataagggtgtagtctgggaccagcagcatccagggagctgtcaaaatgcagaacctcaggccccaccccagagtaacctaagcagaatctgcatttaatgagatccctcagtaatttgcatgtatgttaacgtttaaaattcctgtcctcaaggaacaaataatcagtgtacagatctatatggagaggataatagcagcagcttacatctgtagagttctccggcctttctgaagtgactttggactccaagtgaggagtgttgctggtcggatttgggtcttgataacgttgacagaaatagctgtgaggacttggcggcagatggaatgcgccgcgggtctgggtgtagggatggcagggggaggaggggaggtgtggacactgttggcagaaggtggaagttaggaaggctgggagcgtgtmagaaggagatagtgtgctggacatggaggaaaagttcttccaaggctttgggagcatggagccaagagacactgaaagaaatcagcctatttacgtagaatttgctagagcaaagtct

SEQ ID NO: 50688 - DNA, 530 bp, Homo sapiens
agtttaccctccaactcccatcaggcattggctgagagttgcttcaggaggtgttaactcgtcacacttctggccttccagatgcataggctggacrtactcctgcagccaggggaagccccaaacaaagttgcaggtatatgtgtgagataccttgatcagggatgtgggggatgggggcagagcactatcagacatgttgcgtttttgcaacaatgggcataagaaggatatttgaaaatctttaagcacactattagtggttaagaagacctattgatttttggatgcccatcatgtgctgaataccatgcccgacccccaagtgcatcatctctaggtgttaccatgattgtccctatgataaagcaacccatgtgtctccgtgaattctgcaaactctgctgaaaatggcaaaatggagttggggtcctctgtgctggtgacatttagaatggaaagcaagtgctattttgaagatgactcagtctgaggaggcgctagttttctcaagcaaacacttttgtaac

SEQ ID NO: 50689 - DNA, 1255 bp, Homo sapiens
tatttgtaattcgaaatcaatattataatctctgggccttccttgagtttccatgcttttatgagcctctttaaaacggtatatattatgggaccagtaaaaaatcagactaattccaaatgtcagctcatttaaaaactagaaaatggagtgacttagagtcaaaattatattttggaaaaaaaaaaccccaccgacaattgaataaatgaatttttatcataactgtgaatttgatctccacacatcaaacctgggggaaacaggtcacagaagtagtaataaagtgattttttattactcagcatctaggcacaatttcagcaactctagctacacatctttcctgctacccttgcccctcaaccaagttattcccaaagaatgcagggagatggcagccttggtgaagcctgagcataacctgtctccacagctttgtacatgcctcctgtgatctcccaccttccccactcagatagcactgggttgtgctgggtggctttggtgctctgctgctctggatggcaatgttgagctgacaggttgccccctataaaatggggataaaatactattttctatttgtgttgtgctctgtaacatgggccataggggatggcatctttctgcttttacagcctcacagaggtgttagtgaaacacctcttctttgtttttgtatctcaacctctctcccccactctaggtagagaactgcgggaagaaggtacaggggaaagctaagggtgggggcagcaagaagggggatccacaggcagtgtgagccctgcactcctcatcataccaaaatcaccccttcactcacatttgtgcacacacaggaatcctttcttcttttaggagttttctcccataaatttcttggacactcatgcaaatgaacatcccaatgggctccttttattggtccacagtgttccagaggtacctggacacgcctgaattttactggtaagacagccccagctatccttgagaccccagctataacggtacttggttgacaaagaaacattgccctaaggaacacaggaagggaaagcaacattttagggcaaagtattttacagcacagaaatagcaagctcctattgattactggtccatagggaccaatgtcaccaacagaatgaagaaaataaactctggtgatgtgtgtattatttagcattcttataytggcaaagtcttttcctcagggaagaagtttgttacatggatcaatgccaac

SEQ ID NO: 50690 - DNA, 554 bp, Homo sapiens
tgagaggggagtgacaaagcagaaatataatctgttgagagctctgggtagattcatgcagagatgttggagtatgagagcatagtttctaaatggcatgaagaaggtggagctctgggtcagcagaaggagggagagcggtgtttcatagtgtcatggatgtccactgatttcacctgattggtattctttccccttcgtcaggtaacagcatgctcttttttctttttgggcactatgcttctcacgctgygtgtggtcctggaaaaactaagttcccccatgaccttcttccatgaccttcacagaggggatctctgtggtccagtctgaccaaccggcagtctccatcatctggaacactggccttccctatggcatgctctatggacactgggagagaggagatgtctatttcactctgggatttctagttgtagggattgggtaagcctggagttgttggaagcaattttcccagtagtatgagagaaactgcctgtagaaccaagccatcacacagagaaaagcagagccaaggggtggggagacaa

SEQ ID NO: 50691 - DNA, 587 bp, Homo sapiens
tcagctgcgggagcatgtgtccagctgacctcagatgcctcaaacatgttccaaaccgaactcaccttcctctgaatctgctccttttcatgtcaccatcatctctctgatatcatcatcatcattagccagaagccttagactcactctcaatgcckcccttttccttcaatccccacattcatatgaattttccaagttgacatcaaactgcatctttagatgccaccctcttctttcaaacacaacagccactgctttagttcattatctctccctgaacttttgcaatactcaagtcatcctccaggaacatgcctgagtgatccttttttttttttttttgagatggagtcttgctctgttgcccacgctggagtgcagtggcaggatctcggctcactgcaaccttggcaccccccctcccccagttcaagcgattctcctgcctcagcctcctgagtagctgggattacaggtgtgcgccaccacgcccggctaaattttgtatttttagttgagatggggtttcaccatgttggtcaagctggtctcgaactccttgtagggtccagacctactgggct

SEQ ID NO: 50692 - DNA, 1917 bp, Homo sapiens
gcaggaagaggggccttttaatgtctgtgtttcctttgttactgctgatgaaaattcttggaaaaatcttccaagaaaaacatgtttatgcaatgtgaagcacattcaaatataaataagatgcactaaatgtccacttctctcacccacccactatgggcttcatacggtccttacatcaattgtcagatggtgtcctcctggtgcagagagttgtcagtaacagatatttcttctgacttcaaaggtactcctactttaaaaaaacaacaacagaaaactagctaaggagggttaaatccagacttacaatcaaaactattggtataaaactttttatttaatagctaaagcgawaaatcatatataacaattacccaacaagtactatggttctggtattaacttataatcatcattagtaaggaaactgactgaaatccaggctgtgtatattagttaaggtctgcatttcagccaaaataacagcaactgaaattaggaagttcttttttggtcacataaaagaagtctgaaggtaagcagtccaggggtaacgtgaagtggtaaaagtgccatcagtgtcccacacttctgcttttccactctccaccagcgtctatctgcaagatcaccccatggtcagaagatggctgcaggaactcctgcagggaaggatgaaagggtgcctgccaactgagcaaggtctcttaaggagcttttttttttttgcaagctccacccatctcattgtccaatcccattacaagaggttacaaatgtagttttcaaagctgaggctccacagcaatataggggttcttttagtaaaggggaagtggagactagatactgggttggcactagccatctctgcagtgatgtgactaaaaggaaatggcttgtccacgtcctcttcttttttcatcagtgagtctcttcccctctattatgccatatgagttggcagcatcattttattgtattagggtatttaattccaatttcagaaaaatgtcaatcttcctgtctgcaattgcacaaacttaactaactccttaagcacatggtccttaacgtctgtatttttaagttctaataattgtagaaatctccttagggaggaaatttaatagagtttgctcttcttcctgtagaatgcaaatttcagctgcatgttttcttggaaatgattgtctgtctttttacgtagcagacctgtcctgtggttgtcctgtccctgcagctgtgccttctgcctctggcagttggcttgaagagagcagcttccaggagaaaggcattctctgatagttccttgaatgcatctaggattttgcacttcattcacttctagccacacttatgtagcatacaattgctttagggtcagaagattgtgggagggctatgctatccagttgggttctggaataaatgagggaggaaagaagaggtaagtgagtgcagtgcaatgggagaagagggactaatttctaaggctgggattgggaggtgaatgctggaagagaatctatctttggagcattttactatggacaggtattaaggcaggtgtcttataaacaatgtccagtgctctcaattcttagaactaggcaccatcaactctaccttacagatgaacaaactcaggctcagagaccttaggtaacttgtctgttgtcatgtagtaatggcaaagccaggcaatagggacctaggtgtgctccagggtgtcactggcaagagtcttgagttttaacagttaattaccttctcccctcagcccctgagaggatctcctatccaagcatttcaccttccttggtgaagctctgcttcaggtcatgggagcccctgccagagggttgatgtttagaggagttgttgagagatgaggaagatggtaggagg

SEQ ID NO: 50693 - DNA, 1917 bp, Homo sapiens
gcaggaagaggggccttttaatgtctgtgtttcctttgttactgctgatgaaaattcttggaaaaatcttccaagaaaaacatgtttatgcaatgtgaagcacattcaaatataaataagatgcactaaatgtccacttctctcacccacccactatgggcttcatacggtccttacatcaattgtcagatggtgtcctcctggtgcagagagttgtcagtaacagatatttcttctgacttcaaaggtactcctactttaaaaaaacaacaacagaaaactagctaaggagggttaaatccagacttacaatcaaaactattggtataaaactttttatttaatagctaaagcgaaaaatcatatatarcaattacccaacaagtactatggttctggtattaacttataatcatcattagtaaggaaactgactgaaatccaggctgtgtatattagttaaggtctgcatttcagccaaaataacagcaactgaaattaggaagttcttttttggtcacataaaagaagtctgaaggtaagcagtccaggggtaacgtgaagtggtaaaagtgccatcagtgtcccacacttctgcttttccactctccaccagcgtctatctgcaagatcaccccatggtcagaagatggctgcaggaactcctgcagggaaggatgaaagggtgcctgccaactgagcaaggtctcttaaggagcttttttttttttgcaagctccacccatctcattgtccaatcccattacaagaggttacaaatgtagttttcaaagctgaggctccacagcaatataggggttcttttagtaaaggggaagtggagactagatactgggttggcactagccatctctgcagtgatgtgactaaaaggaaatggcttgtccacgtcctcttcttttttcatcagtgagtctcttcccctctattatgccatatgagttggcagcatcattttattgtattagggtatttaattccaatttcagaaaaatgtcaatcttcctgtctgcaattgcacaaacttaactaactccttaagcacatggtccttaacgtctgtatttttaagttctaataattgtagaaatctccttagggaggaaatttaatagagtttgctcttcttcctgtagaatgcaaatttcagctgcatgttttcttggaaatgattgtctgtctttttacgtagcagacctgtcctgtggttgtcctgtccctgcagctgtgccttctgcctctggcagttggcttgaagagagcagcttccaggagaaaggcattctctgatagttccttgaatgcatctaggattttgcacttcattcacttctagccacacttatgtagcatacaattgctttagggtcagaagattgtgggagggctatgctatccagttgggttctggaataaatgagggaggaaagaagaggtaagtgagtgcagtgcaatgggagaagagggactaatttctaaggctgggattgggaggtgaatgctggaagagaatctatctttggagcattttactatggacaggtattaaggcaggtgtcttataaacaatgtccagtgctctcaattcttagaactaggcaccatcaactctaccttacagatgaacaaactcaggctcagagaccttaggtaacttgtctgttgtcatgtagtaatggcaaagccaggcaatagggacctaggtgtgctccagggtgtcactggcaagagtcttgagttttaacagttaattaccttctcccctcagcccctgagaggatctcctatccaagcatttcaccttccttggtgaagctctgcttcaggtcatgggagcccctgccagagggttgatgtttagaggagttgttgagagatgaggaagatggtaggagg

SEQ ID NO: 50694 - DNA, 1137 bp, Homo sapiens
atatgactttccccaaatagagccaaatataccagagagcataatattttgctgaagactgcctcaattctaaaatataagaaaactatgagagttttaaattgaaatttttgtaacttgcctaaggtattatcatactgctactttgtgcttggcctgaaattagagaatgttaagcaggtaagtgaaaattaaactcctcaaggatatataaagagtgcaaattctactatttcaattctcctttgattcaagtttaaaattcaggcaacagcttmctaggcaaactgagatgctttttttcctcttaacgatgagactatgattagaacaccagccaaactgtgcttcttaagtctcactcactgggtctgtggtacaactgctggctttgtgcactataagtccttcttcagccaagtgttgccttagagtagagaacaatgactgtaaattgcctttgtattgtagatatgaacaagaaaaaaatatgcattcattcttagagatcttgataacctagtgagatttttcaatttataatgatctctatgtgggaagattattacattcataaggaggaaacctacatcatttgaagactccttgtgtgttatttaaaggtgaaatagggcagaacatagacaatggttgtggcctcaactgttgtcacttcagacaccttgaaacatgtagccataataatctactcatcgtctcttgaatattccacctggcaagtgtccctgtggatataatcctaacttatgatagaagagttgtttcatggctagagacaggtctgtgaaagggaagagcttttccactttggataagaatatttgtattcatctaggtgtttatggaaagcatagctaagtctaattttggggagaaaagaggatgttttaagattagccactatcagtaaggagaacaaccagaaattgaccagtgcctcatagaagaaatggtctccccatgatctgaaaatttaaaagaatgtaaatattgtttggaaaatttcaaattcaactttaattaaagaaaagctaaaagtgccttgcttcatttaaggaaattcaagttgttgagattaatctttgccagtaacaataaaatcattcattttctaat

SEQ ID NO: 50695 - DNA, 1216 bp, Homo sapiens
gaggcagggtttcaccatattggccaggctggtctcgaactcctgacctcagttgaacagctcgccttggcctcccaaagtgctgggrtgacaggcatgagccacagtgcccagcctgggcattatcttttgcaggcagccaggagtcactggaggtgtttaatcaggacaatcatattgtctgacatacattttataaataaaaactagagggaggagacaggaggaaaataatctcattagaaagaaggttgtcgcaaggatcacatcaaactgtaacaaaatcctattagtcctactttgagccacagacccatccatggctgccaccctggtctgagccaccatcaccctcaactgactagctgtgcaaacccagatggcttggttaatcccggtaagcctcagctgactcagctagcaaatgggatactaaccaccacctcaccaggtagcagatacttaaggctctagctttggggttcaaaccaactagggttgaaattcagtcccactgtttactcatcgtggcaccctggacaaacacccttgcagagcatccactgcctcactgtaaagtggggataatggcagttcctccacctcatgggctggaggataaagaaccagatgtctataaacactgcacaggacacccagccaagtctctgtgtgttacttccctttctctctccatgcaacaagccagcatctcttagtgtctcttaatcaccagcaggatctgacaacccccaactcacctacgagcatcttgcattatctcagtttcagccctcatcagctctttgcggtgtaatgctccccatgagtcaccaaattcccctatattctgaaagagcctgtgcctacatggaaaccgcacaagatctgtctcatcttcccacgggccagaaatgggggcagcaagaccacgccatcttgtttctgatcgcgcagactttactctcctcccaccccaaagaggcagaagttgcaaggacctaaaatagtggccataccactattcatggaatgcctgccatatgccaggtgttgccatgacagccaattccatgagggccacttgcataggaagcatccactggtctccttcaggcagccacccgaccctcatccatgaagacacagtggctttggggttagacacttctgtcactttagtaagttacttaacctctctgtggctcagtttcct

SEQ ID NO: 50696 - DNA, 1216 bp, Homo sapiens
gaggcagggtttcaccatattggccaggctggtctcgaactcctgacctcagttgaacagctcgccttggcctcccaaagtgctgggatgacaggcatgagccacagtgcccagcctgggcattatcttttgcaggcagccaggagtcactggaggtgtttaatcaggasaatcatattgtctgacatacattttataaataaaaactagagggaggagacaggaggaaaataatctcattagaaagaaggttgtcgcaaggatcacatcaaactgtaacaaaatcctattagtcctactttgagccacagacccatccatggctgccaccctggtctgagccaccatcaccctcaactgactagctgtgcaaacccagatggcttggttaatcccggtaagcctcagctgactcagctagcaaatgggatactaaccaccacctcaccaggtagcagatacttaaggctctagctttggggttcaaaccaactagggttgaaattcagtcccactgtttactcatcgtggcaccctggacaaacacccttgcagagcatccactgcctcactgtaaagtggggataatggcagttcctccacctcatgggctggaggataaagaaccagatgtctataaacactgcacaggacacccagccaagtctctgtgtgttacttccctttctctctccatgcaacaagccagcatctcttagtgtctcttaatcaccagcaggatctgacaacccccaactcacctacgagcatcttgcattatctcagtttcagccctcatcagctctttgcggtgtaatgctccccatgagtcaccaaattcccctatattctgaaagagcctgtgcctacatggaaaccgcacaagatctgtctcatcttcccacgggccagaaatgggggcagcaagaccacgccatcttgtttctgatcgcgcagactttactctcctcccaccccaaagaggcagaagttgcaaggacctaaaatagtggccataccactattcatggaatgcctgccatatgccaggtgttgccatgacagccaattccatgagggccacttgcataggaagcatccactggtctccttcaggcagccacccgaccctcatccatgaagacacagtggctttggggttagacacttctgtcactttagtaagttacttaacctctctgtggctcagtttcct

SEQ ID NO: 50697 - DNA, 1216 bp, Homo sapiens
gaggcagggtttcaccatattggccaggctggtctcgaactcctgacctcagttgaacagctcgccttggcctcccaaagtgctgggatgacaggcatgagccacagtgcccagcctgggcattatcttttgcaggcagccaggagtcactggaggtgtttaatcaggacaatcatattgtctgacatacattttataaataaaaactagagggaggagacaggaggaaaakaatctcattagaaagaaggttgtcgcaaggatcacatcaaactgtaacaaaatcctattagtcctactttgagccacagacccatccatggctgccaccctggtctgagccaccatcaccctcaactgactagctgtgcaaacccagatggcttggttaatcccggtaagcctcagctgactcagctagcaaatgggatactaaccaccacctcaccaggtagcagatacttaaggctctagctttggggttcaaaccaactagggttgaaattcagtcccactgtttactcatcgtggcaccctggacaaacacccttgcagagcatccactgcctcactgtaaagtggggataatggcagttcctccacctcatgggctggaggataaagaaccagatgtctataaacactgcacaggacacccagccaagtctctgtgtgttacttccctttctctctccatgcaacaagccagcatctcttagtgtctcttaatcaccagcaggatctgacaacccccaactcacctacgagcatcttgcattatctcagtttcagccctcatcagctctttgcggtgtaatgctccccatgagtcaccaaattcccctatattctgaaagagcctgtgcctacatggaaaccgcacaagatctgtctcatcttcccacgggccagaaatgggggcagcaagaccacgccatcttgtttctgatcgcgcagactttactctcctcccaccccaaagaggcagaagttgcaaggacctaaaatagtggccataccactattcatggaatgcctgccatatgccaggtgttgccatgacagccaattccatgagggccacttgcataggaagcatccactggtctccttcaggcagccacccgaccctcatccatgaagacacagtggctttggggttagacacttctgtcactttagtaagttacttaacctctctgtggctcagtttcct

SEQ ID NO: 50698 - DNA, 1216 bp, Homo sapiens
gaggcagggtttcaccatattggccaggctggtctcgaactcctgacctcagttgaacagctcgccttggcctcccaaagtgctgggatgacaggcatgagccacagtgcccagcctgggcattatcttttgcaggcagccaggagtcactggaggtgtttaatcaggacaatcatattgtctgacatacattttataaataaaaactagagggaggagacaggaggaaaataatctcattagaaagaaggttgtcgcaaggatcacatcaaactgtaacaaaatcctattagtcctactttgagccacagacccmtccatggctgccaccctggtctgagccaccatcaccctcaactgactagctgtgcaaacccagatggcttggttaatcccggtaagcctcagctgactcagctagcaaatgggatactaaccaccacctcaccaggtagcagatacttaaggctctagctttggggttcaaaccaactagggttgaaattcagtcccactgtttactcatcgtggcaccctggacaaacacccttgcagagcatccactgcctcactgtaaagtggggataatggcagttcctccacctcatgggctggaggataaagaaccagatgtctataaacactgcacaggacacccagccaagtctctgtgtgttacttccctttctctctccatgcaacaagccagcatctcttagtgtctcttaatcaccagcaggatctgacaacccccaactcacctacgagcatcttgcattatctcagtttcagccctcatcagctctttgcggtgtaatgctccccatgagtcaccaaattcccctatattctgaaagagcctgtgcctacatggaaaccgcacaagatctgtctcatcttcccacgggccagaaatgggggcagcaagaccacgccatcttgtttctgatcgcgcagactttactctcctcccaccccaaagaggcagaagttgcaaggacctaaaatagtggccataccactattcatggaatgcctgccatatgccaggtgttgccatgacagccaattccatgagggccacttgcataggaagcatccactggtctccttcaggcagccacccgaccctcatccatgaagacacagtggctttggggttagacacttctgtcactttagtaagttacttaacctctctgtggctcagtttcct

SEQ ID NO: 50699 - DNA, 1216 bp, Homo sapiens
gaggcagggtttcaccatattggccaggctggtctcgaactcctgacctcagttgaacagctcgccttggcctcccaaagtgctgggatgacaggcatgagccacagtgcccagcctgggcattatcttttgcaggcagccaggagtcactggaggtgtttaatcaggacaatcatattgtctgacatacattttataaataaaaactagagggaggagacaggaggaaaataatctcattagaaagaaggttgtcgcaaggatcacatcaaactgtaacaaaatcctattagtcctactttgagccacagacccatccatggctgccaccctggtctgagccaccatcaccctcaactgactagctgtgcaaacccagatggcttggttaatcccggtaagcctcagctgactcagctagcaaatgggatactaaccaccacctcaccaggtagcagatacttaaggctctagctttggggttcaaaccaactagggttgaaattcagtcccactgtttactcatcgtggcaccctggacaaacacccttgcagagcatccactgcctcactgtaaagtggggataatggcagttcctccacctcatgggctggaggataaagaaccagatgtctataaacactgcacaggacacccagccaagtctctgtgtgttacttccctttctctctccatgcaacaagccagcatctcttagtgtctcttaatcaccagcaggatctgacaacccccaactcacctacgagcatcttgcattatctcagtttcagccctcatcagctctttgcggtgtaatgctccccatgagtcaccaaattcccctatattctgaaagagcctgtgcctacatggaaaccgcacaagatctgtctcatcttcccacgggccagaaatgggggyagcaagaccacgccatcttgtttctgatcgcgcagactttactctcctcccaccccaaagaggcagaagttgcaaggacctaaaatagtggccataccactattcatggaatgcctgccatatgccaggtgttgccatgacagccaattccatgagggccacttgcataggaagcatccactggtctccttcaggcagccacccgaccctcatccatgaagacacagtggctttggggttagacacttctgtcactttagtaagttacttaacctctctgtggctcagtttcct

SEQ ID NO: 50700 - DNA, 605 bp, Homo sapiens
ggtatatatcagactattcccagtttaccccaaataatctccctctttaaaacctcctcagaaatatttttttgctaattatcttactaaaaaggagaatacatggactttatgtctaataaagaamaatgggaatgagaaacttttcttataattctaaaaactgttatctttattgtgagaacaaatgattaatcgcacctatgtctggcagtgcttcagccaagccacaagccagccagtgtggggagagcctttgcatagtttattaattggtctaaatgccaaattctcttaaaagttgaatgattattctaatattaaaggccaaaagttattgagataatatcacataaagtgttgaatgacattgtggatctgccataaaaattgccaagtaatagttctcttaaactgctgtggtctgaaagtttaagccctctcaaaattgatacattgaaacctaatccccaagatgatggcatttggaagtggggccttgggagctgattaggtcagggagatggaccccctatgggtttagtgaccttctaaaattttgagaccctagagagcttccttgccccttttgccatgtatgttag

SEQ ID NO: 50701 - DNA, 525 bp, Homo sapiens
tattctcttatttctcttaggatgttagtgataggagtcccctagacttttcttgtttctctaccatctctgttgcctctaagtttgttttatttatgctgtgtttaggtcactatccttcatttcaagggctttctgtaaaaatctgtaatcccttgaattatattattaaagatgagggattaaaaccatggttagaacccttgagtccacagaaaatgcttgtcaattttgagtttctctctagggtgactatatgtagtcctaacccagaatatcacaaggtttcttgtttttgtagaataattctggaataagatcgtacaggtaacaaactccaccctctcacagtggaacagtagggctgatggaccctttttcatcatgagccaaccacacatattccagacttggtgcaaagtctcttcctctgtagaccctgcttygatgccatcctgctcccaagatccaaacaaaattaattgcatcctccttgttcctttcaggacacttgtatattccttt

SEQ ID NO: 50702 - DNA, 542 bp, Homo sapiens
atttaggttctgaagcatgctccagtgctgactactgttgctgagcaaggcctgcatgttccaggccgtcttgtaggggtcagagtcctgtgcaatctttcgggtcgtctgttcgaggggtcagctcatttgtcccttgcagccagcagcaccagcagcacccagaacctcgctccagaatctgcccaccaaatccagacttcagcggacccattcaggagatgctggaatyggctcagcaccagtgattattgttagtcctcaacttttttgaacctctgggatgtttgtctgtttggcaaggtttccaggtgtacagaatgaacatcttgaacattgccagattcattggaaaagtcgacaatataaatgatgaaattgtcttctggatatagaaattagaaaatcaaaagttttcagagcatttccttttgtttcatgttagagatgtacgctgttgccagattgcagtgtgtaatatcctgtggggatctcaccaaagcttgttcacaagttcccacctggagacagccaaagtgcat

SEQ ID NO: 50703 - DNA, 437 bp, Homo sapiens
gttgtggcgcatgtctctagtcccagctactcaggaggattgcttgagcctgggagtagaggttgcagtgagctgtgattacgccactgcactgcagcccagatgacagagagagaccctgtctcaaaaaaaaaaaaaaaaaaagggaaaagaaaacacaacccaaactagagtctgagcaaatacagcacctacacatttattcacaaatgttacattgtaacattctggataaaatttctatttatatgatcatagcttttcttgaaaaatttttgaatgcttcaaaatgacaaaaagaactgcatttatttaacaactttggaatcctataagggattacatgtgagctggccctcaarccaggggtgatgatagtaagccatttatctttaatcagaaagccagagcattattcgtatgctgcagagtttaca

SEQ ID NO: 50704 - DNA, 437 bp, Homo sapiens
gttgtggcgcatgtctctagtcccagctactcaggaggattgcttgagcctgggagtagaggttgcagtgagctgtgattacgccactgcactgcagcccagatgacagagagagaccctgtctcaaaaaaaaaaaaaaaaaaagggaaaagaaaacacaacccaaactagagtctgagcaaatacagcacctacacatttattcacaaatgttacattgtaacattctggataaaatttctatttatatgatcatagcttttcttgaaaaatttttgaatgcttcaaaatgacaaaaagaactgcatttatttaacaactttggaatcctataagggattacatgtgagctggccctcaagccaggggtgatgatagtaagccatttatctttaatcagaaagccagagcattattmgtatgctgcagagtttaca

SEQ ID NO: 50705 - DNA, 626 bp, Homo sapiens
ttgcaaacccacaccctcgctgcgctgtgcaaagcaaacagccggggcttccaggagccccagatccttggtacctagaaaaacgataacttgactagtgctccctacgacaaaggaaggtgatacaaaaacagaagtcaagaggcacacacgtgtggcgttagatacagacagagcagtccagccctggggggtgtaaggtacagacaaagcagtccagtcctggggggtgttagatacagacagrgcagtccagccctggggttgccctctgcagcagggaggtgactgcttcctgctcacagatctcaatgtggtcagcgtgggtttgtggggtggttttcctgctctgcatagtggggtgggccagattgcggggaggtgtgggaagggcacttgtagggggagggtggtataagggactcggcttggagtgtcagtgcatgctgcagacaggcactccatgatcctgagacccttctgcctctgggcgtgagaacagtcttgtcatccacactgagatgccaatgaccccgacgcaggcaggtcccagggaggacaaagcaggaagggcacgcagatggctgcatgaaggccccgtccttcccccgctattaagggagtta

SEQ ID NO: 50706 - DNA, 626 bp, Homo sapiens
ttgcaaacccacaccctcgctgcgctgtgcaaagcaaacagccggggcttccaggagccccagatccttggtacctagaaaaacgataacttgactagtgctccctacgacaaaggaaggtgatacaaaaacagaagtcaagaggcacacacgtgtggcgttagatacagacagagcagtccagccctggggggtgtaaggtacagacaaagcagtccagtcctggggggtgttagatacagacagagcagtccagccctggggttgccctctgcagcagggaggtgactgcttcctgctcacagatctcaatgtggtcagcgtgggtttgtggggtggttttcctgctctgcatagtggggtgggccagattgcggggaggtgtgggaagggcacttgtagggggagggtggtataagggactcggcttggagtgtcagtgcatgctgcagacaggcactccatgatcctgagacscttctgcctctgggcgtgagaacagtcttgtcatccacactgagatgccaatgaccccgacgcaggcaggtcccagggaggacaaagcaggaagggcacgcagatggctgcatgaaggccccgtccttcccccgctattaagggagtta

SEQ ID NO: 50707 - DNA, 562 bp, Homo sapiens
attttttggaaacatttttaacttatattcttaattcctatgtattttataagcaacttagacattcttttgaacaagacagggtctaatattttgtttttaacatatatgtttttattatacatataatatattacatgtttttattatacatataatatatgtatttaacatataacaaaattaattcaaggtgaattaattttatctgtttatgagacagagatgtgaaataaactaatcgtgaatcaytttccattttacttttatttcatgcatattaagaataaaactgggaagtcccaggcagagcaattgggcaagagaaataaagggcatccaaatttaaaagaggaagtcaagctatctcttcaccaatgatatgatcttatacctagaaaaccccaaagactcttacaaaacactcctagatttgataaataaattcagtaaagtctcagaggttacaaaataaatgaataccaatcagtggcacaactatacaccaaatacaaccaagctgagagtcatatcaagaacccaatctcttttacaatggctg

SEQ ID NO: 50708 - DNA, 557 bp, Homo sapiens
ggaatggatttgggagggaaagaaagacagaaagagcagcactagatgctgcagggggtgggcagggcaggtcctgctcgggaccacaggagttcctgcaggaatagcccagtaccatgtgatatggctagagggtcttgaagcaaacccagtccatttcacaattcagccttgggccagagcagagccactgatgtccttccttcccacagcccagagagcacctttaattcacatacttgccttttctcacgcgggagggawtgtgaatgctacctgtgtctgcctccttttcccgaaacgaagctcacagcttggtgctcaggctaattatttgactaggactgtaaatcctaacagttactgtggagttaacatcattgaaaaattgagcagtttagctgcaagaaatctataacctactttgtgctcagcctctaagcaataagagcccaccgacaattctaagtagtagtgctgacccttttcttagagttttaggtaaggagatttaaaagcttctcttttcagtcttttacttccttatttccaggaaa

SEQ ID NO: 50709 - DNA, 554 bp, Homo sapiens
tatctattctgttccattcatctgtctttttttgtaccaggaccaagctgttttgcttactgtagccttatagtatagtttgaagttgggtagtgtgatgcctccagctttgttctttttgcttaggattgctttagctattcgggctgttttttggttctatatgaattttagaatagttttttctagttctgtgaaaaatgacattggtagttatagcattaaatctttaaactgctttgggcagcatggtcattttaacaatattgattcttccaatccatcagcatggaatttttttttatttatttgtgtcatctgtgatttcttccagcagtggttggcagttcyccttgtagagatcttttttctttttcacattatggaacctttacttttcatgtgatttctgtacataaggagtatgagagtaaccctttcacaaatgaaactaatctactagaataaacaatgacaaaactgaactggtatttgatgtaaatccacaggcgtttaagcttcaaattcagcatctgattcttctgagatctttc

SEQ ID NO: 50710 - DNA, 1920 bp, Homo sapiens
tggataaatttgatatatgtgatattatttgtctttggtaattttgtaaagacttttaaactgtttttaacattcaaaaggaaagacacatctctctcttttaatgtagaaggtcagtcttggttatttacagcatacatgggrggccttatctgattctccaatccctggaaaaatagagttgaatgctcatttgatcctattccacatgctactggtttccctcctgttcaccctgctccagccttgaggatgttcttgccgaaatatcaccatccaaagctctttctctatcaggcttttgcatttgctgttcccttttccacatcttctcaaggctggatcttctttagttttcagcaaaatgtgaactctgtgaagaggcctccctgaccactcaattagccactgccccatgactagttttttttttttaactttcttaaagtgctttaacttcctcaagcccttattattattctttgagtgcattttgattatttgtttcttgtttatcatctagaagtagatgacaacttcatgacaacaggaacataatcctcatgagggcaggcattttactagtattgttcacgattactctcccactcccatgtcaaattctgtgctgtaataggcattcaataaataatggaatgaatgaacgacagacaaatgtcacacatcatgccacctgatgttataacatccaatgttgataaccgaacagaagcaaaattaaaggccatgagatattggaatggtcacactgattaaaggctttgtgggctacacctcattgcacacatttatcaatgactgaattaaggtgatatttagcagtttgatattacctatgaaaacaaaccaaatggatgtagcatgctttctttttttgaaacatatttaataattgatttcaatcattttcaatctgaattttaatatacttttaacaacagatttcatagtttggtcttgtttttcttgtttgtttagtgactcgtttacttgagcattaatattaagccagttctttgtgtagttatatatagaagtagccatcaactcccaagcaccaactccaggccagttcaaatacggaagactcacttgaattcctgcatctcaatgatggtacagcctggagcccttctgtcctccataccaataggcagttacagctgatttggttgtttggcagcgaatctctgtcctgctgccttcaagctgccatttcatttcttcaatatggagacaggaaatgtggcttaccatcagcaacaagctagtagtaatcatcctcatggaagacacaaaaacgtttgtcaagagggtccaaagtttgtagctggtgagaatgtacaggaaagaaggaaggaaggaagagagggagggagggtggaagagacagagggagggtggaagaaagggaggaaggaaggaaagagggagggagtaagagagtaagagagagagcctgagaaagatagaggtggattccacacataccagcaaaacaaactcatgaggtagaactttttagcatttaagctttgaccagcatccagatgattttcttttcttttttttttttttttgagacacagtcttgggccatctcccaggctggagtgcaatggcgcgatcttggctcactgcaaccccctcctcctgggttcaagcgattctcctgcctcagcctcccaagtagctgggattacaggtgcctgccaccaagccgggccaccacgccatcacttctccatgttggccagcctggtctcgaactcctgacctcagtttatccacccgcctcagccttccaaagtgctgggattacaggcgtgagacaccgcacctggcctcaagtgattttcaaatgtactcagcaatgcaaaactatcgtcccgaattctt

SEQ ID NO: 50711 - DNA, 1920 bp, Homo sapiens
tggataaatttgatatatgtgatattatttgtctttggtaattttgtaaagacttttaaactgtttttaacattcaaaaggaaagacacatctctctcttttaatgtagaaggtcagtcttggttatttacagcatacatggggggccttatytgattctccaatccctggaaaaatagagttgaatgctcatttgatcctattccacatgctactggtttccctcctgttcaccctgctccagccttgaggatgttcttgccgaaatatcaccatccaaagctctttctctatcaggcttttgcatttgctgttcccttttccacatcttctcaaggctggatcttctttagttttcagcaaaatgtgaactctgtgaagaggcctccctgaccactcaattagccactgccccatgactagttttttttttttaactttcttaaagtgctttaacttcctcaagcccttattattattctttgagtgcattttgattatttgtttcttgtttatcatctagaagtagatgacaacttcatgacaacaggaacataatcctcatgagggcaggcattttactagtattgttcacgattactctcccactcccatgtcaaattctgtgctgtaataggcattcaataaataatggaatgaatgaacgacagacaaatgtcacacatcatgccacctgatgttataacatccaatgttgataaccgaacagaagcaaaattaaaggccatgagatattggaatggtcacactgattaaaggctttgtgggctacacctcattgcacacatttatcaatgactgaattaaggtgatatttagcagtttgatattacctatgaaaacaaaccaaatggatgtagcatgctttctttttttgaaacatatttaataattgatttcaatcattttcaatctgaattttaatatacttttaacaacagatttcatagtttggtcttgtttttcttgtttgtttagtgactcgtttacttgagcattaatattaagccagttctttgtgtagttatatatagaagtagccatcaactcccaagcaccaactccaggccagttcaaatacggaagactcacttgaattcctgcatctcaatgatggtacagcctggagcccttctgtcctccataccaataggcagttacagctgatttggttgtttggcagcgaatctctgtcctgctgccttcaagctgccatttcatttcttcaatatggagacaggaaatgtggcttaccatcagcaacaagctagtagtaatcatcctcatggaagacacaaaaacgtttgtcaagagggtccaaagtttgtagctggtgagaatgtacaggaaagaaggaaggaaggaagagagggagggagggtggaagagacagagggagggtggaagaaagggaggaaggaaggaaagagggagggagtaagagagtaagagagagagcctgagaaagatagaggtggattccacacataccagcaaaacaaactcatgaggtagaactttttagcatttaagctttgaccagcatccagatgattttcttttcttttttttttttttttgagacacagtcttgggccatctcccaggctggagtgcaatggcgcgatcttggctcactgcaaccccctcctcctgggttcaagcgattctcctgcctcagcctcccaagtagctgggattacaggtgcctgccaccaagccgggccaccacgccatcacttctccatgttggccagcctggtctcgaactcctgacctcagtttatccacccgcctcagccttccaaagtgctgggattacaggcgtgagacaccgcacctggcctcaagtgattttcaaatgtactcagcaatgcaaaactatcgtcccgaattctt

SEQ ID NO: 50712 - DNA, 1920 bp, Homo sapiens
tggataaatttgatatatgtgatattatttgtctttggtaattttgtaaagacttttaaactgtttttaacattcaaaaggaaagacacatctctctcttttaatgtagaaggtcagtcttggttatttacagcatacatggggggccttatctgattctccaatccctggaaaaatagagttgaatgctcatttgatcctattccacatgctactggtttccctcctgttcaccctgctccagccttgaggatgttcttgcygaaatatcaccatccaaagctctttctctatcaggcttttgcatttgctgttcccttttccacatcttctcaaggctggatcttctttagttttcagcaaaatgtgaactctgtgaagaggcctccctgaccactcaattagccactgccccatgactagttttttttttttaactttcttaaagtgctttaacttcctcaagcccttattattattctttgagtgcattttgattatttgtttcttgtttatcatctagaagtagatgacaacttcatgacaacaggaacataatcctcatgagggcaggcattttactagtattgttcacgattactctcccactcccatgtcaaattctgtgctgtaataggcattcaataaataatggaatgaatgaacgacagacaaatgtcacacatcatgccacctgatgttataacatccaatgttgataaccgaacagaagcaaaattaaaggccatgagatattggaatggtcacactgattaaaggctttgtgggctacacctcattgcacacatttatcaatgactgaattaaggtgatatttagcagtttgatattacctatgaaaacaaaccaaatggatgtagcatgctttctttttttgaaacatatttaataattgatttcaatcattttcaatctgaattttaatatacttttaacaacagatttcatagtttggtcttgtttttcttgtttgtttagtgactcgtttacttgagcattaatattaagccagttctttgtgtagttatatatagaagtagccatcaactcccaagcaccaactccaggccagttcaaatacggaagactcacttgaattcctgcatctcaatgatggtacagcctggagcccttctgtcctccataccaataggcagttacagctgatttggttgtttggcagcgaatctctgtcctgctgccttcaagctgccatttcatttcttcaatatggagacaggaaatgtggcttaccatcagcaacaagctagtagtaatcatcctcatggaagacacaaaaacgtttgtcaagagggtccaaagtttgtagctggtgagaatgtacaggaaagaaggaaggaaggaagagagggagggagggtggaagagacagagggagggtggaagaaagggaggaaggaaggaaagagggagggagtaagagagtaagagagagagcctgagaaagatagaggtggattccacacataccagcaaaacaaactcatgaggtagaactttttagcatttaagctttgaccagcatccagatgattttcttttcttttttttttttttttgagacacagtcttgggccatctcccaggctggagtgcaatggcgcgatcttggctcactgcaaccccctcctcctgggttcaagcgattctcctgcctcagcctcccaagtagctgggattacaggtgcctgccaccaagccgggccaccacgccatcacttctccatgttggccagcctggtctcgaactcctgacctcagtttatccacccgcctcagccttccaaagtgctgggattacaggcgtgagacaccgcacctggcctcaagtgattttcaaatgtactcagcaatgcaaaactatcgtcccgaattctt

SEQ ID NO: 50713 - DNA, 1920 bp, Homo sapiens
tggataaatttgatatatgtgatattatttgtctttggtaattttgtaaagacttttaaactgtttttaacattcaaaaggaaagacacatctctctcttttaatgtagaaggtcagtcttggttatttacagcatacatggggggccttatctgattctccaatccctggaaaaatagagttgaatgctcatttgatcctattccacatgctactggtttccctcctgttcaccctgctccagccttgaggatgttcttgccgaaatatcaccatccaaagctcttyctctatcaggcttttgcatttgctgttcccttttccacatcttctcaaggctggatcttctttagttttcagcaaaatgtgaactctgtgaagaggcctccctgaccactcaattagccactgccccatgactagttttttttttttaactttcttaaagtgctttaacttcctcaagcccttattattattctttgagtgcattttgattatttgtttcttgtttatcatctagaagtagatgacaacttcatgacaacaggaacataatcctcatgagggcaggcattttactagtattgttcacgattactctcccactcccatgtcaaattctgtgctgtaataggcattcaataaataatggaatgaatgaacgacagacaaatgtcacacatcatgccacctgatgttataacatccaatgttgataaccgaacagaagcaaaattaaaggccatgagatattggaatggtcacactgattaaaggctttgtgggctacacctcattgcacacatttatcaatgactgaattaaggtgatatttagcagtttgatattacctatgaaaacaaaccaaatggatgtagcatgctttctttttttgaaacatatttaataattgatttcaatcattttcaatctgaattttaatatacttttaacaacagatttcatagtttggtcttgtttttcttgtttgtttagtgactcgtttacttgagcattaatattaagccagttctttgtgtagttatatatagaagtagccatcaactcccaagcaccaactccaggccagttcaaatacggaagactcacttgaattcctgcatctcaatgatggtacagcctggagcccttctgtcctccataccaataggcagttacagctgatttggttgtttggcagcgaatctctgtcctgctgccttcaagctgccatttcatttcttcaatatggagacaggaaatgtggcttaccatcagcaacaagctagtagtaatcatcctcatggaagacacaaaaacgtttgtcaagagggtccaaagtttgtagctggtgagaatgtacaggaaagaaggaaggaaggaagagagggagggagggtggaagagacagagggagggtggaagaaagggaggaaggaaggaaagagggagggagtaagagagtaagagagagagcctgagaaagatagaggtggattccacacataccagcaaaacaaactcatgaggtagaactttttagcatttaagctttgaccagcatccagatgattttcttttcttttttttttttttttgagacacagtcttgggccatctcccaggctggagtgcaatggcgcgatcttggctcactgcaaccccctcctcctgggttcaagcgattctcctgcctcagcctcccaagtagctgggattacaggtgcctgccaccaagccgggccaccacgccatcacttctccatgttggccagcctggtctcgaactcctgacctcagtttatccacccgcctcagccttccaaagtgctgggattacaggcgtgagacaccgcacctggcctcaagtgattttcaaatgtactcagcaatgcaaaactatcgtcccgaattctt

SEQ ID NO: 50714 - DNA, 558 bp, Homo sapiens
cagttccagttagtgtctaaaataagaaaaatatttatttatatcttacttagagaacttagaaggggtacatatctcatttaacatttccattttgtattagcaaacacagttttaaatttagagattctaataaagaagttcatttcaggtatgtaaatgttatcccatgtaaaaacattctaacattcagttttcgtggcatatggaaatgctctttcagaaagctatgtaaaacattttgaaaaatccatttaataacatgaaaatatatgctgaaaagtgattgatgtcttctactttggcactgctgcttactcagagtcaattgatataaattctatctgtgaacattcaagtttaacttcatttggaatactatcaaatagattagactgaataaaaggtaggaaacaataccaatrtgcaaagcagtggcacatctgtaaatgatgacattatattacaggcttaataaaccgtttcatttcattttagctttagatgcaatacttcatatggctcaaagtaaattattgaatcctggtaacaaggaaa

SEQ ID NO: 50715 - DNA, 591 bp, Homo sapiens
aaatgaaatattattcagctttttttaaaaaaggaaaattttgcaatacacgacaacatggataaacctggaggtaacacaagccagtcacaggacaaatactgcgtaatgccacttagatgagatatttaaaatagtcaaactcataaaagcagagaacaaaacagtggtcaccaagggcaggagagaagggaaatagaaagttgctgttcaatgggtagaatgtttcagtaatgcaagatgagtaagttctagggatctgctatacaacattgtacctatagctaacaatattttgttgtacccttaaaaatctgttaagatacctttgggactaagaggaattcaacagaggaggggtactcgggttttttgtaatacgttatttcttaaagcagatgatgggtacaagcatattcattaaatcattatttagatacaaacctaatatttaatcattcattttatttaagagggggtgaccagattaygagtgatttgaaatccagagatgttgcatttgataagtagacaacagggagtcactttacaccatgatgtagaaaactcaggaacagctgtaagcagagt

SEQ ID NO: 50716 - DNA, 591 bp, Homo sapiens
aaatgaaatattattcagctttttttaaaaaaggaaaattttgcaatacacgacaacatggataaacctggaggtaacacaagccagtcacaggacaaatactgcgtaatgccacttagatgagatatttaaaatagtcaaactcataaaagcagagaacaaaacagtggtcaccaagggcaggagagaagggaaatagaaagttgctgttcaatgggtagaatgtttcagtaatgcaagatgagtaagttctagggatctgctatacaacattgtacctatagctaacaatattttgttgtacccttaaaaatctgttaagatacctttgggactaagaggaattcaacagaggaggggtactcgggttttttgtaatacgttatttcttaaagcagatgatgggtacaagcatattcattaaatcattatttagatacaaacctaatatttaatcattcattttatttaagagggggtgaccagattatgagtgatttgaaatccagagatgttgcatttgataagtagacaacagggagtcactttacaccatgaygtagaaaactcaggaacagctgtaagcagagt

SEQ ID NO: 50717 - DNA, 563 bp, Homo sapiens
ttatccatcaaacatgcaccatgcgtgctgtgctgggtgttgagggaaatcctgatcttctcagctgacatttccttcccagtagggatgcatccattagcgtaacatccccagcctcctgctgctgctctctcacttctcaagggaggtgaggttatttatccaaccgatgagtttggaaggagaaatgaaacatgagcagcttagccccttccagtctccctcctgagagcttgctggccaaggagaaccaacactctcttcttctcagcaccctaagtttacaagtgcaggcacccacatgggaagcctacggctggttagtactgtctgtgacagagtgttcagtctaattctgggatgctatattaagaagttcattgttactgcatatgtaagtcatcycccccaagccagtttgtgttagtaataaagtttatatacttacatataaactttatatgcacatgcatatacacacacacatttattgtgcaattggctctgaattggttctcaggcaggaaaaggtggtattcttttattggatcccttcagaccca

SEQ ID NO: 50718 - DNA, 563 bp, Homo sapiens
ttatccatcaaacatgcaccatgcgtgctgtgctgggtgttgagggaaatcctgatcttctcagctgacatttccttcccagtagggatgcatccattagcgtaacatccccagcctcctgctgctgctctctcacttctcaagggaggtgaggttatttatccaaccgatgagtttggaaggagaaatgaaacatgagcagcttagccccttccagtctccctcctgagagcttgctggccaaggagaaccaacactctcttcttctcagcaccctaagtttacaagtgcaggcacccacatgggaagcctacggctggttagtactgtctgtgacagagtgttcagtctaattctgggatgctatattaagaagttcattgttactgcatatgtaagtcatcccccccaagccagtttgtgttagtaataaagtttatatacttacatataaactttatatgcacatgcatatacacacacacatttattgtgcaattggctctgaatyggttctcaggcaggaaaaggtggtattcttttattggatcccttcagaccca

SEQ ID NO: 50719 - DNA, 508 bp, Homo sapiens
ggtagagtcagtaggtgaggagaatgcaaaagtctgaaaaatagctcaaagatcaatcttaggttttataatagtgatgttatctacaggagcaaggtaggggtggtgtttcaaatcttgtgacctctggctacaggactctggctagttatcatttaaccatgcctacatcttggcagaattaaggcccctcccataattttaatgctgtggccttttattagccttacaaagatggtctgggtccctgaacaaggagagggtcagtattgggaaggaattattattctccttgattaaacatcaaattgtaagccagatttctcccatatttagctttgccaacattcagcaatgagcaagggcagkaagcttgtgaggttagaagcaagatagagtttgtttatgctagattcctcccactgttacaatagttgcaaagcggatttctgtggagctttctataattgttaggcatcttgaaggtaccgtttccaatttagatctt

SEQ ID NO: 50720 - DNA, 587 bp, Homo sapiens
aaatgtaaatggccattgaagctgcaaaagcccggggaattagacacaaagctattgtttggaattttataggtgatggttaaagaccattcaaataatccaaagatgtgtaaatctggcaactatgatccaggtaccaaagtctgaaacagatgtagaacctacaaaggaagctgtagaaaatgcagaaaggataggataatatgattctcaaaggagtggaagttttgatacgacgtagaatacttgtgtgaaagtkctgttgtgaatctagagaatgaaaaccctattttctcacttcaactatttggatttgaaaatataatcagttctaggtacattttaatgtgataatttcaatgaccaatgaatgtcagaagcagggagaaatagaagcaaacactgggtagaatttaataactaggcttattttaaatattattaactagaaaaggctaaaagttttgaataaccactgatactaccaatgcataataatgccactaaatcaaataactttttctttgtcctctaaaattattaaaacaaagatttcaagtgacaaatgaaagtgcctttgcaaaaat

SEQ ID NO: 50721 - DNA, 587 bp, Homo sapiens
aaatgtaaatggccattgaagctgcaaaagcccggggaattagacacaaagctattgtttggaattttataggtgatggttaaagaccattcaaataatccaaagatgtgtaaatctggcaactatgatccaggtaccaaagtctgaaacagatgtagaacctacaaaggaagctgtagaaaatgcagaaaggataggataatatgattctcaaaggagtggaagttttgatacgacgtagaatacttgtgtgaaagttctgttgtgaatctagagaatgaaaaccctattttctcacttcaactatttggatttgaaaatataatcagttctaggtacattttaatgtgataatttcaatgaccaatgaatgtcagaagcagggagaaatagaagcaaacactgggtagaatttaataactaggcttattttaaatattattaactagaaaaggctaaaagttttgaataaccactgatactaccaatgyataataatgccactaaatcaaataactttttctttgtcctctaaaattattaaaacaaagatttcaagtgacaaatgaaagtgcctttgcaaaaat

SEQ ID NO: 50722 - DNA, 569 bp, Homo sapiens
cgcgcctggcgattttgctcattttagatactagaactttttaatttaaaattttttttttcctgagatggagtctttgtctccaggctggagtgtagtsgcgtaatctcggctcactgcaacctccgcctcctgagttcaagcgattctcctgcctcagcctgccagagttgctgggactacaggtgcgcaccaccacacccaggagttcaaggctgcagtgagccatgatcgtaccactgcactccagcctgggcaacacagcgagaccctgactccacaaataaataaatcaacatcatatgatctgtaccagggtataggcaggtgctatgatccccacttttcatcctcaactctaagttgagtcatacatcaacctctagtaaaaagtggcatgctctcagtcaaaggggtaagcccaaaccacgtggagagaatcttatctcttttgagagctaatataaaaagaattcctcctaggcataaaaatattgtgacatcagttacttaggctaaacatgcctattatgctaagtgagttattaacaataaatactttaactctg

SEQ ID NO: 50723 - DNA, 569 bp, Homo sapiens
cgcgcctggcgattttgctcattttagatactagaactttttaatttaaaattttttttttcctgagatggagtctttgtctccaggctggagtgtagtggcgtaatctcggctcactgcaacctccgcctcctgagttcaagcgattctcctgcctcagcctgccagagttgctgggactacaggtgygcaccaccacacccaggagttcaaggctgcagtgagccatgatcgtaccactgcactccagcctgggcaacacagcgagaccctgactccacaaataaataaatcaacatcatatgatctgtaccagggtataggcaggtgctatgatccccacttttcatcctcaactctaagttgagtcatacatcaacctctagtaaaaagtggcatgctctcagtcaaaggggtaagcccaaaccacgtggagagaatcttatctcttttgagagctaatataaaaagaattcctcctaggcataaaaatattgtgacatcagttacttaggctaaacatgcctattatgctaagtgagttattaacaataaatactttaactctg

SEQ ID NO: 50724 - DNA, 569 bp, Homo sapiens
cgcgcctggcgattttgctcattttagatactagaactttttaatttaaaattttttttttcctgagatggagtctttgtctccaggctggagtgtagtggcgtaatctcggctcactgcaacctccgcctcctgagttcaagcgattctcctgcctcagcctgccagagttgctgggactacaggtgcgcaccaccacacccaggagttcaaggctgcagtgagccatgatcgtaccactgcactccagcctgggcaacacagcgagaccctgactccacaaataaataaatcaacrtcatatgatctgtaccagggtataggcaggtgctatgatccccacttttcatcctcaactctaagttgagtcatacatcaacctctagtaaaaagtggcatgctctcagtcaaaggggtaagcccaaaccacgtggagagaatcttatctcttttgagagctaatataaaaagaattcctcctaggcataaaaatattgtgacatcagttacttaggctaaacatgcctattatgctaagtgagttattaacaataaatactttaactctg

SEQ ID NO: 50725 - DNA, 536 bp, Homo sapiens
agccctctagataacttttgtttctttccccaacagagtagagcttggcacatgggcttgtgggcagaaaatgtgttttagaaactggttccaaccaaggagagtataggactaggaagaataaacaggaaaggaaggaaagtccatccacagttgcattatcaaggggatccctgctctgagcaattgggtttaatcttgctgggagccatatatgtaaccatgttgaaagccacttaaaagtatccatcaaggaaatggaagagggtaatattttttctagcagcttacatccctttggttgccacatgcaacgtcaccccagatttttctgtgcccttttccagtcaactccccttttcctcaaagcaactattttgatatcttgcactataaattagttttgcttgttctggaaattcacttaaatggaatcaaaggtatgtacttttgtatctggcttctctgttcagcrtgaagtttttggaatttatccatgctgctttatgcatacttaatttggcttttctattgat

SEQ ID NO: 50726 - DNA, 1428 bp, Homo sapiens
agggctgactgtacatcaaatttaactagaatttttaggtgcaaattcaactttgtacttacgtaaaagatcctgactcagaatcctttcattggaatcagaattgccatgagatacattaactggttctcctgatttgcttgagcagatgagaataagactcagaattttgctttctggttatcctccttttaatgactaaatttggtttacagataatattgctgattaaaagtgtaaatgatgaaatctgggctattcatagggaagaaataattctttattctctgaaccaaatatatgttgttttttttttaatattcaaattcattgctgtgaaaaagatgggaggtcatttttccctttggaaaaaaggctctattttatattaaaagcaaaactttcgatatttaatcaatggagaaattatttaactaaaaagatgggcatttttctagggtctggcagtagcatcagcatcccctcagagctcgttagaaatgcacattactgaagtacattccagacttggagccagaatcttgagaggggcacccaggattcagggttttaagatgccctgcaaatggttgcatgccgaaatgagaaagccactaatttagaatgagttttttaagctgagcttaattatggccaatggatgcatcacttcctaaacttcatgcatcttacgtttggaactaagccttggttacaaaatatatagtgttgtgttgattttgcacattgttggatggtttaaatgtttctttatgaaaatgacattttaactttgaaaccatagtagaaacttattttgacaagttttaaataccgaattaaaatatccctgttctttcattatatgctctaaactgcttatttaatacacaataacaatatcaattataatttatatgattactaggacatagtttttcttaacattcttcagtgaattttgttaaaagtaatagcatttatattaacccattagcccacattaattcagtattaatgaagaacatgattttaattggaaaagagtccagaacatcctccttttttacattgttttttcagttcttttggcacgactaaaagacatccagaagttcccattttaccgtttttttttttttacctgtctttgacccttttattrtctggatctgctgatttgctcgagcagatgaaaataagactcagaagtttgctttctggttatcctttctcagatgtctccataaatattgccatgagaagcagagcccaaattgtggttcagatttttgtcctgcattgttgtaaggtggctttttgcttactgaaaaatgttaacatttaacatttaaaccttatctgtatgcctgcctgcctgcctgcctacctgcctgcttgattaccagctaacctacctacctacct

SEQ ID NO: 50727 - DNA, 568 bp, Homo sapiens
tccttcttcctgaatggctgaaaaatcattccatgcatttgaaaccactggaggagaaatgaacttaagccatggcaagaaagcacagttagatttaaggcgtgaacgtcagcrttcaaggtaatggaaaccttggtagccctgtagatagattttcaagagagactgtgaaatcctcaagtcaattaatagaagaatatttttcacaatagcaaagacttggaaccaacccaaatgtccaacaatgatagactggattaagaaaatgtgaatgctagatgacgagttagttggtgcagcgcaccagcatggcacatgtatacatatgtaactaacctgcacattgtgcacatgtaccctaaaacttaaagtataataataaataaataaataaataaaaatagaagaatatttttattaattcaattcaggttcaaaattattattgggcgcctaccatgtgccagcccccatgtggtgccctgcaaggctctaaggataccaagatgaataaacacaaccactgctcaggaggaatttacaacccaagggaggaaacaggagctca

SEQ ID NO: 50728 - DNA, 1677 bp, Homo sapiens
agcctccccagtacctgggactacaggctcatgccaccacacccagctaagttttttttttgtttgtttgtttagagacagggtcttgctatgttgcccaggcttgtcttgaatttctggcctcaaatgatgcccccaccgtggcctcccaaagtgttaggattacagatgwgaaccaccatacccagccctcactgtagttttattcttttcttacgtattgcttttctgacatcaactctctcaaatatttatttatctttaaatattacatttttttttagtaagctgactcaaacctttatgggccacagtgttggggctcagaaaacaataccctaaaatatggtgctttggcatggtgaaccaaggtctctctctgagcttcctctgcccacctgtctcctgatctttctttaccaaagcactaggaggggctttctctgaagttcccttcaaagaacttctgattaagggaagttcttccagaagaaaggcaacgatcttaaaactccttctctagaaatcacatcaaatatccagaaacaattaaccaccagagagaagacttaaagtcataaccatgcccagacagacttttcatctattcttctgaggacagctttgagagattacctggagactttagctgcataatgagacaacctttgttccatggtagttctgccccataccttcctgtaattcaccaccacctcccacaacgctcagaaaaactctgtcccaggccaattgtaggccaattgtctattattggggctcatttatttcccctaaaaatcatttactacccctctaaattgcctacacccctgtctctctctcccctgtgaagacgtgccacttaagcctcagtcacctgggccttctttgagtctcatattttttatgattctgtgcttattcacatgaataaatttctatgccttttctcctgttaatctgtctactgtcagttcatttcagcaccaaacttcagaaggtggaaacaaagtttttcctttgctgttaaaatagtttatatgaatagattctaaaacatacattgagttgtcatcactgttgaaacttggtctcacttctgccctctagggccacatcaaacctgttcaatcctgtgttgatttgaaagctggctatatgttaaccctaagcttttcctgggtgattcctggtgagtaaaaaaaaattattattattatttttgagactgggtctcactccgttgcccaggctgggatacagtggcatgatcttggctcactgcaaccttcacctctcaggttcaagcagttctcctgcttcagtctccctgtagcaggacaagccacagacaaaacccctcagacgctgagttaaagaaggaagggctttattcagctgggagcttcggcaagactcacgtctccaacaaccaagctccctgagtgagaaattcctgtcccttttaagagctcacaactctaagggggtctgcgtgagagggccatgatcgattgagcaagcagggggtatgtgactgggggctgcatgcaccagtaattagaatggaacagaacaggacagggattttcacagtgcttttctatacaatgtctgtaatctatagataacataaccaattaggtcaggggtctatctttaactaccaggccc

SEQ ID NO: 50729 - DNA, 1677 bp, Homo sapiens
agcctccccagtacctgggactacaggctcatgccaccacacccagctaagttttttttttgtttgtttgtttagagacagggtcttgctatgttgcccaggcttgtcttgaatttctggcctcaaatgatgcccccaccgtggcctcccaaagtgttaggattacagatgtgaaccaccatacccagccctcactgtagttttattcttttcttacgtattgcttttctgacatcaactctctcaaatatttatttatctttaaatattacatttttttttagtragctgactcaaacctttatgggccacagtgttggggctcagaaaacaataccctaaaatatggtgctttggcatggtgaaccaaggtctctctctgagcttcctctgcccacctgtctcctgatctttctttaccaaagcactaggaggggctttctctgaagttcccttcaaagaacttctgattaagggaagttcttccagaagaaaggcaacgatcttaaaactccttctctagaaatcacatcaaatatccagaaacaattaaccaccagagagaagacttaaagtcataaccatgcccagacagacttttcatctattcttctgaggacagctttgagagattacctggagactttagctgcataatgagacaacctttgttccatggtagttctgccccataccttcctgtaattcaccaccacctcccacaacgctcagaaaaactctgtcccaggccaattgtaggccaattgtctattattggggctcatttatttcccctaaaaatcatttactacccctctaaattgcctacacccctgtctctctctcccctgtgaagacgtgccacttaagcctcagtcacctgggccttctttgagtctcatattttttatgattctgtgcttattcacatgaataaatttctatgccttttctcctgttaatctgtctactgtcagttcatttcagcaccaaacttcagaaggtggaaacaaagtttttcctttgctgttaaaatagtttatatgaatagattctaaaacatacattgagttgtcatcactgttgaaacttggtctcacttctgccctctagggccacatcaaacctgttcaatcctgtgttgatttgaaagctggctatatgttaaccctaagcttttcctgggtgattcctggtgagtaaaaaaaaattattattattatttttgagactgggtctcactccgttgcccaggctgggatacagtggcatgatcttggctcactgcaaccttcacctctcaggttcaagcagttctcctgcttcagtctccctgtagcaggacaagccacagacaaaacccctcagacgctgagttaaagaaggaagggctttattcagctgggagcttcggcaagactcacgtctccaacaaccaagctccctgagtgagaaattcctgtcccttttaagagctcacaactctaagggggtctgcgtgagagggccatgatcgattgagcaagcagggggtatgtgactgggggctgcatgcaccagtaattagaatggaacagaacaggacagggattttcacagtgcttttctatacaatgtctgtaatctatagataacataaccaattaggtcaggggtctatctttaactaccaggccc

SEQ ID NO: 50730 - DNA, 1677 bp, Homo sapiens
agcctccccagtacctgggactacaggctcatgccaccacacccagctaagttttttttttgtttgtttgtttagagacagggtcttgctatgttgcccaggcttgtcttgaatttctggcctcaaatgatgcccccaccgtggcctcccaaagtgttaggattacagatgtgaaccaccatacccagccctcactgtagttttattcttttcttacgtattgcttttctgacatcaactctctcaaatatttatttatctttaaatattacatttttttttagtaagctgactcaaacctttatgggccacagtgttggggctcagaaaacaataccctaaaatatggtgctttggcatggtgaaccaaggtctctctctgagcttcctctgcccacctgtctcctgatctttctttaccaaagcactaggaggggctttctctgaagttcccttcaaagaacttctgattaagggaagttcttccagaagaaaggcaacgatcttaaaactccttctctagaaatcacatcaaatatccagaaacaattaaccaccagagagaagacttaaagtcataaccatgcccagacagacttttcatctattcttctgaggacagctttgagagattacctggagactttagctgcataatgagacaacctttgttccatggtagttctgccccataccttcctgtaattcaccaccacctcccacaacgctcagaaaaactctgtcccaggccaattgtaggccaattgtctattattggggctcatttatttcccctaaaaatcatttactacccctctaaattgcctacacccctgtctctctctcccctgtgaagacgtgccacttaagcctcagtcacctgggccttctttgagtctcatattttttatgattctgtgcttattcacatgaataaatttctatgccttttctcctgttaatctgtctactgtcagttcatttcagcaccaaacttcagaaggtggaaacaaagtttttcctttgctgttaaaatagtttatatgaatagattctaaaacatacattgagttgtcatcactgttgaaacttggtctcacttctgccctctagggccacatcaaacctgttcaatcctgtgttgatttgaaagctggctatatgttaaccctaagcttttcctgggtgattcctggtgagtaaaaaaaaattattattattatttttgagactgggtctcactccgttgcccaggctgggatacagtggcatgatcttggctcactgcaaccttcacctctcaggttcaagcagttctcctgcttcagtctccctgtagcrggacaagccacagacaaaacccctcagacgctgagttaaagaaggaagggctttattcagctgggagcttcggcaagactcacgtctccaacaaccaagctccctgagtgagaaattcctgtcccttttaagagctcacaactctaagggggtctgcgtgagagggccatgatcgattgagcaagcagggggtatgtgactgggggctgcatgcaccagtaattagaatggaacagaacaggacagggattttcacagtgcttttctatacaatgtctgtaatctatagataacataaccaattaggtcaggggtctatctttaactaccaggccc

SEQ ID NO: 50731 - DNA, 556 bp, Homo sapiens
acctctctttttctaggtataggtacacatcctgttggctctgttcccctgccaagatgggagccaatcaattccagcagaatgtgtggggcctcattcgaatgaatgtttgtgccctcttggcagacatggcgaattattcaagagcaggaagccagttcaggatggagcaaagtgttatccttgacttcttcctccagcttccgtccccatcaatctgtgtagtggccaacccttcccacttcccacatttactctctctcttactgctactccttaatccgagccatccatggaaatccccagccaatagcatgggacagttgayggtctaactctcagcattcatccctctcgttcccagcatttgctctatgcatcaggcatgcaaacccttccccactacttgtagagcccatgctcctttatacctcttgtatttcattcaccaaaaatctctaataagggctgactgtgtacaaccctgtgctaagggcggaacacgcagtcccaggtttcaaagagctcagaatctaagggaaagagaggcttggaa

SEQ ID NO: 50732 - DNA, 293 bp, Homo sapiens
cctcttttctttataaattatccagcttcggtattcctttattgcaacactaaacttactaagacagtgttttttgtatgctaatgaaaggactgttggctgggcaccttctgccccaccccgcaaatgactttctggtgaccaacccccatcctttttttttttttggctcatcagctctcattacgattaagatgccgggctcaggtaatccycccaggatgggggttggtcaccagaaagaccaaggcatgggtagagggttggaactttcagccccaccctccagcctc

SEQ ID NO: 50733 - DNA, 619 bp, Homo sapiens
ctgctttcaggtctgatcatctctctctgcttttttcagcacagagctgataccctgcaattcttggggctattggtggtctgtcctcatccacatatattttgggatttatggggataccttgtcacctagttttgtagtaaattttgcctgtggtattctggttttaaaatatagttgctctactcatttttatatggggatttrgagagattaaaaaattatatggctgctgttattattttcctaaaactctgctgagatctcttgagataaaatttatgtttgtaccacatcctgcacttattttgggctatcattttcactaatagtttgtggtttttttgcttctaaacagtttcaaattcttcaaattctttcctctcaaaagctgttattgctgatacctgtttctttttcttttagtccttctcctcttcctctcctacttcttttttcttcatttcttccaagaaaatgttctatccagtcacagttttttttttaacctgttccttaatcttcattcatttctatcaatttattctaaggacaagcgtctcactattgcttctgccttttgcagccattttgttatgctgaggcagctgctccaagg

SEQ ID NO: 50734 - DNA, 540 bp, Homo sapiens
tgcaatcatacatcactctgttacatggaaagacagaaaaaaagaaaaaaggccagcttggaatctgaagactgctttcaaataaaatcactgcctttcattaattcgttcattcattctgattcaaacttacagggatttatgtaccaaatgctttattaagggagaagaaaaggagcatgtctctaccctctggaggtctaggcaaggttacagatactaaactaataggctaacaaatatatatataattacagatagtgatgaatgttataaccggtgataaaagaggaagttggatagtaactttatatttaagcttaaacctgaagtgaaagagccagccacgatgagagagaagataagagcattaaacacagaagcaatagtatgtgccaaagtcttgaggcaaaaaatattttggtgtttgacaaactaaaaaatagttctatatagctatagtatagggagtgagagtgaaagtggtaggggatgcagtcaaagagataggaagagggcaggctatgcagrgcattgtat

SEQ ID NO: 50735 - DNA, 1574 bp, Homo sapiens
atgtgtgtttgtgaactggcgatgtgatcgagggcacgggtgctgggcttccccctcatgggtaaaaccagagctactgtatgccagccgtggaggcatggacggcccctgagctcggacagcagacggacagaccgttgacgcgttggcaccgtggccagagtccgttcaagaaaggtcggcagagagggctgagaacgcggcaggcacatcctccaagggccctgctggaacccctggagcaggaggaagcggtgattctccaggccttgggtagggctcagaggcaagaggggtggagctggggagggtcgggcagccccagcacctcaggctactgcgccttggtggggaactctcctgcggctgctgatgaacacccgggctctggtctcctgtagacttccgccccgggcacgggagcaaggggaggctgcaggcagctccgggggccttggcaggaagttgggagggtcgggacagtccctctggggtggcccaagcagggcacagggcagggagccaggctcttcggggccccaccccaggctggccctgcaccccatcctgccttctctccccactgtgggcccagaacttgccccgtgggggccgggaagcacccaccatccccacccctagctgctctcagccagagcccagctggacttgcaggattgattttccagcaaaaaacaacagcagagaaacccaagagcagctgcatgagccctcccaggcctacccccgcagccggcactccctgcagcaaagaaaaccatctggccactgggccctgagcccggcgcccggaggaggacctctgccccgctgagcagctctgctccccaggctggccctgggcctctcgcggcctgacccgctccccttggcatcaagcaccaggagggacggggtggcccggccagggcgtgggtgttccccggcccctctgagcaccagcacctggtgagtctacctccgcttccccaagcccttgaccactgccctggacagcctcagccgccccctgacccgaccttcaaacgggccaagggcttcccatgtagggtccgaaaacatccctgataggcaggacatgagacttgaacaatataaggttaggtgcatctgtaagcgcggcgcatggttaggcagccggaccctctggagcatgtgtaagcgcggcgcatggttaggcagccggaccctctggagcatgygtaagcgcggcgcatggttaggcagccggaccctctggagcatgtgtaagcgcggcgcatggttaggcagccggaccctctggagcatgtgtaagcgcggcacatggaaacagcggctcttctgggtggcctctctgctgccctttcttttttaaaccagctactgaccccgttggtcagtggtagcagtgtctgtaggatcccactgtggagggctcgccactcactatccaggtccctgatgcaagctggctccagctgggggtgcccactgtggggacgccggggccagccggggccagggctgtggacactggtgggacggagggtgtcgagcagccggactcaccc

SEQ ID NO: 50736 - DNA, 584 bp, Homo sapiens
aggcatgggctacaatgtttcctgttggacactatgctcagtactttgtgacagaagcatttgtactcaaaacctcagcattatgcaatatacccatgaaacaaacctgcacttgtacccccgatccagaataaaagttgaaaaacaaaaatattaaaattattttaaaaaaagagcagagcagctggagctctcagtcaatgtgcagtcagagatctggcaggtgtattctcaaagccatcacagatgmcaatacaaagtgcatttaagaatgtattactgaggccaggagcggtggctcatgcctgtaatcccagcactttgggaggccgaggcggatggatcataaggtcaggagatagagaccatcctggctaacaccgtgaagccccgtctctacaaaaaatacaaaaaaaaattagctaggcgtggtggcgggtgcctgtagtcccagctacttacgaggctgaggcaggagaatggtgcgaaactgggaggcggagcttgtagtgagctgagattgcaccactgcagtccagcctgggcgacagagcgagactcctcaaaaaaataaataaataaat

SEQ ID NO: 50737 - DNA, 584 bp, Homo sapiens
aggcatgggctacaatgtttcctgttggacactatgctcagtactttgtgacagaagcatttgtactcaaaacctcagcattatgcaatatacccatgaaacaaacctgcacttgtacccccgatccagaataaaagttgaaaaacaaaaatattaaaattattttaaaaaaagagcagagcagctggagctctcagtcaatgtgcagtcagagatctggcaggtgtattctcaaagccatcacagatgacaatacaaagtgcatttaagaatgtattactgaggccaggagcggtggctcatgcctgtaatcccagcactttgggaggccgaggcggatggatcataaggtcaggagatagagaccatcctggctaacaccgtgaagccccgtctctacaaaaaatacaaaaaaaaattagctaggcgtggtggcgggtgcytgtagtcccagctacttacgaggctgaggcaggagaatggtgcgaaactgggaggcggagcttgtagtgagctgagattgcaccactgcagtccagcctgggcgacagagcgagactcctcaaaaaaataaataaataaat

SEQ ID NO: 50738 - DNA, 545 bp, Homo sapiens
tgagattacaagtgtgaaccaccatggccagccttatttgtatttttaatcagccttatcaagttgaattggtctttaatctcgtataacagtaatttggagcagcattggttgggcggwgggtgggaaacatttaggaccctgtgggctacaactcgtagtgtgtgcacttattttattttattttgttttgttatattatattatattatatattatattatattatattatattatattatattatattatattatattatatttttttgagacagggtctcactctgtttcccagactggagtgcagtagcatgatcttggttcactgcaacctctgcctcccaacttcaagcgattctcctgcctcggcctccagagtagctggaactacagatgtgcaccaccacgcccagctaatttttgtatttttagtagagatggggtttcaccatgttggccaggctggtctcaaactcctgacctcaggtgatacacctgcctcagcctcccaaagtgctgggattatgcgcatgagccaccg

SEQ ID NO: 50739 - DNA, 549 bp, Homo sapiens
caacgtcagaaaagtcgaaggtaccctgcctcccgacgtacttgtgattcatcaatcaaaatacaagtgtgggatgaagaaccatcatcctgaacagcaaagctccctgctaaacctctcttcgtcgaccccgacacatcaggagtccwtgaacactggcacactcgcttccctgcgagggaggaccaggagatccaaagggaagaacaaacacagcaagagggctctgcttgtgtgccagtgatctcagtggaagtaccgacccacacgtaggggtgcacacacacacgcacacacacagacacacacataactacacccagaagcgcgcacgcaaacacacacacacccacacaaacacgaacaccgtcaatcctacataaactaatgaggagcccaagtttctgtctctacaacagggacaactggatagtgatggctacatctcaggatgagcccgcatatgggaaacatcaagttttggggtcgtgagtcttccgaacctctggagggactgtctgagtgtttgtgctcatgataggtgacatt

SEQ ID NO: 50740 - DNA, 586 bp, Homo sapiens
ttgcacagacttcctctgaaatctgaaaaggagcatctggaagaattgctgtagtaacatgactggagctgccatctctaaaatcatcaaytcaacattcccactatggctggttgtctcttgtcctcactgctactgcacatgttctttgactttaaaatatcttaaggtccttgaccttttaaaaatcttattcattggcttggcacggtggctcatgcctgtaatcccagcattttgggaggccacggcaggcggatcacttgaggtcatgagttcgagaccagcgtcgccaacatggtgaaaccccatatctactaaaaatacaaaaatcagccaggcatgatagcatgcgcctgtagtcccagctactcaggaggctgagtcaggagaatcacttgaacccgggaggagaaggttgcagtgagccaagatcacgccattgcactccagcctgggcaacagagtgagactccatttgaaaacaaacaaacaaaaaaaacaaaaaaccttgtttattatcttatttccaactttatctccttacctgtccatcctaaatctttacctatttcatgaccctctt

SEQ ID NO: 50741 - DNA, 640 bp, Homo sapiens
tttagccctgctgactgatatgcctggttatttwtgatcaaaagccagacattgatctaagagaaaaagtctttagatgggatctccctccaaagaaattgtagttttcttctggcttagaggtagatcttcttggtccaatcaggctgaaatgtcttgaggctagatttcagtttttgtggcagctggtgcatttctagtttgccttttcagctagggattagctttttaggggtctcaatgcctagggagatttctaggtcctctgttccttgttgaactccaattttgtctatccttttgctgagaggtctgcttaacttccttttagtcaggtagctccattttattctaagcttctttgttgctcaccttctgcaactaaagaatcagaaaatgccatgaaggaaaaacaaaatgaaattgttttgtttctactggccctttctcaagccctggccaccatgatagtcatgaattccaatctttgtctatgcaggcctataagatttctaaaatctctgagctacgattttcttcttggctatcagctcagcaaatgtatccaaatgaaaggttgtggagaatgttgaaatcacttcagtgtgtttctcttctttctgggagcttacacactcaa

SEQ ID NO: 50742 - DNA, 640 bp, Homo sapiens
tttagccctgctgactgatatgcctggttatttatgatcaaaagccagacattgatctaagagaaaaagtctttagatgggatctccctccaaagaaattgtagttttcttctggcttagaggtagatcttcttggtccaatcaggctgaaatgtcttgaggctagatttcagtttttgtggcagctggtgcatttctagtttgccttttcagctagggattagctttttaggggtctyaatgcctagggagatttctaggtcctctgttccttgttgaactccaattttgtctatccttttgctgagaggtctgcttaacttccttttagtcaggtagctccattttattctaagcttctttgttgctcaccttctgcaactaaagaatcagaaaatgccatgaaggaaaaacaaaatgaaattgttttgtttctactggccctttctcaagccctggccaccatgatagtcatgaattccaatctttgtctatgcaggcctataagatttctaaaatctctgagctacgattttcttcttggctatcagctcagcaaatgtatccaaatgaaaggttgtggagaatgttgaaatcacttcagtgtgtttctcttctttctgggagcttacacactcaa

SEQ ID NO: 50743 - DNA, 640 bp, Homo sapiens
tttagccctgctgactgatatgcctggttatttatgatcaaaagccagacattgatctaagagaaaaagtctttagatgggatctccctccaaagaaattgtagttttcttctggcttagaggtagatcttcttggtccaatcaggctgaaatgtcttgaggctagatttcagtttttgtggcagctggtgcatttctagtttgccttttcagctagggattagctttttaggggtctcaatgcctagggagatttctaggtcctctgttccttgttgaactccaattttgtctatccttttgctgagaggtctgcttaacttccttttagtcaggtagctccattttattctaagcttctttrttgctcaccttctgcaactaaagaatcagaaaatgccatgaaggaaaaacaaaatgaaattgttttgtttctactggccctttctcaagccctggccaccatgatagtcatgaattccaatctttgtctatgcaggcctataagatttctaaaatctctgagctacgattttcttcttggctatcagctcagcaaatgtatccaaatgaaaggttgtggagaatgttgaaatcacttcagtgtgtttctcttctttctgggagcttacacactcaa

SEQ ID NO: 50744 - DNA, 540 bp, Homo sapiens
caacattttaagctattatttggaacatttctattctttgttttatacttaagactgtgagccaagccaagaagacatttttgtattcccctgtctcctccctaccagtgttggaggaacgtcaacatgaaagaagaagggatattatttagggtggcctaaggggtaataagtaggattaatgggatgaaattgagcaaaggaaaatttaaagtgaacatcaggaacattttccgaagattgaaatcaatgatcctgtggaattaagatcccaggggaggttgtgggagccctattacttgaatcagttcraactagactgggctaaatatttgaatataatcctaccttggcagagagtaaacctgcaatagctggaagatggaaaaaatgacctaataggtcttttccatccctgacttctatgagtcatccaatgtatgctgttatgcgtcacacagccggccagacccaggtcattcactatacatttcagccacaaaatcctcagattctgactgagccccaactaaacggcta

SEQ ID NO: 50745 - DNA, 533 bp, Homo sapiens
tgagggaccagcattttgaattcagggtgaaaaatgaggaatatgcacgtatttcttgactcataaaaaaaattcatagacaaaaaaaaatttaagagtatatactttacaggattagtttgagaaagacactacccatagcaagagctaatatatgttatattccttccttaaaaayaataaataaaaaaatacatgtgaattacactgtcaagcccaatggggcccacaaaagaagatttcataaaatctagtcattgccttaattcccaaaactgctcttaacactgtactttgacttccagccttgtcattccctaatctttgtgtctttggtatccacactattggaaacacagatgtcagcttaatcttttcatgttacacatatgtccagtatttcagatcacacttgccaaaattagtgtgaaaaatctatttatgattacattaataagacaggtatcaaccctcctttgattaattattacagcagtaatgtgactgaaaaagtacatgccaagaaaagtggt

SEQ ID NO: 50746 - DNA, 533 bp, Homo sapiens
tgagggaccagcattttgaattcagggtgaaaaatgaggaatatgcacgtatttcttgactcataaaaaaaattcatagacaaaaaaaaatttaagagtatatactttacaggattagtttgagaaagacactacccatagcaagagctaatatatgttatattccttccttaaaaacaataaataaaaaaatacatgtgaattacactgtcaagcccaatggggcccacaaaagaagatttcataaaatctagtcattgccttaattcccaaaactgctyttaacactgtactttgacttccagccttgtcattccctaatctttgtgtctttggtatccacactattggaaacacagatgtcagcttaatcttttcatgttacacatatgtccagtatttcagatcacacttgccaaaattagtgtgaaaaatctatttatgattacattaataagacaggtatcaaccctcctttgattaattattacagcagtaatgtgactgaaaaagtacatgccaagaaaagtggt

SEQ ID NO: 50747 - DNA, 640 bp, Homo sapiens
ctttgaatcaaaatgtttagttatcctggaatctgccaaaatacatcttctccatctgtataataggagtgaaaggaatactcattgctggctgggcatctgtaatcccagcactttgggaggccgacgcaggcagatcacctgaagtcaggaattcgaaactagcttggtcaccatggtgaaatcctgtctctactaaaaatacaaaaaattagycaggcgtggtgatgggcatttgtaatcccagctacttgggaagctaaggtgggagaactgcttgaacccaggaggtggaggttgcagtgagatgagattgcaccactgcactacagcctggatgacaaagtgagactgcgtttccaaaaaccccaaaacaaacactcattgcccatcatttaagacgctgaaatgaagaagatcataacaaagcaaagcagttagataaatggaattattgtgagcatgttttgagatgttggcttgcatattgctatggatgatgtgcatgaagcttctggaagactgggctgctccatatagaggagaggctggccttttgggataccattttactagatttataactggatatcatccattgattcttactgattggaaagacatgattttaacagactgg

SEQ ID NO: 50748 - DNA, 1743 bp, Homo sapiens
cgtgggtccacacccaacacagagccacctacctgcccaggccagcctaagccaatccagcctcgctctccaaatgccactccgaccccagaagccactcctttaccgaaacatccccgtgggagatgagttcagagccagcccgggaggactccagtcagctcggacaagactgcccttctgtcccaacacctccagaggacacacacaggcagcctgaccaccatatctgctattgcactctgcctgctgccacagccccccgggcacttctggcccccacagcgtcttccatatctttagggggtggcagcagactcacagcaagtcccatcttcctggagcccaaggtagggaggggagagctagaaggggcgggactcaggtgcagctccaagtttccagctcccaaaataatcagatgcaaaggagaagcaagaacagctcgaggcgggcggtgactcagtgctagtgggccggcttagtcacctggatggctgctggcggctcctggcacatcaggacgggagcagcgccctcccccacctgcctggaccgtggctgtctccagagtgtggccgccgagccccgcgcccagggctgcctggcaggcgaggccgctccaccccgctcccgcccatcagggcccagcggccccggctgcggcgcgcccctcctccaccgcgcgccccggctcactttgggatttctccattaaatcctcaggcatcgacctgctcgtttggggcgccgagctgctccaacgttgcttggcaattttgatatcgtcgggggttgccatggggaggaaggtgatgtcattgacacaaaaaacccactgaatttacaaatcagctggggctggagctatttataaaaacacgtttttatctgcctttctttgctgaaggggaggaggaggaagggctgcctgccgggctcagggtgagcctccctgctgtccttcctacccttgccctagagaagccagacctccttggctcacccccacccccaccccccagaacttggagctgcgcattcagatctggcaggtgctggtctcagctggttttgcttcgaaggctgagagtggcacatgggatgtaaggcagggtgggtgctggcttcctgggctggcagggaccagaaaccagttactcaaccgggtccctttatttcattgcccctggtcagaaacagaggcatttgctggtgaggcagcttgagctccttgatgtgcccccctgccagctcccyggagcgccaggtggagcccagccttccacagtgccctccccatccctagcctcagtgtctcctccactggcttcttttcttctcctagtgtccaatcgtgggctgcccaagctccaggcttggtcccctgctcatctctccccacactcagccaccactccatcaaaacaccttttttctgtggctttgaccatcacctgggcaaatgcttgcccgaaaacccattttgtgcctgccccacttcaggcgccacctctgatggcccagctcccactgccaggacccactagctattgacagccagagggaagcctgggagttcttgcctcttcccgtcccccagtcccttatatccaaggtggcacttggctctacattttatttttgaaaactttctaactttcttctgtagcgaagccatgtggtgtttggttaaaagtccaggctgtgagtcttcagtcttccgcatctcagctccactgt

SEQ ID NO: 50749 - DNA, 1743 bp, Homo sapiens
cgtgggtccacacccaacacagagccacctacctgcccaggccagcctaagccaatccagcctcgctctccaaatgccactccgaccccagaagccactcctttaccgaaacatccccgtgggagatgagttcagagccagcccgggaggactccagtcagctcggacaagactgcccttctgtcccaacacctccagaggacacacacaggcagcctgaccaccatatctgctattgcactctgcctgctgccacagccccccgggcacttctggcccccacagcgtcttccatatctttagggggtggcagcagactcacagcaagtcccatcttcctggagcccaaggtagggaggggagagctagaaggggcgggactcaggtgcagctccaagtttccagctcccaaaataatcagatgcaaaggagaagcaagaacagctcgaggcgggcggtgactcagtgctagtgggccggcttagtcacctggatggctgctggcggctcctggcacatcaggacgggagcagcgccctcccccacctgcctggaccgtggctgtctccagagtgtggccgccgagccccgcgcccagggctgcctggcaggcgaggccgctccaccccgctcccgcccatcagggcccagcggccccggctgcggcgcgcccctcctccaccgcgcgccccggctcactttgggatttctccattaaatcctcaggcatcgacctgctcgtttggggcgccgagctgctccaacgttgcttggcaattttgatatcgtcgggggttgccatggggaggaaggtgatgtcattgacacaaaaaacccactgaatttacaaatcagctggggctggagctatttataaaaacacgtttttatctgcctttctttgctgaaggggaggaggaggaagggctgcctgccgggctcagggtgagcctccctgctgtccttcctacccttgccctagagaagccagacctccttggctcacccccacccccaccccccagaacttggagctgcgcattcagatctggcaggtgctggtctcagctggttttgcttcgaaggctgagagtggcacatgggatgtaaggcagggtgggtgctggcttcctgggctggcagggaccagaaaccagttactcaaccgggtccctttatttcattgcccctggtcagaaacagaggcatttgctggtgaggcagcttgagctccttgatgtgcccccctgccagctccccggagcgccaggtggagcccagccttccacagtgccctccccatccctagcctcagtgtctcctccactggcttcttttcttctcctagtgtccaatcgtgggctgcccaagctccaggcttggtcccctgctcatctctccccacactcagccaccactccatcaaaacaccttttttctgtggctttgaccatcacctgggcaaatgcttgcccsaaaacccattttgtgcctgccccacttcaggcgccacctctgatggcccagctcccactgccaggacccactagctattgacagccagagggaagcctgggagttcttgcctcttcccgtcccccagtcccttatatccaaggtggcacttggctctacattttatttttgaaaactttctaactttcttctgtagcgaagccatgtggtgtttggttaaaagtccaggctgtgagtcttcagtcttccgcatctcagctccactgt

SEQ ID NO: 50750 - DNA, 579 bp, Homo sapiens
taaagatatttctatatctgtatgtttaaaccgcaaactgtcaatgtggttatccttggaaataggagtggtggtgagaggggtctttcactttggactttttacactcttgcattgtttcagtgaacatgtactgttgtatttaaacaatacaaaagtaaaaataaaggaatgtatgtttttaaaactaataataggccagacgcagtggcacacgcctgtaatcccagcactttgggaggccgaggtgggtggatcacctgacgtcaggagttcgagaccagcctggccaacatggcgaaaccccgtctctactaagaatacaaaaattagctgggygtggtggtgggcacctgtaatctcagctactcaggaggctgaggcggagaattgctcgaacccgggaggtggagattgcagtgagcagactgtgccattgcattccagcctgggcaacagagcgagactcagtctcaaaacaaacaaacaaacaaacaaacaaaccctaataatagaaaaccaagagctatgaagagtacctaaaacttgtatatttgaacattttcctctgcaaagtcc

SEQ ID NO: 50751 - DNA, 568 bp, Homo sapiens
tattgggctgtggttgaatgtaagatttatgcaggacacattatttctttaaatcagctgaaaattgagcccattctttatatgttgcctccatcattaattataattaaataagtgccttgtaagcacaatccatcatctagacgttttcagtgtctacaagataaattttttgaaaatatattaatcttgaaccatgagggccccctcactactaaatagycatctaagtgttgggctccagttttacacacctttacccggctgtttataaaattacaattttcataaaatgaaattcccattgattttctgtaactgataaatcatcatgaaagtaagtgtttgtaataaaattccaatttttatagggaacattcatctcataaatcaagggaaaccctgacagtggcgataaagcttgtgttgacacaaataattagtttgtttttaggttatagttccctataactattgattttcccttttaattaaaatgaagacctttataccaaatgaagactttcatgttattagaaaggcattttgagttattgaaagccccatg

SEQ ID NO: 50752 - DNA, 602 bp, Homo sapiens
acatttatgaagccaaagcctcgatgaagtatttaaaataatactagaaaccttgaaacttagatatcatcctcaaatctaaaactaactttctgtgtagcatctgattcttttggtgtttaaaacgacactaagatggtactgtgtgtcatcataaattcttagaaattcttagcactttcctagaaatgattatatgaagtgaaagtattattcatataaaatattattttattccactgttatttaaaattttattgctttcctctacacagcaatataggaataacttttttaagagtaaagacataggctttagaataaaattattcgaattgaatcttagctcatatagttactaattcggatacattgggcaaatgatttagctggtctaagcttcaatttactaatctgtataatgagattatgatagtaaatmcttcataacattattttgggtattaaatgagatactttatttatctgattttggaaagcaatgatacatggtaagcatgaaataaacattagtatttttataaattaatatgagaaaaatagaatttattgtttaagatattaatactactcattcattt

SEQ ID NO: 50753 - DNA, 529 bp, Homo sapiens
tagcccaatatacctttccaatttattgttcattattttcctccagtaagtgccctatgagggagtcttccaaatctgtctattccatgtaacccaaatatgcagtgctcgtccttgcctctttcttattggaacttactacagctaaaattagcagcagcatcgttagcagcagcttcaagagcaaacgttatatattatttactatggaccaggcaatrttgtaagtgcttaatacatataactcacataatcctcacaataaccccgttaaatagatgctattattatcatccctatttcacagatggtccaaaacaactaagtaactcatgcaagttcacacagctagtaaaagaatagaaccagaattcaagccaagcagtttggttccaaaattctacactcaaccactatcaatatgtctctcaattacctattaatacactgtattcattgtcagaaatttaactagtcattaattatttcatacatgctacttttatctctttaatgtctttatttcttt

SEQ ID NO: 50754 - DNA, 310 bp, Homo sapiens
ttaagcagtaaaaataattccgtaagagagtaactcactcccaggagaaataaatgtcatttaaataatatgaatgaagagtacctgtgtgtcaggcagaaccaccctgaatgtttgcagcccaggggctgtatcctgacctcaggcctcttgctgataagtaatttcgagtcatgtgggataagaaatatgttgcagtctacgaattgtctacmcagtacatcaactcacctgagatgataaaattgttcccttagagcaggatttagcaaacattgtctataaagaaccaaacatagtaaatatttca

SEQ ID NO: 50755 - DNA, 1408 bp, Homo sapiens
caaacaaacaaagtccaggtgcggtggctcacacctgtaatcccagcactttgggaggccgaggcaggaagatcacaaggtcatgagttcgagaccagcctggacaatatggtgaaaccccacctctactaaaaatacaaaaactagctgagtgtggcggcgtgcacctgtagtcccagctactcaggaggctgaagcagaagaatctcttgaacctgggtggcggaggttgcagtgagccgagatcacaccactgcrctccaggctgggcgacagagtgagactccatctcaaaaacacacacacacacacaaaaacaaaaacaagacacaaattagctgggtgtggtggcgggcacctgtaatcccagctactcaggaagctgaggcagaaagaactgcctgcacccaggaggcagaggttgcagtgagtggagatcgcaccactgcacttcagcctgggcaatggagtgagactccatcttaacaacaaacaaacaaaccccactcctactctcattcctgctgtcttacaatctagtctttagaagatatacataggacaaaaactgccactaggaaaataatgaaaatgtagttacatttgaaaacaaatcatgtaactttaaattgtggtttcataagcttttggccttttatgactcaaagtacagccattccactagtccatgtcacttcatggacccaaatctttaggaataggttttcatcagacaataccaccactgttgtggtggtactttatcaggtagatcctatgcttgtccagaagaggaaaataatctttcagtgtgatgttacaaaaataccaaaacgttggaagcacaatgcttaaatcctgtccactttgagtggagtaacagagataatgttttgcattgtacaacagcagttttataaaatccatttgaattacaattttgatgcagcttctttcttcaaaaagcaaatgcttggtgactgctttaccaaagaaaattgaatagaggttaccttgtgaaattagtgttttcacaaatatactggaaagaaatatttgaagtcatgttaaagacaatttgattcattacttttatttccaaagttaggcttgcaactttaaattttgttttgtgacgtgatggctaactgagccagttactggctatgtgagaaagctactctaattcctttagttgtgcatcttcttccaacccagcctggccactcacctctattcagaaggtgtggacaaaaaatagtttaccgactattgcaaaacactgaaagaaaagtatctcccaccactgaggctattcaaaagagcatttattataagctctaaaggcagttccagaaacattttgagcaacaatagccttactaaatgaaggatgatgttcatttat

SEQ ID NO: 50756 - DNA, 1408 bp, Homo sapiens
caaacaaacaaagtccaggtgcggtggctcacacctgtaatcccagcactttgggaggccgaggcaggaagatcacaaggtcatgagttcgagaccagcctggacaatatggtgaaaccccacctctactaaaaatacaaaaactagctgagtgtggcggcgtgcacctgtagtcccagctactcaggaggctgaagcagaagaatctcttgaacctgggtggcggaggttgcagtgagccgagatcacaccactgcgctccaggctgggcgacagagtgagactccatctcaaaaacacacacacacacamaaaaacaaaaacaagacacaaattagctgggtgtggtggcgggcacctgtaatcccagctactcaggaagctgaggcagaaagaactgcctgcacccaggaggcagaggttgcagtgagtggagatcgcaccactgcacttcagcctgggcaatggagtgagactccatcttaacaacaaacaaacaaaccccactcctactctcattcctgctgtcttacaatctagtctttagaagatatacataggacaaaaactgccactaggaaaataatgaaaatgtagttacatttgaaaacaaatcatgtaactttaaattgtggtttcataagcttttggccttttatgactcaaagtacagccattccactagtccatgtcacttcatggacccaaatctttaggaataggttttcatcagacaataccaccactgttgtggtggtactttatcaggtagatcctatgcttgtccagaagaggaaaataatctttcagtgtgatgttacaaaaataccaaaacgttggaagcacaatgcttaaatcctgtccactttgagtggagtaacagagataatgttttgcattgtacaacagcagttttataaaatccatttgaattacaattttgatgcagcttctttcttcaaaaagcaaatgcttggtgactgctttaccaaagaaaattgaatagaggttaccttgtgaaattagtgttttcacaaatatactggaaagaaatatttgaagtcatgttaaagacaatttgattcattacttttatttccaaagttaggcttgcaactttaaattttgttttgtgacgtgatggctaactgagccagttactggctatgtgagaaagctactctaattcctttagttgtgcatcttcttccaacccagcctggccactcacctctattcagaaggtgtggacaaaaaatagtttaccgactattgcaaaacactgaaagaaaagtatctcccaccactgaggctattcaaaagagcatttattataagctctaaaggcagttccagaaacattttgagcaacaatagccttactaaatgaaggatgatgttcatttat

SEQ ID NO: 50757 - DNA, 568 bp, Homo sapiens
caggagaatggcgtgaacccaggaagcggagcttgcagtgagccgagattgcgccactgcactccagcctgggcgacagagcgagactccgtctcaaaaaaaaaaaaaaaaaataagaactcaaaagcaacaaattctaaatatccaatacatcatttttagaaaaacatagatcatccaaataactcaagccagatttgaaaatcctaaaaaattagttaaaaaggaacaaataaaagacatcaaatacagttgctcataaggctgacctctctcaaacccttgaggaacatattattctctgctaatgatccttctaattgcagaaaaaggagcaagggtacaaaaactctcaactcatttcatgagttctctttamctagcacaaaaacctgacaaagattgtacatagatctacgcatacccacacaaccccaaaacatactaatcttgcatatcatatttggtaaggatcctaaatattacccaattcacgattttttaatcagctcttctataattttctaaaaattcttaaatatattacttttagaatattcaaaaacta

SEQ ID NO: 50758 - DNA, 633 bp, Homo sapiens
cgctgggcacggtggctcacccctgtaatcccagcactttgggaggccaaggcgagtggattgcctgagctcaggagttcaagaccagcttggccagcatggtgaaaccccatctgtactaaaaatacaaaaattagccaggcatggtgatgcgcacctgtaatcccagctacttgggaggctgaggcaggataattacttgaacccagcagatggaggttgcagtgagccgagatcatgccactgcactccagcctggacaacagagtgagactccatctcaaaaaaaatgatatatatgtatattatatatattatatataaaaatacatgatatatataaaaatatatattatatgtattttatatatataatatakagagagagagaaagagaaagagagagatttctgtagaacactccagacaagggtcaaagctgagagatctttgtgatttggctgctttggagcctttgaacttcctcttttggttctgattttcttgttttctcattcaaaaatctacacttatattttcaggcatggtaaattcttctctttcctgctcttgcataatcttcagtgtatccccttctggtctgactcaaagacatcatgggtgtttctctcc

SEQ ID NO: 50759 - DNA, 633 bp, Homo sapiens
cgctgggcacggtggctcacccctgtaatcccagcactttgggaggccaaggcgagtggattgcctgagctcaggagttcaagaccagcttggccagcatggtgaaaccccatctgtactaaaaatacaaaaattagccaggcatggtgatgcgcacctgtaatcccagctacttgggaggctgaggcaggataattacttgaacccagcagatggaggttgcagtgagccgagatcatgccactgcactccagcctggacaacagagtgagactccatctcaaaaaaaatgatatatatgtatattatatatattatatataaaaatacatgatatatataaaaatatatattatatgtattttatatatataatatatagagagagagaaagagaaagagagagatttctgtagaacactccagacaagggtcaaagctgagagatctttgtgatttggctgctttggagcctttgaacttcctcttttggttctgattttyttgttttctcattcaaaaatctacacttatattttcaggcatggtaaattcttctctttcctgctcttgcataatcttcagtgtatccccttctggtctgactcaaagacatcatgggtgtttctctcc

SEQ ID NO: 50760 - DNA, 542 bp, Homo sapiens
ttttacatttatcrtaacatttttaggggtcattattattactgttcattttatgtaagctcagctgcccaagatcagatagctagaaagtggcagtgctacatgtcaactgaatttgtctgactttaagcccacactgtctcttaaaatgctcttctacaattgttaatagttgtatttattatcctccaaatctccaaataggctttgtgaatgtttagtagttcactaatgaactcagtgaaaaacctgttctgcctatggtaggggaagtattacacacccatataaaactcaaatcttgtctaaaatagactttcaaaaatacaactaacataaactaattaaaaacatttaattttatgctgggagaaaattcctaaacatttttaaaaatcaaatttaatactatacacagaaaaattactgatacttggcatttgctacaggcaactaactaattattccttctgttggcatgctgaaagagcaatttgaccatctgcgtggttatttactgtgtctagactacaagaaattct

SEQ ID NO: 50761 - DNA, 542 bp, Homo sapiens
ttttacatttatcgtaacatttttaggggtcattattattactgttcattttatgtaagctcagctgcccaagatcagatagctagaaagtggcagtgctacatgtcaactgaatttgtctgactttaagcccacactgtctcttaaaatgctcttctacaattgttaatagttgtatttattatcctccaaatctccaaataggctttgtgaatgtttagtagttcactaatgaactcagtgaaaaacctgttctgcctatggtaggggaagtattacacacccatataaaactcaaatcttgtctaaaatagactttcaaaaatacaactaacataaactaattaaaaacatttaattttatgctgggagaaaattcctaaacatttttaaaaatcaaatttaatactatacacagaaaaattactgatacttggcatttgctacaggcaactaactaattattccttctgttggcatgctgaaagagcaatttgaccatctgcrtggttatttactgtgtctagactacaagaaattct

SEQ ID NO: 50762 - DNA, 544 bp, Homo sapiens
tttcttttgagatggaatctttctgtgttgctcaggctggagtgcagtggtgcgatcttggctcactacaacctgcacctcccaggttcaagcaattctcctgcctcagcctcctgagtagttgggattacaggcacatgccacaatgcctggctaatttttgtatgtttagtagagacagggtttcactgtgttggtcaggctggtcttgaactcctgaccacagatgacccaccggacttggtctcccaaagtgcggggattacaggcatgagccactgcaccgacccccaactcttttctgtgcctctgcctgcattcaaccacactacactactcarttctctgaaatcaaggctctcgcaattggttgtgcaagttgtgcactgcacaaaacatagaggcatcattcacgttatagtctcttgatgggttctttctggaattgaccagtttacagcctatacccttatatgcagcagtcctgaaataatcacaaacccctatgtgtcatgcctctttatggatgcccccagccacacaa

SEQ ID NO: 50763 - DNA, 585 bp, Homo sapiens
gtccattatcttcaaaggactaaaatcaacaagctggttcaattgaggcaagtctccggctgctttacttcctcccacaaacagaaatcaatacaaccaatgttggtccctactaatgcgagtgctgggagccctcttctgaactccctgtgatcctgcgwatgtctgtgtctaagtgaagaaataacgtaatcatccaggtgattcaagggagaaaaaaggttgtatccagaaagaatgtctattcccagtaactaaatgcctagaacatacgcagcgcaatatttttcagtcttctcttttgaatgttttactcattatgtaacaaaaatttactttggacgttcaactaaaatgacatcatcaactgtgacttgtcctgggtttggttgacagacatgactggaattagtaaaatgttttagtttagacagagaatcaccaaatgttagaggttaagtgaccttgcagatgacctaatccaaatttccgaagggtttaaccaacatcacgcagttaattgtttggaatcttcacttccctggccgtatacacacataattgttttttttatttcttttttta

SEQ ID NO: 50764 - DNA, 585 bp, Homo sapiens
gtccattatcttcaaaggactaaaatcaacaagctggttcaattgaggcaagtctccggctgctttacttcctcccacaaacagaaatcaatacaaccaatgttggtccctactaatgcgagtgctgggagccctcttctgaactccctgtgatcctgcgtatgtctgtgtctaagtgaagaaataacgtaatcatccaggtgattcaagggagaaaaaaggttgtatccagaaagaatgtctattcccagtaactaaatgcctagaacatacgcagcgcaatatttttcagtcttctcttttgaatgttttactcattatgtaacaaaaatttactttggacgttcaactaaaatgacatcatcaactgtgacttgtcctgggtttggttgacagacatgactggaattagtaaaatgttttagtttagacagagaatcaccaaatgttagaggttawgtgaccttgcagatgacctaatccaaatttccgaagggtttaaccaacatcacgcagttaattgtttggaatcttcacttccctggccgtatacacacataattgttttttttatttcttttttta

SEQ ID NO: 50765 - DNA, 586 bp, Homo sapiens
agctaaatcccaaggacaactaatagaaaatctaagtgggcttgtcaatagtggggaaaaataggaagtcaggcacagtgtgggggctagcacaataagcagctgagcatacacagccaaaagtggaactgaactcctaaacttgcaccattctctgcactgatcctgttctcaggctttccttcttaactctggataacattgcttgctcccttttctggtctcttaaaacaatagccatgtatacagtgttgtttgtaattagtcatgacactggctaacatctgatggttgctatgtagcaaggtattcatggctgcacaggtttatctccttgaatcttcataacaaacctgggagtctcagaaamtgttaggttaaagtgaggacactcaaatttaagctcaggatatctgactctggggcccaagctcctaaacaggaagccactctaattactgcttgcgagatccaacctatctgattttctctccttcaagaaggcatttcagagggaggagccaagatggccgaataggaacagctctggtctacagctcccagcgtgagcgacgcagaagacggg

SEQ ID NO: 50766 - DNA, 586 bp, Homo sapiens
agctaaatcccaaggacaactaatagaaaatctaagtgggcttgtcaatagtggggaaaaataggaagtcaggcacagtgtgggggctagcacaataagcagctgagcatacacagccaaaagtggaactgaactcctaaacttgcaccattctctgcactgatcctgttctcaggctttccttcttaactctggataacattgcttgctcccttttctggtctcttaaaacaatagccatgtatacagtgttgtttgtaattagtcatgacactggctaacatctgatggttgctatgtagcaaggtattcatggctgcacaggtttatctccttgaatcttcataacaaacctgggagtctcagaaaatgttaggttaaagtgaggacactcaaatttaagctcaggatatctgactctggggcccaagctcctaaacaggaagccactctaattactgcttgsgagatccaacctatctgattttctctccttcaagaaggcatttcagagggaggagccaagatggccgaataggaacagctctggtctacagctcccagcgtgagcgacgcagaagacggg

SEQ ID NO: 50767 - DNA, 586 bp, Homo sapiens
agctaaatcccaaggacaactaatagaaaatctaagtgggcttgtcaatagtggggaaaaataggaagtcaggcacagtgtgggggctagcacaataagcagctgagcatacacagccaaaagtggaactgaactcctaaacttgcaccattctctgcactgatcctgttctcaggctttccttcttaactctggataacattgcttgctcccttttctggtctcttaaaacaatagccatgtatacagtgttgtttgtaattagtcatgacactggctaacatctgatggttgctatgtagcaaggtattcatggctgcacaggtttatctccttgaatcttcataacaaacctgggagtctcagaaaatgttaggttaaagtgaggacactcaaatttaagctcaggatatctgactctggggcccaagctcctaaacaggaagccactctaattactgcttgcgagatccaacctatctgattttctctccttcaagaaggcatttcagagggaggagccaagatggccgaataggaacagctctggtctacagctcccagcgtgagcracgcagaagacggg

SEQ ID NO: 50768 - DNA, 562 bp, Homo sapiens
tttaacagccaaactgattttacacagtgttatttacaaactgtgaatctgagatccaggattggcataagactaaagaataatcaacataagcaagaggtctttttcatactatttaccacactttattgtaaatactggtgcggagagctttcttcctgcctagttgctaacttagtctgtttgtgttgttagaaagaaatatctgaggctgggtaatttatagagaaaagaggtttattaggctcacacttctacaggctgtagaagaacgttgctggctattgcatcatgtgagagcctcaggctgcttccactcgtggcagaagakggggagccagcatgtggagagcacatagagacagagaaagcgagagagagaagggggaggaaggtgccaggctttatttaacaaccagctgtcccaaaatctaatagagcgagaactcacttattgccacaaggatgacaccaagttaactacgaggaatctgccccatgacctgaacacctctgattaggcccattggggatcaaatttcaacacataatttggatgggt

SEQ ID NO: 50769 - DNA, 562 bp, Homo sapiens
tttaacagccaaactgattttacacagtgttatttacaaactgtgaatctgagatccaggattggcataagactaaagaataatcaacataagcaagaggtctttttcatactatttaccacactttattgtaaatactggtgcggagagctttcttcctgcctagttgctaacttagtctgtttgtgttgttagaaagaaatatctgaggctgggtaatttatagagaaaagaggtttattaggctcacacttctacaggctgtagaagaacgttgctggctattgcatcatgtgagagcctcaggctgcttccactcgtggcagaagatggggagccagcatgtggagagcacatagagacagagaaagcgagagagagargggggaggaaggtgccaggctttatttaacaaccagctgtcccaaaatctaatagagcgagaactcacttattgccacaaggatgacaccaagttaactacgaggaatctgccccatgacctgaacacctctgattaggcccattggggatcaaatttcaacacataatttggatgggt

SEQ ID NO: 50770 - DNA, 562 bp, Homo sapiens
tttaacagccaaactgattttacacagtgttatttacaaactgtgaatctgagatccaggattggcataagactaaagaataatcaacataagcaagaggtctttttcatactatttaccacactttattgtaaatactggtgcggagagctttcttcctgcctagttgctaacttagtctgtttgtgttgttagaaagaaatatctgaggctgggtaatttatagagaaaagaggtttattaggctcacacttctacaggctgtagaagaacgttgctggctattgcatcatgtgagagcctcaggctgcttccactcgtggcagaagatggggagccagcatgtggagagcacatagagacagagaaagcgagagagagaagggggaggaaggtgccaggctttatttaacaaccagctgtcccaaaatctaatagagcgagaactcacttattgccacaaggatgrcaccaagttaactacgaggaatctgccccatgacctgaacacctctgattaggcccattggggatcaaatttcaacacataatttggatgggt

SEQ ID NO: 50771 - DNA, 517 bp, Homo sapiens
tcgtgacatggggatcagttctcaggatggtgtgggagttcaatcacaggggacagaataaagaacttaaagagactgaagtggctaaaatatgattaaatttcataggggaagcaaggtagaaatatcagaatatgctgtcaggtcatttttctaatttgtaaacattcaggtctgaatgacctgaactactgcataaaactattagaaaaatttggtaaaagtgaatcatcaccttcacactgaaaaaaaaaaatgaatgaataagtgaataaaatgtatatttataaaattaaaaggcaataatgttctcatgttatctaccgctctcaakctcctgtctagaagatgccagaattaacacaatttcaaaaagtcacttaaaccaaaaaaacaaagaaggaaaaacacacctaccaattaacacttatcttactaaattgcctttatgtgttagttctgaatacatgaaatgaattctgttcttgtacaagtcactgtcccctaagttgcaatc

SEQ ID NO: 50772 - DNA, 450 bp, Homo sapiens
tttctttctttccgttttacagtagatgctctctcactttaaaaaagagaggcatagctcttacacatctggaattttactatggctaattgcctaagagtgcaaatccactagtcgctaaacaaagagaaaattaaaatgtttctcatatatatatatggggtgtgtgtttgtgctgtgtaattacaaatgctgcattcttgtcaatgttgcaatgttcagaataattttgggtgaggtagggtttatttcattttcatttagtgacctcaatctcatctgcctctggaagatcatcaaagaatgctttgctccagtgacygtgtctcatgagagcaaagcaataagtctgttaagaaatgcggaaagttgtgatgctttattttatgcaaatgacaagctagtagcaagggtgaactatctatttacctatctgtgcacccatcctcc

SEQ ID NO: 50773 - DNA, 450 bp, Homo sapiens
tttctttctttccgttttacagtagatgctctctcactttaaaaaagagaggcatagctcttacacatctggaattttactatggctaattgcctaagagtgcaaatccactagtcgctaaacaaagagaaaattaaaatgtttctcatatatatatatggggtgtgtgtttgtgctgtgtaattacaaatgctgcattcttgtcaatgttgcaatgttcagaataattttgggtgaggtagggtttatttcattttcatttagtgacctcaatctcatctgcctctggaagatcatcaaagaatgctttgctccagtgaccgtgtctcatgagagcaaagcaataagtctgttaagaaatgyggaaagttgtgatgctttattttatgcaaatgacaagctagtagcaagggtgaactatctatttacctatctgtgcacccatcctcc

SEQ ID NO: 50774 - DNA, 1796 bp, Homo sapiens
tatgtcagaatatagccactattcgtaaaaaaagcacacacatttcttgtgcgctaaccccgattttaaatgctttacatacattgacattcattctttgcaattactttatgtgatatgtacaggtattatcaccattatatagattaggaaactgaggcacgttaagtaacttgccctaagttacttagtcagtaactggtagagctggagtcaaacaaggtaatcagccttcaaagttcatgctttcaaatactgctttcttttctctctaagccccattctaaatgctttgaagaaaacatgaactctcatcagtcacactggaactacattttacagataagacaactaagcttcagaaaagtgaggtaacttatttgtagttacacaagttgaaagtaaaacatttcctattctaacgaaattctatgttctattattttcactggctatggacagactgatgtccattcctactttgtaaacagattatttgaatatttggatgcaggttgctcaaatctagggcataatttatatttttgattagttgattcttaatttgataggaaacagaaaaaggaatatattgttctgtttaaataagtagtatatactaaccttgcaacaaatatctgcttgagatttcaacatctgtatatgctgcattagcacatatatatttttaacattcaaatataactgccttgtgaatcttaacagaacaagacatatttttgaaattatttgttatattattttattagattctaaaaatagtttcataaaattcatctttagtaaatattgagcacagacttctttaaaacagcatcctggctaggcgcggtggctcacgcctgtaatcccagcactttgggaggccaaggcaggcggatcatgaggtcaggagatcaagaccatccttgctaacagggtgaaaccccgtctctactaaaaatacaaaaaaattagctgggcttggtggcgggcggctgtagtcccagctacttgggaggctgaggcaggagaatggcttgaacccaggaggcagagcttacagtgagccgagatcgtaccactgcactccagcctgggcaacagggcaagattccatttcaaaaaaaaaaaaaaaaaaagcagtgtcctatttttatgtatccccctaagccttcttttcagtcttaaatgagagggaccaaatgatgtttttacaaaagaaagcaagaaggtgcaaagtcaccatttttactttccatgagaaagtttgtgggaatgatcattttctgacaatatgtacagcggcaagccttgaaacatttttaggaagccactaagtactgcgcagctgtatgaaaactgcttggtataccacggatatctatactaaaagttttcacaacggagttataacatagtctcccattttccattctagagagccacatggatttagtagatataaaaaagttgaaataatgtttagtatttctgttaaaagaaaggacagttggacagtcagtagggatttttccttattaattttgggaggccaaggcgggcagatcatgaggttaggaggtcgagaccatcctggttaacacggtgaaaccccgtctctactaaaaacacacacacacaaaaattagccgggcktggtggcgggcgcctgtagtcccagctactcgtgagagctgaggcaggagaatggcatgagcctgggaggcggagcttgcagtgagccgagattgcgccacgcctgggccaacaaagcgagactccgtctcaaaaac

SEQ ID NO: 50775 - DNA, 620 bp, Homo sapiens
tacaaagtcaaactgaaaccacggattatggaaagaggcaagaattatgggtaacaggggagaaggctgggccagagccaataccacattctgaacacaggagccacgggraagaggtgctggtttcttctggcaagaccggggtgactggaacgcagtgttctactggcaaacccagcccaacactgagctctttctagcatggactccattcccgtgatggccaagggagacccttcccccagaagcctgtgtccggaacctagcagagcctgtgccatccggaggagggggctgcttagccccagccaggctccatgtcttgctcttcagttccgttcactgacatcagaccttgtcccacactcgaaaagcctttttctcccctgtcttattctaaactggaagaggacaggagaaagtcagcacaagactaaaagggccccaggagaaataccaaggttgagggcaaaatgacattctaggggtgcaaaagatgttgtatttagttgttaagtggaaccggggttcctcacacatccatcccacatagcacagcccccagcctgatggcctgccgtcccctagaggctgagcatggggtcagccacccctgccct

SEQ ID NO: 50776 - DNA, 620 bp, Homo sapiens
tacaaagtcaaactgaaaccacggattatggaaagaggcaagaattatgggtaacaggggagaaggctgggccagagccaataccacattctgaacacaggagccacgggaaagaggtgctggtttcttctggcaagacyggggtgactggaacgcagtgttctactggcaaacccagcccaacactgagctctttctagcatggactccattcccgtgatggccaagggagacccttcccccagaagcctgtgtccggaacctagcagagcctgtgccatccggaggagggggctgcttagccccagccaggctccatgtcttgctcttcagttccgttcactgacatcagaccttgtcccacactcgaaaagcctttttctcccctgtcttattctaaactggaagaggacaggagaaagtcagcacaagactaaaagggccccaggagaaataccaaggttgagggcaaaatgacattctaggggtgcaaaagatgttgtatttagttgttaagtggaaccggggttcctcacacatccatcccacatagcacagcccccagcctgatggcctgccgtcccctagaggctgagcatggggtcagccacccctgccct

SEQ ID NO: 50777 - DNA, 476 bp, Homo sapiens
attagccaggggttctgagggggcacctgtaatcccaactactcgggaggctgaggcacgagaattgcttgaacccgggaagcagaggttgcagtgagatgaaatcgcaccactgcactctagcctgggcgacagagcaagactctgtctcaaaaaaaaaaaaaaatgtccttggstttattcaccactgaatcaccagcacctagagccctgaagacatgggtctcaatacatatttattgaatgtgaaaggactgacctccaagagattcaacagcaagcaggtctctcattctgactgaagatttactcatccaattcattcattgctaatgtcttctttatcagtctagttatcattttttttaagcgaaagcaagtttattaagaaaatgaagaaataaaagaatggctactccacaggcagaacagccagtctagttatcattcttaactttcttgtatacttaaaaatt

SEQ ID NO: 50778 - DNA, 476 bp, Homo sapiens
attagccaggggttctgagggggcacctgtaatcccaactactcgggaggctgaggcacgagaattgcttgaacccgggaagcagaggttgcagtgagatgaaatcgcaccactgcactctagcctgggcgacagagcaagactctgtctcaaaaaaaaaaaaaaatgtccttgggtttattcaccactgaatcaccagcacctagagccctgaagacaygggtctcaatacatatttattgaatgtgaaaggactgacctccaagagattcaacagcaagcaggtctctcattctgactgaagatttactcatccaattcattcattgctaatgtcttctttatcagtctagttatcattttttttaagcgaaagcaagtttattaagaaaatgaagaaataaaagaatggctactccacaggcagaacagccagtctagttatcattcttaactttcttgtatacttaaaaatt

SEQ ID NO: 50779 - DNA, 476 bp, Homo sapiens
attagccaggggttctgagggggcacctgtaatcccaactactcgggaggctgaggcacgagaattgcttgaacccgggaagcagaggttgcagtgagatgaaatcgcaccactgcactctagcctgggcgacagagcaagactctgtctcaaaaaaaaaaaaaaatgtccttgggtttattcaccactgaatcaccagcacctagagccctgaagacatgggtctcaatacatatttattgaatgtgaaaggactgacctccaagagattcaacagcaagcaggtctctcattctgactgaagatttactcatccaattcattcattgctaatgtcttctttatcagtctagttatcattttttttaagcgaaagcaagtttattaagaaaatgaagraataaaagaatggctactccacaggcagaacagccagtctagttatcattcttaactttcttgtatacttaaaaatt

SEQ ID NO: 50780 - DNA, 476 bp, Homo sapiens
attagccaggggttctgagggggcacctgtaatcccaactactcgggaggctgaggcacgagaattgcttgaacccgggaagcagaggttgcagtgagatgaaatcgcaccactgcactctagcctgggcgacagagcaagactctgtctcaaaaaaaaaaaaaaatgtccttgggtttattcaccactgaatcaccagcacctagagccctgaagacatgggtctcaatacatatttattgaatgtgaaaggactgacctccaagagattcaacagcaagcaggtctctcattctgactgaagatttactcatccaattcattcattgctaatgtcttctttatcagtctagttatcattttttttaagcgaaagcaagtttattaagaaaatgaagaaataaaagaatggctactccacaggcagaacagscagtctagttatcattcttaactttcttgtatacttaaaaatt

SEQ ID NO: 50781 - DNA, 514 bp, Homo sapiens
atcatttaagctcaggaggtcgagtctgcagtgagccatggggcatctctgtagtcctagttacttgggagactgaggctggaggacggcttaagcccaggatttcgatgctgcagtgagctatgatggtgaatgcataggtgaaccacaggaaatttatttttggtggaggggtgaagatttttttactgtgtaaaatacataatgtaaaatataccatcttaaccatttttaaatgtacagtttagtggcattaagtgcgttgatactgttgtacaaccatcaccaccataaatctccagaatgatcttcatcttgcaactctacactcattaaataactccccattccttcctacccctgttccctgtcaactaccattctacttccttctctctggttttgactattgtaagtacctcgtgtaggtggaatcatacagtatttgtccttttctgtcttattttacttagcatgatgtcttmgatatttatccatgttttgtagcatgtgc

SEQ ID NO: 50782 - DNA, 561 bp, Homo sapiens
ttaaaaacatgagcactggagctatacacagccctgggctggaatcccaagtccaatgcttacttagtgtgtgactttggcaagttagcctgtccctctaaaatccagctcccttatctgtaaagtaaggatttaaaaattacttcctctcttatatcatttatagagattaaattttgcatgcraagtgcttagcatagtgtgtggcacacaggaaaaaacagatatggatagcgattttattatctttgaggcggttagaacagctctccttatctatggggtttgggatgtcaatgtatatgaaatgatatccacatcctgtttgttaccaacagaacttatcattgctgctgcccgctgcttgcaccaggtacccacgtcccaggtgaagtgaagccaaggaggggaaacgtcagcttctcgggtctgtggacactgcacatgatgctgcagaggccacggcactgaagcctttaaacccaactgtaatcttctctcataccagaaaatttctttttctgatttttagattgagcaggtgttactttaatgaactca

SEQ ID NO: 50783 - DNA, 561 bp, Homo sapiens
ttaaaaacatgagcactggagctatacacagccctgggctggaatcccaagtccaatgcttacttagtgtgtgactttggcaagttagcctgtccctctaaaatccagctcccttatctgtaaagtaaggatttaaaaattacttcctctcttatatcatttatagagattaaattttgcatgcaaagtgcttagcatagtgtgtggcacacaggaaaaaacagatatggatagcgattttattatctttgaggcggttagaacagctctccttatctatggggtttgggatgtcaatgtatatgaaatgatatccacatcctgtttgtyaccaacagaacttatcattgctgctgcccgctgcttgcaccaggtacccacgtcccaggtgaagtgaagccaaggaggggaaacgtcagcttctcgggtctgtggacactgcacatgatgctgcagaggccacggcactgaagcctttaaacccaactgtaatcttctctcataccagaaaatttctttttctgatttttagattgagcaggtgttactttaatgaactca

SEQ ID NO: 50784 - DNA, 561 bp, Homo sapiens
ttaaaaacatgagcactggagctatacacagccctgggctggaatcccaagtccaatgcttacttagtgtgtgactttggcaagttagcctgtccctctaaaatccagctcccttatctgtaaagtaaggatttaaaaattacttcctctcttatatcatttatagagattaaattttgcatgcaaagtgcttagcatagtgtgtggcacacaggaaaaaacagatatggatagcgattttattatctttgaggcggttagaacagctctccttatctatggggtttgggatgtcaatgtatatgaaatgatatccacatcctgtttgttaccaacagaacttatcattgctgctgcccgctgcttgcaccaggtacccacgtcccaggtgaagtgaagccaaggaggggaaaygtcagcttctcgggtctgtggacactgcacatgatgctgcagaggccacggcactgaagcctttaaacccaactgtaatcttctctcataccagaaaatttctttttctgatttttagattgagcaggtgttactttaatgaactca

SEQ ID NO: 50785 - DNA, 1873 bp, Homo sapiens
gcaacatctttaccattcatcaatcacagtgattttcaacgatttattctctatcacctgactttactaagtacaatctctcttcctgtctctcaatccctttaaaatttctaattctcattgaatattttcccttgcctttgagcaacaggaagttatccacatattaatgaagatcaaaataaaggcaattcatagggccaataaatattttatataatctaaagttattttgttattttatgttatctgtattataatttgattatgtaggattaccatatttatgcatatgcaaacacaacttaacaggcattttttaaattaacttatgaacttagattatatctttctatgaattcatacaaaattaacaatctattcatttgggctcaataattgtgctaattcataacattcggtaaattcttggatttactctattatcagattctaagatggacaagatgttttcattattacaagtaattttaatcatatctagatttaaatgttgtagttaaatctgtaactttcttgcctgtaattcccagtctaggatgaggaattcatctgcacagttacattcagttctgttttaccttttccaagcaactttactaagattattgctctcagcttaataatgacccaacaaatcctatgcctcacagaggcacttcaacaaagaggtggataaggtaggtaaggaagaaaatcagtttatattccagggtttgagatgtatattctcaaatgtaacctcatagcattctactggcgcattactctaaaattaatttaccctgtttggtatgtaagttttcatgaaaagcttcttgagaacataaggtttctattactccagttttttccaaaaaattctcaggtactgcctgtacatagtagctactaattaatatttgtttcaatgaatcaagggaccacatggtgttgaattaggcataaacataataataattgcattgtttagtgtttatatttccatcactgggctaaatattgaatacatatcacatttcatgtttaaaataagtacatgatgcaaatattatccccatcacattacattccctaatccaaattcaatgcatactaagatttttgtagttatttgatgatttgatagtattgagactaaggattattgctgcaatgggtattatctaataccaattagattcttcctggtattagctaatactataaaggtaatttatttggaatgggaaaagggagtcatgtgataaattaggcttacagaaacaaagaatttggtatatttaatatacttctatctgccatttgaatataaaaaattgatatactatataatatagaaagattttactagctgagaccaaaaatggttgaatatgtcattttattcaatctgcaggtctcagcatttcatgttaagtcatttggacatgagtgagacggagcagatttgtgaraatgttccacattggaaattcagaagctaggatatagctcagaatttattatcagtaaatgtcattcaccagaaagtaaggacaacctatttgtttaagtattctattaagacaaaattcaaacacatataaattatataaaatgatataatgctatacaacatctagatttaagaaatataaatgtattttatttgctttatctaaagttttaaagaattatttgaaagtaagtaaatataaatatcttaatggctcagtatgcatctctcagaaacttaaagactatcataaatacttctcaaaatcacatttttgggggaagtccaataatatcatttgcagctgattatttcaaaccaggatccagtcaagaatcacatggtacatttatt

SEQ ID NO: 50786 - DNA, 536 bp, Homo sapiens
tggagaaagcgctgccattaggatgggaggtcaacatggctctgctggatgccagtggctttggatctgatctgacagagctgtaatcaatactcagcatttcctccatgcagttactccgatcatttacatattgccttactcctcatggcaaacctacacattcttgtgattttacagatgaaaagactgaggcatggaagggatgaagagcctgtccaggaccagcagttaatcacaggagaactgggagctgagcccaggctgcctggcttgcagctgccctgggcctgcctctctgtgctgcagggctgtcagatccaatgcccttggcatctgtagagaaaagcaatccacamaattcttatacataaaataaaaaccattttggctactacaaaatatactgtattcattccacgatcacgtgaattcattggtcagtcccaactatcctcttccaatgtcacagtaggtgggcaggaggatggcgcagtggtcagagctgtgtcaccttgctggcctgcacccctgtc

SEQ ID NO: 50787 - DNA, 536 bp, Homo sapiens
tggagaaagcgctgccattaggatgggaggtcaacatggctctgctggatgccagtggctttggatctgatctgacagagctgtaatcaatactcagcatttcctccatgcagttactccgatcatttacatattgccttactcctcatggcaaacctacacattcttgtgattttacagatgaaaagactgaggcatggaagggatgaagagcctgtccaggaccagcagttaatcacaggagaactgggagctgagcccaggctgcctggcttgcagctgccctgggcctgcctctctgtgctgcagggctgtcagatccaatgcccttggcatctgtagagaaaagcaatccacacaattcttatacataaaataaaaaccattttggctactamaaaatatactgtattcattccacgatcacgtgaattcattggtcagtcccaactatcctcttccaatgtcacagtaggtgggcaggaggatggcgcagtggtcagagctgtgtcaccttgctggcctgcacccctgtc

SEQ ID NO: 50788 - DNA, 1365 bp, Homo sapiens
ttcaatttctcagtcacaacagttccattttaaatattcaataactgcatgttkctagaagctattgtgttagacagaaaagatatcaaacatttccataaaagctgaaagttgttttaaccagtactgattatacatttctgaaagtgatattggagagatattgaaggctagggattcatgtttgtgtgcttgcatactttaaatttgcatgcagcctaatcaaaatgattgtagaatttaacaatcacactaacaatgcatgaaaatgtccaattttccatattattaacattgaatttttaatatttaaataatagaaaacaagtttctttttactattcttatagttgtttaattatcagtgagttcatcaatttatagttgttgaaatttacattttttatttcttaagttgcttaaattatctttgtatatcatattttcttttgaatatacttttcatatgcacagattaacacattaataggaacacatttaccttcttgatgctattcccctctatgtacatttttcagtgttttaatctagaatcagcactaaataatgtaaatatgccattctcaagttatcttgacactagtcaatttcccttcatttacagtattcttttccacgtacctatgttactgtttttctccatattcatccccaacataagaagatccacatagcttttgtcttaatagacaggatgaggaaattgaccttgaattccacttccagtcaactggcacagtttccagattctattttcaaatctgtaacagaagggaaaattgatgtgcacagttcccagtccaattcccaatttctggcagttcttcatattctagtcctgctctactttgattaagtgtttttctgaacattgtttccaggttatctggtactgagccaaagaactgagccaatgttgtacaccaaggccattacttgtcagccagcatcgctaccgggttatgttttctttgcccttacttacagcagtttacccatgggaggtactattctcttcacaacacacttcaccatcatcacctgttttttctatgttcttctagtaattagcacttgaaatctctgtcttagagaacagtttttgaacagcattttaaagaaggtctctgctattagagttctgaatcttggagttaattgagcaatagcagtataatcattaagcatcttattgtgtctcatgtcagctcttagaagatgaggaatttattttaggattttgaaggctgggtctatatttttctacttttcttctagctaattcgaacttacctcatatttgtgttaatttctacaacataccaatgttgttacctgtgagaa

SEQ ID NO: 50789 - DNA, 1365 bp, Homo sapiens
ttcaatttctcagtcacaacagttccattttaaatattcaataactgcatgttgctagaagctattgtgttagacagaaaagatatcaaacatttccataaaagctgaaagttgttttaaccagtactgattatacatttctgaaagtgatattggagagatattgaaggctagggattcatgtttgtgtgcttgcatactttaaatttgcatgcagyctaatcaaaatgattgtagaatttaacaatcacactaacaatgcatgaaaatgtccaattttccatattattaacattgaatttttaatatttaaataatagaaaacaagtttctttttactattcttatagttgtttaattatcagtgagttcatcaatttatagttgttgaaatttacattttttatttcttaagttgcttaaattatctttgtatatcatattttcttttgaatatacttttcatatgcacagattaacacattaataggaacacatttaccttcttgatgctattcccctctatgtacatttttcagtgttttaatctagaatcagcactaaataatgtaaatatgccattctcaagttatcttgacactagtcaatttcccttcatttacagtattcttttccacgtacctatgttactgtttttctccatattcatccccaacataagaagatccacatagcttttgtcttaatagacaggatgaggaaattgaccttgaattccacttccagtcaactggcacagtttccagattctattttcaaatctgtaacagaagggaaaattgatgtgcacagttcccagtccaattcccaatttctggcagttcttcatattctagtcctgctctactttgattaagtgtttttctgaacattgtttccaggttatctggtactgagccaaagaactgagccaatgttgtacaccaaggccattacttgtcagccagcatcgctaccgggttatgttttctttgcccttacttacagcagtttacccatgggaggtactattctcttcacaacacacttcaccatcatcacctgttttttctatgttcttctagtaattagcacttgaaatctctgtcttagagaacagtttttgaacagcattttaaagaaggtctctgctattagagttctgaatcttggagttaattgagcaatagcagtataatcattaagcatcttattgtgtctcatgtcagctcttagaagatgaggaatttattttaggattttgaaggctgggtctatatttttctacttttcttctagctaattcgaacttacctcatatttgtgttaatttctacaacataccaatgttgttacctgtgagaa

SEQ ID NO: 50790 - DNA, 1365 bp, Homo sapiens
ttcaatttctcagtcacaacagttccattttaaatattcaataactgcatgttgctagaagctattgtgttagacagaaaagatatcaaacatttccataaaagctgaaagttgttttaaccagtactgattatacatttctgaaagtgatattggagagatattgaaggctagggattcatgtttgtgtgcttgcatactttaaatttgcatgcagcctaatcaaaatgattgtagaatttaacaatcacactaacaatgcatgaaaatgtccaattttccatattattaacattgaatttttaatatttaaataatagaaaacaagtttctttttactattcttatagttgtttaattatmagtgagttcatcaatttatagttgttgaaatttacattttttatttcttaagttgcttaaattatctttgtatatcatattttcttttgaatatacttttcatatgcacagattaacacattaataggaacacatttaccttcttgatgctattcccctctatgtacatttttcagtgttttaatctagaatcagcactaaataatgtaaatatgccattctcaagttatcttgacactagtcaatttcccttcatttacagtattcttttccacgtacctatgttactgtttttctccatattcatccccaacataagaagatccacatagcttttgtcttaatagacaggatgaggaaattgaccttgaattccacttccagtcaactggcacagtttccagattctattttcaaatctgtaacagaagggaaaattgatgtgcacagttcccagtccaattcccaatttctggcagttcttcatattctagtcctgctctactttgattaagtgtttttctgaacattgtttccaggttatctggtactgagccaaagaactgagccaatgttgtacaccaaggccattacttgtcagccagcatcgctaccgggttatgttttctttgcccttacttacagcagtttacccatgggaggtactattctcttcacaacacacttcaccatcatcacctgttttttctatgttcttctagtaattagcacttgaaatctctgtcttagagaacagtttttgaacagcattttaaagaaggtctctgctattagagttctgaatcttggagttaattgagcaatagcagtataatcattaagcatcttattgtgtctcatgtcagctcttagaagatgaggaatttattttaggattttgaaggctgggtctatatttttctacttttcttctagctaattcgaacttacctcatatttgtgttaatttctacaacataccaatgttgttacctgtgagaa

SEQ ID NO: 50791 - DNA, 1365 bp, Homo sapiens
ttcaatttctcagtcacaacagttccattttaaatattcaataactgcatgttgctagaagctattgtgttagacagaaaagatatcaaacatttccataaaagctgaaagttgttttaaccagtactgattatacatttctgaaagtgatattggagagatattgaaggctagggattcatgtttgtgtgcttgcatactttaaatttgcatgcagcctaatcaaaatgattgtagaatttaacaatcacactaacaatgcatgaaaatgtccaattttccatattattaacattgaatttttaatatttaaataatagaaaacaagtttctttttactattcttatagttgtttaattatcagtgagttcatcaatttatagttgttgaaatttacattttttatttcttaagttgcttaaattatctttgtatatcatattttcttttgaatatacttttcatatgcacagattaacacattaataggaacacatttaccttcttgatgctattcccctctatgtacatttttcagtgttttaatctagaatcagcactaaataatgtaaatatgccattctcaagttatcttgacactagtcaatttcccttcatttacagtattcttttccacgtacctatgttactgtttttctccatattcatccccaacataagaagatccacatagcttttgtcttaatagacaggatgaggaaattgaccttgaattccacttccagtcaactggcacagtttccagattctattttcaaatctgtaacagaagggaaaattgatgtgcacagttcccagtccaattcccaatttctggcagttcttcatattctagtcctgctctactttgattaagtgtttttctgaacattgtttccaggttatctggtaytgagccaaagaactgagccaatgttgtacaccaaggccattacttgtcagccagcatcgctaccgggttatgttttctttgcccttacttacagcagtttacccatgggaggtactattctcttcacaacacacttcaccatcatcacctgttttttctatgttcttctagtaattagcacttgaaatctctgtcttagagaacagtttttgaacagcattttaaagaaggtctctgctattagagttctgaatcttggagttaattgagcaatagcagtataatcattaagcatcttattgtgtctcatgtcagctcttagaagatgaggaatttattttaggattttgaaggctgggtctatatttttctacttttcttctagctaattcgaacttacctcatatttgtgttaatttctacaacataccaatgttgttacctgtgagaa

SEQ ID NO: 50792 - DNA, 1365 bp, Homo sapiens
ttcaatttctcagtcacaacagttccattttaaatattcaataactgcatgttgctagaagctattgtgttagacagaaaagatatcaaacatttccataaaagctgaaagttgttttaaccagtactgattatacatttctgaaagtgatattggagagatattgaaggctagggattcatgtttgtgtgcttgcatactttaaatttgcatgcagcctaatcaaaatgattgtagaatttaacaatcacactaacaatgcatgaaaatgtccaattttccatattattaacattgaatttttaatatttaaataatagaaaacaagtttctttttactattcttatagttgtttaattatcagtgagttcatcaatttatagttgttgaaatttacattttttatttcttaagttgcttaaattatctttgtatatcatattttcttttgaatatacttttcatatgcacagattaacacattaataggaacacatttaccttcttgatgctattcccctctatgtacatttttcagtgttttaatctagaatcagcactaaataatgtaaatatgccattctcaagttatcttgacactagtcaatttcccttcatttacagtattcttttccacgtacctatgttactgtttttctccatattcatccccaacataagaagatccacatagcttttgtcttaatagacaggatgaggaaattgaccttgaattccacttccagtcaactggcacagtttccagattctattttcaaatctgtaacagaagggaaaattgatgtgcacagttcccagtccaattcccaatttctggcagttcttcatattctagtcctgctctactttgattaagtgtttttctgaacattgtttccaggttatctggtactgagccaaagaactgagccaatgttgtacaccaaggccattacttgtcagccagcatcgctaccgggttatgttttctttgmccttacttacagcagtttacccatgggaggtactattctcttcacaacacacttcaccatcatcacctgttttttctatgttcttctagtaattagcacttgaaatctctgtcttagagaacagtttttgaacagcattttaaagaaggtctctgctattagagttctgaatcttggagttaattgagcaatagcagtataatcattaagcatcttattgtgtctcatgtcagctcttagaagatgaggaatttattttaggattttgaaggctgggtctatatttttctacttttcttctagctaattcgaacttacctcatatttgtgttaatttctacaacataccaatgttgttacctgtgagaa

SEQ ID NO: 50793 - DNA, 1365 bp, Homo sapiens
ttcaatttctcagtcacaacagttccattttaaatattcaataactgcatgttgctagaagctattgtgttagacagaaaagatatcaaacatttccataaaagctgaaagttgttttaaccagtactgattatacatttctgaaagtgatattggagagatattgaaggctagggattcatgtttgtgtgcttgcatactttaaatttgcatgcagcctaatcaaaatgattgtagaatttaacaatcacactaacaatgcatgaaaatgtccaattttccatattattaacattgaatttttaatatttaaataatagaaaacaagtttctttttactattcttatagttgtttaattatcagtgagttcatcaatttatagttgttgaaatttacattttttatttcttaagttgcttaaattatctttgtatatcatattttcttttgaatatacttttcatatgcacagattaacacattaataggaacacatttaccttcttgatgctattcccctctatgtacatttttcagtgttttaatctagaatcagcactaaataatgtaaatatgccattctcaagttatcttgacactagtcaatttcccttcatttacagtattcttttccacgtacctatgttactgtttttctccatattcatccccaacataagaagatccacatagcttttgtcttaatagacaggatgaggaaattgaccttgaattccacttccagtcaactggcacagtttccagattctattttcaaatctgtaacagaagggaaaattgatgtgcacagttcccagtccaattcccaatttctggcagttcttcatattctagtcctgctctactttgattaagtgtttttctgaacattgtttccaggttatctggtactgagccaaagaactgagccaatgttgtacaccaaggccattacttgtcagccagcatcgctaccgggttatgttttctttgcccttacttacagcagtttacccatgggaggtactattctcttcacaacacacttcaccatcatcacctgttttttctatgttcttctagtaattagcacttgaaatctctgtcttagagaacagtttttgaacagcattttaaagaaggtctctgctattagagttctgaatcttggagttaattgagcaatagcagtataatcattaagcatcttattgtgtctmatgtcagctcttagaagatgaggaatttattttaggattttgaaggctgggtctatatttttctacttttcttctagctaattcgaacttacctcatatttgtgttaatttctacaacataccaatgttgttacctgtgagaa

SEQ ID NO: 50794 - DNA, 1365 bp, Homo sapiens
ttcaatttctcagtcacaacagttccattttaaatattcaataactgcatgttgctagaagctattgtgttagacagaaaagatatcaaacatttccataaaagctgaaagttgttttaaccagtactgattatacatttctgaaagtgatattggagagatattgaaggctagggattcatgtttgtgtgcttgcatactttaaatttgcatgcagcctaatcaaaatgattgtagaatttaacaatcacactaacaatgcatgaaaatgtccaattttccatattattaacattgaatttttaatatttaaataatagaaaacaagtttctttttactattcttatagttgtttaattatcagtgagttcatcaatttatagttgttgaaatttacattttttatttcttaagttgcttaaattatctttgtatatcatattttcttttgaatatacttttcatatgcacagattaacacattaataggaacacatttaccttcttgatgctattcccctctatgtacatttttcagtgttttaatctagaatcagcactaaataatgtaaatatgccattctcaagttatcttgacactagtcaatttcccttcatttacagtattcttttccacgtacctatgttactgtttttctccatattcatccccaacataagaagatccacatagcttttgtcttaatagacaggatgaggaaattgaccttgaattccacttccagtcaactggcacagtttccagattctattttcaaatctgtaacagaagggaaaattgatgtgcacagttcccagtccaattcccaatttctggcagttcttcatattctagtcctgctctactttgattaagtgtttttctgaacattgtttccaggttatctggtactgagccaaagaactgagccaatgttgtacaccaaggccattacttgtcagccagcatcgctaccgggttatgttttctttgcccttacttacagcagtttacccatgggaggtactattctcttcacaacacacttcaccatcatcacctgttttttctatgttcttctagtaattagcacttgaaatctctgtcttagagaacagtttttgaacagcattttaaagaaggtctctgctattagagttctgaatcttggagttaattgagcaatagcagtataatcattaagcatcttattgtgtctcatgtcagctcttagaagatgaggaatttattttaggattttgaaggctgggtctatatttttctacttttcttctagctaattcgaacttacctcwtatttgtgttaatttctacaacataccaatgttgttacctgtgagaa

SEQ ID NO: 50795 - DNA, 718 bp, Homo sapiens
cagwgtgatgacatctttgaaccatcagttttaactagacaatgttcatgccttattatttgatggtttttgtttgctccctttgttttgttttgtttttctcttgaagatgaggtgattacgggtagagctatttgagaaaagaacaatgtattaaattgtatttagttgtagttctaactttttatgtgattttttttgccaacctttacatggtttgtttgcttgttttcttagaaagatggtatgatagtatgactaagatcctagactctggtaccagattctgggtacaaccatgccttccactattttctagatattacgtataacttcagataacttatttaatctcttttatgcctcatttcctaatccaaaaatgagaataataataatatcattgcacaggacacttaggacatataaatagcttaattagtgtaaagaacacgcttggaagtctagaacacacaaggggctttatgaatgttaactattatttttataaaatcattttctatacttagggactaaattaaactaatatagaaattataaattctgttcccatttagtaaacattttatacaaaagatatatgtttaaataaaaatatcacaattttactgaggatgaaatggagcctaagagaaggtagggttagtaaactaaaaggagcaagagtttccagtcaaaccttaatcgatcagtttcc

SEQ ID NO: 50796 - DNA, 599 bp, Homo sapiens
tacaggctacagagttttggtttgaatgtttttgtaaatctggcatttcttaggagacagatgaaaattaataagattatgctaatttatagcataaagtaaaatgttttatagcactaataccatcgaagactttactgagcactgaaaagtaaatgtaataattctaattgtaaatttattttatgtttttcaaaatcagaaatcatccaaaactcagttacactgatgcaattatttgtacatgcaaatataattaggatgaatattttatgcttaacttcaaaacgatggtaaaatttccaataccacattgtatttttaagttcatgcagtaagagtcatctaaatgatgtaaagaaaataggggtaagcaagtgtaaacataatgkttttgctttttaaaatagttctgggtggatttaaaaattatgtatgtttatactttacaaatttaacacattaataaaagtccaaaatttggaaaagagtgataatggatttacttacgcaggccacgtttttaaattttgtattattccgagatggcttcttatgctacttgatgtatcactagactaaatattctttgggtttta

SEQ ID NO: 50797 - DNA, 599 bp, Homo sapiens
tacaggctacagagttttggtttgaatgtttttgtaaatctggcatttcttaggagacagatgaaaattaataagattatgctaatttatagcataaagtaaaatgttttatagcactaataccatcgaagactttactgagcactgaaaagtaaatgtaataattctaattgtaaatttattttatgtttttcaaaatcagaaatcatccaaaactcagttacactgatgcaattatttgtacatgcaaatataattaggatgaatattttatgcttaacttcaaaacgatggtaaaatttccaataccacattgtatttttaagttcatgcagtaagagtcatctaaatgatgtaaagaaaataggggtaagcaagtgtaaacataatggttttgctttttaaaatagttctgggtrgatttaaaaattatgtatgtttatactttacaaatttaacacattaataaaagtccaaaatttggaaaagagtgataatggatttacttacgcaggccacgtttttaaattttgtattattccgagatggcttcttatgctacttgatgtatcactagactaaatattctttgggtttta

SEQ ID NO: 50798 - DNA, 599 bp, Homo sapiens
tacaggctacagagttttggtttgaatgtttttgtaaatctggcatttcttaggagacagatgaaaattaataagattatgctaatttatagcataaagtaaaatgttttatagcactaataccatcgaagactttactgagcactgaaaagtaaatgtaataattctaattgtaaatttattttatgtttttcaaaatcagaaatcatccaaaactcagttacactgatgcaattatttgtacatgcaaatataattaggatgaatattttatgcttaacttcaaaacgatggtaaaatttccaataccacattgtatttttaagttcatgcagtaagagtcatctaaatgatgtaaagaaaataggggtaagcaagtgtaaacataatggttttgctttttaaaatagttctgggtggatttaaaaattatgtatgtttatactttacaaatttaacasattaataaaagtccaaaatttggaaaagagtgataatggatttacttacgcaggccacgtttttaaattttgtattattccgagatggcttcttatgctacttgatgtatcactagactaaatattctttgggtttta

SEQ ID NO: 50799 - DNA, 1617 bp, Homo sapiens
cagatgtagtctccacaccctaagaaccttatttgtccctttccgacttattttttactctttgctgatctttttactgcctctctattcttgccttttccagaatgtcatatagctggaatcgtacggtgtgtagactttccagattggtttctttcacttactcatatgcatttacatttcctaatgcaatattttttaaagatcaaaattaatgccaaaaaaaaaaattcaggatgaacaaaataccattagtgtctgccctgtcttcacacttyagctcacactgctatctgataaagtaacagggtccgtcccctaagaaaactggggcatttccctttgaccatttgctgccaacattttgtgcttatttcaggagatcttctaagtgaattactaagtcggccgtgaccgtctagaaacagagtctggcggctgcgcagaccctgccagagcgttgggtgctttctttctcgttcccacccctcccctgctggacgtttctgggaagtttctaggtggtgggtggtgtagattacagctgagaaattagctcagatcatgcaaataaataagaggaatggagaatcagcatggagctctgtcctcggcttccagcacaagctcccatcacagtttccagagcttttactggcgtaacttcaaaataagttctttctgaatttcagcagaaaattgctttcaaggatgagaaaattacttagtgattgcggaaaaggaaaagtactgagccttcaccagctgagtcttcttcctttcccactccgcacccaaagggtgccatctgaggttaggatcgaggggctgccggtgctggcaggtgctcgttctctcctgtaatgaggaggggctcagacagggacgacatcttcagggggagacagccgtggggccatggctcccctgagaggtgtgtgggtcatcaggccgcacatttcaaatgagtgtgagagctcattgcagtgaatggaaagaaaggatgaaattccttttgagcctggtacagggagagacgtcagaaagcttcattgctaatctccctctgacggaagatggtttctgggcttctcagatggcagggagtggcctggtcactgttgatcttgaagggtgtgggacccgtgaaagtgaaggaggaaatgctccaggcctgacagcaaccgcagtggggagatggggcaggaactgaggggttggtgccgacaaggccggacccgggaggggagaggagcctgtagcaatctgaggcatgctgtagcccccttagagcgggcctggctcctggctggcagagtggctccatgccatcaaatgccctttctccctcgggagacagggaagcaaagcacttcccctgcttccagggaatgttcctgaagaggtcaagtggatagatcatcagggaccacaggaaagaccaatacctgctactttcttatgttgattcttctatgtccattatgaatgtgccagtttcaaaagaaatgcctatcatttccattgttgattttctggaaatagcgctcagcttttagggcagaagctactttacttttatagtatcttatcaaaggcatggctgaaaaccttgca

SEQ ID NO: 50800 - DNA, 1346 bp, Homo sapiens
cgcctcttttcttcaagtctcagaaggttagtttcctttttgcctttttaaaaccatctgctcttccccctaaattagctatatcccagggctcatctcctataacttctcctaaaaacaagtctataagactttttyatttcagagaacttaaaaaaaaaaaaacaaggaaatagacaaggtggtaggaatgacaagtgtgggagagaacagagagtcaaaaaagatggaaatttcttttcccgtggttcccacactcctaattgccttttctaggagattagaaatattcacctacctctggctccagtgtgtttcctagtggctggctgggaagcccagcagcttcaggtctttcatttcattcctgcaggtagaactcactcctcaccccaccccattctcttccattcactcgtccctacatcctgcaggatgcgtgtgtcacaaaggttccctttttagcatctctgtttgcaatgttaggcatttactcgcactgggcttacagtttctagttaaaggatcaactctaccagggcagaaagcattttggccatcaaccaagaggggagggaggattgagtgacctggaccttttccgtgtgctcccaggataagggaggacaaatggaaagcttccttcctataaatgctacatgggccaagatagtggaggggaatacttcacagcaaagtaactctcaacacttactaattaagcacgtggcagtgccatttattaagtctggtaggaatggttagaggctccacagcttaaaagaaaaaaagtagtaatattgaatagttctatttatgtcaaactatgacaacatattaatgtcaaaatgtgcagccagtctgtcaccatttgaggttactaatatgtctgcaaggccctttaagaacagttgttcccagcagtggagaacatgtggcccagtctaggaagcttcagccccagttctgccaaaaggaatgcaaggcaattgtgcagccactctgtgcctcagatcttatctgcaaattgaggggaataacatcggccttagggtcggtgcatcccttaagaatatttcagggctgggcatggtggctcatatctgtaatctcagcactttgggaggctgaggccagcggatggcttgagcccaggagttcaagaccagcctgggcaacatgaaatggcctcgtctctacaaaaaatacacaaattagtcaggtgtggtggtgcatgcctctagacccagctgctagggaggctgaggtgagcggattgcttgatcccaagtcaaggctgcagggagccaggatcatgccacagcactccatcctgggtgacagag

SEQ ID NO: 50801 - DNA, 1346 bp, Homo sapiens
cgcctcttttcttcaagtctcagaaggttagtttcctttttgcctttttaaaaccatctgctcttccccctaaattagctatatcccagggctcatctcctataacttctcctaaaaacaagtctataagactttttcatttcagagaacttaaaaaaaaaaaaacaaggaaatagacaaggtggtaggaatgacaagtgtgggagagaacagagagtcaaaaaagatggaaatttcttttcccgtggttcccacactcctaattgccttttctaggagattagaaatattcacctacctctggctccagtgtgtttcctagtggctggctgggaagcccagcagcttcaggtctttcatttcattcctgcaggtagaactcactcctcaccccaccccattctcttccattcactcgtccctacatcctgcaggatgcgtgtgtcacaaaggttccctttttagcatctctgtttgcaatgttaggcatttactcgcactgggcttacagtttctagttaaaggatcaactctaccagggcagaaagcattttggccatcaaccaagaggggagggaggattgagtgacctggaccttttccgtgtgctcccaggataagggaggacaaatggaaagcttccttcctataaatgctacatgggccaagatagtggaggggaatacttcacagcaaagtaactctcaacacttactaattaagcacgtggcagtgccatttattaagtctggtaggaatggttagaggctccacagcttaaaagaaaaaaagtagtaatattgaatagttctatttatgtcaaactatgacaacatattaatgtcaaaatgtgcagccagtctgtcaccatttgaggttactaatatgtctgcaaggccctttaagaacagttgttcccagcagtggagaacatgtggcccagtctaggaagcttcagccccagttctgccaaaaggaatgcaaggcaattgtgcagccactctgtgcctcagatcttatctgcaaattgaggggaataacatcggccttagggtcggtgcatcccttaagaatatttcagggctgggcatggtggctcatrtctgtaatctcagcactttgggaggctgaggccagcggatggcttgagcccaggagttcaagaccagcctgggcaacatgaaatggcctcgtctctacaaaaaatacacaaattagtcaggtgtggtggtgcatgcctctagacccagctgctagggaggctgaggtgagcggattgcttgatcccaagtcaaggctgcagggagccaggatcatgccacagcactccatcctgggtgacagag

SEQ ID NO: 50802 - DNA, 1346 bp, Homo sapiens
cgcctcttttcttcaagtctcagaaggttagtttcctttttgcctttttaaaaccatctgctcttccccctaaattagctatatcccagggctcatctcctataacttctcctaaaaacaagtctataagactttttcatttcagagaacttaaaaaaaaaaaaacaaggaaatagacaaggtggtaggaatgacaagtgtgggagagaacagagagtcaaaaaagatggaaatttcttttcccgtggttcccacactcctaattgccttttctaggagattagaaatattcacctacctctggctccagtgtgtttcctagtggctggctgggaagcccagcagcttcaggtctttcatttcattcctgcaggtagaactcactcctcaccccaccccattctcttccattcactcgtccctacatcctgcaggatgcgtgtgtcacaaaggttccctttttagcatctctgtttgcaatgttaggcatttactcgcactgggcttacagtttctagttaaaggatcaactctaccagggcagaaagcattttggccatcaaccaagaggggagggaggattgagtgacctggaccttttccgtgtgctcccaggataagggaggacaaatggaaagcttccttcctataaatgctacatgggccaagatagtggaggggaatacttcacagcaaagtaactctcaacacttactaattaagcacgtggcagtgccatttattaagtctggtaggaatggttagaggctccacagcttaaaagaaaaaaagtagtaatattgaatagttctatttatgtcaaactatgacaacatattaatgtcaaaatgtgcagccagtctgtcaccatttgaggttactaatatgtctgcaaggccctttaagaacagttgttcccagcagtggagaacatgtggcccagtctaggaagcttcagccccagttctgccaaaaggaatgcaaggcaattgtgcagccactctgtgcctcagatcttatctgcaaattgaggggaataacatcggccttagggtcggtgcatcccttaagaatatttcagggctgggcatggtggctcatayctgtaatctcagcactttgggaggctgaggccagcggatggcttgagcccaggagttcaagaccagcctgggcaacatgaaatggcctcgtctctacaaaaaatacacaaattagtcaggtgtggtggtgcatgcctctagacccagctgctagggaggctgaggtgagcggattgcttgatcccaagtcaaggctgcagggagccaggatcatgccacagcactccatcctgggtgacagag

SEQ ID NO: 50803 - DNA, 1346 bp, Homo sapiens
cgcctcttttcttcaagtctcagaaggttagtttcctttttgcctttttaaaaccatctgctcttccccctaaattagctatatcccagggctcatctcctataacttctcctaaaaacaagtctataagactttttcatttcagagaacttaaaaaaaaaaaaacaaggaaatagacaaggtggtaggaatgacaagtgtgggagagaacagagagtcaaaaaagatggaaatttcttttcccgtggttcccacactcctaattgccttttctaggagattagaaatattcacctacctctggctccagtgtgtttcctagtggctggctgggaagcccagcagcttcaggtctttcatttcattcctgcaggtagaactcactcctcaccccaccccattctcttccattcactcgtccctacatcctgcaggatgcgtgtgtcacaaaggttccctttttagcatctctgtttgcaatgttaggcatttactcgcactgggcttacagtttctagttaaaggatcaactctaccagggcagaaagcattttggccatcaaccaagaggggagggaggattgagtgacctggaccttttccgtgtgctcccaggataagggaggacaaatggaaagcttccttcctataaatgctacatgggccaagatagtggaggggaatacttcacagcaaagtaactctcaacacttactaattaagcacgtggcagtgccatttattaagtctggtaggaatggttagaggctccacagcttaaaagaaaaaaagtagtaatattgaatagttctatttatgtcaaactatgacaacatattaatgtcaaaatgtgcagccagtctgtcaccatttgaggttactaatatgtctgcaaggccctttaagaacagttgttcccagcagtggagaacatgtggcccagtctaggaagcttcagccccagttctgccaaaaggaatgcaaggcaattgtgcagccactctgtgcctcagatcttatctgcaaattgaggggaataacatcggccttagggtcggtgcatcccttaagaatatttcagggctgggcatggtggctcatatctrtaatctcagcactttgggaggctgaggccagcggatggcttgagcccaggagttcaagaccagcctgggcaacatgaaatggcctcgtctctacaaaaaatacacaaattagtcaggtgtggtggtgcatgcctctagacccagctgctagggaggctgaggtgagcggattgcttgatcccaagtcaaggctgcagggagccaggatcatgccacagcactccatcctgggtgacagag

SEQ ID NO: 50804 - DNA, 633 bp, Homo sapiens
gggttcaggagacattcactcccttcctcttttccatcagcttttcctctaagggtcctcagaaccccaaagagtttttcccagttgcttcttgggcatctttgtaagtacagctctcttgagaactggcagacacctttgactgaagaaataagttctggggaaataaagttttcctgctggatggaaggaagcacagatgttaggcttcgttgaaaaatgagttcagctcatgacagttgaaagtaaggaaatctgtgctgctacttgaaggaaaataagaactgattcctgagctgtggtttccyggcatatctcagagcagctgcattgcatcaggggtctgggtatcagatggggcttccacagctacaaggtgtgctgtgagtcagttgttactaataaaacaaagtactgaagcttgttagtgactcacaaaatagtaatgcattagatgagatatgcattgctgtttgagagtactcttgagaggggcagagccttgtttgctgggattgtacacaattctgggtaggcctttggtaaggtaacttgcaggtgtcacctgaaccaaatgccaaagccgagaatgattgtatatgccatttaaaagcagattgaaagaacattttg

SEQ ID NO: 50805 - DNA, 595 bp, Homo sapiens
tcagtcttatctcctgggctgggctggagacaccttctgggcaggggctgtcctcaggcctctttcctttcccctccgtgagacttgcccagggtccaatactcatgggtcacagttaaggactgagggttgctccgttgtaaagctaggaactggaggaggttatgttccaaccagatttccagagccttggcttctgatttggttaagtattccttggaaataaacaaataagcaatgcaaacatctgaagagcagtggtttgagttaaggagtgtacaaaatttaagaaaagtctgatgaagacaaagccatgtgctgggcaaaatcgaatcaatccataatagctttctgtcactcctgccatgccaatactgcctgaattgtttgtctacagcttgtgggaggctaaaagrgtcaaaggttagaatttggcacatgagatagaactagagttcagatcacatgcaccttttcacaccttcacacttttggagaaacagtgtatttgtttggttgggctgccatagcaaggtaccacaaactgggtcgcttcaacaacagaagtttattctctcacagttctggaggccag

SEQ ID NO: 50806 - DNA, 297 bp, Homo sapiens
tacttaatgatagttttgatggaaatttctaaacagtaaaataccttcccaaaatagtgactgtgggctaggtgtagtggctcactcctataatcccagcaatttgggaggccaaggcgggcggatcacctgaggtcaggagttcaagaccagcctggccaacaaagcaaaaccccatctctactaaaaaatasaaaaattagccaggtatggtagcggacacctgtaatcctagctactcgggaggctgaggcagggagaattgcttgaacccggaaggtggaggttgcagtgagc

SEQ ID NO: 50807 - DNA, 297 bp, Homo sapiens
tacttaatgatagttttgatggaaatttctaaacagtaaaataccttcccaaaatagtgactgtgggctaggtgtagtggctcactcctataatcccagcaatttgggaggccaaggcgggcggatcacctgaggtcaggagttcaagaccagcctggccaacaaagcaaaaccccatctctactaaaaaatacaaaaattagccaggtatggtagcggacacctgtaatcctagctactcgggaggctgaggcagggagaattgcttgaacccggraggtggaggttgcagtgagc

SEQ ID NO: 50808 - DNA, 2865 bp, Homo sapiens
tgcatataactaaccaaaacaaagattgtttcgaggtaaaagaaacctcaaggtaaacagcattaatagagatcgagggtcacaacataataaaaagtttccgttcaccagaaagatatgaataatttaaaatttgtatgtatcaaataaggcaacttcaaaatatacaaaactaaaatcgacagaacttcagggatagtcaaatccactaccatgctgtgagattctaacatacctctctcaataactgataagcccagtagtcttcatctttgcaaagagctttaaatacaactctaatttctctaacagcacctatcatgagacacattgcctataaatatgtatttcgggttgaatacttcacacacttcagaaaggacatggccatggaccagtgctgtcttatgtttgtagtcaagcatctccttgagaatctgaaggatgctatggaccttgtccacaaggaaaggaacacagttcattctcaacaatcaggaaaatacgggaggaaggttaagtcacaaaattaagttatacgatttttttttttttttgagatgaggtcttgcactattgcccagactggagtacagagacatgatcatgtctcactgcagcctcgactgatggctagggctcaagtgatcctcccactttagccactggaatacctgggaccacagatgcacgctaccacttttggcattttttttttttttttttttgagacggagtctctttctttgcccaggctggagtgcagtggcatgatctcagctcattgcaacctctgcctcctgggttcaagcaatcctcctgtctcagcctcccaagaagctgggattacaggaacccaccaccacgcccggctaatttttgtatttttagtagagacggggtttcaccatattgcccaggctggtcttgaactcctgacctcgtgatccacccgcctcggcctcccaaagtgctgggattacaggcatgagccactgcacccggcttttctaaaaaaattacttatagagagagacaaggtctcactatgttgcccaggctggtctagaactcctgggctcaagtgatcctcccaccttggcttcccaaagtgcttggattacaggcatgagctatggcacctggcctacaatataaatttaagcatccagtgtttaagtgaagaatttaggttacaaaacaatacacagtatctcaattatgttaaaaattggatacacagaacagaaatttaaaaagcatgaaaacagttccaagtggattgttcatctaacgtgaagagtaaaacaaggtttctagactggaactgttcagcaagatttaatgcatatcagatatgtaatctaaaattttctagtagccatgttaaaataggtgaaactaattttaataatatgccatttaacttattatccaaaaygttatcatttcaacatcgatataaaaaaattactgagatagtttacttttttttttttttgcacttaagtctttgaaatccagtgtgtattttatagttctagcacatctcaattataagtagccacctgtagttactggtactatattgaacactgcaattgtagaaaacaacataggagtttataaccctggaataggggaaatttaaacatcaaaagggctacaataaagaagaagattgattcattggactgcacctaaattaggaacttctctaacaagacatcctaagtcaaaagtcaagtaaaagtaggaaaatatttgcaacatacggctgcagaacccaaaaggcccagatcctgaattaagaaaaagacaagaaagaggatactgagatcattttctagattttgtaaattttctgtaggaagcacatagtacctttaaccccacccaccaaatacattttccttctgtgcaacttaccagttccacgagactattattggtgagaatgagttctgtcagacagggcagagcctgatcaagtccctcacctatacggctaaaataaaaatagagtcttagtaaaagtgaaaattaaataagctaacaattttatctacctccttgctcagaggatcacagagagacacttagagatccttcttccaacaccctgataaagaggaaacaaagcaaaaagaacccttttctgaggccacagggtcagcaacagaagtgggattttagacactgcctggggctaattccactgtcataccatctagtggaacctgagaaaaggtgcaactcctgggtggcacaaactacttaactcacttcatgattttttgtgcaggcagcacagaaatacaaataattctggattcccagctcaggtacaagacacaacaactatactataggggaatggttaacctatgagaaatatttctatctgaaggaaatcccactcaccacccagtacctttaaagacattatctatacaccaagtgctttttttccaataaagtttacacagagctgatgaaggcagggtcaaaaaagatctcaatttcaataagtaacagtctagaaattagttgcagttaaaaaaaaaaaaaagcagagacgctcagtcaaaagtataattgttacctttatatatccttttactatgacccctttgataattgttttagaagccaaaatgtatacaaagcaacatgtttttatttagaaacttaaccatgaaaataaaaatacatgatttctgaacagatacaagtaagactagactaatgccaggttaatctctggatctctataggaaaagtgaagttcatttctcattttaagaaaaaacatgtattgaatgtggcttccattatggaaaaaatattttttcaaaatataaa

SEQ ID NO: 50809 - DNA, 514 bp, Homo sapiens
tgtagctcaaaaaatatcttctaaaagaatgcatgaactaggctgggtgcagtggctcacgcctataatcccagcactttgggaggccgaggcaggcggatcacaaggtcaggagatggagaccatcctggctaacacagtgaaaccccatctctactaaaaatacaacaaattagccgggcgtggtggcggtcacctgtagtcccagctactcgggaggctgaggcaggagaatggcgtgaacctgggaggcggagcttgcagtgagccaagatcgcaagatcgtgccactgcactctagcctgggcaacagagtgagactccgtctcaraaaaaaaaaaaaaaggaatgcatgaactaaagttaaagctcagggtgtggtatggagggtcatggagtaggggaaattttatagttaacaaggctacaagtacttttccaaatttttgagttcagtatttaagcatttcttatacttctcagatatgtgaaatactagcattttatcaccttt

SEQ ID NO: 50810 - DNA, 552 bp, Homo sapiens
tacataatatacatttgttttgtttgtatgttgtagatatcattccatgatagtacatacagatctacttcattgtgtttttaaataattgaaaagtactccatagcacaaacataccatgatttactgaacagttctcttggtaatagacatttaggttgcctccaggatttggctactttgaacatccatgtatatatatatgaagttctagaagtgaaattgctgggtcaaatggtrtagtcaaattactcttcacaaaatatcgtactgacttaacgcttttactgatagtgtgtgaatgctcgtttctccacatcctcaccaatccagattatcatggcatcttaattatcaccattttgataggcaaaagtatctcattgttctaacgtgtatttccatgtttctggtaaggttaaatatcttaaaattatttcttatgctacaagtcacagtgcaaagattttgaaatactagaacattacccacatatagtggactggagttggtataaggttattttctcttcctcagtgaaattgtctctta

SEQ ID NO: 50811 - DNA, 538 bp, Homo sapiens
tacacagccctgggctggaatcccaagtccaatgcttacttagtgtgtgacctttggcaagttagcctgtccctctaaaatccagctcccttatctgtaaagtaaggatttaaaaattacttcctctcttatatcatttatagagattaaattttgcatgcraagtgcttagcatagtgtgtggcacacaggaaaaaacagatatggatagcgattttattatctttgaggcggttagaacagctctccttatctatggggtttgggatgtcaatgtatatgaaatgatatccacatcctgtttgttaccaacagaacttatcattgctgctgcccgctgcttgcaccaggtacccacgtcccaggtgaagtgaagccaaggaggggaaacgtcagcttctcgggtctgtggacactgcacatgatgctgcagaggccacggcactgaagcctttaaacccaactgtaatcttctctcataccagaaaatttctttttctgatttttagattgagcaggtgttactttaatgaactca

SEQ ID NO: 50812 - DNA, 538 bp, Homo sapiens
tacacagccctgggctggaatcccaagtccaatgcttacttagtgtgtgacctttggcaagttagcctgtccctctaaaatccagctcccttatctgtaaagtaaggatttaaaaattacttcctctcttatatcatttatagagattaaattttgcatgcaaagtgcttagcatagtgtgtggcacacaggaaaaaacagatatggatagcgattttattatctttgaggcggttagaacagctctccttatctatggggtttgggatgtcaatgtatatgaaatgatatccacatcctgtttgtyaccaacagaacttatcattgctgctgcccgctgcttgcaccaggtacccacgtcccaggtgaagtgaagccaaggaggggaaacgtcagcttctcgggtctgtggacactgcacatgatgctgcagaggccacggcactgaagcctttaaacccaactgtaatcttctctcataccagaaaatttctttttctgatttttagattgagcaggtgttactttaatgaactca

SEQ ID NO: 50813 - DNA, 538 bp, Homo sapiens
tacacagccctgggctggaatcccaagtccaatgcttacttagtgtgtgacctttggcaagttagcctgtccctctaaaatccagctcccttatctgtaaagtaaggatttaaaaattacttcctctcttatatcatttatagagattaaattttgcatgcaaagtgcttagcatagtgtgtggcacacaggaaaaaacagatatggatagcgattttattatctttgaggcggttagaacagctctccttatctatggggtttgggatgtcaatgtatatgaaatgatatccacatcctgtttgttaccaacagaacttatcattgctgctgcccgctgcttgcaccaggtacccacgtcccaggtgaagtgaagccaaggaggggaaaygtcagcttctcgggtctgtggacactgcacatgatgctgcagaggccacggcactgaagcctttaaacccaactgtaatcttctctcataccagaaaatttctttttctgatttttagattgagcaggtgttactttaatgaactca

SEQ ID NO: 50814 - DNA, 664 bp, Homo sapiens
tggacccagctggctcccacccccccacccatccaaggagcctgcattctgggtaaaggagcagccacgcatggatatgcagaacagatggcatttacactcgaggggcaacagtgtcaccaggttcctgcagcctaccacaagccacaccccaagagaaaatggcatgaaggaagacgtcaggagctcaggaagaagtactggttgttaagaaacagaggtctaggacaacagggatctggctaataagatctagaaaaatgggggttgttggaatgagaggaaagtgaggaagggtgggtgaataggcttgagccacctgctgcaggggacagaccccgctgtgaaccagaggttggaggaggccttgggactggctgggtgggccagtgggaaaggggaaccttgggaaccaagctctgcttctgcccggaggagggaggtgggccarggaggcctgaggcactctaggcaacaccctggagcaagagggctctggggaggatagagcagagggcacttgaggaccaggcgcttcctgggacaggctctccccaagcttccaagactagctcttgaccccaagactgaagctgcacctggctctttctctaccacaggggccctctcctcccctcaacacaggcaactgtgatcttttcaa

SEQ ID NO: 50815 - DNA, 472 bp, Homo sapiens
agaagaatgcagggctggattaaggcaggtctcacggatattgtgctaacagggtctttaaaatagactggagagaatgcaggcaaagggaaacatgagatactattttattttttattatggttgggcagtttttaaggcaaaatattgaaaataaatgatcttcaatagaatatttaaattacttccttacataacatgctgccacctggtggcatgataaaaattaggtaagaccagtattttggacagtttaaatatcttgaacagatgctacagagcagggtatcttgtaaacaagcgacttttagttttctcttagaactgagaaatatgaggtagctaaaatgtggcttttcttctcaactgctaaaagtcaatgctatgaacattacagktatccatttgcctaagttaataataatcaatatatactaagtatttactatgggacagtcactatactgattta

SEQ ID NO: 50816 - DNA, 497 bp, Homo sapiens
gataatgatatcagtaaatagggagacttttcaaatcctactctagctacgccctcctactcccagcttatcaagccacacgtgcatgatttttgcttgacctgcataamtgcatatgtgtacaggtgcgcacgcgtgcgtgtgtgtgtgtgtgtgtgtatttgtgtgtttgaaggcctcaggtaagggctacttcagctcgaatccagactgaagtacccttccgatgaaagatgttttattttcctaaatacctaagtaatgaacccaaacttatggaaaccaggttcttatgaaaaggtggcccaagcaccagcaagcttcaagactgtttcctgagagaaccaaacagaagagaactaggtagactggagtaaggagtagagcttcatttcagccatcccagaaggatcattaagctgttctgttttctctgcattttaattatgttggggctggaaatggacccacactgtgctccctgcggtgtacagagc

SEQ ID NO: 50817 - DNA, 644 bp, Homo sapiens
tgtattttattttagtggacacttacttgctgttgtattttgagcaagtatggtaattttaaaacatggccccaaaatattttgrcattcctttcatcaaaagatagcttttatgtccctttccctgaagtcttggtgggcttctaattacttcaaccgatagagtatggaggaagcgatgctgtgtaattcctgatgctgctcagaagggtcaggtcatttctacttgatcttgtgcaacactttatctggagaggctgtccatcatataagaagtagggctatcttaagaccaccatgctatagaggctacatgtaggtattctggtcaacagtcccctgagaggtcccagttgacagccagtcacatctgccagtcattaagtgaaccatcttgaaagtccagcccagtctagacttccaaggactgaagacccagtggctactaccaacaaattgactatgagtgagaactgcaagttcttttcctgaccaaatactctgggtgacatagaaaaaagaaaaacaaagttctttaaaatccctaagtttggaggcaaattcttatgcagagtgacaagttacttaaaagctttgaggattttggagatcatctataaaattgaggtaacattcctctttag

SEQ ID NO: 50818 - DNA, 645 bp, Homo sapiens
atttcaagtttggtcaagcattttggcttttgaacattaatctcctgagcagtgagctctgtacatgcctgggaaggttcaacacaacaatgacatgtgacagccaaacatccaagcactgagcaatttagattctcatatcaccaaatgggattttgtgggtggaggagarggaaggacccgaagttattttgctgttattctgttacagctctttcttctctgtgttgatgctgccaaaagctatgctggcagcacactggattttcagtgtttatattaactcgtcttaatcaaggaatcctgacttaaccttattctttctcacagacacagttcaatgctgcaatggagcctgtggtgagcactgattcaataggtggtttgcctccttagacgcagaatcacaggactagaaggagtgaaaacaacactttatctctacattggcttcagggaggacagtgcccaaaccacctcaagtacagaataatttactctcatttagaagatctccagacagagctcgaatggctcccttggcaacaaattttagttttaacaatctttgtagctttatccttccctccagataatgccataactgtgtactctagattaaacgttttctccttttctgcccac

SEQ ID NO: 50819 - DNA, 539 bp, Homo sapiens
tataaaatatggttaaaacgcaacaaggcattgagagtgctagaaggggcaggctagaagtcagaaaatactcaaaagtctcctaggagtcactaggtagagatgacgccactgaatggggtggtcacatccaggtactgagaggagaaggcaaacttagaagagatggaggctggagaacagacatctggatgtgggaggaggcaggaaaaagtagtggtaattggcttctgactccaacccctcagaaggatcaaagtcatatgccaagaaaaggaacatagcaagaaaatctagtactcctggtaaacatgtcaaggtccagaaatccaaaactaaaagaaaaaaacacatgtatgtacaagatataaccaagaattagaggttcacattagaaagcataattagtttgtgctgtggtctgagagactgtttgttatgatttcagttcttctgcatttgctgaggagtgttttacttctgattatgtgagcaactttagagtaagtgccatgtrgtgatgagaggaatgtatattc

SEQ ID NO: 50820 - DNA, 206 bp, Homo sapiens
gaataatacaggttttcccaagtccaagagtgtcagcamctcaactcaaattctggactcctatttctcctgactttccatgggcctgttttaccatggcataacaatggagataagatgtgccacatgataaataaaagctccaaattttgctctcggattttcatgagattggaggccagtttgctttgttttgttttctacat

SEQ ID NO: 50821 - DNA, 544 bp, Homo sapiens
tgtagaaccatgtctgtagaaccattaatgtwcattcagcccttggtacttggatatcaagaaatatccaagtatccaataagtgaataaatgaagataagaggtcactccctccactgaattagaaaaggaggaaaggacagtggagatgaatgctaagattgtaggataataacaggacactaaagaagttctcatcttccatttactctggtaacaagaaaggatgatcatcaaccaagaatgagggaagtagtgaggtcagagaatgaagaaatcacagatgtgttggaatagctattagggaaaatggaagatataattgcttagagaattgcataaaatggcaaagagctgtgttgattgtctagtgagggtttggagactgtagattaataatagcactgttctaggtttttttcctccagtaattctcagaagtctagatataagcatggaaaatataggcagttagattgaattgccttacatattaatctcttatgtgcactaatctttcctttttaacaaaattatatgatcc

SEQ ID NO: 50822 - DNA, 544 bp, Homo sapiens
tgtagaaccatgtctgtagaaccattaatgtacattcagcccttggtacttggatatcaakaaatatccaagtatccaataagtgaataaatgaagataagaggtcactccctccactgaattagaaaaggaggaaaggacagtggagatgaatgctaagattgtaggataataacaggacactaaagaagttctcatcttccatttactctggtaacaagaaaggatgatcatcaaccaagaatgagggaagtagtgaggtcagagaatgaagaaatcacagatgtgttggaatagctattagggaaaatggaagatataattgcttagagaattgcataaaatggcaaagagctgtgttgattgtctagtgagggtttggagactgtagattaataatagcactgttctaggtttttttcctccagtaattctcagaagtctagatataagcatggaaaatataggcagttagattgaattgccttacatattaatctcttatgtgcactaatctttcctttttaacaaaattatatgatcc

SEQ ID NO: 50823 - DNA, 586 bp, Homo sapiens
agctgaaatatctgaagggtaactcggtggatcttgaaaaatttccattcacaaacgcctgtattcagtaacatctcctctgaaaagttcttcctcctagtcgccactcctttaacttaaaagtactctctctctccactgaccacatctaacggtttatctgtctttatctcatttttagtgatacatcattttctacatagaattagaatatagttatttataggaagggttgatatttagaacatttaacagctggtatgaaatgaacaccaactaatcacaatacgtagctgccataaataactgctgtgatatgcacaaatatgttgtaggaatatctcattcccccacgttggatagttaccactttgaaggtggaggggaaaataacccttttattttgtatgcccaggggttttatggacaaagtagatacttgaaaactaattttttatttttattttaaaagacaggggtctatgctatgttgtccaggctggacttaaacttctgaggtgaaggsattcccccaacctcagcctcccaagtagctgggactataggtgagcaccactgtacccag

SEQ ID NO: 50824 - DNA, 587 bp, Homo sapiens
acatgatagattagtatttataagatctactatgtaataacagatagtcagatatgaatagcatacaggactagagaaattaaggagatggtgaggaggtgagtatagcattaaatactataccatagcaagttagcaatgggatatcaatgattagacacttgcttactaaaatgaagagcaaggcaaggatgtcccctctcactactcctttttaacatgggactggaagtctctgctaatgccattggacaagaaaatgaaacaaaattgtactgattgggaagtgtctaagtttaggttacaagataacataaactgartgacttaaacaatagttagttatttctcacagctgtatgctgggaagtcgaagatgaacttgctaggttgattaggtttcttgtgagagtccactttctggtttgtagatggccatcttctcattgtatcctcacatagcctagagtagagaggagaagcaagctcccttgtgtctcttcttataaggggactaattccattcatgagggctccactctcatgatctaattacctctcaaagactccatctacaaatgccatta

SEQ ID NO: 50825 - DNA, 612 bp, Homo sapiens
agatatatacataataagaaattatgtgttatatataatatatctactgatgtactatatactcacgtaatttatattagagaattatgatatatatatactcaattattatatcgtgcactatataatatataagcgcgtattatatattatataagtcaattgtataatatataagttcttatatatttatattacatagtctcatccctggccgtcgactaaatatattaatattatctattatatataaaaattccttctgagaactggaacatatatatgtcctatgatttttcagaccatttcttttctagttgtggaaagtcaaggctgacttatagcactttctttcagtttttcttccaaagccatccttaaattgcattgattattttttcagaaggtatagcattgccccttacattgccactatcatcatcccaatcaaaggctttcattacttgatggctaaattgttgcaattggcatctatctggtttccaattatcctttcagtctaatttttgtttaccrtgccactggattaacatttccaaaaagtatatttttatttgtcattcttagtttaaaatcctagtttaaaattcc

SEQ ID NO: 50826 - DNA, 593 bp, Homo sapiens
cccaggagagaggatctggcccagtatagatgtggtctctgtctcaagatccatcagccctgctgagcgcagtgggtcacacctstaatcccagcactctgggaggccaagacaggtggatcacttgacgtcaggagttcgagcccagcctggccaacatggtgaaaccccatctctactaaaaaatacaaaaattagctgggtgtggtggcacatgcctgtaatcccagctactcaggaggctgaggcaggagaattgcctgaacccaggaggcagaggctacagtgagccaagatcacaccactgcactctagcctgggcaacagagtgagaccctgtctccaaaaaaaaaaaaagatcaatcagccctagctgttctttaggttgtaagacaatcttaaggggttgtccagcacatattttgagtgattgcaactttaaaccaacttatgggattccaaaatcaacgatgacacctgaagtagacagccctgatttagatatttgaggcctggcatttttatatctatcacccacaagctttgtaatcacgcctcagagataattctacacatcttctctgtttatctcc

SEQ ID NO: 50827 - DNA, 539 bp, Homo sapiens
cctcagagtattcccaataagacatctgaatccaaatctctttcttagtttctgtttctgggaaaccaatttaaggcatatactatagatgggagaaaatagaaacgattcttggaatctcaagcacaaatacttgaatactggtatccaatgcttacaaaatctttgaggtggctaaaggagtaaaagtctgaggccacaactgaactaccagttcagaaccatcatatcgctatagctatggctaaaatttcagagtctgttgttgggacacaattctccaagtgtctctgatgtttctgcacatttttgtgagctaagcattaattgccttctttttcccaaactgtcttgtcaagaatctttgtataacgcacagttgtggaagataaagatactatttacatctggggtagagtgcaggtctgtttgattttcagtatwaaaaatataatgtgcattacatttatttaggtaaagcttcaatgggtttgctgcagcttatttcaaaatttgatttgggatttctcagctctggg

SEQ ID NO: 50828 - DNA, 792 bp, Homo sapiens
catttgtccatggatacttcagttgtttccatgttttacctagtgtgaataatgctactatgaacatggatgttacaaatatttcttcaagactctgctttcaaatcttttgggtacatacccagaagtggaattgcttgtacatgtacatgtggtaattttttaaaatatatattctcattacttttgatataacaatttgtctttcctaattgtctgctgtgacaaataatcttctctggtgtgtcttctgctggcttctcattcactttgtttttgttcctcttttccttttatttatagattaaaaattcaacttgctttgcaaaaactttttaaaatatctgtttaaatctttaatgcacaaaaagacagcaactgagctgcgtcttaaattttatagattgatgtcttagaaactaccaacttagcccactggaaaacgtcactggtatcctttatgatgtggccaaaattggggaatttttccttgtatttgtcagacttaattgactgtcatgaaagcaatgaactggaatgtgtcaggataccaagagacagcgatcaaaggctaaaatttgttttttattgttgttgttccttttacccccrcaaagagggcaacattaagcaacagagacacattgtcaatgccaatcttctgtttgtgttgctaaaatttatttattgttttataatttgatacccaagaagttgaagaaacaaaccaaaagaatgttgtcccatgcccaaagtcagcctcaatgggcctgagtgggtaattatttcaaa

SEQ ID NO: 50829 - DNA, 792 bp, Homo sapiens
catttgtccatggatacttcagttgtttccatgttttacctagtgtgaataatgctactatgaacatggatgttacaaatatttcttcaagactctgctttcaaatcttttgggtacatacccagaagtggaattgcttgtacatgtacatgtggtaattttttaaaatatatattctcattacttttgatataacaatttgtctttcctaattgtctgctgtgacaaataatcttctctggtgtgtcttctgctggcttctcattcactttgtttttgttcctcttttccttttatttatagattaaaaattcaacttgctttgcaaaaactttttaaaatatctgtttaaatctttaatgcacaaaaagacagcaactgagctgcgtcttaaattttatagattgatgtcttagaaactaccaacttagcccactggaaaacgtcactggtatcctttatgatgtggccaaaattggggaatttttccttgtatttgtcagacttaattgactgtcatgaaagcaatgaactggaatgtgtcaggataccaagagacagcgatcaaaggctaaaatttgttttttattgttgttgttccttttacccccgcaaagagggcaacattaagcaacagagacacattgtcaatgccaatcttctgtttgtgttgctaaaatttattwattgttttataatttgatacccaagaagttgaagaaacaaaccaaaagaatgttgtcccatgcccaaagtcagcctcaatgggcctgagtgggtaattatttcaaa

SEQ ID NO: 50830 - DNA, 1123 bp, Homo sapiens
gaaggtatttgtgactcttcttcaacccaatccaatttcctcatcagaaattgcctctttttcagctgttaaggcgggaagtatccaacagcaggagctctgatggggagaatgggcttgttttttattacattcctcccattccaaggtgggaaaccagaacatcactacgatagagtgattctgctctttggggtaggagggctgctcagaactcaagtattgttctgtataaggggagtagagcaatcttgtgcacagactcgttttctctgtgcctcaggaggccatgtgggtyggtacacagagtctgttggagatgagtatccagcacctcaacataaactagccattatgtgttggcctctctcgggtgcttacattatagacattgtacatataatttaaggcatccgagaacttccagaagccaaggaatggatgggtgcccagttaagaagacttattctagatgtaattgtggatttattgaaatcatcttccaaattctgctttatctaggataagtattattgcatttatttgaagttcaaattaggcgcctatgtcatttattttgcatgtgtatacacaattctaattttttggtctggtttggtgtttaaggagaagcagcatgatagggaagagcagtttctccctggacaggtcttcagcagaatctgcattcaagtcctgattccactgagccacttcaccaattgggccttcatcttctgctgaagaggaataacatccagtccagtgcgggcactggttgcagtgcccattgtggggcccatacctgcccattgtggttagttccaaaagtaaaagtgctttagaaagattagaatatcattaaaatgttaaaaaaattgttgtgataattttattattcttgtttctgggaaaattagctcttaaaccagaaaatctaatgtcatataaaagtagaagaggctaaccaatgataaaagcatgggatttttatagtaacttcaagtgtgtatgagggtatgtgtttctgtatgtgtgtgtgtgcgtgtgagagacagagagagacaggcagagagagagagagaaaggcagagagagagagagagagatgctttgctgaaaa

SEQ ID NO: 50831 - DNA, 565 bp, Homo sapiens
tccttcaacttagttgtaggtcctggagttctctcctgcattttcttatgagtttagtagttttatgttttacactgtaatgataccctatttttattgtaaatttcacatttttaatgtctaaatctaattttcttcaatttgtctcacgtgttctataacccttatttctctttttttcttaccttattttgaattaattgtcatgctgtcttttctattacctttgtgttattttggtatttatatcttctattttactaattctaggggttaccaaagagattacagagtgaacccttgagatattaaatgctaatatacatttttacatttgattttactaaggtaaaaatatttcataaatattgaatatgacattgaatgactttayatttgagcacctcctgactcattttcatggttttggtacaatataattttccatatatcttaaatccaaatacattactaaaattttatctaacaaatactttatcctttagacttaacctttttgctgcgatttagttatttcttctaatgctgaacttacatctgtctc

SEQ ID NO: 50832 - DNA, 587 bp, Homo sapiens
gcaggactttggagtcccctgatttcatgctgtgctcctagctcatcaccccagggattgtcarcctccttctcacacctggtgcccaccccactggtgcccaccccactaatgatgcccatccacagctatattagtcttctagggctgacttaacaaagtacggcagactgggtagcttaaccacagaaattgattctcacagctctggaggctagaagtccaagatcgaggtttctgcttgaaaatggcagtctttcccctgtgtcctcacatggtcttttctctgtgtgtgcatttgtctggtctctctcgctctcctccctccttctcccttcctccctctttctctctcgctcctttctctctctctctctctctctctcctccccctgcccctgtctctcttcttcctaatctcttcttataaggacaccaaattggactatggcccaccctaatggcctcgttttaatttaattacctctttgaaggccctatttctaaatacggtcacattctgaggtaccaagggttagagcttcaacatgtgaatttggggagacacagttcagcccatgacaaca

SEQ ID NO: 50833 - DNA, 633 bp, Homo sapiens
tgggtttaaaaccaaagaacaagaaactgtgaaaagamtacttattatcagaggattattactgaaaataattttgtcatagagaggaggggagggttaaaaaatgatcctctccaggtgtcctccaatgtcactgtttcccagaggtaatctacgctgtaagtttcctgtgtatctttccaagcttgctttctactgatacatatgaatatatgcaccagggtagtatagatagcctcattttgtagctggacaaatgttcaagtatatctacatattatcaccttttaaccttattctactgcctccttttctcactccacaggatgtgtttgagatcgggtcatgtggatacttatagatctagctctttcttttaacttgccatatgcatgatagagaccacattttacttatttgctcctggatgggcactcaggctatttccggttcttcactgttacaatgtgtccctggggtagggtttctctacacatggaaaggtcagaggcagacatagttctcagcttaatagatcccatcaggcgccctcctgaaggccatcccaacctgcagcttctctcgctctggggttattttcacccctgtccttttccacgatggcccagggcc

SEQ ID NO: 50834 - DNA, 633 bp, Homo sapiens
tgggtttaaaaccaaagaacaagaaactgtgaaaagactacttattatcagaggattattactgaaaataattttgtcatagagaggaggggagggttaaaaaatgatcctctccaggtgtcctccaatgtcactgtttcccagaggtaatctacgctgtaagtttcctgtgtatctttccaagcttgctttctactgatacatatgaatatatgcaccagggtagtatagatagcctcattttgtagmtggacaaatgttcaagtatatctacatattatcaccttttaaccttattctactgcctccttttctcactccacaggatgtgtttgagatcgggtcatgtggatacttatagatctagctctttcttttaacttgccatatgcatgatagagaccacattttacttatttgctcctggatgggcactcaggctatttccggttcttcactgttacaatgtgtccctggggtagggtttctctacacatggaaaggtcagaggcagacatagttctcagcttaatagatcccatcaggcgccctcctgaaggccatcccaacctgcagcttctctcgctctggggttattttcacccctgtccttttccacgatggcccagggcc

SEQ ID NO: 50835 - DNA, 533 bp, Homo sapiens
gaattatttaaaataatcaaattccttttaacatgccagtcctatattaaagtggtccttggatttagtaattgtttctcactcttaagtagaataaacatttctttcatttacatttctttctacttttctcctatataaaatataaagatrcccagtaaattaatgtgataggatctatacattcaacattgtaaagaacttatttgtaaagttctttttattcctctcagtaaatattttatcactgtggtggtgggtaaaatagatactaggacattgttcctgctgctgcacctaccagaatgaaccctgatatgtccaggatactgaggcataaaaaattgcctctgatagagcttctgaaaatttggtaggtgcagttgaagacctcggaacaatggttccttgaactttctgcacaggacatgtttattcctttttgactttttttgagacaaaatctcacttgatgcccaggctgggtgtagtgcagtggagcaattacagctcactgcagcctcaacctcccg

SEQ ID NO: 50836 - DNA, 522 bp, Homo sapiens
atctcttgctctttttttagttcctccttctcacccactacctttgcccctcctttaacaaagcagcgatttttgcaaagaaaaggggaaaaaacaaaatraatccgcattagacaaagggcacaaatgaacagatttccaaccctgaatagtttcagaatgaatgattatctggctaattagtgaaataaataataataattgcctgtccctcctcattagagcccttaatagcaaatggaaccccagtgcagagtgccagcaagctggtttcacagctcagtgctgagttgagaaaaatagacagtctgtattgcagatgttcacatgccaaccctaaaaccagaaaagccagaaaaactggggacttcaggatctgtaagggagatggcttgggacatagagggaatatttctgacttccttccatgcttaagaattatgctatgttctgggcatccaagaagtgagctaagacctatgaacatagaccatggacgccagaacacagaagaagttattc

SEQ ID NO: 50837 - DNA, 522 bp, Homo sapiens
atctcttgctctttttttagttcctccttctcacccactacctttgcccctcctttaacaaagcagcgatttttgcaaagaaaaggggaaaaaacaaaataaatccgcattagacaaagggcacaaatgaacagatttccaaccctgaatagtttcagaatgaatgattatctggctaattagtgaaataaataataataattgcctgwccctcctcattagagcccttaatagcaaatggaaccccagtgcagagtgccagcaagctggtttcacagctcagtgctgagttgagaaaaatagacagtctgtattgcagatgttcacatgccaaccctaaaaccagaaaagccagaaaaactggggacttcaggatctgtaagggagatggcttgggacatagagggaatatttctgacttccttccatgcttaagaattatgctatgttctgggcatccaagaagtgagctaagacctatgaacatagaccatggacgccagaacacagaagaagttattc

SEQ ID NO: 50838 - DNA, 522 bp, Homo sapiens
atctcttgctctttttttagttcctccttctcacccactacctttgcccctcctttaacaaagcagcgatttttgcaaagaaaaggggaaaaaacaaaataaatccgcattagacaaagggcacaaatgaacagatttccaaccctgaatagtttcagaatgaatgattatctggctaattagtgaaataaataataataattgcctgtccctcctcattagagcccttaatagcaaatggaaccccagtgcagagtgycagcaagctggtttcacagctcagtgctgagttgagaaaaatagacagtctgtattgcagatgttcacatgccaaccctaaaaccagaaaagccagaaaaactggggacttcaggatctgtaagggagatggcttgggacatagagggaatatttctgacttccttccatgcttaagaattatgctatgttctgggcatccaagaagtgagctaagacctatgaacatagaccatggacgccagaacacagaagaagttattc

SEQ ID NO: 50839 - DNA, 633 bp, Homo sapiens
cattagagcatgttttaaacgagcatataaattaaatgacatcacatattgtaagttatccccattgctgcagaagtaccatggtatcaattagacctcaggggacacacaggccaaatttaaattctgcctttcattcttatattggtgctgccataataaaatatcacagactgggtagcttaaataacagaaatgtatttctcacagttctgggggctggaaatttccagatgcagatacaggtgggttcttgtctggtgcgggctcttgtcctggcttacagacagctgccttctcactgtgtcctcacatcacaaaaaagacagggagggctctggggtctctttatcttcttacataaaggccccactcctatcagagaagggccctaccatcgggaaatcatttacactttatcacctccctcacaggccctatttctaaattctgtcacactggggattaaagcttcaatatacaaattttaggaggacacaattcagttcctarcacatcttaacagttgtgtgactttgggcaacttatatatcacctctcagccttgttttctgatttgtaaaatgtacattatattgatttcatagtgttactgtaaggcttaaatgattt

SEQ ID NO: 50840 - DNA, 469 bp, Homo sapiens
tgcctcagcctcccgagtggctgggattacaggcacctgccactacgcccgggaacttttttgtatttttagtagagacggtttcgccatgttggccaggctggtctcgaactcctgacctcatgatccacccgcctcggcctcccaaagtgcttggattacaggtgtgagctgccgtgcccggcccttagaatgttttaaatgcacgtacttccactgtcgtctacttccctgtgtgagggaaatctttgagatagaacttgtcctcccgtttgcctaccggggctttcattttacaaatctgttaaagttagctgggagtttcacatgagaaaastaacatatggactcacatgtagcagatacagtgcagtagctggaagaaaagctatggattcataaatatctggaatgcaagtccaggcccaatacttgtgacctgaggcaaggaagataattgatctctctg

SEQ ID NO: 50841 - DNA, 509 bp, Homo sapiens
agaccagagttgctcagtgacagttacacagagtaaaatgcataatggcttcttacataagtctaactctaatgaataagtgtgcttagatgttaagaatcatgtcattcagatacagggtastttttttttttttttttttttgaggtaaagtctcgctctgtcatccaggctggagtacatggaatacagtggtgcgatctcagctcactgcaacatccgccttccaaattcaagtgattctcccaggtagctggaactacaggcacctgccaccacgcctggctagtttagtaaagacaagttttcgccatgttggccaggctggtctcaaactcctgaccataagtgatccgcccgcctcggcctcccaaattgctgagattacaggtgtgagccactggacctggccccaaaatgaaaatcttcatagtaaacataaaacaaataagctacccattaactaatataagtaatcatattttaaagggaactactaaagtcacatc

SEQ ID NO: 50842 - DNA, 509 bp, Homo sapiens
agaccagagttgctcagtgacagttacacagagtaaaatgcataatggcttcttacataagtctaactctaatgaataagtgtgcttagatgttaagaatcatgtcattcagatacagggtagtttttttttttttttttttttgaggtaaagtctcgctctgtcatccaggctggagtacrtggaatacagtggtgcgatctcagctcactgcaacatccgccttccaaattcaagtgattctcccaggtagctggaactacaggcacctgccaccacgcctggctagtttagtaaagacaagttttcgccatgttggccaggctggtctcaaactcctgaccataagtgatccgcccgcctcggcctcccaaattgctgagattacaggtgtgagccactggacctggccccaaaatgaaaatcttcatagtaaacataaaacaaataagctacccattaactaatataagtaatcatattttaaagggaactactaaagtcacatc

SEQ ID NO: 50843 - DNA, 849 bp, Homo sapiens
tgaggtctgatgctcacagacaaatggaggaagtagaggcagaatggaaggtggtgaggtgctgcagttttgggctgagaaaggcwaggatatgcagaagaaaaaattgagagcctgacctctgaaggaacttgtatatttgaaagaaccagattctttaagaaatacttttatgcagccagatgtggtggcttacacctgtaatcccgcactttaggaggccgaggtgggaggatcacctgaggtcaggagttcaagaccaacctggccaacatggcaaaacttggtggtgcacatctgtagtcccagctactcagggggctgaggcaggagaatcacttgaacacagaaggtggaggttgcagtgagctgagatcacaccactgcacttcagcctgcagcctgggcaacagagtgagactctgtctcaaaaaaaaaaaaaaatgaaagaaagaaaagaaaaagaaatacttttatctatgttacatgcatccacacacgcatgcacacagcatggctaaatgaatccttgacctgtcatgcaccggccccatgggtgaatagttgtgcacattctgcagacacatgcctaattttcatttccgcctttacagtctaggtatctagcagcagctttctctgtttttgttaacttttatcttaagttaaggggtacctgcgcagatttgttctataggtaaacccatgtcctgggtgtttgtcgtaaagattatttaatcacccaggtattaagcctggttcccattagctactcttttctgacctctccctcctcccaccctccaatctccagtaggcccctgtgtctgtttttcccttctgtgtcca

SEQ ID NO: 50844 - DNA, 849 bp, Homo sapiens
tgaggtctgatgctcacagacaaatggaggaagtagaggcagaatggaaggtggtgaggtgctgcagttttgggctgagaaaggctaggatatgcagaagaaaaaattgagagcctgacctctgaaggaacttgtatatttgaaagaaccagattctttaagaaatacttttatgcagccagatgtggtggcttacacctgtaatcccrcactttaggaggccgaggtgggaggatcacctgaggtcaggagttcaagaccaacctggccaacatggcaaaacttggtggtgcacatctgtagtcccagctactcagggggctgaggcaggagaatcacttgaacacagaaggtggaggttgcagtgagctgagatcacaccactgcacttcagcctgcagcctgggcaacagagtgagactctgtctcaaaaaaaaaaaaaaatgaaagaaagaaaagaaaaagaaatacttttatctatgttacatgcatccacacacgcatgcacacagcatggctaaatgaatccttgacctgtcatgcaccggccccatgggtgaatagttgtgcacattctgcagacacatgcctaattttcatttccgcctttacagtctaggtatctagcagcagctttctctgtttttgttaacttttatcttaagttaaggggtacctgcgcagatttgttctataggtaaacccatgtcctgggtgtttgtcgtaaagattatttaatcacccaggtattaagcctggttcccattagctactcttttctgacctctccctcctcccaccctccaatctccagtaggcccctgtgtctgtttttcccttctgtgtcca

SEQ ID NO: 50845 - DNA, 612 bp, Homo sapiens
gaaaacaggatgagttttttgggtggtacaaaaaagaaagtgcctttaattataaaaacatagctgggccgccctgaaaygaatcagaggaaaaagggaacaacagagacatgttgtagtactccagaaaaagtgacggtagaagaaaacatttttgctgacattaaagtttctcagttattcacgacctgaagagacaaggggctggggaagaacaggctctgggaaatagtgtgtggcaaaatgttggctctgaccaggccttgagagacacagattctcaaactccaacagcagttttggtcagcaatctgctagggtgaagcaaaacaaatgtttcaggcaaaacaaagtaaatgaaacctcagaagcagaattcaggggccttatttatgatcagtagcagcaagaaatgctagctcggaaaaataggccatatgattagacagaagccatggtgggttcattgctggggtgccaaaagcaaagaggtcaaagggtaacacaagatgagattttaaatataatagatgagaaagaaaggcagcccaaagaaggcttgggaaatttctaaattttgcactaaagcagtgatatctcaaatcctactct

SEQ ID NO: 50846 - DNA, 612 bp, Homo sapiens
gaaaacaggatgagttttttgggtggtacaaaaaagaaagtgcctttaattataaaaacatagctgggccgccctgaaacgaatcagaggaaaaagkgaacaacagagacatgttgtagtactccagaaaaagtgacggtagaagaaaacatttttgctgacattaaagtttctcagttattcacgacctgaagagacaaggggctggggaagaacaggctctgggaaatagtgtgtggcaaaatgttggctctgaccaggccttgagagacacagattctcaaactccaacagcagttttggtcagcaatctgctagggtgaagcaaaacaaatgtttcaggcaaaacaaagtaaatgaaacctcagaagcagaattcaggggccttatttatgatcagtagcagcaagaaatgctagctcggaaaaataggccatatgattagacagaagccatggtgggttcattgctggggtgccaaaagcaaagaggtcaaagggtaacacaagatgagattttaaatataatagatgagaaagaaaggcagcccaaagaaggcttgggaaatttctaaattttgcactaaagcagtgatatctcaaatcctactct

SEQ ID NO: 50847 - DNA, 566 bp, Homo sapiens
ttaaaacaatatggttttggtacagaagaaaaaagtacattaatggaacaaagcaggtaataataaaaatgacctaagaacatacaagaacttggtgtatggtagaattggcagtatggatcaggggaaatctttaggcataaactgaatataactgctgactaatacttaaaataagaggccaaccatgtcattttgaagacatttatttgyaggtgccaatatagagtgagtcaagatatatgaaatagaatgaaacacaccaaattgttgccgttgggaaatggtagaggggagaagggtggggttgggaagtgcatgggaggaaaaacaccagaaaatttaattttaaatgttaatttttaaattgttcaataaacaaaatatttgaagcaaaaatggaaaatatgaaaatgtgtttactgtagttgagtggtagtaagaaacccctataattttctgtattttaaactatttaatagagaaagagcaaaaaatgcttcttaagcctcagaaatatataatttactctgccaaaggccttggcaatgtaggttttgaaagca

SEQ ID NO: 50848 - DNA, 566 bp, Homo sapiens
ttaaaacaatatggttttggtacagaagaaaaaagtacattaatggaacaaagcaggtaataataaaaatgacctaagaacatacaagaacttggtgtatggtagaattggcagtatggatcaggggaaatctttaggcataaactgaatataactgctgactaatacttaaaataagaggccaaccatgtcattttgaagacatttatttgtaggtgccaatatagagtgagtcaagatatatgaaatagaatgaaacacaccaaattgttgccgttgggaaayggtagaggggagaagggtggggttgggaagtgcatgggaggaaaaacaccagaaaatttaattttaaatgttaatttttaaattgttcaataaacaaaatatttgaagcaaaaatggaaaatatgaaaatgtgtttactgtagttgagtggtagtaagaaacccctataattttctgtattttaaactatttaatagagaaagagcaaaaaatgcttcttaagcctcagaaatatataatttactctgccaaaggccttggcaatgtaggttttgaaagca

SEQ ID NO: 50849 - DNA, 544 bp, Homo sapiens
gtgctcattgcctcagaggtagagaacatcaaggccagaatataatatgctgcttgtatttctctggcttttgtcttccaaaagcccagatccttagggaaacagtgaaataaacaaaagcatgaagggttgaagaagttacaactctccctcttttgtctcctgacctcagcctaaggggagaaggaaggaaggatgatgcgagggagagataaagatgtggacactgctttttatttagtgcaaacagtaccttgacaatgtgattaaggtcagcaccatcygtgatgccatgtagataccatgtgccccatgctctgatgggataaaaagggcacttaagttttgttgtctcctctccaaaaatccataggcccagtctaatcatgagaaaatctcacacaaaccatgactgaggtgcattctacaacatacctgatgagtcctcctcaaagttgtcaaggtcacgaaaaataaggggactgagagattgaggagactgaaggacgtggtaacaaatggcaatggagtaacgtggattgaa

SEQ ID NO: 50850 - DNA, 1593 bp, Homo sapiens
tgcagtggtggtgcartctttgctcactgcaacctctgcctctgtctcccgggttcaagtgattctactgcttcagtctaccgagtagctgggactacaggcacccaccaccacacctggctaatttttgtatttttagtagagacagggtttcgccatgttggccaggctggtctcgacctcttggcctcaaatgatctgcccgcctcagcctcccaaagtgctgggatttacaggcgtgagccactgcacctgtccttgtgtctctcattagatatttgcttgtgtgattattggttcagtgtctcttctcccaactagatgctaaactccatgaagagaggctgggtgcagtggctcgctgttttttttttttttttttttttttgctctggacctggcccataataggggctcaataaatttttggtaaataaatgattcaaactttttacacttcaagataaaaagtatgaaaagctggtggggataaagtctcggttcttttcctagccccagtcccatagcatttcaaagatggggtaggtggtgctacactactcaacaggcttttgttttttaactcatttaactcaagtgagttggtgaaggcattcaattggtggttttttatgtatagagaaattacctctgtcctgatttggaatatctgtgctattttgggctgtttttctcttttgggcctgtttgtattgtagcaataatttcaccatttggctatgcacaggcccaattaatattacacatgtggtcctataaaatgtgctttttgacatcacaacgttttgttgctaattactctccaaggtttttaatttcaagccctccttggtgactcagtgcacaaatttaaagacataattatttccccccaagggaagagagctctaggtaatgccgagtttctatctattcgcccctccttccagggggtatcgtgtttttgattatatctccgccctttctcgtggacagaatatacacatgcacacaaaacccctattggaacaaaaatataaatttctggaacacattaaaagcactcatttactaatgtattaattaacacaatatttactgagcacctactatgtgtcagatggtgcatgctaggctctaaaaataaaaaagaatatagcatggtgctgtctccaggtagctcacagtcaagtggacagcaagcaagtgctgggaattctatgacacatctggaaacatctgggggtgcttctcatggtggggcttattcattagagcccatccaaaagtgccacatcagtctccacgaattaaaatcaggagagctttgcgccatttctcatttgaagaccttggctaactgaaagaaatccacattttaatcacattttgaatgggttgataaaataggaacagatggttaaagtttgtcattttagggaaaataatgaaatattgtactgcttaatgtgtcttcgtgtcacactcttccctatcccctccctactgaaaatatattcagatgcaacaaaacttaaagcaaaattctaatatctttttacacactttaggtctcttcacctgaaagtgctc

SEQ ID NO: 50851 - DNA, 557 bp, Homo sapiens
tttttgtgtgtattagtccattttcatgctgctcataaagacataccggagactggacaatttacaaaagtttaatgaactcacggtttcttgtggctgaggaggcctcacaatcatggtggaaggtgaatgacacgtctcacatggcgtcagacaagagaagagagattgtgcagggaaacttccctttataaaaccatcagatctaatgagacttattcacttaccatgagaactcccaccgagtttctcccacaacacatgggaatttggggagctacaattcaagatgagatttgggtggggacacagagccaaaccatatcaactgtgagacattctctgctgattctttaagaatttaggaatattaactagtcctrattattgccattgtttcttattttagtaactttgaattccaagagagaaatatctaaactactattagttcataatccaaaaagtgaataatctttaatttctaaaagtgtagtatatttcacaagggaattcttgggtttattttcaagagacatggaaacccatttaagctt

SEQ ID NO: 50852 - DNA, 594 bp, Homo sapiens
atcactgttatgtatgggagaggagcctgggcaggtttcagagagacatagcaattgatttggttcttccttatcttttcagatttgactaaaatgtcaccttttatgtgaagccttgtctgactcccttcccccctggaaaaatgaattgcttcctgatttgtgtaccacttcaatgtgtatctatgtcatatgtgtatttcatgctgtagtcttaatttctttgctctctgtttcttgaagacatgagcctgtcttatgaaaatagttgtttctctagggactagcccattccatgctgcacattaggtcttgcgtgactgcttatagaatacatttgtaaatggaggcataaacatattaagacaggctacacaaaacttttcttcatgaagtccaaataaattgcgtaattatactatgtatttcggtgtaataatatccattattattgtttaaagaatgtagtaagaaaatacaayggtacttctgctgcagaacttcttatatttagcagtggtttcactaaccaaatacattatctaccaaatgctacaatgtctaaactactcaaagatttgcagatcattttaa

SEQ ID NO: 50853 - DNA, 597 bp, Homo sapiens
tttcatgccgtgatgtgttggagcccacccatgatcatccaagcctgtggttgatcttatttccatgactgttttatagctctaaataaacttttaaaaacacatatattttcatgtcacagaactaggtcccaagaaatttgtggaataccactctcttcacacacaagagtttaaatgatgaatgcaataatcatcatcatggaaccagccactactaggtcacgaatgacctgtttcctmttatgttccaaagtcccatgcacagcataagttgctgattgcaaagtggatgaaactgaaacgtgcaatttccctgcagagctaacgttgtggacaaaaagaggcagaagatgcctacagggaattcaggcgatttctattatagtgcatcatttcccactggctttgacctgtgagaaaactgggattttccactgttttcattataaaaggagtttgtagtaaaaatttcttattaccacagaatctaagggtggttgtctaacccagctctcaacacttgatgcagtcatgcctttaacaatatcactaacatggttatttagtctgtgcttaaatatctccatgtcctga

SEQ ID NO: 50854 - DNA, 597 bp, Homo sapiens
tttcatgccgtgatgtgttggagcccacccatgatcatccaagcctgtggttgatcttatttccatgactgttttatagctctaaataaacttttaaaaacacatatattttcatgtcacagaactaggtcccaagaaatttgtggaataccactctcttcacacacaagagtttaaatgatgaatgcaataatcatcatcatggaaccagccactactaggtcacgaatgacctgtttcctattatgttccaaagtcccatgcacagcataagttgctgattgcaaagtggatgaaactgaaaygtgcaatttccctgcagagctaacgttgtggacaaaaagaggcagaagatgcctacagggaattcaggcgatttctattatagtgcatcatttcccactggctttgacctgtgagaaaactgggattttccactgttttcattataaaaggagtttgtagtaaaaatttcttattaccacagaatctaagggtggttgtctaacccagctctcaacacttgatgcagtcatgcctttaacaatatcactaacatggttatttagtctgtgcttaaatatctccatgtcctga

SEQ ID NO: 50855 - DNA, 597 bp, Homo sapiens
tttcatgccgtgatgtgttggagcccacccatgatcatccaagcctgtggttgatcttatttccatgactgttttatagctctaaataaacttttaaaaacacatatattttcatgtcacagaactaggtcccaagaaatttgtggaataccactctcttcacacacaagagtttaaatgatgaatgcaataatcatcatcatggaaccagccactactaggtcacgaatgacctgtttcctattatgttccaaagtcccatgcacagcataagttgctgattgcaaagtggatgaaactgaaacgtgcaatttccctgcagagctaacgttgtggacaaaaagaggcagaagatgcctrcagggaattcaggcgatttctattatagtgcatcatttcccactggctttgacctgtgagaaaactgggattttccactgttttcattataaaaggagtttgtagtaaaaatttcttattaccacagaatctaagggtggttgtctaacccagctctcaacacttgatgcagtcatgcctttaacaatatcactaacatggttatttagtctgtgcttaaatatctccatgtcctga

SEQ ID NO: 50856 - DNA, 538 bp, Homo sapiens
  misc_feature (1)...(538): n = A,T,C or G
ctcttgtaccctcaaatcctagtcgcttcagtaactctctgatgccttcaagcacttttttttgtatcctatccagctttttaattgttctcagtaggagtatctgccttctgcaggctattccatcatagctccagagccttattctaaagtaattcttcagatactctacatgggatgattagttttctgccatttaccattttcactgaaaaatatacttattatttattttgttacatatttgacaaccacatatttaccattttataatttatttgtccaatatcttatcaatgaactatttttttaaacattttatgaaaatgttcaacatagagaaaaacagatatagtacaataaacacccatgtrttcatcatctanattcaacacagttagcatttttgtcatatttctcttctccctaaattcttcagcatgcaattcctaagaataaagatattttaccttcattatcacaatatgttggacagttctgtctaatgttttggtgattacaaaaaaatactttaaag

SEQ ID NO: 50857 - DNA, 521 bp, Homo sapiens
tgggcatgtcatctgcatccaattagggactgagctgacttaatttgagttacagtttttataaagttttattttctctggttcacttctacccctagcctgtagctgtctgagtggttttacaaaggccctccttttagtggattctgaagtgkaatttttgtcttcttggcactatgaaatggtaaaagtctttcagtggcgaaagacgccactctgacttccatgagcattctgcttacttttaaactttgcatttaggaatttggcaaatgcctgaaggacaaaactggccgctggtcttaattttctatgcctctcttttcaccaggatcttgccttcgccccatattctggctgtattcatgttaccagaaaggggtcccaatccagaccccaagagagggttcttggaccttgcaagaaagaatctggggtaagtccacacagtaaagttctcagaggcatttgaaccagagcaactctatcttaaataggagctgggtaaaatgaggctgaaa

SEQ ID NO: 50858 - DNA, 1110 bp, Homo sapiens
aggagcttcagtagaagctctcttacgttagctatgaaggaggcagggacatttcacgtctcttcctgagaaacaggaagacccagccccacagaaggctgacttgaccattataacccattagcctgttgcagagttgcagaacacaggtagctttttaggtactggtatttggctggtttgaacttaaaaattgaaaaaaaaaaaaaaaaaaaccaaaaggatcctctttttcctaattctaaaggtaatatacagtgattgcagacattttgtaaaatacagaaaaataggccaggcacggtggctcacacctgtaaccctggcactttgggagggtgaggcaggtcgatcccttgaggtcaggagttcgaaaccccgtctctgctaacaatgcaaaaattagctgggagtagtggcaggcgcctgtgatctcaactactcgggaggctgaggcgggagaatcgcttgaatctgggaggtggaggttgcagtgagcttagatcacgccactacactctagcctgggcaacaagagcaaaactttgtctcaaaaaaaaaacaacaacaacaamaaaaaaaaccagaagaatataaatcagataagaattacttggtatggaatcatccagaaattataacatatttaattttggaatattttcttcttttttaaataaagtaatgaataagtacttaaaatggatgggatcataatatatatattgtttgtagccttatagtttccctcttagtatattgtgagcactgacacatatccttacatgatttttaataattccacaaaataggtatataaatcacaactctatttggggttatttacattgtttacagctttggaattaaaaataatgcaatgggcaatggctggcaagctggccaaataggaacagttccagtctgcagctcccagtgagatcaacgcagaaggtgggtgatttctgcatttccaactgaggtacccggcccaactcattaggactggttagacagtgggtgcagcccatggagggtgagcagaagcaggatgaggcatcccctcacccaggaagcacaaggggttcaggaactccctcgcctagccaa

SEQ ID NO: 50859 - DNA, 1110 bp, Homo sapiens
aggagcttcagtagaagctctcttacgttagctatgaaggaggcagggacatttcacgtctcttcctgagaaacaggaagacccagccccacagaaggctgacttgaccattataacccattagcctgttgcagagttgcagaacacaggtagctttttaggtactggtatttggctggtttgaacttaaaaattgaaaaaaaaaaaaaaaaaaaccaaaaggatcctctttttcctaattctaaaggtaatatacagtgattgcagacattttgtaaaatacagaaaaataggccaggcacggtggctcacacctgtaaccctggcactttgggagggtgaggcaggtcgatcccttgaggtcaggagttcgaaaccccgtctctgctaacaatgcaaaaattagctgggagtagtggcaggcgcctgtgatctcaactactcgggaggctgaggcgggagaatcgcttgaatctgggaggtggaggttgcagtgagcttagatcacgccactacactctagcctgggcaacaagagcaaaactttgtctcaaaaaaaaaacaacaacaacaacaaaaaaaaccagaagaatataaatcagataagaattacttggtatggaatcatccagaaattataacatatttaattttggaatattttcttcttttttaaataaagtaatgaataagtacttaaaatggatgggatcataatatatatattgtttgtagccttatagtttccctcttagtatattgtgagcactgacmcatatccttacatgatttttaataattccacaaaataggtatataaatcacaactctatttggggttatttacattgtttacagctttggaattaaaaataatgcaatgggcaatggctggcaagctggccaaataggaacagttccagtctgcagctcccagtgagatcaacgcagaaggtgggtgatttctgcatttccaactgaggtacccggcccaactcattaggactggttagacagtgggtgcagcccatggagggtgagcagaagcaggatgaggcatcccctcacccaggaagcacaaggggttcaggaactccctcgcctagccaa

SEQ ID NO: 50860 - DNA, 547 bp, Homo sapiens
ggtttggatctttcttctcaccaactctcttgtggaactgtaatccccaatgttaaagatggggccaggtgggaggtgtttgggagatggtggtggatccctcatggcttaatgttgtccttctgatagtgagtgagttctcatgagatcttcctgtaaagtatggcacctcctcccacccccttgcttctgctttcaccatgtgaagtacctgctcctgcctcactttctgtcatgagtaaaagctccctgaggcctacccagaagcagacgctgctatgcttcctgtatacccgacaaactcaccagccaattaaagctcttttcttataaagtacccagtctcaggtgtttaytcatagcaatgcaagaatggcctaatacagtattgttggaggaatttttgtcttagcgcacatgcattgggttgcaccattatttgtttttcttactatagactacagtaaaaaatatttgaaaatcattggcctaaagcaactaaagtctcttacagagtttacctcaaggagttgttagaaggttcaca

SEQ ID NO: 50861 - DNA, 539 bp, Homo sapiens
taagtctttaaaatgtatgctatgctttcagcaggctagaatagttcttttggagtttttctgctctggtgggtaaattcacattcaatcaatttctgaaaatacatattcagttgccaatgggcttgcattttgatatgcagcttataatatgcagttaatgggcaggaactgctcctggagcgctattttggactgtgaaacatttttcaagctctggtgatcgtctgattaaatctgaattcatacatttttatgaattcacgagtttcataagattcaaaaaaccataayttacagtaaaaatcacctgtcaattaaaaacaaaaaacaaaatcaaagctgttctgaaactagaatagacccgtgagaagaattagggtggaatgcagtctcccataactgaagaaaggaccatttgaggggaaaatctgtgtaaaagcaattgttcccaggctaatgcttgatcttacatgctgctattcaggactacattttatagtgagattcttcagcccagaaaagggttacttaaaagt

SEQ ID NO: 50862 - DNA, 642 bp, Homo sapiens
cggaagtgatcattccagtcagagcctgaagtgatcattccagtcagagcctgacaccagccaatattcacaaactcagtttattttagctgtgttattcagtctactaaatgactgagtaatcaactaactaactcagtaattgttatgggctgaattatatgacccccaaaattcacatgtttaagtcctaacctctatgacctcagaatgtgactgtatttggaaatagggcctttaaaatggtaattaagttaaaatggagtcctcggggtggaccctaattcaatataactggtgtccttataggaagaggatgttaggacagagggatgaccatgtgaggatatagcaagaaggtggctatctccaagtcaaggagaggggtttcagaagaaaccaaacctgccgacaccttgatcttgaatttctagtgtctagaattatgagaaaataaatttctattacttaarctacccagcctagggtattttagtacagcagttcttgaaaactaatatgctaacaaactatctaagaaaaaaaagttaaaatcctatttcctgtcctggaagagctgatataataggaaaggaggcttgacttgtaaacatttccaccattagtcagaatgatcttata

SEQ ID NO: 50863 - DNA, 558 bp, Homo sapiens
gagtgggcaaaatgaaataatctctataaagggattaattcacttcmtatctttgtattaggatcttttgttttcagttttattttgctttagaccagccaattataggcagcaccagtattgttcccaaagacccaccattgcttaagtggatggaaaaaaaggggcctcccctctgtggtttactgcaatagtagctgctttttctagatcctggaagccagcttaatattgagttccctggctgggagcctccaaataagccctgagcatattgaactccagctgttgaactgaggaacagctggaaattacacaattgacacctaaatggaggcgatgatccctgcacaatcaccttcgattacctgcacgttgctttccgcctcagccttgctgattttcctgtggtcgcccaggaccttgctgacttctgaagctggcctgagcttgaacaatgtctgtatggtggtggtggtgatggtggggctgtgtgtgtgcatgcatgtgtgtttacaaccgagtctcatagccaaattcacacagagcctgggaagt

SEQ ID NO: 50864 - DNA, 782 bp, Homo sapiens
gccctgaagcagggaggattcagacttgggtaaagggtgccttttcccacaaaggcagggaagaacttgagcggtgggagagagagcagtaagaaattggacaagttaaaataaaacataaaaactaacttaataaagtaaatctgagcattagctgtgtatcacatcacctgtggatatttaaaaatatgcatgtctgggcaccactccagatctattaaatcagactctccaagagtgatcacatgtgtaccctagcacttataggtggattgtacattctatcattaaaaaaacttaagatcttccctcatttacacagtatccagaagattatacaaaaagctctctgaatttgagtgggacattctaatacatgcaacaacagagagcagtggagtctggaatggcttttctcactctattctggatatccctactccaatcttcttcaataatagatgcaggggcttaattctggtgtgccccccaccccttactcccccatgtagccatctgccttgtgatcagcaaagaaacctcttttctttgggcactcttttttcatgtcccctctcccaagtcccttcagtttatatgttttgccaaccctccttttacttcctatccaaattcaatcatttatctctgtctggttgagctgggagggytctggatactgtgaaaggaggagagacagatatgaagctctgaagaagcattcactctctagcatcagggtgattatttaaaaggctagtagaccttttacactgtcaaaa

SEQ ID NO: 50865 - DNA, 662 bp, Homo sapiens
catctccatcttcagaaaggaaggtcagcacaggatctgaagaaggaaaatgaagataggaggaacttcataactccattctttttttgtgtttcagcaacacccccgtctatttagcggggcatccccagagcagttccactatgtgtcctctttatcaccagcgggacttagcactgggcttggtatamaagagatactgaatatttactgaacatagaagagagggcaagccaatagtctcagaaagaattaaggagatatcccctttaatgtgatttttacatgcaactcaatggtggtattggttcattttggaaagatgaccctaaatggacaagttcaatgacaatcactgcccaaacctataagtgcctatgtttgaaggccaggggcacagggtagtggttctcaatgtgtagtgcttagaccaacagcagcagcagcacctgggactcattagaaagcaaattctactgccctactgctacggtttgcatagggtttgtttgtttgaccccaccaagtctcatattgaaatctgatccccaatgttgaatgtggggcatggtgggaggtgtttgggccatgggagcagatccctcacaaatagattggtggaattctcaagggagtgagtgacttctcttcattcctgcaat

SEQ ID NO: 50866 - DNA, 662 bp, Homo sapiens
catctccatcttcagaaaggaaggtcagcacaggatctgaagaaggaaaatgaagataggaggaacttcataactccattctttttttgtgtttcagcaacacccccgtctatttagcggggcatccccagagcagttccactatgtgtcctctttatcaccagcgggacttagcactgggcttggtataaaagagatactgaatatttactgaacatagaagagagggcaagccaatagtctcagaaagaattaaggagatatcccctttaatgtgatttttacatgcaactcaatggtggtattggttcattttggaaagatgaccctaaatggacaagttcaatgacaatcactgcccaaacctataagtgcctatgtttgaaggccaggggcacagggtagtggttctcaatgtgtagtgcttagaccaacagcagcagcagcacctgggactcattagaaagcaaattctactgccctactgctacggtttgcatagggtttgtttgtttgaccccaccaagtctcatattgaaatytgatccccaatgttgaatgtggggcatggtgggaggtgtttgggccatgggagcagatccctcacaaatagattggtggaattctcaagggagtgagtgacttctcttcattcctgcaat

SEQ ID NO: 50867 - DNA, 538 bp, Homo sapiens
tgagccaccgcgccggcctatgtatgtagatttctttaccagcagaccttgaaattytcaaggccaccagtgataatcttatttaatccccaatatctaggtaatgtctggcataatggatacacttactagagatatgttacataaaccacattgaggagcattcagattctgaccattccaaggaagatggcttcatgcaaccttagctcctgagatgaaggagtgagcctgggagaaacgccctggcatgtccgacatctggcagaatgaccacgcaaacaccgaggaagaaagcataaaaaaatcaaagagacggcaggccttggcatgggctatttgcactctctacagattacaactgggggcagagcattaacaggacttgatgggcagcagagtccaataaatgagagagcatagaccatgggttcagcctggccccttgatctcatgtgaaataacatgcttgggcagaatcacacttgattgtgatcttggggaaataactgaaatctttgtgcccactttctcaact

SEQ ID NO: 50868 - DNA, 538 bp, Homo sapiens
tgagccaccgcgccggcctatgtatgtagatttctttaccagcagaccttgaaattttcaaggccaccagtgataatcttatttaatccccaatatctaggtaatgtctggcataatggatacacttactagagatatgttacataarccacattgaggagcattcagattctgaccattccaaggaagatggcttcatgcaaccttagctcctgagatgaaggagtgagcctgggagaaacgccctggcatgtccgacatctggcagaatgaccacgcaaacaccgaggaagaaagcataaaaaaatcaaagagacggcaggccttggcatgggctatttgcactctctacagattacaactgggggcagagcattaacaggacttgatgggcagcagagtccaataaatgagagagcatagaccatgggttcagcctggccccttgatctcatgtgaaataacatgcttgggcagaatcacacttgattgtgatcttggggaaataactgaaatctttgtgcccactttctcaact

SEQ ID NO: 50869 - DNA, 558 bp, Homo sapiens
gataaacagggaaagggaactcatttttccygtgatctctgtggctcatggaaaggtccagctaccaactgacttggcaccagcagctcctcctgcagctgggacgggccttgtctgggccacagcagcctcggcaggaggcattggtggttgtgagctggtgtctgtgggccgcagcctactgtcactacctgtttaggatgctggtgtcagagctgctgatttgggcgccagcatcagaaacaaccccaggggatggacagagaaagagtaggccccagagagtcctcccaaggtactcacgtgaggcgaggcgtgccagggaccctcagagagagccaggaggagtttgcccagggagggacaatcacactcccttgtgcctatggcccgatccacccaccaatctggaagacttgggatacagcctgcaaatcctgcccaccactggacagctcccgtcatcagtgttatgtcaaaagcatattttcctctttagttgtggcagagggatggagaatcccaggccactgggccccttttccttggcagtcctgc

SEQ ID NO: 50870 - DNA, 558 bp, Homo sapiens
gataaacagggaaagggaactcatttttcccgtgatctctgtggctcatggaaaggtccagctaccaactgacttggcaccagcagctcctcctgcagcygggacgggccttgtctgggccacagcagcctcggcaggaggcattggtggttgtgagctggtgtctgtgggccgcagcctactgtcactacctgtttaggatgctggtgtcagagctgctgatttgggcgccagcatcagaaacaaccccaggggatggacagagaaagagtaggccccagagagtcctcccaaggtactcacgtgaggcgaggcgtgccagggaccctcagagagagccaggaggagtttgcccagggagggacaatcacactcccttgtgcctatggcccgatccacccaccaatctggaagacttgggatacagcctgcaaatcctgcccaccactggacagctcccgtcatcagtgttatgtcaaaagcatattttcctctttagttgtggcagagggatggagaatcccaggccactgggccccttttccttggcagtcctgc

SEQ ID NO: 50871 - DNA, 558 bp, Homo sapiens
gataaacagggaaagggaactcatttttcccgtgatctctgtggctcatggaaaggtccagctaccaactgacttggcaccagcagctcctcctgcagctrggacgggccttgtctgggccacagcagcctcggcaggaggcattggtggttgtgagctggtgtctgtgggccgcagcctactgtcactacctgtttaggatgctggtgtcagagctgctgatttgggcgccagcatcagaaacaaccccaggggatggacagagaaagagtaggccccagagagtcctcccaaggtactcacgtgaggcgaggcgtgccagggaccctcagagagagccaggaggagtttgcccagggagggacaatcacactcccttgtgcctatggcccgatccacccaccaatctggaagacttgggatacagcctgcaaatcctgcccaccactggacagctcccgtcatcagtgttatgtcaaaagcatattttcctctttagttgtggcagagggatggagaatcccaggccactgggccccttttccttggcagtcctgc

SEQ ID NO: 50872 - DNA, 541 bp, Homo sapiens
cacacacatacatacacacacacaaactgttccagaacagtgacttagtgaaaaactggatttccactctgtcagacaaatttcggaaagcactgaagtagggcatttctgattgattttaccgttcccggaattttattttcctttatcacttagacsccttctgtggggatttaataaataaacgtcttttgtagtgtatgttatttcattttatttttataatttatatgaattttaattttaacttgacaaataaaaattatatatatttatggcatacaacatgatgtttcatacgtgtatacattgtggaatgacaaaatcaagctaattaacacactcgtttcctcacatactgattttaatgtgatgaggacatgtctaaaatctactcttatagcaattttcaagtatacaatacatacttatacactgtagatgccaggctgttcaatagatctctagaaccattcctctctgaaattttgtatcatgagactatcatctctccagtccctccctgacccctgcctcgggt

SEQ ID NO: 50873 - DNA, 541 bp, Homo sapiens
cacacacatacatacacacacacaaactgttccagaacagtgacttagtgaaaaactggatttccactctgtcagacaaatttcggaaagcactgaagtagggcatttctgattgattttaccgttcccggaattttattttcctttatcacttagaccccttctgtggggatttaataaataaacgtcttttgtagtgtatgttatttcattttatttttataatttatatgaattttaattttaacttgacaaataaaaattatatatatttatggcatacaacatgatgtttcataygtgtatacattgtggaatgacaaaatcaagctaattaacacactcgtttcctcacatactgattttaatgtgatgaggacatgtctaaaatctactcttatagcaattttcaagtatacaatacatacttatacactgtagatgccaggctgttcaatagatctctagaaccattcctctctgaaattttgtatcatgagactatcatctctccagtccctccctgacccctgcctcgggt

SEQ ID NO: 50874 - DNA, 1316 bp, Homo sapiens
atcataacatttcacccaaatacttcagtatacagctataaaaaataaagacactttcctacataaccatgatgatatcacacataacaaatataatactaattccttaacgttctttcatacccaggccatattcaaatgcctcagtagttcctcccccaaatgtctcttacagcaaatttatccaaatcagaaaaaaaaatctgtatctatataacatttgtgatacaaatatagaaaaatactacaactgtgaaatctaaatgtgggtattacgctattctctgtcttttctctggatttgagattttttgtaatacagtgtccaaaagattgccaccattatatcttttcagatatgattataaatgtwtcagaggagagtgttgtctagactgtgctactgggccctgtgctgttcaaagctgtcctcaattatttggacaatgatatagaaatgatccttatcaaatttctcagttgatgagctaggagaaacaatgaacatgttagataactgaatcaagatccaaaaacactttgacaaactaaatatagcagactgctgaggaaatgagtggtgatacactgggtgctttttttgttcagtaagagctggaggcaaaaggtcacaggtcgatagatgccgtcatgaggaagggtcctatggattaccagtagctttggtgatggccagatcaaatggaattgcctgaagcattaaaaaaaaaaaaaagttacagctttttcagaatttgtccagcaggttttctggttttcactggaaaatacctcacacaaaaaaagaaaaattaaaataaattttaagagtcctttatcaagagggcctgcctgctgccctcctggcttgtgagctgcatctgttagccttgtgagatgagcattgccagcgaactggggtggcaaatgtgagactaagaaatggaggtggggggcttggaaggtggggatacaaaagccaaattgctatagaatcttgaagtaagtttccatcattatgagaaatcttcaaggtgagtagcaaggtagcctaaccatcttggcatcgaactcaagcacttgactgggtccaaattcagagattatcttatcctgtgcttggcatatttcacaaggacagatgtgtcagccaaactggagatgtggacatgataatgagcaatttttttaaagtcacagtatctgaatgtaggtcgccttggcattgacagggcaaacaggaggatctcagtttgtacaaaagttaaaatcctttattcagtctcaagagttttctggatcaaatcctccatgtc

SEQ ID NO: 50875 - DNA, 962 bp, Homo sapiens
aagtaattataattgatatacaattagtaaatgtaattcaatatcataattacaataatgtgtaaaatactaagaaataaaaatagaatagattggccttgaaatggrcaaatacaagcctaaatcattttcataacttaatgttggaatttacttagcatttttaccgagagagtttcagaaaactgggtaagaaaactggataagaaaggataagaatgatttgtgtgggttgtatgtagaactgatttgggccacaatggtctgggagcctagacaatattagttgaactgaaaaaaaaaaaagtgaaagagaaaaaaataacttctaaaatttttggtttaacttttgtaataactcctcttcaccatccctcaaactaaagaaaaagtttgggggcagatgaagaaatacatgaactacatcactcagaaatgacgaaacaccgcagcatgctatattccttcattattttttctctaattatttactttttcctgcctcctgcatctacttctgtttcctttggttgttaaattgtggtgcatttgtcctgtcttgtgaagggataagaaaggattctctctgagaagaatatagaaaggaaaatgtgtctgtattatggaaagatgtattagactgagacttgttcgcaattttctagactttgtgaatagttactgtttgttttttaaatgattataacatatgctattacttttgagtgacccctttcacatatctcaaagtgtccttcataaaattccaaaatgtcagggttaaactagtgattcaacggtagagaaaaatcccagcaaaaatgaataacaatggtgtatccctggcttttttcactttaataagtttgaagggatctataatggcctataaaacctgtgtcctactaaaattctacataattttatcaatctaggcttaaacaaaaggaaagcagttcatt

SEQ ID NO: 50876 - DNA, 962 bp, Homo sapiens
aagtaattataattgatatacaattagtaaatgtaattcaatatcataattacaataatgtgtaaaatactaagaaataaaaatagaatagattggccttgaaatggacaaatacaagcctaaatcattttcataacttaatgttggaatttacttagcatttttaccgagagagtttcagaaaactgggtaagaaaactggataagaaaggataagaatgatttgtgtgggttgtatgtagaactgatttgggccacaatggtctgggagcctagacaatattagttgaactgaaaaaaaaaaaagtgaaagagaaaaaaataacttctaaaatttttggtttaacttttgtaataactcctcttcaccatccctcaaactaaagaaaaagtttgggggcagatgaagaaatacatgaactacatcactcagaaatgacgaaacaccgcagcatgctatattccttcattattttttctctaattatttactttttcctgcctcctgcatctacttctgtttcctttggttgttaaattgtggtgcatttgtcctgtcttgtgaagggataagaaaggattctctctgagaagaatatagaaaggaaaatgtgtctgtattatggaaagatgtattagactgagacttgttcgcaattttctagactttgtgaatagttactgtttgttttttaaatgattataacatatgctattacttttgagtgacccctttcacatatctcaaagtgtccttcataaaattccaaaatgtcagggttaaactagtgattcaacggtagagaaaaatcccagcaaaaatgaataacaatggtgtatccctggcttttttcactttaataagtttgaagggatctataatggcctataaaacctgtrtcctactaaaattctacataattttatcaatctaggcttaaacaaaaggaaagcagttcatt

SEQ ID NO: 50877 - DNA, 1108 bp, Homo sapiens
tctggagggtcacacggcccttaaaatttgagtatttccacagttataatgggcaatgaagaagtccttccttatatcattcattgttttacacaccccaacctaattttaagggtacagaaggaatggcagctggtttctgagtttgcaggaaaaagtactaagagcaaataagtagtcgggaaattgtcttgacatttatggaatgaacgaggcattactgtgtaatagagaggtttatgactgttctgggaacactattccagtgtgttagagatggttggccatttattttaaagaattaaaagaagagcaaaagccaccctagcagtttcaggggaatagctgtgggcgaacattagagaagagggggaggagaaatgtatgagggctattaagcagctgtctgttaaggaacatttaatttaaaataagataaacattcattgtgctgtaaacaaacaaacaaacaaacattttttgcagcattttcattccgacctccttacattggtgttttcagaatttattagagtgtagtattgaaaaacgatgtgaaactcagatagattatggttttatcccatttgttagtattgagggaagtatttggcatgtgttttcaatgcattataattctaaaaaattgcttttttcttcactgtattgcaagtccctccatgttgctctatttaaaattgtacagttcataacagattaggaattactctaataaatatggtcaaatttctcatttgatgcagaattgtctgtgcttctgtctttgttagtgactagccccctctgggtacttagctcttaataaatactaagttatgtatttgctttcatgtccttggctagaaactgcatgactggccatactctgaaattttgtamcattatggctaatgcactttttgtaataatgaagcaaaatagatttattgtcaaatgctttcttcaattcaaagtagagagaaaggaattccaggatcttgaaagcactagggaaatgtgactctgtaatggaattgtgtctaatgaaatctccaggaccaactgaggaatgttcttcttaccataaactccagaattggaagaattc

SEQ ID NO: 50878 - DNA, 503 bp, Homo sapiens
tttgagacagagtctcrctctgttgcccaagctggagtgcagtggtgcaatctcggctcactgcaagctccgcctcccgggttcacgccattctcctgcctcagcctcccgagtagctgggactacaggcgcccgccactacgcccggctaatttttttgtatttttagtagagacggggtttcaccgctttagccgggatggtctcgatctcctgacctcgtgatccgcccgcctcggcctcccaaagtgctgggattacaggcgtgagccaccgcgcccggcctttaaattcttttgaaggaactgtttccattttataacttaaacaggtgcctgatgagtactattcataaatttaatacaattaacatgaagatcaactttaaattggcatctttgaatgcaaatttgtttagaagttaaacattttaaatgtgcatttgccaatttgattttgtctatgatagctcctttgtttttacaaaatgaagttcaaacttt

SEQ ID NO: 50879 - DNA, 503 bp, Homo sapiens
tttgagacagagtctcactctgtygcccaagctggagtgcagtggtgcaatctcggctcactgcaagctccgcctcccgggttcacgccattctcctgcctcagcctcccgagtagctgggactacaggcgcccgccactacgcccggctaatttttttgtatttttagtagagacggggtttcaccgctttagccgggatggtctcgatctcctgacctcgtgatccgcccgcctcggcctcccaaagtgctgggattacaggcgtgagccaccgcgcccggcctttaaattcttttgaaggaactgtttccattttataacttaaacaggtgcctgatgagtactattcataaatttaatacaattaacatgaagatcaactttaaattggcatctttgaatgcaaatttgtttagaagttaaacattttaaatgtgcatttgccaatttgattttgtctatgatagctcctttgtttttacaaaatgaagttcaaacttt

SEQ ID NO: 50880 - DNA, 503 bp, Homo sapiens
tttgagacagagtctcactctgttgcccaagctggagtgcagtggygcaatctcggctcactgcaagctccgcctcccgggttcacgccattctcctgcctcagcctcccgagtagctgggactacaggcgcccgccactacgcccggctaatttttttgtatttttagtagagacggggtttcaccgctttagccgggatggtctcgatctcctgacctcgtgatccgcccgcctcggcctcccaaagtgctgggattacaggcgtgagccaccgcgcccggcctttaaattcttttgaaggaactgtttccattttataacttaaacaggtgcctgatgagtactattcataaatttaatacaattaacatgaagatcaactttaaattggcatctttgaatgcaaatttgtttagaagttaaacattttaaatgtgcatttgccaatttgattttgtctatgatagctcctttgtttttacaaaatgaagttcaaacttt

SEQ ID NO: 50881 - DNA, 503 bp, Homo sapiens
tttgagacagagtctcactctgttgcccaagctggagtgcagtggtgsaatctcggctcactgcaagctccgcctcccgggttcacgccattctcctgcctcagcctcccgagtagctgggactacaggcgcccgccactacgcccggctaatttttttgtatttttagtagagacggggtttcaccgctttagccgggatggtctcgatctcctgacctcgtgatccgcccgcctcggcctcccaaagtgctgggattacaggcgtgagccaccgcgcccggcctttaaattcttttgaaggaactgtttccattttataacttaaacaggtgcctgatgagtactattcataaatttaatacaattaacatgaagatcaactttaaattggcatctttgaatgcaaatttgtttagaagttaaacattttaaatgtgcatttgccaatttgattttgtctatgatagctcctttgtttttacaaaatgaagttcaaacttt

SEQ ID NO: 50882 - DNA, 503 bp, Homo sapiens
tttgagacagagtctcactctgttgcccaagctggagtgcagtggtgcratctcggctcactgcaagctccgcctcccgggttcacgccattctcctgcctcagcctcccgagtagctgggactacaggcgcccgccactacgcccggctaatttttttgtatttttagtagagacggggtttcaccgctttagccgggatggtctcgatctcctgacctcgtgatccgcccgcctcggcctcccaaagtgctgggattacaggcgtgagccaccgcgcccggcctttaaattcttttgaaggaactgtttccattttataacttaaacaggtgcctgatgagtactattcataaatttaatacaattaacatgaagatcaactttaaattggcatctttgaatgcaaatttgtttagaagttaaacattttaaatgtgcatttgccaatttgattttgtctatgatagctcctttgtttttacaaaatgaagttcaaacttt

SEQ ID NO: 50883 - DNA, 503 bp, Homo sapiens
tttgagacagagtctcactctgttgcccaagctggagtgcagtggtgcaatctcggctcactgcaagctccgcctcccgggttcacgccattctcctgcctcagcctcccragtagctgggactacaggcgcccgccactacgcccggctaatttttttgtatttttagtagagacggggtttcaccgctttagccgggatggtctcgatctcctgacctcgtgatccgcccgcctcggcctcccaaagtgctgggattacaggcgtgagccaccgcgcccggcctttaaattcttttgaaggaactgtttccattttataacttaaacaggtgcctgatgagtactattcataaatttaatacaattaacatgaagatcaactttaaattggcatctttgaatgcaaatttgtttagaagttaaacattttaaatgtgcatttgccaatttgattttgtctatgatagctcctttgtttttacaaaatgaagttcaaacttt

SEQ ID NO: 50884 - DNA, 1121 bp, Homo sapiens
catgtgtctgattcattcgcgtttacagaaacttgaaatttccagtgtccaaaaaccctttcaactattttttttcttccctttcttagaaacaggaagttgtgtttggctgcggacaaactctctcagtgcccctgggacttacaagatgtttggaatgaggaacggtgaggtctggggaaggcttctttcctctctcctttcctggggcgattcgcatctgccagggctgggctgggcagctctgggggctggaaggccagccggaaccttcctgtctctttctactgagccccaggcctgagggaaagtatgttctaaagagacaggtggctttcttgctctctgcttgtcattacggttcagaatgcacttgtgcactggtgtcatgtctcttcccagtacttgagcagtggctgtgatgagtcccttgatctatttcagggggtgtgggctggccggcactcagttttaagcaagtcctgctctttccaaagtggaaggtcagaaaaactccccacctgaagaagaacgagccagggaagtgtggtaccagctgtttaggaccacacctattggttacgtctggccaggtcattctgcagtgttgacctggaaagcacacaggtgcttaggaggggctggccaggggcagggaaagtgtgggagtcacagcccacccactccgttcgcgggaccctccagtttttactgttgctcgttgtgttctcctgtgttgtttagaatgttgtcatatgtacggtcaatacaaccacagtatttgtcgcattagtgatcaccaacattgagccaatgaagacgctggcttagrtgggtgacttcttctttcccacattccacatgcagctctcccaatgcgagctcagcggaggcccccagaaaaacgtggggaggagagttttccccataagacagactgtccttcagccccggccaccaaagaggagtaacccgggcctgctgttctctgggactgaatgcggctgcatccttcccttcctctgcttcctgtcccggtacttactgacggtgcacatgcggggcttggggaagctgagtgtctaaccgcggtgcagctacggatgggaaattctgggcag

SEQ ID NO: 50885 - DNA, 693 bp, Homo sapiens
tcaattcatttaaactaatacaaacatttggggtctatagtattactatcctcatttcacagatgagaaaactgaggttaagcctcctaagtagcagatgtaataacaaggaagattcagatatgtttccaggcatccaaatgtggtcagaggcaaggctatttcaccctctcaatattgagtttgaatagaaggtagaatatcataagatggtacttaatatgttttaataattttaatttagggactatagcataaatatgaaaacaaaattatccaaatgagttatcctctcagaactgctagggggaaaaaaaaaccctcagtagtaacaaaataaaactatctrgtatccatatttcataatatatttttcagaccagagaaaaattaatgccaagtagtatatcaaatgttttacatttctttgggaatataattttatatgtcatattttcctgttaacatattggaactgaacatatcctgcctacgtaaacaaatggttgttgctcaaagatgccggctgggaactttggtatatttatccattcttcttagtgccctgaagatactttacatgtgacagagatttaataagcattgtttaataagtaagcaacttcaatcctaagactaagcatatataattagtatattaagagaaggcaaacagacacttctaaatatcac

SEQ ID NO: 50886 - DNA, 607 bp, Homo sapiens
cccttgggaccctttcctaggtcagcactgcatgctgtgtagcaacatccagttctgctagtttggattacctggccccaccatacccccaacacattaccccgtggctaaagtgtagatgttagcggcaagttctagagcccagtttaagcagctgccccttcctcctgtcaagtgtgtgaccctgggcaacctgaagagcctctgcctgctcctctgaatatgggatgatgtatggtaaacgtacccaccccttaggcttgtcaagagcatggaatgagatgatgcttacaaagctcctagcatgtggtgartgctaataaatagtagctgtttttacacaggagactttatccagatctctgcaagtctatgtggattctttttaagattctttagagaaggctcatcaagcaaggccttgtttcccactcacagtaggcatggtgagctttcttagtgcatttttttcttcacttaattgttcttttgacatttttcttagtaaatactgggtgctgggcatcttataagtagccagaaagatgagtggtgggacactggctctccatgaagaagcacacagcccagcaggggaagctgggaa

SEQ ID NO: 50887 - DNA, 509 bp, Homo sapiens
aagtgcaataaaacaagtatacctgttactgaaatatgcaaagttagcctgtttaattcattgcaaattagaagccttagaggcctgtgattaaaaaaaaaagtaaaggacaaaatctagaagaacagagctcagtctttttaaaggaaatcaagaatatgggtagtcatacagatagtcattcaaactcaggagatgaccatcagtggaggttttgggagaactggaagtacaaagcaaayctttgctcttattgtttttattgtactgatgtcacaatgccttctagagttggaccaagacagagtcaattttgccacatacaaggctacacattcttgtcaattctttctcttaaacgtcttgggtttgttggcaaagtctattacttcaaattgcataggtgttatgtggggcccttattagtatacgctttgctcttctagcctgatgacctacagggatacccagagaacttcttgagccattgaggtaaaaacatagtgaaa

SEQ ID NO: 50888 - DNA, 509 bp, Homo sapiens
aagtgcaataaaacaagtatacctgttactgaaatatgcaaagttagcctgtttaattcattgcaaattagaagccttagaggcctgtgattaaaaaaaaaagtaaaggacaaaatctagaagaacagagctcagtctttttaaaggaaatcaagaatatgggtagtcatacagatagtcattcaaactcaggagatgaccatcagtggaggttttgggagaactggaagtacaaagcaaacctttgctcttattgtttttattgtactgatgtcacartgccttctagagttggaccaagacagagtcaattttgccacatacaaggctacacattcttgtcaattctttctcttaaacgtcttgggtttgttggcaaagtctattacttcaaattgcataggtgttatgtggggcccttattagtatacgctttgctcttctagcctgatgacctacagggatacccagagaacttcttgagccattgaggtaaaaacatagtgaaa

SEQ ID NO: 50889 - DNA, 613 bp, Homo sapiens
gtttgtgccttctgacttatccaggctgtctcttatttaacatccatcttattttccccactgtctggcctgtggacttcaattgttagcatcagtcctgaagacaacaaacttactgggaccacttaacccgmtcccacagccgcataagtccaatgtctgtaacaaatctttttataaaaacacaccacatgcaggcacacacacacacacacacacacacacacacgagagagagaatgagaatcttttagtggtttggtttccctggttgaaccttagccgacatatatacaatatataaagtgccaggattatggaagatagtcaataatgaatggacagatgaatgacagagacctgcttgtctgaatgaggatggagaaagtgaggaggtacacaagaacttaaatttcttgagcacctactatatgccagaaattatgctctatgttgagggtacagttgtgtaaaatcagacttggttcttgttttcatgacagttgcagtttagtggcattctttatcttcattgctagcttttctgacttcctgctgatggccattttaaggctacacggcatataggtaatgttgaagttactaaagaaag

SEQ ID NO: 50890 - DNA, 613 bp, Homo sapiens
gtttgtgccttctgacttatccaggctgtctcttatttaacatccatcttattttccccactgtctggcctgtggacttcaattgttagcatcagtcctgaagacaacaaacttactgggaccacttaacccgctcccacagccgcataagtccaatgtctgtaacaaatctttttataaaaacacaccacatgcaggcacacacacacacacacacacacacacacacgagagagagaatgagaatcttttagtggtttggtttccctggtygaaccttagccgacatatatacaatatataaagtgccaggattatggaagatagtcaataatgaatggacagatgaatgacagagacctgcttgtctgaatgaggatggagaaagtgaggaggtacacaagaacttaaatttcttgagcacctactatatgccagaaattatgctctatgttgagggtacagttgtgtaaaatcagacttggttcttgttttcatgacagttgcagtttagtggcattctttatcttcattgctagcttttctgacttcctgctgatggccattttaaggctacacggcatataggtaatgttgaagttactaaagaaag

SEQ ID NO: 50891 - DNA, 613 bp, Homo sapiens
gtttgtgccttctgacttatccaggctgtctcttatttaacatccatcttattttccccactgtctggcctgtggacttcaattgttagcatcagtcctgaagacaacaaacttactgggaccacttaacccgctcccacagccgcataagtccaatgtctgtaacaaatctttttataaaaacacaccacatgcaggcacacacacacacacacacacacacacacacgagagagagaatgagaatcttttagtggtttggtttccctggttgaaccttagccgacayatatacaatatataaagtgccaggattatggaagatagtcaataatgaatggacagatgaatgacagagacctgcttgtctgaatgaggatggagaaagtgaggaggtacacaagaacttaaatttcttgagcacctactatatgccagaaattatgctctatgttgagggtacagttgtgtaaaatcagacttggttcttgttttcatgacagttgcagtttagtggcattctttatcttcattgctagcttttctgacttcctgctgatggccattttaaggctacacggcatataggtaatgttgaagttactaaagaaag

SEQ ID NO: 50892 - DNA, 613 bp, Homo sapiens
gtttgtgccttctgacttatccaggctgtctcttatttaacatccatcttattttccccactgtctggcctgtggacttcaattgttagcatcagtcctgaagacaacaaacttactgggaccacttaacccgctcccacagccgcataagtccaatgtctgtaacaaatctttttataaaaacacaccacatgcaggcacacacacacacacacacacacacacacacgagagagagaatgagaatcttttagtggtttggtttccctggttgaaccttagccgacatatatacaatatataaagtgccaggattatggaagatagtcaataatgaatggacagatgaatgacagagacctgcttgtctgaatgaggatggagaaagtgaggaggtacacaagaacttaaatttcttgagcacctactatatgccagaaattatgctctatgttgagggtacagttgtgtaaaatcagacttggttcttgttttcatgacagttgcagtttagtggcattctttatcttcattgctagcttttctgacttcctgctgatggccattttaaggctacayggcatataggtaatgttgaagttactaaagaaag

SEQ ID NO: 50893 - DNA, 588 bp, Homo sapiens
tcaccattgggcacatttgttctatgcccaataagtagcagaattgattttacaaaccagggtaggtctgtcttcaaaaactggtctctgtctatctatcatacagcctaatggaagcctatagwaggttgagttgtggcctctctaaaatatatccttgtcctaatcttctgtgaatatgcttttatttggaaaaaaggttttattcaggtgtaattaaattaagcagctaaatatgagatcattttgaatgatctggttgggatcttaatccaatcacagatgctctcataagagacaaaagaggatgataacagggagaagatgagaaactcacatgaacgcagaggcagaggtagaagtgatagagccacaagccaatgatggcctggagctaccagtagatggaagtggcaaaggattcttcactctagcttttaggtggaatctagccctaccaacacttgatttcagacttccagcctccagatctgtgagacagtacactcttgttgttttaagccattcattttgtgataatttcttatgggagtgacaggaaaataatgcatagcctatttcattttg

SEQ ID NO: 50894 - DNA, 588 bp, Homo sapiens
tcaccattgggcacatttgttctatgcccaataagtagcagaattgattttacaaaccagggtaggtctgtcttcaaaaactggtctctgtctatctatcatacagcctaatggaagcctatagaaggttgagttgtggcctctctaaaatatatccttgtcctaatcttctgtgaatatgcttttatttggaaaaaaggttttattcaggtgtaattaaattaagcagctaaatatgagatcattttgaatgatctggttgggatcttaatccaatcacagatgctctcataagagacaaaagaggatgataacagggagaagatgagaaactcacatgaacgcagaggcagagrtagaagtgatagagccacaagccaatgatggcctggagctaccagtagatggaagtggcaaaggattcttcactctagcttttaggtggaatctagccctaccaacacttgatttcagacttccagcctccagatctgtgagacagtacactcttgttgttttaagccattcattttgtgataatttcttatgggagtgacaggaaaataatgcatagcctatttcattttg

SEQ ID NO: 50895 - DNA, 588 bp, Homo sapiens
tcaccattgggcacatttgttctatgcccaataagtagcagaattgattttacaaaccagggtaggtctgtcttcaaaaactggtctctgtctatctatcatacagcctaatggaagcctatagaaggttgagttgtggcctctctaaaatatatccttgtcctaatcttctgtgaatatgcttttatttggaaaaaaggttttattcaggtgtaattaaattaagcagctaaatatgagatcattttgaatgatctggttgggatcttaatccaatcacagatgctctcataagagacaaaagaggatgataacagggagaagatgagaaactcacatgaacgcagaggcagaggtagaagtgatagagccacaagccaatgatggcctggagctaccagtagatggaagtggcaaaggattcttcactctagcttttaggtggaatctagccctaccaacacttgatttcagacttccagcctccagatctgtgagacagtacaytcttgttgttttaagccattcattttgtgataatttcttatgggagtgacaggaaaataatgcatagcctatttcattttg

SEQ ID NO: 50896 - DNA, 632 bp, Homo sapiens
gaacttagtgggttataagtaatctgtatccatttatctttaggcaggtttggctttcttttaccttaaccagaggaaagcctccctgagaaatttccagaggagatttctgtccttcctcaaggttaggaagtccttgatgtttagcccctaaccttgctaattttgttgtaaggtaacatactcaagggctatagctgagattctcaattgcttatgtgactaatccaagaactggtctagcccactgagagaaaggaacaaactaccaaggacgaatgggctagtactgctacctcaggaccagagccactagagggctctggtacttcttggagtgcctgctctttatagcttccctgaaggaggtcccaaaaataacaagaggtggtcctgagggcatcacatatatgggaggtccaagaccagatgattctgtcctgagatccctgctgcaactgaccttctgaaaaagtctataaatagacaagggggtgggtactaggtcctggcttgtagaatrtgctactatagttagcagggacactgtgtccaagaggccttcttataccttcactcccccaggaaaagaagccataacttcgttctactctactatatctacattattg

SEQ ID NO: 50897 - DNA, 380 bp, Homo sapiens
acagcttggccagaccacgctggactatcatggagaccacattgcctcttgggcatctgtaagtctcgggaaggacttttttcacggtgccagtctcaggagggtgaaagcaaatcatgttsgtaaacagcccatttgacctcagaacgcagtggcaggctaactcctgacttctccactcactctttttgttctcttgttaaacaaagaaacagattcttcccctgcgctagtataatatgattcccaaggatttagctgaaatgggtgcagattgttcaaagaataatggcagcacccactggttgttgaaggcccaccctgggccctgggctttgtatacactctctaattctcaaagcaaacctgcagttacagct

SEQ ID NO: 50898 - DNA, 599 bp, Homo sapiens
ccccgatcatgtctgcacctgtccatggggaagaagggaatgggaaaggccattggctgctgattccttccaggcataatccgaaagtggaaaatatcatttcaactcaacactccactggccgaacttagttacatgtccataaagtgctgcaaggagggctagggaatgtcatctccagccaggctaaaagttaggcattattttactaaggaaaaaaatggatactgaaagagaaatagaagcctctgccacaaataggaatcaaaacagaatcatatttcttcacagcatcactgtgatactagtagtcaatgaaataatgtcttcattgtttggtgggtaaaaracacttaccctagaatgccattttagtctgttatcaaaagtgagtttcagtaaggcaataagacataaacagagagttttctgaaaattactgaatggtgtgctctaattaaacacagagtaatccaagaaagaggagtacagcgggtctaagaaggaggcctggagggcaaatagtgcaggctgacagatggatggctctgggaaggaagtctccaggaaaaaatgaaatcaataaattacctaataaa

SEQ ID NO: 50899 - DNA, 549 bp, Homo sapiens
aatacaattggctccaacttcagcgttacatgtttagaggatgagagttaatattacagaaagataacattttctggggagaggctatacaatgaaagtttatgaagcaccagaacctgggatttgcaaaactgtctctctataaagcmagagcaagaaggagagccaggaaaggaaaggaggaaaattaaatggtctaacttttagagtctcttaatggtaaaattcttgctttttacacagatctgcattcatttcctcaatttatttcaataacgttttttgtaacctactcaatgttaggtaccacactaggtgcagaggccacaaagatcaatgatagaattgcaaagaggcacacatgtttgctattagctaggagcccatatgaacatcttgcacatatttatctatctagttttcacaaccactctttgagattgaaacacagagtggtgaagtcacttgcccaaaatcactcagctagttaatggtagacaaggattcagatctaagcagtctgtctctagaatatgctaattactagct

SEQ ID NO: 50900 - DNA, 631 bp, Homo sapiens
gttttaatattttgttactttaacaccagtaccactgtttcctctcattaattagctattgatgttttctaaaattaactttgcagacagtgttcactgacagagttctaaactaatgagtctgactttgtcttgagggaggcagaggaggggaggtggtcacagacatgcaaggagacagtgttgctttctgcttcaacacttcaaggggcagaggaacatttcttttacatgtggcctttgagcctgtgaggcatttgagcaaggaacacctcattcaccaatattttccaaacacattttaaawcccatgtgctaagggttttgatagagatggtattgggtgctatgggaagacacccaagacccacctagtccagtcctggcaacggtcaagaaaacttcctgggcaaaactatggctaaagccaagacgtaaagaatgaggatgtttgacctaggctaaggtgcatgtggggtgtgtctatcaggcaggaggagctacatctgcaaatgtcccaagtacaggtagatcttgtcttaattataaacctacaagtacttcagcatagctgaaaaataaagcacacaagatggtatgtcaaggggttaagccagaacagtggaagagg

SEQ ID NO: 50901 - DNA, 631 bp, Homo sapiens
gttttaatattttgttactttaacaccagtaccactgtttcctctcattaattagctattgatgttttctaaaattaactttgcagacagtgttcactgacagagttctaaactaatgagtctgactttgtcttgagggaggcagaggaggggaggtggtcacagacatgcaaggagacagtgttgctttctgcttcaacacttcaaggggcagaggaacatttcttttacatgtggcctttgagcctgtgaggcatttgagcaaggaacacctcattcaccaatattttccaaacacattttaaaacccatgtgctaagggttttgatagagatggtattgggtgctatgggaagacacccaagacccacctagtccagtcctggcaacggtcaakaaaacttcctgggcaaaactatggctaaagccaagacgtaaagaatgaggatgtttgacctaggctaaggtgcatgtggggtgtgtctatcaggcaggaggagctacatctgcaaatgtcccaagtacaggtagatcttgtcttaattataaacctacaagtacttcagcatagctgaaaaataaagcacacaagatggtatgtcaaggggttaagccagaacagtggaagagg

SEQ ID NO: 50902 - DNA, 631 bp, Homo sapiens
gttttaatattttgttactttaacaccagtaccactgtttcctctcattaattagctattgatgttttctaaaattaactttgcagacagtgttcactgacagagttctaaactaatgagtctgactttgtcttgagggaggcagaggaggggaggtggtcacagacatgcaaggagacagtgttgctttctgcttcaacacttcaaggggcagaggaacatttcttttacatgtggcctttgagcctgtgaggcatttgagcaaggaacacctcattcaccaatattttccaaacacattttaaaacccatgtgctaagggttttgatagagatggtattgggtgctatgggaagacacccaagacccacctagtccagtcctggcaacggtcaagaaaacttcctgggcaaaactatggctaaagccaagacgtaaagaatgaggatgtttgacctaggctaaggtgcatgtggggtgtgtctatcaggcaggaggagctacmtctgcaaatgtcccaagtacaggtagatcttgtcttaattataaacctacaagtacttcagcatagctgaaaaataaagcacacaagatggtatgtcaaggggttaagccagaacagtggaagagg

SEQ ID NO: 50903 - DNA, 631 bp, Homo sapiens
gttttaatattttgttactttaacaccagtaccactgtttcctctcattaattagctattgatgttttctaaaattaactttgcagacagtgttcactgacagagttctaaactaatgagtctgactttgtcttgagggaggcagaggaggggaggtggtcacagacatgcaaggagacagtgttgctttctgcttcaacacttcaaggggcagaggaacatttcttttacatgtggcctttgagcctgtgaggcatttgagcaaggaacacctcattcaccaatattttccaaacacattttaaaacccatgtgctaagggttttgatagagatggtattgggtgctatgggaagacacccaagacccacctagtccagtcctggcaacggtcaagaaaacttcctgggcaaaactatggctaaagccaagacgtaaagaatgaggatgtttgacctaggctaaggtgcatgtggggtgtgtctatcaggcaggaggagctacatctgcaaatgtcccaagtacaggtagatcttgtcttaattataaacctacaagyacttcagcatagctgaaaaataaagcacacaagatggtatgtcaaggggttaagccagaacagtggaagagg

SEQ ID NO: 50904 - DNA, 545 bp, Homo sapiens
tttaaaatttgtaatttgagagagacttgggagagcagcagagaggggaaagaaagacgggaacagggtcagaacctatttgtgttgagaattaaataacttaatgcatgtaaagcacttaaccatacaaatctcatttccttatacatttgcattgttttcactgtcatgatgatcatcatcaccataaatgacaatctggggatgaaaatgcgagaggccctaggggagacatgagacatcagagaataagaagtgagagtatagagaaaggctcttgaaaaccgtcttctgtaccacacattttggattccccacgacactccgggagacattaaaataacaaatacgtttattgtaaatcactacttgatacggtttggctgtgtccccactcagatctcaccttgaattgtaataatcatcatgcatcaaagccagggccaggtggagataatggaatcatagaggtggtttcccccatactgttcttgtgatastgaataagtctcacaagatctgatggctttatcaaagagagtttt

SEQ ID NO: 50905 - DNA, 577 bp, Homo sapiens
taaattacatgatatattcaacacttcattataaaatagactttctcttacatgatttgcccaatggcaggctaatgtaagtgttctgagcacatttaaagtaggctcagctatgatgtgtagtaggttaggtgtattaaatgcatttttgacttgatgatattttcaccttatgatgggcttgctgagtcataatcscctcgtaagtcaagaagcatcttgacttacaggaactgactatagcagaggtaggaaacatttggcacagaagggctcctggacctacagagccttcgataagccaggctgtgcaggagaggaggaatgcctcatccctcacctttgatttctttgcccatttctttggcatcactccctctaccctaaacctcccctccctctgttcctcagtgtccacatttcctactgaaattatctcaatttcttaacttttcctctaacagcaagcatctggcttgctagcagatttgtgcggcctttaaagaaagatattttatggcacaagaatcttgatttttcttaaatcaattcttctgttgaccaacaaaatagctat

SEQ ID NO: 50906 - DNA, 317 bp, Homo sapiens
cacacacacacacacacacacacacacacayacctacacacacatacacatacatagtttttcctttgtaacaacagaaagcttgtctatcactaaaacaaatgtattgagctaggaagtaattacattgaaaattatagtaggactatgcttccacaataaactgtcttgaaattattcttaaattcttcttagtttttcactcttatacttaaaaagcactctcaggcattctactttgctcaaggaagttaatgaaaatagtcccgtttggagtcaggcatactagtgcaacatacacattaagactcatgtta

SEQ ID NO: 50907 - DNA, 1082 bp, Homo sapiens
tttattgaacaaattgtctttctgtttggtatgataaaggagatttttcaccattcttaccaagaatccttatataaagatccatatgtgtctgtctcctctttaggaaattaaatgacaagacacgaaacataaaaattttccatattaattataaattcatacttaacatacttattaaaatgattttatttatgtaatgtaagaatgattatgactgtgattaaccacaaacaaagttccaaagcttattctgtcaaagcaaatttcctatcatacctgtcaagtttaatcttactgagatagatagtaacttgtgaactccatttctaaatttgctggaaccactagtgtgactctcagtatttacgctggcttaaatacagctmattggtcctatgtaacaaacatgcatgtcctgaacatgtatcctggaactatatatatatatatatatatatatatatatatataaaaatacacacacacacacacacacatatatataatataggtataaattttatatttatatataaaccttatatataaatatatttatatagttatataattatatataactacctatatatatagtaatttaatgcatttttcagatctcaatacaatgatcatgtaagaagccttctttgacttcgctgaattaatattcatatctactactgttatatatatagttgaagttgaagcctatgcccatagctgacagcagttgtaattgtactagtcaactgcctcccaagttcaaaactcagcatcagattaaccctatatttttgaaaactaaacataaaataatgaggtacagagaatttagacatctccacgtgtctatgttgcttctaacccttcagcggatatcatatctatagctttctgatggaaatctagaggggaagagttataatatataatacatatattatactatttgaaagaattttccttgaagtttcaagacatggaaacaaatatgcctttcccatgtggcctgtgaactggactcttgctattcaaagcacgattcatggaacatcagtagcagcatcaagtgggag

SEQ ID NO: 50908 - DNA, 592 bp, Homo sapiens
tctcagttactcctgaatattctgatttcatacgtacccagggagcatgctgttttgtcaatcaatataaaatatttatgaggtctcccccacccccaggaggttatatgattgctcttctctttataataagagaaacaaattcttattgtgaatcttaacatgctttttagctgtggctatgatggattttattttttcctaggtcaagctgtgtaaaagtcatttatgttatttaaatgatgtactgtactgctgtttacatggacgttttgtgcgggtgctttgaagtgccttgcatcagggattaggagcaattaaattattttttcacgggacygtgtaaagcatgtaactaggtattgctttggtatataactattgtagctttacaagagattgttttatttgaatggggaaaataccctttaaattatgacggacatccactagagatgggtttgaggattttccaagcgtgtaataatgatgtttttcctaacatgacagatgagtagtaaatgttgatatatcctatacatgacagtgtgagactttttcattaaataatattgaaagattttaaaattca

SEQ ID NO: 50909 - DNA, 592 bp, Homo sapiens
tctcagttactcctgaatattctgatttcatacgtacccagggagcatgctgttttgtcaatcaatataaaatatttatgaggtctcccccacccccaggaggttatatgattgctcttctctttataataagagaaacaaattcttattgtgaatcttaacatgctttttagctgtggctatgatggattttattttttcctaggtcaagctgtgtaaaagtcatttatgttatttaaatgatgtactgtactgctgtttacatggacgttttgtgcgggtgctttgaagtgccttgcatcagggattaggagcaattaaattattttttcacgggactgtgtaaagcatgtaactaggtattgctttggtatataactrttgtagctttacaagagattgttttatttgaatggggaaaataccctttaaattatgacggacatccactagagatgggtttgaggattttccaagcgtgtaataatgatgtttttcctaacatgacagatgagtagtaaatgttgatatatcctatacatgacagtgtgagactttttcattaaataatattgaaagattttaaaattca

SEQ ID NO: 50910 - DNA, 592 bp, Homo sapiens
tctcagttactcctgaatattctgatttcatacgtacccagggagcatgctgttttgtcaatcaatataaaatatttatgaggtctcccccacccccaggaggttatatgattgctcttctctttataataagagaaacaaattcttattgtgaatcttaacatgctttttagctgtggctatgatggattttattttttcctaggtcaagctgtgtaaaagtcatttatgttatttaaatgatgtactgtactgctgtttacatggacgttttgtgcgggtgctttgaagtgccttgcatcagggattaggagcaattaaattattttttcacgggactgtgtaaagcatgtaactaggtattgctttggtatataactattgtagctttacaagagattgttttatttgaatggggaaaataccctttaaattatgacrgacatccactagagatgggtttgaggattttccaagcgtgtaataatgatgtttttcctaacatgacagatgagtagtaaatgttgatatatcctatacatgacagtgtgagactttttcattaaataatattgaaagattttaaaattca

SEQ ID NO: 50911 - DNA, 592 bp, Homo sapiens
tctcagttactcctgaatattctgatttcatacgtacccagggagcatgctgttttgtcaatcaatataaaatatttatgaggtctcccccacccccaggaggttatatgattgctcttctctttataataagagaaacaaattcttattgtgaatcttaacatgctttttagctgtggctatgatggattttattttttcctaggtcaagctgtgtaaaagtcatttatgttatttaaatgatgtactgtactgctgtttacatggacgttttgtgcgggtgctttgaagtgccttgcatcagggattaggagcaattaaattattttttcacgggactgtgtaaagcatgtaactaggtattgctttggtatataactattgtagctttacaagagattgttttatttgaatggggaaaataccctttaaattatgacggacatccactagagatgggtttgaggattttccaagcgtgtaataatgatgtttttcctaacatgacagatgagtagtaaatgttgatatatcctrtacatgacagtgtgagactttttcattaaataatattgaaagattttaaaattca

SEQ ID NO: 50912 - DNA, 857 bp, Homo sapiens
ggatattattccatctaaagaatccaacagaagcaactagaatgcttttaatgattgattaaactgcttatgtggggttttatgctacctagaacattgaatttgtaggaatttttatttgaagatttccagggaggaaaaaacaaaacaacaaaaaatatgagactatttagaatcccttctttcaggctatatctgtgttgttttctgaaataaaaacacgcctctcaaaaactaattttctgaatattaaactgtcttaggaagttctattgaatgattactgccttttttgtttttgttttcaaactaacaagaacgatgcttattttgtgccataatgtattatttatttgctattacttcatcgaggatgtagaagagcarttcagagagccaagttattcaaacaaataaagaattaaattatttcctggagtcccacatatttacatgttcacaaaaaatgtaaacatattcaaacatttgacgatgttatatttaatgatgtattatttaatgatatcacattaaatgataaaaattattttatcatttaaaatattaataaaataatattattcatattatttttcttgtttttttctttttttgagacggagttctgctcttattgccctggctagagtgcagtggtgcaatctcggctcactgcaacctctgccttccggtttcaagcaattcttcctcggcctcccaagtcgctggcattacagacgcccgccaccatgcccagctaattttttttgtatttttagtagagacggggttttaccatgttggtcaggctggtctcgaactgctgatctcgtgatccacccaccttggtctcccaa

SEQ ID NO: 50913 - DNA, 857 bp, Homo sapiens
ggatattattccatctaaagaatccaacagaagcaactagaatgcttttaatgattgattaaactgcttatgtggggttttatgctacctagaacattgaatttgtaggaatttttatttgaagatttccagggaggaaaaaacaaaacaacaaaaaatatgagactatttagaatcccttctttcaggctatatctgtgttgttttctgaaataaaaacacgcctctcaaaaactaattttctgaatattaaactgtcttaggaagttctattgaatgattactgccttttttgtttttgttttcaaactaacaagaacgatgcttattttgtgccataatgtattatttatttgctattacttcatcgaggatgtagaagagcaattcagagagccaagttattcaaacaaataaagaattaaattatttcctggagtcccacatatttacatgttcacaaaaaatgtaaacatattcaaacatttgacgatgttatatttaatgatgtattatttaatgatatcacattaaatgataaaaattattttatcatttaaaatattaataaaataatattattcatattatttttcttgtttttttctttttttgagacggagttytgctcttattgccctggctagagtgcagtggtgcaatctcggctcactgcaacctctgccttccggtttcaagcaattcttcctcggcctcccaagtcgctggcattacagacgcccgccaccatgcccagctaattttttttgtatttttagtagagacggggttttaccatgttggtcaggctggtctcgaactgctgatctcgtgatccacccaccttggtctcccaa

SEQ ID NO: 50914 - DNA, 592 bp, Homo sapiens
gtatatttcttgatagcaggattctgccatcaaatgcatttaacacatgctaggtgaaatgctgtggaaaatacatcttaaccataggatatctcacagccttaaatatgttaacctatattggaaatctctaaacggagacgtggcattccgcacttgtattcagtcagggaaactctttacttgtagatgcctctgaactcctcatagagtgctggagtttctcaaaacaatgtttgggaaatgctaatctaattcaactcttgcctccatattttacacaggagggccccagtaattgaagtaactggtcctcaattgaagtaattgaagtcctggttctcagcgctgccttatagctggtcawgttccatggcaggtgtgtctttgtaacccgagggctgggtgaaagcaggagggaggctgtaaggtgctcccccttgctcctcatccttagcattaaaattctcctgtgggaggtctggaggcttcatgctaagtgcctattaggcttggacatcctataacagttaaaatattgattttaaaacctaaaataatactttccttccaagttcttatggttattttt

SEQ ID NO: 50915 - DNA, 590 bp, Homo sapiens
gcacgcctataatcctagctacttgggaagctgaggcaggagaatcacttgaatctgcgaaatggaggtggcaggaaaccgagatcatgccacaaaactccagcctgggcaacagggtgagattctatcaaaaaaaaaagaagaaatatgtgcaaagaaaaagttttctttggaagctttgtttctgcttactctctgctttctgctctttagtgacttccttactggatcagcagccaggctgtgttctcagctgacctttttctctgtcttcctccatcagagggtcccctctctgatcctggctcactaagctccagccatggggaggtaggatgaaggcaagatgaatagttcttaaaagcttattccgaaggctaaatgaatgctgatcacctaaaatgtcactgaaattttctaaagcgtaagaaagaaaggaagaaaaaaaaacttttggccaggcayggtggctcacgcctgtaatcccagcactttgggaggccgaggcgggcggatcacaaggtcaggagatcgagaccatcctggctaacactgtgaaaccctgtccctactaaaaatacaaaaaatta

SEQ ID NO: 50916 - DNA, 516 bp, Homo sapiens
cgagtgcctgtaatcccagctactcggaggctgaggcaggagactcacttgaaccctggaagtggaggttcagtgagctgagatcataccactgcactacagccttggtgatagagtgagattctgtcttaaaaaaaaaattactgaacagagctatataaactatatacatttgaatataagaaaatgaattttcaaaaaggctaagaggatgcacagctgccttaaaataatgaaaaaaattccacatgactttaatggcacattaaaaatattgctataaagtccaatggtgttgaatattcctgaaaactttyttctctttttaaaagtattcagaaattttctttgtaaaattaagtattttggtttgagacattttcaattctttcttagctggaaattcattactcagtgaatttttaaaaagtttttaacagtgtttcaccatcatttctatccaatcaaaacagttattgctggtagtgtggacagtcatcgtcatgtttcatcaag

SEQ ID NO: 50917 - DNA, 564 bp, Homo sapiens
ccaataattcaaacatacgaacagataaattagtaattctttcataattaattactttatgacacgatatgtgtcactgacttccttaaattgttgtttgggtgtacgatagacacttttatttggatttattcaggactttctagaattcatctagaaaaaatcagacacattcctgctctttcttctgtagcagagtgaaatactatttttatgctattctcatttttaatttaaaaggtaaagtccctaaaaaatatcytttggaaaacctgctaatgaaagctcagatcttggggacagcatagcaatgtagaagagtgtgggccgagagacctgtgtattctcttagccccagcacttcctagacagataaacatgggagcttcagtatgtaggtaaggagtttcataagctttgccgtattcatacagcaaatgtatgaaacaattgctgtaatatgaactctctcacctgttgtgtctgtttcttctctctcatccactgagtaaaattccttcataagcggggtatcccttgagaaagcctagtgcctagagataa

SEQ ID NO: 50918 - DNA, 2607 bp, Homo sapiens
aaggaaacatcttagttagaagttattcagcagtaggtaccatccctaagtatttttcaccaaattcgtgacaataaagagctatctaaccagaaaaattagcgagtaccggcaccatccatagggctttgtctttacgcttcattagcacttaccatgccttacaatgtctaggattgaccctgatagcatttcggaaacaagctaatgctttgtccagttcttcagtgaagacaagctcacgccctaatgcgctataggcataagcatcatttggatccacttcgagagttctctggaagaattgaatcgcaatatcgtgttcccgttgcagaccgaaacagttccctgcagcacaccaggcctctggctggcgaatttttatccatgtctgtgaagtctttggacagaactgaaagagcaacctctttcggaggatgccaaagtgttgtagagtagatctccatgccttcgactctgtaattctcratcctcctaacctctgagaattgtctttcagcttgcgtggactctgaaagtttacaataggcccttccgattttggcacagtacccaaccggtattgcagtggtgagaagctagatggctcaagatactgatagcttctttgccgtggtaagaacacaaagctaaataacctttccccctttcacgaagaaggctcatcaagccttccgctgctgctttttgtagattaaaagcctgaatctgaggcgcgattgcggctattttcccttctgaaatgacggaagagtccaattttgtcacttccaggctatcacttatgttcggtggagttattgctcctttattagtttcacttttggttcttctgtttgggattttaggtggaaacttcatttttaattttctcctattctcctcggttgtggagctgtcactagtcaagagtcgtgaatttcttcgaggcggtgcatttgggggagatgtcatagtggggctcaatacctgaggtgttgcccttgtcggcggaccagaactttgtgtttttgcaaggactggagttacctttcggctctttcccctctgcgagaagacagacggtgttccggtttggccgattctggcaacaggcttctttgaaggggctccggtggatggcacgtcaatgacagacggtgtctcataccagtgcagttttgtcaatagggtccgtctccgggacttggggtttctaatggcaaaatgccaacacttggggttaatggactaacagctgctggtcctcctaataaacttcgaccagtttttggtttatgttgaacctgtttagatcatatggaagttcctgttcccagtgggacagtatcaggtgaaaggacagctgaatcgatagaagacactggggagtctgtattcaaggagtactttgaattggaagattctaaattccatccgtttcattcgacggtgtcctggggtgtttccgtaagaacggtctcgggctgtctgtgacataaactaggacgaggtccaagtgttgcggcgcaacacttggacaggcagttgctaaagctctctagagaggtgaatcaaaatgtttggtcaggatctggcttttcccccctatttcacatcatgattcaaagggacaccagaggaaaggatttcaacgaaggctcttttggtcacattctgatcctttggtaagccgatctgtcttgcaatatacatgtcccgacgatggaaggggaaagcgagctgaatcaccaaactcaggaacgataatatcatcgtggcttttctgcttatgaaacactccacccgataagatttgatccccttctgcaagcttgctgagatcaacacaacatttcgcaagcaggcatttgcattgcggggtagtacaactgtgtcctttcaagagtctatatgttttataggcctttcctgagcggtaagaacaggtcgccagtaagaacaaggcttcttctgagtgtacttctgcataaaggcgttctgcgggggaaaccgcatctcggtaggcatagtggtttagtgcttgccatatagcagcctggacgggtccctgcagcaccgccatcctcgaggctcaggcccactttctgcagtgccacaggcatcccccccccccccatagcggctccggcccggccagccccggctcatttaaaggcaccagccgccgttaccgggggatgggggagtccgagacagaatgacttctttatcctgctgactctggaaagcccggcgccttgtgatccattgcaaaccgagagtcacctcgtgtttagaacacggatccactcccaagttcagtggggggatgtgaggggtgtggcaggtaggacgaaggactctcttccttctgattcggtctgcacagtggggcctagggctggagctctctccgtgcggaccgctgactccctctaccttgggttccctcggccccaccctggaacgccgggccttggcagattctggcccttcctggcccttcagtcgctgtcagaaaccccatctcatgctcggatgccccgagtgactgtggctcgcacctctccggaaacattggaaatctctcctctacgcgcggcc

SEQ ID NO: 50919 - DNA, 554 bp, Homo sapiens
cgagtagccgcgactacaggcggccatcaccgcgcacaactcatcttataataacatcatgwttctctcgagacggggtctcgctccgtcatccaggccgcatcgccacggcacgatctcagctcatcgcaacctcggcctccccggttggaacaagtcgcccgccccagtctcccgagcggtcgtgattccaagcccacgccaccaggcccggctaatcgttctatttttcagagagacggggtttcgccacgtcggccagcctggtctcgaactcccggccccaagcgatccacccgcctcggcctcccaaagtgccggagtgacaggcgtgagctagcgtgcccggcccagatcatctttttcataaattgtagagaaggggtttcgtcagccaacgggtggagggtggggcgggttttactcagcctgcgtactgtgaaaaggggaagtgagtgtgctctgtgaactagatatggaaattgtgtgtgtgtgtgcgcgcgtgcgcgtgcgagagagagagagagagagagagagagaccaatcccaccacg

SEQ ID NO: 50920 - DNA, 544 bp, Homo sapiens
ccatgcagaactgtgagtccattaaacctctttctttataagttacccagttttggaccactcctttatagcagcatgagaatggactaatcaatgactattcagctctttcaaatataagcagtgttctattagctcttgatttagaacatccagtgtgcgaggagaaaaataaaagattgaaccatcttgaaagcatgtgtaaacacagggagaggcagggaattgtagcaacatttaatctaccgtgagaatctattgttagcttttcttacacccctcaataagcttatacacagggttttattgaccagagtatgttactaaattgctgaaatataayttatttaaccaattatttttgtgagttaaaaaactttctcaatttttgatattaagcagagtttcaataaatcttttcatatgtctttgtccacctgtcttatttccctggattacttattaacattgaatgattagtttaatttttgtaaataattttagagacttgccatacattgacaaaatatttttgctggaaatt

SEQ ID NO: 50921 - DNA, 553 bp, Homo sapiens
caccctcacatataaacagaacccacttgtggggtcctgaatttcacacatgaatgcagtytatagttggaattgcgaatctcatatgtaaagatctggccacagttggaatgggaacttcgttataaacccaccgcatagaaaggtgatgattctcttatctggaccccgccaattgtaaagatgttgactcatatataggcttagggccacaggtttgatcctgggtccataccagcatgaaaatctctgaaagaattgagactgtcatgcataccatataaagccctcaggtgcaacacagaaactcctaatagggctcagcacacagtaatataatgacattgggatgcacacccagccaacattaaagattgtcattctttcacatgatcatagttcacttttgaggctctgaatcccatacccaaaggcagtttcaaaagttgaaaaactgagccttttttatgtgtcttttggctgtatacatatcttcttttgagaactgtctgttcatatcctcgcccacttgttgatgggtttgtttgctttt

SEQ ID NO: 50922 - DNA, 544 bp, Homo sapiens
tgtgccctttgaccaacatctcctcactgctcccaaccccaggcccctggcaacctaattgtttctttatccttgattgtagtcctctctatttttgaaagtatttttagctgaaattgaacatcaatgatgtaaaagtaccagaagtcttactctctagggagatgaatggattaataaaccaggtctagcaatactgaataatttggaggcaaaaaccagatttgacttacaacagcccagcagggcggcttactttggaaacattttgccagcgctctgctgagcatactaaaaatgcatggtgctggctgacttcacgccggaagcccatggattcagctgctgaagaatgatgtgaaattagagagaatgaaatgtgtgatattacttaatcacacctggtgcttcaatttcttaataatagtgccctgctccactgttgaattggatacatatatgtatatayttatgaattattgctagaggatggattaactctctaatgcctgccaatccattgcagggattgaaaatgcaaatg

SEQ ID NO: 50923 - DNA, 519 bp, Homo sapiens
ataagtaaatataaatgtgtatataaaatgcaaaacaatggtttgaaaatcagagattataatatattagttgcatttctttgatataagcaaacaaaaacatttggtgtgaaaattaaaatcattttacaaagcaaaaaatagtcatattttaaatatattgtaacattagaaaattcttttttcagaatattctatcactggtaatrtaaacctttggacatgaccacaatcataaattcaaaattctctagaacttactccctctctaacatattattgtagtaatatataattatgctgttatataatgaggggtacttcggtttgcttttctattggcacaatataattttgtaatgtaaacataaatgtagtcatgttaaaatattactatcttgtaaatgtataatgctgtagaatttaaatttctattcacaatcaaaagcacatatagtactcatcattgtaatcagaaattacagaaatcagaataccatcactgctttacaggtgtga

SEQ ID NO: 50924 - DNA, 1616 bp, Homo sapiens
tgtgcgggctctgcacagggcaggatgtcagggaggctgaggacagaagcccaggggctgtccccagcttctaacatcagcgggtcatagaacttcctgcctcagcttcttgaaatcatggcgtccttgacctcaggtaccccttccattatgctcyggctctcccaacttcttagaagcctcctcaactcctggccccttctgcggaggaggcgggaggcagtgaaatcgtggcatgaagaggtggcggacccaagctccagcccccatgctgcaggagcagctgtgtgaccttttgggcaggtcacccagcctcatgcaccacctcagtgtctcatctaagaaacaaggctgtgggagcccttcccacagggtggtggtgacatcagactgccactgtgcttggctaaaggctggaggcacagagggtacccagccaacgggagttccttcatcttatctcacctgccacagagccagtctcccagcaccacagccccaaagcagccccccaggtgggaagtgccttgggggtacctactgttcctttgctcaccacccctccacagcctcctcttgggtggtcttcaacttctactttccctcccccacgccctgacatctgcctcctcctccccacccctcacacagagctctcctgatgccctgaggcctccagtgcctccattcacaaggaactgcaatggtacagccttaatctgtgttccttctcctgggcctccatattttggaagctgggactgttgacctaaatgtatccaaagaaatgacttcctaatggtggaattacgggtatcgggcatcttggtaggagggagctttgagaatgagagccttcttaacacctctccaatcataccccatggctccccttcagggtaagagtcttcctacacagagatcagtggatctggaataaagccaacagccgccgcctagccctgagcatgcttggaaacccacagcctgctcttggacaggaaggttcagccacagcagccaggacagctgcagctttaagaacgactcctgagcccagagaagcatggagtggaggggattgatttttgggtcctcctggagactgggatccaaaatcaatctggcaattaataggcaaggtgtgaaatggctctggtttcaggctcccagtgtccctggttgtcttccccagagaagggccctgctgcctctgtgcttccttccactccccatattctggggctctggtgacagctcctgagaagtccagctggctggccctcttccagggccttgtcacctggacagggccacaggataagcttggccagctggcagggctgggaggagggagcaggcagcctggattagtggccagggaagggaaagccaccaggggccctttcaagcccctccatctccaccccctacatcgcaggtaagaagcaggacatggcggggcttctagggactctaaatttccagagggccagcaccatgggggcaaataactgtccatcctatgtcctccaaccactctgctgaccgagcctggtggacaggccctcccccattgcacagacaggctgcttgagctcctaagaatgtgtcca

SEQ ID NO: 50925 - DNA, 1616 bp, Homo sapiens
tgtgcgggctctgcacagggcaggatgtcagggaggctgaggacagaagcccaggggctgtccccagcttctaacatcagcgggtcatagaacttcctgcctcagcttcttgaaatcatggcgtccttgacctcaggtaccccttccattatgctccggctctcccaacttcttagaagcctcctcaactcctggccccttytgcggaggaggcgggaggcagtgaaatcgtggcatgaagaggtggcggacccaagctccagcccccatgctgcaggagcagctgtgtgaccttttgggcaggtcacccagcctcatgcaccacctcagtgtctcatctaagaaacaaggctgtgggagcccttcccacagggtggtggtgacatcagactgccactgtgcttggctaaaggctggaggcacagagggtacccagccaacgggagttccttcatcttatctcacctgccacagagccagtctcccagcaccacagccccaaagcagccccccaggtgggaagtgccttgggggtacctactgttcctttgctcaccacccctccacagcctcctcttgggtggtcttcaacttctactttccctcccccacgccctgacatctgcctcctcctccccacccctcacacagagctctcctgatgccctgaggcctccagtgcctccattcacaaggaactgcaatggtacagccttaatctgtgttccttctcctgggcctccatattttggaagctgggactgttgacctaaatgtatccaaagaaatgacttcctaatggtggaattacgggtatcgggcatcttggtaggagggagctttgagaatgagagccttcttaacacctctccaatcataccccatggctccccttcagggtaagagtcttcctacacagagatcagtggatctggaataaagccaacagccgccgcctagccctgagcatgcttggaaacccacagcctgctcttggacaggaaggttcagccacagcagccaggacagctgcagctttaagaacgactcctgagcccagagaagcatggagtggaggggattgatttttgggtcctcctggagactgggatccaaaatcaatctggcaattaataggcaaggtgtgaaatggctctggtttcaggctcccagtgtccctggttgtcttccccagagaagggccctgctgcctctgtgcttccttccactccccatattctggggctctggtgacagctcctgagaagtccagctggctggccctcttccagggccttgtcacctggacagggccacaggataagcttggccagctggcagggctgggaggagggagcaggcagcctggattagtggccagggaagggaaagccaccaggggccctttcaagcccctccatctccaccccctacatcgcaggtaagaagcaggacatggcggggcttctagggactctaaatttccagagggccagcaccatgggggcaaataactgtccatcctatgtcctccaaccactctgctgaccgagcctggtggacaggccctcccccattgcacagacaggctgcttgagctcctaagaatgtgtcca

SEQ ID NO: 50926 - DNA, 1616 bp, Homo sapiens
tgtgcgggctctgcacagggcaggatgtcagggaggctgaggacagaagcccaggggctgtccccagcttctaacatcagcgggtcatagaacttcctgcctcagcttcttgaaatcatggcgtccttgacctcaggtaccccttccattatgctccggctctcccaacttcttagaagcctcctcaactcctggccccttctgcggaggaggcgggaggcagtgaaatcrtggcatgaagaggtggcggacccaagctccagcccccatgctgcaggagcagctgtgtgaccttttgggcaggtcacccagcctcatgcaccacctcagtgtctcatctaagaaacaaggctgtgggagcccttcccacagggtggtggtgacatcagactgccactgtgcttggctaaaggctggaggcacagagggtacccagccaacgggagttccttcatcttatctcacctgccacagagccagtctcccagcaccacagccccaaagcagccccccaggtgggaagtgccttgggggtacctactgttcctttgctcaccacccctccacagcctcctcttgggtggtcttcaacttctactttccctcccccacgccctgacatctgcctcctcctccccacccctcacacagagctctcctgatgccctgaggcctccagtgcctccattcacaaggaactgcaatggtacagccttaatctgtgttccttctcctgggcctccatattttggaagctgggactgttgacctaaatgtatccaaagaaatgacttcctaatggtggaattacgggtatcgggcatcttggtaggagggagctttgagaatgagagccttcttaacacctctccaatcataccccatggctccccttcagggtaagagtcttcctacacagagatcagtggatctggaataaagccaacagccgccgcctagccctgagcatgcttggaaacccacagcctgctcttggacaggaaggttcagccacagcagccaggacagctgcagctttaagaacgactcctgagcccagagaagcatggagtggaggggattgatttttgggtcctcctggagactgggatccaaaatcaatctggcaattaataggcaaggtgtgaaatggctctggtttcaggctcccagtgtccctggttgtcttccccagagaagggccctgctgcctctgtgcttccttccactccccatattctggggctctggtgacagctcctgagaagtccagctggctggccctcttccagggccttgtcacctggacagggccacaggataagcttggccagctggcagggctgggaggagggagcaggcagcctggattagtggccagggaagggaaagccaccaggggccctttcaagcccctccatctccaccccctacatcgcaggtaagaagcaggacatggcggggcttctagggactctaaatttccagagggccagcaccatgggggcaaataactgtccatcctatgtcctccaaccactctgctgaccgagcctggtggacaggccctcccccattgcacagacaggctgcttgagctcctaagaatgtgtcca

SEQ ID NO: 50927 - DNA, 630 bp, Homo sapiens
caattgaagctgttatttstgtggttgctacttccaagttccgcacttacctaacagcctatctttttttttatcattaaccaagtaacctttattaaagcactgacaccctatcattaatagattcccagtggatattttcagtagaatgcttccttcctttaactattgccttaaatatttagtatataacaaaaaatagaattttggggggattcagttataggcaaggggctacattcaactttaagatgatttgaatgttggcacctgaagataacttctttccttttcccaatgggtaggcttggactgctgaacatgtcaagtagttctattaggatagtttatgaatgattaagtatcagatttaaagaaattgtttttggataaaccaagtaaaactctctaccaatagttacagacaaagttattgtctccctcaaatattttcatacctaaaataaatattttgttatttttcactctttttcatatgacagtttctaatctctcatcccattctttgcacactcttctgacacaatatcatttgttgatttaataaatgaattcttacagctagtttggaagagggatattgtactggatttgaagctggattatcac

SEQ ID NO: 50928 - DNA, 573 bp, Homo sapiens
aactatatataggaactgtttggttggaagggccaggagaagccctggttgctcctccctcacattttactagagtactgatcaaaagcaataccatgtccttgcgggaatcaatagcactccaacgtcaagtagagatcataagtataaagccaccgtcaaatacttgaaagatgtagtaatagtgaacttatcatatccctgattaacttgtctgtgtagttcaaaagacagatgggttttggagaaaagcaaattttgtttggtaattaatattaactgcctcaattttacctactttctcagagatggtgggtgcttttactaaaacaagtccatctaacccctggaacaaggtatataactactgatctagctatcctttcttttctttttgcaataaacagaaaatasagagtagatttgcttttacttggcatggctatatatgctcttaatctctatgccataatttatccttaggccctttggtccctcaccatccccgaggacacaaatatgttcaactatcctcctggcaggacctggtggataggaaaaaaaaaagttact

SEQ ID NO: 50929 - DNA, 503 bp, Homo sapiens
ttatttttctaagtgagagattgacttttgttgacagaattgtactatctatggcagatgctatgcatacaaaatatttcttcaataaatgcaaagttacatctgtattgctattttttgtcattgctgttgctaccatagtcktttttcattcctcaaaccaaggaactacagtgtttctgtgatggtcctgctttcatttcataatttctgcccaatgtaaagcagaattgatagactaaaatacatggaaggggaaaagtttcacacaaatacataaataaattgataaatgtttttcttgtttaatttgaacacaaaattttttgtattactgtctgctttttaaatataagaaagaaattatctaaatctcaattcatgtgaaatttcctaccttccagattactcattctattctatatattaataaaacagggcttgcttgtatgtgttttgttgttgttgttgttgttgttgttgtctgtgtgtttttgagacag

SEQ ID NO: 50930 - DNA, 650 bp, Homo sapiens
cactccaatctttatctctaccttcattatttttccttattttctttactcagaattatcataaagcaatactactaacatgtcattctactgattttcttaaaatatttttttcttggtgattgacactccaattagggcttctttttactaactccatccatatggaagaactccatctgctgtgacctattgttttggatatgaattacataccttatagtttttctttaaaagttaaaggacattattgagcagcattctcagagtttcctctgttttcacatgctgtgtgatttctctcctcttytcttttggctgttgtggtggtggggcagggggagtgagatgtcttcacaatactatgttttcactatactatatttttgggcaaaagcatgttctttcactgtgtcaatagcaacacaggttgagcctcttcaattcaaaagttaaaatctgaaatgccccaaatgcactgaaataatgccacaagtgtacaataactttttaattaaacacaacatcttaagtggagccagaaagcctgccatcgtctgttgttgtttaagagcgatgcaggtattctggtgatgctgctgtgctgctccattaccctgaacacattatttttcactctattaatgcca

SEQ ID NO: 50931 - DNA, 650 bp, Homo sapiens
cactccaatctttatctctaccttcattatttttccttattttctttactcagaattatcataaagcaatactactaacatgtcattctactgattttcttaaaatatttttttcttggtgattgacactccaattagggcttctttttactaactccatccatatggaagaactccatctgctgtgacctattgttttggatatgaattacataccttatagtttttctttaaaagttaaaggacattattgagcagcattctcagagtttcctctgttttcacatgctgtgtgatttctctcctcttctcttttggctgttgtggtggtggggcagggggagtgagatgtcttcacaatactatgttttcactatactatatttttgggcaaaagcaygttctttcactgtgtcaatagcaacacaggttgagcctcttcaattcaaaagttaaaatctgaaatgccccaaatgcactgaaataatgccacaagtgtacaataactttttaattaaacacaacatcttaagtggagccagaaagcctgccatcgtctgttgttgtttaagagcgatgcaggtattctggtgatgctgctgtgctgctccattaccctgaacacattatttttcactctattaatgcca

SEQ ID NO: 50932 - DNA, 637 bp, Homo sapiens
ggtggttaggagaagctacataaacggtgtcatcaaacataatttgtaagtctacagaaatgccaccttagaaccagggcagtaaaaggttctcaaagctgccaaagaaattttcatgagggcaattttgagtgcagagtgggtagtcctccactacaacttcttcctttttctaaaaggaaaggggaaacctaaagtccactccatgggacacttgggatcagcactgtcttgtttcaacaccacctgagcgaactaagaacaaagacatcaacttgatagatactgccttggccaaaagtacacaaaagacttgcacttttactctttatgatttggcaaattacagttacaaaataatattaaaacttaccattaataagccaatttgctgcagcctggtcagtaagtgctagtattaaaaaatgagaataagataaatacaataaaggctgatatcatttcaccataatttcttaaagtacagtacccagacaacaagaagcagaattacttgttggggttgggaggtggtcctctaaaatgcagattcctasgcttcctttcagacctgctgaaacgatctctaactcatgggccctacaaatctctttgtttacaaccttttcccaatttg

SEQ ID NO: 50933 - DNA, 557 bp, Homo sapiens
tgtggctccgcgtcggtagacattgttctgtggaaggctagcttgccagggccattctccttcctcagcatccagaccctctgctattctgttgccagagggagttattgtgcattgtccacaacctgctcaaaatacagttctgcttatgcacgtatattggtatagtagaacctaccacagagaatctatcccataaaaggaactcaagaamtatttgtagaaatgaagtccatattgggccaggtgcggtggctcccgcctgtgtaatgccagcattttgggaggccaaggtgggcagatcacaaggttaggagatcgagaccatcctggtcaacatggtgaaagccagtctctactaaaaatacaaaaattagctgggtgtggtggtgtgtgcttgtaatcccagctactcaggaggctgaggcaagagaatcacttgaaccagggagtcagaggttgcagtgagccgagattacaccactgcactccagcctggcaacagagcaagactctgtttcaaaaaaaaaaaaaaaaaaaaaagaaaaaagaaatga

SEQ ID NO: 50934 - DNA, 2195 bp, Homo sapiens
atacckggctaggcacggtggctcacgcctgtaatcccagcactttgggaggccgaggtgggcagatcacgaggtcaggagatcgagaccatccgggctaacatgcagaagccctgtctctactaaaaactcaaaaaattagccgggcgtggtggcacatgcctctagtcccagctactcgggaggctgaggcaggagaatcccttgaatcccggaggtggaggttgcagtgagccgagattatgccactgtactccatcctgggcaacagagcgagactgtgtctcaaaaaaaaaaaaaaaaaaaaattccttttttgtttttccacaaaaattttttctgtgttttccttgaagtttttccaaggaaaaactttggaaaccatgtcctgccttgaattacttttaataatctcaagacagcatggattggcttgcaaagactaatagttgacttcatgttccagaagcatcagagaatgctgatcatgttgagagctggcccctttgcaggcatctactgggtgtcctcgaagtaaaaactcgtaattttcacgtatggcatggggatagttgctctgaaatgcattccagaactgtcaagattaggtcttcatgagaagtcaggtttggagaagtcattcattcaagatgatgtttaggtagtagaaatcagtgaaggtgattgcagaggtcaaagggcatgaccctacattctaatgacaggaattgtgtttggaaaatttcagttttcttcttaatgtgtccacttgaatgcatgcaagctctgtggagataagcagagtctatggtagttttgtcctgtggctatcttgggcccactagaatcatagcagatatgacagaggcacagcttgcctcagtttctgcttacacacagaacagcttcttctacatataaagccacatataatttaacacctaaactaggacacttgtgacagtgaaaagagatgctattgacaatttcagctggaaaacaggtggataccatttggctaatggatcaatgagaaatgttgaagaatgaatgaaccagcatctgtgtgttttattaatgggttttcaaagaccctgggtcttcagacctaagaagaaggtggtatagcaaagcactggctttgggggtacacagccagttgaaatcctactttaacatttactgtttgtgtgatcttgggcatatttgctaattactttgtgtctctctgttttcttgttataaatgggaataataattctcaccacaccgggttgttttaagaattaaagaaatgatgtatatatagcatttggtgtggtgcctggcacagagtaaacatttggcaaataatcattattattcttaattattgtccctacttgaccagaaccttgttctaggtataagaataatgctacagcacagtcaaggtggagaagagccattttggcctcttggtcgaagcatccattgtaacaaaacaactcagcctgatgtcccatgatcatgaaaggagctcatggtaggactgaatgaacacggtgtcttacaaatatttaggctgaatcatgaggaccagggcccaagcctttagtataggcctactgcttgaataggaaggccttatacaaccaaaatgacctagatttccagcacatcttcctgatgctctgcaatatttatctttttcttggaagagctcattagcaagatggaaggtgttcaggttactcacgaatgtacatattatagacttctctttatgagtatatgtgttagtttatttttgcattgctacaaatacccgaggcttggtaatttataaagaaaagaggtttaattagctcacagttctgtaggctgtataggaagcatggtgctggcatctgctcagcttctggtagggccatagggaggttttactcatggcagaaggccaagggggaaaaaggcatggtgagagagggagcaagagagagagaagggggaggtcccagactctctgaacaactaggtctattgtgaactgagtgagaactcactcatcaccaaggagatggtgctaagccattcatgagggatctgcccccatcatccaatacttcccaccaggccccacctccaacattgaggatcacatttcaacatgagatttgaaagggacacacctccaaatcctatcagtatatgaa

SEQ ID NO: 50935 - DNA, 2195 bp, Homo sapiens
atacctggctaggcacggtggctcacgcctgtaatcccagcactttgggaggccgaggtgggcagatcacgaggtcaggagatcgagaccatccgggctaacatgcagaagccctgtctctactaaaaactcaaaaaattagccgggcgtggtggcacatgcctctagtcccagctactcgggaggctgaggcaggagaatcccttgaatcccggaggtggaggttgcagtgagccgagattatgccactgtactccatcctgggcaacagagcgagactgtgtctcaaaaaaaaaaaaaaaaaaaaattccttttttgtttttccacaaaaattttttctgtgttttccttgaagtttttccaaggaaaaactttggaaaccatgtcctgccttgaattacttttaataatctcaagacagcatggattggcttgcaaagactaatagttgacttcatgttccagaagcatcagagaatgctgatcatgttgagagctggcccctttgcaggcatctactgggtgtcctcgaagtaaaaactcgtaattttcacgtatggcatggggatagttgctctgaaatgcattccagaactgtcaagattaggtcttcatgagaagtcaggtttggagaagtcattcattcaagatgatgtttaggtagtagaaatcagtgaaggtgattgcagaggtcaaagggcatgaccctacattctaatgacaggaattgtgtttggaaaatttcagttttcttcttaatgtgtccacttgaatgcatgcaagctctgtggagataagcagagtctatggtagttttgtcctgtggctatcttgggcccactagaatcatagcagatatgacagaggcacagcttgcctcagtttctgcttacacacagaacagcttcttctacatataaagccacatataatttaacacctaaactaggacacttgtgacagtgaaaagagatgctattgacaatttcagctggaaaacaggtggataccatttggctaatggatcaatgagaaatgttgaagaatgaatgaaccagcatctgtgtgttttattaatgggttttcaaagaccctgggtcttcagacctaagaagaaggtggtatagcaaagcactggctttgggggtacacagccagttgaaatcctactttaacatttactgtttgtgtgatcttgggcatatttgctaattactttgtgtctctctgttttcttgttataaatgggaataataattctcaccacaccgggttgttttaagaattaaagaaatgatgtatatatagcatttggtgtggtgcctggcacagagtaaacatttggcaaataatcattattattcttaattattgtccctacttgaccagaaccttgttctaggtataagaataatgctacagcacagtcaaggtggagaagagccattttggcctcttggtcgaagcatccattgtaacaaaacaactcagcctgatgtcccatgatcatgaaaggagctcatggtaggactgaatgaacacggtgtcttacaaatatttaggctgaatcatgaggaccagggcccaagcctttagtataggcctactgcttgaataggaaggccttatacaaccaaaatgacctagatttccagcacatcttcctgatgctctgcaatatttatctttttcttggaagagctcattagcaagatggaaggtgttcaggttactcacgaatgtacatattatagacttctctttatgagtatatgtgttagtttatttttgcattgctacaaatacccgaggcttggtaatttataaagaaaagaggtttaattagctcacagttctgtaggctgtataggaagcatggtgctggcatctgctcagcttctggtagggccatagggaggttttactcatggcagaaggccaagggggaaaaaggcatggtgagagagggagcaagagagagagaagggggaggtcccagactctctgaacaactaggtctattgtgaactgagtgagaactcactcatcaccaaggagatggtgctaagccattcaygagggatctgcccccatcatccaatacttcccaccaggccccacctccaacattgaggatcacatttcaacatgagatttgaaagggacacacctccaaatcctatcagtatatgaa

SEQ ID NO: 50936 - DNA, 607 bp, Homo sapiens
ttcattagacttttttttttttcactttcactttgagtaagccatcttctggaacctagaacaatagagtggtactatgagtgggtccaggaaagaaaaccctcaaaataggattttaaaatttggtaggtcacatagattaataattcatggacagcttccttgcttaagaaaaaaatggaacagtaatcagatagtggtatcatgattacttaagttattaacaatagtgccatgaggtagaagaagggtaaaatttggtagaaaaaatggttatagcacttagacatatgggatcgattatgattacaaatattgttggattggaagcttttgtagctataaaaaacatacaggcaaagtaaaaattcaatgccttaaattaataaattcaataagcagatttgaaattagaaagattaaaaagcttctttgacaattttaaagtaattccctatttgacatgggtaaaggacagatgtgtctcagggttaagcctagagctgagtgcaatgcttacagaattgaagcaacaaataaatacacacctttgccagataatcttaaagaaagaacagtgatagggaagaattgcaacctrttacaa

SEQ ID NO: 50937 - DNA, 548 bp, Homo sapiens
cattagacctagttcaaatcccagtccagccaattcctggctgtgtgtccttggacaagtgacttaagcactctggccttgcctcgtcttctctgtaaatggaagatggttttgtacataacacaagggatggagaggtttaaatcactgaagtaatgcatgttaaatgaatcataaatgtagattcccttttcctccacataatataccctccraagccccagggaaatcttagcagtgacaaagcaatgaagacttggatgaggatgggcctcttggggactgtgggaaagagacaggaagatactattaccacccctcattttttccctttactagttttgaagttttatgcatatgtctgtcctttaagtagttagcctggcccttttttcatgcatatttaatagaccctaatgatagtatcattcattaccttcctcccaaactattacagaattgtagagttaattaactgtagtcaccctctcccaacttactgctatttttgtctaatatttaagttgtatccctttttttccacaata

SEQ ID NO: 50938 - DNA, 548 bp, Homo sapiens
cattagacctagttcaaatcccagtccagccaattcctggctgtgtgtccttggacaagtgacttaagcactctggccttgcctcgtcttctctgtaaatggaagatggttttgtacataacacaagggatggagaggtttaaatcactgaagtaatgcatgttaaatgaatcataaatgtagattcccttttcctccacataatataccctccgaagccccagggaaatctyagcagtgacaaagcaatgaagacttggatgaggatgggcctcttggggactgtgggaaagagacaggaagatactattaccacccctcattttttccctttactagttttgaagttttatgcatatgtctgtcctttaagtagttagcctggcccttttttcatgcatatttaatagaccctaatgatagtatcattcattaccttcctcccaaactattacagaattgtagagttaattaactgtagtcaccctctcccaacttactgctatttttgtctaatatttaagttgtatccctttttttccacaata

SEQ ID NO: 50939 - DNA, 902 bp, Homo sapiens
aaagctgacagcaaattaaataactatttatcactggtttaattcaagccttaggataattaaaagcctgaaagttcactttcagtcaagcgtgagtaaggaagcaagaagaggaaactgcaaacctaccatttcctgagcttcctgagaattgttcatataccccgctttgtaaaataattattcatataccactttaaaagcaaataaggagatatggtgtcaattgcattcaaataatattagttcagttttttgttttgttttttgttttttttttgagacggagtctcgctctatcgcccaggctggagtgccgtggcgcgatctcggctcactgcaagctccgcctcccgggttcacgccattctcctgcctcagcctccggagtagctgggactacaggcgcaagccgccaggcctggctaatttttttgtatttttagtagagacggggtttcaccgtgttaggcaggaaggcctcgatctcctgacctcgtgatccgcccgtctcggcctcccaaaragctgggattacaggcgtgagccaccgcgcccggccagttcatttttatttagaaatatgagaaagtttaaccatgaataaattgtttccgaatattttatattggaaacattttgtgaggaatttatattaaataattttctttattaaataattgttgacagattatcagattagacaatgcttacaaatatcattttaatgttcagaataaatttaaaaatgtttgaataaagtgggaagtgtagagtttccaattttgctaatattttttatgataaaatttagacatcaagcaaaaataatcaaatattaaaacaaaaaaggacttctctggagattgccttggccaaagaattgtgtcttgcatatttga

SEQ ID NO: 50940 - DNA, 2227 bp, Homo sapiens
ggagaaatgggctataaaacagaatgaattagcagcaccaattaagtccccttttttcttttagaagtgtgttgttgtcataaaagtggtgactaagaaagtaaattccgttactgaagaatgcccaccaagaataaagaattggatgcaaagcagtaagagttcatttgtttttgtaattctgttattattaacctattattttttcttctgagcccaagcttgatactgtatctgaagcactgggatggtttagtaatttaaaatgtaaaacttaatagaataatactttgctgcaacctttaattatatttttacattgagacttggtcgatatttgtgtttattttcttaacttcaaacataattgacaatcttcacaaatgtcacctctctaaagaaagggtcaacatttagcagtgcattactagatttttcacacatattcattattttgtggtctttaagtatttaatgttgaataagaaattcaagctttacttctacatgcccacatgtcggatagttaataaatatgtttttcatttgaattcattaaatttgtctgaagtttcagaaactactaatacttgttataaaataagtgatataatttagtcaaaatgctgagttatttttgagtattgagaaggatgtcaaatgttaaatggcatatttttcttctaataacaccatcctggcttggctgaccaaggtgaaggggaaataaatacaaattaatttagaggtcacactacatatcattagaatctgtataatttttgtttatcttcagtattaaaagaggattttcaagctttcagtagtacgtcatcaagtattttatttaaatttttaaaattaacagatacttttacatatttgaaaaaaaattttcattaaatttaaaattttggctctaatgcctacttgataataaattatagagaagcctaaggaaaagtcaattaattattcataattcagccatccatatatttgtgtatatatatatgcattatgcctttatccaccaatcattttaagagtattctagtattaacacaaactctttgaaaccatcagtctttattgctcataatgtctgattgcatttatatacatacatatatacataaaacttctccagttatatttacatgtttatatataccactacaatatacatacactatatatacaacatacatatattaacctttttaaaaatctactcttatctgttaagacatactaatttaaagccagtttaaaaatctagcctatggcaagtttttatgtctgatttgcttgcttattgaatttaattggtcatgttattatgcataaattcattttcaaatacttattaattacctactgtgttccagatttatattagtaaatttttctcgtctaattgctaggaagtagcaaagtataatgcatgttactgacccactcctcacagtaggagccataaatggagtcccatatagtaaggtctaaatatgtaaagttttaactgaagatgtaagtatcacccatcccttttcccagctgtggatcccacttttagttccctttacaccttaactgtacaacccagaggctctccaaaagccatatttcaccttacagcaggtctggtgcttggagcctgagcatatttataactggggttggagagagcaaagccggaagtgggttgtccaggaatcctgaaccaggatggaaactgacctcgtcacactcttcagagagctgagcaggctgtttctctatcccgtggaataatcttatctgttctgaatttccaggcaggtaaggtctttccaattaagaccacttaagtcaaggaaagacagaaaactcagctatctgtttggttacacattttaactgatttgggtggccagcttaaaacgaaagcagccaaatttcctacagccacgcttttctacttccctgccatcaacacactcatacactcactcacacacttgtgaactctyagattcacattcatttaacaggaggacctggtttagctcacacattccattcttgtatttagtttgtactcaaattaatcattaagtttagcggagccggagtttctccttgtacaggtctaagaggatattttaatgttactgttgaaagtaaaaatagtcatacaggattaattttaaaacagaatttcattgtacctttagagtcagaa

SEQ ID NO: 50941 - DNA, 554 bp, Homo sapiens
ccatgacaatcctgcttactgactctagaaagagggaacttcaccagggagctggcacagaggaaagggtgtaaatttgagccccagcccaatttacttgttgtataatcttggacaaacccactattccctgccacaggaaggcctggagaagaaggaaagaatgaagctgactggtgggaattcactttggaatgtgaagtgctttgctctttggaagaactggcattccctgaggcaccctgcagtgtgtgcccactgatgactgagtcacttgcactggacaagaagtcattttttttttwattgggaaactcatgtaacaaacctacatttattgaaaatgaaatcagtaactaagactctgcaggccccaccccaaccagcaccaaggcctctacttggtctggtcccagttctttaagccccagaatggacaaccatgtgaagcagctcaggtcaactgcagggccacattcccacactgcaaacccctccacccaccctcaactcacacacaccctggatcagcaggtctaggctgaaagagagaa

SEQ ID NO: 50942 - DNA, 563 bp, Homo sapiens
ttacagagtcatttcaattgttcaagtatttttaagtaaaaaaaataatctgtatggggcctgttgataaaggaacttactgatattgatctagcctccaaaataagtagtatcaagaagcccactttagcctttaagattagcttatgataggtagatagctctttaaaaatttttttcaaacaagttttagatttagagttgagtttgggttggagcgaacaggactgtctggactgaaagaagtatcctggggttatcctcaaatagaaatgaactacaagaaagtgattttcatgggctttgtaaatttgaatacatacttttttcttcatatctcttataactagggcaattactacaacaatatgatgacaacaataygatgagcttagacgtattagaactttgagatttttcagaaaaataatagctagcatttattgagggttaactacatgaaattcagttaaccctcacagccactctatgaaataatcattgttattcatattcctattttacagaaatgaaaacaggttatgctagcaagaggcagatct

SEQ ID NO: 50943 - DNA, 551 bp, Homo sapiens
ggctggtggtgggcatctgtagtcccagctaattggaagggtgaggcgggaggatcgcttgaacctgggaggcggaggttccagagagccaagatcgcaccactgcactmcagcctgggcgacagaacgagaccctgtctccaaaggaaaaacaaaaaagaagaataaaataatttggatgaaaatcatgtttatttaaatagtaatgtcatgagactattaaagatgtgccagagtttcaatgaaaatcattaaagtaggacagctaagaaattaatattaatatcaaaattattgataatcttaaattattgattattccttaacgcactccattctccttttacattttatcatgtttcttttgaatatatgaattggcaaaggacttgatgaaactgagtactaagatttggtacagagtatgtcaggaagacaactcagattgccattttaaataaagttgtacatgaacaataattggaatcatcaggtaatttttttaaacaaaggttcttcatttactgttatgattggaaaaaaattagaaa

SEQ ID NO: 50944 - DNA, 534 bp, Homo sapiens
ccttggcctcccaggttctagtgattctcctgcctcagcttcctgagtagctgggactacaggcacccatcgccacacccagctaatttttgtgtctttagtagagacagggtttcgccatggtggccaggccagtctccaactcctgacctcaggtgatccacctgccttggcctcccaaagtgttgggattacaggcgtgagccactgcccccagcctttctttttttttatttagaaacaaagtctcactctgttgctcaggctggactcaaactcastggctcaagtgatactcctgcctcatcctccctaaatgctgggattataggcatgagccaccacacccagcctccagttcatttcttaatcaagagacatactgattaacccaactgactttccagcatgtacactgtatatctgtattcatagacacatttctcttttcttcctcttaataaaaatgtagctctcaaagatatcctgaaaatagtgctcaggcttgcaacattacagctttaatgagccaag

SEQ ID NO: 50945 - DNA, 534 bp, Homo sapiens
aaaaaaaaaaaaaaactgctgaatgctataaataagattggaacttgctctgcttttacaagaccactgttagatgaccactgacaagaagactgtgagctggtctctgtaggaagcaggggcctgggcagctctgggggcagaggagacaggcctggggcagagacacctcagggcattttcagaagacagccaaagcagccattccagcttgcccaggtagatggcaagtcaatgggaaatgattccaggaaggtagggaaagatggaattctggagagcattggacctcagattgggagtctgaacatctttccatatgcatcaggaagycatggaaaattcacagactggagtgactttggcaaaggtgggatttaggaagactgatcaaggcacgggatagacccatggatgaatagccttctggtcagtttgtccctgtggttttctatgctgaggaggtgggaatgtgctgggtgagtcagctgtggatttgtgtccctgcctcacctcactccccactgtcgtgga

SEQ ID NO: 50946 - DNA, 534 bp, Homo sapiens
aaaaaaaaaaaaaaactgctgaatgctataaataagattggaacttgctctgcttttacaagaccactgttagatgaccactgacaagaagactgtgagctggtctctgtaggaagcaggggcctgggcagctctgggggcagaggagacaggcctggggcagagacacctcagggcattttcagaagacagccaaagcagccattccagcttgcccaggtagatggcaagtcaatgggaaatgattccaggaaggtagggaaagatggaattctggagagcattggacctcagattgggagtctgaacatctttccatatgcatcaggaagtcatggaaaattcacagactggagtgactttggcaaaggtgggatttaggaagactgatcaaggcacgggatagacccatggatgaatrgccttctggtcagtttgtccctgtggttttctatgctgaggaggtgggaatgtgctgggtgagtcagctgtggatttgtgtccctgcctcacctcactccccactgtcgtgga

SEQ ID NO: 50947 - DNA, 534 bp, Homo sapiens
aaaaaaaaaaaaaaactgctgaatgctataaataagattggaacttgctctgcttttacaagaccactgttagatgaccactgacaagaagactgtgagctggtctctgtaggaagcaggggcctgggcagctctgggggcagaggagacaggcctggggcagagacacctcagggcattttcagaagacagccaaagcagccattccagcttgcccaggtagatggcaagtcaatgggaaatgattccaggaaggtagggaaagatggaattctggagagcattggacctcagattgggagtctgaacatctttccatatgcatcaggaagtcatggaaaattcacagactggagtgactttggcaaaggtgggatttaggaagactgatcaaggcacgggatagacccatggatgaatagycttctggtcagtttgtccctgtggttttctatgctgaggaggtgggaatgtgctgggtgagtcagctgtggatttgtgtccctgcctcacctcactccccactgtcgtgga

SEQ ID NO: 50948 - DNA, 567 bp, Homo sapiens
atgttgtgtgcagaaacccatgtgacagcatgagtgtgttgtgtggatatgtgcttcccaggacaggattatgtacaggggagttgtacagacatggagtgtacagatacattgtagagacaaatgttaaagagacatacagtgtacagaaattggattgtagagatatgaacttcacatacaggagttacaaaagcatggtatgcagattggattattgagatgcaggttgtctagacactggccctgaaggcataggttgtgtagacacagcctgggaccaagctctttggtcctggccttaaarcagggtgtgcagcatgagcccagtgatggttgcctggctatgtgccagaagtgggactctgatgtctgtgcagagggtgagggcaggacggtatattctgccactctactttgagcactggctttgaagctttccctccaatgccattcccacccccaagggactcaggaaatgacttctgtcttttctttgatagaacaaagaaagagagagttctaatagatgagagagagagaaagagagagagagagagagagaga

SEQ ID NO: 50949 - DNA, 589 bp, Homo sapiens
ttcctccttattgtctaacacggtctccttaacactgaaatagcttatgtcacagcaaataacgggaagcaaattaatgtagagttaaaaataaaayttgagaccgaactatacctctgccacttaccacctaggtaattctggtgggtcacatcccctctctgaaccttcattttattatctgtaagatgggagatattaagacataattcatagggttggcatgaaggttaaatgtagttaataaatccaaagtgactggcatgttctcaagtactcaaaaactgttttttggtgatgcaaaattgctttgtgtggcataaaactctgtgtaaatgtaagagattattattttgtcaaggcaagattcatgttttcaaaggttaatggatatttcaagtcgaggtttcacttttctgctgactctgttgttggagatggtgtggtagaagaacaatgctttgattccctgtactatcaagggactaacgttgttctctgcactctgcacagagccccaaagcaacccacccaacatcacagcaaaatgctgcagggtcgttttgatgttccaggaggaaagagcatg

SEQ ID NO: 50950 - DNA, 589 bp, Homo sapiens
ttcctccttattgtctaacacggtctccttaacactgaaatagcttatgtcacagcaaataacgggaagcaaattaatgtagagttaaaaataaaatttgagwccgaactatacctctgccacttaccacctaggtaattctggtgggtcacatcccctctctgaaccttcattttattatctgtaagatgggagatattaagacataattcatagggttggcatgaaggttaaatgtagttaataaatccaaagtgactggcatgttctcaagtactcaaaaactgttttttggtgatgcaaaattgctttgtgtggcataaaactctgtgtaaatgtaagagattattattttgtcaaggcaagattcatgttttcaaaggttaatggatatttcaagtcgaggtttcacttttctgctgactctgttgttggagatggtgtggtagaagaacaatgctttgattccctgtactatcaagggactaacgttgttctctgcactctgcacagagccccaaagcaacccacccaacatcacagcaaaatgctgcagggtcgttttgatgttccaggaggaaagagcatg

SEQ ID NO: 50951 - DNA, 589 bp, Homo sapiens
ttcctccttattgtctaacacggtctccttaacactgaaatagcttatgtcacagcaaataacgggaagcaaattaatgtagagttaaaaataaaatttgagaccgaactatacctctgccacttaccacctaggtaattctggtgggtcacatcccctctctgaaccttcattttattatctgtaagatgggagatattaagacataattcatagggttggcatgaaggttaaatgtagttaataaatccaaagtgactggcatgttctcaagtactcaaaaactgttttttggtgatgcaaaattgctttgtgtggcataaaactctgtgtaaatgtaagagattattattttgtcaaggcaagattcatgttttcaaaggttaatggatatttcaagtcgaggtttcacttttctgctgactctgttgttggagatggtgtggtagaagaacaatgctttgattccctgtactatcaagggactaacgttgttctctgcactctgcacagagccccaragcaacccacccaacatcacagcaaaatgctgcagggtcgttttgatgttccaggaggaaagagcatg

SEQ ID NO: 50952 - DNA, 513 bp, Homo sapiens
gaagcatgaatagcatcacactctccagtggctttcaatctctttcctggtgaaagtcaaattcctttcagtgtctatgagataacaggaagacagtatctggtgtgtcattgcttattgtcctcatctccttattttttcttcctagcatatttaattccaggcacttgaataarataaacaaaatccttgccctcatcggaattatagcaaaacaaatttagatagacaagtcacagaaacaaacaaatgctaagataatttcagataatgtatctgttatgaagaaaataagcctggtacatagggtaatctgaggcacttaatggaattgctatttgagctatggattgagaataaaccaggaataatgaagcacatggcagaaggtcagagatcactctatgtgaacagcctataaattggtagaaagcagagtgactattttttgttcatattttggtaatttatttgaaaaatcacatgaaatgaatttgaaaaccactcattttt

SEQ ID NO: 50953 - DNA, 545 bp, Homo sapiens
tttggaattagacctascttggaatcacagcttagccacctctttgtgtgatattcatcgaggtatttaatttctctgaactcactgtccttatctgagtatctgaatacgaagacaaaaatatctgcttcacacagtttccatgaggattaattattttagcacagtgcctgaaatgtagcagccaaagcaatgtagtagccaatattgtactatttggttgctttaatggcttaaaattttttttttaattttattattattattattttgagatggagtcttactcttgtcgcccaggctggagtgcaatggtgcaatcttggctcactgcaaccttcgcctcctgggctcaagctgttctcctacctcagcctcccgagtagctgggactacaggcatgcgccaccatgcccagctaacttttgtgtttttagtagagatagggtttcaccatgttgcccaagctggtcttgaactcctgacctcaggtgatccacccacctcagcctctcaaagtgctgggattacatgcgtcagctacc

SEQ ID NO: 50954 - DNA, 545 bp, Homo sapiens
tttggaattagacctaccttggaatcacagcttagccacctctttgtgtgatattcatygaggtatttaatttctctgaactcactgtccttatctgagtatctgaatacgaagacaaaaatatctgcttcacacagtttccatgaggattaattattttagcacagtgcctgaaatgtagcagccaaagcaatgtagtagccaatattgtactatttggttgctttaatggcttaaaattttttttttaattttattattattattattttgagatggagtcttactcttgtcgcccaggctggagtgcaatggtgcaatcttggctcactgcaaccttcgcctcctgggctcaagctgttctcctacctcagcctcccgagtagctgggactacaggcatgcgccaccatgcccagctaacttttgtgtttttagtagagatagggtttcaccatgttgcccaagctggtcttgaactcctgacctcaggtgatccacccacctcagcctctcaaagtgctgggattacatgcgtcagctacc

SEQ ID NO: 50955 - DNA, 545 bp, Homo sapiens
tttggaattagacctaccttggaatcacagcttagccacctctttgtgtgatattcatcgaggtatttaatttctctgaactcactgtccttatctgagtatctgaatacgaagacaaaaatayctgcttcacacagtttccatgaggattaattattttagcacagtgcctgaaatgtagcagccaaagcaatgtagtagccaatattgtactatttggttgctttaatggcttaaaattttttttttaattttattattattattattttgagatggagtcttactcttgtcgcccaggctggagtgcaatggtgcaatcttggctcactgcaaccttcgcctcctgggctcaagctgttctcctacctcagcctcccgagtagctgggactacaggcatgcgccaccatgcccagctaacttttgtgtttttagtagagatagggtttcaccatgttgcccaagctggtcttgaactcctgacctcaggtgatccacccacctcagcctctcaaagtgctgggattacatgcgtcagctacc

SEQ ID NO: 50956 - DNA, 545 bp, Homo sapiens
tttggaattagacctaccttggaatcacagcttagccacctctttgtgtgatattcatcgaggtatttaatttctctgaactcactgtccttatctgagtatctgaatacgaagacaaaaatatctgcttcacacagtttccatgaggattaattattttagcacartgcctgaaatgtagcagccaaagcaatgtagtagccaatattgtactatttggttgctttaatggcttaaaattttttttttaattttattattattattattttgagatggagtcttactcttgtcgcccaggctggagtgcaatggtgcaatcttggctcactgcaaccttcgcctcctgggctcaagctgttctcctacctcagcctcccgagtagctgggactacaggcatgcgccaccatgcccagctaacttttgtgtttttagtagagatagggtttcaccatgttgcccaagctggtcttgaactcctgacctcaggtgatccacccacctcagcctctcaaagtgctgggattacatgcgtcagctacc

SEQ ID NO: 50957 - DNA, 545 bp, Homo sapiens
tttggaattagacctaccttggaatcacagcttagccacctctttgtgtgatattcatcgaggtatttaatttctctgaactcactgtccttatctgagtatctgaatacgaagacaaaaatatctgcttcacacagtttccatgaggattaattattttagcacagtgcctgaaatgtagcagccaaagcaatgtagtagccaatattgtactatttggttgctttaatggcttaaaattttttttttaattttattattattattattttgagatggagtcttactcttgtcgcccaggctggagtgcaatggtgcaatcttggctcactgcaaccttcgcctcctgggctcaagctgttctcctacctcagcctcccgagtagctgggactacaggcatgcgccaccatgcccagctaacttttgtrtttttagtagagatagggtttcaccatgttgcccaagctggtcttgaactcctgacctcaggtgatccacccacctcagcctctcaaagtgctgggattacatgcgtcagctacc

SEQ ID NO: 50958 - DNA, 579 bp, Homo sapiens
tgtcactgcactccagcctgggcgacagagcgagactccatctcaaaataaataaataaataaataaataaataaataaataaataaagattttcttttktaggtatagacatcaggggagtcatgcagtgactgcctggctgtgaaagatgattatgcggatggagttgtctcgctcaacgtatctcttcttgagcgtgtttacttttaaaaatctagaaattcccttttcagttactatttaaaatttgtaatttgatttctttatacacacaccgtcacacatacaacacataattttatataaaggcaacatagttttttccctaattttttgcctttccctctcataaattccctctatttgcagcccttctctgccctctgttaaatcagactctttcaaatttttccccttactaacataattgtgtataggcgtaaacaaacacaaacacatatgtatatactcctagaaccttattcattatgactagcttttataaatgcaccaaacttttgattatttttcttctctctcaaaagtgccacacagaaattcctccaagtcatgtggtg

SEQ ID NO: 50959 - DNA, 597 bp, Homo sapiens
gcaaaaatggactaaagtgcacattgataggtcatctataagtattagtgctcccccttgtggcatctcaggaaggtggaggtgaaagtgaccatggacttatcaaggtctgttaggaagcaagatggatctttagctgggagagaacatctgtgccccggcctgtgttcccccaggaagaagttaatcagaagatgtttcctttcaccacaagcaaaaattatctttatttcaagtcttcaatcattttcattagattccacaggcatctgagtagattctttaggcagatattctgacttacattattgagaatataagtcctcattataacctgttgaaataggttgtctcattctaytgttaccaggtgagacaactgaggttcaggatgttaaagtaatcattgcaagggtggacagcctggagcgcttgtctttgaagtcctctatgtagcatactttctaccatactctgcctgtttagacaataaaagtttggattgctgcaaaacaagctagctattgttgttgccagaattctgttagctaccaagtaggcaaaggaagctggcattcagtggacagctcaggtgca

SEQ ID NO: 50960 - DNA, 503 bp, Homo sapiens
tgtagatatgttttcaattctctttgggtatatacctaggcttggaattgttgaatcatatggtcaatccatgtttaactttttgaggaactgccaaactgttttctgaagtggctacaccagcaatgcaagagggttcaaatttcactacatgcttgccaamacttgctactgtctatcttttaaattatggccattctagtggatgtgacatggtatctcattgtggtttggagtaccctaatgactaatgatgtagaatatctgtcatgtgcttaccagccatctctatgtcttctttgaagaaatgtttattcttccctgatttttgagatcacattctattggttttcctctgtctcctgtatgggttcctagtcttctgtccttgctttaaatattgaagttcctcattattctgccccagatcctatcccaggatgatctcatccatgttcaggcatttgttaaaatctaaaagtcaattatttctaattctccag

SEQ ID NO: 50961 - DNA, 542 bp, Homo sapiens
ttaagaaaaaaagaaaagattatgggaaataaaacattgaaattatgcttttataaataaatagttattrtgaatatagttatataatgatacaagatcaaaatgattttcaaaagcaagaagagttcatttatcgtttctcttagttttatgttgacacttattcaagggtaatgtttccttatgtttttgattatcactgtctgttagactttatgcttagaataaaatacttttggaaataattaaatgattgttttaataatatcttccttcagatagtttcgtttggtgcaatatgttgttaccattctttgctcccttaagccaaatataatgtttgagagttcctgagccactcacataacttaatgacaagaaggcaggatgcaaatccttgaatgggctacttgatttgtctttgcactgatatcccatgaagacacacacacatataaacacactatatatacacatatatatgtatatctgtgtgtatgtatatatatgtatacatatacgtgtactttatgtatgtatat

SEQ ID NO: 50962 - DNA, 542 bp, Homo sapiens
ttaagaaaaaaagaaaagattatgggaaataaaacattgaaattatgcttttataaataaatagttattgtgaatatagttatataatgatacaagatcaaaatgattttcaaaagcaagaagagttcatttatcgtttctcttagttttatgttgacacttattcaagggtaatgtttccttatgtttttgaytatcactgtctgttagactttatgcttagaataaaatacttttggaaataattaaatgattgttttaataatatcttccttcagatagtttcgtttggtgcaatatgttgttaccattctttgctcccttaagccaaatataatgtttgagagttcctgagccactcacataacttaatgacaagaaggcaggatgcaaatccttgaatgggctacttgatttgtctttgcactgatatcccatgaagacacacacacatataaacacactatatatacacatatatatgtatatctgtgtgtatgtatatatatgtatacatatacgtgtactttatgtatgtatat

SEQ ID NO: 50963 - DNA, 542 bp, Homo sapiens
ttaagaaaaaaagaaaagattatgggaaataaaacattgaaattatgcttttataaataaatagttattgtgaatatagttatataatgatacaagatcaaaatgattttcaaaagcaagaagagttcatttatcgtttctcttagttttatgttgacacttattcaagggtaatgtttccttatgtttttgattatcactgtctgttagactttatgcttagaataaaatacttttggaaataattaaatgattgttttaataatatcttccttcagatagtttcgtttggtgcaatatgttgttaccattctttgctcccttaagccaaatataatgtttgagagttcctgagccactcacataayttaatgacaagaaggcaggatgcaaatccttgaatgggctacttgatttgtctttgcactgatatcccatgaagacacacacacatataaacacactatatatacacatatatatgtatatctgtgtgtatgtatatatatgtatacatatacgtgtactttatgtatgtatat

SEQ ID NO: 50964 - DNA, 635 bp, Homo sapiens
gtgggtgtgtgtgtgacacaagcactgtggctgccaccaccattgggactgcgctgggtcagacttgaagccagcacagcactgggtcccacccaatgcccgtggtaaccactgcctggctatggcctgtgttcactcaaggccctagggctcagcaatcagcagatagaaaagccaaccaggcttgtgtccttcccttcagagtggtgagttccccrgctcccaaatgcatccagagatgctgtccaggagccagggcctggagtcagaaaccttaggaatctacttggtgctctgttctattgaggatgagctggcacccaagccgcaagacaaagtcctttcccactcttccctcccctttccacaagcaggccctggcaaccactaatatactttctgtctctctgagtttgtctattctggacgtttcaaataaatggaatcacataatatgtggacttttgcatctagttcactgagatttcatggttaacaaaatcataggaataataaaatcagccctagtatgcagggtcttttgctttgtgtatacatttattatactgagctactcccactctgatcattcactcaaaagtggtttctaattctgctgttactcctttgatatc

SEQ ID NO: 50965 - DNA, 605 bp, Homo sapiens
acaatagatgccagaactagagctagagatcaaggtttctttaactcttaggatcaagagggattcttgggttttgcatttttcaaattgtctgcaataaacaatttaattttatattcagacaaaaaaactacagaattatgtattttatttatttaatttacagcacaagaaaagtataaatgaatatgttgacargtattttttagttttgaggatctactttttctttactttgtatattccagggcttgatcctgggtcttgcatgccttcaggaaatcaagatgccttcagagaatttctacagattcctagaatgttcttacatgtcctggtttttgcttatcaccttttgtcctgagacattggctttcttgcaatatctctcactaccttgtaactgctcttccttgtcctgcttcaaccaaccctgagaacattaagagaaagaaatagaaggaagggtagagggggtgttaaaataattaattgtctagtttttgatgaagatatcagcatactattctcattagaatattaaaacagactcctgcgtgaaatacacattatgtaacaatgtacaagtttcacatcctaaagct

SEQ ID NO: 50966 - DNA, 557 bp, Homo sapiens
ggaatctgacacctgctagacaccctcagaatgtctgtgaaatgatgtaactctacgtgatgtgtgtctactcatagctgtaaaatgagtgagccctcctgtaggtcacagtgtccagcagactggcagggacctgatatgaacatcacagaggaaaaaaacacataygaaacaattaatgcttgccattgggccaaatgctttgtatgtgttatttcatttatatttttatttaatactaagcagacttcatgtaccctgtattttgctaggcagtggagtacatagaaaggaacagaaactgcgtatcttgtcttcccaactgaaaggagacgattaacctacttgaagatgttagaatacaaatacatgatatctgaggacagggtgaagaaaaacaaacaaataagaacatgaaaaactgtgtttgtcttgactattcaggatatgaaagtgccgcaacattcatgtatctagaaactccatgaaggaatctacacttagggcttaaagaatcctaagggaccgggcgcggtggctcacgcctgtaatcccaa

SEQ ID NO: 50967 - DNA, 1808 bp, Homo sapiens
ctttctattttatttataaatcacaatttttaaaaaattactcatcactataaagatatgtagatactttaacctgtaaataatctataaaaaggctaataaaaaactatatttcttttcttcaaagaatatgtaatctatttgattaagaacatacaatggagagaagcatgttatcttccttgtaattatttctctatatctagtaatattttctaaatataatgatatattcctatatccaataatagacatagccataatatcatcagcttatcttcacattatcatgccactaaaaaaagtaataaaacatgtaacaattctttaatgttttcaaaatacattttatacattctctaatttccatattttgaacatttttcattktgtttccagactgcttatgttttccttaatttccgaattttctatacattttcagaacccatttgcttagagtataaccaaaaaacattcatcacatacacagattacttttaatttttttctttatgaatgcatcaattgattctgtgttgtctatcaaaatgtatgatattaactgattcacaagtaatagaaacccctatttctatgcacagtacatttgtaaaaatgtgtaaaaatataaaatgttcaaaatcatgttaaaaataggagttagttcccaaggagctcaaggcattttataaaaattccttaattaagttacattatgattagtatttaacctcctgtgtattgtataatgtaaagggaatcattataccattattaaacaataaatatagataagaatattaatgcttacttgcaagtatttaactttaattctattaacctagattatttgaaatgaacttccagtagacaaaggaagtgtatttatatttgtaaataaatccatgtactgatataggtttttaaaactatgcaaagaatcttggaggtgttataactagtgtttgcacaggtaaaccaaattggtttaaaacaaaaaaatatatttaaacaaattttaaggcttgaattgtactgtttctttagtataaatatcccagccgtgactgaataaaaggattttagctactgactcacaaaatttttgattatttaatgagtcattttcagagaccacggtagccagaccagtgctgactcaaggctgagcagaatattttaagataagcatcgatggtgtcttaaaaatggttgaaatttttttctaaaaatgtatgaagacctacgtttgtctttaaattacattattctgattttgaatggtgcaggtatgggagtagatttattatttctcactgcataaaagagttttccgcttacttaaaataaaattcaatctttgggaaaaatagtcaatactttaagaattttttaaaaaattgtttttgctctttacatgtgacagcgtagagttgaagggtttgagtacaatgatcatctaataaaggctaattttttaccacattccgtgcctaataattttcagttttactttaattgtatttttacagttatgagaattttctcccactccccacatattttattgtaaagacatttagttaactaaaaataagtataataaatctaagtacatcaaaaactaaattgagtaaatagtaactataaataaatgggaagtaataaattatataaaaatattcatacataatttaaatatataattacagatgacaaatgtgttataacaagtacctatgacatgttaggaatttatctgttatgaataataaataattatgttttgctttttaaattcttta

SEQ ID NO: 50968 - DNA, 1808 bp, Homo sapiens
ctttctattttatttataaatcacaatttttaaaaaattactcatcactataaagatatgtagatactttaacctgtaaataatctataaaaaggctaataaaaaactatatttcttttcttcaaagaatatgtaatctatttgattaagaacatacaatggagagaagcatgttatcttccttgtaattatttctctatatctagtaatattttctaaatataatgatatattcctatatccaataatagacatagccataatatcatcagcttatcttcacattatcatgccactaaaaaaagtaataaaacatgtaacaattctttaatgttttcaaaatacattttatacattctctaatttccatattttgaacatttttcattgtgtttccagactgcttatgttttccttaatttccraattttctatacattttcagaacccatttgcttagagtataaccaaaaaacattcatcacatacacagattacttttaatttttttctttatgaatgcatcaattgattctgtgttgtctatcaaaatgtatgatattaactgattcacaagtaatagaaacccctatttctatgcacagtacatttgtaaaaatgtgtaaaaatataaaatgttcaaaatcatgttaaaaataggagttagttcccaaggagctcaaggcattttataaaaattccttaattaagttacattatgattagtatttaacctcctgtgtattgtataatgtaaagggaatcattataccattattaaacaataaatatagataagaatattaatgcttacttgcaagtatttaactttaattctattaacctagattatttgaaatgaacttccagtagacaaaggaagtgtatttatatttgtaaataaatccatgtactgatataggtttttaaaactatgcaaagaatcttggaggtgttataactagtgtttgcacaggtaaaccaaattggtttaaaacaaaaaaatatatttaaacaaattttaaggcttgaattgtactgtttctttagtataaatatcccagccgtgactgaataaaaggattttagctactgactcacaaaatttttgattatttaatgagtcattttcagagaccacggtagccagaccagtgctgactcaaggctgagcagaatattttaagataagcatcgatggtgtcttaaaaatggttgaaatttttttctaaaaatgtatgaagacctacgtttgtctttaaattacattattctgattttgaatggtgcaggtatgggagtagatttattatttctcactgcataaaagagttttccgcttacttaaaataaaattcaatctttgggaaaaatagtcaatactttaagaattttttaaaaaattgtttttgctctttacatgtgacagcgtagagttgaagggtttgagtacaatgatcatctaataaaggctaattttttaccacattccgtgcctaataattttcagttttactttaattgtatttttacagttatgagaattttctcccactccccacatattttattgtaaagacatttagttaactaaaaataagtataataaatctaagtacatcaaaaactaaattgagtaaatagtaactataaataaatgggaagtaataaattatataaaaatattcatacataatttaaatatataattacagatgacaaatgtgttataacaagtacctatgacatgttaggaatttatctgttatgaataataaataattatgttttgctttttaaattcttta

SEQ ID NO: 50969 - DNA, 2066 bp, Homo sapiens
aattacccagcatgctttccaaaaatcggttggtcatatatgtgtggaaccattgtgttccactgatatacatgtgcacttttaatataatggcacatagactttatttataagaagttttgaggtaagatgttataggttttaactattcttttcaacattatttgaagtattctagctacgtggcatttatcatatacattttcaaatcaacttttcaatatttaaagataagcttgctcacatattcactgggactgagttgaatctgtgggtcaatatggaaggaattgaaaaagtcattatatcgagccttctgacccacaaatatggtatatctctctatttatttaggtcttgtttatctcagcaatgttgtgtagtaattagtgcacaggtcttgcatgccttttgtcaaatatatcccaatatatttgttaaatatatttctaagaatttcacatttgcatatctcactagcatttttacttaaagtttcagctgttcattgtttgagccaattcaaatttcttttgaaaaaaataccactactggaatttaactttggtaagagcatgatgcatctctttccatctttaacattttaacctgtatctttgcatttcaaatgatattttttgtaaataatatacagttgaatcatatttttgttgaatatgacagtctttgccttttaatttggaagttaatagcatatatatttgatgtaagtattgatatggttgggtttcaacctaagatcttgttattttttgtttatctcttttttctttttcctatttaacaacctcttttgaattagttgtatattttttcatgatgctatttttatctcctttattcaccatttagcaaaatcactgtttaaccttttcagtggttccttaaatttcatagactacacttttaaattgatatcttccaactttcataaacattatactactccacatgtattattaaaaactcacaacataattctttcatcctctcttgaattttgtgccactgttgtcagatattttatctctatgtatgttactagcctaaccataggtcattatatttttttactgtctgcagtcaattatcttttaaggagccctcaaataggactttgtattaattcacagaattccacttttatttttctttatttctttctgtagatacaggtttctatttggtttaatttgtctattacctctaagaatttgtttaacattcttattcttatagtgcaagtctgctgctgctaaattaattcagcattcatagttctcctaatatattactttcatatttttttctgaaagaattttctctgagtatagcattttaagtttatgggttttattttttcttttaatgtactaaagatttttctccattgtcttttggggtgtgtgtgtgtgtgtgtgtgtgtgtgtgtgtgtgtgtgtgtgtatgtttcaataaggtgtccgttgtcattcttatattattcctctaatgtggttttttatccctcttgctactgttactattttatttttaccatgattttaacaattgtattttaatgtattttggtatagttttcttcaagtttttcttttttaagtagtatattagtaaatgatctttccttcttttttttttatttcaatagtttttggggaacaggtggtgtttagttacgtggatatttttaatggtgatttctgagattttggtgcacccctcaccccagtagtgcacacggtacccaatgaatagtcttttatccatcacccttctcccaccctgcctgccaatttcctaaaatctattgtgtaattgttatgcctttgtatcctcatagagtagctgtcacttataagtgagaacatatgatattgggtttttcattccctatttacttcacttagaataatggtaataatggtytccaaccccatccaggttgcaaatgccattatttcatttctttccatgactgagtagtattccatcacctatctatctatctatctatctatctatctatctatcatctatctatc

SEQ ID NO: 50970 - DNA, 1440 bp, Homo sapiens
attcagtacgcacaactatacataggcaccctcttatttttccatttaataggttgatagaagaaattgaggctcagaaaaataacagaactgcccacgaccacacagtgatggaaatggaatttgagtcttgtagtttttgactccaaagctaaaattatttccactaaaattttctataccaaaccctcccccatcctaccaccggcagccccaccaaattaaaaaaaaaaaaaatcccctcagctgcttttggctccctttttctaactgtataggtcttattctgaatcctgagaaataatcagatggtagtaagtttgatctccagttgaagatcaaacttacaatcttggtttttcttcatatacatgtcacagtacaaatattgtgcagttttacataataagagaagattctgaaagttatttttcatccaatctaatttcaaggaaactcagtcagcaaatgttctggtaatgcaaatactctcaacccatgtcctttaggcatgaaaatggttctggattaaaggtgactattctgcttagtagatcatttaacaaatcttaaaaaatcgcttcatctttacttatacatscattaaaatataatcaccatgtttaagatgaactaatctcttgtcaaagtatacagtctcaaactgtgaccccaaacataaccagcccatgtttctgacctttctcatcaatatttcccttctcattcttggctgtttcaactctgcgccacgggtttctgtgcctaaattgttcatctccatatatccaaattctactcattctttaaaccccaatataaattccattttctgatgaagtctttgttcatcaattgcccatcattaccccactaaattttctttcctctgacaatcccataacactttttgtctgaatcactcctagtgatgtcgagtcacattttaattagttgttttcatttttttatttgtatacatttaaggagtacaagtgcaatttttttacatggtgtattagtcagggttctctagaaggatagaactaataggacagatgtatatataaaggggaatttattaaggaatattgactcacacgatcacaaagtgaggtcccacaatagactgtctgcaagctgaggagcaaggaagccagtccaagtcccaaagctgaagaacttggagtctgatgtttgagggcgagaagcatccagagtgggagaaagatgtaggctgggaaactaagccagtctagtcttttcacattcttctgcctgcttgtattctggtcacactggcagctgattagttggtgcccatccagattgagggtgggtcagcttttcccagttcactgactcaaatgttaatttcctttggcaacaccctcacagacacacccaggaagaatactttgcacccttgaatccaatcaa

SEQ ID NO: 50971 - DNA, 555 bp, Homo sapiens
atgtgataaagcaaagtaaatgcaaaggaaagtgatgggaggagtttcgccaagataggaatagacacayagaaagaaagcaatagagaaagacagacaagaaaattgagacccaagctgagactgaccaagaaaggctcataggcaaaaaaattaggagcaaaatgatgctagctgcagtgtatggagtgcaatttgcattatacattttattattttattatctattcacatatacatacatatgcatatactttttttttttttagttgaagtctcactctgtcaccccagggctggagtgcaatggcacgatcttggctcattgcaacttctgcctcccaggttcaagtgattctcatgcctcagcctcctgagtagctgggattacaggtgcccaccaccacgcctggctaattttttttgtatttttagtagagatgaggttttgccatgctggccaggctggacttgaactcctggccttaagtgatctgcctgcctcagcctcccaaagtgctggaattacaggcgtgagccaccatgcctggccca

SEQ ID NO: 50972 - DNA, 555 bp, Homo sapiens
atgtgataaagcaaagtaaatgcaaaggaaagtgatgggaggagtttcgccaagataggaatagacacatagaaagaaagcaatagagaaagacagacaagaaaattgagacccaagctgagactgaccaagaaaggctcataggcaaaaaaattaggagcaaaatgatgctagctgcagtgtatggagtgcaatttgcattatacattttattattttattatctattcacatatacatacatatgcatatactttttttttttttagttgaagtctcactctgtcaccccagggctggagtgcaatggcacgatcttggctcattgcaacttctgcctcccaggttcaagtgattctcatgcctcagcctcctgagtagctgggattacaggtgcccaccaccacgcctggctaattttttttgtatttttagtagagatgaggtttygccatgctggccaggctggacttgaactcctggccttaagtgatctgcctgcctcagcctcccaaagtgctggaattacaggcgtgagccaccatgcctggccca

SEQ ID NO: 50973 - DNA, 527 bp, Homo sapiens
aacatggcgaaactccatctctactaaaaacacaaaaattagctggacatcgtggcccatgcctgtaatcccaggtattttggaggctgaggcaggaaaatcacttgaacctgggaggtagaggttacagtgagccgagatctgccactgtgcttcccgcctgggcaacagagtgagactctgtcgcaaaaataaaataaaagttatcaagtgaatgaaaatgagtttgcaaaaagagctttgccctgaggtcagtggtacacagattccataaaatccaagtacttgcagtcatatttaagaacagttgtcattagagagtgttatcawtctgtgttgcaaaagcaacatgccaagccttattgaccaataagagtaagaggaaatgaaattatcttgatgaagagaatttcctaaaagtgaatttgatcaaaatttaactattacccatttcttatttgcaagatgttgggttatgaactataatggtgtattagttttctagggctgtcatgacaaataaccga

SEQ ID NO: 50974 - DNA, 521 bp, Homo sapiens
tacttgattttcccatatgtagaatgggtataacaaccttacgtagttattgtgatggttwaacagagaatttaagtgaacacaggaaacacctaattactattactactagtattgtaagaaatatacagtatttgcctataaacatttgatatagttaggctttgtgtcctcacccaaagctcaccttgaattgcaatccccataatccctacgagtcaagggtgagatcaggtggagataattgaatcacaggggcagttttccccatgctcttctcgtgacagtgagtgaattctcgcaagatctgatagtttaaaaggggcttttctccccttcgcttggcacttctccttcctgctgccttgtgaaaaaggtaccttgcttccccttcaccttcttcctagatagtaagtttcctgaggtatccccagccatgctgaatgtgagtcatttaaacctctttcctttataaattacccagtatcgggcaattctgtataacagtattcagatggact

SEQ ID NO: 50975 - DNA, 521 bp, Homo sapiens
tacttgattttcccatatgtagaatgggtataacaaccttacgtagttattgtgatggtttaacagagaatttaagtgaacacaggaaacacctaattactattactactagtattgtaagaaatatacagtatttgcytataaacatttgatatagttaggctttgtgtcctcacccaaagctcaccttgaattgcaatccccataatccctacgagtcaagggtgagatcaggtggagataattgaatcacaggggcagttttccccatgctcttctcgtgacagtgagtgaattctcgcaagatctgatagtttaaaaggggcttttctccccttcgcttggcacttctccttcctgctgccttgtgaaaaaggtaccttgcttccccttcaccttcttcctagatagtaagtttcctgaggtatccccagccatgctgaatgtgagtcatttaaacctctttcctttataaattacccagtatcgggcaattctgtataacagtattcagatggact

SEQ ID NO: 50976 - DNA, 554 bp, Homo sapiens
gtttttaggctataaacggttttccatcactcctggttgaatgatttttatctttgattgctgtgagaactagctgcttcatttgtaaaatggaatgactaatactaaggtagtcctcctcgggagcatgatgtgagattttgttgcacaagataaatgattagataaaaggtatctggaatatttatgatcctttgagagacatcatttcctttcatttcttacatttgtcttttaactggttctcatagtttaaatatgytacaatttttggtttagttttatcttcagcttttcattatcataaagttgaaatgagcatatatttgcataaaacatttctatatttataatttctctggctagatttacagagtaaacccctaaagccaggtttacaaatatgttaggatagttaatattattataaactccatgttatttattaatgggagagggatctataattggtaaaatttagagcagagaaaatgagttgttgttgttttccttgcccttgcaaagagttttagaacctcagccttcactgttgg

SEQ ID NO: 50977 - DNA, 560 bp, Homo sapiens
gtgaaataaatgagatcatgtgaataatgcacctcacctggtgcctggccctaagggaggttcctgaggcttggtaacttttaccaagatatcatcaacagaaattcattgacagccaggccgagggctttccaaggaagactctaactatctgcattttacagaagcaacagtrgcctggagggtaaagtggcaccacatacatcactttcaccaaccattttttgggcaccaaacaggtcttggaggaagaggccctggctggcatgacgatgaggccaggatgaatgagggccgattccgcaggtgtagcctgaagctccacacctactcctaatgaaaatcattttatttcagcacagccttgcagcctccggtgggtgcagccgtcaattattcaaggatagtgctcaaagaggaggaaaaccagcattttaattgctacatcatgctgacgaagcagaatggaattttctctgcttaaagttatgtttaaagtaattttgccccccaggccatttcaaaatgaattcacatgcaacccctggcctgggccagct

SEQ ID NO: 50978 - DNA, 538 bp, Homo sapiens
ggccctccccctgccacagctctgagccctggccccgctaattgcctgttaaccctgtgggctctgcgagggagggaggatgcaagcaagccagccagggagagagctttctggagaaacggaagctgtgaatagatagagttccgagggctgagagaagccactgctctcaggaggagcaagctctggacaactctctcccaacccctcatcactgtctcaggcagaccctgagagagaggggccagggagaaggaggtggagggcacctggagaggggttcctggcatgttgggtcagggtggggagcctcaggcccagggaaaagtctaggaggaagacaagaggctgagactcgacagccagactaagggatggatagagaagaaagcaaataggatagagartgcagtgggcaagggacaaaaaggtcagggggcatccaggacaatgggagagaaagaggccaaggggatggacaggtcaacagagggcaggggcagagaaacagagtccaagtggataactgatcaggggc

SEQ ID NO: 50979 - DNA, 548 bp, Homo sapiens
tgtcctgtctctctccacaaaaatgactctaaactccattggacagggatttagtatggtttgttcactcctgtatctggagtatctgaaacaatagttcacccagtaaatacttgttaaataaattaatgaagacatatttgtattatttgaaataatgcagttgataataaggggacaagatatttgataaagtaagttaaaaaagaatacttgtgattcgtcttagaagaaatgcttcttgtactcacagaagactgtctccaattgtttttggatactatagaaactgttgtataataacaatcactatttgtaatctagccttccttttatttgttcacaatcaagtaccacttgttctgccactatgacagcttatcttttttatatatcttaactgtttaataacctcagttgattgayttggtgatacataactatttttttctggttactatatcaatctaaggaaataaattatttaatattatatgttacttgtctaacacttcatgcattatttaatttgattttcacactaataa

SEQ ID NO: 50980 - DNA, 579 bp, Homo sapiens
aattaagactagtcaagtgcagcagtgagaagtggggaaagagtagaaaaggagttccatctgcaactgactgtgatcaatggagatagctcatgaccttcggaccagccaaagcaagattgttgactactattttaagcamagcacagcattactgattatcatcaggagaaataaagaatccctactcagtaggaagtactgtgctaggatatatacttagtacatccaagtattccacacaactctcttcatttcccagcttcctctgcagtgaggttgggcccacgtgactagtctcggccaactaagtgtgagtgaaatggaaggtggagtgtgccacttctgggccaaggaagttaaacacagatgtgctccaccctcacactcttcccttgtatgctgaccttggaggccttgtgttccagagagtgtcactacacatggaggaggccacatgatcccaacacgactctatcagagtgagaaagaaactttcattgtgttaagccactgagactttgggttcatgtgttgaaatggctacggttaattaccctaaaataccagtgattgcat

SEQ ID NO: 50981 - DNA, 579 bp, Homo sapiens
aattaagactagtcaagtgcagcagtgagaagtggggaaagagtagaaaaggagttccatctgcaactgactgtgatcaatggagatagctcatgaccttcggaccagccaaagcaagattgttgactactattttaagcacagcacagcattactgattatcatcaggagaaataaagaatccctactcagtaggaagtactgtgctaggatatatacttagtacatccaagtattccacacaactctcttcatttcccagcttcctctgcagtgaggttgggcccacgtgactagtctcggccaactaagtgtgagtgaaatggaaggtggagtgtgccacttctgggccaaggaagttaaacacagatgtgctccaccctcrcactcttcccttgtatgctgaccttggaggccttgtgttccagagagtgtcactacacatggaggaggccacatgatcccaacacgactctatcagagtgagaaagaaactttcattgtgttaagccactgagactttgggttcatgtgttgaaatggctacggttaattaccctaaaataccagtgattgcat

SEQ ID NO: 50982 - DNA, 563 bp, Homo sapiens
tgaaaaaaataatcataggaattattcctgcaactggtcatgtggtcaaacttttattcaaaaactaccttctttgactacccattccatattccctttgcccattgcaagcacataagctgaacatggcacttagctttaggaaatgaccaagcctttacttctgaagtatttgagcccttagcaatcctgcctaaatcgagttttcatagttttccattgacttgaatcatagaacaaggtagtactaaaaaggtgccttaatgcatctggttccacagcttcactttacattactccaatgtattttccaagcttaggtatggagccctaaaaccaaaacttgatctgagggattcagagacagtagacagcagaaggctacggtaccacgcaggtgagyatgattgtttctgccaactaggccttcctgcttcatgggtgaagaatttgcttgcatctgtggcatagatgaggtctagggaacccaaaggttaccaacagtggaaggctaaggcacagcgtaggtaagtgtgaccatccctaatgactaggccttccta

SEQ ID NO: 50983 - DNA, 622 bp, Homo sapiens
gagggattagaaaataaatacaaaggtaaacacaattagttattgacagaattattcgtctaaattagtctaaaatattgcctaaatattatatttaaggcagcattttggagagaaaaaatagtaattctatggggactgaggagtatagggaaagaaagagayggagaatggggagagagagacacacatagaaagacagagatagagagattgaaagagaacaagagagaatagcaatatgttgatttctgatgtaaatctctatagcctaaatcttggcatctttataagaaatgagttctaggagtctggagaggcacatctcttagggaacagatcagaaccttcaccccttgaagaagggactaattcaaatgacacagatccttttgaaactactattatacaagtggttgccatcttcacctttagtggcctaagtaatccactatcactactactaatatctgcttgtcatgtcatccaggtggttatatggaaaacttcttttagcatttctgtgcctccatcaagcaatatggtctcaatgaggtgaaatcttaattaacaaaaaaactcatttacttatttttattttttatctaattagtgctcaata

SEQ ID NO: 50984 - DNA, 1469 bp, Homo sapiens
tgatgaattaactggcctgagttcagggcaccaarggatgagcagacaggatgaggcttttggaaaaaataaacatctccagctgctttcaaaggatgcatgtaataaacaaggtcccagcagaatgaaatggaggagctgaaggtggagactggctgggaggaaggaaagaattggttgagtcggagtggtcccactctggattcaaggccacgtttgctgagcacttacccagtctttggctgggccctgagtcctcagagatgagtccaccaccattcctgccccccaggcggctcccagttaggaagagggcgtcagacagtcacccagcggtgtcacctgtgctatgttgaggcccagaggaagcgccaacctggcctggagtcaggcagggaaggtgtgggaggcatcggggtgagggaacggaacctgcaaaggcctggcggcacagaggaacccgctgtgttatccacactggttcaccccaaagacaaaccaagcatgccttcagggccctggcaggacaggaacacacacacacactcacgcacgcactcacacacgcactcacacacacactcacacacgcactcacacacactcacacacgcactcacagacatacaaagtgagtgaagaatcagctatttaaaacatatagcgctgacggccgggcatggtggctcctgcctgtaatctcagcactttgggaggccgaggtgggtggatcacttgagatcaggagttcgaaaccagcctggccaacatagtgaaaccccatctctactaaaattacaaaaattagctgggtgtggtggtgcatgcctgtaatcccagctacttgggaggctgaggcaggagaatcacttgaatccaggaattggaagctgcagtgagctgagatcatggcactgcactccactctgggcaacagagtgagactccacctcaaaaaaaaaaaaaaagaaagaaagaaagaaaaaaaagaaaacaaaacaaaacaaaagaagggccagacgtggtggctcacgcctgtatgtaatcccagcactttgggaagctgaggcaggtggatcacctgaggttaggagttcaagaccagcctggccaacatggtgaaaccccatctctactaaaaaatacaaaaaattagcctggtgtggtggtgggtgcctgtaatcccagctacttaggaggctgaggcaggagaatcacttgaacccaggagaaggagtttgcagtgagcaagagagatcgcaccattgcactccagcctgggcaacaagagcgaaactgtatgaaagaaaaaagaaaaaagaaaaaatatgtatatagcactgaagtagtcattatgggaaaatgagaatcttgctggacttcacacttatgagtttaaaactttctttgtctacaatttcctgcccccatatcccccttcctgctagaatatcagtagcaaaagggcc

SEQ ID NO: 50985 - DNA, 627 bp, Homo sapiens
ggaccccaggagaactaggacaatagatgtcttcagcctagtgccaaatggacattctgaacaagcagcatttcagttacttcaaattgtagtttcttcccaattctggcaatgcatatcacacaagaagaagtagggagaagcaaagggcagggaaaatggagaagttagcttcccactgttatctttgctgtcccctcggagatagggtccttctcccgcttccctgtggggaactcttggccacctgtgaccttagccactgaacattgagggtgcaggcttttccaaaaaccttttggccccatggaaccctctaggccctccttcatccacaggacatgcaaaagtccatttactaaattcagctccttagctattgggaaggtaaagccagtgtgtcctaacataaatggaattgcagattatcattgagtggagattagtaagaagatgcagaagtctggagaataaacaagtcttatctagaataatttctacttcagaattgtcactggtttttatctgagagaggaagagagacatatycacacttgaatagtggaaggaggagaggaaaagactcatttgagagcgttagaatgtcagatctaggcttgggaagtg

SEQ ID NO: 50986 - DNA, 547 bp, Homo sapiens
agtcaggtgtggctggagtattaatgttcaaagggcagagggatatgagattttgttggagaggtaggcagggcatgtaggagtttgtaagccatggtgaggagcttgatatctatgctaccttatttaagaaaaaaagaagataaaaatggcatgcctggaatgagtctatatagaaagaatgtatttgtgcatttagaatctatggaagggggataccaccaaagaattaacatgagattactctggggcagttttactataaatrttctttttgtttttctgtgctttctgatttgtttcttaattaatcgattatttttcttatatggaaaaaaaaccctaacaatagaaacaaaacacgtatgggcttaaaaaaattaaaacattttaaaagtaccattcatttttagacaattatggttgttctttgtttgacataatttaatgacctcttaaattaaaaaaagttcatacataaagatacttgtgcaaattttcgtaagctaaaaacttgagcaaaggcatgaaatattgaatatttgga

SEQ ID NO: 50987 - DNA, 589 bp, Homo sapiens
taaaatgaagatgaaaacatcagataccaatgtgttgagaattacagcatgatgctatgatcaagagtcactgctggctactttagaagggggctgggaaatttttcagagctggcaaatgaaaaagcagaaattcagtcctgaacagtgtgactctggagccaattcctttattttatacacagcttctatgtgaacttgaatgatgatgataattttccggaaatgaagggtatgtctttacaaggacagattttcaggcaccttctcagaacaactggatcagaacctcaaggtactggaacttgtggytttaacaagtacctggggtgatatttagcagaacagaccagtttagagaacactgcaccagcgcttcacaaaggagtaatgaattcctgaaatgcattgctcacaagttcctgaagagacgatcaaatcatccctgggtgagtttgaacaactaacccttcagttaacaaccaaacgtactaagcaagcgcaccacagagacaactgtatagcttggctgtgactttagctgtaacagagaagtctcttttatgtgccattttgtctggaatagcac

SEQ ID NO: 50988 - DNA, 387 bp, Homo sapiens
tagccaggcctggtggcgtgcacctaaagtctcacctacttgtgaggctgaggcacaagaatcgctggaatccaggaggcaaaggttgcagtgasccgagatcccgccactgcactccagcttgggcaacagagcgagactccatctccaaacaacaacaaagattcacagaattataaccagaaggagtgaattctactatatgtaaactgagattttaatgattaatgtttttaagtgttgagaaaattggctagctcactccagcaaaataagccccagatggataaaggtttaaatatataaaatttcattataaaagcacttttatattattagagtggggacttttttaaaaaaataagtatgacctataacctggaaact

SEQ ID NO: 50989 - DNA, 550 bp, Homo sapiens
aaggcatgctaggaagaaacaacagcatttgcaaagtgtctctggaaggaaagagcctggtaagtttgaggagatggaaaaagagcattgtagtaattcactgtaagtgaggagagaggtagatacgggcctgataacatggggtcttacaagccattataagaaaktctgatttattcaaagtgcaatggaaagtcattgaaaggcagcatcatcaaatctgagtttcaatatcattattgttgtcatgtggaaaatgaactggaaggaatcagtggaaataataaaatgaggtagaagaccattagggcattctggatgagagatgatagcacccagaatcagtgtggttgttgcagacaaaaatgactagattcggtacatagaatggcttattaatgggttgattgggagtgaaggagagagaggaactgaggatgattcctgatttggtgacaacaactgagatagggattattgagtgtgcgagaggacacattagagcagaaagcaaaggcagagttttaagatggtaagtttggagatacaa

SEQ ID NO: 50990 - DNA, 612 bp, Homo sapiens
taactgtcctaaaactaaaaacatgtatctttattctcttaatagcctgtgacctgttgttacagccggacaatctagcttgtaaaccctgtaagtaatagtgttcttatctatcaagtctcaaagtatcgccactatgatggtgttagggtagcctctggttgctcactctgggtcctaccttcttccagtctggaagcctcggaacctgaacatcagccagcatggctcggacatgcaggtgtccttcgaccaygcaccgcacaacttcggcttccgtttcttctatcttcactacaagctcaagcacgaaggacctttcaagcgaaagacctgtaagcaggtgagctgctgggtgtatataaaggaacactgcgtgtttcaaagcgacccccaggccactggaatttgggttgctcaatgtgagcattaggctttgttggctctcagtggttggtagatacttgagaatgtaatcattgggcatgtctcagggccatcttgccactgtccttcattccctagttatctgtaacccagctgtcctggtggtgatatagcctggtaacagtattgccaaggaataaacaagaagtatttctcatttgttca

SEQ ID NO: 50991 - DNA, 612 bp, Homo sapiens
taactgtcctaaaactaaaaacatgtatctttattctcttaatagcctgtgacctgttgttacagccggacaatctagcttgtaaaccctgtaagtaatagtgttcttatctatcaagtctcaaagtatcgccactatgatggtgttagggtagcctctggttgctcactctgggtcctaccttcttccagtctggaagcctcggaacctgaacatcagccagcatggctcggacatgcaggtgtccttcgaccatgcaccgcacaacttcggcttccgtttcttctatcttcactacaagctcaagcacgaaggacctttcaagcgaaagacctgtaagcaggtgagctgctgggtgtatataaaggaacactgcgtgtttcaaagcgaccccyaggccactggaatttgggttgctcaatgtgagcattaggctttgttggctctcagtggttggtagatacttgagaatgtaatcattgggcatgtctcagggccatcttgccactgtccttcattccctagttatctgtaacccagctgtcctggtggtgatatagcctggtaacagtattgccaaggaataaacaagaagtatttctcatttgttca

SEQ ID NO: 50992 - DNA, 603 bp, Homo sapiens
gcccgaaccaagtgaattctatccttcacaccagatgataagctgagtcagcattttgctaaatcaggataaaaaattgtatttaattattgtctttctgatgatcagtttgaaaaagaccattcaagcctttgctaattattcttccttggtataggccttggtttttatttataacagaatcagaagaaaagtttgcccacttcgttacctaccatgatttccactgaaatcttttgcaaagtatgtgttttcataactctagtttcaggaggtgctctctaaaaaagttcaatgagaaagaagtttcacggtcagagattttagggacagattacaaattatgtcacttcttgcacatttacaatagacattagcatagtaaagccactgagaagtcctacagtgaaaaaacctatgtaattttatttcactaagactccctaaactatctgaccacaaaagcctgttttcaaataacacctattaacatcctgtggaasagtggtccattgaacgtcctcagaaaggatgcattagagagccaggagacatccaacaaggccaagatattttctaaccctcaactttactaaataactg

SEQ ID NO: 50993 - DNA, 565 bp, Homo sapiens
  misc_feature (1)...(565): n = A,T,C or G
atcttatcataagatgaaaatgtctattatattattagctttttataaggactgaacagcattacaggatgctcccattggtaccatggcatatacatcatggatagataggtagatagatagacagatagatagacatataaatgcacacatataccataggcatatagacatgtcaatataaatataatttttctgtaaagaaacataagaaactgttgattgttccttctgcagagttatttcttgaggaaattctttaccttatatattgnactgcacaattaagtacttgatcatgagcatgtattttctttgttttaataatatcagttcttcagagaactagctggtagtggctaagaatcyaaaatttcaattatgcaagaatctgaatgaaaatccattaggatgtttttggcttctaagcacctttaaaaaactaaattcaatatgagtctttcattctataaatgtaagaaaatcaaagtaataattgtaatgtatcctgattcatttctcctggtgttagattacaataacttatacaatatggaggtctgtg

SEQ ID NO: 50994 - DNA, 632 bp, Homo sapiens
aaggcatgtaccttctctccaaaccctctcacctctgcagtgacagccactactccccaagtctctgtcacccctcactgagccctgaggggtctcttgtataatgggctccctccccaccaaccagagcagagatgggtcctttgctcagctcagccttcctccaacccctcattccagaatgggtgtgggagcttcctgcctgccctggggcactgaggcagcatcgcccgggcagttgaagaaagtccatgttgccagtttggctatttccrctgccggggaggccactgtgggaggtcttgttcccgagaaatgtgggtggttaggacggtggctagggcttgggtcccactcagcccctgtgaggttccctctcctgggccactcggctggcagcctctggacctcctggttgggccacaccttcagatgccaccggggaaccccctcactggcctcttttctgtggtcctctcccagggtgccacagcttgatctctctccttccaaatgtcctcttctctctttccccataggcttgacggcagccctagttgttagtaactcagcggctacactttctcccaacactcaggctcccaaccatcctttataggaagggaaatacc

SEQ ID NO: 50995 - DNA, 1339 bp, Homo sapiens
cagtcttaatctgcactgccagctgttctacctgatagcccccctgaggcccagggaattccgttttgggtgctgcagggtgtctcagtctatagcagagggagctggctgaatctcgctgtcttcctcaccccacccactccatttttaatgcagctatttcctaaggcagtggttttccaaggatggtccagtgggacataataaaagctccattaaacaaagggttctgcagagagactgattactttacaccttccacatctagtataaagttgccaggaagttgtttagtagaccctgtccaccaaaatggccttataggtgcacccacacacacaggcagcatatgtgtgtgcttgcacacacacacaccacacacacacactgaataaaataagttggcaaatagactgtacagctttgagcaactgaaacaaatgctctgagatcttacaaaaaaccactgtttatcatgttttcatgccaccaactcagactctgtttaaattgtcatatgaacatgacttaactaagggcagccagtgccctgtaggatctgaacactagaagggtaagatgaaaaatgtatgtccaggttaccaaatgtcaaagatatcctggatctcctactgagccagagcccaggcctagaaggcaggtgttgggaagaggtaatagataaatagaaaagttagagacttgggacaatttggtgtgcttatctttgctggtggcacacatgcaattcgattccagcaactcctcctccctgctacacctttttaaaatcaggtcttcctccctgttacatcttttcttaatcaggtcctggctcaactagctgtgtcccatgaccacatggtggacttaggctcacaactccacatggccccaagcctgaaaatgagggggtcaaggaggccttgggtggcagcgtgatctgctatccacagatatggcatcagagtctgcacaaagacaggctgatcctggtccttggcacactcatcttcctcatccataaaatggggatagatgataacaccttcctcataggactgttaggaggattaaatgggtaaatgtatgcaaagtattcaaaacagagtcggccacrttttcagcattatttaaatacatgctgctactattaccattattattatgatctaacttttatttcattttagtttttccaaagcttgcagttactgaagtatgatatgcactgccagagagaagaaaattgagttaggagaaaggtgctttagccgtgtataggttgtgatgggcaggcaaccaggttctctgtggcatgcttccagcagaagcactt

SEQ ID NO: 50996 - DNA, 529 bp, Homo sapiens
tattgtgcctcagtttacctttttaagagtttggtgtcagaaaagtgggatctgaaggagaccgtcatcaactcccaggagcaataagtaaccaggagtagcactgagcccatggtgctcagtgttttctttctttctttctttttttttttttttttttttttttttttttgagacggagtctcactttgtcgcacaggctggagtgcagtggcgcgatctcggctgactgcaagctccgcctcctgggttcacgccattctcctgcytcagcctcccgagtagctgggactacaggcgaccgccaccatgcccggctaattttttgtgtttttagtagagacgggggttcaccgtgttagccaggatggtcttgatctcctgacctcgtgatccgcccatctcggcctcccaaagtgctgggattacaggcgtgagccaccgcgcccagccggtgctcagtgttttcttaccgcctctgggggtcatgagtaagtccctcttagatttgaagctctgcaatttgtgt

SEQ ID NO: 50997 - DNA, 529 bp, Homo sapiens
tattgtgcctcagtttacctttttaagagtttggtgtcagaaaagtgggatctgaaggagaccgtcatcaactcccaggagcaataagtaaccaggagtagcactgagcccatggtgctcagtgttttctttctttctttctttttttttttttttttttttttttttttttgagacggagtctcactttgtcgcacaggctggagtgcagtggcgcgatctcggctgactgcaagctccgcctcctgggttcacgccattctcctgcctcagcctcccgagtagctgggactacaggcgaccgccaccaygcccggctaattttttgtgtttttagtagagacgggggttcaccgtgttagccaggatggtcttgatctcctgacctcgtgatccgcccatctcggcctcccaaagtgctgggattacaggcgtgagccaccgcgcccagccggtgctcagtgttttcttaccgcctctgggggtcatgagtaagtccctcttagatttgaagctctgcaatttgtgt

SEQ ID NO: 50998 - DNA, 634 bp, Homo sapiens
acgtgctcaccactgtatgtcataaagagtttgcagcatttatgcaagcttatggcaggccatttcgaagacaagggacagagcaaagtccttgaaacaatgcygatcaactatatgaggactcctgaaatgctaggtaatggaaatcattcctggtgctgaactccaacgataaagcctttgcagagatttgctttactttatgacagtcactaagagaatggctacatgtggcaaatagagcaatggaaaaaaaaaaagcacacacttttttttttttttgttacactttgaggaaatatgccaagcataaaagaggtagacagaaaaactatgaggattataaaggaaagtgaagaatgcagcagaggactgtgaacagtaagtaagctggggaataaggcactagtaagagctgcaagagtatttcagcaaccaaattactcatgaaaagaaggcaaggtaaaataaggagttgagtcttttaaagaaaaggagtaaccctttcctggaacaagtgggcaaaaaataaaggagaggccagcaaaataagttgacattatttatgtctctggtgcaaaagtttaaaatagaaagaaatatattttaaaaaccttcatgcaatgtatctcat

SEQ ID NO: 50999 - DNA, 581 bp, Homo sapiens
tttgttcattgatttatrtgcctcagaattttatgctcctcacaataattagagttaattatctctaatgcaaatagatctgtgaaccactcctgaatacctatgtccaagcatcttaaagttttatataaggatttcagaaactgatttctgggttgggcatggtggctcgtgtctataatcccagcactttgggacgctgaggcaggtggatcatttgaggtcaggagttcaagaccagcctggccaacaaggcgaaaccccatctctaatagaatacaaaaattagcaggtggtaatggcacatgcctgtaatctcagctacttgggaggctgaggcaggagaattgcttgaacctgggaggccgggttgcagtgagccaagatcatgccactgcacttcagtctgggagacagagtaagaccttgtcccaaaaaaaggaaagaaaaggaaactgatttctgcccaaatctccatctgtagccctttccccatctgcagccctttccccatctgcctttttctctggaattactgagctgctggtaatggccccctcaccattcctcttttgcagaga

SEQ ID NO: 51000 - DNA, 550 bp, Homo sapiens
atataaaaaaagtcctgttccaaagtagtttgaggagcattagagtaagtggcagaagaaaatcaagatgtgaagctcagttttgctgaggggcagggtgaagagtttgatttagatgacatttcctagaaaggtagccctagtgctgagaagagagcaaagacagacttttacaagtcatccttagaatgacatttaagaccagaatgagtagaagatacctctaatatacagaagaagaaagagaagaatgttaaagaagcaaaacttggataagyattggggttaatggcaaatggggggattttaagaggagtgcccagaagaggttagggtgggcatctagataaagccaaggaaggttcaaagaaaaactgtggtgtagcgattgtcaggggcctgggagcagtccattgcctttagccggaagactcctcaccagatactttaagataccggccggggacagtggctcacgcctgtaatcccagcactttgggaggctgagtcgggtggatcacaaggtcaggagttcgaggccagcctggcc

SEQ ID NO: 51001 - DNA, 550 bp, Homo sapiens
atataaaaaaagtcctgttccaaagtagtttgaggagcattagagtaagtggcagaagaaaatcaagatgtgaagctcagttttgctgaggggcagggtgaagagtttgatttagatgacatttcctagaaaggtagccctagtgctgagaagagagcaaagacagacttttacaagtcatccttagaatgacatttaagaccagaatgagtagaagatacctctaatatacagaagaagaaagagaagaatgttaaagaagcaaaacttggataagcattggggttaatggcaaatggggggattttaagaggagtgcccagaagaggttagggtgggcatctagataaagccaaggaaggttcaaagaaaaactgtggtgtagcgattgtcaggggcctgggagcagtccattgcctttagccggaagactcctcaccagatactttaagataccggccggggacagtggctcacgcctgtaatcccagcactttgggaggcygagtcgggtggatcacaaggtcaggagttcgaggccagcctggcc

SEQ ID NO: 51002 - DNA, 540 bp, Homo sapiens
aatcacaatgagtaaaggtggaggatgaccagttttgagtaaatgggtcaggttggagaaatatttagaggtcagagtggattgcaagctaaactcagcccaacgttcattgaccaggattggacttgtgcccttacaatctaatcatagtgtgaaatataaacatggagtcactgacactctaagacccattgtggaaaarccagtaagcatgctgtaacaatgccctggatatgaaccatatgttgcacagctccagggaaatcagtgcatattcatagattttgtagattcatggcttattaaagctgaaagggatctcacaagccatgaatctgtaccttgactcactctctcttttttaaacacagcagatacaaacactgtgaggttgtaagctagccccaagatcacacagccagtcagtggcctggtgaaactaggacttggatttcctgagacataaaaggcttctgtttgcagcttgaagaaagcagtctctagacaaagtaagtagtcctatttacttagtatgaaaca

SEQ ID NO: 51003 - DNA, 633 bp, Homo sapiens
atttcttattctttctatttttgaaaaattcacaactgccagcttctgtgaaatattccatctacttgtttcctcaccacccatcccccttgtaatctaacatcaacttccatagagaaagtgctttgaattttccatagcaatacttgctgttttaagttttctgttggtaccaaaaatattacttgataacttatttccattaagggcttcattttcttttcactactcttcctgcttaatcttgcagcgctttctcagctaatgcattgcctctacctggaagtcttccttgactcttgagtaagagttagattgtcctcagcagtgtaggcatataaccagttaggtcctgtaggccagtactgactacattgcatttcaatgtattcattgtttccttaaggatcttgtcctcatttgtttgtttatttaaacccagcacttagattaatatgatgaayggtgaatacttggaaatgagtgtttctgattacaggtacctgcatgagataatattcaaaatagataagagatatgtttcaatgtaattttacctttcatatcaaaatatgtgaatatagatataaactagtgactttattggtgtttgttgtgataaaaattatgaat

SEQ ID NO: 51004 - DNA, 543 bp, Homo sapiens
tgcaccgagccctacatatttgaaacattaattttagatgcctctatggcaacataatgtattcttgtagtcttccaagatgtgccacactktggaatctttgctaaatgtcacaaactgagagacatatcataaacaaaataaagaatgaccacaacggttcaaaaagttgccaatactaacagttccaccaaacgtctattattcaacatacatgatttgaatttcaaatagttctgtaactaattttgacatgaaattctaaacaattctgagtattgccagttgcctccagtagaggcaaggcgatatcacaattcaactctataaataaatattgcaagtcttttataatttataatattatggtggccaggtggcaagttggggatcatacactaccacatcactaccataattttaaacaaccacttggtttcaggtttaccatcactctagctgctttgtgatgaaagaatggtatgtttagaatcttccctctttctggattctcatcctcaggacttatttctctcctaaaag

SEQ ID NO: 51005 - DNA, 705 bp, Homo sapiens
ttcttcggcctcagcctcccgggtagctgggactacaggcgcgcactactgtgcctgactaatttttgtatttttagtagagacggggtttcaccgtgttggccaggctggtctccaactcctgacctcaggtgatccatccgcctcggcctcccagagtgctgggattacaggcatgagccaccactcctgactctycttgtttacttttaagcaagaaaggaaaattaaatgtagaacaattatgatagacttgtaaaaggaataaacaccccagatttgcaggccaattctactctgaatcccaaaatatatagtttcttcaactctaatgggtcagagaactatgtggaaagttttttccagaaaagatctttgattaaaacacacacacacacacacacacgcacacacacacacacacacactcattttggggtaagagatttttcctaaataagtatagccatcttgtttctatcatttataattcaatcaggtgcaaagagaggactatataaccatttctccctttaaatgagaaactgggatacaagtggtttgaggtggggaagaaatgatacattttaaaaactcaaatgacaagttcttcctggctggagagtgagacaagagaaaccacaaaaccccagactgtgcaatctgtaaagacagtgataaagtgactacttcatagatgaagat

SEQ ID NO: 51006 - DNA, 705 bp, Homo sapiens
ttcttcggcctcagcctcccgggtagctgggactacaggcgcgcactactgtgcctgactaatttttgtatttttagtagagacggggtttcaccgtgttggccaggctggtctccaactcctgacctcaggtgatccatccgcctcggcctcccagagtgctgggattacaggcatgagccaccactcctgactctccttgtttacttttaagcaagaaaggaaaattaaatgtasaacaattatgatagacttgtaaaaggaataaacaccccagatttgcaggccaattctactctgaatcccaaaatatatagtttcttcaactctaatgggtcagagaactatgtggaaagttttttccagaaaagatctttgattaaaacacacacacacacacacacacgcacacacacacacacacacactcattttggggtaagagatttttcctaaataagtatagccatcttgtttctatcatttataattcaatcaggtgcaaagagaggactatataaccatttctccctttaaatgagaaactgggatacaagtggtttgaggtggggaagaaatgatacattttaaaaactcaaatgacaagttcttcctggctggagagtgagacaagagaaaccacaaaaccccagactgtgcaatctgtaaagacagtgataaagtgactacttcatagatgaagat

SEQ ID NO: 51007 - DNA, 705 bp, Homo sapiens
ttcttcggcctcagcctcccgggtagctgggactacaggcgcgcactactgtgcctgactaatttttgtatttttagtagagacggggtttcaccgtgttggccaggctggtctccaactcctgacctcaggtgatccatccgcctcggcctcccagagtgctgggattacaggcatgagccaccactcctgactctccttgtttacttttaagcaagaaaggaaaattaaatgtagaacaattatgatagacttgkaaaaggaataaacaccccagatttgcaggccaattctactctgaatcccaaaatatatagtttcttcaactctaatgggtcagagaactatgtggaaagttttttccagaaaagatctttgattaaaacacacacacacacacacacacgcacacacacacacacacacactcattttggggtaagagatttttcctaaataagtatagccatcttgtttctatcatttataattcaatcaggtgcaaagagaggactatataaccatttctccctttaaatgagaaactgggatacaagtggtttgaggtggggaagaaatgatacattttaaaaactcaaatgacaagttcttcctggctggagagtgagacaagagaaaccacaaaaccccagactgtgcaatctgtaaagacagtgataaagtgactacttcatagatgaagat

SEQ ID NO: 51008 - DNA, 578 bp, Homo sapiens
ttaagcagtcactccctattttcttcttcccctagtgcctagcatctacaaaattactttttgtctccatagatttacttattctggatattttacatataatggaatcatacaatatgtgaaccttcatgtacacccaaattattgtatggccattttttaagaagcaatcttgaataagaatacaattttaaaactacgcagtattcttcccttcaatgactattttgaaagaaaaatatttcattttgacctcgagcctcaggactcccttgtctcctactcattacaacaacaacaamaaaaaaccatccatgtgagccgagtcacacacagtctaaactgcaggaaaagatgacaaggattttgctcccaaccttttgtggttcttaaggatgttaggaagggctgccaagctgaacccaggctatgaattagcctccatagttatcctaaagatgctgggcaatgggaggtagaggtggagacactccctagctgtggttgtaggcacagctattgtcaggctaggccagactgatatgagtggtagtgatagatttgcttaaaaggaagca

SEQ ID NO: 51009 - DNA, 578 bp, Homo sapiens
ttaagcagtcactccctattttcttcttcccctagtgcctagcatctacaaaattactttttgtctccatagatttacttattctggatattttacatataatggaatcatacaatatgtgaaccttcatgtacacccaaattattgtatggccattttttaagaagcaatcttgaataagaatacaattttaaaactacgcagtattcttcccttcaatgactattttgaaagaaaaatatttcattttgacctcgagcctcaggactcccttgtctcctactcattacaacaacaacaacaaaaaaccatccatgtgagccgagtcacacacagtctaaactgcaggaaaagatgacaaggattttgctcccaaccttttgtggttcttaaggatgttaggaagggctgccaagctgaacccaggctatgaattagcctccatagttatcctaaagatgctgggcartgggaggtagaggtggagacactccctagctgtggttgtaggcacagctattgtcaggctaggccagactgatatgagtggtagtgatagatttgcttaaaaggaagca

SEQ ID NO: 51010 - DNA, 632 bp, Homo sapiens
cattgtggcacatgcctctagtcccagctacttgcgaggctgaggcaggaagattatttgagcccagaagttcaagtttccastgagttatgactgggcccctacactctagcctagttgacgaagcaagaccctgcctcttcaggaaaaaaaaaaaaaaaaaaaagaaaaagaaataaataaatatggtatggttttattcatacaagaaaatgtcaactttaggacaagaaattttttgagaaaaagaaaatattttcataatgataaatggttaaatttagtaagaaggcctaacaatgtgaaatgcacatgcaattcaaaacggaaattctaaaggtgttacgcaaactggcagaactagagggaaacataatgaacaaatccataattacacatagggattttcacactcctattttttactgataaaacaagaagacatgaacataagaaagaatagaaaacatttaaacaatattttcaaccagtgaccaaattggtatttatattactcatagacaaggaatgacatttgaaggtcttgggtgtgagactttacaaggtctataatgaagatagggtaataaaaatacagtgagtagaactgaaaagttacggaagtgtgaata

SEQ ID NO: 51011 - DNA, 607 bp, Homo sapiens
ttaagggctgtaatgtgaaagagggagagggctttttatgtgtaaccctaagtggtagatagatttcagcttcagaaaagatgagccrataagctccttgcaggtatgaaatgtgtgtgtctcttcaacagttacatcctcatgtctagaacagtgcctgacaatggagtaaggcttaataaatgcttgtcgaataatagtgaaatagataaatggatgaactcaagcatccaagggcaagttttgaaagttaagattgagtcccatcagaagattatctgattttatgacagtaattctccaggatttgggaaagagagctcttctctgtggctagttaccaggtgaggtttgcaggaaggagagaaaatggagcctcttttctgcatcagaaacgattatgaacaaagatgtaggctttagcaaactagaagtgtggccttcttctaacaaaatgagccctatatgaaattctggaaaatagaagaggaacatagatgagtgacccacttggggtaggtatgataatagcaactgttcctcttttgtcaatttgtcttctgtgtaggatacatgtgtcgctggaataagcaatgaataaacacac

SEQ ID NO: 51012 - DNA, 607 bp, Homo sapiens
ttaagggctgtaatgtgaaagagggagagggctttttatgtgtaaccctaagtggtagatagatttcagcttcagaaaagatgagccaataagctccttgcaggtatgaaatgtgtgtgtctcttcaacagttacatcctcatgtctagaacagtgcctgacaatggagtaaggcttaataaatgcttgtcgaataatagtgaaatagataaatggatgaactcaagcatccaagggcaagttttgaaagttargattgagtcccatcagaagattatctgattttatgacagtaattctccaggatttgggaaagagagctcttctctgtggctagttaccaggtgaggtttgcaggaaggagagaaaatggagcctcttttctgcatcagaaacgattatgaacaaagatgtaggctttagcaaactagaagtgtggccttcttctaacaaaatgagccctatatgaaattctggaaaatagaagaggaacatagatgagtgacccacttggggtaggtatgataatagcaactgttcctcttttgtcaatttgtcttctgtgtaggatacatgtgtcgctggaataagcaatgaataaacacac

SEQ ID NO: 51013 - DNA, 607 bp, Homo sapiens
ttaagggctgtaatgtgaaagagggagagggctttttatgtgtaaccctaagtggtagatagatttcagcttcagaaaagatgagccaataagctccttgcaggtatgaaatgtgtgtgtctcttcaacagttacatcctcatgtctagaacagtgcctgacaatggagtaaggcttaataaatgcttgtcgaataatagtgaaatagataaatggatgaactcaagcatccaagggcaagttttgaaagttaagattgagtcccatcagaagattatctgattttatgacagtaattctccaggatttgggaaagagagctcttctctgtggctagttaccaggtgaggtttgcaggaaggagagaaaatggagcctcttttctgcatcagaaacgattatgaacaaagatgtaggctttagcaaactagaagtgtggccttcttctaacaaaatgagccctatatgaaattctggaaaatagaagaggaacatagatgagtgacccacttggggtaggtatgataatagcaactgttcctcttttgtcaatttgtcttctgtgtaggatacatgtgtmgctggaataagcaatgaataaacacac

SEQ ID NO: 51014 - DNA, 683 bp, Homo sapiens
tgttcagacaacatcctttgtatagtatttcaggcttgaaccttttctcaatcgatcgacatasagtctatcttggtactgccaagtaccatttgggtcaggattttgtcatttagatccatatttttccaatatttttatctggttgtcccatcagttactgagagagcagtattaattcaccagctataattttgcattgtcaatttcctgcttttgttctgttgtttttgattcacatactttgaggttgtgtgtgtgtgtgtactttgtgtgcattttgaggcacaatttttaattgtaacatcatcctctctgattcttttatttttattaaattaccctgtttatttctggtgatatattttgctctgaagcctctttcatctagtgttaacatctctgttgaagctttttatgattagtgtctggatagcatatttttatgattagtgtctgcatagcatattttttctcatactttgtttgtgtctttgtgtttaaattgtgtctctgtggatgccatattgttgggtcttgccttcctctcaggtctggcagtctctgtcttaagtagagtatttgtccagttacattgtaactaatcattgctaaggttggatttaggtctgccatttttctagttattttctatttgtttgtttattatttttaagacaggg

SEQ ID NO: 51015 - DNA, 683 bp, Homo sapiens
tgttcagacaacatcctttgtatagtatttcaggcttgaaccttttctcaatcgatcgacatagagtctatcttggtactgccaagtaccatttgggtcaggattttgtcatttagatccatatttttccwatatttttatctggttgtcccatcagttactgagagagcagtattaattcaccagctataattttgcattgtcaatttcctgcttttgttctgttgtttttgattcacatactttgaggttgtgtgtgtgtgtgtactttgtgtgcattttgaggcacaatttttaattgtaacatcatcctctctgattcttttatttttattaaattaccctgtttatttctggtgatatattttgctctgaagcctctttcatctagtgttaacatctctgttgaagctttttatgattagtgtctggatagcatatttttatgattagtgtctgcatagcatattttttctcatactttgtttgtgtctttgtgtttaaattgtgtctctgtggatgccatattgttgggtcttgccttcctctcaggtctggcagtctctgtcttaagtagagtatttgtccagttacattgtaactaatcattgctaaggttggatttaggtctgccatttttctagttattttctatttgtttgtttattatttttaagacaggg

SEQ ID NO: 51016 - DNA, 683 bp, Homo sapiens
tgttcagacaacatcctttgtatagtatttcaggcttgaaccttttctcaatcgatcgacatagagtctatcttggtactgccaagtaccatttgggtcaggattttgtcatttagatccatatttttccaatatttttatctggttgtcccatcagttactgagagagcagtattaattcaccagctataattttgsattgtcaatttcctgcttttgttctgttgtttttgattcacatactttgaggttgtgtgtgtgtgtgtactttgtgtgcattttgaggcacaatttttaattgtaacatcatcctctctgattcttttatttttattaaattaccctgtttatttctggtgatatattttgctctgaagcctctttcatctagtgttaacatctctgttgaagctttttatgattagtgtctggatagcatatttttatgattagtgtctgcatagcatattttttctcatactttgtttgtgtctttgtgtttaaattgtgtctctgtggatgccatattgttgggtcttgccttcctctcaggtctggcagtctctgtcttaagtagagtatttgtccagttacattgtaactaatcattgctaaggttggatttaggtctgccatttttctagttattttctatttgtttgtttattatttttaagacaggg

SEQ ID NO: 51017 - DNA, 643 bp, Homo sapiens
tgttaaataaaagaagccagacacaaaagaccacatcatatattagtctgtttatatgaagtgtccagaaagggcaatactgyagaggcagaaagtagatcagtgggtgcctggggctggaggtgagaatggcagtgactacaaaatgcgcacggggatctctttggagtgatggaaatgattcaaaactagattgtggtgatggctgagccattctgtaaatatgctaaaaaaatcactgaaatgtacatttcaaactggtgatattttatggtacgtaaagcatacctcaataagactatttagaaaacccacctgagaggaggtgaaaatcatctgatgtgatcatatttttaatttatgtgtcattatatccagaaagcccaagattcacagcacttaataaatatttgcaaactcataaatgaatggtagaaatgatcatgaatcaggacagattatctaccatacacataatcaataaacaaaaagtaaaaaaaaagtcagccaaagtcatttccttcatcaattactctgagagataccacacaaacaaacctgagaccactctaaatgtcagctcctcacggcaccctctctaggctgatctctctggctccattattatttcaatggactgttt

SEQ ID NO: 51018 - DNA, 643 bp, Homo sapiens
tgttaaataaaagaagccagacacaaaagaccacatcatatattagtctgtttatatgaagtgtccagaaagggcaatactgtagaggcagaaagtagatcagtgggtgcctggggctggaggtgagaatggcagtgactacaaaatgcgcacggggatctctttggagtgatggaaatgattcaaaactagattgtggtgatggctgagccattctgtaaatatgctaaaaaaatcactgaaatgtacatttmaaactggtgatattttatggtacgtaaagcatacctcaataagactatttagaaaacccacctgagaggaggtgaaaatcatctgatgtgatcatatttttaatttatgtgtcattatatccagaaagcccaagattcacagcacttaataaatatttgcaaactcataaatgaatggtagaaatgatcatgaatcaggacagattatctaccatacacataatcaataaacaaaaagtaaaaaaaaagtcagccaaagtcatttccttcatcaattactctgagagataccacacaaacaaacctgagaccactctaaatgtcagctcctcacggcaccctctctaggctgatctctctggctccattattatttcaatggactgttt

SEQ ID NO: 51019 - DNA, 643 bp, Homo sapiens
tgttaaataaaagaagccagacacaaaagaccacatcatatattagtctgtttatatgaagtgtccagaaagggcaatactgtagaggcagaaagtagatcagtgggtgcctggggctggaggtgagaatggcagtgactacaaaatgcgcacggggatctctttggagtgatggaaatgattcaaaactagattgtggtgatggctgagccattctgtaaatatgctaaaaaaatcactgaaatgtacatttcaaactggtgatattttatggtacgtaaagcatacctcaataagactatytagaaaacccacctgagaggaggtgaaaatcatctgatgtgatcatatttttaatttatgtgtcattatatccagaaagcccaagattcacagcacttaataaatatttgcaaactcataaatgaatggtagaaatgatcatgaatcaggacagattatctaccatacacataatcaataaacaaaaagtaaaaaaaaagtcagccaaagtcatttccttcatcaattactctgagagataccacacaaacaaacctgagaccactctaaatgtcagctcctcacggcaccctctctaggctgatctctctggctccattattatttcaatggactgttt

SEQ ID NO: 51020 - DNA, 643 bp, Homo sapiens
gcagttttaagtttaaacacgtttggtttcttctcatagtccgtggccttggatgccaatgcgtggtgcacactcacagcgtttttcaagtcctcttcagacaaggccttttctggcttgtattcatcctatagatggacacaaagaaaataaaggcaaaaatcacgatcagatttcaacttaattttttaaaagcaaaaactaaaaaaatagtttttaggaaatccaagtaagtgaatgaaaaaaatgaaacaaayggtgagtaaaaacaaccttataaatgttacagaacattatgttgtttgaaaaatttgctgagaatgagaaaatacatctacccaaggcatttttttaaaaatcagtttttttaaaaaactgatatacaataattgaggtaaatagctaagtaaggccaaaggcagaaataaatatctatcgtacacattttataatgaacagaaatgagacttggaccaatagtgtgatttggtttcaggattaaatggttaaaagcaaaaccttacaggtaactgtcaacagaattataccgaggataaaaacaatgccattgtgttctttgctctgaagatattacatgttcctgttactttctgtttagactaatattatcaaaagaaaaatg

SEQ ID NO: 51021 - DNA, 643 bp, Homo sapiens
gcagttttaagtttaaacacgtttggtttcttctcatagtccgtggccttggatgccaatgcgtggtgcacactcacagcgtttttcaagtcctcttcagacaaggccttttctggcttgtattcatcctatagatggacacaaagaaaataaaggcaaaaatcacgatcagatttcaacttaattttttaaaagcaaaaactaaaaaaatagtttttaggaaatccaagtaagtgaatgaaaaaaatgaaacaaacggtgagtaaaaacaaccttataaatgttacagaacattatgttgtttgaaaaatttgctgagaatgagaaaatacatctacccaaggcatttttttaaaaatcagtttttttaaaaaactgatatacaataattgaggtaaatagctaagtaaggccaaaggcagaaataaatatctatcgtacacattttataatgaacagaaatgagacttggaccaatagtgtgatttggtttcaggattaaatggttaaaagcamaaccttacaggtaactgtcaacagaattataccgaggataaaaacaatgccattgtgttctttgctctgaagatattacatgttcctgttactttctgtttagactaatattatcaaaagaaaaatg

SEQ ID NO: 51022 - DNA, 630 bp, Homo sapiens
taatattgtatgtctgtgtgtatgtctggtgtctgtgtatggttttccttctcctgggcttttcttataattaaatttctctaatgattttatttttatattggatggcataagatttttatttagttgtctaaatgtaactagcacactgtaataagttaagggccttagtggctggcstgttgcctcacacctgtaattccagcactctgggaggctaatgtggacagatcacctgaggtcaggagtttgagaccagcctggacaacatggtgaaaccccatctctactaaaaatacagaaactagctgggcgtggtggtgtgtgcctgtactcccactactcgggaggctcaggcaggagaatcacttgaactcagggggcagagattgcagtgagccaagatcacaccactgtactccagcctgggcaacacagtgcaactccatctcaaaaacaaaacaaaacaaaacaaaagttaagggccttagtgagctgtgttatgaaataggattccagcatttatacaaagaaaacaaaagggttaattcttatataagcataaaaagtatttctttgcctaaaatattatggataataatatttaatcaagatgtttcctttactttc

SEQ ID NO: 51023 - DNA, 630 bp, Homo sapiens
taatattgtatgtctgtgtgtatgtctggtgtctgtgtatggttttccttctcctgggcttttcttataattaaatttctctaatgattttatttttatattggatggcataagatttttatttagttgtctaaatgtaactagcacactgtaataagttaagggccttagtggctggcctgttgcctcacacctgtaattccagcactctgggaggctaatgtggacagatcacctgaggtcaggagtttgagaccagcctggacaacatggtgaaaccccatctctactaaaaatacagaaactagctgggcgtggtggtgtgtgcctgtactcccactactcgggaggctcaggcaggagaatcacttgaactcagggggcagagattgcagtgagccaagatcacaccactgtactccagcctgggcaacacagtgcaactccatctcaaaaacaaaacaaaacaaaamaaaagttaagggccttagtgagctgtgttatgaaataggattccagcatttatacaaagaaaacaaaagggttaattcttatataagcataaaaagtatttctttgcctaaaatattatggataataatatttaatcaagatgtttcctttactttc

SEQ ID NO: 51024 - DNA, 650 bp, Homo sapiens
cctcccaagtagctgggattacaggcatgcgccatcacgcctggctaattttttgtatttagcagagacggggtttcaccgtgttagtcacaccggtcttgaactcctgacctaaggtgatccacctgccttggcctcccaaagtgctgggactgcaggcgtgcgtcaacacacctggctcaaattactatgttttatagagctcaccttatagattttagatgtgtgctgctactctcaaaattctgattcttgctatggttatacataccayggtggtaacacccatgaattattggccttcacaaatatgcaaaggaaagaaatgggcctcagactcagacatacttgagcaaattattcactttgcttgaatttcagtttcctcacctctgaattctctctaaatacatctatggatgctatgcaatttttactaatatcttatattgatttgtgtccatatggtatgcatatatgagtgtgtatgtaactagacaaactgatcttagtatttatgtggaagagcaaaaggctaagaatagctacaataatttgaagaagaaaatggagagagcagtcctacaaataatcaagccttataatatgggtctttcaaaacagagatagagagatcacaaatagagtca

SEQ ID NO: 51025 - DNA, 551 bp, Homo sapiens
aatcatataaagtaaatagacttttattctttctttatgccagttacaaacaacaattccagaaagataattaatttatttgtgaatgttatgtttttccaaataatctataaaaatatcctaatggtgctatgatctcattgaaggaaaatattagaataaaggaagataaaatttaagctacaactatatgaaatttaaaattattttcatcaaaatatgatggaaatttagcagaaagacaagccacaactagaagatatctacaatacttaaaatcggcaaataatttttacgtaaaatatatgaacaactcccatgaatcaattaaaggaacaatttactagcaaaataagcaataacacattagcaaacattatacagaagatgaaaaacaaataatcaataaygtatgaaaaattattcaacctcatctctaattaaaaaccataatgagataatgtttcactctcagcaaattgtcagaaaaatatagtctgcaatacatgggtttcatcagtatgctcttaggaggaaaattgttacaagca

SEQ ID NO: 51026 - DNA, 545 bp, Homo sapiens
tgaggctaatgaagtcctggtgtgtggaagaaccacagatgtgctctaaatcaggctctaaaggatggatgaagggaggctgtttactacaaacacctaccccttgagaggagaaactcagcacgacaactgctacatcaaagtgcaattatytgtattctcaagacatagaaaacagaaaaggtagactaagcaggaagatgaagccaaataaatttaaacactttttaaaaattgccttagaagatggagaaagaaaaaataaaaagaaataagtgtaatcagctcataaataatctacaagtaagtcctaaaactgcaaatgattcagtagttcacattttgacttcttaagactttgcaaactgccaaagactgtctgcttcttcttgaagaatgcttttgtttctttctcttaactcaggcagctttctcctggtccccatgactgctgagtccagaaatgtgaagcattctcacaggagagctccccctcctgtctttcgtctttcacatctcgtttaaatttctaattcctcaaagct

SEQ ID NO: 51027 - DNA, 545 bp, Homo sapiens
tgaggctaatgaagtcctggtgtgtggaagaaccacagatgtgctctaaatcaggctctaaaggatggatgaagggaggctgtttactacaaacacctaccccttgagaggagaaactcagcacgacaactgctacatcaaagtgcaattatctgtattctcaagacatagaaaacagaaaaggtagactaagcaggaagatgaagccaaataaatttaaacactttttaaaaattgccttagaagatggagaaagaaaaaataaaaagaaataagtgtaatcagctcataaataatctacaagtaagtcctaaaactgcaaatgattcagtagttcacattttgacttcttaagactttgcaaactrccaaagactgtctgcttcttcttgaagaatgcttttgtttctttctcttaactcaggcagctttctcctggtccccatgactgctgagtccagaaatgtgaagcattctcacaggagagctccccctcctgtctttcgtctttcacatctcgtttaaatttctaattcctcaaagct

SEQ ID NO: 51028 - DNA, 752 bp, Homo sapiens
cgagttttttaaatattttcaaatgctgcatcaccatgaagccattcaatagacttcactaaatctcaagtaagttggttagatttaacagagctaagcctcatccatcactgatcagtcttcatgtataaaagtaaggatttgtgctggcttcagtggtacatatagtaaaattgaaacaacgttgagaagaccagcatggtccccgcacaaggatgacatagaaatctgtaaagtgttgcatatttcttgcagtccccaaaaggacattttactcctttctaactagctccaaggaaatggtgtgagtcaaagcaaaatgggtgacacccagtattgcaattgtgattttcatacaaaaaaatatttatgtaaggtgatctatgaaatgagatgtggtaacacataggatcttgtgtgcaatattttgttagtagggatctcagaaatgagaaaataccaacttgcatcttctttgtggaacttacaaaaaataaaggtagcgttttgtcttccacagcagctggaaatgaacatagtgactaagcatcattctaacaaagatttgttggttcagagtttaaggaggtagataaagagtagcagtagtccaagccagatgctgacatctattattttctgcccttggtgtggytgatgagctcagtaatagagtataattaggttatctgatttaatgatttaatatatttataaataaatttcattacaaaatataaaatagcttagat

SEQ ID NO: 51029 - DNA, 602 bp, Homo sapiens
aaaattctcaaaatagcaatccaggtaagacctctgatagtaaactacacttggtggtgctaccatgagattataggagtgttgatcacaaaagaactattaaaaaagcaatgtgtaagtagcatgtgtttacatatatacctayatgtaagtgtttttatatatacatagctttgatttaattttttagtttataattcagaattaagaatttagttgggcaacccgctcgggtccccttccacactgtggaagctttgttctttcgctctttgcaataaatcttgctagtaaaaaaaaaaaaaaaagaatttagttttaggtggtttataatctcaaaaatattatctgaaaaaatatttgtttaattgtggtccctaatatcctatataaaacttttgtataaatgagtaaaacaatttttaagtttatatattgtatgtttcctcaactgtcataacaatttatgcttgttataaaatgtataatccttggtgtgattgatgagctcagtaataggggtttatcagcttatccaatttaatgaattaatatatttataaataaactttattacaaattataaactagcttagatgcct

SEQ ID NO: 51030 - DNA, 602 bp, Homo sapiens
aaaattctcaaaatagcaatccaggtaagacctctgatagtaaactacacttggtggtgctaccatgagattataggagtgttgatcacaaaagaactattaaaaaagcaatgtgtaagtagcatgtgtttacatatatacctatatgtaagtgtttttatatatacatagctttgatttaattttttagtttataattcagaattaagaatttagttgggcaacccgctcgggtccccttccacactgtggaagctttgttctttcgctctttgcaataaatcttgctagtaaaaaaaaaaaaaaaagaatttagttttaggtggtttataatctcaaaaatattatctgaaaaaatatttgtttaattgtggtccctaatatcctatataaaacttttgtataaatgagtaaaacaatttttaagtttatatattgtatgtttcctcaactgtcataacaatttatgcttgttataaaatgtataatccttggtgtgattgatgagctcagtaataggggtttrtcagcttatccaatttaatgaattaatatatttataaataaactttattacaaattataaactagcttagatgcct

SEQ ID NO: 51031 - DNA, 597 bp, Homo sapiens
tgaaaaataattgtgtttggcttgattttaaaagaactgaatgagccctcaggttgttggatttcatgtgatactttaacacagaatacaatctactagatatattatgggaaatctcttttgtgagggcaattttaaaaaaagtgttataaacaacaaggttctgtttgactaaaattagagggtagctatgtatcctctctcacttttctgtagttccctttatatgatgaaagaaatcgatcttccccctkctcttcttgtaagactgaatgttttgcaaatggtaccatctgttcagcaggagatactcaggacacatattttttgaaaacctagctggtatctttatttgcccaaatcttactgtatattcatttcatgtgagtttcttccataggagtgggtacttagggagagctatagttatgcctggccgcagaaactttctaatctaattcactttgtctgcttaggactcatccttctcttgtgcggctacaggccctgtttgctagcccctgacttctctagccttgctcagctgtggttagagaaagcctctttccctaggcttggccctaccaagcatctgat

SEQ ID NO: 51032 - DNA, 1052 bp, Homo sapiens
gcttttgtatttctgagccttagcactcaataagtttggcttaatacattggtacagaagtgcaagcactctgccttctcccttctcactctctatccaatgtaacagatattgtaacatcttctgtcatctatgggcacagaattggggggctccaaatgtccaagatgtttaagtgcaaaaacacagaggagctggggcatcactttttcaaaatgcctggcacaaccccaaatgcataagggaatccttttgtctgttcacaaccttgaactccttaagaacagtttattgctttgattaaaaacaacaacttgggtagtcagtggtattgagtgagttttggttgctaagcaacccacaaactgaaaattccatcaatattctactcattaattgggatcagctctcaactttggcatgtgttccctaagctaaattatcattttgttagttttttcgacttgtccttgaggtggtacatttacccagcaactatgtgccaggcatatttttaaaattatctcatttaacaaccccaggaggaaagtactattatctccattttacacataagaaaatttaaattcagcaaaaaactaagttgttcaatgtcacattgcttataatggaactaagattccacccaagagaagggttctagtcttagctgtatccctagatagctatgtgattttcatctccttagactggtttcctcattggtaaaatgaaagaattggacaacatcataagagctctaaaatgacatgactctgtatgatgtggagtagaagatgattccaaacatgggtcaaaatatagagccgagtggcagaactgaattaagactgcaggtcttaacaccaggtgtttgactggggcccagctccrgagactgttacttaactggcctgttttgtcgccggggcactgaatttttttcacaaacttcccagggattttgatgttcaaccagggttaagaagtgtcgaacaaatctaagagataggaaggaggtgacaggtgggggtgggggagggaaaagagac

SEQ ID NO: 51033 - DNA, 524 bp, Homo sapiens
tgaggtgaagaggtcaaagcatgaaggatgagactacatttctcttttcagaatgacctcagggcaatttctaagagattcaaccaacaaaggaaacagacgtacagcttcttcttgcttctggcccctttctccaggttggacatcatttctgcagcctataatcctcccacacttggagaattaatatgcaaatttcctaattatatggccaagaattttacaggtctcgcctggagtgataaattagttcccaggtctctgccttcctcaatagggggtctggtaacctcaactkcaggatagtcatagaaaccattagtgtcactaaattaaccagccctcagaattagccaagagaaagtgtatattgatctgacttagcgatgtgagaagagaagcgatttcttttatgattagccttttcaaagtcctcttaggctactcatactctctgctgatggaaagattactgaaaaataattaaaaatgtccccagaaccacaaagtctttgtgccattat

SEQ ID NO: 51034 - DNA, 1637 bp, Homo sapiens
tagacaaataatataggaaagctaataataataccccttctcaccatcaccctagaaataaatccaggaatgggcatgtgaaagttgaattcttttttrgaaatttctaggttgagttccatgaaaaaaaaaactttcttgtaagaatattataaggtccacatgaatattatttatggcaatatttgctcaccttctcatacacaccaaaatacatgagtctatctgcaacaaaagaatatagagccaatgtccacagaaagagatgaaatgacagttatctcattctcaaaatgaggctaactgcaactctgtcttccattatgaacaaataattacttaatcttatcctagtggggtttcagtcaccagcaaagaaaatcctaattagtacatttgtatatgagaaattccacaggatgcttgggtaaacaaatatagaatccaccttctaagtgttatgagttaattagagagacagtttgaataaaggttgattgtcagttaatcagtatagtgtctttgtataagagctgaaaaacctttcccactggttcagaggaggtagataaagtcttgagacagtcaggagtcttcatggaagttgtgggatttgatttaagctgagatgagggagaagtattaatattggttaaaacaggagagtcggccgggcgcggtggctcacgcctgtaatcccagcactttgggaggcagaggcgggcggatcatgaggtcaggagatcgagaccatcctggctaacacagtgaaaccccgcctctactaaaaatacaaaaaattagccgggcgtggtggcgggcgcctgtagtcccagctactcgggaggctgaggcaggagaatggcgtgaacccgggaggcggagcttgcagtgagccgagatcgcgccactacactccagcctgggcgacagagcgagactccgtctcaaaaaaaacaaaaaacaaaaaacaaaaaaaaacaggagagtcatctttctcctgaagttgagacactaagaagtatattctgataataatgtagagggatttggaatgcttctcaaggaagccatgccaaactaggcatctgctataaggaaagcttgaaataaagaaaaacaaatattcaggtataaaattgaagtattgaagtcacaggttactttcttagaaaaggtagggcttccataggttaccacggcttctgcacagccagaagagctgctgtattcactttaaccccaaaagacagaaaaaagaagactaacttttgaaaggcactgaatattgaggccgctggacaatcttggctccccctgaataagcgtacgtggttcaagtttgctttaataaagggcattcacgatcaccattgtgcaaagccagactgcagggcagtagccaatatccattgattaaaacaggctaatcaggacagaagaacccaggtggaaccaggcaggtgggactcagcatgtgggaatgggacaacagaaatagattagcccttttgttttgttaatcaaaccttaataataatgtttactccagtgaattgcagagttatttcaaacaaatcacttcaattcatgtctgtcattttaaatgagagattctttgctgtattttatctcaa

SEQ ID NO: 51035 - DNA, 1637 bp, Homo sapiens
tagacaaataatataggaaagctaataataataccccttctcaccatcaccctagaaataaatccaggaatgggcatgtgaaagttgaattcttttttggaaatttctaggttgagttccatgaaaaaaaaaactttcttgtaagaatattataaggtccacatgaatattatttatggcaatatttgctcaccttctcatacacaccaaaatacatgagtctatctgcaacaaaagaatatagagccartgtccacagaaagagatgaaatgacagttatctcattctcaaaatgaggctaactgcaactctgtcttccattatgaacaaataattacttaatcttatcctagtggggtttcagtcaccagcaaagaaaatcctaattagtacatttgtatatgagaaattccacaggatgcttgggtaaacaaatatagaatccaccttctaagtgttatgagttaattagagagacagtttgaataaaggttgattgtcagttaatcagtatagtgtctttgtataagagctgaaaaacctttcccactggttcagaggaggtagataaagtcttgagacagtcaggagtcttcatggaagttgtgggatttgatttaagctgagatgagggagaagtattaatattggttaaaacaggagagtcggccgggcgcggtggctcacgcctgtaatcccagcactttgggaggcagaggcgggcggatcatgaggtcaggagatcgagaccatcctggctaacacagtgaaaccccgcctctactaaaaatacaaaaaattagccgggcgtggtggcgggcgcctgtagtcccagctactcgggaggctgaggcaggagaatggcgtgaacccgggaggcggagcttgcagtgagccgagatcgcgccactacactccagcctgggcgacagagcgagactccgtctcaaaaaaaacaaaaaacaaaaaacaaaaaaaaacaggagagtcatctttctcctgaagttgagacactaagaagtatattctgataataatgtagagggatttggaatgcttctcaaggaagccatgccaaactaggcatctgctataaggaaagcttgaaataaagaaaaacaaatattcaggtataaaattgaagtattgaagtcacaggttactttcttagaaaaggtagggcttccataggttaccacggcttctgcacagccagaagagctgctgtattcactttaaccccaaaagacagaaaaaagaagactaacttttgaaaggcactgaatattgaggccgctggacaatcttggctccccctgaataagcgtacgtggttcaagtttgctttaataaagggcattcacgatcaccattgtgcaaagccagactgcagggcagtagccaatatccattgattaaaacaggctaatcaggacagaagaacccaggtggaaccaggcaggtgggactcagcatgtgggaatgggacaacagaaatagattagcccttttgttttgttaatcaaaccttaataataatgtttactccagtgaattgcagagttatttcaaacaaatcacttcaattcatgtctgtcattttaaatgagagattctttgctgtattttatctcaa

SEQ ID NO: 51036 - DNA, 568 bp, Homo sapiens
cctcacagaagtgtttatgtgtaaggttgtgatggtctttgggcgaggttgtgatttttgcagtcttttgtgatcttgttatcaggcatttgtgcataagaacccttcttcatggccttcctggttgtatttgtcaggatttttaacacaagtgactccactttgattctgacaactttcacaagttacttagaaaaaaaagctggaagcaaaactggatttttcatgtgctcaaaaatatggaatcyagaagctgggcgcagtggtttatgccggtaatcccagctactcgggaggctgaggcaggaggattccagtagcccaggagttcaagactagcctgggcaacatagagagaccccccctcatctcaaaaagaaaaaactggaatccaaacatcacatcaaaaataaaaatgcttaacaaaagaaaggatataaggaaatattccaaaatgtactaaggctgggaggtgtaatgggatgagaatgagctttggggtcaggccacctgcttccctgggagctctgagcaaaccgttgtatgtcattaagcctcagtgtcttca

SEQ ID NO: 51037 - DNA, 477 bp, Homo sapiens
ggttatattttaaaacataccatgtgtgayaattctgtttccaacatgaacattatgctgacattgcatttctaaagtgagtgattcctgacacaaggagacatcctaggctactgacctagaaaaagctggctcttcttcagccagtttcgtttctctcagctactaagaaaaaaacacaaattcagatgctattaatagccagattctaaaatctaccctgtcattgtaatatctatttaagcctctcaagtctcccagattaatggaagccattgagcagagatctactactgggtcctgtattggaaagtgttgggtttctttgtcaaacaccaatggcatgaaaaatcttgataataaaaagtcatgaatataccttattaatttaatttatatatattgtgatgattgtaattgcaagtaggatagcataattcagttatgaattgtttgagaagctatatttataaatgt

SEQ ID NO: 51038 - DNA, 571 bp, Homo sapiens
aaaattacaaagcacattcaaactgaccacaataccttttagtgaatatttatactaacccaggagaacagggacttttcagaaaaaggataccacaggaaaaagggtgggcataggatgacctgggcctatgggttaaaatgcatatcagtgggttccgcaccaagagattctaatgcattcatttaggcttaataattttcccagtcaaaaatcatgaccccttggccaagtgtggtggctcatgcctgtaatcccagcactttgggaggccgaggcaggtgtaccacctgaggtcaggagttcaagaccagcctggccaacagggcgaaacttcttttctacaaaaaatacaaaaaaaatagccgggtgtggtggcacatgcctgtaatcccagcaactcgtgaggctgaggcatgagaatggcttgaaaccaggggaggcggraggtggggggagctgggggtcggaggttgcagtaagtcaagatcgcgccactgcactccagcctgggtgacagaggaagactccatctcaaaaaaaaaaaaaaaaaaaaaaagaaatcatgacc

SEQ ID NO: 51039 - DNA, 569 bp, Homo sapiens
ttgggagaattatttaaatactagaggcatctattagcacacaataatgtgattattggtctctaataaatacaatgttgagagctggattaattaaacagaaggaatgaaactctcaaaatgatggccgggaagctatttattaactggaagctcgagcatgtgtgtctgtgaagaacgccaaatggtggtgttcccattgttgaaaaacaatgtggtctggaaccaaacattgcaaggataacttgaatttataaatcaaattccttgactttttatctttaagtaatatgaataatttgttttcatttgaaggtcttctaaagaaatttttctgccatggagttagttaaaacttctaatcagaaactttgtttaawactgtttttaggccgggtgcagttgctcatgtctgtaattccagtgctttgggaggctaaggcaggaggatcacttgagtccaggagttcaagagcagcctgggcaacataggaagggcctgtctctacaaaatggaaaaactagacattaggcaggcatggtggcacgcacctgtgatcccagctact

SEQ ID NO: 51040 - DNA, 525 bp, Homo sapiens
agggggcagtaacacactttcaaacagccagatctcatgaaaactcactatcaggagaacagcaaggggaaagtctactcccatgattcagtaacctcccagcaagcccctcccctgacacgtggggattacaattcgagatgagatttgggtggggacacagagtcaaactatgtcagactatcacttaacttgggcaagttatttacttaacttccttctttgtgcaaatagaatattaagacctacctcaaattgttattgtgaggacaaaataaataaagcaattaaaggrtcctgtagaatgaatgcttgatacttaataggttcttattaagcaaaaggtaataatatcttgaacgaaaactgtttaaatactttcttaccttcatacaatttttaatgcaagattctaaatttaacatggtaagtctgaaatttagatggacaattttttgtcaaatcttgattttgcatggttggtacagttcccttgcaaagaacgcgaaaatcgacctatgctaa

SEQ ID NO: 51041 - DNA, 575 bp, Homo sapiens
cactaggtccagcccatactcaagcagaagaggctacacagtatatgaatatcagagagggcgggtcattgggagccattttagatgctgcctatcacaaccaatgtgtctgtctacacgtgacacctccagcttggtgctctcaggggtcccggggagagtattccaggagaacttcctttagcagaagttgcaagaattcttatgttctagcttcagaagtctcagaacatcactttcactgcatcctatcggtcaacttaaaactcactaggagcagccagattcaaggggaagggaatcagattcaacctgtcaatgtaaggagtgtcgaagagtttgccatcatccttcatttaccacactgktctacataatatcatatgcctcccccgactacgcaccaattgtttcccttacatcacctttttattacagcccatatattcttaaaaatttgtttatatctaacaactagaaagcgagctccctgaagtcagaaaaatctgcttttttgttttcctcccactgttctaatccccaggatttagagcagtgcctgacacagaatatgt

SEQ ID NO: 51042 - DNA, 554 bp, Homo sapiens
ggtagcacaaacaaaaactcctttgtatctgacttttctcaatccccacttcaggtgctttactaatgggaatgatttctatatgttcccttggtaccaagaggcactatgcaaagtaacctatgacaccaagttacttgcttgctaaaaaataaaatmaaatccatgtctttgtttgtccctttttattcctcagctacaaagccatttttggggggaagacaatacagatatcaaaatattattccttctgtcaccccaaggcataggaaaaagtgatgacatcagcatctttggaaaattcttgattccctggataatcttgttcaaatgactgtgggagaactggtcaggtaaaagagattcagcaaaggctcatgtctgttagtcactggcaatgtaggaaacatgaccactttgacctagtttgttttagacagttatatcccccttgacggatccaaatgcctttttaagcatacctcatttctagtaccactattagccagaaaaccatgcatgttgaaaaataactttaagtcaggtctaatttt

SEQ ID NO: 51043 - DNA, 554 bp, Homo sapiens
ggtagcacaaacaaaaactcctttgtatctgacttttctcaatccccacttcaggtgctttactaatgggaatgatttctatatgttcccttggtaccaagaggcactatgcaaagtaacctatgacaccaagttacttgcttgctaaaaaataaaatcaaatccatgtctttgtttgtccctttttattcctcagctacaaagccatttttggggggaagacaatacagatatcaaaatattattccttctgtcaccccaaggcataggaaaaagtgatgacatcagcatctttggaaaattcttgattccctggataawcttgttcaaatgactgtgggagaactggtcaggtaaaagagattcagcaaaggctcatgtctgttagtcactggcaatgtaggaaacatgaccactttgacctagtttgttttagacagttatatcccccttgacggatccaaatgcctttttaagcatacctcatttctagtaccactattagccagaaaaccatgcatgttgaaaaataactttaagtcaggtctaatttt

SEQ ID NO: 51044 - DNA, 854 bp, Homo sapiens
ttgatattttacttatttgaaaaaagatactaataaattcagaaagttttatctttgtctatgtaatttataaatattttccaattgttggaatgttcaggttttggttgtttttaaattttatttgttgccatgtaattttttttcacttttgtgatttttttttgaaatcactttctcttattgcttctaggtttaatgcttaattagagtattaccagtgatattataaaataaattctcatatgatcaattttttatttctttgataaaccttattttaatcacttggaatttcttctgatatatgcagtataaaacaacatttatttttgcaagtatctatttagtttttcaagcaaatatacaaaaaattgtatcctgttgtcactgttctcatgcctcctatggtaaattattatttacgactgtcacaataactccatccatccttcatgggcttcgtgcattgtgactttgtcactccttctatctggtggtgaagtcttcttctccctttaaattagaattgctccttggaattgctttggatagatatgacagaagtacacttctggaaatttcatttataagcttttgtgtgaccaaagaaagttgatgtgctagcataagcacagttatttttttccttccttagagaaaaactatgttagaawaaactaatagtaaaaggatgcacaaatgagtctcttacataagctatcaaaaaatactgaaaagcaagaaactttttaatttgtttaattgtttttagtttcagcttctttttaaagaagttccacagtttaaaaacattttttcctgaaggaaataaactaggattattttcttta

SEQ ID NO: 51045 - DNA, 854 bp, Homo sapiens
ttgatattttacttatttgaaaaaagatactaataaattcagaaagttttatctttgtctatgtaatttataaatattttccaattgttggaatgttcaggttttggttgtttttaaattttatttgttgccatgtaattttttttcacttttgtgatttttttttgaaatcactttctcttattgcttctaggtttaatgcttaattagagtattaccagtgatattataaaataaattctcatatgatcaattttttatttctttgataaaccttattttaatcacttggaatttcttctgatatatgcagtataaaacaacatttatttttgcaagtatctatttagtttttcaagcaaatatacaaaaaattgtatcctgttgtcactgttctcatgcctcctatggtaaattattatttacgactgtcacaataactccatccatccttcatgggcttcgtgcattgtgactttgtcactccttctatctggtggtgaagtcttcttctccctttaaattagaattgctccttggaattgctttggatagatatgacagaagtacacttctggaaatttcatttataagcttttgtgtgaccaaagaaagttgatgtgctagcataagcacagttatttttttccttccttagagaaaaactatgttagaaaaaactaatagtaaaaggatgcacaaatgagtctcttacataagctatcaaaaaatactgaaaagcaagaaactttttaatttgtttaattgtttttagtttcagcttcttyttaaagaagttccacagtttaaaaacattttttcctgaaggaaataaactaggattattttcttta

SEQ ID NO: 51046 - DNA, 634 bp, Homo sapiens
gtgtacagtatacataacctataaaacatgcgttaatggactgtttaagttatccataaggtcagcaggaggctatgagttattacaatttgggggagacaaaagttatacatagatttttcaactgtgacagagtaggtcaacacacctcatcccagtgttgttgaagttttaactctatattcagtctgctacccatattgtgaartataatttatatttttatttcatgatagtgtggaaaaaaaattattaataagatacaaaataattctgaggagtgaagtaattgaaaggccaaacttaagtgtaatgaaataaagaaattttactccttatatatctctattagtaaaataattaaatgcatcaagtgcttctttatatttagaggataaaatgcaaaagatggagattgtttctttgtcaggagaattatttcatgtaagggaatgctatgttattaattgtgataattgtgatagttaattttatatgtcaacagggctgggccacaatgtccagatatttggtcaaacattattcttgatgattctagtaaggagtttttggatgagattaacatttaagtcaggtggaccttgagcaaagcagattaccttcataacacgaa

SEQ ID NO: 51047 - DNA, 2000 bp, Homo sapiens
atttttagtagagacggggtttctccatgttggtcaggctggtctcgaactcccgacctcaggtgatccgcccacctcagcctcccaaagtgctgggattacaagcatgagccaccgtgcccagccaagtttgttttttaatctccatttcaaaaagataataaataagattcagaaatattagctaacttgcctgatgtgtgatggggtggaaccatgcttctaagctctatttgactcattacaaggcatgtgctcttttcattatattattctcttcttaaataacgagcactaggcaatagtggtaatttgtgactcaatttcctacattttctaaccatcgtattcttactacccagaaaccattgcttttgatgttctcttaactccatgatgaggaaggatacctgtttcaaagttggttctcaaaagggacttcccatgctctaagaatttgggaaaaacaaatcctaaaacatagtaatatattttctattgtggtgattttcacagctgtgtcatccgaaaataatataccatgtaggctgttggtcaaaacttgaaattattttaattctactgaattttaaaaattaaattcctgctaacaggtttgttcagtgtgaccttggtttgccctctgctctgagttcccagctccccctacgtctgccaccctctgctctctttggcgatttgttgggcatcctcctcactcagttccaacttttctggggtgtttccttcccagatcgggattctttgtgttgaaaactcactaggtaggtgttcagcagcctaatttcctcttcctaaacacatgtgaagattatacaccttagcttgcttgtggacagaccatggccttgtgatgagttttagccagtggaatgtagtcagaagtaatatctgccaattccaggactgacaataaagtataccatgtgtgacaattaattttatgtgtcaacttgcctgtgccatggcacccagaaaggtggccaaatattattatggatgtttccatgagggtgcttttggatgagattaaccttaaaatcaagggaccgattttaagtaaagcagatagattaccttctataatgtgggtgggcctcatccatcaaaggcctggttgaaacaaaagactggcttcccacaagcaagaattgtgcgagcaaatagtcttcggacttgtattgcagcgttggctcttccttggactccagcctgctggcccatcctgcagattttggacttgccagcctctgtaatcacatgactcaactccttaaaatacatctcttkctctttctctacacacacatcctatttgttctgtttctccggagaaccctaatgcatgttgccattctccatgctgttttgttctccatctacatggcaaagatctccaaaggtgatggaatcatatgatgggaggagcttggagcctgagtcaccgctgaaagcacactgccatataatgtcatctgaccagtgtcggagtttgtgtgtgttagagataaacttgttgttgttgttaagtcactgagatgtgacttactagagttacttgtcttaactatatcattattgtctggaaaatccagtgatggagtaacagagacaagagaggctagctctgcagatgtgccagggtttagttccaagtggggaaccatagtaaaaatcaaggaggtaatgcggaagggacttgagaatggagcaaacacagagagggcttctggaccagagctggcctggtgagtcagagctttcccaggcacaacagatacctgtgcctcgtatccagactccagctgctggtgggtgtgaactgactgtctggtcagcatcaactcagaggctgcatgggagtgagagacttggcttctatggagccaaagaggctgggacctgatccagttgattcaagaataattctcatggaagtgggaggacagttgcaggtagctagcgcagcaaactctctc

SEQ ID NO: 51048 - DNA, 2000 bp, Homo sapiens
atttttagtagagacggggtttctccatgttggtcaggctggtctcgaactcccgacctcaggtgatccgcccacctcagcctcccaaagtgctgggattacaagcatgagccaccgtgcccagccaagtttgttttttaatctccatttcaaaaagataataaataagattcagaaatattagctaacttgcctgatgtgtgatggggtggaaccatgcttctaagctctatttgactcattacaaggcatgtgctcttttcattatattattctcttcttaaataacgagcactaggcaatagtggtaatttgtgactcaatttcctacattttctaaccatcgtattcttactacccagaaaccattgcttttgatgttctcttaactccatgatgaggaaggatacctgtttcaaagttggttctcaaaagggacttcccatgctctaagaatttgggaaaaacaaatcctaaaacatagtaatatattttctattgtggtgattttcacagctgtgtcatccgaaaataatataccatgtaggctgttggtcaaaacttgaaattattttaattctactgaattttaaaaattaaattcctgctaacaggtttgttcagtgtgaccttggtttgccctctgctctgagttcccagctccccctacgtctgccaccctctgctctctttggcgatttgttgggcatcctcctcactcagttccaacttttctggggtgtttccttcccagatcgggattctttgtgttgaaaactcactaggtaggtgttcagcagcctaatttcctcttcctaaacacatgtgaagattatacaccttagcttgcttgtggacagaccatggccttgtgatgagttttagccagtggaatgtagtcagaagtaatatctgccaattccaggactgacaataaagtataccatgtgtgacaattaattttatgtgtcaacttgcctgtgccatggcacccagaaaggtggccaaatattattatggatgtttccatgagggtgcttttggatgagattaaccttaaaatcaagggaccgattttaagtaaagcagatagattaccttctataatgtgggtgggcctcatccatcaaaggcctggttgaaacaaaagactggcttcccacaagcaagaattgtgcgagcaaatagtcttcggacttgtattgcagcgttggctcttccttggactccagcctgctggcccatcctgcagattttggacttgccagcctctgtaatcacatgactcaactccttaaaatacatctctttctctttctctacacacacatcctatttgttctgtttctccggagaaccctaatgcatgttgccattctccatgctgttttgttctccatctacatggcaaagatctccaaaggtgatggaatcatatgatgggaggagcttggagcctgagtcaccgctgaaagcacactgccatataatgtcatctgaccagtgtcggagtttgtgtgtgttagagataaacttgttgttgttgttaagtcactgagatgtgacttactagagttacttgtcttaactatatcattattgtctggaaaatccagtgatggagtaacagagacaagagaggctagctctgcagatgtgccagggtttagttccaagtggggaaccatagtaaaaatcaaggaggtaatgcggaagggacttgagaatggagcaaacacagagagggyttctggaccagagctggcctggtgagtcagagctttcccaggcacaacagatacctgtgcctcgtatccagactccagctgctggtgggtgtgaactgactgtctggtcagcatcaactcagaggctgcatgggagtgagagacttggcttctatggagccaaagaggctgggacctgatccagttgattcaagaataattctcatggaagtgggaggacagttgcaggtagctagcgcagcaaactctctc

SEQ ID NO: 51049 - DNA, 646 bp, Homo sapiens
gctaaaatttatttcacactttctatagggtaagcactatgtcaagtattttgtgcacattttctccttaaacctttacaataaccccattagggaagtgctattgtcattcgtagggacagggggcagggaarttctgggcagacgagggcaggtccctggcgagggccctaccctcaagcctggaaccacaccctaaagtgagaacataacattcctgtttccccgccgaatgttgccttttccaaaactatccatggcctgccccaccccatcctgtgcccataaaaaccccaggctctgccagcagagagaagagaggagaagaggagaggcagtaggacatgggagactgtggttggacttcagagagaagcagcttgacttcagagggatggcttgacagcataacttcagtgaggagtccagctggagatggccagactctggggaaggttatctttctactccatccccttttcagctccccttcctgctgagagccactttcatcaacaactccctctgcttctccacaccttcattttattggctttctcccttaagtggggaggcaggtgatggtcccaggacatctagggctgaggaggtgtatgtaattctgtggttcagaattaggaaatcc

SEQ ID NO: 51050 - DNA, 1104 bp, Homo sapiens
tgtgtctgcgtgtgcatgtgtccctctgcaggtgtctgcacatgtatgtgcgtgtgcatgtgtccctctgcagatgtctgcacatctrtgtgtctgcgtgtgcatgtgtgcctctgcaggtgtctgcacatgtatgtgcgtgtgcatgtgtgcctttgcaggcatctttgcatgtgtgtgtctgcgtgtgctgcttctatgcatgcgctcctatgtgtgcgtgcgcttgtttgtgcatccatgcatgtgtttgcgtgcgtgctggaggagagcattgggtgggaccctccagccttttggcttctcctctgctctagagagcaagggttgccaggccgaggtctgcccttcgctctgagggtctcaccaggtgcacattggtttatttggtgcagaattcaggcagcaggcaaagggcgagctccgtccaagaagaaggataatgcccccactacttcatcccctccaccctgcgttgtgtagggaactgctctagaccccattagaagttttttgtgggggaggaacagaagagggagcggaagaagaattacaaaagagactgaagtcaagattattatatttgtcatttgcattcatttggacctagaaaatgtttactttggaatgccaatttagtttgcaacacctgttattcattggttgattagttgctttagttactaatgcagccacattttttttttttgagacagagtcttgctctgttgcccaggctggagtgcagtgatgtaatcttggctcactgcaacttccacctcctggattcaagcctcccaagtagctaggattacaggcatgtgccaccacacccagctaatttttgcatttttagtagagatgggattttgccatgttggccaggctggtctttgactcctgacctcaagtgatcgacctcggcctcccaaaatgctgggattgcagcactgtttttttttagaaggaaggtcagaggaagaaaagaggatggaaggtggacgctagaaaactatgagaaagatggcatttagtccccagccccaccactctgccaaaaagaattcaggggagtttccttcccatccctaaccctcagtctcc

SEQ ID NO: 51051 - DNA, 618 bp, Homo sapiens
tgttatgcaacactccagaaactcttaaaactcacatttgataaagagactgttactcaaaacacttcaataactcttaaaactcacatctgataaagagactttacacaaaacactccaataacccttaaaactgacatccgataaagagactgttttgcaaaacattccaaaaactcttaaaactcacatctgataaagagactgttaggcaaaasattccgaatactcttaaaactcgcatctgataaagtggctgttatacaaagcactccaaaaactgttaaaactcacatctgataaagagactgtttcacaaaacattccaaaaactaaactcacatctgataaagagactgttacgcaaaacattccaaaaactcttaaaactgtacagtaagaaaaccacctaataaaatagaccaaagaccttaacagatacctcaccaattatgagaaccatataggaaataaactcataaaagaatgcattatattgtgtaacgttagggtaacatattaaaacaatgagataccgctacatacctagtagaatggccaaaatctggagcactgacaacaactgatattgagaatgtgcagcaacaggaactctca

SEQ ID NO: 51052 - DNA, 618 bp, Homo sapiens
tgttatgcaacactccagaaactcttaaaactcacatttgataaagagactgttactcaaaacacttcaataactcttaaaactcacatctgataaagagactttacacaaaacactccaataacccttaaaactgacatccgataaagagactgttttgcaaaacattccaaaaactcttaaaactcacatctgataaagagactgttaggcaaaacattccgaatactcttaaaactcgcatctgataaagtggctgttatacaaagcactccaaaaactgttaaaactcacatctgataaagagactgtttcacaaaacattccaaaaactaaactcacatctgataaagagactgttacgcaaaacattccaaaaactcttaaaactgtacagtaagaaaaccacctaataaaatagaccaaagaccttaacagatacctcaccaattatgagaaccatataggaaataaactcataaaagaatgcattatattgtgtaacgttagggtaacatattaaaacaatgagatacygctacatacctagtagaatggccaaaatctggagcactgacaacaactgatattgagaatgtgcagcaacaggaactctca

SEQ ID NO: 51053 - DNA, 558 bp, Homo sapiens
aatatgtaatcaaattctttatcctgaccttatggcacctgggtttaggaccatgatttgaaccaaacgttggtctgtcactttctgagtttgaaactttattttgcctttagcgttttgctattgctttttcgttttcttttgtttcgtttcgtttctaagttctggggtatatgtgcaggatgtgcagatttgttactaaggtaaacgtgtgccatggtggtttgctgcacctgtcaacccgtcacctaggtattaagcccagcatgyagtagctgtttttcttaacgctctgcctcccgaaaggccccagtgtgtgttgttccccttcctgtgtccatgggatctcacttttcagctcccattataagtgagaaggtggcgtttggttttctttccctggattagtttgctgacgataatgaccacacatcaccactgtttttgttttttagtataaagagtagtattttattgaataagatttgctcacagaaaaataagcttaaatctacaatgaatgccagaccctacagcagaaagcaattttctcacttt

SEQ ID NO: 51054 - DNA, 541 bp, Homo sapiens
cccagaagtaaccgctttcctgaagttggtgataattttttgaagtatggcttgaaatttttattgtctttgtttataatatttatataaatgtcatcagagtacaatttctttggcacctttttcactctacattcagtttttgaaattcagccatatttctacgtgtttacttattttaaatgttgtgtagtatttcattggattaatgaaagaagtttacttcgtttcaacgaaggaatgagaataaaatttaatcctgttttttcaggaacaatacactataaaggtatttttatttatatccatcaatttcacttrtttttattgagctattatcatgtgtcagactctatcatgtgtggaagttacagtgctgataaaacaaacacatccttgcctgccatgagtctacgaaagcagtaggagagggatcacataaatatgtacagcataaaaaatgtaataaatagtctgaggagactctgagagactaaaatgaaaaagttatttattggaggctcaagaaagcaggattcaa

SEQ ID NO: 51055 - DNA, 601 bp, Homo sapiens
acaggcttcaaccaccatacccagcccacattttaaaaaacatatatctctggtgtgtcatcaatgagataactgatttttaggacaccagagtaggtgtgtctttagaaagaaaaaatattttgtaatctgcacgtaaastccaatggcataaacttgacctcccaaatgtaaaatgatatttgagcacatcccatttttggcttattggttgcaaacagatttttaaaagacatgagtttgaaaaagtattgatcatattacaagatgttattcagagtttttagagtaaaagaaacataaacacagttacatattttagaagtgtcaggcccaatctgcttgtcgattcccagaacatactagtttttcagaggatgtacgcatataaataaactaaatgcatatagaaaagcacatatatcttttctttccaaattgctttccttcactctacctgacataaactccctgatgtcctggccagagtggtatttttggcacaatattgttcctgatttctctattgcctcctggggacctgcctttcaaacatctaatctgaattttctcatgaatgccaatgatatacggctacatt

SEQ ID NO: 51056 - DNA, 627 bp, Homo sapiens
gactgccatttttaactgaaagaccttaggtaagttacctaacctctctgtacctgtgtaaaatggagataacagtagtatccacttcacagagttatgaggatgaaatacattcatatttataaaacgtttggaacccagtacttggcacatrgtaagaccatgtaagtgtttgtaaaataaaactgaaaataaagccatataccaaataagtggaaatgtatccaaattccattaacatttcctttttaacagttttattgagatataattaacatactgtaaaatgtccccattgaatgtacaatgtaatgacttctagtgtattcagagttctgcaaccatcaccacaatcatttttagaacaaaaagaaaccccagcctcaattagcattcactccatgccccatcccccacccaagccctagacaaccactaatctactttctgttggcgttgtgggttttttccatgggggcatctcactttgttgtccaggttggaatacagtggcatgatcatgacccactgcagcctcaaactcgagctcaagctgtccttccaccttatcctcctgagtagctgggagtacaggcacaccaccagagctggctgttttgtttttat

SEQ ID NO: 51057 - DNA, 627 bp, Homo sapiens
gactgccatttttaactgaaagaccttaggtaagttacctaacctctctgtacctgtgtaaaatggagataacagtagtatccacttcacagagttatgaggatgaaatacattcatatttataaaacgtttggaacccagtacttggcacatagtaagaccatgtaagtgtttgtaaaataaaactgaaaataaagccatataccaaataagtggaaatgtatccaaattccattaacatttcctttttaacagttttattgagatataattaacatactgtaaaatgtccccattgaatgtacaatgtaatgacttctagtgtattcagagttctgcaaccatcaccacaatcatttttagaacaaaaagaaaccccagcctcaattagcattcactccatgccccatcccccacccaagccctagacaaccactaatctactttctgttggsgttgtgggttttttccatgggggcatctcactttgttgtccaggttggaatacagtggcatgatcatgacccactgcagcctcaaactcgagctcaagctgtccttccaccttatcctcctgagtagctgggagtacaggcacaccaccagagctggctgttttgtttttat

SEQ ID NO: 51058 - DNA, 1394 bp, Homo sapiens
cacataacacaagaggtcacatttaacagaattattctgagagtggccagttggggctgttaagaaaactaattctcaagctgatcctggcccacctgctgacttggctggaagaagcgctggcacccagagcttcacactcagaagaaggtcatgggggaagcagggtggctgccggctgggaggcatctgaggagagtgaggatttcactaggctggccacaaaagatgacaccaccgtcttttttcggggggcacctcattctatctgtctacacacagatatgcctacacccacaataaaaatgtttataaataaaaatatttggtactagttttgattttctacagaattgggactaaaaaaccaatttattcttacacttgtggattaaatggtaactccacagtttaattttatctgaaaggggraaaaaaactgacatctagcagttaaacatgtctttgtcactagaggcctatgacacaaatctcgatgatattttatgagaacatgtatagcttttctccacttgtggctataattgctgttggagaagccccaacatgtaaaggttgatgcttctgaatgtgctgaaagatgctggaactaaaccatgcagtgacagctatcaaaatgtcaccaatgcagtgtcatattcagtcaagatgcttaaaaattcaaatgttcaactaacactgctctagtgtgcgaggaagagcattacctggctggttggtagggaaatgaaatgagattatgtgcataacagcacttaggaagaagcccggtgcagggttggctgagctaggaagagctatcattcgctgggcactgactccatagagtagtgtatgccagacagtagtctcattacacatgttttaattcaattaatcctcaaaactgtgaagtggatactatcctcatgcctgggtaaaaggtgacaaaaaggaggctaagagaatacccagctacttagtattggaggctggattcacatccaggtctgtctgactttggagtctctactttaaccgttacttaagttctggtttctcaaagcatcctgaagagagccatgtacatttcaggtgccctttgtctttactgtcccggtgtgaggtatgcgctgcagggcctagcaatgtactctctttacgtgggcctaaacacccactggtatttttaaaaagacaaaatacggtatttcaagtttctaaataatttttatttaaacaattacaactccttgccacttgctcattaattgaaaaggtttcatttgaaatcactagtatttattctaggaattagtagttagtttgaagagaaggttgcagtagctaaaatttaaatttatactaatttagggcacaggaagcagtatata

SEQ ID NO: 51059 - DNA, 558 bp, Homo sapiens
ggcgcacgactctaactttaacttaacatggagctctgcacattagggtctcacaacaggaacaaacttcacaccttgcttgagcccaggaggctcttaaaaccaagtaaggggacaggaagcagacactgggtcctgggctgctgtcggctcgctgcctctttcttcccactcctctagcctctgagctgctgggaaccgctcatagatgcagaattaaaagggtaggacaggagtctttcaaagtttgcccatatggctggctcaaatacaatttccagcatgaattgagyggtggaaatcggatctgaccacaacactgcagcacccacagagttcatcacagtcttctccaggccattctgacaacactccctgccgagggtgggtgtcccggtggaatgccgccacagcacacactgcgcagtggggaacccagtgcctcgggagtgaggtcacttcccccaccgtgagcctgtctattctggacctctgagcacatttctctgtgctgcaagtgtattgcctttgaggttgaactgtgtggaaaatcatgtg

SEQ ID NO: 51060 - DNA, 560 bp, Homo sapiens
gcaggtgtcctctcttttgacatttcaatatgccgaggcacttacacttattttcattcattctattactatgcaaagatccaattcaggaagctattttaaaaatatgggaaaatttaattaattttagttgatatttatgattctgttagcacattatttgttattaaggtcacataaagaactaatcatttctactcttattccagaggcatagtgtgtattacaataacataaatcatattaatgtgaatgtgagattaatttcaaaaagagacaaattacatgctttgcttagtatttacatattggatgttatgaatttattcttattcatggtaataacattaattacaataaatttgttttatattcatgtaaatgtcacacacttctggaatttggcatctataatacatgaataaatggccactagctttttactctcgtatttcagatgtagttactcaaatgaatmgtcacaaaattaacaagctatgaaaccagaaaaaaaaaacctgatagttgaattttattgatttttgtcacaatatcaaaat

SEQ ID NO: 51061 - DNA, 592 bp, Homo sapiens
aaagaaagtagtaagaatgttagaaactggtaagagctgctgagaaaggaccctatgcctgccccttgtgctgaagatgtgatcaatagaactactccagataaacttagagacatgatagtagaaaaggcctatgtcccatttcatgcctagggatctgacaggaggcaagtgttctcatgttaccatggcacaggagagtagagtaaaaatggctacttgggggtgcctaggcaaatggaactattacaatctcagaaattcccatggaacccagtggagaaataggagcaaacatgttcccgtgtggcgagactggatygattgcaaataccaatgagagccagtggatcatctcagcagatattgtatggagaggtaataaccaaaaacaagtatcctcctgctgatgtcacgactctatgtaagccattggaacttaaagatgtctctggatcaagtgataaatgtctttatcaattgagtctgccatgaatttgagtagtctaaactatttgtttttcttaataatgcattttttcctagtcccaaaatttatatctgcaaacttttatccacagattttatgagg

SEQ ID NO: 51062 - DNA, 537 bp, Homo sapiens
acaatcaacaaaatccagaatgtaaaaaaaatgctatgggacagccccagtgacttgatttcttcaactatttgattaaaaaaaaaaaaagagggagaagctttagattaaaatagacctaagaaactataaaaatggatcctgatttgaaaaaaaagttaaaaaatataataaaaacaaatttattaaaaattaggaatagttgacactgcctggatatttgacaatattaaatatttgacactgcctggatatttgatgatactaaatatccaggcagtgtcaaatatttatggggattaatataaatgtttatgggaattaatgacagtattatggttatgttctttcaaaaattcttatttttaggggtacttactgaactaatgaaacaataagatgtctgggatggttcaaaataatckagacatttggagattggagttactggggaggattgacaaagcaagattgggcctgaattgataattattgatgatgggagatgggtttgtggggattcattctatttctttg

SEQ ID NO: 51063 - DNA, 549 bp, Homo sapiens
tacagccacactaactggctctgaatcgcttaggttttcctttttaatcgcttttctttttttttttttttttttgggggggggaaacagagtctcaaatctcgctctgtcgcccaggtggagtgcagtggcacaatctcggctcactgcaacctctgcctcctgggttcaagcaattctccttgcctcagcctcccgagtagctgggattacaggcacctgccaccatgtccagctaatttttgtatttttagtagagacagagtttcaccatactggccaggctggtcttgaactcctgacttcaggtgatccagctgccctggcctcccaaagtgctgtgattacaggcgtgagccaccacgcccggcctctcttttcttctcattaaaatataactcttacagaaataataagaaaagtaatgaagtaatgagtctattattttgagcccatccaaaaaaaattgcttaactggcaacagayagaaaaataagatattgaattatccaaaagctgattagccaaattatttcttttttcaccatt

SEQ ID NO: 51064 - DNA, 575 bp, Homo sapiens
tcagcctgagataagcccaaccaatcacagctgagtccatcagagccttaccctaccccatggcttgtaatcagtgttataagccaccaagatttggagattggagtttgtttgttaaacagtggtattatagtgaaaaacctccctgagatgctatctagtcctagtttgctaagagtttgtattataaatggactttgaattttatcaaatgctttatctgcatttattgagataataatataaattttccctcatcctattaatgtggtaatttatcttgtttgatttttgaatgctaaacaaaccctgcattcctagatttaaacagacaaaamgacttagtactgaggtattattctctatattttgctgaattcagcttgcttatttaattttttagtttgtgcatctatgtttgtgaaagaaattgattcataaatttcttccatcatattgttcttatctgattttattaccagtgttatgccattctttggaagagtttggccacgactagaatgatttcttcctcgaataacatttataacattctccaatgaagatatgtaaac

SEQ ID NO: 51065 - DNA, 642 bp, Homo sapiens
gataatggtaaataaaaatgctaagtgttgatatcactttcaatttatagtcctaaaggcaaatgttcaagacttgaagtttccagcaaacatttatggtatctaatctgttatcacttctttgtaggccatctaggcaaccgtgacctattctactttgctttggggaatgtgataaagaggaagaaacagctgcttgagaaaaggcttagaaacatggctgtggtttatgaagacaataataatattttcatattgaatgggtttagatatatgttatgctagatgcaaaggagcaagcaaccctagtcaaaatgttctataaggttattaagagagctatattaaaaatacaaaagtctacactttcctgggtcagagaaaaaagtaaaatgtacatagcacttaaaaaaattctctyggtgcattctacggttcttaaagcttgttttttccttaaatactgcttaatcttcagtagatttgtgtgcgactttgcccaactaaacagaatgtcttgttaaattattttcttcctctatgttgagtcttccaactaaagcaacagcaaccaaaatttacaaatttttgatgataaaaattaatcaatgaatatataagcttattggagtccaaactaca

SEQ ID NO: 51066 - DNA, 578 bp, Homo sapiens
aaacaaaaaacaaagcagacaattttcttagctgatatgcaggggtctgtcccgcagaccctgacccaactatggatgaataacatacactgacacagatattatgcttctcagtccagctgacggtctgggccacttacaggttccaaggagagtgctgcaaggagttgcagccatggcccgactagctggccctgccggcatctattcagcacacattaaatgataaaggctttgagtcaacaccattagaargtaatcaacctggtcatcttcccccctccaacacgccaccgccatccccaccccaccccctgcagagccatcctgcctgcgaatgatcaaaggttagttttaggaccacatgagtaaacaagttatttagataaactcctctacattcctatgtatctactctaagttatttactcaaggtaaagattaggctgctttcagacataaccctatcctgagacttttcaaaaaccttccggccttccaagaagatttgtgtttatatcctacaacttcatcgtaaattttttctcaccagcctgacagaactcccacactgataa

SEQ ID NO: 51067 - DNA, 588 bp, Homo sapiens
attttcaaaaaggttttattgattgattgtttgattgattgattgagactagctttgttgtcttgctttgttgcccaggctagatagagcgcagtggtgcgatcttggcttactgcaatctccacctcctgagttcacacaattctcctgcctcaacctcccgaatagctgggactacaggcatgcaacacaaygcccgactaatttttttgtgtttttagtagagacggggtttgaccatgttggccaggttggtcttgaacttctgacctcaagtgatccacctgccttggcctctcaaagtgctgggattactggtgtgagccaccgggcctggccaagaggttgtaatttaaataaacaaaagtatagtttgaaaagaaagtaaacaaagaagcaagaaaatatgaataaatataaatattctgtagaacgaatcaattatgcataaatggtaattatttcaaaagttcttaaacttagaaattatgaagtgatgtccatttatgcaagttctggaagtagggaaaaggatctgctgaatttattattattagccagatatgtgccatcctttcaaaggattat

SEQ ID NO: 51068 - DNA, 539 bp, Homo sapiens
tcatatttttttttcttttcttctctgtgttattttgattcccaacttcctgtttatttctaacataccagcatttaggtctctgttaatacctggtcttctactgacccatcttttgccccaagcactttatttaggtagccaaaaaacaaacagamaaaagaaatctggtttcttctttaagagaacttgtggttttagctgttattatatgtttttactctaccttatactcatgaatcaatcatataaagtaaataaacagcttaaagcatgagttgtgtgaatagttatgcaaattagcttcaactctatgtatattatatgtgaacacctgtttttatgtgcagaaatagccatgcgcagcacattcatttacaaaaatgctcattaatgtccctagaatgtttagcttcatgaagtattgctgggccacatggtgcgtttaccaccatttccaattccttattttccttcctgggaacatctgaaatagaggaaaaataataactagagttatttgcagaagttttcgaaac

SEQ ID NO: 51069 - DNA, 1198 bp, Homo sapiens
attagatattataagtaatctgaaaatgatgtaaagtatatgagaaaatatgagtaggttatatgcaaataatagctgtattatacaaggaatttgagcatctgctgatatcctcaggaatgacaataggaaattacaatccagtgtagcatgttttactttataagtttaagtacagtatatacacaaaggagtcatagcagtcacgaaacttacaattcaagagaagtcactactataactgggaaaagaatagaaaatacatattgacttaaaagaaaatcgtgttcttatctacccgttttataactyagatatttgattcctatgtcagttattgcttgcccaagatcagaaactacatgacaacagaatagaaaatgattccaggactgctgagctgcctctatgaagtagttcacctttttgaattactaaaagttgaagtggaagttgaaaaatgaaagattacttttacttatgtctcacttttttcatatgtatgtgtgtgtataacatttaacattaaaaactacctacctaataaatatctttaattaaataagagaaaaatcaatcaaatggatagcttgcgataaagaataactatttcctacgaatgttttaaaaatagcctgataattctggaatttaagtcattttgatagaacttctatatggagttcttgttgacaaattattctatctctggtaaaagtagggagaaatataattccatatctagccaaatactacggtattttgtgatgttaaaagattcattataacctgaaatgatatattgtgtatcctctaaacaactgtttccctaaagatttagtggaaaaacactttcccccaatctgtgcaactctaagaaagtgacttattattgtgacaagtagatctatcagtgctacctgcaggcccaagctgcccagattactaatgacctgcgaaataaattggccattccagaactccctactcagctgtaaaagaggtggtgacatcacaggctcactatagactctagttgatgctcaaagtaacaggcttggatcccaagggcttattcagccatgttggcataatgtccttacctcacaaactgatttacaggtcaagtgtaagaacagcttaagagtttctaaaaaaataccagctgaatgttctttatttagaaagagaataaatt

SEQ ID NO: 51070 - DNA, 769 bp, Homo sapiens
acacttaaattcagaaactttaaattcagctaactttaactttcagacattattgcaatttgtgtagtatcatcaaactgaaaatattctrtcagtgaaatttcagacagcagttttttctgtcatccttcccgtgtaagaaaagaagagaagatgcataactttcctgtatcggagatttccttagtgatgactgagatttatgtattcttttcttaaagcagaatgttttgagataaagtattcttagtttaacagatccataatgtttacccccatgtaattatgaatattatcagagatacttttaaaaacgtgtgtgtgcttatgtgtgtatacgtttaacttcctataacataaacagattgtaatgcaacatctaggacttatcataatttaacttgctaaaagagattaagcgagtaaacatttaaaggaagcatttaaaattaaactcaactttattgtttgaaaataaagcctcatctaccttataataaaataattttaaaacacttctctgttcatcgccttataggagtttcttgggtttatgtgctttcttccttctaatttcttaatttttccaattcttatatagttattctttaatccataatatacacatataacagacaaatacctatttacatgttgctttcatcagtgcttatatttggttttatataaaacaggtttatttttactatgtaatttaagacaaaaaattgcagaaagcaattttgatcattgtattttctattcagat

SEQ ID NO: 51071 - DNA, 568 bp, Homo sapiens
atgcaagacagggcagcccagccagcagacggtaaaatacccagggtagcttcacgcattggttgtgagataagaaacaatacttccaaataaatgctgcctgtactaagatgaatagatgagaattatgtcacagagcattttgaagccagaagcaggattgtgggctttattcctcagtgcagtggagtacccacactctacagaatatgaaagctgatgcagtggggcattgaaaagaaaaaacgatcctaacttattgttattttgcatcaaaaaaaagagaagaaaattaagcttcactcttatgtattacagagatttacagtgacttctcagccagggatatgtcagaatggtgacttgtcatataggagaaggcatagctcactggggtagagtcacaattttgagatgtagaagggatgacaaagtgggcttctccttcatctatttgyttttagcactttttgaactattatagtttagaggcatccagggaagagaacttgggattaccatatttagttttaactaaattaaatctcataaaatggcatgtgcatga

SEQ ID NO: 51072 - DNA, 1847 bp, Homo sapiens
tggtggctataaaagccagcatgtttgtcacagatttggaagaaaacagcaaagcataaagaagcaatttgaaattgctcattcattctgctatccaggatggcaaccttgatacatgtgtgtatttccttccagccctttttctgtgtaatttaccaaattgagatcacagcatctatatggttctgtagccagcttttgtccactagactacagtggtgagcatgttccaatatccttgattagtctttgaagcctggcattcaatggctaggtcatcacccaaggggccctcgcatctttcatatactatgtctygctggtggctggttggatgtgagatcttggggctgcttacctggctgcatctatgtatttccagtggcctctctccatgaggagatgcgacagtgcagccttgggtgctgggtggtgaggagcaggaggtgggaggcccttcctaattggagcggttatcatgggaaagacaggtgctcaggtgagctccccatgggggcaggtgaggaggtggatgtggcaggtggagtgtaggaggcagccaggtgtcccaggtgatactcagggccctggagagacgtgccggatgaactgcaggcatgggagccagggactatggcttcacttcatgcttgctcaggatgaaagccccctaaaccccggaaattcaactcagggatttaaatccagtgtggcagctgaggtagtgggtgggcagggagccaggctggcagggagggatgacctcacaagtatacttcaccatggacaggtggggtttgtggcaggggggcctgggagaaggaggcagatacccctgaggctctcaggttggcatggccttggaagcccttttgggctggcccagcctgtctcgcccacctcatctttgttccctccctccggccctgccattttcagttccatttcccccgaggccagtctctaaatccccccagcttcccatctgccaggcctctgcttctgatggtccacctgccccgaagaatgctctgtctgccttttcattcctttacatttttctttaaaatggaggtacaacttatacactgtaagatacacaaatttcaggtgtatgacttgttgaacttttataaatgcatttgccggtatccgatagagaacattctcagtgccctggaaagctcccttgagcccctcctagttaatatcctttcctccccaaggataatcaatagcctgatttctaactgtgtagactggtgttgcctggttttgagcctcacgtaacagaatcgtgcagcaaggtttttatgtccagcttcttttgctcacattgtctgtgagaaccccctggggttgggtctgttggtggtttgctcacttctattgctctgtactctttcattgtatcattgtttgggtaattcatcatttatttaccctttctgctgccactggacatttgggctgaatccagtgtttggctattatgaatagagccactcttaacatttgtgtacgtgtcttttagtggatgtaaacgctcgtttctcatatatatatattaagtggaattgttggctcataggttgcatgaatgattagctttaggaggtgctgccaatcattttcccaaagagactgtaccttcttgccacctttctttgctttggtaattccacatttgttttgaggcccatctccaatgccccctcttctgctgtcctgaagagaataaccctggtcactggggtgtcagatctaccaggcaaggttgtgtctctcttcttccctgctctggtctccagtgcctggaacatagtaggtgcttaataaaatgaatg

SEQ ID NO: 51073 - DNA, 1847 bp, Homo sapiens
tggtggctataaaagccagcatgtttgtcacagatttggaagaaaacagcaaagcataaagaagcaatttgaaattgctcattcattctgctatccaggatggcaaccttgatacatgtgtgtatttccttccagccctttttctgtgtaatttaccaaattgagatcacagcatctatatggttctgtagccagcttttgtccactagactacagtggtgagcatgttccaatatccttgattagtctttgaagcctggcattcaatggctaggtcatcacccaaggggccctcgcatctttcatatactatgtcttgctggtggctggttggatgtgagatcttggggctgcttacctggctgcatctatgtatttccagtggcctctctccatgaggagatgcgacagtgcagccttgggtgctgggtggtgaggagcaggaggtgggaggcccttcctaattggagcggttatcatgggaaagacaggtgctcaggtgagctccccatgggggcaggtgaggaggtggatgtggcaggtggagtgtaggaggcagccaggtgtcccaggtgatactcagggccctggagagacgtgccggatgaactgcaggcatgggagccagggactatggcttcacttcatgcttgctcaggatgaaagccccctaaaccccggaaattcaactcagggatttaaatccagtgtggcagctgaggtagtgggtgggcagggagccaggctggcagggagggatgacctcacaagtatacttcaccatggacaggtggggtttgtggcaggggggcctgggagaaggaggcagatacccctgaggctctcaggttggcatggccttggaagcccttttgggctggcccagcctgtctcgcccacctcatctttgttccctccctccggccctgccattttcagttccatttcccccgaggccagtctctaaatccccccagcttcccatctgccaggcctctgcttctgatggtccacctgccccgaagaatgctctgtctgccttttcattcctttacatttttctttaaaatggaggtacaacttatacactgtaagatacacaaatttcaggtgtatgacttgttgaacttttataaatgcatttgccggtatccgatagagaacattctcagtgccctggaaagctcccttgagcccctcctagttaatatcctttcctccccaaggataatcaatagcctgatttctaactgtgtagactggtgttgcctggttttgagcctcacgtaacagaatcgtgcagcaaggtttttatgtccagcttcttttgctcacattgtctgtgagaaccccctggggttgggtctgttggtggtttgctcacttctattgctctgtactctttcattgtatcattgtttgggtaattcatcatttatttaccctttctgctgccactggacatttgggctgaatccagtgtttggctattatgaatagagccactcttaacatttgtgtacgtgtcttttagtggatgtaaacgctcgtttctcatatatatatattaagtggaattgttggctcataggttgcatgaatgattagctttaggaggtgctgccaatcattttcccaaagagactgtaccttcttgccacctttctttgctttggtaattccacatttgttttgaggcccatctccaatgccccctcttctgctgtcctgaagagaataaccctggtcactggggtgtcagmtctaccaggcaaggttgtgtctctcttcttccctgctctggtctccagtgcctggaacatagtaggtgcttaataaaatgaatg

SEQ ID NO: 51074 - DNA, 534 bp, Homo sapiens
ctatttagatgtagccacagtggggatgaactgtgattatacccattcaggcctgtggacctgtggacctggcgtgtgtggtcgtgaggcggtgggtcggcacatccctgggaggtttcaggaggacattcaagaccaaaatgagccatgagtaaataacacaaccacatcctgagtgggagtaggggagcctccccttctctcctaggtcttgtatgggtcatgatcccgccttggcaggagtggaaggaacagatcccacaggctgtggcttatggtaaagtgattgtggtcatgccttgtgagtgtcattaaaataaacatatatcgttaaatccaccatcaaataacagctatttctgccatcctctcgccttttccacaagtttaaatatcccagatattctactgtgtatattcctaaaagcagacaggtmgatttagtaaagttaactggatcattggtaccttctttatagatcatctggtgaaacttgtttttcaaattatgagttgtagggctttgttttaatg

SEQ ID NO: 51075 - DNA, 205 bp, Homo sapiens
ctcattgtcaaatctaccccccccmccagtactgtccagccagagaatggaatattcccaggactctatctctatataatctgaggctttagttgctgaaaatagttgctaaaattattttttgtttgtttcgttcttttaatacctgagaacagaaataggaagaaatacccaagtgaattgtcttagttttagatataattct

SEQ ID NO: 51076 - DNA, 560 bp, Homo sapiens
tctagacacagatctgtgaagatgtgtataggaagtaaaaaataaatacataaaaattgagcttaagactttttttcttttaactgatgttttgccagtatgttaygggcttcatcagagaatgcaaacacaaacttgtgtttggacttcaaagcatttttcaattccagcttaagtaatgaaataaatgtgtaaagtcacagatccagggactgctttgtattgctggttgttttatcacaacattgttttttaaaaagatagctctgtagatttaactttaatacctgaaaaaaaaattggaaagccattcaagagattgatttgcaaacaaggagaagatactagctagtgcttagcatggcttattcagaataaattccactggattaatctgatctcatgagacagtgacatacttgacaaatgtcgggctgtgggtatatgagaagaggaaacaaagatacaatatgtaaacttatgtcaatgatcagggtacatttaaaactagcatcatgttagtttattctagacacatgaacatataccacttttcaaaa

SEQ ID NO: 51077 - DNA, 561 bp, Homo sapiens
taaaaagaaatagcgtttaggctaaaaagggaactgctacctctcctaaaatcagaaagatgttacagtaattctccattctctagaattatcaagaagcacctttgtgatgatttacttttgctcttgsgagtgtgagcccgtgtagtcgtggaaccatcaattagaatggttgctttctgatcccaaagtcactcgttctgaaaacaatatttttcataaatttgaaagtgagaagttttgatcttgccattcccaagtaactctcttaataagaggcatcagcatgcttcagtgacagctgtcaccttccattgctgagagtcatctttgagttctctatttcactccctacactccaatttagctgcagttctcttggccagtcctatgaaatacatccatggcctaacgacttctcaccactactaccactcatgctgacagcattctcacctaagtcactaccttttttcactggattagagtagcctcccaatttatttgctcacataacctatttattctacacagtgcaccagatacacccctttgaaatgc

SEQ ID NO: 51078 - DNA, 561 bp, Homo sapiens
taaaaagaaatagcgtttaggctaaaaagggaactgctacctctcctaaaatcagaaagatgttacagtaattctccattctctagaattatcaagaagcacctttgtgatgatttacttttgctcttgcgagtgtgagcccgtgyagtcgtggaaccatcaattagaatggttgctttctgatcccaaagtcactcgttctgaaaacaatatttttcataaatttgaaagtgagaagttttgatcttgccattcccaagtaactctcttaataagaggcatcagcatgcttcagtgacagctgtcaccttccattgctgagagtcatctttgagttctctatttcactccctacactccaatttagctgcagttctcttggccagtcctatgaaatacatccatggcctaacgacttctcaccactactaccactcatgctgacagcattctcacctaagtcactaccttttttcactggattagagtagcctcccaatttatttgctcacataacctatttattctacacagtgcaccagatacacccctttgaaatgc

SEQ ID NO: 51079 - DNA, 561 bp, Homo sapiens
taaaaagaaatagcgtttaggctaaaaagggaactgctacctctcctaaaatcagaaagatgttacagtaattctccattctctagaattatcaagaagcacctttgtgatgatttacttttgctcttgcgagtgtgagcccgtgtagtcgtggaaccatcaattagaatggtkgctttctgatcccaaagtcactcgttctgaaaacaatatttttcataaatttgaaagtgagaagttttgatcttgccattcccaagtaactctcttaataagaggcatcagcatgcttcagtgacagctgtcaccttccattgctgagagtcatctttgagttctctatttcactccctacactccaatttagctgcagttctcttggccagtcctatgaaatacatccatggcctaacgacttctcaccactactaccactcatgctgacagcattctcacctaagtcactaccttttttcactggattagagtagcctcccaatttatttgctcacataacctatttattctacacagtgcaccagatacacccctttgaaatgc

SEQ ID NO: 51080 - DNA, 561 bp, Homo sapiens
taaaaagaaatagcgtttaggctaaaaagggaactgctacctctcctaaaatcagaaagatgttacagtaattctccattctctagaattatcaagaagcacctttgtgatgatttacttttgctcttgcgagtgtgagcccgtgtagtcgtggaaccatcaattagaatggttgctttctgatcccaaagtcaytcgttctgaaaacaatatttttcataaatttgaaagtgagaagttttgatcttgccattcccaagtaactctcttaataagaggcatcagcatgcttcagtgacagctgtcaccttccattgctgagagtcatctttgagttctctatttcactccctacactccaatttagctgcagttctcttggccagtcctatgaaatacatccatggcctaacgacttctcaccactactaccactcatgctgacagcattctcacctaagtcactaccttttttcactggattagagtagcctcccaatttatttgctcacataacctatttattctacacagtgcaccagatacacccctttgaaatgc

SEQ ID NO: 51081 - DNA, 561 bp, Homo sapiens
taaaaagaaatagcgtttaggctaaaaagggaactgctacctctcctaaaatcagaaagatgttacagtaattctccattctctagaattatcaagaagcacctttgtgatgatttacttttgctcttgcgagtgtgagcccgtgtagtcgtggaaccatcaattagaatggttgctttctgatcccaaagtcactygttctgaaaacaatatttttcataaatttgaaagtgagaagttttgatcttgccattcccaagtaactctcttaataagaggcatcagcatgcttcagtgacagctgtcaccttccattgctgagagtcatctttgagttctctatttcactccctacactccaatttagctgcagttctcttggccagtcctatgaaatacatccatggcctaacgacttctcaccactactaccactcatgctgacagcattctcacctaagtcactaccttttttcactggattagagtagcctcccaatttatttgctcacataacctatttattctacacagtgcaccagatacacccctttgaaatgc

SEQ ID NO: 51082 - DNA, 561 bp, Homo sapiens
taaaaagaaatagcgtttaggctaaaaagggaactgctacctctcctaaaatcagaaagatgttacagtaattctccattctctagaattatcaagaagcacctttgtgatgatttacttttgctcttgcgagtgtgagcccgtgtagtcgtggaaccatcaattagaatggttgctttctgatcccaaagtcactcgttctgaaaacaatatttttcataaatttgaaagtgagaagttttgatcttgccattcccaagtaactctcttaataagaggcatcagcatgcttcagtgacagctgtcaccttccattgctgagagtcatctttgagttctcyatttcactccctacactccaatttagctgcagttctcttggccagtcctatgaaatacatccatggcctaacgacttctcaccactactaccactcatgctgacagcattctcacctaagtcactaccttttttcactggattagagtagcctcccaatttatttgctcacataacctatttattctacacagtgcaccagatacacccctttgaaatgc

SEQ ID NO: 51083 - DNA, 547 bp, Homo sapiens
taaaatttttcacttactgttatttacatttttgaatataggttgctatttatatcagttttttgtttttttgttttttttttttgagacrcagtcttgctctgttgcccaggctggagtgcagtggcgtgatcttggctcactgcaatctctgcctccaaggttcatgccattctcctgcctcagcctcccaagtagctgggactacaggtgcccgccacaatgcccggctaatttttttgtatttttaatagagacacggtttcaccatgttagccaggatggtctcgatctcctgacctcgtgatccactcgcctcagcctcccaaagcgctgggattacaggcgtgaaccaccgtgcctggcctatttatatcagttttaacaaataattttattttgatgtaaactgtggatggcgcattttacattgacactattttctgaaaaaatatatgtaaaaaaactagtttggctattagcaaattactatattttcaatctttctacttttcatttatatttaacttgaagaaatataaattta

SEQ ID NO: 51084 - DNA, 557 bp, Homo sapiens
actgagctcccacctccttggctgcagcacctgattaaagctttcttccttggcaaaacctgtccttttagtgattggctttctgtgcagcaagcagcaggacctagacgatacccctgatgtttcagtaacaatagagcttggctatttaaatctttataatacaatgaatatttaaaacattattgagacttcagtattttcttggtctgattatccccaccaagactgtgagaacagtatcatacaccctattaatcaaggccttgaataagtatttttttctgaactcttcttaaggtacttagtcagcaattagtaagtgacctctgcctccagctgacatacagagattgttaaatggccatgaatccagtaagttgccaataaaattttccagtgggctcaatttactcttccacagaactgggacttaagtttctgaataatatagtaaggtttcaattagttcaataaatttttaataagcacagcttattaataataaggatatcttatatttgaggctttttttyagacagcatagaaataataag

SEQ ID NO: 51085 - DNA, 568 bp, Homo sapiens
ttttcaaaacctgagtgaaggttggtattaagtggcctcccacaacaccaacgaagtgtctaaagaataaaaataaagacctcattcttaggattttagtgtacaaggcctctaaraaaaacttgacaagggtatcacaagcccgcctatggtacccaaactgcttagcagaagcacccggctctctgaagcctcctggggggatcatgtgttaaagaatctgggattcctttgttggccattttcctcaaggatttctttcttaaggaagaagtgaaattatgcaatgagaaatcttgaaaccctgtaactgtggttacctcttgtcttagtcagttcaggctggtataagagaataccataggctcagtggcttaaacaacagaagtttctttctcagttctgtagggtggaactcttagataagggtgctggcatactaggtatatggtgagggccgtcttcctaatttatggatagcatcttctcattgtatcctcatgtggtgggatcatgtctctcgtgtctcttcttataggggcactaatcccattcatgagaacactct

SEQ ID NO: 51086 - DNA, 531 bp, Homo sapiens
agtcacaggaagaggagagaaaggagaaaggaaaagagagaaacattgaagagacaaagagagaagacaggagcattctgcatgcttatagcttaagaaaagagcagtcagcccataatctcctatcactgtgaataccttggccgaggcctgtgtgttggtggcttgtcagcatataaattcactctgatttttagttggaaggctccagatgtcctggttacattacagtgctcctctcttcactgtggtagygttattacatgcatctctataagaggctcctgcaaaggcaggtatttgatgcctaaatttaaatctccactttgctcccaaatgtttacaaccattgaacatctcatatgggacaaagtcactatgtacgtctatctaaaagcactgctttctcattgaaaggcattcgaaagggaatgccccatcgtggggaattgagaagacatatttccttatgaagattcttgcagaagttagcttttaacttggatacaactctactacttggttaaaaaa

SEQ ID NO: 51087 - DNA, 490 bp, Homo sapiens
tgtagtccccagaccagccccatccacatcaacctgggaacttgttagaaatgcaaattcttagactccacccaagacctactgaacgggatactctagggggtgaggcccagcatgctcttttaccatgttctccaggagactctgatgcatgctaaaattggagaatcattgttcttgattcttagatgtgtgaagtgcttgaggacccaagctcaggctttgattctcaagggacctcaaaaaccctttgaattggcagtgtgatcttcaatctcccaaagaagtatttcccagagaaatacggtcttggttttctgtaacaaactttcaagkgtagacaggtaagattttttgagtgcaataaccagatacatgtactgtggtaagtacttatcccattgtagtatcaatagtcaatacatggctggacgtggtggctcacacctgtaatcctagcactttgggaggctgaggctggcggatcacc

SEQ ID NO: 51088 - DNA, 568 bp, Homo sapiens
aaccctgctttgctgatgaggaaacttacacttttgagagggtgagtagcttggccaggatgacacaattagtaaatgcaacaactggatgtgttatagcccagctctgaccaacccggaaaccctcttttttaaattgatgctgtctccctaaaatgtgcagcgttaagttttataagtggattttcttgttctttacttgggaagaatgtggaaggagaggaagaggaggcctggagttccttcatcttggtatgtgttgcagaggaagcaagataaaggaaaactatttattctagcaacactgaagwctaaattttgcctgcttagtagttaatcttagagcttgctctggttgtctatgcatatggcaccttacataagtatcttttgatgtgacattgtctgaagatgatgtgagtaggacgacactgtccagaaggtttaaggatagatctcaatagcattgtgttgaattaaaaagaaagaaaaaccagtgtcgagcaatatagaccttgtgatgccgtttatataaaaatctaaaaccacatagaatatgtccatttgt

SEQ ID NO: 51089 - DNA, 586 bp, Homo sapiens
ggcggaggctgcagtgagccgagatcatgtgacttcactccagcctggatgacagacggagactccatctcaaaaaaaagaaaaaaaaagaaaaaaaaatagggagagagagaagagaggcttcaaggaagctcttgaacacagaacaatgtagcgtgtgggtgtgggtgtgggtgtgggttgcccaaagctggcccaatgaaaaatggggttgagccaaccttcaggccagagcttcctctactgccggcctggcaccattcacgaaccaacacacagccyggatggatagctttcctgggccttccttttaaaaagtgtgagttctccttcatcgaagttataggaaagcaatagagacttgactgaaagaaaaggattcactccacaccacattggagaaacaagctcagaacaataggtctgcaattctcaaagtgctaattcttgccttctggatttttttgtttgtttttagttcagtggaatttttatttatttattttttaatttttattttttagtaggggagaacatgaacgcagtcccctaccaccagaaattatgtagtcgagtttcccacatt

SEQ ID NO: 51090 - DNA, 545 bp, Homo sapiens
acaggcgtgtaccaccatgctcagctactttttgtagttttagtagagatggggtttcatcattttggccaggcttgtctcaaactcttggcctcaagtgatctgcctgcctcggcctcccaaagtgctgggattacagacgtgagccaccacgcttagcccagagtgyacccttctgctgccattgtttcaggagcaaattcagttaattgaaggacagtcctcggggtcagttctcaggctagagttagcaccctgggaggatggtggatggggtggagagaggggcttttctagctaaatgtaagcaatgggcctgttctttaaatatccttgcagctggatttcagtgtctcacccctctggagctgtgaggacttcgactagattgttttccttcaagaaaaaaaaattcatgaattgcttaaggccctacaattcttgtttcatctatatattccctatgtctgcaattatgaccaacacacaataggtgcttactaaaagttcaatgactagatgaccaggtgaattgtaatttcccc

SEQ ID NO: 51091 - DNA, 596 bp, Homo sapiens
cactgaggctttggagtgttaattaaatgatttaactgtactctgctctcatcactctttgaaatgccagttctttatctgctttttaccctcaaaatcttcagaaactaccttaaataggataccacacctgtccctggtagagaagaattgccttttagaakgcagatgcaggcggctggaactggcctgtgggctcaaggggaataattactctctgatttttcttttgggtaaatgcaggttttcatatattggattttctcagagtgagaaaagaaagagtgacaatggaatgaagaaaaatgaaacaagatggagaaattgaggacgataattgtttattgaaccaatgatgaatgaatgagtaaattgtgagggcaaaacaccaaaaaatagtaacatcatcctacaacctacaatatacgccgttttgtcatatgtcactcataataaaaagagaaaaggaacgggtgtggtggctcacacctgtaatcccagcattttgggaggctgaggtgggagactctctcaaggctaggagttcaaggccagcctgggcaaaatagcgagaccctggctctacaaaaaaaaaa

SEQ ID NO: 51092 - DNA, 596 bp, Homo sapiens
cactgaggctttggagtgttaattaaatgatttaactgtactctgctctcatcactctttgaaatgccagttctttatctgctttttaccctcaaaatcttcagaaactaccttaaataggataccacacctgtccctggtagagaagaattgccttttagaaggcagatgcaggcggctggaactggcctgtgggctcaaggggaataattactctctgatttttcttttgggtaaatgcaggttttcatatattggattttctcagagtgagaaaagaaagagtgacaatggaatgaagaaaaatgaaacaagatggagaaattgaggacgataattgtttattgaaccaatgatgaatgaatgagtaaattgtgagggcaaaacaccaaaaaatagtaacatcatcctacaacctacaatatacgccgttttgtcatatgtcactcataataaaaagagaaaaggaaygggtgtggtggctcacacctgtaatcccagcattttgggaggctgaggtgggagactctctcaaggctaggagttcaaggccagcctgggcaaaatagcgagaccctggctctacaaaaaaaaaa

SEQ ID NO: 51093 - DNA, 596 bp, Homo sapiens
cactgaggctttggagtgttaattaaatgatttaactgtactctgctctcatcactctttgaaatgccagttctttatctgctttttaccctcaaaatcttcagaaactaccttaaataggataccacacctgtccctggtagagaagaattgccttttagaaggcagatgcaggcggctggaactggcctgtgggctcaaggggaataattactctctgatttttcttttgggtaaatgcaggttttcatatattggattttctcagagtgagaaaagaaagagtgacaatggaatgaagaaaaatgaaacaagatggagaaattgaggacgataattgtttattgaaccaatgatgaatgaatgagtaaattgtgagggcaaaacaccaaaaaatagtaacatcatcctacaacctacaatatacgccgttttgtcatatgtcactcataataaaaagagaaaaggaacgggtgtggtggctcacacctgtaatcccagcattttgggaggctgaggtgggagactctctyaaggctaggagttcaaggccagcctgggcaaaatagcgagaccctggctctacaaaaaaaaaa

SEQ ID NO: 51094 - DNA, 443 bp, Homo sapiens
agcactctgggaggcggagataggtggatgacttgagttcaggagttcgagaccagcctggccaaatggtgaaaccctgtctatactaaaaatacaaaagttagccagrcatggtggcaggtgcctgtaatcccagctgtttggaaggctgaggcaggtgcctgtaatcccagctgtttggaaggctgaggcaggagaatcccttgaacctgggaggcggaggttgcagtgagccaagatcatgccattgcactccagcctgggtgacaagagcaaaacagtttcaaaagaaagaaagaaagaaagaaaagggcaagggtcccttgactcaagtccactaccggaatgggtaaaatgaccagcgggtaaagaaaagaaagatcttcagagtcaatggttttggggaaagatgaatgagtccttagatgaatagatgatggttt

SEQ ID NO: 51095 - DNA, 629 bp, Homo sapiens
agggggcagaatgaggcttgatggggagtaggacagcaggaagctctgggtggcagagacccttcacctgtagtgcgctggcaggacctctcaagggtgggtggggctgcaccctgggggttcaccccactctctctttccccccgtggctgaccctaggctccaggccacaggcagcctccttggccccagccacaacgaggccctgtcccggtggaggtcagcgcgggtttgcagcccttgtttctcatagctgatctgcctgctttggacaggcacctggcccagaaccctttcatttgcgactgtaacctcaagtggctggcagacttcctgcgcaccaatcccatcgagacgagtggtgcccgctgtgccagtccccggcgcctcgccaacaagcgcatcgggcagatcaagagcaagaagttccggtgctcaggtacctgcccgcctgcccacctgcccacctgtccacctacctgcctgcccacctgcccaccggcctacttgtccacctgcatacctgcccrcctgcccacctgtccacctacccgcctgctcacttgcctgcctgcctacctgtccacctgcatacctgcccgcctacccacctgttcacctacctgcct

SEQ ID NO: 51096 - DNA, 1196 bp, Homo sapiens
tggaggaccctgcaaaagaagactgygggtcagtcaaatgacagggacagtgtgctggaatctgagagggtgtcaggagaccagggagaccatcaaagcatgcaggacctgccaagctggcctctgctttcccggaggcttggtgggccccagtgggctggtctatgcttttctggaggcctggcccctaggtgttaccccacgtaggcaaaagtgaatgttcgggggatgccctatactctcctaggagtctgtgggctacaagaacccctgtggggttcagggtcaaggcttagtctgccggtgaagccttgaatctccttcaaaggaaccccccaggagtccaagatgcacccagcactcagttacctaccggggggccgggccgccctctggggccgggaggaccctgggggaacaagagaagaagagtgagccctggtccacagggtcttcatctctccccaacccagtccctcctcaagcagacctgggacccagggacaatggttcctctggcacagacgggatgacggaggtccggagggagagaatgtaccaccgggaggagaatgcagggtgcccgccccacgccccgccccacagccctcatgcccagcccactcaccctcggaccttgcaatccctggagggagacagaagcaggggagagagttagggaacctggctgagccatggcccaactctgggagcccacccctcccccgcccctgcagtgctgcatccctcagccccagcccatccacttacccagtccccacggctgcctttgtcacccttcggaccctgcaacaaaccacggcccagtgagacagggcccagaggtgaagccccatttccagatgaggaaactgaggctcagactggcactgagtcacagagacaatctggagccaggaaggcaaggggaccccggagtcttcctgtccaatccccacacataccgggagtcccgaaggtcccaggattccgaggggcccgacgatgccttcctttccctaaaggagacagaaaggctcatgtgtccttgttccagggcctggggaacagacacggggagcggggtggagggcagcccgagcgtcgcaagggagtagaagggagaccatctgaagcgggcccaggccatgcatctcctgagcccctcatttgtgcctaggggtggacttcaagag

SEQ ID NO: 51097 - DNA, 1196 bp, Homo sapiens
tggaggaccctgcaaaagaagactgcgggtcagtcaaatgacagggacagtgtgctggaatctgrgagggtgtcaggagaccagggagaccatcaaagcatgcaggacctgccaagctggcctctgctttcccggaggcttggtgggccccagtgggctggtctatgcttttctggaggcctggcccctaggtgttaccccacgtaggcaaaagtgaatgttcgggggatgccctatactctcctaggagtctgtgggctacaagaacccctgtggggttcagggtcaaggcttagtctgccggtgaagccttgaatctccttcaaaggaaccccccaggagtccaagatgcacccagcactcagttacctaccggggggccgggccgccctctggggccgggaggaccctgggggaacaagagaagaagagtgagccctggtccacagggtcttcatctctccccaacccagtccctcctcaagcagacctgggacccagggacaatggttcctctggcacagacgggatgacggaggtccggagggagagaatgtaccaccgggaggagaatgcagggtgcccgccccacgccccgccccacagccctcatgcccagcccactcaccctcggaccttgcaatccctggagggagacagaagcaggggagagagttagggaacctggctgagccatggcccaactctgggagcccacccctcccccgcccctgcagtgctgcatccctcagccccagcccatccacttacccagtccccacggctgcctttgtcacccttcggaccctgcaacaaaccacggcccagtgagacagggcccagaggtgaagccccatttccagatgaggaaactgaggctcagactggcactgagtcacagagacaatctggagccaggaaggcaaggggaccccggagtcttcctgtccaatccccacacataccgggagtcccgaaggtcccaggattccgaggggcccgacgatgccttcctttccctaaaggagacagaaaggctcatgtgtccttgttccagggcctggggaacagacacggggagcggggtggagggcagcccgagcgtcgcaagggagtagaagggagaccatctgaagcgggcccaggccatgcatctcctgagcccctcatttgtgcctaggggtggacttcaagag

SEQ ID NO: 51098 - DNA, 1420 bp, Homo sapiens
tttcctcagtatcaggcccatagctacccacttctcctctcccttcctctttctccatctcttctccttggtcttttctcattgtgaactctcactactccctcctgactccggcttagagcagaaggagctgcagctggcctgaggcacctcaaggaggggcggctggtttctgtgcagtgaagacaacttcctgaagagctatgtgactgtgctgaacccgcttctgtaaaatgggttcaccaataacaggttactgtagaattatagaggatagggtgtaaaactgtcctataaacggkgaagaattggacacatgtggtgctcagttttgtattcagtgggagttggggtcaatgttatgttgatattgttagaataactgccagtcttaggagcatttatcagtagaggcctaacagcaataatgtgaggttgtgtgtttgcttcatttgaaatggtacagttgcctgctacttcacaaatacagggagaagaaaggagaagtgaggtacaaggcgggtacgtgtgcatgtttcagtgtgtgtgtgtttgtgtgtgtgtagagagagagagagaaatggaggtacaatctggcatttgttagaaatcgcacaatcatagaacactagggatgggccttaaagaatctatcctcttcactctatggacagggacactaaagctcagacagaaaaaagctaattttccaaggtcaatcactagtcagttgggggccacacggggcatggtctccaggtcttctggtccaagtccaaggcttccattgtcagcccatgctcagccctattgtacaaaccacgatgtgcaaggagcagtggggagtcagagggacagatgtgacctttcgtgtcagggtgtcccagattatttgggaaggccacacctacaaccgtgacccagtcaaagacgagcctgaaacagtactgactgggatgtaagatccagggatacacctcagggacctgtaagaatgtaggtgcaggagcagccatccaggcctgggtggtaggggaagacttgaggaaatagctgaaggagtggacgtggacagttagaataataaaaaacaagcaattaagtaacatttccttcaagtgatgctttttgctccaattcttgcctagaggtggtggtttgggattttaccagcatctctctttggaattcaaatgtaccaccagtacttcgcttttcctgaaaagcctaagttacaaattgatagcttctaaaacctctctgcaaagggttaaatgtctgtgttggaaaagagaaactcatcagttaatatctacttcttaatcagcccaaggtgctgaaaaaaaggccattcaccaagtggttagcaaagctaatttgtcattctggcattttgacctactgtgcttttaaggcatta

SEQ ID NO: 51099 - DNA, 579 bp, Homo sapiens
tgattctgtgtrtagtttgcctttccagatccgtgccatttaagctagaaaaggggtcagttttgagatgttgtgaaaatgttgaaaggctcctcgttattagtgggaagtatctgatgttgccagagactgaactggggcgcggggagcactacggctgctagacactgcctcactgcgctgtgggtgggggaggtgctggattcagtcttactgcctaatgatttgtgaggatttgtgttttcagagtaacatgtttaccttatgttatcagttcctaatatgtgacgtatgggccacagatgctggtgtattatttcacatgcatttatatagattgttttcagggaattcagaaattctgttatctctacactagtgattgtgctttcttgatttttctcttttcattattcttaaatcctcccttttttaatttgcatctcagttcgtttatactcgggaagtgcaagacatggctactagaaagagatgtcaagagaaccggaatccagtaggctacaatttggcaaatcttagcttaaaacttcctaaatgttgaccacagtggatgcaaat

SEQ ID NO: 51100 - DNA, 579 bp, Homo sapiens
tgattctgtgtgtagtttgcctttccagatccgtgccatttaagctagaaaaggggtcagttttgagatgttgtgaaaatgttgaaaggctcctcgttattagtgggaagtatctgatgttgccagagactgaactggggcgcggggagcactacggctgctagacactgcctcactgcgctgtgggtgggggaggtgctggattcagtcttactgcctaatgatttgtgaggatttgtgttttcagagtaacatgtttaccttatgttatcagttcctaatatgtgacgtatgggccacagatgctggtgtattatttcacatgcatttatatagattgttttcagggaattcagaaattctgttatctctacactagtgattgtgctttcttgatttttctcttttcattattcttaaatcctccyttttttaatttgcatctcagttcgtttatactcgggaagtgcaagacatggctactagaaagagatgtcaagagaaccggaatccagtaggctacaatttggcaaatcttagcttaaaacttcctaaatgttgaccacagtggatgcaaat

SEQ ID NO: 51101 - DNA, 579 bp, Homo sapiens
tgattctgtgtgtagtttgcctttccagatccgtgccatttaagctagaaaaggggtcagttttgagatgttgtgaaaatgttgaaaggctcctcgttattagtgggaagtatctgatgttgccagagactgaactggggcgcggggagcactacggctgctagacactgcctcactgcgctgtgggtgggggaggtgctggattcagtcttactgcctaatgatttgtgaggatttgtgttttcagagtaacatgtttaccttatgttatcagttcctaatatgtgacgtatgggccacagatgctggtgtattatttcacatgcatttatatagattgttttcagggaattcagaaattctgttatctctacactagtgattgtgctttcttgatttttctcttttcattattcttaaatcctcccttttttaatttgcatctcagttygtttatactcgggaagtgcaagacatggctactagaaagagatgtcaagagaaccggaatccagtaggctacaatttggcaaatcttagcttaaaacttcctaaatgttgaccacagtggatgcaaat

SEQ ID NO: 51102 - DNA, 579 bp, Homo sapiens
tgattctgtgtgtagtttgcctttccagatccgtgccatttaagctagaaaaggggtcagttttgagatgttgtgaaaatgttgaaaggctcctcgttattagtgggaagtatctgatgttgccagagactgaactggggcgcggggagcactacggctgctagacactgcctcactgcgctgtgggtgggggaggtgctggattcagtcttactgcctaatgatttgtgaggatttgtgttttcagagtaacatgtttaccttatgttatcagttcctaatatgtgacgtatgggccacagatgctggtgtattatttcacatgcatttatatagattgttttcagggaattcagaaattctgttatctctacactagtgattgtgctttcttgatttttctcttttcattattcttaaatcctcccttttttaatttgcatctcagttcrtttatactcgggaagtgcaagacatggctactagaaagagatgtcaagagaaccggaatccagtaggctacaatttggcaaatcttagcttaaaacttcctaaatgttgaccacagtggatgcaaat

SEQ ID NO: 51103 - DNA, 579 bp, Homo sapiens
tgattctgtgtgtagtttgcctttccagatccgtgccatttaagctagaaaaggggtcagttttgagatgttgtgaaaatgttgaaaggctcctcgttattagtgggaagtatctgatgttgccagagactgaactggggcgcggggagcactacggctgctagacactgcctcactgcgctgtgggtgggggaggtgctggattcagtcttactgcctaatgatttgtgaggatttgtgttttcagagtaacatgtttaccttatgttatcagttcctaatatgtgacgtatgggccacagatgctggtgtattatttcacatgcatttatatagattgttttcagggaattcagaaattctgttatctctacactagtgattgtgctttcttgatttttctcttttcattattcttaaatcctcccttttttaatttgcatctcagttcgtttatactcgggaagtgcaagacatggckactagaaagagatgtcaagagaaccggaatccagtaggctacaatttggcaaatcttagcttaaaacttcctaaatgttgaccacagtggatgcaaat

SEQ ID NO: 51104 - DNA, 500 bp, Homo sapiens
tttttttgagacggagtttcactcttgttgcccaggctggagtacaatggcgcgatctcggttcactgcaacctccgcctccagggttcaagcaattctcctgcctcagcctcccgagtagctggaattacagccatgcaccaccacacccagytaattttgtatttttagtagagacggggtttctccatgttggtcaggctggtctcaaactcccaacctcaggtgatccacaagccttggcctcccaaagtgctcggattacaggcatgagccaccgtgcctggcccagctataattctttaagccccatctgctgatttagtcctatactccttttcagaaataaccttgggcaagaggaagctactcagcctgactctgtattaagccccttggctatgagtctcacccatcagcagcagttgttatagaaattggaatctcatctcatgtccaaacccctggttgtttaattcaactttctattttcaaatgtc

SEQ ID NO: 51105 - DNA, 594 bp, Homo sapiens
gaaaaagaaaaagaaagaaagaaagaaagaaggaaagggagagagagaaaagaaaggaagaaaagaaaccaggtcagtcaaaatggcccagactaaaacttcttgatagaagacttatytctcaccttcttgctcaaaaaatttaagggtcgttggtacaacctttccacatgtgctgcattccacccctgctaaaatcctgcctttcgtgttgaattcaaacctcttcaggaaatgatccagggtgtaaaaggaagatagtctacgattttgccctcatttcctgcagaaagcatttagatgtttgttagggaatatacatataaatatacatatatatgtgggtgtatatacgtgtgtgtgtatatgtgtgtgtgtgtgtgtgtgtgtgtgtgtgtatatatatatataaaacattctactttaaaaaagaaaatacaggtttcaaaaaaaaccctattcaatcacaaacacattgcagtcagtagctatgcttcagactacaaatcatagtgaaagccagcttctatctatctatgtaacccataaaatgcctttttaactcaatattgttagcagcattctattccagat

SEQ ID NO: 51106 - DNA, 594 bp, Homo sapiens
gaaaaagaaaaagaaagaaagaaagaaagaaggaaagggagagagagaaaagaaaggaagaaaagaaaccaggtcagtcaaaatggcccagactaaaacttcttgatagaagacttatctctcaccttcttgctcaaaaaatttaagggtcgttggtacaacctttccacatgtgctgcattccacccctgctaaaatcctgcctttcgtgttgaattcaaamctcttcaggaaatgatccagggtgtaaaaggaagatagtctacgattttgccctcatttcctgcagaaagcatttagatgtttgttagggaatatacatataaatatacatatatatgtgggtgtatatacgtgtgtgtgtatatgtgtgtgtgtgtgtgtgtgtgtgtgtgtgtatatatatatataaaacattctactttaaaaaagaaaatacaggtttcaaaaaaaaccctattcaatcacaaacacattgcagtcagtagctatgcttcagactacaaatcatagtgaaagccagcttctatctatctatgtaacccataaaatgcctttttaactcaatattgttagcagcattctattccagat

SEQ ID NO: 51107 - DNA, 546 bp, Homo sapiens
ttcaaatgccattcctttttaccaagagatcacaatttgcacaaccaaggaaaactttagagaaccactcaaaacctcatataattacatgctaagatgtactacgtgataagactgccaacgattgttactttggaatcacacaccctaaaataatcagtgtgagccagaaggtaactaagtggtaagtgggaagatgtcttaaaaccagaattgattttcctcactgaattgttaatgcctaaagagaggtggttcttaaaattktggagctgtgttaccctcccccaaatgaaaaggctacaagtatgtcagtattttctcagtgatttgctttgaacttatctgtgcagaatcatccgcaacgctcattaacagtgctgggagttggatatgccacagtgaatttcctgattttctaattcactggtgattattagctaaggagctacttgcagacaataatacatattggaagtatgacagtctgtgaatggaaatatcaaaaagagactgtttcattatgtcttttttctccatatagga

SEQ ID NO: 51108 - DNA, 658 bp, Homo sapiens
ggaaaataatttagagaatgtgttgctaccagactctccttacaaaataaatttttttaatttataaggataaaaccaagtgaccctaaacagtattsaaatacacacacacacacacacacacacagagagagacacccacccaagaatgctggtgaaggtggccgggcgcggtggctcacgcctgtaatcccagcactttgggaggccgaggcaggtggatcacaaggtcaggagatcgagaccatcctggctaacacagtgaaaccccatctctattaaaaatagttagcttggcgtggtggcgggcgcctgcagtcccagctactcgggaggctgaggcaggagaatggcgtgaacccgggaggtggagcttgcagcgagacgagatcgcgccactgcactccagcctgggcgacaaagcgagactctacctcaaaaaaaaaaaaaaaagaatgctggtgaaggtaattgtgcgcttactaatgacagcatgaaaacacttatgtcttctcctcttggctgattcaaaagcaattgtatagagcctaagaaatgaccccctccatatatggtaatgacccaagtccgcaaaatgggaaacagacagtctctctcacaaatgttgttgagaaactgaatattcacatgtaaaata

SEQ ID NO: 51109 - DNA, 658 bp, Homo sapiens
ggaaaataatttagagaatgtgttgctaccagactctccttacaaaataaatttttttaatttataaggataaaaccaagtgaccctaaacagtattgaaatacacacacacacacacacacacacasagagagacacccacccaagaatgctggtgaaggtggccgggcgcggtggctcacgcctgtaatcccagcactttgggaggccgaggcaggtggatcacaaggtcaggagatcgagaccatcctggctaacacagtgaaaccccatctctattaaaaatagttagcttggcgtggtggcgggcgcctgcagtcccagctactcgggaggctgaggcaggagaatggcgtgaacccgggaggtggagcttgcagcgagacgagatcgcgccactgcactccagcctgggcgacaaagcgagactctacctcaaaaaaaaaaaaaaaagaatgctggtgaaggtaattgtgcgcttactaatgacagcatgaaaacacttatgtcttctcctcttggctgattcaaaagcaattgtatagagcctaagaaatgaccccctccatatatggtaatgacccaagtccgcaaaatgggaaacagacagtctctctcacaaatgttgttgagaaactgaatattcacatgtaaaata

SEQ ID NO: 51110 - DNA, 658 bp, Homo sapiens
ggaaaataatttagagaatgtgttgctaccagactctccttacaaaataaatttttttaatttataaggataaaaccaagtgaccctaaacagtattgaaatacacacacacacacacacacacacagagagagacacccacccaagaatgctggtgaaggtggccgggcgcggtggctcacgcctgtaatcccagcactttgggaggccgaggcrggtggatcacaaggtcaggagatcgagaccatcctggctaacacagtgaaaccccatctctattaaaaatagttagcttggcgtggtggcgggcgcctgcagtcccagctactcgggaggctgaggcaggagaatggcgtgaacccgggaggtggagcttgcagcgagacgagatcgcgccactgcactccagcctgggcgacaaagcgagactctacctcaaaaaaaaaaaaaaaagaatgctggtgaaggtaattgtgcgcttactaatgacagcatgaaaacacttatgtcttctcctcttggctgattcaaaagcaattgtatagagcctaagaaatgaccccctccatatatggtaatgacccaagtccgcaaaatgggaaacagacagtctctctcacaaatgttgttgagaaactgaatattcacatgtaaaata

SEQ ID NO: 51111 - DNA, 658 bp, Homo sapiens
ggaaaataatttagagaatgtgttgctaccagactctccttacaaaataaatttttttaatttataaggataaaaccaagtgaccctaaacagtattgaaatacacacacacacacacacacacacagagagagacacccacccaagaatgctggtgaaggtggccgggcgcggtggctcacgcctgtaatcccagcactttgggaggccgaggcaggtggatcacaaggtcaggagatcgagaccatcctggctaacacagtgaaaccccatctctattaaaaatagttagcttggcgtggtggcgggcgcctgyagtcccagctactcgggaggctgaggcaggagaatggcgtgaacccgggaggtggagcttgcagcgagacgagatcgcgccactgcactccagcctgggcgacaaagcgagactctacctcaaaaaaaaaaaaaaaagaatgctggtgaaggtaattgtgcgcttactaatgacagcatgaaaacacttatgtcttctcctcttggctgattcaaaagcaattgtatagagcctaagaaatgaccccctccatatatggtaatgacccaagtccgcaaaatgggaaacagacagtctctctcacaaatgttgttgagaaactgaatattcacatgtaaaata

SEQ ID NO: 51112 - DNA, 643 bp, Homo sapiens
ccggaaacattattgagtagcacagatccatacaattcaaagttacaaaatttcatcagcagaaatagcgactgaaaggaaccaaggacatggaaatatatcaaagggcccccaaaatctgttcttttcatttatcttaactcactcttcctatttgtcctgaactcatttacactgcttgcttttactcccttccttgacaaccgtattttatatactgaatacatgtgttgaaataaactactcttatctcattcttttaatatcttgttatattgagaacagtgcatacattttttcccaaaagggaaatatgacaatgggaaggaaacatccacacaaaatagattttttgcctttagctgaattaagttacaatgcatgatgatgttaattactccaaagtaaaatatcacagaatgttattttattgcaaatgcagaattacttttgaratattttgagcatatctgttgaaaacagatcataacttttaacattttgatatctagaggcagattatttctactattagcaaatataatatacaaaataaagtaggccaaaaattctcatttattattatcagtcacatttctctagatagctaatttgctatttaatatttaatatatttgctatt

SEQ ID NO: 51113 - DNA, 591 bp, Homo sapiens
tttcagaactgtgtccttgacttacccagtaaagatagtaacaataataaacatttgacagtgatatggtttggctgtgtcccctctcaaatctcatcttgaattgtagctcccacaattcccacgtgtcgtgggagggaccgaatgggaggtaaatgaatcatgggggtgggtctttgccctgatgttcttgtgacagtgataagtctcactagatctgatggttttataaagaggagttctcctgcacaagctatctatctttgcctgccgccatccacgtatgacatcacttgttcctccttgccatccgccatgattgaraggccttcccagccacgtggaactctgagtccattaaacctctttttcttcccagtcttgggtatgtgtttaccaccagtgtgaaaacgggctaatacagattggtgatatatatattaatattaaacttttttacaaagaacatcaaaagcatgcttcattttttctcacaaccccttgggaaaaacatgcaaacatcaccattctgattgtagctagataagcagaagaatagcatgattaagcatccaagttatgtctctcaat

SEQ ID NO: 51114 - DNA, 591 bp, Homo sapiens
tttcagaactgtgtccttgacttacccagtaaagatagtaacaataataaacatttgacagtgatatggtttggctgtgtcccctctcaaatctcatcttgaattgtagctcccacaattcccacgtgtcgtgggagggaccgaatgggaggtaaatgaatcatgggggtgggtctttgccctgatgttcttgtgacagtgataagtctcactagatctgatggttttataaagaggagttctcctgcacaagctatctatctttgcctgccgccatccacgtatgacatcacttgttcctccttgccatccgccatgattgagaggcctycccagccacgtggaactctgagtccattaaacctctttttcttcccagtcttgggtatgtgtttaccaccagtgtgaaaacgggctaatacagattggtgatatatatattaatattaaacttttttacaaagaacatcaaaagcatgcttcattttttctcacaaccccttgggaaaaacatgcaaacatcaccattctgattgtagctagataagcagaagaatagcatgattaagcatccaagttatgtctctcaat

SEQ ID NO: 51115 - DNA, 591 bp, Homo sapiens
tttcagaactgtgtccttgacttacccagtaaagatagtaacaataataaacatttgacagtgatatggtttggctgtgtcccctctcaaatctcatcttgaattgtagctcccacaattcccacgtgtcgtgggagggaccgaatgggaggtaaatgaatcatgggggtgggtctttgccctgatgttcttgtgacagtgataagtctcactagatctgatggttttataaagaggagttctcctgcacaagctatctatctttgcctgccgccatccacgtatgacatcacttgttcctccttgccatccgccatgattgagaggccttcccagccacgtggaactctgagtccaytaaacctctttttcttcccagtcttgggtatgtgtttaccaccagtgtgaaaacgggctaatacagattggtgatatatatattaatattaaacttttttacaaagaacatcaaaagcatgcttcattttttctcacaaccccttgggaaaaacatgcaaacatcaccattctgattgtagctagataagcagaagaatagcatgattaagcatccaagttatgtctctcaat

SEQ ID NO: 51116 - DNA, 591 bp, Homo sapiens
tttcagaactgtgtccttgacttacccagtaaagatagtaacaataataaacatttgacagtgatatggtttggctgtgtcccctctcaaatctcatcttgaattgtagctcccacaattcccacgtgtcgtgggagggaccgaatgggaggtaaatgaatcatgggggtgggtctttgccctgatgttcttgtgacagtgataagtctcactagatctgatggttttataaagaggagttctcctgcacaagctatctatctttgcctgccgccatccacgtatgacatcacttgttcctccttgccatccgccatgattgagaggccttcccagccacgtggaactctgagtccattaaacctctttttcttcccagtcttgggyatgtgtttaccaccagtgtgaaaacgggctaatacagattggtgatatatatattaatattaaacttttttacaaagaacatcaaaagcatgcttcattttttctcacaaccccttgggaaaaacatgcaaacatcaccattctgattgtagctagataagcagaagaatagcatgattaagcatccaagttatgtctctcaat

SEQ ID NO: 51117 - DNA, 601 bp, Homo sapiens
ttttgtatttttagtagagatggagtttctccatgttggtcaggctggtctcaaactcccgacctcaggtgatctgccctcctctgcctcccaaagtgctgagattacaggcatgagccactgcgcctggcgatttcacacttctgatctccggagctgtgggagaataagtttctgttgtgmcaagtcacccagtttgtggtcatctgttatgacagtctgggaaaccaatacacctccagcagctcacggccagtccacctaggactgtgtgtgtatcctgtgggcatcatgcaaaccacccccactcccattccaccttgactgccagcctagggttgtgtccaacagcacagcagatatttgcagggagcagagcaacaggccagggaccggtggaagggcctggctagtggggccaggccaggcccaggtgtctggaaccttgcagatttgctgcaccctggaaatatcctggagataatatttactctaatgtaatttactctcaaatactgtacttctgcctttggtgctttctcccctctacctcctgaccagggatcactagaggccattggggagtgaggagggaaagagc

SEQ ID NO: 51118 - DNA, 614 bp, Homo sapiens
aaccccaacacccatactgtgaaacaatttgtatcagctttattaaccacgatcttgcaaaaaaagctactttattcttgtaacaccctctctggtttgttttttcccactagcaattgcatgaaaagggaaaagcaggaaagtcccaagactgtacaatctaaacaatgcctagggaaacagtctgtgaacttttctagctctacttgaacctatgtatcacaaaagctcgaataattttcaattaggccagtgctaccactacctggaggtataaaatgcatactgcctttttaccaataaacattgtttggtctaggcatcttgtgaagtaagtagactacacaggagttagttactcttactttacaaattaatcaactgagattctgaattaacagatttttcaagaaagagtaaaagagtggttgacttaaacccaaattccctaaaaactagtcccaatattmatccatctccccacatgtaaacatatggtcatgtataaatctttttgtatgtaaattatgctctgtaacccaatcaatatttatttctatcatcaacatccttccatacatcaaagcctactttatcatgcagatagctgcaga

SEQ ID NO: 51119 - DNA, 614 bp, Homo sapiens
aaccccaacacccatactgtgaaacaatttgtatcagctttattaaccacgatcttgcaaaaaaagctactttattcttgtaacaccctctctggtttgttttttcccactagcaattgcatgaaaagggaaaagcaggaaagtcccaagactgtacaatctaaacaatgcctagggaaacagtctgtgaacttttctagctctacttgaacctatgtatcacaaaagctcgaataattttcaattaggccagtgctaccactacctggaggtataaaatgcatactgcctttttaccaataaacattgtttggtctaggcatcttgtgaagtaagtagactacacaggagttagttactcttactttacaaattaatcaactgagattctgaattaacagatttttcaagaaagagtaaaagagtggttgacttaaacccaaattccctaaaaactagtcccaatattaatccatctccccacatgtaaacatatggtcatgtataaatctttttstatgtaaattatgctctgtaacccaatcaatatttatttctatcatcaacatccttccatacatcaaagcctactttatcatgcagatagctgcaga

SEQ ID NO: 51120 - DNA, 298 bp, Homo sapiens
tatatawtttatatatacatttatatatataaatgtatatatataatatatacatttatataggattgctacctatctataaatatatagtataaataaatattatatttatttatttatttatttatttttgagaaggagtctcactctatcgcccaggctggagtgcagtggcgctatctgtcactgcaatctttgcctcccaggttcaagcaattttcctgcctcagcctcctgagtagctgggattacaggcacatgccagctagctgggatcacagggacattagcccaccct

SEQ ID NO: 51121 - DNA, 298 bp, Homo sapiens
tatataawttatatatacatttatatatataaatgtatatatataatatatacatttatataggattgctacctatctataaatatatagtataaataaatattatatttatttatttatttatttatttttgagaaggagtctcactctatcgcccaggctggagtgcagtggcgctatctgtcactgcaatctttgcctcccaggttcaagcaattttcctgcctcagcctcctgagtagctgggattacaggcacatgccagctagctgggatcacagggacattagcccaccct

SEQ ID NO: 51122 - DNA, 298 bp, Homo sapiens
tatataattwatatatacatttatatatataaatgtatatatataatatatacatttatataggattgctacctatctataaatatatagtataaataaatattatatttatttatttatttatttatttttgagaaggagtctcactctatcgcccaggctggagtgcagtggcgctatctgtcactgcaatctttgcctcccaggttcaagcaattttcctgcctcagcctcctgagtagctgggattacaggcacatgccagctagctgggatcacagggacattagcccaccct

SEQ ID NO: 51123 - DNA, 298 bp, Homo sapiens
tatataatttatatatacatwtatatatataaatgtatatatataatatatacatttatataggattgctacctatctataaatatatagtataaataaatattatatttatttatttatttatttatttttgagaaggagtctcactctatcgcccaggctggagtgcagtggcgctatctgtcactgcaatctttgcctcccaggttcaagcaattttcctgcctcagcctcctgagtagctgggattacaggcacatgccagctagctgggatcacagggacattagcccaccct

SEQ ID NO: 51124 - DNA, 570 bp, Homo sapiens
cgctttaagtaacatatcactcaatttatttggtatccactaacagtgaaaccactgagtcacagcatattgctgtagattaaatttttagccacaattctttattcctttctatgtcatttgctatatgactttgcagtttctcttatgagaggcagaatgtaacttcctaaccctaaactttgggcttttatgggatttatattaaccaatgaaatgtgggcagaagtcatagccagtttcaaaccttggccaaaagaaacattgcaagttttctgccatcaccatgaaaagagttttttcccaagtagcttctgttcttttaacctgagctctaggatgaatatatctgatgcaaatctaaccccaatctaccaaaaggagtcaaacccaagtgacatgaagcttgaaggagagccgctattctaagcccagcttagatctctaaattgacttgcagacacwaaagcaaataaaaaaaatttaaaaatgtggttaaaaaccaaataacgtaaaattcaccaactcaaccattttaagtgtaaagttcagtagtgtcaagtatattcc

SEQ ID NO: 51125 - DNA, 570 bp, Homo sapiens
cgctttaagtaacatatcactcaatttatttggtatccactaacagtgaaaccactgagtcacagcatattgctgtagattaaatttttagccacaattctttattcctttctatgtcatttgctatatgactttgcagtttctcttatgagaggcagaatgtaacttcctaaccctaaactttgggcttttatgggatttatattaaccaatgaaatgtgggcagaagtcatagccagtttcaaaccttggccaaaagaaacattgcaagttttctgccatcaccatgaaaagagttttttcccaagtagcttctgttcttttaacctgagctctaggatgaatatatctgatgcaaatctaaccccaatctaccaaaaggagtcaaacccaagtgacatgaagcttgaaggagagccgctattctaagcccagcttagatctctaaattgacttgcagacacaaaagcaaataaaaaaaatttwaaaatgtggttaaaaaccaaataacgtaaaattcaccaactcaaccattttaagtgtaaagttcagtagtgtcaagtatattcc

SEQ ID NO: 51126 - DNA, 1468 bp, Homo sapiens
taaaaatcatttgcttttatttccagcataatttatttttaattgaaattcttccttgtgataatttttctttttaaagcaaccatgtcttctttataactgtctgagtgtccaattacattttcttacttatgaaggtttttaatatctaatcatatcttatgtaatcagtgggctattgtgtaaagtaatagttctttttctcccttatttatagggattttactacacacttccttcctccctatttttttctttcctgaacacctttcacctggtattgtgatagttcatttacttgtatgtattgctcactagatggtaaactctgcggggaaaggaatttttttgcatgtcatgttcgctacatcattcctgcatttagcatatgcctaacaaatagtagtctagcaagtattttaaatggattaattaaggaactstaaactacaagacaccaaggaacagatgttcagataaatacataaagatataatctacatgacaatgaaaaggttatgttaaaagtaaaaccctgaagtgcattagaataaatatttaaaaatactatccaggacatataacagttgctatttttctatttaatgaggtatattttggatcccagtcagcaaacaactctctctaccaaaagtagctgactatagcccagcctgtctttgcagttcatggcagaagaagagcagagaacacacagggctcaggtccagagttagctcagagaaaacagaaaatccaatctcagcacagtaaacatgtaggaattcagcatctcatagaggttactgaaagcaaagaatcaaaaataataaatggttataaatagtccatgctctcagagaactttgagtgcataaacaaaacctataaatcttcagcaaatgaaaataaggctctggttaataaaacaaaacaaaacagaaatggcctagtgtaattgttaagaagaggagaaaaacataccccaaagaattcagtatgtagttggtgaattcagagcaaacaaaaatggaaaattacaccttctcagccacacaaaagaaaagacttctaaggatttaaattaagagtatcacagtgaggaggaaggaggagttgattattgggcaaaatattttgcctctatcaaggcttgagctcatgagtaaaaggtgtgcgaggcctccttccatagtgtgcattcagtccttctcaaagaatccattcatttccacattaaattctcaagtaaagaaatcaatcaaacaaaaaaactcccacatgtgttattatagtttctacctggactatgtggacatgtcctgtctgtctatagcagttgcaatgctattgcccagagtggaaaaaaagaaaaagaaaaggagcttcccataaggtttatttctacatgttaaaaactctattgctaaaaccctaccacactagcttaggaatcacatttttagta

SEQ ID NO: 51127 - DNA, 1753 bp, Homo sapiens
gattttattggatatatatggatatataggaagaggatggggagtagtgagctttcaaaaacacgcacctgttgactcgtttaggcttaaacaccctgggagttaggcagagcacacgttaatatatctctggcagataaccaccctccccttcccccgacacgtcaaatgacttgcccatggttcctcaataacttagatgtagacgtgagagtacaagctggaactaattttcctattcaatgggattaatttaattgagcataaaatccagtagagtatgagagaaagaatcatgagaatttcccctaaacttcaacctgatgcttctctttgaggcaggaggggacatatgatgtggtcctctacttccgtacctcttggcctcccagaatttttggtgcaaattctccccaaattggaaggttgagagaaatgcttcacatcccaggagagtaaattcggaaagaagaaataaagtgcaggtataaataaagccatgcccttcttggactcttaaactagtccaagtaagcttttgagcagtttcactgctacttcaaatagaccttaacaaaatagatatgttttagcaatatagaaagcaaagtaaaattctgttaaatattcctggtttttctccattgacttctatgaaaaagctagatatttctgctggtcttgcaagtaacaaaggggggcttggaaatataataaaaagcctcttataaatacgttaattcttttgaaaacatttatttgaaggaaaacaaaaccattctggaaaactaacaattctaccaaaatacaagaattcccatgctttttcccagagtaaattacaaaatcgaaatggtcaaagtaatagaaggatataatactagatactacagaggcataatcgttgacctaaaatgttgttttgctgacaagattgcaaaccaagctctctagctccggcctgaccatcccatttccaaagtttcaatctacctttacatacctagatttaaagacaaagaaatgtctttatttatgttttcctttcattctgatcacctttggtctttactgagtttttttcagcaagttttttaaggtaagagcaacgagaacaattacagtctcaatcataaaaaacggagacaaaactggccaatctttcctcaatagcatcttaaatagtcaattcttaaattacactggcttcaacgcttctcttcataggctaatgaatggttttcttgtattgctaaggcctcacaaacaactgctgttcaaatcaaaatcttttttgtagagacaaaaaaaaaatgtctagctcattgctagagattagtctgaaatcagaattccacttgcattgtagatcaagagggaagattcccccagtgatggagtctgtgtgataaaagtcagcctggaaccatcagggacatacacacatacctttccttgaggaactctttgagaatattttaaatttccttactttgcaatattctaagcaaactctagaatttcagtgtttctgtattttattagcaaatatttaaaaaaattgtgaaatagtagttctcaagagtttcttcactgtgaaatatagtgttcacatatatacccacttatacaggcacactgttactcagaaaacaaccaaaaatawtttttgttgcatgagatagaatgtggttacatttaatttctgaggcaataacatctactccaccaatttctctcccgctaatgaaag

SEQ ID NO: 51128 - DNA, 639 bp, Homo sapiens
ctccagtgagcctcccacctcagcctcccaaagtgctgggattccgggcataagccaccagacctggcctatttatagtttaaattttctcatcgtctaaaataaaagatctaaaactaattgtctaagttggcagagcagtcagaacacacacatttattgattaaattcattgtcttatatagatgtggttcatggtgcccaaaacaattacaatagtaacatcaaaggtcactggttacagattatcatatcaaatataattataattaaaaagtttgaaatattgtgagatttacctagatatggcacagagatacaaatgaacacatgctattaaaaagtggtgccaataaagttgcttgatgcagggttgatataaaccttcaatttgtgaaaaacacattatctgtgaggccaagtgaagcaaagcacaatcaattgaagtatgtctatattccactgcctttgtagagtgtatatagttgtattatataacatatataatatatatacaaatatatataatatatatatatttgggtatatgtaatatatattatatatatttgtatatatattacacgtatatattgtatatgtatatattatacatacatatagtgtgtgtgtrtatat

SEQ ID NO: 51129 - DNA, 656 bp, Homo sapiens
atagaacttctggaagcaaacaggaaagctgattctgaaatcattttttgacacttttagaaaagaaagattatctcagaagggtaaagagaatttaaagagaacagcaatgcataaaattagaattgatcatttcacataaaggaggacatttattattttgttttctaactgtgtcccgttgaagactttgcatcccaaggtgcctattttaaatcacaatcacatgstaagaatgtatattcacaattatattctaaataagtctataataaaaagataattaaaaagataacttcttgagatattcattatttctctcttgttttatttatttttctagtcattttctatatgtaacaattctttggttctctttacttaagatttttcaaatacctgttttgtgctagacattttgatagatgctaagggcacaaaacacaaataaaatgtcattctgcttcatagaagcttacagttaagtatgactggcagatataaaatggctatttcaataaaacctacaaaggacacgaaagatacatgctggttacatgcatgcaaattggagcacaagtgaagaactcactactccaataataggaaattttaagaagtcttcctagatggtgttaaaagagaagattcagctg

SEQ ID NO: 51130 - DNA, 656 bp, Homo sapiens
atagaacttctggaagcaaacaggaaagctgattctgaaatcattttttgacacttttagaaaagaaagattatctcagaagggtaaagagaatttaaagagaacagcaatgcataaaattagaattgatcatttcacataaaggaggacatttattattttgttttctaactgtgtcccgttgaagactttgcatcccaaggtgcctattttaaatcacaatcacatgctaagaatgtatattcacaattatattctaaataagtctataataaaaagataattaaaaagataacttcttgagatattcattatttctctcttgttttatttatttttctagtcattttctatatgtaacaattctttggttctctttacttaagatttttcaaatacctgttttgtgctagacattttgatagatgctaagggcacaaaacacaaataaaakgtcattctgcttcatagaagcttacagttaagtatgactggcagatataaaatggctatttcaataaaacctacaaaggacacgaaagatacatgctggttacatgcatgcaaattggagcacaagtgaagaactcactactccaataataggaaattttaagaagtcttcctagatggtgttaaaagagaagattcagctg

SEQ ID NO: 51131 - DNA, 656 bp, Homo sapiens
atagaacttctggaagcaaacaggaaagctgattctgaaatcattttttgacacttttagaaaagaaagattatctcagaagggtaaagagaatttaaagagaacagcaatgcataaaattagaattgatcatttcacataaaggaggacatttattattttgttttctaactgtgtcccgttgaagactttgcatcccaaggtgcctattttaaatcacaatcacatgctaagaatgtatattcacaattatattctaaataagtctataataaaaagataattaaaaagataacttcttgagatattcattatttctctcttgttttatttatttttctagtcattttctatatgtaacaattctttggttctctttacttaagatttttcaaatacctgttttgtgctagacattttgatagatgctaagggcacaaaacacaaataaaatgtcattctgcttcatagaagcttacagttaagtatgactggcagatataaaatggctatttcaataaaacctacaaaggacaygaaagatacatgctggttacatgcatgcaaattggagcacaagtgaagaactcactactccaataataggaaattttaagaagtcttcctagatggtgttaaaagagaagattcagctg

SEQ ID NO: 51132 - DNA, 656 bp, Homo sapiens
atagaacttctggaagcaaacaggaaagctgattctgaaatcattttttgacacttttagaaaagaaagattatctcagaagggtaaagagaatttaaagagaacagcaatgcataaaattagaattgatcatttcacataaaggaggacatttattattttgttttctaactgtgtcccgttgaagactttgcatcccaaggtgcctattttaaatcacaatcacatgctaagaatgtatattcacaattatattctaaataagtctataataaaaagataattaaaaagataacttcttgagatattcattatttctctcttgttttatttatttttctagtcattttctatatgtaacaattctttggttctctttacttaagatttttcaaatacctgttttgtgctagacattttgatagatgctaagggcacaaaacacaaataaaatgtcattctgcttcatagaagcttacagttaagtatgactggcagatataaaatggctatttcaataaaacctacaaaggacacgaaagatacatgctggttacatgcatgcaaattggagcacaagtgaagaactcactactccaataataggaaattttaagaagtcttcctagatggtgttaaaagagaarattcagctg

SEQ ID NO: 51133 - DNA, 543 bp, Homo sapiens
tctcaattctgcaagtgaaaggcatagggtctttgaatgagtaaaaaaataaaaccctactatatgctgttttccagaaactcaattcacctataagcatacatgtagatggaaagtgaaggggtagaataagatattccatacaactggaaaccaaaaacagcaagagtagctgtacttatatcaggtaaaatagatgccaaatctcacaatgcactcaggtaaaacagaatacaaatctgagcttgtaaaatawtagactacgcttacacaaactatgcctagaaagaacatacatcaaaataatagaagccaaaaatgacaaatccacatgcaacatcatattgaatgaagaaacgttgaaagtattcctgctaggaactacaagcagacaaaaatgctcactttatccacttgtaatcaacataggactgaaaatgtttgtcagagcaatctggtaagcaaaaggaataaagtataattaaattggaaagaaggaagtgaaactacctgtgtttgccaatgatgtgatcatatgtgctt

SEQ ID NO: 51134 - DNA, 540 bp, Homo sapiens
  misc_feature (1)...(540): n = A,T,C or G
ggcacatatacaccattcaatactatgcagccataaaaaatgatgagttcaggtcattttcagggacatggatgaagctggaaatcwtcattctcagcaaactaacacaggaatagaaaagcaaataccacatgttttcagtcataagtgggagttgaacaatgcgaacacatggatacagggaacatcacacactggggcctgttggggggtggggatggtgggggagggttagcattaggataaatacctagtgtagatgatggcttgatatgtgcagcaaaccaccatggcatatgtatccctatgtaacaaacctgcacgttctgcacatgtgtcccagaacttgaagtatatttagaaaatgcttaatgtggtgttgagtctcaaataaaatgacaccttcaaaactgattttgaagatcaatgaataagaattgctcttatttaaaaatatttaagtttatacaattttggagctggaaggaagtgcaatatttttagggatatatgatntattttcttagagcagttataagg

SEQ ID NO: 51135 - DNA, 540 bp, Homo sapiens
  misc_feature (1)...(540): n = A,T,C or G
ggcacatatacaccattcaatactatgcagccataaaaaatgatgagttcaggtcattttcagggacatggatgaagctggaaatcttcattctcagcaaactaacacaggaayagaaaagcaaataccacatgttttcagtcataagtgggagttgaacaatgcgaacacatggatacagggaacatcacacactggggcctgttggggggtggggatggtgggggagggttagcattaggataaatacctagtgtagatgatggcttgatatgtgcagcaaaccaccatggcatatgtatccctatgtaacaaacctgcacgttctgcacatgtgtcccagaacttgaagtatatttagaaaatgcttaatgtggtgttgagtctcaaataaaatgacaccttcaaaactgattttgaagatcaatgaataagaattgctcttatttaaaaatatttaagtttatacaattttggagctggaaggaagtgcaatatttttagggatatatgatntattttcttagagcagttataagg

SEQ ID NO: 51136 - DNA, 540 bp, Homo sapiens
  misc_feature (1)...(540): n = A,T,C or G
ggcacatatacaccattcaatactatgcagccataaaaaatgatgagttcaggtcattttcagggacatggatgaagctggaaatcttcattctcagcaaactaacacaggaatagaaaagcaaataccacatgttttcagtcataagtgggagttgaacaatgcgaacacatggatacagggaacatcacacactggggcctgttggggggtrgggatggtgggggagggttagcattaggataaatacctagtgtagatgatggcttgatatgtgcagcaaaccaccatggcatatgtatccctatgtaacaaacctgcacgttctgcacatgtgtcccagaacttgaagtatatttagaaaatgcttaatgtggtgttgagtctcaaataaaatgacaccttcaaaactgattttgaagatcaatgaataagaattgctcttatttaaaaatatttaagtttatacaattttggagctggaaggaagtgcaatatttttagggatatatgatntattttcttagagcagttataagg

SEQ ID NO: 51137 - DNA, 540 bp, Homo sapiens
  misc_feature (1)...(540): n = A,T,C or G
ggcacatatacaccattcaatactatgcagccataaaaaatgatgagttcaggtcattttcagggacatggatgaagctggaaatcttcattctcagcaaactaacacaggaatagaaaagcaaataccacatgttttcagtcataagtgggagttgaacaatgcgaacacatggatacagggaacatcacacactggggcctgttggggggtggggatggtgggggagggttagcattaggataaatacctagtgtagatgatggcttgatatgtgcagcaaaccaccatggcatatgtatccctatgtaacaaacctgcacgttctgcacatgtgtcccagaacttgaagtatatttagaaaatgcttaatgtggygttgagtctcaaataaaatgacaccttcaaaactgattttgaagatcaatgaataagaattgctcttatttaaaaatatttaagtttatacaattttggagctggaaggaagtgcaatatttttagggatatatgatntattttcttagagcagttataagg

SEQ ID NO: 51138 - DNA, 540 bp, Homo sapiens
  misc_feature (1)...(540): n = A,T,C or G
ggcacatatacaccattcaatactatgcagccataaaaaatgatgagttcaggtcattttcagggacatggatgaagctggaaatcttcattctcagcaaactaacacaggaatagaaaagcaaataccacatgttttcagtcataagtgggagttgaacaatgcgaacacatggatacagggaacatcacacactggggcctgttggggggtggggatggtgggggagggttagcattaggataaatacctagtgtagatgatggcttgatatgtgcagcaaaccaccatggcatatgtatccctatgtaacaaacctgcacgttctgcacatgtgtcccagaacttgaagtatatttagaaaatgcttaatgtggtrttgagtctcaaataaaatgacaccttcaaaactgattttgaagatcaatgaataagaattgctcttatttaaaaatatttaagtttatacaattttggagctggaaggaagtgcaatatttttagggatatatgatntattttcttagagcagttataagg

SEQ ID NO: 51139 - DNA, 534 bp, Homo sapiens
tttttttttttttagcacagacagggtttcaccgtgttagccggggtggtctcttatctcctgacctcatgatccgcccgcctcggcctcccaragtgctgggattacaggcctgagccaccgcgcccggccaatttgagttagatttctatgggaactttacctttcagaaatcaggactaagggtctagattcaggaattctataaaaagaggtagggccctatttcagacacagaagcaatattccaaaatattgaaaaagatcttaaaatggtgcacaggcaaacaaaagaaaataaaacatttaggtacatatcatctccaccctaaacttcaaatatcaggaactctacaattaaatatctgctccaaaaatattacattttttgttccagcaagaaacattttctgtttcacagagtgtatttaattctaacaattagagattttgtaaaatagtcttcgtgggaaagtactgaaagcattaacatgtggtctggatataggcagatcatcaacaattggacacaga

SEQ ID NO: 51140 - DNA, 528 bp, Homo sapiens
ttttttttttttttgagatggagtctcgttctgttgcccaggctggagtgcggtggcgcgatctcagctcactgcaagctcctcctcccgggttcctgccattctcctgcctcagcctcctgaatagctggggactacaggcacccgccaccacgcccggctaattttgttttgtttttgwatttttagtagagatggggtttcaccgtgttagccaggatggtctcgatctcctgatcttgtgatctgcccgccttggcctcccaaagtgctgggattacaggtgtgagccaccacacctggccaaatctgttttttaaaaaacaaaaatatgtaaagaaagcaaggcaggggaataaattactgtagtgagatagaaaaatcaaaaaacatgtttcagaatatgaattcagggtaactaaacaaagaagaattagtagaagaaatagaaaaggcatataggttttggatttattcaggtttcagttttactcaagtatctggaatatcctagctgtgagatttgca

SEQ ID NO: 51141 - DNA, 528 bp, Homo sapiens
ttttttttttttttgagatggagtctcgttctgttgcccaggctggagtgcggtggcgcgatctcagctcactgcaagctcctcctcccgggttcctgccattctcctgcctcagcctcctgaatagctggggactacaggcacccgccaccacgcccggctaattttgttttgtttttgtatttttagtagagayggggtttcaccgtgttagccaggatggtctcgatctcctgatcttgtgatctgcccgccttggcctcccaaagtgctgggattacaggtgtgagccaccacacctggccaaatctgttttttaaaaaacaaaaatatgtaaagaaagcaaggcaggggaataaattactgtagtgagatagaaaaatcaaaaaacatgtttcagaatatgaattcagggtaactaaacaaagaagaattagtagaagaaatagaaaaggcatataggttttggatttattcaggtttcagttttactcaagtatctggaatatcctagctgtgagatttgca

SEQ ID NO: 51142 - DNA, 559 bp, Homo sapiens
tggaaatttctggcccttatctctagatgaagatcccaccttaattttatgtatccaacatagcctaaactattgttctttttttctgtctctgtcttcctttccccctgcctccctccttctctctcttctttctttctttccttcttctcatttcccagtggtctggtctccaaaaacaaatgaatgtgtgaaatcagtgaggattcttctccctggaaacaatgtgttgttggcaaagcaacaactgcctctgcaacatcaaaatcctccaaaagagtgaatggggaagatcatatttggtgttcagcaatctaaaaaaaaaaaaaaaaaaaacagacagcaaaaacccagaggaagtgaagaaagttagtaggaactggtmatactatacagatgatttcttctccacctgtttggaagttttgcttaagtctggcttttcttgcagtattaggaagtgaatatggttggtgtaagagaaggtgacagtggatactatacgcagggagctctgtggagccttgcagccctgcaagtttttatttgcaaggtgttg

SEQ ID NO: 51143 - DNA, 1413 bp, Homo sapiens
agtctctgactgtaccacgtgtgcccttacccacgattcagctttgttcttccagcaaggtctcttcgcctcttggaagatcagtttctccacctgcaatctgggcataaattgcctccctcccacctagtctgttgtgagaatgaaccatgataaggtattttaaagtgctttgaaaactgtaaagcaccacagaaaatgtgtctattattgttatatttatatttttatatttaccactttaatttgagtgtgataagttgtgtttgcatatttgtcatataaggctttctgtttaatccatcatggttcacatagaacctgttagccagcctgggagcctctgtagtgcttycttaaactttcattagtcaaccccactttttgaagatgatccctgtcagttctcctccaagtggaagaggaaatacagaagataggaactgaaaccatctactgtttcggatacttgttaaacgttctgtgaaagttttagttgtttgggcagatggtgaaagcacttcaaaatcctggggacagaattcaacatgagtgagcccaagtaagggggagttcattgaaacgataaaggggcatctcagcaaatctggagaagccaagcatttaagcatgccttaaggaaaccaagttatgggcccagaaccctttctccttgcaagcaggggcgacctccagcgggtttcagataaactaaaagtggctaatgctggccgggcgtggtggctcacgcctataatcccagcactttgggaggctgaggtgggtggattacctgaggtagggagtttgagaccagcctgaccaacatggagaaagctcgtctctactaaaaaaaaaaaaaaaaaaaaaaaaaattagccaggcatagtggcacatgcctgtaatcccagctactagggaggctgaggcaggagaatcgcttgaacctgggaggcagaggttgcagtgagctgagatcatgccattgcacttcagcctgggcaacaagagcaaaactcaatctcaagaaaaaaaaaaaaagtggctaatgctgtcatgtcatttggggaaagatttcattctggagatgtcatgtgcctccacaaaaggaaacgatatgacttctttaactaaattcaaagtattctgttttgacccagatgtatatagatcaacacaagtccttatcaatatacagcataagaggaggtatttaatgtctctttattcagagttgtggtactgcaccacccaaagatttctaaccacgtgagatttttgagagcccagacccagaagacattctttggggggacataaaaaaggatgctgatcagtccccagttaaggtcatacaaggaaatagaaataatctggaattagggaggccagtcaaaattctgctaaaatgat

SEQ ID NO: 51144 - DNA, 636 bp, Homo sapiens
gacaactggccctcacacactagccacctcgagtgcagaggccacgaggtggggagagctgcttctccaatgcatattttatgctttctgtttcacaacatttaggctaatcctctgattgaaaggcagcgtctaggatttatttttatttatgacagaaggccattctaccgcacagcttgtgggagctgcgagcagagctattgtacttgccctgttctgcaggaaaggtaaccactgtgtctggggtgtgtgtggccagccaagcaggcaccaaccagacaggcagccctcctcctccacataggccccatcccagtgctggaaacacaggcgaacactttatcatgatcaggagattccacttattgagcatctactatatgccagtgatacggtttgactctctgtccctacccaaatctcatctggaattgtaatccccataatcctcaccgtgttgagggaggaaccccgtgggaggtgattggatcatggaggtgatttccctcwtgctgttttcgagatagcgagtgcgttctcatgagatgtgatggttttataagaggctcttccccctcattcctcattcttctctctcctgccaccttgtgaagaagatggctgcttcccctt

SEQ ID NO: 51145 - DNA, 585 bp, Homo sapiens
cacagagagctgctcccagcctgggaagagactgctagggtaaggaccacacagtcctactcacagaggaccaggaagttgggacctatggttggtccaggaagatgcacagagaaagggaactgtagggagaggaagtgaygtgtttaaaagcatgaagcatggtgtgttggagaacttcccacaagttggcattactagtgtaagaccatgggcacttgctggtgcttggaggtattgggaaaaattaaaaatcctaccaacctagagaatcctctccacaataggtagaaaagaaagacaacagctttattattgagtaagcgttaaaccagattacaaagtgtatggcaggtagctgagatgacaaaaccaaaagaaatttttataccgccaaacagttaccatccattacatatctgtgctcaagattaacagcaacttgtcttcctgtaggatttggcagcaccattttctgtgcattcttttattattcatccatgttcacctactaattagcctactaattgcctatatccgaattgcctttgcctccatgacgggcagtagttacagcttgaagca

SEQ ID NO: 51146 - DNA, 585 bp, Homo sapiens
cacagagagctgctcccagcctgggaagagactgctagggtaaggaccacacagtcctactcacagaggaccaggaagttgggacctatggttggtccaggaagatgcacagagaaagggaactgtagggagaggaagtgatgtgtttaaaagcatgaagcatggtgtgttggagaacttcccacaagttggcattactagtgtaagaccatgggcacttgctggtgcttggaggtattgggaaaaattaaaaatcctrccaacctagagaatcctctccacaataggtagaaaagaaagacaacagctttattattgagtaagcgttaaaccagattacaaagtgtatggcaggtagctgagatgacaaaaccaaaagaaatttttataccgccaaacagttaccatccattacatatctgtgctcaagattaacagcaacttgtcttcctgtaggatttggcagcaccattttctgtgcattcttttattattcatccatgttcacctactaattagcctactaattgcctatatccgaattgcctttgcctccatgacgggcagtagttacagcttgaagca

SEQ ID NO: 51147 - DNA, 585 bp, Homo sapiens
cacagagagctgctcccagcctgggaagagactgctagggtaaggaccacacagtcctactcacagaggaccaggaagttgggacctatggttggtccaggaagatgcacagagaaagggaactgtagggagaggaagtgatgtgtttaaaagcatgaagcatggtgtgttggagaacttcccacaagttggcattactagtgtaagaccatgggcacttgctggtgcttggaggtattgggaaaaattaaaaatcctaccaacctagagaatcctctccacaataggtagaaaagaaagacaacagctttattattgagtaagcgttaaaccagattacaaagtgtatggcaggtagctgagatgacaaaaccaaaagaaatttttataccgccaaacagttaccatccattacatatctgtgctcaagattaacagcaacttgtcttcctgtaggatttggcagcaccattttctgtgcattcttttattattcatccatgttcacctactaattagcctrctaattgcctatatccgaattgcctttgcctccatgacgggcagtagttacagcttgaagca

SEQ ID NO: 51148 - DNA, 585 bp, Homo sapiens
cacagagagctgctcccagcctgggaagagactgctagggtaaggaccacacagtcctactcacagaggaccaggaagttgggacctatggttggtccaggaagatgcacagagaaagggaactgtagggagaggaagtgatgtgtttaaaagcatgaagcatggtgtgttggagaacttcccacaagttggcattactagtgtaagaccatgggcacttgctggtgcttggaggtattgggaaaaattaaaaatcctaccaacctagagaatcctctccacaataggtagaaaagaaagacaacagctttattattgagtaagcgttaaaccagattacaaagtgtatggcaggtagctgagatgacaaaaccaaaagaaatttttataccgccaaacagttaccatccattacatatctgtgctcaagattaacagcaacttgtcttcctgtaggatttggcagcaccattttctgtgcattcttttattattcatccatgttcacctactaattagcctactaattgcctatatccraattgcctttgcctccatgacgggcagtagttacagcttgaagca

SEQ ID NO: 51149 - DNA, 603 bp, Homo sapiens
tttgagacttctgaaccacttttcggattcactcacaatcagttaatacactaatcagttgtattttgagacatctaatatgtatgggagaagcaaaatmcctgtgcaatcaaattgggtcatcttgaaatataaaatataaacaagtgttaaatggtgtcatgaatcaggaagtactaaatgaattcagaggagtaagtcagctacaacacttgtagagacttcaagatcacctgtttttgatgagtgggcaaaaaagatattggaaggaaagaaagaaatttcaggtggaggaagaggctgagccttggagacataggcctggttaagaatattctccagaagtgaaagggattgttctctctagagtttaatgggaaatgattttagattgtttgagtgagggcagagaatgaaggactttgaaatcctggtagtgaagggatctataatagtagcctcttaaagtgaactcttgtaaaatcttcagcaggtacatgaaaactgtatgtgagaaatcttgacatattggattggaattaagagaaactaaggtcataggacctcacagtcaggcagaggattgttcttcctaatgtccag

SEQ ID NO: 51150 - DNA, 603 bp, Homo sapiens
tttgagacttctgaaccacttttcggattcactcacaatcagttaatacactaatcagttgtattttgagacatctaatatgtatgggagaagcaaaatccctgtgcaatcaaattgggtcatcttgaaatataaaatataaacaagtgttaaatggtgtcatgaatcaggaagtactaaatgaattcagaggagtaagtcagctacaacacttgtagagacttcaagatcacctgtttttgatgagtgggcaaaaaagatattggaaggaaagaaagaaatttcaggtggaggaagaggctgagccttggagacataggcctggttaagaatattctccagaagtgaaagggattgttctctctagagtttaatgggaaatgattttagattgtttgagtgagggcagagaatgaaggactttgaaatcctggtagtgaagggatctataatagtagcctcttaaagtgaactcttgtaaaatcttcagcaggtacatgaaaactgtatgtgagaaatcttgacataytggattggaattaagagaaactaaggtcataggacctcacagtcaggcagaggattgttcttcctaatgtccag

SEQ ID NO: 51151 - DNA, 2169 bp, Homo sapiens
  misc_feature (1)...(2169): n = A,T,C or G
tgccattgaactccagcctgggtgaccagagcaaaactccatctcaaataaataaataaataaataaaataaaatagtggatgaaactgttggcacattagcatgcatcaatatggtggcccttaagttgggaatactagcatggtatttgaagctggatataaatggatcaatgctttttgggttctaaagaatatgatgtttaaccctgggtgattttttttccaaacaagttgtccctgaagcaaacaggtaagaaatataattctcaaastctgcagaaggaagataatatgacacacataattgatctaacagtttatcttaatatagaattgcagaagtttgccacatacccactgtcttcagaaacctttagcgaaacagagatggctgggagaaattgaaaatccaccaagagctgaggcagcttttgcaccgcttctgacttggagaactatttttggtgactttccaacatttctgaaacatcaagtaatgcaagggagcacaggaattaatattgaattaatcattcatttctgacataatatttttaatttaaattagtatttgaagtttattattaggaaaacatttacatttaggtggattccttctgccttcttgagttaaaaatttgattctaactgccattaaatgttgaatccttctccatcctgaatcagaaaacaggccaagttcaagacatttttacagactttccaactgatagtaaagtataaatgttttctaagtaatattgttggcagcaatgcaagtcttatggatattcattagcatttaaattttttattgctattatatcagaatacttattgttagataataaaatgaattaatttattattgttaactattttgagcatttaggaaactaaaaatttgttttccttctccattctaggttttataatgtaatataattaatactttgtagaatacttaacataaatgtgtttggaaatcattatatcatgtgatttatgatttaataactgcaagtgattcatcattttctctactaaaaatgagaattattttcccataaacatgtttgataaacattaaatttaacctcttttatacaaaatgtatatttcctgaagaaaaggcttttctattttttcattataacttcactgatatctgatcttatccttattttttttccttcttcttgctttaggtttatttcgctttccttttgctaggttcctgaagtaggactttagagtattgatttgagacttcaaattttccaatatatgcatagagtgctaaaacttatttctttaagcatttacttagtgtgtctcccaaattcagataggtgtatttttacttttatttacagcagtctattttttccctgtgatgtatttgtctagttttggcttcatactaataatgtcctcatagaaagaactgagcacatatgtggtagagttattcattattttttgctccatttatacgaccattgcattataaaataaacatctttttctttatttgacagaatgacagaaacagcagttctcatcaatattttaactgtctccctatattttcaaacatccattcatctaatttgtgctatgaacatagccaatgcaatgtaaacaggagtgaagttcttaggcattacaaggtcctacacaaccccttggctctatgttcctctgttgtgatgcccgaaaagactttgtgctccagttggtacagtcccaagttagtggaacctcagttagggtgggtttctgatgaattttgtggagcagatccctctggcatcccacattgcacatatgcatttatttattttattcattgcttgngggttttctgttttttctgtcttctcaagtagaatatatgctctttaaaagtataagcctttttttgtatatctcagcaaacattaaccacctagtaataaaggtttgtagatatttgtagtatgtaaaaaattagatatttgatttgaatttaagcatcttaaaaattttaaaaagtattaaaattcaaattatatgccaaattttatcatatgaatactaccaaaactgttccttatataagcaggataacatactaacttgtggctttgaaataaaatgtgttttccatcatatcctatctttc

SEQ ID NO: 51152 - DNA, 540 bp, Homo sapiens
ataaatgtatttttaatggaaaaatatccactatcttgacatattcacataatcatattaaacatttttattttttcacattattttttcatttgaatagatttctactggttgttactaaaatatattatttttattcttttttaatacttgatgttagcttactgatatttgttttatgtttccrtatagtattcttaataattattttaaatgaccatataatatgctgtctagtatatatatatatgtatatgtacttatatataatttttttaactataaccattttgttacgtatttagattgtcttcaggtttttttctactataaataatgctatgacaaacatctacaatctacttttttcatatttctgatttcctattattttatttccatatatttagactaccagaattagaattatagagttacattgaataaatctttattgtaattgacacattttattttatttattttattttattttattttattttattttattttattttattttattttattttattt

SEQ ID NO: 51153 - DNA, 540 bp, Homo sapiens
ataaatgtatttttaatggaaaaatatccactatcttgacatattcacataatcatattaaacatttttattttttcacattattttttcatttgaatagatttctactggttgttactaaaatatattatttttattcttttttaatacttgatgttagcttactgatatttgttttatgtttccgtrtagtattcttaataattattttaaatgaccatataatatgctgtctagtatatatatatatgtatatgtacttatatataatttttttaactataaccattttgttacgtatttagattgtcttcaggtttttttctactataaataatgctatgacaaacatctacaatctacttttttcatatttctgatttcctattattttatttccatatatttagactaccagaattagaattatagagttacattgaataaatctttattgtaattgacacattttattttatttattttattttattttattttattttattttattttattttattttattttattttattt

SEQ ID NO: 51154 - DNA, 540 bp, Homo sapiens
ataaatgtatttttaatggaaaaatatccactatcttgacatattcacataatcatattaaacatttttattttttcacattattttttcatttgaatagatttctactggttgttactaaaatatattatttttattcttttttaatacttgatgttagcttactgatatttgttttatgtttccgtatagtattcttaataattatyttaaatgaccatataatatgctgtctagtatatatatatatgtatatgtacttatatataatttttttaactataaccattttgttacgtatttagattgtcttcaggtttttttctactataaataatgctatgacaaacatctacaatctacttttttcatatttctgatttcctattattttatttccatatatttagactaccagaattagaattatagagttacattgaataaatctttattgtaattgacacattttattttatttattttattttattttattttattttattttattttattttattttattttattttattt

SEQ ID NO: 51155 - DNA, 566 bp, Homo sapiens
gaaaacataataaattaagaattagagacaatttttctttctagaataggtaggctcctcatctatggtggtaagtgaagaggatatttttaaaaaacttaaacatctttaaaatagaatttatgtgaacattccatatccccaaataaaagtgacaaaaaatagcttcgatgtagtgaaagctgctaaaatacttccagttctaatatttcacatttatctttatatcaggaggagtctgactggagatttcagacatggctgtcattcatcaactctcaataaagaaaatgttggccagtgtcacaactagctttgtcaacagttagaactacattaaattttagaaaaacaaaataaggttacagctttgggaatgtagaagaaacctgaaaaacaatggggtacttttgctaactttgtctctgtaagagtaaagcctgtttgtttaaatagtaaatagagaaaaagggcagagacatcaaaatayacagacaatctgctacctacaaagtggtatactggaagccgtaaggttttttttgttttttgggggtggtttttct

SEQ ID NO: 51156 - DNA, 1575 bp, Homo sapiens
ttattttggactgtaactttcacctagagaaaatataaggaagggcatcatgacatggctaaaggtacagttattttaaaatagcagtcccaaggtgtaaaagcacagttactttatcacgagagaatatgtatgacagacattacctcatctctgaactttgcccagttccttgttctttttctcaattgtggtcactcttaaactctggggatgaaggaaaacctatggtgaggttgagggatgaaaacgttgtctgtattgtacaccctctaataattatgaaaatataaaactgttactgtttatagacttcttagaaccatatttggcagaactttaatacaatacgtagatgggtgagaagattttctaagcacatgactacaaaaataaagtagagaagtaaattaatcaatgtgacttcataaaaaatttttaaattaccccaaatttagaaataagctccaaaacttcaataccaaaaaacctatctgaagggcaacttcgccaggaaaaatagtcacaaattaaaagttgatgtttttaataaatcaagggctatcatgtatcagtaaaaatacagaatgcagaataaataatagtgataagtcatcactgttatatgccctttagactggcaaacattggaatgctggctaatgccaagtgttggaatagaagtgaggatgtaggaagacttaggcactggtagtgaaaactttgattgccgaagacattctttggagaaacctggcagtattgagtgcaattctctctctatatatataccctacaatccagcaatttcagtcctggataaatatcacaaactaatacacagatctataaagggacaagttcaagatgttcatggcaatgtcactgggataggtagaagaggaagcaggctaaagaagtgggtaacatggagggtacaaatcactgggttgtagccagcagtgagaagcagtagacttggtggacacaaaagaacatggatagatcttttttttttttttcctttttttgagatggaatcttaccctgtcagccaggctggagtgcagtggctcgatcttggctcactaaaacctccacctcccaggttcaagtgttctcccatctcagcctcctgaggagctgggatcacaggcacatgccgtcacacccagctaatttttgtatttttagtagagatggggtttcaccatgttggtcaggctggtctcaaactcctgacctcaaaygatccgcccatctcggcctcccaaagtgctgggattacaggcgtgagccactgcatctggccagatagatcttaaaaggagagacttgggttgaatgtacatgtgtacatatatatctatattgtgtgtgtgtgtgtgtgtgtgtctgtatacatatacacaatgctggggccttgtgcaaccactgatgacattgtgtctccagctgaaaaatacgattagctcaaacttctgcaacttgaagtctggaaaaaaactacaaataatgaggaagaggagactaggctagatgacagcatgagagaaatctctggagggatggaaa

SEQ ID NO: 51157 - DNA, 1575 bp, Homo sapiens
ttattttggactgtaactttcacctagagaaaatataaggaagggcatcatgacatggctaaaggtacagttattttaaaatagcagtcccaaggtgtaaaagcacagttactttatcacgagagaatatgtatgacagacattacctcatctctgaactttgcccagttccttgttctttttctcaattgtggtcactcttaaactctggggatgaaggaaaacctatggtgaggttgagggatgaaaacgttgtctgtattgtacaccctctaataattatgaaaatataaaactgttactgtttatagacttcttagaaccatatttggcagaactttaatacaatacgtagatgggtgagaagattttctaagcacatgactacaaaaataaagtagagaagtaaattaatcaatgtgacttcataaaaaatttttaaattaccccaaatttagaaataagctccaaaacttcaataccaaaaaacctatctgaagggcaacttcgccaggaaaaatagtcacaaattaaaagttgatgtttttaataaatcaagggctatcatgtatcagtaaaaatacagaatgcagaataaataatagtgataagtcatcactgttatatgccctttagactggcaaacattggaatgctggctaatgccaagtgttggaatagaagtgaggatgtaggaagacttaggcactggtagtgaaaactttgattgccgaagacattctttggagaaacctggcagtattgagtgcaattctctctctatatatataccctacaatccagcaatttcagtcctggataaatatcacaaactaatacacagatctataaagggacaagttcaagatgttcatggcaatgtcactgggataggtagaagaggaagcaggctaaagaagtgggtaacatggagggtacaaatcactgggttgtagccagcagtgagaagcagtagacttggtggacacaaaagaacatggatagatcttttttttttttttcctttttttgagatggaatcttaccctgtcagccaggctggagtgcagtggctcgatcttggctcactaaaacctccacctcccaggttcaagtgttctcccatctcagcctcctgaggagctgggatcacaggcacatgccgtcacacccagctaatttttgtatttttagtagagatggggtttcaccatgttggtcaggctggtctcaaactcctgacctcaaacgatccgcccatctcggcctcccaaagtgctgggattacaggcgtgagccactgcatctggccagatagatcttaaaaggagagacttgggttgaatgtacatgtgtacatatatatctatattgtgtgtgtgtgtgtgtgtgtgtctgtatacatatacacaatgctggggccttgtgcaaccactgatgacattgtgtctscagctgaaaaatacgattagctcaaacttctgcaacttgaagtctggaaaaaaactacaaataatgaggaagaggagactaggctagatgacagcatgagagaaatctctggagggatggaaa

SEQ ID NO: 51158 - DNA, 618 bp, Homo sapiens
gtggttacaaaggctgccatcctgaaatataactgacttgagcctggtctggtaaaaacgcagtgctcaaatagtatgctcttccctgagaggacagctgatccacattctgtgcaatttctgggcatgcagggagacaaaagccatgctgggcccatcaggcrgaggctgcaatacgtgagaccaccaagggcagacgggtagacattcctgcacactttttagcttcctctgcagcaacagaccatgagggcaaatgacaaccactcacagctgtttctacctgattgagtctcactatccttattatttttttttttgtcatcatcaactgtgttgaatcctcctctccttttttttttttgagaccgagtctcgctcttgtcacccaggctggagtgcagtggcgtgatctcagctcactgcaacctccgtctcctgggttcaagcaattctcctacctcagcctcccgagtacctaggattacaggcacccgtcaccacacccagctaatttttgcatttttagtagacatggggtttcaccacattggccaggctggtcttgaactcctgacctcaggtgatccacccgcctcagcctcccaaagtgctggg

SEQ ID NO: 51159 - DNA, 344 bp, Homo sapiens
ccttgccattatcaataccacgtcctctttctcttaccagacagtaagatggtatctaaagccattttattttcaacagaatacatcgcacgtcattgaaaacagatggtgcctaataattkcagaatgactaaatgaaacatgcaggagtcactttttttgactaaacaacatgccttgtgatggccagctcattttttaactatttaactagcaatacttgagaaaatgtatacagtgtagtttgagtttttattaaacctgcaaagcctttttatttgctgtctcatctgatgcaaaaaaatacgtttccagtgtaagctattttagccccatttggcata

SEQ ID NO: 51160 - DNA, 628 bp, Homo sapiens
tccatcaaaaggatgatgaacagagggcgaggccgtctgagactactccaggatccacctcgtcaacgactctcatgaacgaatgagaaggagctcgctgcaatgaaaggacttaagtagasatgactgatgctccaggatcagagccctgactctggaatgatattcagtgttctcactaataaaaccaacaaaagtcaaaatgacatgctggccaacaatgggaatgggtttctgtaaagatcaaaatggaataatgtaggtcaatctttgttacctggaaaagggttttcaaattgaaagcagctacatttctccccgggtacctgatagccaaccacaggaccattctcaggtttctcaaattggatgccagagaatacacaatccaataccataaacatggataactcttcgtatcactaatttggtttagtcattggtgcgggggccacattcttgttatataaaccaacatgagtatatcatgaaaaactacgaaaattttacataaatttgtaaggtaaaacacgagggttcaaagaaattgtattacacactatttggaggcttatttgtattttcatgtgccaataaaaagttctattgtaatacaaagacccatgca

SEQ ID NO: 51161 - DNA, 628 bp, Homo sapiens
tccatcaaaaggatgatgaacagagggcgaggccgtctgagactactccaggatccacctcgtcaacgactctcatgaacgaatgagaaggagctcgctgcaatgaaaggacttaagtagacatgactgatgctccaggatcagagccctgactctggaatgatattcagtgttctcactaataaaaccaacaaaagtcaaaatgacatgctggccaacaatgggaatgggtttctgtaaagatcaaaatggaataatgtaggtcaatctttgttacctggaaaagggttttcaaattgaaagcrgctacatttctccccgggtacctgatagccaaccacaggaccattctcaggtttctcaaattggatgccagagaatacacaatccaataccataaacatggataactcttcgtatcactaatttggtttagtcattggtgcgggggccacattcttgttatataaaccaacatgagtatatcatgaaaaactacgaaaattttacataaatttgtaaggtaaaacacgagggttcaaagaaattgtattacacactatttggaggcttatttgtattttcatgtgccaataaaaagttctattgtaatacaaagacccatgca

SEQ ID NO: 51162 - DNA, 520 bp, Homo sapiens
tttgatcaaaatttcacatattaattttctcaacacccatacggcaaaaacattactataatacctatatttcgcaaataagttaactgaagtatagtagtttcagcttctcagaaaaaatcaagtacagaaatcaaaattcaactgccaatttgtctgagccatagttctggacgcttggcttctatatttgattactctcttgtttaagagtatggaatgactatataatacatcgttgaaactgggacacctgtcagcagaaagggggatgtcaataattacaccaggatcaagggataaacaggacytgttctgagcaaacctaaaggtaatgatgccatgggtaattcacacattaactgataaatatctgttggatccctttctttttgtccttctgagacagagtcttgtgctctgtcacccaggcaatctcggcactcactgcaacctctgcctcccgggttcaagcgatcctgctgcctgagcctcccagtagctgggattacaggccggt

SEQ ID NO: 51163 - DNA, 648 bp, Homo sapiens
tgaattgagtccatttgtttkcattcattccttagctacaaattgtcaatcaaaactatcatctgtctagcttaaatttcagaaaatatcttatgtgtttcattgcatttggttttaatcccctttaatacagttccacaccacagctggagctatcttttaaaagcaaatctaatcttatatccttcccttgtaaaatttacattggatttctgtagttctgaggacaaaaactcaaaccatatatttgacaaacttcaaaatattagaaagtcctaaggaccaacccttagctctgttgttttcaccatcttcactcactgccagttccatgctgaggatacctagttttatctctctaatccctactttgcctttgtactccagacttatggatccaaattgcccactcaacatctctactggctatttaataactagtgcaatatctattgttgacatcttttttcttaccgtatctacataaaattcatcaacactaccatcagcttttccagaatctgactcttttttacaacctcagcattctagtctaagccaccatcttcagtcatctgtattttttcatcataactaatctccaaattctattcatgtccctcaacataccctattctacatacagtt

SEQ ID NO: 51164 - DNA, 648 bp, Homo sapiens
tgaattgagtccatttgtttgcattcattccttagctacaaattgtcaatcaaaactatcatctgtctagcttaaatttcagaaaatatcttatgtgtttcattgcatttggttttaatcccctttaatacagttccacaccacagctggagctatcttttaaaagcaaatctaatcttatatccttcccttgtaaaatttacattggatttctgtagttctgaggacaaaractcaaaccatatatttgacaaacttcaaaatattagaaagtcctaaggaccaacccttagctctgttgttttcaccatcttcactcactgccagttccatgctgaggatacctagttttatctctctaatccctactttgcctttgtactccagacttatggatccaaattgcccactcaacatctctactggctatttaataactagtgcaatatctattgttgacatcttttttcttaccgtatctacataaaattcatcaacactaccatcagcttttccagaatctgactcttttttacaacctcagcattctagtctaagccaccatcttcagtcatctgtattttttcatcataactaatctccaaattctattcatgtccctcaacataccctattctacatacagtt

SEQ ID NO: 51165 - DNA, 607 bp, Homo sapiens
gttctattctctatgtgtatgtttcatatcacaagtaaaggttttcttttctttctttcctattctttagttcctatgataagtcaatgaatggagcactacttaacaaattgttctaaatttcaaagggaaagtattagtatattttggtaaaatggctaccattgtgaactattgtcaagttaacttgaatcaataatgatgccatatccaaataagaatggttattatactgtttgttgtaaagtttcactcaataaaattttattgtggaaaatctctataatacaaaaattttaaatcaacattagagyagattacttcatttcatttatgacagcactaaaatatgcaataggattatgatgttaaattcctgtggctggatttcaatgctgttcattatctggctccacctcgcctcccatcacccataaacttcatttcagactattccacagtggaatactaggttagttttacctacacaactatgtgctctttcccacttgtcagacttttcatttgatttgatcataacacagagaaatcaatttggctaaaagcaatgtaaacttagtagtggtaataatgaaatagggattta

SEQ ID NO: 51166 - DNA, 506 bp, Homo sapiens
tctgagcattccacaccccaaggtcatgtgtatttccaagttgggggctgtttgttctgctgttgactagcaaatgtcatccccttgcaaccccctcaggttagaggtggatgtaaatgggaagytctgatttaataatacagtattcgcttgtattatagtcgcttgtgctgttggtaattgaatggaactgggaagtgtgggctgagaaaatgtctcactatttcagcaatgtttaacctcttgcatgcttaacagagagcttttctttacttagaagaattttcttttgaagctatgttccttttatcaattggcagtgtgttctgagtgtgtacagagaaagaattcagtgtggaaaacgactgaacaatacttctcatagtgagcaattattaaatgatagaagttatcctgtgctctttgtatttcttattactattcatgactttgacaggtgtgatggtttgcctgataaatggaattgtggtctctcatttatgtca

SEQ ID NO: 51167 - DNA, 636 bp, Homo sapiens
tttttaagtgttcaactcggtggcatttagtgcattcacagtgttgagcacccacatttctatccagaatattcccattcccgcagagtacagctcgaacccgctagcagtcactccccatctcccccctcccccagtccctggcaaccattggcctgccttctgtctctatggatttatccattctggacatttcatataaatggaatcatacatkacatggtctttcgtgtctggcttctttcattatgtttggagtttgctccacattatagcatgtatcagaatcgcatttctttttatggctgaataatattccatggtctgggtgtactacaatttgtttatccatttcttcttggatagccatttggactgtttccaaagggtctttggaagggactagagagagcccacaaaggcgcctgcaggggctggggtggggctgggcagagagctcagtggctgcgcagggctagcgggagaggagggctggaggcagctgctgtcagcccagcctccgaggcagctgctcaccactgataccaggggctcccagcagcaaagcgctgttgctggagtgacagtcctccgctctgatacagaggacctgcagctgaagcaggctaaacttgc

SEQ ID NO: 51168 - DNA, 636 bp, Homo sapiens
tttttaagtgttcaactcggtggcatttagtgcattcacagtgttgagcacccacatttctatccagaatattcccattcccgcagagtacagctcgaacccgctagcagtcactccccatctcccccctcccccagtccctggcaaccattggcctgccttctgtctctatggatttatccattctggacatttcatataaatggaatcatacattacatggtctttcgtgtctggcttctttcattatgtttggagtttgctccacattatagcatgtatcagaatcgcatttctttttatggctgaataatattccatggtctgggtgtactacaatttgtttatccatttcttcwtggatagccatttggactgtttccaaagggtctttggaagggactagagagagcccacaaaggcgcctgcaggggctggggtggggctgggcagagagctcagtggctgcgcagggctagcgggagaggagggctggaggcagctgctgtcagcccagcctccgaggcagctgctcaccactgataccaggggctcccagcagcaaagcgctgttgctggagtgacagtcctccgctctgatacagaggacctgcagctgaagcaggctaaacttgc

SEQ ID NO: 51169 - DNA, 554 bp, Homo sapiens
gaattaccgtttgatggaaagctaaatcctgctggattcgtggatccgcaaatccataactctcctcttcttttcccctcccttcgtggtcctagagggaaggcaatttgaagagtgttaatggtaggctaagttttttaaaaattccatctacacccacttgtaataacctgatgggaggagagtcagggctttcastcggtctttaattaagaaagttgttttggtaagctttaaataccagggtgttatggaggcctcttagcaccagcactaggaagggcaaaccctttgccattatagcatttggccaaaagctagcaagcccatttatgtataagaaggaaatgtttttaaatcatcaaagaaaaatttaagataagcatgagtctaataacagctaaaactttagtattctcataagaggaattattaatccataaatcatcatagtattaaatgagctctaatatttgaagtggtgaatagatctagttctctgggtctagtcacattgagcaccaatttaaatggcctgtgactgtctagacatt

SEQ ID NO: 51170 - DNA, 557 bp, Homo sapiens
cacagtggtggaagagggcctggtcacctgggctgcccgaaaatgacaggaaaggcagggccaggaaaggaaatccccctgcacatcacctccctccccttcccactgcatgctccacccctgcaccacaggcacttgcttctcactcctctgtgtttttttgtggtttttttttttgtttkttttttttttcagatggagtcttgctctgttgcccaggctggagtgcagtggcgcaatcttggctcactgcaacctccgcctcccgggttcaagctattctcctggctcagcctcccaaggagctgggactacagatgtgcgccaccacacctggctattttttttgtattttagtagagatgggtttcaccacgttggccagaatggtctcgatctcctgaccttgtgatcttcctgcctcagcctcccaaagtgctgggattacaggcatgagccactgtgtctggtcttttttttttttaagagtctcactctgctgcccaggctggagtgtagtggcatcatcatagctcactgcagtctcaaactcctgg

SEQ ID NO: 51171 - DNA, 328 bp, Homo sapiens
ttggtactgcttttggccagccaaataaattttatgctcttgacctgatttaaactaatatttttcttctttctgmtgccagtaaaatattgttatactcaacttttctcaagagaaagatgttctgtgtttcttcatagtaggcaacagcatttaagggaaaagggggtatctcttgaactgatgactctttttctggaaaatatacagaatactgtgaaaaaataagctgtaatgatctgttaggattacattacattactttaatagagaagaatcctacacatatgtggaatttacaagaaatggtgttattttctggtaatga

SEQ ID NO: 51172 - DNA, 505 bp, Homo sapiens
  misc_feature (1)...(505): n = A,T,C or G
tnnnnnnnnnnnnnnnnnnnnnnnnnnnnnnnnnnnnnnnnnnnnnnnnnnnnnnnnnnnnnnnnnnnnnnnnnnnnnnnnnnnnnnnnnnnnnnnnnnnnaacaataaagcctcattgtcaagatattaaaatcgctgggcatggtggcgcccacctgtagttccagctacttgggaggctaaggtgggaggatctcaagccagagaggtcgaggctgcagtgagctatgattgtgcccctgcactccakcctgggtgacagagtgataccctgtccctaaaataaataagtaataaaaatgtaacaagatactaaaatctacatgctgctcactatcattggaggatatgcatctttacaccctcctgaaagaaggagtcaaaaagcctcctccacactttaaagttatgtgataatctggatacccttcaggacctggacctgtttaaaaagactggcatcaaatgttgtaagggattggatctcanagaaaaaagcagctt

SEQ ID NO: 51173 - DNA, 584 bp, Homo sapiens
tggtgaaaccctgtctctactaaaaataaaaacaattagctaggtgtggtggtgggctcctgtaatcccagctccttaggaggctgaggcaggagaatctcttgaacctgggaggcggaggttgcagtgagccgagattgcaccatcgcactccagcctgggcgacaagagcgaaactccatctcataataatcataataaatacataagtaaataamccccccttaacatttatataaggaatatatgtttcttgtataaaattcagaaaaagacaagcaagaaagtacaaattacccgtaattgcaatacccagaagtcacccccattcaaatttagtttctaattctttcaagaggattagtttttattttaaagtcataccagatcattaaataaaaaataaatatgtattgccattcataataacaaagcaaaaataatagctgctcttattaatacttcctatgtgtcagccctgtagtaaaagcttacatgcctgtaaacacaaccattttggggtaacatttggcatattaatttgtgatccattctttccttttgaatataggcatttttttttt

SEQ ID NO: 51174 - DNA, 1488 bp, Homo sapiens
ttgagtcaaataataaccaagctgtcaggccgtgctgcaactctatctttggcatttcaattatgtatggcattagagctttgatctgcataatgagttgatagcacgcagaaaacaagaccatttctaaaaatgtgtcattggccaaatgctttcttacaatcaattctaaatcctccaagttaagagaattaggtaacgtaagctaaagttgcaatgtgaatcaatctggctgtaatcagttctcccttttttctagaaattagtgtgcttaaaacggcacgttatcaaataaactagcataacrgttgtgtttctcctgctgtctttgatgaacattaactaacaagaaaaatctgtcctcaaaaacactatttttaatttcctgacatgcagaagttaaagagcttcttaacagtatttctacaataaaatacatccaattaaaatcaatcaatgtctactgtggttaactttatttatcagctgccataaaatatgcaccaggatcagtcgctgtgttcaaggaccatctcttgaaaacaagaacatgaaattctgactcaccgatagttgacctttcacttgatattgtcttccctgatcctgaaaatagaataaaaagcagccatatatgtgtcttcatgggactttcaccccatatcaccagcacagcacctggcacatggtagtggctcgatgagtatgtgttaaaaaaataaacaggaaaacagcatcaaggtttatgagttaaaacaacatacagagaagtgagaagtatccacagacactttaggcaatagatcaagttgcagaaaagttacatatatggatctttataaattacgtcatttcaaaatccattcccttgccatatgaatcaccctctgtattactttgcattgctgcatcctacaaagggcagtttaattgttgttgtggttttttagaatgcaaataattttctaatttatctattttgtaactttgatgataatggatatgttgttcttgatttgttctttttaaaagtagaacatgtcaatgtctcaaatttattttgcaatacaaagggaataaaatataaatggtgaaaaatggagtacttataatttcaaaggattatactactaactcatccctttaccctgttatattagaaatggtacagtgctgaaagaggatttctgaggattaataaataatttgataaagagtagaacttctggacagaagtgaaaagaacaatcagtatcaatgtaacaaaatattgttttctgtttcttttgttttacatagcagtgctttatatggaaggtatctcagaaatatgagttaaataagaataaaatcccatccctatattccaagttcacattttataaagcactcttgtcaatttggaacttgctccttgtggtatgttcacattgcaagatcacagccaaggcccacactccaccaattattaatgtggaattctattta

SEQ ID NO: 51175 - DNA, 1488 bp, Homo sapiens
ttgagtcaaataataaccaagctgtcaggccgtgctgcaactctatctttggcatttcaattatgtatggcattagagctttgatctgcataatgagttgatagcacgcagaaaacaagaccatttctaaaaatgtgtcattggccaaatgctttcttacaatcaattctaaatcctccaagttaagagaattaggtaacgtaagctaaagttgcaatgtgaatcaatctggctgtaatcagttctcccttttttctagaaattagtgtgcttaaaacggcacgttatcaaataaactagcataacggttgtgtttctcctgctgtctttgatgaacattaactaacaagaaaaatctgtcctcaaaaacactatttttaatttcctgacatgcagaagttaaagagcttcttaacagtatttctacaataaaatacatccaattaaaatcaatcaatgtctactgtggttaactttatttatcagctgccataaaatatgcaccaggatcagtcgctgtgttcaaggaccatctcttgaaaacaagaacatgaaattctgactcaccgatagttgacctttcacttgatattgtcttccctgatcctgaaaatagaataaaaagcagccatatatgtgtcttcatgggactttcaccccatatcaccagcacagcacctggcacatggtagtggctcgatgagtatgtgttaaaaaaataaacaggaaaacagcatcaaggtttatgagttaaaacaacatacagagaagtgagaagtatccacagacactttaggcaatagatcaagttgcagaaaagttacatatatggatctttataaattacgtcatttcaaaatccattcccttgccatatgaatcaccctctgtattactttgcattgctgcatcctacaaagggcagtttaattgttgttgtggttttttagaatgcaaataattttctaatttatctattttgtaactttgatgataatggatatgttgttcttgatttgttctttttaaaagtagaacatgtcaatgtctcaaatttattttgcaatacaaagggaataaaatataaatggtgaaaaatggagtacttataatttcaaaggattatactactaactcatccctttaccctgttatattagaaatggtacagtgctgaaagaggatttctgaggattaataaataatttgataaagagtagaacttctggacagaagtgaaaagaacaatcagtatcaatgtaasaaaatattgttttctgtttcttttgttttacatagcagtgctttatatggaaggtatctcagaaatatgagttaaataagaataaaatcccatccctatattccaagttcacattttataaagcactcttgtcaatttggaacttgctccttgtggtatgttcacattgcaagatcacagccaaggcccacactccaccaattattaatgtggaattctattta

SEQ ID NO: 51176 - DNA, 1488 bp, Homo sapiens
ttgagtcaaataataaccaagctgtcaggccgtgctgcaactctatctttggcatttcaattatgtatggcattagagctttgatctgcataatgagttgatagcacgcagaaaacaagaccatttctaaaaatgtgtcattggccaaatgctttcttacaatcaattctaaatcctccaagttaagagaattaggtaacgtaagctaaagttgcaatgtgaatcaatctggctgtaatcagttctcccttttttctagaaattagtgtgcttaaaacggcacgttatcaaataaactagcataacggttgtgtttctcctgctgtctttgatgaacattaactaacaagaaaaatctgtcctcaaaaacactatttttaatttcctgacatgcagaagttaaagagcttcttaacagtatttctacaataaaatacatccaattaaaatcaatcaatgtctactgtggttaactttatttatcagctgccataaaatatgcaccaggatcagtcgctgtgttcaaggaccatctcttgaaaacaagaacatgaaattctgactcaccgatagttgacctttcacttgatattgtcttccctgatcctgaaaatagaataaaaagcagccatatatgtgtcttcatgggactttcaccccatatcaccagcacagcacctggcacatggtagtggctcgatgagtatgtgttaaaaaaataaacaggaaaacagcatcaaggtttatgagttaaaacaacatacagagaagtgagaagtatccacagacactttaggcaatagatcaagttgcagaaaagttacatatatggatctttataaattacgtcatttcaaaatccattcccttgccatatgaatcaccctctgtattactttgcattgctgcatcctacaaagggcagtttaattgttgttgtggttttttagaatgcaaataattttctaatttatctattttgtaactttgatgataatggatatgttgttcttgatttgttctttttaaaagtagaacatgtcaatgtctcaaatttattttgcaatacaaagggaataaaatataaatggtgaaaaatggagtacttataatttcaaaggattatactactaactcatccctttaccctgttatattagaaatggtacagtgctgaaagaggatttctgaggattaataaataatttgataaagagtagaacttctggacagaagtgaaaagaacaatcagtatcaatgtaacaaaatattgttttctgtttcttttgttttacatagcagtgctttatatggaaggtatctcagaaatatgagttaaataagaataaaatcccatccctatattccaagttcacattttataaagcactcttgtcaatytggaacttgctccttgtggtatgttcacattgcaagatcacagccaaggcccacactccaccaattattaatgtggaattctattta

SEQ ID NO: 51177 - DNA, 504 bp, Homo sapiens
cttgggtgcagcaagacacatcagcccagcgtttataaatggttttttggaaacatttataaagtcaccactaaatacccttttyatgtaaaactgtaatttcttttgtgtattatttaaccattatttaagaatgtctgctcatggtgaaatgtttgtctttccaatatttaattaaatttcatttcatggtttaaagcattcctttgctttatgactttatgacttgtctttatgcaaaaacgatcagcctcatttttgtgttctaactgagtggaactatgcaaatgttttgattaaatgataaactaaacagttttgccagaagcagctatttccacaggaggctatgctactgaattatccaagcaaaatggaatgatgccagtcgctggcagatgtagggaaactgatagaagcttctaaatgtgtctattatcaagcaatcaaaataaatttaaaagaagtaaaaaccaaaaaacaaaaacaaacaaaaaaactaaa

SEQ ID NO: 51178 - DNA, 644 bp, Homo sapiens
ctctgttaaactgacacaaagttatcatctgatagtgttaacttggctgaaaaatcttcaaatgttcccgtttttcctagaaaaaagttcaaagtcctcaacctgatgttcaaatcctgatgcggtttggctctttggctctttcctgactggagtctgtctatttttatttatttatttatttttttgagacggagtttcactcttttgcccaggctagagtacagtaaagggatctaggctcgctgcaacctctgtcccccgggttcacgcgattctcctgcctcagcctcctgagtagctgggattataggcgccgggcactacaccaagctaaattttgtatttttagtagagacggggtttcgccatgttggccaggctggtctcaaactcctgacctcaggtggtccacctgcctgaggctcccaaagtgctgggattacaagcatgagccaccacacctggcctgtctcctaatgtattgccctcccctggtaccctcgtacggtttcctgtctaagcactccctgkgctcaccaacctcagctccttaattgaactgctcttactgtctgcaaggccctttactccatagacaaccatcaggtatcagttcttctaacaacttctccgaagacact

SEQ ID NO: 51179 - DNA, 637 bp, Homo sapiens
tgagaaagtgacaccataaagtttttaatgaactgagcgcatccccaagctgcatgtgtgtggatctgctcctaattagttaaccaaagattttgagaacgaagctagcagattattatccgagttccacactgaccaccaggacatatctgaagcaaactggaaaggttttgaaaactcgattattggaaccacagctcacaaaacagagattggaacttgcagcttgaatatgacaaggtcaattgcttctaaaacaaaaatagcatccatccgcctaatattttatgaagacccaggcctcaaarcttaatgtccatgacgcaatccaaaattacaaaaaaaacagataaactgcaccccacatgagaaaagacaatcagtactaagtagctaccaatactgagaagaaacagaaatttgaattacatcacaaggattttaaagcagcttttataaaaatgttccaacaagtggtcgcaaacactttttttctctcttgggacggagtctcactctgtcacccaggctacagtgcagtggtgcaatctaggttcactgcaacctcggcctcccgggttaaaacgattctcctgtctcagcctaccaatgagctggaactacaggcatgcaccac

SEQ ID NO: 51180 - DNA, 648 bp, Homo sapiens
tttagtcaattagcagcaattaatcttggttgctttgcataataaccccataatattttataatttgtttaatggtgtatgctgtaaaagtattgtcctttgttccatttttgttgatgtttagatttccctccctgttacaacgagctttggatatatcattctttatgtttggggaaattatctttactcccttgtgaattattaatttgttaaaaaaaacataaaggattgctcagtatccattgaataacatttataatttactttatgtttgtcttatattaatttgagccatttttaaagccaaaatgaagatgtcttattggaaagatactaaaacaacatttacyaaaaaagattttaggttatagaagtaaaaatttaataactgcaatggagactgatgaatttaagagcagattaaacatagaagagaacattactctttgagaattaataaatttgaatgtgactcaacgaagtatatatttgaaaacttacacaatagaatataggtaagaggcaaagaaaggcatttaaaataaactgtaacaataaccagaacaaaagaatgtagaaaaaatgaaaaaatactgggaaactttctgatcagctatattaagaaaaactttaaaaagtattttt

SEQ ID NO: 51181 - DNA, 504 bp, Homo sapiens
taactgggaaatgataaaaatgtatgtcagggcacaaatattgaggcagagaaaacaggctgttgcaataatatgagtgagwataagtataatggtacctgtaaggtggggggtggcggtggggtcccgataaacatgagacaagtggattccagagattttagaagattgaatcaatagaacgtggcaactgatcgtgcatatagggggtgatgaaggaatgtcatagccaaggacaaataccggataaaggcaggtctctaaatttactgcttggaagaagcaaggtaatggagaacatcagagaagctcctgcattggtgatgagtttgttttttatttattttttatttttatttcaatagtttttggggaacaggtggtgtttggttacatggataagttctttagtagtgatttctgagattttggtgcacccataacctgagcagtgtacactgcacccaacgtgtagtcctttaccccttagccccctcctgccct

SEQ ID NO: 51182 - DNA, 573 bp, Homo sapiens
ccagaaaacaaaagaaagtttgggaggtgtggggaaatgtgtgcctggtggtttagctttaggcaatcatttctagtcaagcacatttttctttatcaatatttatagacaatctgtaacaaaaatcaacttaaaaataaatcatgtttatttagtaataccaatgataactatgaaaagttttggtgtcaacaaggatttatttcaaratagatttgttttatactaacaagtatcctgttacaaaatatcgtataattttaatcgattaaatttgtgattcatattttaaaaagtgattattacttttatgaaaatatagtagcaaatttttcaagtatattaaaatgatattcaatattctaacttgtattttatgcttttttaaggtttatgtttgttgaatttataaatatattgttgaatcttgggtattgaattggcttcctggaatttatctaagttgattatcccttatgttgtgtaccagtgtatgatataagccccaccagaacaaaaaaatgtgcatataggtctttctattaatttattttttataacctaacatcattt

SEQ ID NO: 51183 - DNA, 659 bp, Homo sapiens
ttctggatcccattaggatgtggtttatgccagtttctctctcccaggagacagcccgcatcacacaacatttcactcagctgtgtcgctgagcactgacaaactcaatttacgaaaggcaagagtgagttgacaccatgctgtggcagttgtcctgatgggaggaaacgactcatttccttccaaggtagaatccaccttctctgagaagcatgcttgtgcacaagagtactgaagacaaggaggtaaggaaagcctcttggctgacacaaagtaaaatccctgcagttgaagaaatgctaaaaatcaaatttggttcctggtctttaaagaaaaaacagctatcgcttgccctgtaggcacaacaggctgctattatctttatcaaacatttagtaagagctaactaggtacaaagtaagggagaagcccagaagcagaggaaatggtctctcttttctggagcttacaatgtaaataagaggcaacagataaacatgacaaatacataagccggggtgaaaggcaacacagctaagtcctgaatgagaagcacagaccaaaagaacactaggagttcagaagtctgtgatggggaatttggggaaagcttttctggggaggtgagaattaaataaaagcagttcccccrgccattc

SEQ ID NO: 51184 - DNA, 2129 bp, Homo sapiens
ggagtttcaccatgttggccaagctggtctcaaactcctgacctcaggtgatctgcccacctcagccttccaaagtgctgggattacacgcatgagccaccatgcccagccgggcctcttactttaaattcccatctcccygactccattcactttttcagaacagtagataaaagacacaaagaaacaggaagccggagagaatagcaggctctggccagggcacctgccacacctgaggacagaaggtgaagtgaaacttggagaccatgattctgttaaagcagtttattccatccatcagtaaatgtgacctaatgtagatcaaatgaagaccaatcagtaaagagactcccaggggaggcgctggatgacagaagctgtgtcctccatcagccccctccagctgggcagagaagatgtatatggaagttctgttctcaccatgggcagaagcagtagaaaggagaatgaattacctcacttctcaactggtaatggacaaaacaaggggctgggtatataatttaaaatttaaacctggggatgttaagttatggctccctgcagagggctatggcatgtggggctgcccccacaaaactgtccttgccaatctgtggctaggacttcagtgtaattttatttagcatcacaaacttatgcttatcagcttcatttatttctatactttggtttcctaattcttgatagaagcacttttagaaaattttcatccgttgggtgcaatactcagtttaaaacatattttagcacccatcaagtggtaagtttgcagaaaatgccagggcatactactgaaagccaaagaggaatggcctttggccttagggaactttcagtccagtggcaggtgtgaatgaggttttacatggacgacatttttttttcctaaggccaagacattggaaaattgggaagtggtgtatgttaggagatactaagtatcctacatccctaaagagagaaagtgtaatggcataagaggttccagctctgaccttcttagagaaaccaggaagctggggatctcaccagcccacatgaatttgcctcaaacagttttagacatacgaaggaagatgaagtatacacgcagatggtacatggttctcccagaagtttgtatcgttctgatgacctctctcatactgacttctgttacaggttttgacttagctgtcatactacagcaaacactcctgaaaggcgagtactctgtatctttttctttttgtaactgcacaacaattaatgcagactcataccaaccaaaagctgacaaataagttttaaatgaatgagtatatttgtgttgctaatgggaggcaagaaaagggaaatactaaacaaaaggagcagaacaggttttaaatagaaggtaagcaatggaaaagagacaataacaataagacatggatcagcacagctgctcaaaagaaagtcactcaaccagttttaggactttcaacactcatcactggaactctcattcctccaccccaattctctcctagtgcccaggccttcattagttcccacctacacttgtgaaacagtctcctctaactggtctcttttttctctccctacacatattacacagccagaatacctgtgtttttcatcctggctgtgtgacgttagacaaattatttaggcactgctcctctacttcctcatctttattaaaagaataataggctgggtgcggtggctcactcctgtaatccaagcacttcgggaggccgaggcgggcggatcacgaggtcaggagatcgagaccatcctggctaacacagtgaaaccccatctctactaaaaattcaaaaaaattagccgggcatggtggcagactactcaggaggctgaggcaggagaatggcgtgtgaacccgggaggcagagcttgcaatgagccgagatcgcgccactgcactccagcctgggcgacagagcgagactccatctcaaaaaaaaaaaaaaaagaagaatagtagcatctatgcctcacagagttcttgaaaggattaagtgagttacatgtaaagcatttaaaagaatgtctgacacacattacctgctctataagtattattattagtagta

SEQ ID NO: 51185 - DNA, 619 bp, Homo sapiens
aatggagataatgttgatgcgtcctgatacagtactcagttccaaaccaaacttcagattattggggcagcactattcccaattttctctcaggcataagatttcaattgcctatggagtgtaattggattgtgactcaaagaataaatgtttgagggggatggatagcccattctccatgatgcgcttatttcacattgcatgcctatatcaaaatatgtaccccaaaatgtatacacctactatgtacctgtaaaaaatttaaaaaaaaagaacagaatcacctatgaatgtcacaatgagccttgagtgctttaattaataactctaartgacacttaaatggcaagaaagaatgtccaacacccaatcatagaattcaatctatattttggcactgacactatattatctaatgtgatggactaccattgaccatggaaaacatcagcaaagacaaatagctactgcatagctagtccaactagtctctcttggtcattgtgaatgttttatggtggagggatagagtcacagccctcgtggaaactcacaaaatccatgggcacttgccccagcacaacacagatactgcaaatttctgcaccagttcttaagt

SEQ ID NO: 51186 - DNA, 2168 bp, Homo sapiens
ttgccaacatccatatgcttttgcagaatgtcctgctgatgggcacggaaaagctaatggaaaaatcacctttgaaaataaaacatcaatccttgactttctgacttagtaaagtttttttttttttcacattaggaatggtaatacaaacctgtggtgatgtccctcaaagagatatacatacttacaattctccttcaacaattcctgataatgacaacttaaattaggataactttacagatacttagcatgttgatgcttttggctggtcttttgtgttttttatatttatattcttcctaatttatggcaaaggaagccttttgcttctctgaatagtgggagagtattgtgacttcattcactcattccttttttcaacttattcattgatcccctgttatgtgttagtcagtgaccgtacatagaaagcatatgaataaaactcatctcaggcttcaatcctcacagcctagtgaaaggtaagaaattgcatgcaaacagttataaagcaatatcatactaaataaccaaatcctgtgatagaagcttggaaaaagtgcaatgtgaccaactgcttaggaaacaaaggaaagtcttccttaccaggtaaaactcaactagaaagatgaggaaagaagacattccaagtggagggaataatatgtacaaaaaaacaagacgtattaaagaacatagtattcttagagttcagaaagtactttagcagagctaaactccaaatcatgtaggagacgtaaggagtaaatactataaatatatccagttgaagattctaatgtgccttccatagtatgccaaggagtttgaatgttaccttttaggcaatggagagctttttattaaaggattataaacaaaacaaatacacgatgtgatatgttgtcaatgttacctcatttcaccaaggtggaaacgaaaaaaaaccattagttactctgtggcatgagaaactttgaggtacaaagaagcattttctgacaataagatttgctaagtattggaaagtgttcctgagagaggttgaaaaatcacctcaggaggtctttaaaaatagaacaaattaatttgtcttagatgctttagaagtgattacccattacagcaaggggattcactccaagtcttgtccagatttacagtttcattgttcctagaacactgtagcggatagagttctgcattggttagcaatttgtacttgatcctgtggttgcagattgattacaaaattacagaagcagaatatttactttagaaatatgcatggaatggactctatatgcatgggaagctacctggtgaagacagagcaacttggcttataagacaggtacattttccctttattttgttataggcttgtgaatgaccttgatgcaactccattttttaaaggctatctgaagactagagaaggtgctatcaaggatgaggaaacacaataatgagctatagtagaaataaaggaactcatcctagattaactcagtatgcaggggcaccttgcatcaatgctcaggaaatcagttaaaactagctattactgaaggtgccctctgaggccattaataatctccagaaatgtcatagcttttgagtttagaaaatacatccatgtatattaccttaactgctcttccccaaaacactgaacaaagcttttacaaatgaggacacggaggctgagagaactgcaataacctgccccagtctctatagctactaaggggcataacctagattacgcctctctcagaaacactttatctgaatcttagtccatgcaatatttacaaagtaaggaaacaatggttgggaggggtagggaaaagagagaaaagaaagcaacaatcaaatcaaaatgctaaataaaatgatacccagaaaccagaacttggtacattgtcagggtcaagaataacaccaaagcatattatcagttcgcaaatacctatttttggtaaataacagcctgaaaactaaaaaacatttcctaaaacatggatgaggtaacacattaagaagaggcaaaaacaaacaaaygttttaaaaaatgcattaaccataatgatcagtgtgttgatagagttccatgtgacatatctcattagcaatataaaatagcatgtattataaaataa

SEQ ID NO: 51187 - DNA, 1903 bp, Homo sapiens
atgcctttcttttcttccaaacaagactgtttgcttttggaaagtgctgattttttgttactgttcaccaaagtgtatattgatatgttggtaaatacaatatttcgtgaatggtttgctttaccctttaattgtttactaagagtctcacagatctcaaacaaaattcttaaattttcattataactaatcatttttataggctagtattggaatatgctgtttttgtgaatcaaaagcttatagtatttctgtgtagtcttttttctgcaattatgctgctaacatagctctatatatcatttgttagtttaaaatctttgttgaacatctattttatgcaagacactctgttaagtgctgggaatataaagataacatagcacaaactggttcctattataaaaataaacaacacaaaacataaaagcactgaagttggacagtgttgctcaggagaagaccttttacataaaagccaatctcaagcttaaaaagaaggatactacattagaatttgttatatgtttaatttatgtcccagaggcccacttgttctctgagtgtactagctgaatccaggaggagactatctaaaggggtagaagatcataatattaagaaaatatgttcaattgtcttttgtaaaattttaatcatgggtaaaatatttttttaaatttattagattgatgaacaattaaacccattactgaatatacaaacaaagtacagctaattattctaccaaaaagacacatgcactcatacattcattgcagcactagtcacaacagcaaagacatggaattaacaaagctgcccatccatagtggattggataaaaaaaaatgtggtacctatacaccatggaatgctatacagcaataaaaaggaacaaaaattgtgtctttgcaggagcatggatatagctagaggccattattctaagcaaatgaacacaggaatgcaaactaaatactgcataatctcacttataactgggagctaagcattgggtacaaatggacataaaaatgggaacaatagatagcatgaactactagagggaacagaaagggagggaggccaagggctgaaaaatatctaatatgcatgttgaatattatgctcactacctggatgatagtatcatttgtactgcaaatctgagcatcacgcaacatacccatgtaacaaacctgcacatgtactccctcaatctgaaaaaaaagttgaaattatatagaataaattagaatttagttcaatgtcatttattctgtcatatttgcatacttgtttatttagttttcgaccctgtgattggtaatctaagtccaaggtattttttaaatgacctgaatcatcagaaataaatttgcctgagacaagttaaagatgagtctgcaaatatgttcatgtggtttcctaaacttacattgaagatatttgcagtatcatttataagttaaatataggcattataaataatcacatctttataaaagttatttttcttattaaatgaaaatcaataaaatatcttagaaatgaaaaacttttagataattaaactaataagcttatgtgaaggataaataatggacacctatgagacttagagcaggcctggatttcattcttggattctgattccagctccatcaytatcacattttagttcttataggcaattcattaagacattcaaaactgttcacattggtaaatgagggagtttgatttgattctttggctctttttaacaataaaagtctgtgattgcaaaataaatttccatggtactcttacatacttcatgtcagtttaaactcaagtgtcttttctgaggtccagtgtgccagatatggcttgtcttttgcaaccatcatgccggggt

SEQ ID NO: 51188 - DNA, 1444 bp, Homo sapiens
gttttgagaattaattcagggcattcatgttaaccatttattcagttactctttttttttttttgagacagagtctctctgtgtagcccaggctggagtgcagtggcgcaatctcggctaactgcaagctccgcctcccgggttcatgccattctcctgcctcagcctccgsagaagctgggattacaggctcccgccaccacgcccggctaactttttgtatttctagtagagacagggtttcaccatgttagccaggacggtctcgatctcctgaccccgtgatccacccgcctcagtctcccaaagtgttgggattacaggtgtgagccactgcgcccggcacagttactcttaatattgttatgattatcattattatttaaagtctgataacaatttaattagcacattgtaaaaaacattaggaaggaggagagcaaataaaagttaatttaaaaaaatacaaggatacacatgtctaattaagttaatctctggttgttgaaaaaatttactagctatacagagttaagcaataaatgcaacctgtattgttctcaaaattctaagcctagtacattctctttctgaacagggctccatgtgcccacactgtggtggtttaatccctacagtgcagccaattcagtgccattgtaatgcaaaactttatcctgctttaaataattcacaaatgaagtgataaaagaaaaaagtaattcatgcatcagagattatatcaagttctaggaaaaggacataaacaataaaacatgaaaactttgatttcccatatctcttttggaatacatatcacctaatctaaagttattgacaatattttatctgttcctccaaaagagagagaaaatagcactaaattgttcaaatgatttttttctttaatcttacaattcttagatttttgtgtgcaatgccatgttcttattttcttttaattcaccagtgatatgtttcctcacttcacacctgaatctgccttttggtattctattcagggatcttccatttgatctgatttctttcaacctttcactcaatcaagtaatgttctcattttgaaatgctaatgttcaactttatacagcagttagttgagaacctgtgacaattgcacttagcctatggtaaatattttaattttttaaaggtcccttgccttagcatttaataaactatctcagctaatacagaataacacaatactttaaaattattgtattttttattttatattgttcatgggttatttagaactcctttctccctaaatatcacagttttatataatcacattaatatctccaaataagtacaaattcaataaagcgattgataaacatttttagtagctaatagtttaacaaataatttttaaatttataaacctatggaatgttgttctctctctttttttttc

SEQ ID NO: 51189 - DNA, 1444 bp, Homo sapiens
gttttgagaattaattcagggcattcatgttaaccatttattcagttactctttttttttttttgagacagagtctctctgtgtagcccaggctggagtgcagtggcgcaatctcggctaactgcaagctccgcctcccgggttcatgccattctcctgcctcagcctccgcagaagctgggattacaggctcccgccaccackcccggctaactttttgtatttctagtagagacagggtttcaccatgttagccaggacggtctcgatctcctgaccccgtgatccacccgcctcagtctcccaaagtgttgggattacaggtgtgagccactgcgcccggcacagttactcttaatattgttatgattatcattattatttaaagtctgataacaatttaattagcacattgtaaaaaacattaggaaggaggagagcaaataaaagttaatttaaaaaaatacaaggatacacatgtctaattaagttaatctctggttgttgaaaaaatttactagctatacagagttaagcaataaatgcaacctgtattgttctcaaaattctaagcctagtacattctctttctgaacagggctccatgtgcccacactgtggtggtttaatccctacagtgcagccaattcagtgccattgtaatgcaaaactttatcctgctttaaataattcacaaatgaagtgataaaagaaaaaagtaattcatgcatcagagattatatcaagttctaggaaaaggacataaacaataaaacatgaaaactttgatttcccatatctcttttggaatacatatcacctaatctaaagttattgacaatattttatctgttcctccaaaagagagagaaaatagcactaaattgttcaaatgatttttttctttaatcttacaattcttagatttttgtgtgcaatgccatgttcttattttcttttaattcaccagtgatatgtttcctcacttcacacctgaatctgccttttggtattctattcagggatcttccatttgatctgatttctttcaacctttcactcaatcaagtaatgttctcattttgaaatgctaatgttcaactttatacagcagttagttgagaacctgtgacaattgcacttagcctatggtaaatattttaattttttaaaggtcccttgccttagcatttaataaactatctcagctaatacagaataacacaatactttaaaattattgtattttttattttatattgttcatgggttatttagaactcctttctccctaaatatcacagttttatataatcacattaatatctccaaataagtacaaattcaataaagcgattgataaacatttttagtagctaatagtttaacaaataatttttaaatttataaacctatggaatgttgttctctctctttttttttc

SEQ ID NO: 51190 - DNA, 633 bp, Homo sapiens
ccctcaccagacaccggatctgccagtgcctggatcttgaatctgctggtgccttgatcttgratttcccattctccagaattgtaagtaatacatttctgtttataagccatctggtattttgaactgggtggtattttgttaaagcaacccgaacaagtctaagacaattgtattcttttctttaaaagtataaaattcaaccagtattattaatgtccttcagtgggattcacaattataataagattaaaataaatgtaagcatataaggtcaacgtagttatcttactactcttagagaatcagttgacagaattcaagtctgtggcatttcagcagccctgccagtttgcagatccttgaagcctctttgctaaaacttttgggtcgtttttccaggaagaggggggtggggtttgccacaaaacactctttgggtatacgaatatgttgtctttttaaaaacaaatagcaaaggtcgacttaggtcaacttagctaccatttttccagtgagagaaatgatactcttagaacacaagtgacttgcccaagatcgactccgggtaacagattccgattcaagccctttgattgaaacatccaatactcatgttttgtcttggaacac

SEQ ID NO: 51191 - DNA, 1889 bp, Homo sapiens
cttcctaagtatttgataattacttatggtcttgagccaccagaaccgccaaccctctgagacagcaactcccagaaaagagtgcagaatggggtggaaatgtgagggaaatattaaatggtgtgctgccctgcatctccccagtcagggacatcacaatggcttgaaataggtcctggtagaagtatttacaccacctgaataagcaaatcagagctggggttgggggcaggaagatgagcccttgtacacagctacctgcctggcagggatgtggagatcaggttctggggctgcagttacaagaggaagaggctgtcttccagcaaacagtagaaaaatsgggccaggcttcctccatgaaattatctcatttgacccttgaccaaaccctggactggggactggcataggaggccgagtgagtatcagctggagaagatgcaatcgcaccttatgttcccatctagtttggagaacagcccaaggagtttttcaggctctagacctcaagatccttcttacctctccgcagaatcaacttctttctctgacaagggagaaaggcaaggagaggagggaggctttgctactctctcctgatacctagaaaatctttctggagccaaagggctctgagttgagtttgcaagaggggaggacaaagaagggagtgtgtgatgattttaagcataaaggggatgatgtgggagaattttggaattttttttagggaagtggctgttcaagggaagaactctattgtccaaggagagaaaaggctgggactggtccatcagtgaagagcactttttgcccattatcttctccccataaaggatccactcttggaagcgccccctggggccttggaacatgaagatggctcagatgcccataattccagtgaggcctctccttgattgggacacaaggagctgaaattcattatgtgaatgagtgagagatgggtgtttatactctgcaaatgaaagagagtgtatgggtatgggaggactgtgtgtgagacagggagttcaagcttacaaaggccctgtgtgtttgagcgttcaaagagggcctataattaaagagaaacgcagacaaccaacagcaatgataagtcatttatttggggcaagcaattgttttactacacccggcagttttaaaggtggattgcaaggttttcaacggcactttactttcattctgacccatggggggtggcaagggctgcagcatgtcagtcaagatggcagggacctgacacaggaagtccctcccacttagtgctccccctgccccaatcacagcccagctattctcacccctgagcacagaaactggccatgtggatttgctcaaagggattagcatgtattgcaggcttagtatgtgctaaacattgcaccaagagttatatgtgcattctcgtatttaatgcttgactgtcccctcttggaagcctgtggttccatccaatcacttttgccagggaattgaggatctagggatatgttgagcacttgagtagaggtgatactcaggattggcactccacttctatcactgatctgattctctgactcgtctgtcaaaagagaaggggttatcctagctcagaggtcttcagccagagaactgcatccaaaatctgtggtctagataatacctaagataacgaccaggtcaaatattacatgactgattgaggcctatggaagggaacatagtacagtgatttagagcccatggtcagagggccctgtgtgcatgcctccaccagatcttagctgtgcaatcttgggtaaattactgtacctctctaagcctcacttttctcattattaaaatggggatacaaattctacccactgcctggacta

SEQ ID NO: 51192 - DNA, 626 bp, Homo sapiens
gtgtctgccccccagtttaagttaattttgtttccttattataaactatacacattctacaaaagtaaaaaatagataaaaacattatttgaaaaaatacaaaatatgagaagataagaaaaaagaaaagaaaaagcccctataatcctactgccaaagacacactcttactattttctattattcaggatgggttatgtaatgttatagtaacaaataacccctgctttttttttaatcattttaaacagtaaagattgattctttgttaacattaaatgtcttgcttgatttttgtctttcctgattaatttcctgctcacactaaatgtcctgccctgcttgatttgcctgcagccagagatgcagcctcctccatctggagcagtgcwgcttgacatagcccaggaaaaccacatggaagaatcatacctaagctcttaaagctggctccgaaagtgacatgcttcatctgccgtattttaaaggtcaaactcatgcctggcttccaggggatcagaaagtaaaatctaccatgtttccagtaagaaaaggaccaaaagtattggtgaatagcagtaataattacccaaactctgccaaaccttcacttctctttttttctg

SEQ ID NO: 51193 - DNA, 1711 bp, Homo sapiens
  misc_feature (1)...(1711): n = A,T,C or G
ttnnnnnnnnnnnnnnnnnnnnnnnnnnnnnnnnnnnnnnnnnnnnnnnnnnnnnnnnnnnnnnnnnnnnnnnnnnnnnnnnnnnnnnnnnnnnnnnnnnnntattcatttgcaaatttagccacaaagcatgaatcaaactcaaaatttccatggcaccactaaaagacttacaagagacaattgtgtgtactgacacattatgtaatgtgattaataaatgaaaaactaacatttcaaaatggatgaagtctagtattttaaaaaatcaaaataattgataaaataatttcacataaaagctaaccttattaccttacttaatatctttaaatttttagaagtaacacagaaatttccatctgcttaataattatttatgtagcttcagtgcaatatagttatggttgttttcaactgtgtaaagctacgacgtttctttctactataatgcattcgatagtgaccttgataaggagtcttaaggaatatttgtaggacatgtattcttctgttcagctaccaaactcttcataatcagaatcatcctagcaggcaaaatgattgtgctcactgggaacaattaatgtttactgaacccgataaataatttttttaagagaagcctaagcagcaaatcttttccctatcaaagtaaacaaaataataagtaaacctctctctgctttgacaataaaattttccacaatttactgaactggaaatataagaaaaccagtccaaaaaaataaatattctattattttgaagcaaactatttttagagtgagccaaatattcaattcccagctcttgcctatatgtactataactcatgtatcatgtatttctaccaaaatgcagtgggcttggacattgactgcccatcttgtaacaaagaagaaagacccccccaaaaaaacatgtgcaccttcagaaaggatggaagtgcgtggctttcatgaagagctgcactgtccggtatacagccctgaccacaagaggctactgaggacttgaacttgggcaaggttgaatgaagatggactgtaaaaggtaatgtacacaccaaattttaatgacttttagtaccaaaaaaatgtaaactatctcattaatatttatttaactcacgcagtgaaattatacactaggtggatacattaggttaaagaagacattaaaattaatttcacctgtttctctgtatttttgtaacatgtctattagacaactcaaaattacatatgtgactcacgtttttccattggatagcattggtctggagcctcatttactccattatgcttgtggctgaacctagaataatctagtaatccttacttagaaatctatagtcatgttaaagagttttggtgacaacatcagtgtctgtcatcactagcactcgctgttctaaaccctttccatgtattagctcrtttagttctcaaactgacactcacaaaaccctcctcctgcccccatgataggagacccatgtccttagtatcactgttgttatttaaattctaactggaaagaaactttaggttagactccattcacctgttatcatttagataaaagtgaaattgtacttgtaattttatctcaaaataaataaataatatgaataaaactcgaggaagtaacaatcatctgtgctttttccatttgtaagtgttcatgctattttgtttagccaaaa

SEQ ID NO: 51194 - DNA, 646 bp, Homo sapiens
ggaggaggctttaagtacaaatgaatggcatgcctatgactaaaacactagataggatacaggcctgagggcatgcagagggagcttcctagatggtaaataatgacttaaaaaggaaaaaagatgagtaatgagaggacaggacccagaaggttaagacttaaatgtgtaagttacaaaaggtcagtaacaggaacaagggggccttttaaagaaagggtaattcattgagatgtctgtgaaacggctgatcaatggtcagttatcagaaaatgaagagcacctatgtttggctaagaacagaaatctgtgcctgagggcatcacttcttaaaatcttcttcagacactgaaaaagcttctaatctaaggccttttcarcctcctggagactcaagagaaaaagtgctgagaaacctacaactatggcattagagacctgcaaacccaggagaagggggatgacaggatagagatgcaatagtaaggctaacttcatggatgaaggacacagagtagaaggaaaacttgaaaaccaagaacgtggctttaaataagacaaattgccacatgaatgagtgtacacacccaacataaatcaaaaggaatttctccaaaggattctgaggacaaacttagccctgtat

SEQ ID NO: 51195 - DNA, 646 bp, Homo sapiens
ggaggaggctttaagtacaaatgaatggcatgcctatgactaaaacactagataggatacaggcctgagggcatgcagagggagcttcctagatggtaaataatgacttaaaaaggaaaaaagatgagtaatgagaggacaggacccagaaggttaagacttaaatgtgtaagttacaaaaggtcagtaacaggaacaagggggccttttaaagaaagggtaattcattgagatgtctgtgaaacggctgatcaatggtcagttatcagaaaatgaagagcacctatgtttggctaagaacagaaatctgtgcctgagggcatcacttcttaaaatcttcttcagacactgaaaaagcttctaatctaaggccttttcagcctcctggagactcaagagaaaaagtgctgagaaacctacaactatggcattagagacctgcaaasccaggagaagggggatgacaggatagagatgcaatagtaaggctaacttcatggatgaaggacacagagtagaaggaaaacttgaaaaccaagaacgtggctttaaataagacaaattgccacatgaatgagtgtacacacccaacataaatcaaaaggaatttctccaaaggattctgaggacaaacttagccctgtat

SEQ ID NO: 51196 - DNA, 643 bp, Homo sapiens
tgccaagcctgattcctgattttacctttcactatataacwtacctacccactctttatacccaagtgtcttacccaggggtgaagaactgaaacatcttcctgaaccaggtaagtaacttcaatgcgtgctctattcctgagccttagacaacttcatcctgttggaatgtagatttaatgtagccaggctctgttgttgtagtagagattccagaaatagaaatatttggtttaccagtgtttagatctcctgacagtctttgttctcatctgtccttgttttttgtgaattctgtttgcatctgtatctctgcttaatttccaccacgttggtcccaaaccctcccggccagtttgtcttgtgatttctccctccaccttatagactattttaggaaccggccatgtgaaatttatctctgatttctcagaatgattagttatacttatttccatctgtctttctcagaaaataattgttcatattttaagacatctttgttattgggaagttataatttcaaaagtttatgacaattctaaaaaaacacctaaagggtgtcatgatcatggttttagttaaaaagagtaatcatgaatagtaataattattaggggcttatgagatgccaggctgcagg

SEQ ID NO: 51197 - DNA, 643 bp, Homo sapiens
tgccaagcctgattcctgattttacctttcactatataacatacctacccactctttatacccaagtgtcttacccaggggtgaagaactgaaacatcttcctgaaccaggtaagtaacttcaatgcgtgctctattcctgagccttagacaacttcatcctgttggaatgtagatttaatgtagccaggctctgttgttgtagtagagattccagaaatagaaatatttggtttaccagtgtttagatctcctgacagtctttgttctcatctgtccttgttttttgtgaattctrtttgcatctgtatctctgcttaatttccaccacgttggtcccaaaccctcccggccagtttgtcttgtgatttctccctccaccttatagactattttaggaaccggccatgtgaaatttatctctgatttctcagaatgattagttatacttatttccatctgtctttctcagaaaataattgttcatattttaagacatctttgttattgggaagttataatttcaaaagtttatgacaattctaaaaaaacacctaaagggtgtcatgatcatggttttagttaaaaagagtaatcatgaatagtaataattattaggggcttatgagatgccaggctgcagg

SEQ ID NO: 51198 - DNA, 632 bp, Homo sapiens
aatacttatagtaatgcaaactattcttgcccataaaaatgcaacttttgtctgaaggagagtcagttgattattacatagatattgactagttttgacatttttttaacctattaagcgtatttatttcatcattcctggtggtttatcyatgtgtctttagattctcctgtgaaccagttattgcctcttgctggctttctcattgattagtgatttaattgatatggttgaaatatgttcatcttatatctgtatgagggtcatgattatacctttttccacaatttctcttattctctccctccttttcctccctcccaccttccctcttagagaaagtatttattaacacatagaggaggtggattatatggatgcaaaaatattaagagaaagatcttggatttaaggtttaagcatggctaggtctaataaaaaaaaacactgtcatcttaacctccttatcttacattctataaatctttcctgagaagcaagttagacagaggagtttaaatatctgcattctgatgcaatgctcaaaactttcatgatccttcacaagaagtcagttcttgttttaagtgagtttccttctgattagttcaggctgctaaacataaacggag

SEQ ID NO: 51199 - DNA, 632 bp, Homo sapiens
aatacttatagtaatgcaaactattcttgcccataaaaatgcaacttttgtctgaaggagagtcagttgattattacatagatattgactagttttgacatttttttaacctattaagcgtatttatttcatcattcctggtggtttatctatgtgtctttagattctcctgtgaaccagttattgcctcttgctggctttctcattgattagtgatttaattgatatggttgaaatatgttcatcttatatctgtatgagggtcatgattatacctttttccacaatttctcttatyctctccctccttttcctccctcccaccttccctcttagagaaagtatttattaacacatagaggaggtggattatatggatgcaaaaatattaagagaaagatcttggatttaaggtttaagcatggctaggtctaataaaaaaaaacactgtcatcttaacctccttatcttacattctataaatctttcctgagaagcaagttagacagaggagtttaaatatctgcattctgatgcaatgctcaaaactttcatgatccttcacaagaagtcagttcttgttttaagtgagtttccttctgattagttcaggctgctaaacataaacggag

SEQ ID NO: 51200 - DNA, 632 bp, Homo sapiens
aatacttatagtaatgcaaactattcttgcccataaaaatgcaacttttgtctgaaggagagtcagttgattattacatagatattgactagttttgacatttttttaacctattaagcgtatttatttcatcattcctggtggtttatctatgtgtctttagattctcctgtgaaccagttattgcctcttgctggctttctcattgattagtgatttaattgatatggttgaaatatgttcatcttatatctgtatgagggtcatgattatacctttttccacaatttctcttattctctccctccttttcctccctcccaccttccctcttagagaaagtatttattaacacatagaggaggtggattatatggatgcaaaaatattaagagaaasatcttggatttaaggtttaagcatggctaggtctaataaaaaaaaacactgtcatcttaacctccttatcttacattctataaatctttcctgagaagcaagttagacagaggagtttaaatatctgcattctgatgcaatgctcaaaactttcatgatccttcacaagaagtcagttcttgttttaagtgagtttccttctgattagttcaggctgctaaacataaacggag

SEQ ID NO: 51201 - DNA, 580 bp, Homo sapiens
attggaaatttaaacaaatgagctggtttactaaatggcaaggtggaaaaaagaaatagagggaggaaatctgtagattaaaagagtatgaagagctccatcaaccaattrcagagtatggggcttatttggattctgtttcaaactagcaaaatgtaaaagaatacaatttgagacagttggagaaatgtaagcacttgttgaatattttatgaattaaggaatccttgattactaagctcttttaggcgtgataatgaaattgtggttgtgtattttttaaaggagtccttatttattaggggcacatactgagatctttatggatgaaatattatgatgctcaagatttacttcgaaataatctattaggtgaagagagaaatagaagtaggtggggattagatgaaataagattgtttgtgagtgacagctgttgaagccaaatcatggtgaagggggatagtgatactttgttttctgtctctaaatgtgtaattgacattcccccacccccttttatgcctctgaatatgtaattgacattttccccaaaaagttttaaaagaaagaaagaaaa

SEQ ID NO: 51202 - DNA, 593 bp, Homo sapiens
tttctttgttagcaagtgaaataatctatatttttgttttctattggaaactggattttaactctacatgcaaatttctacattagataatttattcagttttatagaatctatggctacacgatatagtctttttctctctcaaataaattaataaaaatttgacttaattcttcttgctatatctatatayctaattcagttcagactaattgatttgaaatgagataaagaatacaaaattatatatttttactttatgttcctgatattctgcttttatattctttttatttgagatggagttttgctctgtcacccaggctggagtgcagtggcacagttttggctcactacaacctccacctcctaggttattctctcacctcagcctctgagtagctgggattacaggcgctcaccaccacatctggctgttttgtatttttggtagagatggggtttcaccatgttggccaagctggtcttgaactcctgacctcaagtgatcagcccgcctcggcctcccaaagtgttgggattacaggtgtgagccaccatgcgtggcttgcctttatattcttaatatgttt

SEQ ID NO: 51203 - DNA, 429 bp, Homo sapiens
tttaaccatgaaatctcttaaatctacctaytgctccatatctaccagtttatcctcctacaagctttcattaactcttgcttgaattactgattgactaactagtgtctctagatcccctctttaacatctccagtccactttccgtatcacggctagaatgatagttttgaaatacaagtctaattgctttacatcctgttcacacacagtaatgacttccctggtcttgaagtatatatttttttaatttgatccaccaggctttgcatggtctggctcctgttaatcttgcaaggattactttgttttattttgtttgtttgtttcttgattgcacttgtagtgggctgcttccagccctctatatgctcttcccttggcagtatttgaggcctgtatcttctttcgtatccttttgcatattta

SEQ ID NO: 51204 - DNA, 429 bp, Homo sapiens
tttaaccatgaaatctcttaaatctacctattgctccatatctaccagtttatcctcctacaagctttcattaactcttgcttgaattactgattgactaactagtgtctctagatcccctctttaacatctccagtccactttccgtatcacrgctagaatgatagttttgaaatacaagtctaattgctttacatcctgttcacacacagtaatgacttccctggtcttgaagtatatatttttttaatttgatccaccaggctttgcatggtctggctcctgttaatcttgcaaggattactttgttttattttgtttgtttgtttcttgattgcacttgtagtgggctgcttccagccctctatatgctcttcccttggcagtatttgaggcctgtatcttctttcgtatccttttgcatattta

SEQ ID NO: 51205 - DNA, 552 bp, Homo sapiens
  misc_feature (1)...(552): n = A,T,C or G
agtgcagtggtgtgatctcggctcactgcaacctccactacttcctgagttccagygattctcatgcctcagcctcctgagtagctgagattacaggcatgcatcaccacgccggtttttgtatttttagtggagacagggttacacgatgttggccagattggtttcgaactcctggcctcaagctatccacctgcctcagcctcccaaagtgctgggattacaggtgtgagccaccgcgcccagccatgctttttctaaattcttaagtactatgtttttaaaaagttctataaattttacattatatacactttttaggcagtttagattatttttcattttaccttaatcattaagataccctgaaaataagttttctgtttcataagcctgttagattctaatgtctcatctttcatcatattcatcatattcagaccccactcctatgttgtaagaagatccatattgacaaaatttatgtgcttattcctgtaatgtataaaatctctnaaacagtatatttcattttcaccagtaaatcctgaa

SEQ ID NO: 51206 - DNA, 552 bp, Homo sapiens
  misc_feature (1)...(552): n = A,T,C or G
agtgcagtggtgtgatctcggctcactgcaacctccactacttcctgagttccagtgattctcatgcctcagcctcctgagtagctgagattacaggcatgcatcaccacgccggtttttgtatttttagtggagacagggttacacgatgttggccagattggtttcgaactcctggcctcaagctatccacctgcctcagcctcccaaagtgctgggattacaggtgtgagccaccgygcccagccatgctttttctaaattcttaagtactatgtttttaaaaagttctataaattttacattatatacactttttaggcagtttagattatttttcattttaccttaatcattaagataccctgaaaataagttttctgtttcataagcctgttagattctaatgtctcatctttcatcatattcatcatattcagaccccactcctatgttgtaagaagatccatattgacaaaatttatgtgcttattcctgtaatgtataaaatctctnaaacagtatatttcattttcaccagtaaatcctgaa

SEQ ID NO: 51207 - DNA, 562 bp, Homo sapiens
tgactctgtcacccagactggagtgcagtggcacgatctcggctcacttcaacctctgcctccggggtttaagtacttctcctgcttcagcctcccaagtagctgcgactacaggtgcacaccrccacaccaggctaatttttgtatttttaataaaggtggggtttcaccatattgaccaggctggccttgaactcctgacctcaagtgatccgcctgcctcagcctcccaaaatcctgggattacagtagtgaaccacggcacctggccgcatatctctttttatagcttctggatcttactgtagaagaatctctttccctccctctatcctgagtatcatcaccttatacttctaggtgtctaccttgattagggacatgtcaatcttgaggatggaaaagaggagagcatgtgccagcctgaagaaagggagaagaggaaaaaaattatctacctgacctacctcacgctttagtgttttctttttttaagtagatagtaaactccatggaggcaggaaacttttctctgaattcttagcttagcatactgctgagt

SEQ ID NO: 51208 - DNA, 588 bp, Homo sapiens
agaggaacttgattaggtatgaagggtgagagggaagaggaacttgattaaatattaacagtgtaagaagacgagcttgactggatatcaaagatgggggaattcttcattttccccttcgtgggattctttgccaaaactaggctcagcaggcaaaggaagaggcctcatagagaaaagggctcaaaagaacctgactaaagtttgaccaagaaagttactgtcagtaatgtacactatgatgtttcctttcttgtttgttttatctctgtttgaggaggacaaaatgtaagatattaatactgacttaaaaagagaagggacatcacaatggggtttcatatactaggcatctggacttgaagttctaaaacatatgtattgtgactaaagtcttgaaactatstgagttgcattttcttccaaagagacacccatatggaatataacttcttccctccctcctcttctgttccttccttgaagttttaaatacaatgtcaaagagagaaagaatcccaaagattatctgttccaatcttgttttatagatgacaagaaagctttcaaaaaatggaataattaatt

SEQ ID NO: 51209 - DNA, 538 bp, Homo sapiens
gataagggtggcagaaaataataaggcaaagcccaccatatacagccatacagaaagccatgccctgcaccaagcagtttagcaagggagcagatgggtgttgaggatcagactgtgatctcctggccaagcactgtggcccagcaggagcaagaaggaaacccttgttttattcatcagctaggcaaggggccatttcgttattctcacagagtcaccatatatatgcgcagcattaaaggccctgccaaatatgagtacactctagagaattttgaggaagaatacagttgatcagatayagcagttagagaaagagcattcaaagaggataccaaactgtttggccctattaccttgacaaaaaaataaggcagtcaatgctttgtcgggataaatcagttccgctttacctgttcaatacaattccttatttgctatcatgaaattcttaagcaaattcaaataactcttattcaaacaaaaaagaaatacattttattcatatttaataatgctcacaggttatttaattaaa

SEQ ID NO: 51210 - DNA, 538 bp, Homo sapiens
tgatcacaaatgttatctaaaaaagcattgaattactcactgctagttataaccaagatagccttaacttttctctcagcttgattaaactttaggcaggtttcttcctgaataaacgtccctaaccttcctttccctcgtatcarttttacaagctgtggactgaaaattaagcctgttgaggcataaataatttgataaagtttcaccataagccaaatgtgagaatcgaactggaaagacacaccaacaaagttgaaaacatcccagagtctgctacaagttggaacgcttttataagaaagtttaggagaagagaaggggacttctcatatcagaattatccttgttcattggagggtacaatacagaggctataatcattggctacagagtgcaacatatgggctaagatatctacatgcaagacaaccagtaaaatttcatgactcagaaaaaaataagtaaaacttcatgattcaaaaacaattcagcataatttccagcatcagtaggtcatacattaatcagtacatca

SEQ ID NO: 51211 - DNA, 540 bp, Homo sapiens
ctgttcttgcagttctttaaacatggcaaactcacttttgacttagtgttttttcattggctgtcacacattgctaacacttaaatcttcttcaagcctgtttcaatgtgctctagtccacaagaatgagttctacttggactgccctatttaaaattgcagcctgcttccctgcaccttcccactgtctttgattactcatgttgcacatcagcctattattgtcctaatttatatcactaggtacattcaattctgctttcctgagacatttcaatatatttatttaacttgcaccaataatatagctcatctgrtgctaaacctatgtttttccatccaagaaacagggcagatctttaatgaatccccacagtgagttaactctgttttctgatgctatggtaccctctattttctgtttttgcacccttcatgaattgttcctttcatatctgagtaagaaggtatacattttcaaatttatgactgcccacaaaatccaatataagcctgattttatcacttaacgctgaagta

SEQ ID NO: 51212 - DNA, 1905 bp, Homo sapiens
ccgcatctgtaaaatggagagagtcgtgtgtgctgcgttcgctgctccagccagcgctgtgaccggctcctactaatgcgacttctcccaccaccctctgcttcctttcagagctcaagcgcccagctctgcccsaggagcccaggctgccccgtgagtcccatagttgctgcaggagtggagccatgagctgcgtcctgggtggtgtcatccccttggggctgctgttcctggtctgcggatcccaaggctacctcctgcccaacgtcactctcttagaggagctgctcagcaaataccagcacaacgagtctcactcccgggtccgcagagccatccccagggaggacaaggaggagatcctcatgctgcacaacaagcttcggggccaggtgcagcctcaggcctccaacatggagtacatggtgagcgccggctccggccgcagaggctggcaccgggggtggggcctgggccaccagcctgctctgttccccagccagctctgttccccagccagtgcgtgtgatggctggctcagggtctcctctggcaggggaggatcccggctctgttctgttttgtttgtttgttttgagacagggtctcactctgccactgacgctggagtgcaatggcacaatcgtcatgccctgaaaccttagactcccggggttaagcgatcctgcttcagcctcccaagtagctggaactacaggcatgcaccatggtgcccagctagattttaaatattttgtggagatgggggtcttgctacgttgcccaggctggtcttgaactcctaggctcaagcaatcctcctgcctcagcctctcaaagtgctaggattataggcatgagtcaccctgtctggctctggctctgttcttaacattctgccaaaacaacacacgtgggttccctgtgcagagcctgcctcgttgccttcatgtcactcttggtagctccactgggaacacagctctcagcctttcccacctggaggcagagtggggaggggcccagggctgggctttgctgatgctgatctcagctgtgccacacgctagctgcaccaccctgacttctccttagcccgtgtgagcctcactttccacttggagagtccttcctcgcgtggttgccatgactgtgagataagtcgaggctgtgaagggcccggcacagactgaccctgcctccccaacccctaggctttgctaaccgggaaaggagctaacggtgacagaagacagccaaggtcaaccctcccgggtgattgtgatgggtgttccaggtgtggttgggcgatgctgctacttgaccccaagctccagtgtggaaacttccttcctggctggttttccagaactacagaggaatggaccacagtcttccagggtccctcctcgtccaccaaccgggagcctccaccttggccatccgtcagctatgaatggctttttaaacaaacccacgtcccagcctgggtaacatggtaaagccccgtctctacaaaaaaatccaagttagccgggcatggtggtgcgcacctgtagtcccagctgcagtgggactgaggtggaggtggaggtggggggtgggagctgaggaaggaggatcgcttgagcctgggaagtcaaggctgcagtgagctgagattgcaccactgcactccagcctgggtgacagagcaagaccctgtctcaaaaaaaaaaaaaaaatccacatctcccccagagtctgagtctttgccactttgtgggtacaggcatcatcatgtctttggaatgcacccatggccccctgctgtgattgctctgagagacacgctgccgtctcatctgtgtctttaaagctgtggtcacgttcctttgccacaggctgagctggcctgggtgatga

SEQ ID NO: 51213 - DNA, 1905 bp, Homo sapiens
ccgcatctgtaaaatggagagagtcgtgtgtgctgcgttcgctgctccagccagcgctgtgaccggctcctactaatgcgacttctcccaccaccctctgcttcctttcagagctcaagcgcccagctctgcccgaggagcccaggctgccccgtgagtcccatagttgctgcaggagtggagccatgagctgcgtcctgggtggtgtcatccccttggggctgctgttcctggtctgcggatcccaaggctacctcctgcccaacgtcactctcttagaggagctgctcagcaaataccagcacaacgagtctcactcccgggtccgcagagccatccccagggaggacaaggaggagatcctcatgctgcacaacaagcttcggggccaggtgcagcctcaggcctccaacatggagtacatggtgagcgccggctccggccgcagaggctggcaccgggggtggggcctgggccaccagcctgctctgttccccagccagctctgttccccagccagtgcgtgtgatggctggctcagggtctcctctggcaggggaggatcccggctctgttctgttttgtttgtttgttttgagacagggtctcactctgccactgacgctggagtgcaatggcacaatcgtcatgccctgaaaccttagactcccggggttaagcgatcctgcttcagcctcccaagtagctggaactacaggcatgcaccatggtgcccagctagattttaaatattttgtggagatgggggtcttgctacgttgcccaggctggtcttgaactcctaggctcaagcaatcctcctgcctcagcctctcaaagtgctaggattataggcatgagtcaccctgtctggctctggctctgttcttaacattctgccaaaacaacacacgtgggttccctgtgcagagcctgcctcgttgccttcatgtcactcttggtagctccactgggaacacagctctcagcctttcccacctggaggcagagtggggaggggcccagggctgggctttgctgatgctgatctcagctgtgccacacgctagctgcaccaccctgacttctccttagcccgtgtgagcctcactttccacttggagagtccttcctcgcgtggttgccatgactgtgagataagtcgaggctgtgaagggcccggcacagactgaccctgcctccccaacccctaggctttgctaaccgggaaaggagctaacggtgacagaagacagccaaggtcaaccctcccgggtgattgtgatgggtgttccaggtgtggttgggcgatgctgctacttgaccccaagctccagtgtggaaacttccttcctggctggttttccagaactacagaggaatggaccacagtcttccagggtccctcctcgtccaccaaccgggagcctccaccttggccatccgtcagctatgaatggctttttaaacaaacccacgtcccagcctgggtaacatggtaaagccccgtctctacaaaaaaatccaagttagccgggcatggtggtgcgcacctgtagtcccagctgcagtgggactgaggtggaggtggaggtggggggtgggagctgaggaaggaggatcgcttgagcctgggaagtcraggctgcagtgagctgagattgcaccactgcactccagcctgggtgacagagcaagaccctgtctcaaaaaaaaaaaaaaaatccacatctcccccagagtctgagtctttgccactttgtgggtacaggcatcatcatgtctttggaatgcacccatggccccctgctgtgattgctctgagagacacgctgccgtctcatctgtgtctttaaagctgtggtcacgttcctttgccacaggctgagctggcctgggtgatga

SEQ ID NO: 51214 - DNA, 512 bp, Homo sapiens
ttactgtgggattgcatttatttaacctctgcaataagcaaactatagtaaaaaaaaatcagtaaagcatttgcctttgtgaattgaggaggatttatggagaaggatcatggaggaaaaaactttttggtgcggcagctatatcttaataggagtgtagcttacacgggtggataaatttgtcaggcctcttaaaattcacttcagatgtgcacattttacttcatgtaaacttttctactaaaggaattttaaacaytgatgagtataaaagggtcaaatatcccaacaatgtactatttcactttcatccagttctttatgcagagtaaaacataagttttctttatttgataattggccataagctggaaataaatgcaaaatgcagtctccttgagagccttgtaattctatgaaggaatcattattagcatactctagatccagtctttggcaggaaggggcagagtatgtaaattcatagcaatgtatagacaggaccgtggaga

SEQ ID NO: 51215 - DNA, 512 bp, Homo sapiens
ttactgtgggattgcatttatttaacctctgcaataagcaaactatagtaaaaaaaaatcagtaaagcatttgcctttgtgaattgaggaggatttatggagaaggatcatggaggaaaaaactttttggtgcggcagctatatcttaataggagtgtagcttacacgggtggataaatttgtcaggcctcttaaaattcacttcagatgtgcacattttacttcatgtaaacttttctactaaaggaattttaaacactgatgagtataaaagggtcaaatatcccaacaatgtactatttcactttcatccagttctttatgcagagtaaaacataagttttmtttatttgataattggccataagctggaaataaatgcaaaatgcagtctccttgagagccttgtaattctatgaaggaatcattattagcatactctagatccagtctttggcaggaaggggcagagtatgtaaattcatagcaatgtatagacaggaccgtggaga

SEQ ID NO: 51216 - DNA, 512 bp, Homo sapiens
ttactgtgggattgcatttatttaacctctgcaataagcaaactatagtaaaaaaaaatcagtaaagcatttgcctttgtgaattgaggaggatttatggagaaggatcatggaggaaaaaactttttggtgcggcagctatatcttaataggagtgtagcttacacgggtggataaatttgtcaggcctcttaaaattcacttcagatgtgcacattttacttcatgtaaacttttctactaaaggaattttaaacactgatgagtataaaagggtcaaatatcccaacaatgtactatttcactttcatccagttctttatgcagagtaaaacataagttttctttatttgataattggccataagctggaaataaatgcaaaatgcagtctccttgagagccttgtaattctatgaaggaatcattattagcatactctagatccagtctttggcaggaaggggcagagtatgtaaattcatagcaatgtayagacaggaccgtggaga

SEQ ID NO: 51217 - DNA, 569 bp, Homo sapiens
ttctttttgagacaaagtctcactttgtcacccaggctggagtgcagtggcatgatcataattccctgcagcctctatctcctgggctgaagccaacctcatgcctcsccagtgtctggaactacaggcacacaccacctcgctgggctcatttttaattttttttgtagagacggggacttgccatgttgcccaggctggtctcaaactcctgggctcaagcaatcctcccaccttggcttcccaaagtgctgggattgcaagcgtgaaccgccgcacccggccttcactttcatttaagtggttgtgcaattgcaaacctctccactttgttgatgccttctgtgcagcggacatcccagttcttgggtcttttcagtggtcatatggaggctctcagaacaattccaaggagacttccctctgcctagttttctgccaggggagatcggattccaatccaatctcttctaatctctcagctccatccccatggtcttactgttgggttccctttgacatgctgccagtcctctgatgtggtgacataagtcttgttacctcccatc

SEQ ID NO: 51218 - DNA, 595 bp, Homo sapiens
ctgtgccagctggtccaggagtaccttttctccattgagagtggggttccaacaccttcctgggtgggaaggtggttagtgcacctgtggacaggcagcctggttcagtttgtggattgttccatcctgagcatctcctgatcccaggcttgcttgcatgttggcctgaggcatttcatctggtagaagaggagggaatttggacttcattgcatagcttctaaaatggaaacctacagacatcacgtgccatttaatttcattaaatttgatccaattcagttcaactccatattgttcaatttcaaccagttcagcggagggctgcragcacctcctgtgctctgggcaatacggggagtacggatgggccaggcttcgtgctgcccttgagggcatggcttgctggctcaggaggcagatgcgtaccccactgcctaccctggaggaggctataaacaatggctccacggagagccagggaaagtgctgtgggagcagccgagaggaagcaacaactctgtggaaatgttcttttatttatggcgataaaggtacacgtctgtgtaatgatctcttttctgttgtatatgat

SEQ ID NO: 51219 - DNA, 595 bp, Homo sapiens
ctgtgccagctggtccaggagtaccttttctccattgagagtggggttccaacaccttcctgggtgggaaggtggttagtgcacctgtggacaggcagcctggttcagtttgtggattgttccatcctgagcatctcctgatcccaggcttgcttgcatgttggcctgaggcatttcatctggtagaagaggagggaatttggacttcattgcatagcttctaaaatggaaacctacagacatcacgtgccatttaatttcattaaatttgatccaattcagttcaactccatattgttcaatttcaaccagttcagcggagggctgcaagcacctcctgtgctctgggcaatacggggagtacggatgggccaggcttygtgctgcccttgagggcatggcttgctggctcaggaggcagatgcgtaccccactgcctaccctggaggaggctataaacaatggctccacggagagccagggaaagtgctgtgggagcagccgagaggaagcaacaactctgtggaaatgttcttttatttatggcgataaaggtacacgtctgtgtaatgatctcttttctgttgtatatgat

SEQ ID NO: 51220 - DNA, 626 bp, Homo sapiens
aattaaatggctattttttgatgaattattttgaaataagtactttatttccttgttttggacactgtaaaaagtaagagtgtctgaaaagccctcaattgttcatattttcaaaaatatttgaaggcacttgaattcaaaaagatttgagcatgcacacgttcatctgagtctgcatcgtgtgtgtgtgtgtgtgtgtgtgtgtgtgtgtgtatgtttgcrtgtcacaaagaatgagaatacaagagcccagaagaaaggaaagccaagggcttgcttcatagttatttttcttagaagaggatggcggtgctgatttcactattggcaagtagttgtcaaaatggcatggcttcagaagtggggccattgctctcaaaagtacctttcctcaggttttctaacatctgtaactcttatctcaagcattttagacagccttaaagatacttctttgagttcatgtaatattagaagtcatagaaaattacatagtttgtatggtgactacgtggctgatatcaattattttaaaaggagatatgctggtgcaggaaaacacccttttacaactcaacatgctctgggctggcttccccgtggggctctcagggacgggacaggat

SEQ ID NO: 51221 - DNA, 626 bp, Homo sapiens
aattaaatggctattttttgatgaattattttgaaataagtactttatttccttgttttggacactgtaaaaagtaagagtgtctgaaaagccctcaattgttcatattttcaaaaatatttgaaggcacttgaattcaaaaagatttgagcatgcacacgttcatctgagtctgcatcgtgtgtgtgtgtgtgtgtgtgtgtgtgtgtgtgtatgtttgcgtgtcacaaagaatgagaatacaagagcccagaagaaaggaaagccaagggcttgcttcatagttatttttcttagaagaggatggcggtgctgatttcactattggcaagtagttktcaaaatggcatggcttcagaagtggggccattgctctcaaaagtacctttcctcaggttttctaacatctgtaactcttatctcaagcattttagacagccttaaagatacttctttgagttcatgtaatattagaagtcatagaaaattacatagtttgtatggtgactacgtggctgatatcaattattttaaaaggagatatgctggtgcaggaaaacacccttttacaactcaacatgctctgggctggcttccccgtggggctctcagggacgggacaggat

SEQ ID NO: 51222 - DNA, 651 bp, Homo sapiens
atatgatgacacgtttgacccatggcagatgtgcacccacagacacaaagttgtgacatacatagtgaagatctggaatccacgggttctgacttatatccagccatgattattctagtggcatcacgaaacacaaattccacaaatataatggtttcaaatgctaataaaacaatcaaaagctcaaacttaaaaccttatttaatatctttccaaccaagagacagggagaaacccaagaacaaagttcggaatacaccactgcacaactttccagagattgcagatgacctggtcacttacccaaatgtacagctttcactcagcaaaaatttctacatcyataaatgcctaaagcacaaagtgcattttttactgtatctcatcactcagattttacgatggaaacatattacaaaccatatattttgtatttcacacaggaactatgaagaagaacatatcttacatatgtgcgcatgtatgtcacacacacacacacacaccctgtataagatcaagtaaatacattatgtataaaaatattatatgttgcaaatcatgcgtcaacctgtttgaagagtagaggaatgcagcaattgaattttcattccaggttccaagcaatatttcagtagagaatctccttga

SEQ ID NO: 51223 - DNA, 591 bp, Homo sapiens
ttggtttctttgtcttttcctgttgccggaaccaagtcctcctgaatcattatttaatctataatcctataacttcatttaaggtgtttaagtgcayaagcatgttcagattcattttgctttattattgcttaataaaactaaatacaaatgaatgaattacataattcaaacaaaatatacgtctgagttatagctaattttttaatgccaaaatttgaaactcttttaaaattaagagcactcatttcaagcaaactatttgaagaacttttaaaaattaaaccaccaaaagggggaaaatatttatacatttttaaaagataattattaaatcatgtttcttcaatacaaagtgttatattaacattatcacaattatatacttatgaatcctcataatggcaaaatcataaaatttacatccctctcccatccaaatagcaaaagttgctggcttaaaatgtactaatttagaaaaaaactatttacaaattcatatgaaaccaaaaaactgtcaaaatagctaaggcaattctgagcaaaaagaataaatctggagacatcatgctacccaacctcgaactatac

SEQ ID NO: 51224 - DNA, 543 bp, Homo sapiens
tgaaatttcctgaaactatacagatctctctctctttctctttctctgtctacacatcgatacttactaactaggatcaaatatagaattaaaaaatttctctttaaagaaagaaatttggaatgaccagaaatcataaataccccactaagctatttttttctggaagagacaaatactgaatttttaaattatatttttattttctgttttataaattgttgaggtgttcaaatayttgtttacatagaaatacgctaagttatcatcaaatatcttcataggttcttgaaaactgtgactttatgcaaaatcacccacaataaaacaattttgaccataggctaattgatataaacaagcattaagttcatcaggcatatttctagtcacaaaaacatctaatattaaatattgaattaatgtcaactataaacacattttaaaaatgttaataaaagcgagtgagataatactttacccaatttttggtgaatgaaagagtgatggttgttgtactggtggtgggttaaatcaaggaat

SEQ ID NO: 51225 - DNA, 934 bp, Homo sapiens
taattcagtttgatcttgagatgtttacattgagctgtgtaataatatattttatttgcttatttcctggttgtaaatgtgttccttaaagaagtctaatgagtgatttcagataagctagatgttactgtacacatttatctctccctgcaaaacaactatgttcatcataaatgtatgtccaggcaaatcgtaatacaagtaatatattagggcagacaactagtgtattagagtaggccaccttctcattggctcagcacaacacaactttacagtgacataggagagctctgttccacatagtcatctagggactctttatatctagacattcccttattctgaaggccttagagtcactcaagaagtgagatatggaagaaaattaggggatgtcatgcactaggtgtgaaggttgtgtacctctcttgtacacattccagtggctgaatcacagccacatgccacattaagagaggctgggcaatagaaactttagctttgcacccaggaagaaaggaaataaagttagccagtgcgttgccagactctgctgcaattgacatgtgattattttctaaaaggatttttgaaaacctataccgagtagacacattatcctattaacattttcagttcaaattttttcttctttgtttcttcttacaaagtggtgttttgtcactgtacagttttttgttttgttttgttttgttttgttttacttaacatgagttttttcaggttgctgcataactttgtagccataattgtttatctctaaacaagactatactaaagagttagatttaatcacaaccttaaarttgagcatttggttgtttccatttgggagctattataaataacattaagcttcccaactgctgtgttgctgtgttttctgatttgcacagtggcagaaatgatg

SEQ ID NO: 51226 - DNA, 554 bp, Homo sapiens
tcgcagctcactgcaacctccgcctcctgggttcaagcgattctcctgcctcagcctcccgagtagcgggattacaggcrcccgccaccacgcctggctaatttttgtatttttagtacaccatgttggccaggctggtcttgaactcctgacctcaagtgatccacctgcctcggcctcccaaagtgctgggattacaggcacaagccactgcacctggcctgggttacttctttataaaaaaataaaggctgtttccttctccctggaaggtacagcaagaactccaggtaggagagcaaagacttttttttttttttaatggctccctacatcttaccacaaatattttcattcactctctctaatggaccagcggtgatacttttaagttcacatgtctcttttctgtccatattgtcattgtttatatacatatgaaaaacacatataaattatttcctttcaaagcatcagcccttcaaagagactacatacttttaaaacaataactactgagaaaatagtatcttgctttaaagtagtgtggtatt

SEQ ID NO: 51227 - DNA, 560 bp, Homo sapiens
cgggattgtaatgtcagctaacacttggaacacacagtagcagaataactctatattaacaaggcaaatgaaatcacagaaacacatgaataaagaatattgcaattaataatttgaaaagtagaccgatatagtcagtgtctattttaaaatgccatttggatatatacttttgtttgagaaatcagctttcgaatatcaaaaatgtgttgtcaaatgcttttctttagggttttgaattccttggctggtgaaatagaaaagctattaacacaattcacatttttataatctakatgtgtcattgatcactcatatcctcttgctccttcagaagttccccttaaacttcagtctgcaatcaactccgtccctttatcaccttatctgaaacaaacccaaatgaaatccccgtgggccaaatccctctccgtacttgcagcagacattgtcccccaacccgtcttctgccctgctggaaatacttaagagttgttctttcaatgaattcttgatcccttgtgaatatttcatactaattagcctttttcttttgactg

SEQ ID NO: 51228 - DNA, 560 bp, Homo sapiens
cgggattgtaatgtcagctaacacttggaacacacagtagcagaataactctatattaacaaggcaaatgaaatcacagaaacacatgaataaagaatattgcaattaataatttgaaaagtagaccgatatagtcagtgtctattttaaaatgccatttggatatatacttttgtttgagaaatcagctttcgaatatcaaaaatgtgttgtcaaatgcttttctttagggttttgaattccttggctggtgaaatagaaaagctattaacacaattcacatttttataatctatatgtgtcattgatcactcatatcctcttgctccttcagaagytccccttaaacttcagtctgcaatcaactccgtccctttatcaccttatctgaaacaaacccaaatgaaatccccgtgggccaaatccctctccgtacttgcagcagacattgtcccccaacccgtcttctgccctgctggaaatacttaagagttgttctttcaatgaattcttgatcccttgtgaatatttcatactaattagcctttttcttttgactg

SEQ ID NO: 51229 - DNA, 647 bp, Homo sapiens
caatatttaaaattatttaaaacacaaatatatcaaaatatctcctgaagataacgaaaggagaaataaagaaataaagagaaagggagagtgagacagaaagaataaagaaagaaagagagaaagaaagaagaaagaaagaaagaagaaagaaagaaagaagaaagaaagaaagaaagaagaaagaaagagcaagcaagcaagcagcagggaggaaggaaggaaaaaaggagagaatgagagaaaaaaggagagagaggaggaaagaaacagaaaaatgcaaaagaagacagaggaaaatggaaaggggaaagaggaaaaagggaaaggaatggagaggggaggagagaaaaggaaaggacaggaacatatttccttcataactcagtaaatggttctaaagttatcccagttactcaagcccaaatcctaagaggtcagcagtgtttcttctctttcctttatctttcacatgtaggcatgtacaattgttctcctttcatatgcaatccacaatatctctactttcaaaacatcagaaaaaaaggccagtgtggctgagtatagtaagaamaaaacggtattataaagattaacagacattggttttgtctggttttattgactctcatgtttcatggcacaaa

SEQ ID NO: 51230 - DNA, 550 bp, Homo sapiens
aagactgaaaaattgacacaaaattttttagaagtacctagatattaaattttgctatacattattaatgttttatataacttctatatttttggatacatatgtgtgtgtgtgtgtgtgtgtgtctccatctctctcttatctatgaaagactcacaccaaaatgtgaatagcatttgacttgagtggatatattattataaataattctttttttgtactttttggagtttttcaagttttctatcttgggtatatagcacttgtgtaaaaacataactataatcattattaaaaagagcaaaagtatatgaaaattttaataagcaactccaattatatttaaattcatattaccagtatttaaatgaaggaaacactcataagcttatcatagaatgccattcatttccctaaaaaaaaagtacagctcagtctaggttcatgtattaattttggggtaatatttgttagcatcagatgttaagggcatagtatttgatcycaagtagtcagactttccaatcatccatgtacctctctgaacaca

SEQ ID NO: 51231 - DNA, 1564 bp, Homo sapiens
gccatgctacccagattccactataatctagtcacttaatacaatttttcttatcacttgaggaaggaacactttccctaatgcccatgaaggaacaaggattctgatagcttaagacttaaataacctagtgataaaggaaggcagtggaaaagcaaaaaaaaaataaaaaaataaaaaaaaaaggcaaagagacagaaggaatgaaacatgaaacatgagtaacgtgaggtctgtgatatccatgtcactgtaaggagataaagtttattcactcttaatactgtacagtattttattgtatggctataccactgattattcaaccattttgctaatgatcaaagattatattttaatatcagtagttacttgtataaaagattgttgtctatgaatttaattttagaatagatttacatgaataaataattactgtcatattcacattggtccttaataagattaattcttaataggctatgtccaggaggagaagttgagcaaaaaccttcttgtcccaacacaaacacagacacacacacacaggttgagtgaaagaaaaggggcagattgtgtctgtaagttgaatgaacagtatgagaaaggaagtaaagttaccaagctatgcttgaaaccgactgagttaagactatgttgagaaaaaagatttatgactgacaccactgttttccaaaccttacgtatagaggtcaataagactcttatgaaactcatgggcttattatggaataatttttatttatgaataataaataatttattattttcagttttaaaaactttcttaaatctatagaagaaatgcagaatttggtttggttgtttatgcatagacacacacaaacacatatgtgcacaggctgaaaagcaaatggtttataagacctgcctatagaggtcccacaaatgattgagtcagacagctaccccttttctttatttaattgaaaataaggtgtattttgcaaaatagaacatacaatttacccacaggaagtgtgaatttatgcaggtttcctatatgaaagtgtgccttgcactgatctaagatagaggtctaatgccagtttaaacctgatgatatactctctcccatagtgccatagcaataatgtttctgataatgagttcctgtggactggccattttctgtttcactacactcatacacaactcaggttctggctcagtctcatacatgtaaccagacttagtaagctcaggggacctagctatccaaggcaaagttgaaaatttccttatctcccacattgttacaatgaatctggctttaatatgtgtcccagtcctatcaaatttgactgtctacaaagcttgaaatgatcacaatttaccaattatccatctccttttttttgtctgcatgtgtgtgtgtgtgtgtgtgtgtgtgtgtgtgtgtcatatattcataacaacaaaaattgtatcattatagaatcaggtattaccctgtccaagaataaaatcaaatgttactctctcttaccttatttttctaataatttatgactgaaygaaa

SEQ ID NO: 51232 - DNA, 526 bp, Homo sapiens
caatctactttacttaaaatccacagatttaaatgctattctcatctaaaaagaaaagcatctttatggaagtatctggaataacgtttgactaaatatgtaggcagcatggctctggcaagttgatgtataaaattaaccatcaggatgcccaaactgttagtgaaaacaaaaaagaaacataaaattaacacagtaagatacaggaacttgggagaaacatgaaattaactaactgcatgatttaaaaaacactaacataatccaaatccaaatataacattaaaatatctacaaattgacttaatagtcaaaattcagaagaatttcaagctcagcgacataatgaataaaataatctgaaagctcttcctgttayacacaactaaatccttcataaaaatgctttttattataacactgcattttcttggataaaaagtaaatcttctagggtcagtcacatacatcacctataaaaaaataaagctgagttcaaaatggttggcaataaacatgcttaaaa

SEQ ID NO: 51233 - DNA, 513 bp, Homo sapiens
tctattcattttaaagtttgatatgtcttatcctcactgttaatttggcacagaagccaaggtttagtgcctaattgaaaacctccatacaaagtttagacaatgaactggaaaccctatcagagaatctgaagccttttacaaattaaggtcaatcttccgtgggattgttttgcttttgcaaactggtcaagttcctttgtttttaatgccctcgcttttattgtttattagttatgtggaaaacacacgttcaggcggtgtctgcaggcttggattttgtataagccaggaaatgaagtcagcagacctgcaggctcagcagtgattcaacctctccttcctgagagaagcaggcacttcagaggtatttaaagaaaaatgcaaagacagtggcaaagaaattgtaataaatgtgtttagtagtttgccatgtacttagaaccattccatttatgtaaaactttggaggcawgaaaatcctaggtggcacagagctttttcatatcaata

SEQ ID NO: 51234 - DNA, 283 bp, Homo sapiens
gtaaaatagcacttgcgcgttttcagtgttaaagagctaaattaaagctgcttgtaagatttgtaaaataaacagttgccctggggaaatgtctttgaaatgatcctgcagaggggcacctgttgggcgaatttctccctgtccctgtcgttctgtcttcactgaaacatattactattagaatcactcttttccttaaaatackgcacaaaattctagtctttattatcaaataagcgtcaaagctgttctgtacctagtaacttggaggaatggctgatca

SEQ ID NO: 51235 - DNA, 544 bp, Homo sapiens
gcttaatttcgtggcaaaggataataaattcaactgtaatagtgaaatatacaattcaaatagaaactttaacatcaataacttgaaaatcctattatagaaaagttactttgattccttgcccttctctrtgaaatggacatgggtgtctctatcgctcccaacctcacagagaaaaaattaaatgatgctttttagtatccagaggaaaaataagatttcatatgcatcttaggcatttttaacctattttgtgtcacctgtgcttgtgtatacttttggagtacttcagagaacacatgtccaaggatgaaatagtaccaaaagcaatggtttcaatactccaataaatcagaccacccgggtaaccatttggggaagaatcaaaagacttgtattttggaaaccacattttttggtgctaatgataaaggaaatgatcttatttcctatgccagaccagctaagggtttaatgaacaaacacacagtttcattacttttgcttctgttctaacaactgagagtatccatcagattcacct

SEQ ID NO: 51236 - DNA, 677 bp, Homo sapiens
ccgagtagctgggactacaggctcacgccaccacacccagccaatttattttgtactttagtagagacagggtttcaccatgttagcccatatggtctcaatctcctgacctcatgatccacctgcctcggcctcccaaagtgccgggattacaggcgtgagccaccgcgcccggcctaaaatattttttaagatccctttttgcattgcatgtggaacatgtgagagtagtggtgatattggtatttggttaagaaatcccagaacaccacaaacggatgtatattttctcctttatgacttaccctgtggagatttcaaatgtgattctacagaaattgatagtaattttatcagaagactaagcatctccctaaatatcagaaaatctaatgtcgtttacttaaaaattttctttcttttgtgtgaactgagatttgtaatttgaaccctacgtgcctaaatttctcagctgttatatagtttaatatatctactcatatcctagatttcttaaatatgctgggtcgttggggagtgtagaacattgctgattatatagtaaactcccacttgttgccttcctttaaaataattgtcattttataattttctcttgtttagtatgaaacttcatyggtctgtgtcatttatatatatgtgtgtgtatatatgta

SEQ ID NO: 51237 - DNA, 579 bp, Homo sapiens
acaaaaattagccaggtgtggtcgtgtgtgcctgtagccccagctactcagraggctgatgcaggagaatcgcttgaacccgggaggtggagggtgcaatgagctgagatcgttccaccgtacgaccatacgagctgagatcgtgccaccagcctgggtgacagtgcaaaaaacgaagaaagaaaaagaaaaaaaattctgcagagtccccacagcaagaaggccctcaccaggagcagcctctcaaccttggacttctcagcctccataactgtaaaaaataaattcctttttgtttatataccttgtttcaggtattctgttataagcaagagaaaactaacccagaaaattaaaaatatatatatattttatatatatatctttttataaatcacaatatcacaggtagtcagggaggcctcagtgagaggggacatttgagcaaagacttgaagaaagtgaaggagcaagtcatgtgagtatttggaggaaaatattaagagaaaagttaagaataagggcaaagagcctggggcagaggcatacttcaactgtgaaggaagtagaaaaaggcca

SEQ ID NO: 51238 - DNA, 577 bp, Homo sapiens
gacccagtttctctgccgaagtaactcataatctagttcagaaggcagacatataaataaatgtttacactacactacagcatgataaatgctatgatagcaccccacacagttgatcagtgagtgtagaggatcagccatacctcctggaacttgacaagggtctgtgatcttcccccacccttgaccatcactatacccctcagtgcccttctatagtatggctccaaagcaactaccaatgcccattaaatctgagtgtccctctgaactggcaagcaaagaattgggctcattgcctrtaaatcactttgagctcttgggaagaaaggcacttggtaaacaaggactgggattatctcactgctttataagatcaaagcactttacaaacattaaccaattgagcataccaggttgcagattgttagtctagtaatgagtctttgtttaagctctatttctttctaatatgcctgtctactctttgaagttgtgacttctacgttgacttcaattgacaaagaaatcctttctttgtcccaccttctctactcctagagaaccttatctcagt

SEQ ID NO: 51239 - DNA, 536 bp, Homo sapiens
tttaccatgcaggtcatgatgataaatatttttctttctctgccattttaggggtgggggctctgtagggaatggtggagggaactgcaacataagaattaggcttacagttcttctggtgctatttctgagccttctggagaataatcactgtcttcctggacaagcgatacttgtgtttcatctatttctgtgtgactgctcctttatgagagggagagtaaggatcaaacattctgaatttctcagggtagacggtgtagtcttgaagcgtttagacwacttacaaagttcctgtgttaataatgtagaaccctttgagggcaatggtgtgcagacaaatatttaacagcttactggaggagccttgatttatggcatttactgatttccctggtgtaaatacttccactatagctgatttcaagctactgtggtgagttcacaaagcttacagttgggaagaagtaagcacaaccccctttagcaagccaatccgagctggctccagcacaccccttcctgagggcactcct

SEQ ID NO: 51240 - DNA, 591 bp, Homo sapiens
ttcactttctggacagtaactcttcccacgaggcatgtaagctctatttgacattggcattttcaatctcctttaaagctaaagtagggaatacttgtacgaggttaacagaaaaatgaatcaaaattatccctattaaaaacctatcttcttttcagtggaagaaaatcattttttttttttcttggggatgatgccccagaaggcatgactcccctctgggagttcatggatctgtgatctttctggggaatcactgacaattaacacgcctctgggaagcaagacctatataagagagaggtgaagggaggggccttcctaattgaaaagcccagagatctagctagacacttcagggaaatgtactgtttgaacttgttctgggagggccagctgatcagttagattaccttttgacacacaacaaaagctctttagggtagaactgcaggctctgggtagagcttcccatttaaargcaaagattgcctgtggcattggggcacacccaagtcttctgacaactagctaccaagctctagagcatgacaaaaataaggggatggagaataggaaatttgacaaaca

SEQ ID NO: 51241 - DNA, 590 bp, Homo sapiens
atgagagcagaatccttatcacttaatcacttcccaaatgctccacctcttaagaccaccagattggcaattgtttcaatatgtgaatttgcggggacacattcggactatggctatgtatatatatatatatatatatggtattttatatatataatttatagtctgtgtgtgtgtatatatatatgttatatatatgttatgtatatatacaccatattttcattatccactcatttgttaatatacacaattattatttgccacttgaaaataaagtgtaaaaaaccacaatgactctttcagataatacagagacagggaacttactaatgctccaatttcagaatcaagaagaaaaaatgtacaatttgttttacagttgaaagaaaacatttaagacctaaaagattagtgactgaaaagtcattaaagctattttaactcagtgatattaatttataaatgagaataatcaaagcttacaaaggaaaaaaatgatcacatagtcgatttgttctttatttgaaacttacctcacaggctgctgcatgaactaaatgtaacaraaaaccccttaatattttcta

SEQ ID NO: 51242 - DNA, 562 bp, Homo sapiens
tatatatttatggatgaagtttaacttatttctggtaattttttaaaaagcttcggtgtggtcaaacatttctaactacagtaatggcattatcagatgtgtgtctgtttttaagcaygatcacaggtaaccatgtgaagtttgccattagatttattaccacagatggcaaagcctgtattttggaccagacaactttcataagtaatgtgatggatacgtatataccgagagatttctgactaaattttcagtctttttttcttccatgtggttggtcagattgaattttagcaactgtaatgtgccaatgaaccctggcatttaagttaatagggtaaaaatgaagacacagcgtgctctctgaatggttgtaacagcttgctggatcatcaatcatgaagcagctcatgctaggaataaacaacaaagaaaaatacaaacaatagttggtaagaaaggggtgtcgctgcatttaaacaggcataggaatatatttgtaacattaaaatgtcagaaaatagcgtatgtatactcatagaatatttgaaaggctgtgtta

SEQ ID NO: 51243 - DNA, 562 bp, Homo sapiens
tatatatttatggatgaagtttaacttatttctggtaattttttaaaaagcttcggtgtggtcaaacatttctaactacagtaatggcattatcagatgtgtgtctgtttttaagcatgatcacaggtaaccatgtgaagtttgccattagatttattaccacagatggcaaagcctgtattttggaccagacaactttcataagtaatgtgatggatacgtatataccgagagatttctgactaaattttcagtctttttttcttccatgtggttggtcagattgaattttagcaactgtaatgtgccaatgaaccctggcatttaagytaatagggtaaaaatgaagacacagcgtgctctctgaatggttgtaacagcttgctggatcatcaatcatgaagcagctcatgctaggaataaacaacaaagaaaaatacaaacaatagttggtaagaaaggggtgtcgctgcatttaaacaggcataggaatatatttgtaacattaaaatgtcagaaaatagcgtatgtatactcatagaatatttgaaaggctgtgtta

SEQ ID NO: 51244 - DNA, 1287 bp, Homo sapiens
ttccttccctttactctgtatttatgttaatgtgtacaatttaaactaagacaacaacacacttaagccaataatcttcatgtaaaaccaaaatgattatgtaaaaaacagctactgtaatggcatatatcccaaactattctagagctccagttttccagttgatttayttatactttttctttcaactctatagaagtgacagcatctgtacagggttaaacaatttctgatctcaatgtttatctaggggaatttaaaaatctctttggaaatttggctaagagactgagagataaacagaaaactgaaagatgggaagaataatactggtaataattagctggatctaaaaatgagactacttaaaaagatctctaatactgccctaactgtataagcatcacacaaaggggatagggatgcagtgtagaaaattaacactatccctgagacaggctaatttgggctctggtgttatctctgtcctttgccacttctataacttcaggcaagtttctctatgtctctaggatcatcaaaaaaatggatttaataaccatatatacctctttggaatgttgacgactaaataggatagtttaagactttaggtgtagcatggtgcctcagagcataataactgctcaataatattagctgttattatcatgtagcagcaaactgtgtataaagggggcgcctataaatattgtagttgaattatagcaattggccatcgtcaaaacatttggaaaggtaatatcaaaaaaaaggaaatgaatcttttcatctgcaagtgtcacagaagggacatgacttcaatataaataagaaattgctttaattagccaagtaatttaaatactatgataatgctggttgttaggaggctagtacagacggtcagggttgggatgggttgtgtgtggatatgaaggagcaatgtgagaagtgggactgtgaaataaacaccaacttctaaactttcaatatttcctggctatttcacttatttttgtaatgtattcttttatttctttggacattcaaatttaagtttttttaagagaaaacaaatatacgtattaacttgttaaaaagtgtgatccaaatcccccaactgtaaaatgatgcattgtctttactgaattttctcaataatgtaaattccaggatgcatgtggcttttcttatacccattccatttgctacacctagtgagatttaattactgtgtcagcaatctactttattgttgcaggaagtcagggactctgaacggag

SEQ ID NO: 51245 - DNA, 2655 bp, Homo sapiens
tacagtaaaatgttgtaattcagactccactgaattgcaggcttacctgaaggaggagtggagtgaaattgacccctgcctttgatgaatttcagagcatcagcatgatatcaggggaaacctttgcatatcttccttaacaactgtttttttttttttttttgagactaaatctccctgtcactgaggctggagtgcaatggcatgatcttggctcactgccacctccacctcctgggttcaagtgattctcttgcctcagcttcctgagtagctggaactacagatgcatgccaccacactcggctaatttttgtatttttagtagagacggggtttccccaggttggctaggctggtcccaaactcctgacctcaggtgatccacccaccttggcctcccaaagtgttgggattacaggcgtgagccaacacgcccagcaacaatgtctattgtaaggcatttcactcgctgtattcaaagttgctgaatgttttcaaagattatatatgtttgtttcttgaaataaatatctcatgttgtacccttagtgatattggagcatgttcttccagggtatttgtttttcagagggttttatgaaacatgctcattagcgagtagtggagagctgaagaggcggccaggtttggctccaacgtttaacagaggatgtttgacaaagtttaacagagcctggccaacatggcgaaaccctgtctctgctaaaaatacaaaaactagctgggcgtggtggtgtgcacctataatcccagctactagggaggctgaggcacaagaatcacttgaacttgggaggcagaggttgcagtgagctgacatcgtgccactgcactccagcctgggccacagagtgagactgtcttaaaaacaaacaaacaaaaaaaacccaaaaaaacaaagtgggtcaggagtgcagtgatgtgagacatagtcaatgtagagaatggcaggctattctggaaaagttagattaaaaccgtaaggctaagaactgataaggttaactgatcatttttagtatgtttcagcttgttgggcttccctttctctcccatcctccacactccttttactttttcttacctattaccacatttcaagtgtatttgtttttggacaggtgggtcgccttctcttgtcaccacattgctttgtccaattctatggatggagggaaaaggcaatgtgacaagaggaggtgacccgccaaaggccaaatgtcgcaaatgtagacctgtcagtagctgtggtgcaactggagtaaaaccttgcccctctctgagcttcagttttctcttcaggagattaacatcctcctgtgtctctgacaatctcaataaaatgatcgagagatgaaatagtcgtgagagtttgtatatcacaaaactcctgagttcttaggaggacagggagggattatgcagcccatgcatcacccacggacttcctttcctttgcagctcctttctctttcattttccttctaggacggtcaacagtgtgtgctggaagggaagctagactaggaagagggggcgatattgaaacatgccatttttgattttgtggattgtttttagagtacattgggagtgatggttacctctgtttcatttaacctagtggtctgtgtctcttgttacctaggggatgactaagagctgatatagcacctggcttcaccctggagccttcgctctggttaaggacgcagtatccatgcagacgtttgcaaacagcttacttaggaccaggtatattattaaggtctgcccaagaacagcaagatctgaatcttggtaacccatggcaggattcctagacaccagtgtcaggctggatgacttccaggatcaagaaagagatggcctcctttcgaggcaaggaaacagctgggctcttattgctaaatccaagaattgctcattaatagcctgacaggacagagttgcttcgggctgcagggccactttgctttaatcgctggattgaggattatgtcagtaatgcttaaactgcagaaaagttagtgccatgaaaaggaagaccagacttacctgtaataccccatagcgcaagatgtacatgttcctggatcatctggaaaaaaaaaataataaaaartaataatcatgaggaattcgtcatttggaaaaatagggtctgaaagctgtagcttgagataaacaatcctgtgggatagtttcatgaaatgtactgtccagaaataatatttgaacagattgtactgtttttaattagcaacaagatgtacactaggatttatctttatcaaaggtagtaagaattctcataaacacttggccctgactttcaaggaggaataggttcaagctactgggtcttcgaattaaagatcaacgaccatccacattaagaaccccctggcctttactgagatagagggatcaaccaagtccacacacaaatatttggaaggggctacaagcttctgaccctgaatagagggttttccatcagttacccaagaatcttgccaatggaagtgagcatcatttggggcactccttcgaaatctgcacaattatttttcccaagtatccacttcatgttacgcccttcgcaactttcttaaaaaaactgtcttg

SEQ ID NO: 51246 - DNA, 2655 bp, Homo sapiens
tacagtaaaatgttgtaattcagactccactgaattgcaggcttacctgaaggaggagtggagtgaaattgacccctgcctttgatgaatttcagagcatcagcatgatatcaggggaaacctttgcatatcttccttaacaactgtttttttttttttttttgagactaaatctccctgtcactgaggctggagtgcaatggcatgatcttggctcactgccacctccacctcctgggttcaagtgattctcttgcctcagcttcctgagtagctggaactacagatgcatgccaccacactcggctaatttttgtatttttagtagagacggggtttccccaggttggctaggctggtcccaaactcctgacctcaggtgatccacccaccttggcctcccaaagtgttgggattacaggcgtgagccaacacgcccagcaacaatgtctattgtaaggcatttcactcgctgtattcaaagttgctgaatgttttcaaagattatatatgtttgtttcttgaaataaatatctcatgttgtacccttagtgatattggagcatgttcttccagggtatttgtttttcagagggttttatgaaacatgctcattagcgagtagtggagagctgaagaggcggccaggtttggctccaacgtttaacagaggatgtttgacaaagtttaacagagcctggccaacatggcgaaaccctgtctctgctaaaaatacaaaaactagctgggcgtggtggtgtgcacctataatcccagctactagggaggctgaggcacaagaatcacttgaacttgggaggcagaggttgcagtgagctgacatcgtgccactgcactccagcctgggccacagagtgagactgtcttaaaaacaaacaaacaaaaaaaacccaaaaaaacaaagtgggtcaggagtgcagtgatgtgagacatagtcaatgtagagaatggcaggctattctggaaaagttagattaaaaccgtaaggctaagaactgataaggttaactgatcatttttagtatgtttcagcttgttgggcttccctttctctcccatcctccacactccttttactttttcttacctattaccacatttcaagtgtatttgtttttggacaggtgggtcgccttctcttgtcaccacattgctttgtccaattctatggatggagggaaaaggcaatgtgacaagaggaggtgacccgccaaaggccaaatgtcgcaaatgtagacctgtcagtagctgtggtgcaactggagtaaaaccttgcccctctctgagcttcagttttctcttcaggagattaacatcctcctgtgtctctgacaatctcaataaaatgatcgagagatgaaatagtcgtgagagtttgtatatcacaaaactcctgagttcttaggaggacagggagggattatgcagcccatgcatcacccacggacttcctttcctttgcagctcctttctctttcattttccttctaggacggtcaacagtgtgtgctggaagggaagctagactaggaagagggggcgatattgaaacatgccatttttgattttgtggattgtttttagagtacattgggagtgatggttacctctgtttcatttaacctagtggtctgtgtctcttgttacctaggggatgactaagagctgatatagcacctggcttcaccctggagccttcgctctggttaaggacgcagtatccatgcagacgtttgcaaacagcttacttaggaccaggtatattattaaggtctgcccaagaacagcaagatctgaatcttggtaacccatggcaggattcctagacaccagtgtcaggctggatgacttccaggatcaagaaagagatggcctcctttcgaggcaaggaaacagctgggctcttattgctaaatccaagaattgctcattaatagcctgacaggacagagttgcttcgggctgcagggccactttgctttaatcgctggattgaggattatgtcagtaatgcttaaactgcagaaaagttagtgccatgaaaaggaagaccagacttacctgtaataccccatagcgcaagatgtacatgttcctggatcatctggaaaaaaaaaataataaaaagtaataatcatgaggaattcgtcatttggaaaaatagggtctgaaagytgtagcttgagataaacaatcctgtgggatagtttcatgaaatgtactgtccagaaataatatttgaacagattgtactgtttttaattagcaacaagatgtacactaggatttatctttatcaaaggtagtaagaattctcataaacacttggccctgactttcaaggaggaataggttcaagctactgggtcttcgaattaaagatcaacgaccatccacattaagaaccccctggcctttactgagatagagggatcaaccaagtccacacacaaatatttggaaggggctacaagcttctgaccctgaatagagggttttccatcagttacccaagaatcttgccaatggaagtgagcatcatttggggcactccttcgaaatctgcacaattatttttcccaagtatccacttcatgttacgcccttcgcaactttcttaaaaaaactgtcttg

SEQ ID NO: 51247 - DNA, 567 bp, Homo sapiens
gtgaaaaataaaatgtatctttattctctgaaacccttttgaccctggattttatctatagcatggcacatagcatactctgccttaatcgtggttcattatataattggaactcctacgggattgttaatttcttatgtacaagaaacgacaatattgttgaaatatctacatactagaaactcaataaattttctttgaatttagtattcattgaaatacatccattgcagatctagacaaccagagatggccaaatgccttgtcttgtaaaatgtcagagtaatgcacaaacaactgacagtaacagctaagtcccttatctcttcttaacctaaagcaatattttcaatgttttaaaatagcttgtgcttgatgcagtatttgaacggaaaggataataaacagaaatcaaggtacagtttttggaagaatagcataacttttgccttgtcmaaggcttttggtatgaatggaactggatcttaatccttttaaggatactttctgcatgcctatacagctagtgatttatttttggtttttaagggtcatattttcataaat

SEQ ID NO: 51248 - DNA, 1836 bp, Homo sapiens
tgctttaatattccgtgtcggtgatctctccttggtcagcaggtcaggtttggtttggtttgtttcttttttttaagagggaaaaataactaagattttttattaaatttgttgaggaaaaaatgactcaatatgaattttatacacacacacacacacacacacacacacacacgcccttatgagtaaatgttgaactaagagaattgctgattacatcttttctttaaaaaattaaaaaaamttttttttttgttttttcgtttttgagacagagtctcactctgttgcccaggctggagtgcagtggcaccatctcggctcactgcaacctctgcctcctgggttcaagtgattctcctgcctcagcctccagaatagctgggattacaggtgcccgccaccacgcccggctaatttttttgtattttcagtagagccggggtttcaccatgttggtcaggctgaaaaagacttatttaagttaaccttttgcacaggaatcatcagtaaccaaaatattcacttctttacattattttaaatcaaaatggaatcaacactattttctactgagctttttagcaaaatagttaattttttttatatcattggatgatttcccacttaacacatattagggtcttgataatatgtatagaacaatttgtttgttgggacaaatcgtatccaaatactttgaagaatttattccgtattttgggagattgaacagctcggctggcccagtgattacttatgagggtatgatatgggggtactagctgtgcttgtattgtagatcttaaaacccttgttttaatgttttatactacacatgcttccaaaaaggttgaaagcaaattataaaatttggagaaatacaaaatatcacttaaatatatagtgactaggatttttatgacaagtaaaaaaaatctatttcaaatttttgaacagttttcacagatagactccacatatattaatagctatttatttatgtttaatgttttctttcacaacattaagcacaaattgaggtactacttttagagttaaagatccattaatatttctaatcttaataataatatatattatgcatttataacatgtttctagtattttataataaaatttagtgcatttccctactagtttggcactatgattttttaatctttgattttttaaaacaataagcaaagcattttttttacaaattcttattatagcttataatttcaagtaactaaagatttaaaaaatatggattaaatatgaagtttttaaaaaattaggcacagaaatgacaaaacatgtccagtttaattaacattttgactctaaaattaaatagccagatttttattaagcatttgaatgtttttagagtacctgggttcaaatgcttttcttaagtcttcttaactctatggtctaaattctttgacttaaattctatgaattaaattctctgaacatcactttcttccataaaatgatggtaataatagctacttctaagtgctatgaggattaaataaagtggaactttcacagtggttgatgaatccttgctctttcatcagagttaatgcagctagagattaaggaacaaattggtagttaatggaggaatcataaattgttggtccctgctttttgcttaccatgccatagaagcaataggattctagatttgggcttctgagcacccgataagggcctcaatacagtgctccccataactttcaactatttgcatttctgtgcttaagagtttttctttaaaaggggaaggccactctctgtataaagctagggagaagt

SEQ ID NO: 51249 - DNA, 665 bp, Homo sapiens
gttggtgacaggttgagaccttgaattccaggttaaggagtctgtgtttgactgtgaaatcatgtggataggtaatgtgaacagagtaggtttcaagtaaattaatctggttggaacatcagtaaggaaagagactgggatcagggagacagggtaaatatgtgtcatttaacagctctttatgctctgactcaagctgtccattttgtatatttttatataacaccagtgcctcttaaagcaaactgttcagaggtgaaccaggatgattattaggcaattatgtatacaaattaaaacaagaacatgtttgtgtgacttggctcagtcgcctatgagtgaatttacatataactgacatttcatatgtcccatctttttttttttwaaaaaagaaagaattatataagaaataacatttctgtgtttgaagaattcttagcaacactgttgtagacagcttgatcagagatggtaatgctctagtactactccttagcttttgtatccacctatctgggccaagtgtgttattggcagtagtggaagttccttccaacgttactgccatttccttgcatgtgaagtaagcttcactaatgggacattcctggatcttgtctcatttcttgcctcttctgatgcaagtagagtaaataatctaa

SEQ ID NO: 51250 - DNA, 665 bp, Homo sapiens
gttggtgacaggttgagaccttgaattccaggttaaggagtctgtgtttgactgtgaaatcatgtggataggtaatgtgaacagagtaggtttcaagtaaattaatctggttggaacatcagtaaggaaagagactgggatcagggagacagggtaaatatgtgtcatttaacagctctttatgctctgactcaagctgtccattttgtatatttttatataacaccagtgcctcttaaagcaaactgttcagaggtgaaccaggatgattattaggcaattatgtatacaaattaaaacaagaacatgtttgtgtgacttggctcagtcgcctatgagtgaatttacatataactgacatttcatatgtcccatcttttttttttttaaaaaagaaagaattatataagaaataacatttctgtgtttgaagaattcttagcaacrctgttgtagacagcttgatcagagatggtaatgctctagtactactccttagcttttgtatccacctatctgggccaagtgtgttattggcagtagtggaagttccttccaacgttactgccatttccttgcatgtgaagtaagcttcactaatgggacattcctggatcttgtctcatttcttgcctcttctgatgcaagtagagtaaataatctaa

SEQ ID NO: 51251 - DNA, 643 bp, Homo sapiens
taaatacataccctggtacctggtatgcagatattgatctggcaaatgcctttttctccatacatgtcaattaaggaccaccagaagcagtttgcctttagctggcaaggccagtaatataccttcattgtcctatctcaggggtatctctcccagtttatatcataatagcaacttaatatgttattattatatattacacaaatatcaactctacaggttatatcataatttagttcacagggatattgatgaccttgccattctttgggccattacatgccagaccttccacaagacattacactggtcaatgacatgctgattggacctagtgagcaagaactagccactactctggacttattattaatacatttgcatgtcagaggatggaaaataaatcagatgaaaatttagggatcttctacctcagtgaaatttctaagggtccagtggtgtgggggcatgatgagatatcccttctaatgtgaatgataagttgttacatctggcttctacaaccagaaaagaggcayaatgcctactgagcatctttgaagtttagaggcaaatgttcctcatttgagtgagttacttcagcctgatatggtttggctctgtgtcctcacccaaatctcac

SEQ ID NO: 51252 - DNA, 616 bp, Homo sapiens
tggaaaatatctcgttaacagtgttgtgcaatggctgcatgttgattacatcatcgtattttgaatatattgggctaaataagatacagtctttttttttttttagtcggagtcttgctctgtccccccaggctgaactgcagtggtgcgatctcggctcactgcagcctcctcctccctggttccagcgattctcctgcctcagcctcccgaggagctgggattacaggtgcacgccaccacgcgcagctaatttttgtatttttagtagagasaggatttcaccatgttggccaggctggtctcgagctcctgacctcaagttgatccacccgcctcagcctcccaaagtgctgggattacaggcatgagccaccacgcctggccaagatacagtcttcaaattatttttacctgttcttttttactttattaacataggtaccagaaaactttaaatgatatttgtgactcatataatatttctttatttccccctgctttagactattataaatgtaatgtatacataccagggattcgcaaattcggcactattggcatttggggctggataactcttggtgatggctctgtgctgtgcatttgtgggatg

SEQ ID NO: 51253 - DNA, 616 bp, Homo sapiens
tggaaaatatctcgttaacagtgttgtgcaatggctgcatgttgattacatcatcgtattttgaatatattgggctaaataagatacagtctttttttttttttagtcggagtcttgctctgtccccccaggctgaactgcagtggtgcgatctcggctcactgcagcctcctcctccctggttccagcgattctcctgcctcagcctcccgaggagctgggattacaggtgcacgccaccacgcgcagctaatttttgtatttttagtagagacaggatttcaccatgttggccaggctggtctcgagctcctgacctcaagttgatccacccgcctcagcctcccaaagtgctgggattacaggcatgagccaccaygcctggccaagatacagtcttcaaattatttttacctgttcttttttactttattaacataggtaccagaaaactttaaatgatatttgtgactcatataatatttctttatttccccctgctttagactattataaatgtaatgtatacataccagggattcgcaaattcggcactattggcatttggggctggataactcttggtgatggctctgtgctgtgcatttgtgggatg

SEQ ID NO: 51254 - DNA, 593 bp, Homo sapiens
tctcacctcgagagaagatgatgcgggagagaggggcgttatgatgggtatgctctcagaaagacaggaagctatgatgacgggctgcaggtgcaggggcccgcagtgtccgtcagaagaggctcgggaaagtaagcgagaatggtgttcacgttgtgactttgtttggaatcataagaccgaaaagccaggaagaagttctgttttcctctgccctcttgctagccaccacacagccactgttcttggagaattaaaaaaaaaaacaaacaaaracaaaacaaaacaaaacaaaaaaaccgtccctcctaccatttctttagtcctgaatctccttttcccttcctctccccagccatccccacccctacttcctcttctctccctcccgctgccagttctctggttactccccccctcccttgcttctatcccagcctggtgcaagctaagagggcgaggacgagggagtgggagagattggctgaggactctacagatcagctagagagcgaaagaactaagtctctctctctcatacacacacacacacgcacacacgcgcgcgcgcgcgcgcacacacacacacacgt

SEQ ID NO: 51255 - DNA, 462 bp, Homo sapiens
catctatttctttttcttaacttattgtcctggctaggacctccaatacaacatttaataaaagtggtcatggtggacatctttgtcttgctcccaatttcagggtgaaattttcaatcttctattaaatatgatatttgctttagttttttggtaatcttatttatcaaactaaggtaattcccttttaatcttagtaaaccaaaagttttaaattataaatatatgtttgtcaaatgcatttactgtagtgttcttttaattgtgtatatagcaaaaaaaacgaaactagaaatgtctttcacataaacagtgcttatattaatgtaatcatcttaaatagatcacaaggtacattaacactttttattaatctacattacagcttctttattctrctctgctagcactcacataaattagtatggatggataaagccagatgagaaaaccccaaggccc

SEQ ID NO: 51256 - DNA, 635 bp, Homo sapiens
gtgttgtgcccaggcagggcagggttaaccacagtggtaaatccttaggctaggagaccttggtcttggacctagattggcctactatgctgggatcggtattggaaggtcggctgcagatgctggtatgcagaagggcagggaacatggattccatcaagtagaatgctattaggcaactggtgggaggccaggaaagcagttggactcatgaaagtccaaacaggtgggcagatggaatacagctagatagctgcaatatttagagactcaggcaggcaaagtcagtggcatctgtcagtgggaaacagtaccgcactcgggaactgagtctgggtcaggattgagactccctatcttcctagagagcagaatagcacctcaaatctaaaatgactgagtagaatgctcttaagatctgttgaagttctgtattaaaaacagagagagtgacaacatctgacaattaacagatgacatgaatggggtgaaatgcctagcaamagtccatatatttttaggcattagatgcatttttattttcttccttattcccttatctcaatgcaatatttaagaccaagaaaaatttgagagttaagagcacctcctttctaatagaatggcatccctga

SEQ ID NO: 51257 - DNA, 1876 bp, Homo sapiens
tactttattccacatttcttctctcctagctctgaggaagtgctcagatctggaaaaagctattgccaccactgctctgattttcagaaattcttctgactctgatggtaaacttgaaaaagctattgccaaagatctgctgcaaacccaatttaggaatttcgcagaggtgagagaattaacttgcataaagaaacagaaactacaccctcatggctgacccaatgagcaaataactccagctccaggtccctgtcatgttgtctcacgtaacaaatgtttattgaacacctaccttatgccaggcagtgagctgcactggagttgatgcagtgaagacagcaatccccagcagaagaaagaaatacactaaaaaagtaattaaaaatagtcaaaggatgtgaaagagtagagcattcagtgagagtaaaacagaggaactatcttggggcaggtaatcaaagatgggctcctggaaaactaaggtatagctgagatctgaagaataagcaggaggtagctaggcaagggggagtgagaatgatggcrttccaagcagagatctggagggccagttggtgagaagggatgggacggtagctgggaagtggttagagatgaggctggggaggcgaggagaagccaaatcttacagaagcatagcctgatagcaagaggaagccaggaactatgtctacgtccaggcctaagaaattacaccagctgcagtacagagaacagactagggttgggggtggaataggaaaaaagggaataactagctgtggggaggcaattcaagagaaagatggtgatggcttagactacggcggtgaagatggagataaacaaacaaatagaagagacgtttagaaggtggaatgaacaagatctgacaattgattgactgtgagagttgaaggataggaaagaaaatgatgacaacccaatttctgacttacaaaaggaatggtggtgttcccactcctagagaagaaaaaggctaaagaataagcaggtttgaggtgggatggaggtagggaggagatggcgagtttcattaggttgtgtcagtgtttagatgtccatgaaatatttaagaggaagacttagcaacaggacagatgagttcaaaggtgagaatagagatctgtgttcaaaatatggaaatgagagtcagcagtatataatcagtcactggcctaaaggttactaccttactcacctaagggtatatttctcgaatttcagtcattgaataccatatttagtatttttcccacaactgcctatagcctgtgttgcttagaacttttcctttatgttttctctctacttaagtaaatttttataaggacaccgtatcattattcttattgtaaattcagtggattagagtaaaaaataatagtgaaaaaatagacgactatcaattcttatttagtgtttaatatttattcttgcatcacctaaaatggcattacattctatcggcagtatatattcatactttggaaaataccagcctagggaaaatgtgtaagaggaaaagagggcctcatatcagcttaaactatcaatatttattgatgggtagagcaagaaagcacatagaggcagtctccaagtccctgtatctgttctgaaatattgaaaagatattattctctctatatatgcacacatacacatacataaacacctatatatggtttcagtgcactacagttatataagatgtcacccactggggggagctaagtcaagggtacaactttctgtgagtgggtgattatttcaaaagagaaagggagaatatagtgtaatacacagataaatgaacggaagtaaatgttaataagggttagctattttg

SEQ ID NO: 51258 - DNA, 597 bp, Homo sapiens
ctcattgagctctatatcactgcctttatgacagagatgatgtctatgaggcttggtcagccagcctgctagagcaattcttcctagtctcttcatgactcttgtctgccacgccaaagcttccttggaaccactgaggcacaggtgccatggaatctctcagggcccatgcttgcttaaaggattgcctggttggacctgcaagcttatgggccacaggttgcgaactgcagggaggtgtgctgctggctgctggttcatcctgtgcactgtggctcatgctgcagatgtcaactctgacactttagttctaatcccccagcagctgcctgaagggaccagcaatgcaagycagcagtgtgggaaactgagcccccgtcaggtggactttggccagtgggagatagttaagttcttctttctcttgtcatgagatttctatatgctctttctgggaatgtccctaagtgtataaacaaccagctgcattttctgttgaagctgtggccagtccagtgatgttaccacctggcatttgcttttgtccctttcctggctcactccttccctcttgcctccctggggctgtgtaactcc

SEQ ID NO: 51259 - DNA, 555 bp, Homo sapiens
gcttgccttgttaaaaatcaaaggatgggccgggcacggtggctcacgcctgtaatcccagcactttgggaggccgaggcgggctgatcacgaggtcaggagatggagaccatcctgactaacacgatgaaaccccatctctactaaaaatacaaaaaaattagccgggcatggtggccggcgcctgtagtcccagctactcgggaggctgaggcaggagaatggcgtgaacccgggaggcggagcttgcagtgagccgagatyacaccactgcactccagcctggatgacacagcgagactccatcttaaaaaaaaaaaaaaaaaaaaaaatcaaagaatggcttcaaattgtagtcagctgtttcgttaaattgcagcaggaagaaatttttctcagcaggtctattttcatgtcacttgctttcagagtaagaggttatttcagacacagtggtttgatttagtctttgttgaaaatcataaatagcctacaaacaacaaaaagggatgaataggatttgcgttcatgtggagtgcgtcatctgtgctttta

SEQ ID NO: 51260 - DNA, 555 bp, Homo sapiens
gcttgccttgttaaaaatcaaaggatgggccgggcacggtggctcacgcctgtaatcccagcactttgggaggccgaggcgggctgatcacgaggtcaggagatggagaccatcctgactaacacgatgaaaccccatctctactaaaaatacaaaaaaattagccgggcatggtggccggcgcctgtagtcccagctactcgggaggctgaggcaggagaatggcgtgaacccgggaggcggagcttgcagtgagccgagatcrcaccactgcactccagcctggatgacacagcgagactccatcttaaaaaaaaaaaaaaaaaaaaaaatcaaagaatggcttcaaattgtagtcagctgtttcgttaaattgcagcaggaagaaatttttctcagcaggtctattttcatgtcacttgctttcagagtaagaggttatttcagacacagtggtttgatttagtctttgttgaaaatcataaatagcctacaaacaacaaaaagggatgaataggatttgcgttcatgtggagtgcgtcatctgtgctttta

SEQ ID NO: 51261 - DNA, 612 bp, Homo sapiens
aagtaatttgcctaaagtcaaatagcatgtaagtgtcagagctgcggtttgacccagattaatctgtctcaaaatccagtatgctgtccttagtaccatgctgctgattgaaatcagcacttgcccagaactcagagctaaataaataaataaatgcatggtatccccctaaaagcacttatctttggacttctctcccaaagacctttcctcagagaaaactctggatgactctggagtcaatggctgctatggatttctaagagtagaaggaaatcttgcgttccttggtctggtctcctctggtgtctgataatgcctgctgcccccaccaaccccaaggaaccacacacgctctgtggaagcacaagtgggctttgcttttatctwcttgttggtcctggttctatctgtggagacatggagagtgagccttacgcatcttaccatgacatggcccttcctgtatttgaaaacaggtgtgagcgtcccccgaagacttcttttcttccagcagaacattctgagttccttataggacatgatatagaaatctctctttctctccagctactatactgaatgcacttcagtttgtctgtggtcctttta

SEQ ID NO: 51262 - DNA, 612 bp, Homo sapiens
aagtaatttgcctaaagtcaaatagcatgtaagtgtcagagctgcggtttgacccagattaatctgtctcaaaatccagtatgctgtccttagtaccatgctgctgattgaaatcagcacttgcccagaactcagagctaaataaataaataaatgcatggtatccccctaaaagcacttatctttggacttctctcccaaagacctttcctcagagaaaactctggatgactctggagtcaatggctgctatggatttctaagagtagaaggaaatcttgcgttccttggtctggtctcctctggtgtctgataatgcctgctgcccccaccaaccccaaggaaccacacacgctctgtggaagcacaagtgggctttgcttttatcttcttgttggtcctggttctatctgtggagacatggagagtgagccttacgcatcttaccatgacatggcccttcctgtatttgaaaacaggtgtgagcgtcccccraagacttcttttcttccagcagaacattctgagttccttataggacatgatatagaaatctctctttctctccagctactatactgaatgcacttcagtttgtctgtggtcctttta

SEQ ID NO: 51263 - DNA, 598 bp, Homo sapiens
tcatgttcctctagtctctttcaatctggagcaatttatcagtctttttctttcttaaccctgatatttttgaagggtataggctatttgttttatgtaacatccctcaattgtagtttgtcatgactagattcgggccacacatttttggtcagaaataccacagaaatgattttctgtccttctcagtgagttatatcaggaggcacatgtatgtttgtctcattacaagtgatgttatctttgatcatttgattgtgttgtctgccaggttgtccactgtaaagaatgtctgttccttaatagttyggtaaaattcccctagaaacatagcattttttctaatggatggaatggtaactatttcaaaacttccattactccccaaatttccttaagctggccttttgtaatcactccatttcccaattcctaaccccggacaaccactgatctgttctctgtccctacagttttgcttcttcagaatgccatataaatgaaaacataaagtatgtaacattttgagactggcttctttcactcagtctaatgcatttgagatttgcctatattgttgcctgtatcaatagtctgt

SEQ ID NO: 51264 - DNA, 570 bp, Homo sapiens
ttttgagtgtttgaggagaaaggtgagttttaaaatagtcacatgggaagagggagagatgactcaaccagtgatgattgcctagcaagatgaaacatgcattttaggttcactgtcatgaaactgaatttttaaagtatttgtctttagtcaaattctactgtgccgaatataaggagaatagtatttctgtaaggtaatggctttgtcaagcaagacaaatggaggcagtcagytgagagtttgttagggaagtaggaggaaacaaggagaaggtatggagctgtgaggcaaagtagatagtgtaaagtagatggtaaagtagataggaaacagacaatcaatatctgtagataaaagttaaatccattatcctttaaaaatcctttcttagtatgtaggtgtttctagggtattattttgcttttttttttttttttttttttgagacggagttttgctcttgttgcccaggctggagtacaatggcacgatcttggctcactgcaacctctacctccccgattaaaacaactctcctgcctcagcctcccgagtagctggtattac

SEQ ID NO: 51265 - DNA, 570 bp, Homo sapiens
ttttgagtgtttgaggagaaaggtgagttttaaaatagtcacatgggaagagggagagatgactcaaccagtgatgattgcctagcaagatgaaacatgcattttaggttcactgtcatgaaactgaatttttaaagtatttgtctttagtcaaattctactgtgccgaatataaggagaatagtatttctgtaaggtaatggctttgtcaagcaagacaaatggaggcagtcagctgagagtttgttagggaagtaggaggaaacaaggagaaggtatggagctgtgaggcaaagtagatagtgtaaagtagatggtaaagtagataggaaacagacaatcaatatctgtagataaaagttaaatccattatcctttaaaaatccttkcttagtatgtaggtgtttctagggtattattttgcttttttttttttttttttttttgagacggagttttgctcttgttgcccaggctggagtacaatggcacgatcttggctcactgcaacctctacctccccgattaaaacaactctcctgcctcagcctcccgagtagctggtattac

SEQ ID NO: 51266 - DNA, 625 bp, Homo sapiens
ggctctccggctttacgcacgcaaccctcatctcgacagcgctcggcgccccttacgccactrgctcagcctcagagacttcgcgaatatggctttgcgcactgcggcggggctgcgccgcaaccgagctcagccctgtggctcctcctcgctgccctgcgcggattggtggcagacggcaaccgggccgctgattgggcggcgaaggagccattcggggagactctggtgggttcggctgccccaagagtgataagttcggcttcagacacgccttagcgccagcagtgagtcggagctctatggaggtggcagcgggtaccgagtggcggctgcagcagcgactcctctgagctgagtttgaggccgtccccgactccttcctcccccttccctcccccttttttttgttttccgttcccctttcccctcccttccctatccccgacgaccggatcctgaggaggcagctgcggtggcagctgctgagttctcggtgaaggtgagttgagccgctgccgccgccgagtggagcgctctaaaatggccgccgtccctggtcgcttcttctcgagtggtacaaaatggcggccgcaggcggagccgggtggggcgaccctttttt

SEQ ID NO: 51267 - DNA, 592 bp, Homo sapiens
tgtaccagcactactctagattctgggaacaaaaatgattaatacaattcttcagaaactcgtagttttagcagaagatttggccatggactgaaagcagagatgcaggtgtgggggcgtccttggaacgccagagttgrtataaagattattttaagctgaagacttttgagattcaacagatacagaaagaagtcttttggtgctgtccttatctgaatatatgcaaaaatttctgagaaataaagactgttataaatactcttgagtttggtctgtccccagaagagtgactaagagtaaatctgcataaactttctctttgaggaatttttatgtccctgaagatggaaagaacactcatacatgtataaactttatgctcaaactttcttatctcctatttgttcttctaaagaactcatttgtctttcctaaagaaacctatttttcttcccataggagccatttctcttccctacctttcccctactgactaaattaggtatataagctccaagctctaaccacacctttgagttattcatcactgagcactccagtatgtatgtacattgcaagtgtaaataaa

SEQ ID NO: 51268 - DNA, 577 bp, Homo sapiens
ttcccagtactttttcaacccctggggccttctgtgactacgctactttgaagtttgtgtttattttattttaatttctcttgactgggattgattatgcttcctgactttgaggagtcyggtgtattctaagttcagaaaattcatcgacatcacctctctagatattgctttttcctcattttctctttcttttcatttggaaactccaattacatttgtgttagactccattctatctgccatttcatttttttctctttcatattttctatttcttgctctctcttttcagtattctgtgtaaatttgctcagttctactttcaacttattaatttccttttcagctgttgtttaatctattttttaacccatcctatttattatgttttaatttcattaagcacatttttaatttctcgaacttctctgtggttaattctcaaattcccttattgattatggtggaattttgctcactgatcaaacttgtaatttgacttttagatatcatcataatcacttttattattatttttcagtggacatacaacatttcgattatctgagttcct

SEQ ID NO: 51269 - DNA, 577 bp, Homo sapiens
ttcccagtactttttcaacccctggggccttctgtgactacgctactttgaagtttgtgtttattttattttaatttctcttgactgggattgattatgcttcctgactttgaggagtctggtgtattctaagttcagaaaattcatcgacatcacctctctagwtattgctttttcctcattttctctttcttttcatttggaaactccaattacatttgtgttagactccattctatctgccatttcatttttttctctttcatattttctatttcttgctctctcttttcagtattctgtgtaaatttgctcagttctactttcaacttattaatttccttttcagctgttgtttaatctattttttaacccatcctatttattatgttttaatttcattaagcacatttttaatttctcgaacttctctgtggttaattctcaaattcccttattgattatggtggaattttgctcactgatcaaacttgtaatttgacttttagatatcatcataatcacttttattattatttttcagtggacatacaacatttcgattatctgagttcct

SEQ ID NO: 51270 - DNA, 577 bp, Homo sapiens
ttcccagtactttttcaacccctggggccttctgtgactacgctactttgaagtttgtgtttattttattttaatttctcttgactgggattgattatgcttcctgactttgaggagtctggtgtattctaagttcagaaaattcatcgacatcacctctctagatattgctttttcctcattttctctttcttytcatttggaaactccaattacatttgtgttagactccattctatctgccatttcatttttttctctttcatattttctatttcttgctctctcttttcagtattctgtgtaaatttgctcagttctactttcaacttattaatttccttttcagctgttgtttaatctattttttaacccatcctatttattatgttttaatttcattaagcacatttttaatttctcgaacttctctgtggttaattctcaaattcccttattgattatggtggaattttgctcactgatcaaacttgtaatttgacttttagatatcatcataatcacttttattattatttttcagtggacatacaacatttcgattatctgagttcct

SEQ ID NO: 51271 - DNA, 569 bp, Homo sapiens
tgtcaggtgagaaatttataggatgagaaaacaatgatgtactgtaacctgccatgaactatttttattcaatcacaacctggactggagaaagagtagttaattatccccaccttggtggaaataaataatggaaaaacatgttgctgaaaaacagtagatgtctttaaatcattaatgaatgggagagtttgcaatagaacacttcaatttgggtgaacctctattctgaaatgccaaatctcttttatccagacattaaatgtattactttaggaattccttccttcgtggatattttggtccagggtagaaatcttaaattattgattagattaccactaggctgtcatttacaatagtatcagctacagataaactatcrtgctgcagtgggagagcttcaaatctcatctttaatgctatcagaacagagtgcacctaggaatctctctacactcaacctcaaagatttatgagcttccaacccaaatacagcattgtatttcgagtatcttgggaaatgaatcagacagtcaacatcgtttatttgaactggcattggcatt

SEQ ID NO: 51272 - DNA, 619 bp, Homo sapiens
acctcacctagaggataagaccaggctgaaacatgcgactgcattttcaggctgtggtttaacatttgtctctagaaattccagccaggtggggttagtctcgacttctctggcttctttaggaagctttcttttctggttcctgatgtttggctttctgcggggaggtgcctgtaaattttctcactgtggattttgctttggtttctgatctttgctttggtttctttcttgcaggagaaggcttccactgcactactggaagaaaccattgctttgggaattttctatcctgcagccctcagcaaccctctgctggaatgctgccactatgactgctagagacacttcatggaagcccacaggacaygtcaccttttctcatgggctcatttcatgggccaggcacgagcttctgttcattccacctatgggtttgaaggtcaactctgcagcacctgtttaatctctagaaaagatgctgataaaacttggaaatgttgtagctcaggtatcttcattataattgaagccacctttgcaaaaagtatgacagtgagagaaacgtgacatagaaaaattatgatagggaaagaaatatcacctaactgattccatc

SEQ ID NO: 51273 - DNA, 1087 bp, Homo sapiens
tatttaatattcatcacatattaataataaaaccattacatgttgatataatacttttgtttttttctttgagacaaagtcttgttcttttgcccaggctggagtgaagtggcgcaatctcagctcattgcaacctccgccccgcaggttcaagcgattctcctacctcagcctcccaagtagctgggattacaggcgcccactaccatgtccggctaattattgtattttcttagtagagaaggagttttcttagtagagaaggctggtcttgaactcttgacctcaggtgatccatccgcctgggtctccctaagtgctgggattacaggtgtgagccaccgcacccaccccgattaatatatgttttaaaacactgattagacatgcaacaacaccgggcaggggtctcctcattcccagcgacacaaaccccactgcacggctgaggggttgcaagtgctgcagagccaaaaggctctgacttgagatttcattattttacttgtatttttatttgtattgtgagacaggtcctgctctgtcacccagactggagtgcagctgtgcacttacagctcactgcagcctcgacctcctgggctcaagccatcttcctgcctcagctccccagtagctggtagtacagttgagtgccmccatgcctggttatttttttaatttttttgtagagtgaggggtcttgctatgttgcccaagctggcctcaaactcctgacctcaagagatctgcccacttcagcctcctgagtagctgaaactacaagtacacatcaccatgcctagctacatttatttaattttgaaaaatatttttgtaaagagcagatcttgctgtgttgtccaggctggtcttgaacacctgcccttaaaagatactcccacctctgcttaccaaacagctgggactacaggcatgagccactgcaatgagcctgaagagatttctttaatctagcatcccatacttggtaggattgggaaaggcagtagtgttttttaaaattacttaataatttcagtaacaatcaaactcaaccttgacccctgccttctctcacacccca

SEQ ID NO: 51274 - DNA, 1087 bp, Homo sapiens
tatttaatattcatcacatattaataataaaaccattacatgttgatataatacttttgtttttttctttgagacaaagtcttgttcttttgcccaggctggagtgaagtggcgcaatctcagctcattgcaacctccgccccgcaggttcaagcgattctcctacctcagcctcccaagtagctgggattacaggcgcccactaccatgtccggctaattattgtattttcttagtagagaaggagttttcttagtagagaaggctggtcttgaactcttgacctcaggtgatccatccgcctgggtctccctaagtgctgggattacaggtgtgagccaccgcacccaccccgattaatatatgttttaaaacactgattagacatgcaacaacaccgggcaggggtctcctcattcccagcgacacaaaccccactgcacggctgaggggttgcaagtgctgcagagccaaaaggctctgacttgagatttcattattttacttgtatttttatttgtattgtgagacaggtcctgctctgtcacccagactggagtgcagctgtgcacttacagctcactgcagcctcgacctcctgggctcaagccatcttcctgcctcagctccccagtagctggtagtacagttgagtgcccccatgcctggttatttttttaatttttttgtagagtgaggggtcttgctatgttgcccaagctggcctcaaactcctgacctcaagagatctgcccacttcagcctcctgagtagctgaaactacaartacacatcaccatgcctagctacatttatttaattttgaaaaatatttttgtaaagagcagatcttgctgtgttgtccaggctggtcttgaacacctgcccttaaaagatactcccacctctgcttaccaaacagctgggactacaggcatgagccactgcaatgagcctgaagagatttctttaatctagcatcccatacttggtaggattgggaaaggcagtagtgttttttaaaattacttaataatttcagtaacaatcaaactcaaccttgacccctgccttctctcacacccca

SEQ ID NO: 51275 - DNA, 1087 bp, Homo sapiens
tatttaatattcatcacatattaataataaaaccattacatgttgatataatacttttgtttttttctttgagacaaagtcttgttcttttgcccaggctggagtgaagtggcgcaatctcagctcattgcaacctccgccccgcaggttcaagcgattctcctacctcagcctcccaagtagctgggattacaggcgcccactaccatgtccggctaattattgtattttcttagtagagaaggagttttcttagtagagaaggctggtcttgaactcttgacctcaggtgatccatccgcctgggtctccctaagtgctgggattacaggtgtgagccaccgcacccaccccgattaatatatgttttaaaacactgattagacatgcaacaacaccgggcaggggtctcctcattcccagcgacacaaaccccactgcacggctgaggggttgcaagtgctgcagagccaaaaggctctgacttgagatttcattattttacttgtatttttatttgtattgtgagacaggtcctgctctgtcacccagactggagtgcagctgtgcacttacagctcactgcagcctcgacctcctgggctcaagccatcttcctgcctcagctccccagtagctggtagtacagttgagtgcccccatgcctggttatttttttaatttttttgtagagtgaggggtcttgctatgttgcccaagctggcctcaaactcctgacctcaagagatctgcccacttcagcctcctgagtagctgaaactacaagtacacatcaccatgcctagctacatttatttmattttgaaaaatatttttgtaaagagcagatcttgctgtgttgtccaggctggtcttgaacacctgcccttaaaagatactcccacctctgcttaccaaacagctgggactacaggcatgagccactgcaatgagcctgaagagatttctttaatctagcatcccatacttggtaggattgggaaaggcagtagtgttttttaaaattacttaataatttcagtaacaatcaaactcaaccttgacccctgccttctctcacacccca

SEQ ID NO: 51276 - DNA, 1087 bp, Homo sapiens
tatttaatattcatcacatattaataataaaaccattacatgttgatataatacttttgtttttttctttgagacaaagtcttgttcttttgcccaggctggagtgaagtggcgcaatctcagctcattgcaacctccgccccgcaggttcaagcgattctcctacctcagcctcccaagtagctgggattacaggcgcccactaccatgtccggctaattattgtattttcttagtagagaaggagttttcttagtagagaaggctggtcttgaactcttgacctcaggtgatccatccgcctgggtctccctaagtgctgggattacaggtgtgagccaccgcacccaccccgattaatatatgttttaaaacactgattagacatgcaacaacaccgggcaggggtctcctcattcccagcgacacaaaccccactgcacggctgaggggttgcaagtgctgcagagccaaaaggctctgacttgagatttcattattttacttgtatttttatttgtattgtgagacaggtcctgctctgtcacccagactggagtgcagctgtgcacttacagctcactgcagcctcgacctcctgggctcaagccatcttcctgcctcagctccccagtagctggtagtacagttgagtgcccccatgcctggttatttttttaatttttttgtagagtgaggggtcttgctatgttgcccaagctggcctcaaactcctgacctcaagagatctgcccacttcagcctcctgagtagctgaaactacaagtacacatcaccatgcctagctacatttatttaattttgaaaaatatttttgtaaagagcagatcttgctgtgttgtccaggctggtcttgaacacctgcccttaaaagatactcccacctctgcttaycaaacagctgggactacaggcatgagccactgcaatgagcctgaagagatttctttaatctagcatcccatacttggtaggattgggaaaggcagtagtgttttttaaaattacttaataatttcagtaacaatcaaactcaaccttgacccctgccttctctcacacccca

SEQ ID NO: 51277 - DNA, 2289 bp, Homo sapiens
ttaggaacccttcccatggcaatagatgctttctgggtttaagggctgtgtacttaagtcaggttagaactaattcctttgttgttccatgagcatgtcatgagtgtgttccccatarccctgaaaaatcaggatctttgtcagaggattaggaagcagtagcaacaaaggaaatttgtgcctggttagccatctacttttaaaagtgttgcctcaacatgtcacatgatagacgcttttcctctacaagcaaccacccaatgaacttatataccccacagagtatcagtctttcccctgatcacttatagtatgggttcctgtcaatgcctagttgaaacaaacagacacacagggtaagagttgctaccttgagcctggctacagtaacaaaatatgctggcacagaaacacatgaatcaatctaacacacagagaagtctgggccaatacagatgacccagggccattttaaaagggccttaatcccatactcctgtccctaagtgctgattcttgaaacctaatattcaggttagtgaaagctgaaagaggctcagtagcactcagctaatgaagcacaaaacagcacaactcaaagcaaaagcttgagagcatggaggaaatccagtttagaagccaaggccagagaaaaaagattcccagtggtgatggccactatctagacatcctgattgctatgccaaacgttgtggtcacccgtagcaggggagtggaccctccacccaaaatttggttcggacgtcaagacaaacgatgttacacaatccatgaagaaggtttgaaaaggtttattacttacacaatggggctctctggggagagcaaggtagattctcgacagtgcaaaaaaatggcttagaagagggaggataggagactagctctgaagtttctatagcagttaggggatgaggttcaggagagaggatccccactcaggctgggacttacatggtttaacctttccacagccaaaggagggagaacccaagatttcttatcagctttcacataagcagggccgaaagggaaatgatgggactcaaaagctttcagcagtcgaacatcaaaaatggagtctgatattatattactttattacacagtatgtatgtgggtgtgtgtaggtgtgactgtgtgtgtcatatgcatgttagaaggaaaagtttgattttgaatattataccatattttcacctgagctcaggatgaaataatgatctataaggaatcaagagtggtgtagaaatagcatggattttagagtcaaacagattgaaattcacatgctttttctcgacaagcaacctaatctgctaagtatttattccatgcccttgggaatagatacgtaattttttcagttttcttcactatgtaaaataaaaacttcatagaactgatgggtataggggccaatgtgtgaatgcatgtgaactgtgtggcatggtttttggcatatggtagttattattaatgctagttacttctccttcagtcactcagtaacttctattaacttatgaatggaaaccttggcaatagtaatgttttcctagatagtcaattcccaattattcacaagggcgttctcctttcttggaaataaagtgataccccaggagtttcctggttcccatttcagctggccagcattcttcatcctagggtaagatctgagtcaaaccagctaatttaatcacatatttaattaaatcattcaaagtagtttcctctattgtgtgcctttacatcataaaaaagcaaatttgaatccttccatttaatgtctatgaatcaattgtcttttttagctatgaattttaagacacttattatgtgaatttttatcatggtactttttctttcaacagacatgaattgtgcacattatggtaggccatggtgacacagtaggcctgaagacacattaaaaaaataaaaaggaaaagaattcaaaatatgtgcatgtagcaaagcagaatatgctattggttggtaggtagaccgtgtgctgcaatgtcttattcatttgctctgtggtagcaaaggcaacaaactcacgactatgaactcctctaacttgctgttttcttcaatttgcaacggacttttttttcttttcttttttttttttttttgatatgaggtctcgctctgtcacccaggctggagtgcagtggtgccatcacagctcactgcagcctcgacctcccaggctcaagttaccctcctgctttagccttccaagtagctggaactaca

SEQ ID NO: 51278 - DNA, 2289 bp, Homo sapiens
ttaggaacccttcccatggcaatagatgctttctgggtttaagggctgtgtacttaagtcaggttagaactaattcctttgttgttccatgagcatgtcatgagtgtgttccccataaccctgaaaaatcaggatctttgtcagaggattaggaagcagtagcaacaaaggaaatttgtgcctggttagccatctacttttaaaagtgttgcctcaacrtgtcacatgatagacgcttttcctctacaagcaaccacccaatgaacttatataccccacagagtatcagtctttcccctgatcacttatagtatgggttcctgtcaatgcctagttgaaacaaacagacacacagggtaagagttgctaccttgagcctggctacagtaacaaaatatgctggcacagaaacacatgaatcaatctaacacacagagaagtctgggccaatacagatgacccagggccattttaaaagggccttaatcccatactcctgtccctaagtgctgattcttgaaacctaatattcaggttagtgaaagctgaaagaggctcagtagcactcagctaatgaagcacaaaacagcacaactcaaagcaaaagcttgagagcatggaggaaatccagtttagaagccaaggccagagaaaaaagattcccagtggtgatggccactatctagacatcctgattgctatgccaaacgttgtggtcacccgtagcaggggagtggaccctccacccaaaatttggttcggacgtcaagacaaacgatgttacacaatccatgaagaaggtttgaaaaggtttattacttacacaatggggctctctggggagagcaaggtagattctcgacagtgcaaaaaaatggcttagaagagggaggataggagactagctctgaagtttctatagcagttaggggatgaggttcaggagagaggatccccactcaggctgggacttacatggtttaacctttccacagccaaaggagggagaacccaagatttcttatcagctttcacataagcagggccgaaagggaaatgatgggactcaaaagctttcagcagtcgaacatcaaaaatggagtctgatattatattactttattacacagtatgtatgtgggtgtgtgtaggtgtgactgtgtgtgtcatatgcatgttagaaggaaaagtttgattttgaatattataccatattttcacctgagctcaggatgaaataatgatctataaggaatcaagagtggtgtagaaatagcatggattttagagtcaaacagattgaaattcacatgctttttctcgacaagcaacctaatctgctaagtatttattccatgcccttgggaatagatacgtaattttttcagttttcttcactatgtaaaataaaaacttcatagaactgatgggtataggggccaatgtgtgaatgcatgtgaactgtgtggcatggtttttggcatatggtagttattattaatgctagttacttctccttcagtcactcagtaacttctattaacttatgaatggaaaccttggcaatagtaatgttttcctagatagtcaattcccaattattcacaagggcgttctcctttcttggaaataaagtgataccccaggagtttcctggttcccatttcagctggccagcattcttcatcctagggtaagatctgagtcaaaccagctaatttaatcacatatttaattaaatcattcaaagtagtttcctctattgtgtgcctttacatcataaaaaagcaaatttgaatccttccatttaatgtctatgaatcaattgtcttttttagctatgaattttaagacacttattatgtgaatttttatcatggtactttttctttcaacagacatgaattgtgcacattatggtaggccatggtgacacagtaggcctgaagacacattaaaaaaataaaaaggaaaagaattcaaaatatgtgcatgtagcaaagcagaatatgctattggttggtaggtagaccgtgtgctgcaatgtcttattcatttgctctgtggtagcaaaggcaacaaactcacgactatgaactcctctaacttgctgttttcttcaatttgcaacggacttttttttcttttcttttttttttttttttgatatgaggtctcgctctgtcacccaggctggagtgcagtggtgccatcacagctcactgcagcctcgacctcccaggctcaagttaccctcctgctttagccttccaagtagctggaactaca

SEQ ID NO: 51279 - DNA, 2289 bp, Homo sapiens
ttaggaacccttcccatggcaatagatgctttctgggtttaagggctgtgtacttaagtcaggttagaactaattcctttgttgttccatgagcatgtcatgagtgtgttccccataaccctgaaaaatcaggatctttgtcagaggattaggaagcagtagcaacaaaggaaatttgtgcctggttagccatctacttttaaaagtgttgcctcaacatgtcacatgatagacgcttttcctctacaagcaaccacccaatgaacttatataccccacagagtatcagtctttcccctgatcacttatagtatgggttcctgtcaatgcctagttgaaacaaacagacacacagggtaagagttgctaccttgagcctggctacagtaacaaaatatgctggcacagaaacacatgaatcaatctaacacacagagaagtctgggccaatacagatgacccagggccattttaaaagggccttaatcccatactcctgtccctaagtgctgattcttgaaacctaatattcaggttagtgaaagctgaaagaggctcagtagcactcagctaatgaagcacaaaacagcacaactcaaagcaaaagcttgagagcatggaggaaatccagtttagaagccaaggccagagaaaaaagattcccagtggtgatggccactatctagacatcctgattgctatgccaaacgttgtggtcacccgtagcaggggagtggaccctccacccaaaatttggttcggacgtcaagacaaacgatgttacacaatccatgaagaaggtttgaaaaggtttattacttacacaatggggctctctggggagagcaaggtagattctcgacagtgcaaaaaaatggcttagaagagggaggataggagactagctctgaagtttctatagcagttaggggatgaggttcaggagagaggatccccactcaggctgggacttacatggtttaacctttccacagccaaaggagggagaacccaagatttcttatcagctttcacataagcagggccgaaagggaaatgatgggactcaaaagctttcagcagtcgaacatcaaaaatggagtctgatattatattactttattacacagtatgtatgtgggtgtgtgtaggtgtgactgtgtgtgtcatatgcatgttagaaggaaaagtttgattttgaatattataccatattttcacctgagctcaggatgaaataatgatctataaggaatcaagagtggtgtagaaatagcatggattttagagtcaaacagattgaaattcacatgctttttctcgacaagcaacctaatctgctaagtatttattccatgcccttgggaatagatacgtaattttttcagttttcttcactatgtaaaataaaaacttcatagaactgatgggtataggggccaatgtgtgaatgcatgtgaactgtgtggcatggtttttggcatatggtagttattattaatgctagttacttctccttcagtcactcagtaacttctattaacttatgaatggaaaccttggcaatagtaatgttttcctagatagtcaattcccaattattcacaagggcgttctcctttcttggaaataaagtgataccccaggagtttcctggttcccatttcagctggccagcattcttcatcctagggtaagatctgagtcaaaccagctaatttaatcacatatttaattaaatcattcaaagtagtttcctctattgtgtgcctttacatcataaaaaagcaaatttgaatccttccatttaatgtctatgaatcaattgtcttttttagctatgaattttaagacacttattatgtgaatttttatcatggtactttttctttcaacagacatgaattgtgcacattatggtaggccatggtgacacagtaggcctgaagacacattaaaaaaataaaaaggaaaagaattcaaaatatgtgcatgtagcaaagcagaatatgctattggttggtaggtagaccgtgtgctgcaatgtcttattcatttgctctgtggyagcaaaggcaacaaactcacgactatgaactcctctaacttgctgttttcttcaatttgcaacggacttttttttcttttcttttttttttttttttgatatgaggtctcgctctgtcacccaggctggagtgcagtggtgccatcacagctcactgcagcctcgacctcccaggctcaagttaccctcctgctttagccttccaagtagctggaactaca

SEQ ID NO: 51280 - DNA, 2289 bp, Homo sapiens
ttaggaacccttcccatggcaatagatgctttctgggtttaagggctgtgtacttaagtcaggttagaactaattcctttgttgttccatgagcatgtcatgagtgtgttccccataaccctgaaaaatcaggatctttgtcagaggattaggaagcagtagcaacaaaggaaatttgtgcctggttagccatctacttttaaaagtgttgcctcaacatgtcacatgatagacgcttttcctctacaagcaaccacccaatgaacttatataccccacagagtatcagtctttcccctgatcacttatagtatgggttcctgtcaatgcctagttgaaacaaacagacacacagggtaagagttgctaccttgagcctggctacagtaacaaaatatgctggcacagaaacacatgaatcaatctaacacacagagaagtctgggccaatacagatgacccagggccattttaaaagggccttaatcccatactcctgtccctaagtgctgattcttgaaacctaatattcaggttagtgaaagctgaaagaggctcagtagcactcagctaatgaagcacaaaacagcacaactcaaagcaaaagcttgagagcatggaggaaatccagtttagaagccaaggccagagaaaaaagattcccagtggtgatggccactatctagacatcctgattgctatgccaaacgttgtggtcacccgtagcaggggagtggaccctccacccaaaatttggttcggacgtcaagacaaacgatgttacacaatccatgaagaaggtttgaaaaggtttattacttacacaatggggctctctggggagagcaaggtagattctcgacagtgcaaaaaaatggcttagaagagggaggataggagactagctctgaagtttctatagcagttaggggatgaggttcaggagagaggatccccactcaggctgggacttacatggtttaacctttccacagccaaaggagggagaacccaagatttcttatcagctttcacataagcagggccgaaagggaaatgatgggactcaaaagctttcagcagtcgaacatcaaaaatggagtctgatattatattactttattacacagtatgtatgtgggtgtgtgtaggtgtgactgtgtgtgtcatatgcatgttagaaggaaaagtttgattttgaatattataccatattttcacctgagctcaggatgaaataatgatctataaggaatcaagagtggtgtagaaatagcatggattttagagtcaaacagattgaaattcacatgctttttctcgacaagcaacctaatctgctaagtatttattccatgcccttgggaatagatacgtaattttttcagttttcttcactatgtaaaataaaaacttcatagaactgatgggtataggggccaatgtgtgaatgcatgtgaactgtgtggcatggtttttggcatatggtagttattattaatgctagttacttctccttcagtcactcagtaacttctattaacttatgaatggaaaccttggcaatagtaatgttttcctagatagtcaattcccaattattcacaagggcgttctcctttcttggaaataaagtgataccccaggagtttcctggttcccatttcagctggccagcattcttcatcctagggtaagatctgagtcaaaccagctaatttaatcacatatttaattaaatcattcaaagtagtttcctctattgtgtgcctttacatcataaaaaagcaaatttgaatccttccatttaatgtctatgaatcaattgtcttttttagctatgaattttaagacacttattatgtgaatttttatcatggtactttttctttcaacagacatgaattgtgcacattatggtaggccatggtgacacagtaggcctgaagacacattaaaaaaataaaaaggaaaagaattcaaaatatgtgcatgtagcaaagcagaatatgctattggttggtaggtagaccgtgtgctgcaatgtcttattcatttgctctgtggtagcaaaggcaacaaactcacgactatgaactcctctaacttgctgttttcttcaatttgcaacggacttttttttcttttcttttttttttttttttgatatgaggtctcgctctgtcacccaggctggagtgcagtggtgccatcacagctcactgcagcctcgamctcccaggctcaagttaccctcctgctttagccttccaagtagctggaactaca

SEQ ID NO: 51281 - DNA, 580 bp, Homo sapiens
tttttttttttttttttttttttttgagacatagttttgctctgtcatccaggctggagtgcagtggcacgaccatagctcackgcagcctcaacctcctggactcaagcaatcctccccctctgcctccagagtagctaggactcaggcatgcaacgccaccactggttagtttaaaaaaatttttttttgtagaggcaggatcttactatgttgcccagactagtctcaaactcctagcctcaagtgatcctcctgcctcagcctcccaaggttttgggattacaggcatgagccaccatgtctgtcttgcattgagtaccactttgaatctatactaatgacattatgagtaagtattcacttgtgtattataagtaatctagagatgatttaaagaatacaacaggatgtacatagaatctatgcaaataccacactattttacagaagggtcttgggtatggtcttaggtttggtatttgtgaggggtcctgaaaccaatcttccatggttactgagcaatgactgtatataaaaaacatttctatcaattcttagaacaaatatacaaaaataa

SEQ ID NO: 51282 - DNA, 1694 bp, Homo sapiens
tggcatataaaagatagttagtaaatattagttgagtgaataaatgaattaaaaatgctttcttgttctgcatcctgtttctttcaataattctcaaatgccggtgtcagacttttcagagctccatgccatatggtaaaaattctacaaatgcaatcttcacctttcttaaaccctgttcacatgggactgtcactactcctatttaaacatgcctccagaacctacgtgaggtactgaatcaaacacaaagagttacaaatgaaagaaataaagatctgataatgaggggatagacttgagaattttctcctcttttgatttattctcttataattcaygtgagacctgtgtattcattttattgctcagtactctatatacttctttttttctaactgctttacatccaccaaaaaaatagactttcaagagaacaaatcataccttctccactttacattccttcctctgatctagagctttttattttcctctttacctctgatttaccaggcttttccaatggttaaacattagctttgcatactatagttttatcatgattaaatataaaagagggaccctccctccttcacagttgggctaacatcagagaatggcaaagaacagctttttagtgttcattccactcattcctaggaagcctctctgttctcactcagatgagaaactttccaggctttgtcccaaaacaaagcttaaatgttttgatttgaaatccaggtctaacctgttttaaatcaactttctgcaaaagaccatttgtgtatctgtctgaatgccaatatttacctaaagcagcttcagggaacatggtttaaaacacacagcagacttgaacagcacctaaccaggaaagatgcctgttctgcttgggatgtgaaaagtctctttcagtgaaaatagtcaccaagcttgatcttccattcctggatgtggtagatgtgagggagaccagaggaggagttcagcatattcacatgcatgaacacagctttctcctcacacgttttaaatttgcatagcaaagaagagcaatcacatcaggaaagaaaggtctaatgggatgtctgtgtcaaagcaaggagtatgaaactggacaggacactcacaaactctttgaacccaggaacaacagcatccaaatgcccagggctggtgtcttctatgggacagaatttgaaaggcattatcttcccaaatttctctctcatgttagcacattgcacctttcctaagagcctctaccactactgccattcctctgggttaacagtggaaatgagatgactgtgtcctcatatgtcaaactgcaccaatcttgttcccaccagagaggaagtgttcgggagggaaggggggctgtgccttctctcaccatgaacacttgatcatagattagcttttcctatctgcaagggtccatcctggcagcctttcccaacatttctaccaccgcggatccctttttcggtatcttctatatggatcccatgttttgaatgattctgccttgctaatctatatttattaccaaacattaattcattttcctatttttcccacatatgaaaaatacatctaaaaatcagagcttctgatcaacataaatagccagggccattggtattaatataactttatttatttttaatataatgttagtcaaa

SEQ ID NO: 51283 - DNA, 1694 bp, Homo sapiens
tggcatataaaagatagttagtaaatattagttgagtgaataaatgaattaaaaatgctttcttgttctgcatcctgtttctttcaataattctcaaatgccggtgtcagacttttcagagctccatgccatatggtaaaaattctacaaatgcaatcttcacctttcttaaaccctgttcacatgggactgtcactactcctatttaaacatgcctccagaacctacgtgaggtactgaatcaaacacaaagagttacaaatgaaagaaataaagatctgataatgaggggatagacttgagaattttctcctcttttgatttattctcttataattcatgtgagacctgtgtattcattttattgctcagtactctatatacttctttttttctaactgctttacatccaccaaaaaaatagactttcaagagaacaaatcataccttctccactttacattccttcctctgatctagagctttttattttcctctttacctctgatttaccaggcttttccaatggttaaacattagctttgcatactatagttttatcatgattaaatataaaagagggaccctccctccttcacagttgggctaacatcagagaatggcaaagaacagctttttagtgttcattccactcattcctaggaagcctctctgttctcactcagatgagaaactttccaggctttgtcccaaaacaaagcttaaatgttttgatttgaaatccaggtctaacctgttttaaatcaactttctgcaaaagaccatttgtgtatctgtctgaatgccaatatttacctaaagcagcttcagggaacatggtttaaaacacacagcagacttgaacagcacctaaccaggaaagatgcctgttctgcttgggatgtgaaaagtctctttcagtgaaaatagtcaccaagcttgatcttccattcctggatgtggtagatgtgagggagaccagaggaggagttcagcatattcacatgcatgaacacagctttctcctcacacgttttaaatttgcatagcaaagaagagcaatcacatcaggaaagaaaggtctaatgggatgtctgtgtcaaagcaaggagtatgaaactggacaggacactcacaaactctttgaacccaggaacaacagcatccaaatgcccagggctggtgtcttctatgggacagaatttgaaaggcattatcttcccaaatttctctctcatgttagcacattgcacctttcctaagagcctctaccactactgccattcctctgggttaacagtggaaatgagatgactgtgtcctcatatgtcaaactgcaccaatcttgttcccaccagagaggaagkgttcgggagggaaggggggctgtgccttctctcaccatgaacacttgatcatagattagcttttcctatctgcaagggtccatcctggcagcctttcccaacatttctaccaccgcggatccctttttcggtatcttctatatggatcccatgttttgaatgattctgccttgctaatctatatttattaccaaacattaattcattttcctatttttcccacatatgaaaaatacatctaaaaatcagagcttctgatcaacataaatagccagggccattggtattaatataactttatttatttttaatataatgttagtcaaa

SEQ ID NO: 51284 - DNA, 1694 bp, Homo sapiens
tggcatataaaagatagttagtaaatattagttgagtgaataaatgaattaaaaatgctttcttgttctgcatcctgtttctttcaataattctcaaatgccggtgtcagacttttcagagctccatgccatatggtaaaaattctacaaatgcaatcttcacctttcttaaaccctgttcacatgggactgtcactactcctatttaaacatgcctccagaacctacgtgaggtactgaatcaaacacaaagagttacaaatgaaagaaataaagatctgataatgaggggatagacttgagaattttctcctcttttgatttattctcttataattcatgtgagacctgtgtattcattttattgctcagtactctatatacttctttttttctaactgctttacatccaccaaaaaaatagactttcaagagaacaaatcataccttctccactttacattccttcctctgatctagagctttttattttcctctttacctctgatttaccaggcttttccaatggttaaacattagctttgcatactatagttttatcatgattaaatataaaagagggaccctccctccttcacagttgggctaacatcagagaatggcaaagaacagctttttagtgttcattccactcattcctaggaagcctctctgttctcactcagatgagaaactttccaggctttgtcccaaaacaaagcttaaatgttttgatttgaaatccaggtctaacctgttttaaatcaactttctgcaaaagaccatttgtgtatctgtctgaatgccaatatttacctaaagcagcttcagggaacatggtttaaaacacacagcagacttgaacagcacctaaccaggaaagatgcctgttctgcttgggatgtgaaaagtctctttcagtgaaaatagtcaccaagcttgatcttccattcctggatgtggtagatgtgagggagaccagaggaggagttcagcatattcacatgcatgaacacagctttctcctcacacgttttaaatttgcatagcaaagaagagcaatcacatcaggaaagaaaggtctaatgggatgtctgtgtcaaagcaaggagtatgaaactggacaggacactcacaaactctttgaacccaggaacaacagcatccaaatgcccagggctggtgtcttctatgggacagaatttgaaaggcattatcttcccaaatttctctctcatgttagcacattgcacctttcctaagagcctctaccactactgccattcctctgggttaacagtggaaatgagatgactgtgtcctcatatgtcaaactgcaccaatcttgttcccaccagagaggaagtgttcgggagggaaggggggctgtgccttctctcaccatgaacacttgatcatagattagcttttcctatctgcaagggtccatcctggcagcctttcccaacatttctaccaccgcggatccctttttcggtatcttctatatggatcccatgttttgaatgattctgccttgctaatctatatttattaccaaacattaattcattttcctatttttcccayatatgaaaaatacatctaaaaatcagagcttctgatcaacataaatagccagggccattggtattaatataactttatttatttttaatataatgttagtcaaa

SEQ ID NO: 51285 - DNA, 1694 bp, Homo sapiens
tggcatataaaagatagttagtaaatattagttgagtgaataaatgaattaaaaatgctttcttgttctgcatcctgtttctttcaataattctcaaatgccggtgtcagacttttcagagctccatgccatatggtaaaaattctacaaatgcaatcttcacctttcttaaaccctgttcacatgggactgtcactactcctatttaaacatgcctccagaacctacgtgaggtactgaatcaaacacaaagagttacaaatgaaagaaataaagatctgataatgaggggatagacttgagaattttctcctcttttgatttattctcttataattcatgtgagacctgtgtattcattttattgctcagtactctatatacttctttttttctaactgctttacatccaccaaaaaaatagactttcaagagaacaaatcataccttctccactttacattccttcctctgatctagagctttttattttcctctttacctctgatttaccaggcttttccaatggttaaacattagctttgcatactatagttttatcatgattaaatataaaagagggaccctccctccttcacagttgggctaacatcagagaatggcaaagaacagctttttagtgttcattccactcattcctaggaagcctctctgttctcactcagatgagaaactttccaggctttgtcccaaaacaaagcttaaatgttttgatttgaaatccaggtctaacctgttttaaatcaactttctgcaaaagaccatttgtgtatctgtctgaatgccaatatttacctaaagcagcttcagggaacatggtttaaaacacacagcagacttgaacagcacctaaccaggaaagatgcctgttctgcttgggatgtgaaaagtctctttcagtgaaaatagtcaccaagcttgatcttccattcctggatgtggtagatgtgagggagaccagaggaggagttcagcatattcacatgcatgaacacagctttctcctcacacgttttaaatttgcatagcaaagaagagcaatcacatcaggaaagaaaggtctaatgggatgtctgtgtcaaagcaaggagtatgaaactggacaggacactcacaaactctttgaacccaggaacaacagcatccaaatgcccagggctggtgtcttctatgggacagaatttgaaaggcattatcttcccaaatttctctctcatgttagcacattgcacctttcctaagagcctctaccactactgccattcctctgggttaacagtggaaatgagatgactgtgtcctcatatgtcaaactgcaccaatcttgttcccaccagagaggaagtgttcgggagggaaggggggctgtgccttctctcaccatgaacacttgatcatagattagcttttcctatctgcaagggtccatcctggcagcctttcccaacatttctaccaccgcggatccctttttcggtatcttctatatggatcccatgttttgaatgattctgccttgctaatctatatttattaccaaacattaattcattttcctatttttcccacatatgaaaaatacatctaamaatcagagcttctgatcaacataaatagccagggccattggtattaatataactttatttatttttaatataatgttagtcaaa

SEQ ID NO: 51286 - DNA, 597 bp, Homo sapiens
ttggcaaaactatgcatttaaagaatccatcatgccatctttgagtgggacctaatatgaaataccttgactgatatgaaatagataaagtgaaaaaaattccagttagagttattttcctggaccagaatagaaatgatcgtactggccatgtgcagtggctcacgcctgtaatctcakcactttgggaggttagcaggcggactgcttgagcccaggagtttgagaccagcctgggcaacctagtgagaccctgtctctgccaaaaatacaaaaattagcctggcatggtggcacatgcctgtggtccaagctacttgggaggctgaggtgggaggattgcttgagtcaggaagctcatttggcaagttagttctgtaatcaatactataaatgtcagtcataactaagatgatggcaggagataatgaaaacaactacttaaatatttgggagataaaattgagtaaacatggtattcaaagttaccaagtgtcagtcaagtatgccttcacgattttagtgtaagtgatttagtgagtaagtatatcacgaagcaataaatcaatgttaatactcatagagtgcttactatgt

SEQ ID NO: 51287 - DNA, 597 bp, Homo sapiens
ttggcaaaactatgcatttaaagaatccatcatgccatctttgagtgggacctaatatgaaataccttgactgatatgaaatagataaagtgaaaaaaattccagttagagttattttcctggaccagaatagaaatgatcgtactggccatgtgcagtggctcacgcctgtaatctcagcactttgggaggttagcaggcggaytgcttgagcccaggagtttgagaccagcctgggcaacctagtgagaccctgtctctgccaaaaatacaaaaattagcctggcatggtggcacatgcctgtggtccaagctacttgggaggctgaggtgggaggattgcttgagtcaggaagctcatttggcaagttagttctgtaatcaatactataaatgtcagtcataactaagatgatggcaggagataatgaaaacaactacttaaatatttgggagataaaattgagtaaacatggtattcaaagttaccaagtgtcagtcaagtatgccttcacgattttagtgtaagtgatttagtgagtaagtatatcacgaagcaataaatcaatgttaatactcatagagtgcttactatgt

SEQ ID NO: 51288 - DNA, 322 bp, Homo sapiens
ggttttaggcacacacacacacacacacacacacacacacacacacatatatatatatacatttttcttttttttttaaactgtattttacatgttttctgcagaagttgctgtctccttaaaacattctcggaaaacaaaaactttaagagattttcctaagttttataaatcagaatataacattgagaggaatagattacrtcaaggtaaaatgaatggaaggataaccattagaagcagtgaaccagagggaagagaaggccgaaattaaatttatgtttggaatatgttccaaatgaccatgtttagaaattttaat

SEQ ID NO: 51289 - DNA, 564 bp, Homo sapiens
atttttaaagttgcagtttcatttattacctttttccctttggaaaagaaaaaaaaatcaagactgtccaatattagccgtggctttggctaaaaagagacagatacagatttgaatttttagtcccacgtaagtacttcttgctgtgatattataatttgccaaaaaaatggagtcagacacgtagttggttcttggtgtttttcaaatatgttcaataatgacttactggattagttaataagttaaaatgataaacattctaataatgctttacagtttatgaaatgctttcataaatcaggaccatctgtaagcttactgagggtggggactgtgtgtcattcacctttgtagtcactgtgcctgtttctgtgatacagaaaggcccatggtcaatatttgctgagtagtacttggtgaccatgygtcattccatcatcagtacaaacctgggagcaggtgtcagattgatcattagtgttgaagagacgacaaaagcgaggccttcaaagatgcagaattcaactcttctgccatataggcccatactgtgtacccttt

SEQ ID NO: 51290 - DNA, 507 bp, Homo sapiens
tgtgtaacagaatacattcctagtggaccagtgtataaattaggatacaaatgtcataacgacatgatgtggttttgaacagcatcaggtttaatctgattattcttactctgtttatcctatttttattccctcaacattcaaagctcagtgatactatctctattttcagccctttctttcctgtctcaatcaagtaataatcaaaactrtatcttcgatctttccttttatttcgaatcccactaggctggttcagggcattatcactggatggttggaggaatgttctggcctcacaatggttcaagaccttcagagattttcattaactttggaatatctgaaaaattattcaatgttatattttttgagcagtgatcatcacataccatttcacatactggggataaagtaaatagataagaaccccaacttcaaggaatattagcaagttgatagctatggatatactaaggggaataaatattttaatataagatttat

SEQ ID NO: 51291 - DNA, 584 bp, Homo sapiens
aacagtaattcagtgattacaacacattcatcacaaattgagtttctgttaatagtttaggtggggaacaatgctagtgggcttttttttttttttttttttgctaatcttgcttgtacttatgaatcctttattctggttgattctctgctctgggttattatgtaacaagtcatttttttgctcttatggtttaaaataaacaaatatatatatacatatatacatatatatatatatatwttttgagagggagtctcgctctgtcgcctaggctggagtgcaatggcgcgatctcggcttactgcaagctccacctcctgggttcacgccattctcctgcctcagcctcccgagtagctgggactacaggcgcccgccaccacacccggataattttttgtatttttggtagagacggggtttcaccatgttagccaggatggtctcgatctcctgacctagtgatccgcccgcctcggcctccagaagtgctgggattacaggcgtgagccaccacgcccagccggtttagataaatattgatataccttttaaaaagttgaaatgaagatgataagtca

SEQ ID NO: 51292 - DNA, 584 bp, Homo sapiens
aacagtaattcagtgattacaacacattcatcacaaattgagtttctgttaatagtttaggtggggaacaatgctagtgggcttttttttttttttttttttgctaatcttgcttgtacttatgaatcctttattctggttgattctctgctctgggttattatgtaacaagtcatttttttgctcttatggtttaaaataaacaaatatatatatacatatatacatatatatatatatatattttgagagggagtctcrctctgtcgcctaggctggagtgcaatggcgcgatctcggcttactgcaagctccacctcctgggttcacgccattctcctgcctcagcctcccgagtagctgggactacaggcgcccgccaccacacccggataattttttgtatttttggtagagacggggtttcaccatgttagccaggatggtctcgatctcctgacctagtgatccgcccgcctcggcctccagaagtgctgggattacaggcgtgagccaccacgcccagccggtttagataaatattgatataccttttaaaaagttgaaatgaagatgataagtca

SEQ ID NO: 51293 - DNA, 510 bp, Homo sapiens
ccaccacctagctccatcaattgcagcctacaatgactgacacgcaacataattagcacttcattaaatattgtattgtgtttctgggatcactatttgctggtcctaacacctatctgtttaaggataccttaagcagaaaggctctctgcgtctctaacttccagtctcactaccccttcattattctaactcattataaactacactgagaccacaagtgattacacaatgccatttaattagaattgtgcatgcttgaaaatacaaaaatcacccttggaacagttaacagataattttagcttattaaacacacattttttaacactccaaaaccactttggttcagatcacatggggacatttccattggttgctgtggtgactatgtcacaaattagagtccctctggctaagattctcaggcccagggtgctgtgactaaaccactgtaaccacttcacatctactcatacactcccattttctaaaacttcraaaccacca

SEQ ID NO: 51294 - DNA, 573 bp, Homo sapiens
cacgccactgcactccagcccgggcaacagagcgagacttcatctcaaaaaaaaaaaaaagtcatacagatcgcacagagcttacattctagtggagtcaggcagcgttaaacacagtaagtatactgaagtacgttagtgtggacgtactgtgtgcaagtgttaaygctatgaacaaataaggcagaaaaagggacagggagggggatgtggcttctgtgaaagaattgagataatacaggtaaaaaaaaaatcagttgtggacagttcaatagaaagtcctcaaacaatgttaagctattactaccacagggacttctgagctcacggacctacagttaagtgcatcatcccacttctgaattattaaataggtgacgtatattcaaagaaaaaaaccaaacaggagtagatcctgatgttgtttgcaggtggaagaaaagaatcaatgaaaatgtcatgatttgggggttctggcatagcctcatttgtcaaggatgctgataagaatctggaaaatttagaaatgcagaaacctgggcttgaactgagtgacatcaggtaagtgaccta

SEQ ID NO: 51295 - DNA, 573 bp, Homo sapiens
cacgccactgcactccagcccgggcaacagagcgagacttcatctcaaaaaaaaaaaaaagtcatacagatcgcacagagcttacattctagtggagtcaggcagcgttaaacacagtaagtatactgaagtacgttagtgtggacgtactgtgtgcaagtgttaacgctatgaacaaataaggcagaaaaagggacagggagggggatgtggcttctgtgaaagaattgagataatacaggtaaaaaaaaaatcagttgtggacagttcaatagaaagtcctcaaacaatgttaagctattactaccacagggacttctgagcycacggacctacagttaagtgcatcatcccacttctgaattattaaataggtgacgtatattcaaagaaaaaaaccaaacaggagtagatcctgatgttgtttgcaggtggaagaaaagaatcaatgaaaatgtcatgatttgggggttctggcatagcctcatttgtcaaggatgctgataagaatctggaaaatttagaaatgcagaaacctgggcttgaactgagtgacatcaggtaagtgaccta

SEQ ID NO: 51296 - DNA, 618 bp, Homo sapiens
gacagctacactgtcattgaatggctgcattgtcagaaaattctttgtatcaagctgaattttatctccaggtaacttccamctgttggtctgagtcctcccctttaagaatgacgaaataaaggaaaatataatcttggtttacttatactcctcagtgggtgtctcttgtcccagtccctcaaacactcctggcttggcatctttccagccgttttccatcctgtgggcttcctttggcatggcctccagcttgtccgtgtctgacttaagggcttcatccgggcctgcaggtggggtattgggagtgcatcataccaccctgttgttcattcatatcccccaagtctttcaaagtaaactattgttgaactctagtgggaagaaagtactgcacaggtggaaccaaggattgctgatgattatgaaaaataatagtgatgtctgtggacactctgctctccatttttctgtgcactccctgtgccacacccaagacagttcttaaaagagtgaccacttattgagttctgactgtgtataagatactgtcctagacactttacatacaccacccatttaactttctaaacaaccatattcttagatatgatttag

SEQ ID NO: 51297 - DNA, 618 bp, Homo sapiens
gacagctacactgtcattgaatggctgcattgtcagaaaattctttgtatcaagctgaattttatctccaggtaacttccacctgttggtctgagtcctcccctttaagaatgacgaaataaaggaaaatataatcttggtttacttatactcctcagtgggtgtctcttgtcccagtccctcaaacactcctggcttggcatctttccagccgttttccatcctgtggrcttcctttggcatggcctccagcttgtccgtgtctgacttaagggcttcatccgggcctgcaggtggggtattgggagtgcatcataccaccctgttgttcattcatatcccccaagtctttcaaagtaaactattgttgaactctagtgggaagaaagtactgcacaggtggaaccaaggattgctgatgattatgaaaaataatagtgatgtctgtggacactctgctctccatttttctgtgcactccctgtgccacacccaagacagttcttaaaagagtgaccacttattgagttctgactgtgtataagatactgtcctagacactttacatacaccacccatttaactttctaaacaaccatattcttagatatgatttag

SEQ ID NO: 51298 - DNA, 618 bp, Homo sapiens
gacagctacactgtcattgaatggctgcattgtcagaaaattctttgtatcaagctgaattttatctccaggtaacttccacctgttggtctgagtcctcccctttaagaatgacgaaataaaggaaaatataatcttggtttacttatactcctcagtgggtgtctcttgtcccagtccctcaaacactcctggcttggcatctttccagccgttttccatcctgtgggcttcctttggcatggcctccagcttgtccgtgtctgacttaagggcytcatccgggcctgcaggtggggtattgggagtgcatcataccaccctgttgttcattcatatcccccaagtctttcaaagtaaactattgttgaactctagtgggaagaaagtactgcacaggtggaaccaaggattgctgatgattatgaaaaataatagtgatgtctgtggacactctgctctccatttttctgtgcactccctgtgccacacccaagacagttcttaaaagagtgaccacttattgagttctgactgtgtataagatactgtcctagacactttacatacaccacccatttaactttctaaacaaccatattcttagatatgatttag

SEQ ID NO: 51299 - DNA, 640 bp, Homo sapiens
actccatctcgttgatgatttattgggtgtgaaaataagtactttaacacatttaagtctgcctgcagatgtgccattggaattctgccatgcttcatggagggccgagaagcccaggctgccatccctttaggcaacataacatgtgctgcttgtggaagataacaygcccacaatagatgttagcaaatacatccgtgctccagaaatggaacctgaggaacaaagcctatctgggtgtcattgccatgcatgattaagaaaatcagacacagccatgataatggccaccaaagcacttcagaagcctatccacatcaagaacacatgacaggcaagattgcagagcaggtgggactcccacagggacaatgctggcctcactttgagcactccaccaccctgacacctttatggtgacacaacacaacatgtacaggatcttcccagcccctcttcaaatccactccaccattggcccatggtctggaaatggggccatttttcataaaaattgaaaactgcttttctgaaaaatggaagaatcagaagagtaaaattcttaaatcatagggtttcatctttcaaattcaagctaattaacagcaatcctgtaacaaagttgcttttctacttgtca

SEQ ID NO: 51300 - DNA, 598 bp, Homo sapiens
tttatttttaattaattaatttgtttttttctttgagacaagatctcactctgtcacccaggctggagtgcagtggcatgatcacggctcactgcagccactaccccctgggtgtagatgatcctyccacctcagcctccccagtagctgggactacatgcacgtgccaccacgcccggctaattttttgtatttttttgtagagacggggtttcgccatgttgcctaggctggtcttgaattcctggcttaagtgacctgcctgccttggcctcccaaagggctgggattatagatgtgagccactgcacccagcccctttgtccatttttaaattgggttgtttttatgctcttgagttttttgagttctgtgtatgttttgtgtattagccccttgtcagatgtacatttgcaaatattttctcccattgataagaagattttgttttgaaggacactgggtaggatgcaaaaaggacagtgagtctaaagagccaggctggagaaaaggcaggaatgcaggggggctgggcacacaggaccacagccagaatcaaaccctgaaacaggttgctaaagactgttgccaacagcac

SEQ ID NO: 51301 - DNA, 1939 bp, Homo sapiens
aagtatcaagccccattgtgaaactagcagaaggagcagagcacaataagaaaatgagagctgcttactggataacatttcagtggtatgcatcatgtttttgccaatgaaatattagttgaagtgcaacctccatgaccctgcactctcagacaattctacttcctttcatctatgaattggtcattgaaagagagtttaataacagaactatgtgtagggactcataaacacagtagacagggagtcacaagggacagtgcagtactccaggacaagtagcagtagaggctgtaggtaactccaagcatgaaggagtccaggaaacagtagcttccagaacctggagtgagtatcacctggagagggccacctgaaaggggctgtgtccctagggccctggacacatccaacttgaagcaaccccaaagggagggaataactactttcactttccactctttcctgcctctaatctcctgttgtcctccattgggcaaacccaaccaaaagccagaagacaagagacaaccaagatatatgccaggcaggccagcctccatggcacaaagcagtggggagaaggataaagagtggatctggaaaggcaaatggaagatgcccagcatggatagtaagttgactcaacttgacttcttggctttgctgtttgataaagaacctgaagaaaatggcccagcagccatgaagccaagctccagaagagtcactgcactgtcattgtatcctttgctggccacatccaatccaagatctaactggttgctactgatttcagagatgaaagatcaggagagaggcggtcgttgtcacctctactttttctttccttggaaccccttacattggtttcctttctgtgaactaactctattcaattggcctgcatgacaggttggggagaattaggataaactgatgccctcaacttatccttccaacagagggctcactggagcactccaaagttctctttactcctaaacttggggacataaatatctttaccttttgctatcttcttaacagtcctcctctcaactattatggatgcattttcccttcatctttacttacatagattccaaaatgtttttactagttcataccagggtacaaaaaaagcccattcggccgggcgcggtggctcacgcctgtaatcccagcactttgggaggccgagacgggcggatcacgaggtcaggagatcgagaccatcctggctaacacggtgaaaccccgtctctactaaaaacacaaaaattagccgggcatggtggcgcgcgcctgtagtcccagctacacgggaggctgaggcaggagaatggcgtgaacccgggaggcggagcttgcagtgagtcgagatcgcgccactgcactccagcctgggcgacagagcgagactctgtctcaaaaaaaaaaaaaaaaaaaagcccattcagctttgaatgtcaaaaattaaatgattatatcagtttatattaaaaatgtatctaattttaatatactcaaatgagttggcaataaacatgatccctayaccccttgtggaaaaaaacaagaacaatcccacagcaactgccattgttcccccaggaaaaaaaaaaaaaaaacttctcccccataactacaggaagaatttgactccttgaatagagttttcagagttagtcagactgctggttccctgaagggaatttgcaaaatattcacagagccacattcaaaaaaacaggtcccgtctgataatgagcaatgatttcttaaatagaacacaaaaagcactaccacagaacgaaaatatcgataaattttatctcattaaataacttccattattgacagattctattaaaagactggaaagacaggccatatagactaagaaaacaatattggcaatccacatagctgacaa

SEQ ID NO: 51302 - DNA, 1939 bp, Homo sapiens
aagtatcaagccccattgtgaaactagcagaaggagcagagcacaataagaaaatgagagctgcttactggataacatttcagtggtatgcatcatgtttttgccaatgaaatattagttgaagtgcaacctccatgaccctgcactctcagacaattctacttcctttcatctatgaattggtcattgaaagagagtttaataacagaactatgtgtagggactcataaacacagtagacagggagtcacaagggacagtgcagtactccaggacaagtagcagtagaggctgtaggtaactccaagcatgaaggagtccaggaaacagtagcttccagaacctggagtgagtatcacctggagagggccacctgaaaggggctgtgtccctagggccctggacacatccaacttgaagcaaccccaaagggagggaataactactttcactttccactctttcctgcctctaatctcctgttgtcctccattgggcaaacccaaccaaaagccagaagacaagagacaaccaagatatatgccaggcaggccagcctccatggcacaaagcagtggggagaaggataaagagtggatctggaaaggcaaatggaagatgcccagcatggatagtaagttgactcaacttgacttcttggctttgctgtttgataaagaacctgaagaaaatggcccagcagccatgaagccaagctccagaagagtcactgcactgtcattgtatcctttgctggccacatccaatccaagatctaactggttgctactgatttcagagatgaaagatcaggagagaggcggtcgttgtcacctctactttttctttccttggaaccccttacattggtttcctttctgtgaactaactctattcaattggcctgcatgacaggttggggagaattaggataaactgatgccctcaacttatccttccaacagagggctcactggagcactccaaagttctctttactcctaaacttggggacataaatatctttaccttttgctatcttcttaacagtcctcctctcaactattatggatgcattttcccttcatctttacttacatagattccaaaatgtttttactagttcataccagggtacaaaaaaagcccattcggccgggcgcggtggctcacgcctgtaatcccagcactttgggaggccgagacgggcggatcacgaggtcaggagatcgagaccatcctggctaacacggtgaaaccccgtctctactaaaaacacaaaaattagccgggcatggtggcgcgcgcctgtagtcccagctacacgggaggctgaggcaggagaatggcgtgaacccgggaggcggagcttgcagtgagtcgagatcgcgccactgcactccagcctgggcgacagagcgagactctgtctcaaaaaaaaaaaaaaaaaaaagcccattcagctttgaatgtcaaaaattaaatgattatatcagtttatattaaaaatgtatctaattttaatatactcaaatgagttggcaataaacatgatccctacaccccttgtggaaaaaaacaagaacaatcccacagcaactgccattgttcccccaggaaaaaaaaaaaaaaaacttctcccccwtaactacaggaagaatttgactccttgaatagagttttcagagttagtcagactgctggttccctgaagggaatttgcaaaatattcacagagccacattcaaaaaaacaggtcccgtctgataatgagcaatgatttcttaaatagaacacaaaaagcactaccacagaacgaaaatatcgataaattttatctcattaaataacttccattattgacagattctattaaaagactggaaagacaggccatatagactaagaaaacaatattggcaatccacatagctgacaa

SEQ ID NO: 51303 - DNA, 543 bp, Homo sapiens
tgtatttctaacattgcaaaaatgatctcaacatacctcttctaaaggtaaggctaagttaattttaaagccttcaggtaggcccatcctgcttaccctgtgtcctcartgcaaattaatgatgctcagcctgcactttcttttagtatttccagactcctgaagcatgtgtatcctatctcccagcccaccttgcacttacacaaatgattaactacatagagagggctcatttctcctaagtggagctgcagtattattttttagaaggaaaatatgtgggtgaaccagcacttactcaacctaactatatctaaatttcaaatatctgctatacatatattatttattcattaatgaaaaaaatagagaagatgctggcttcaaaaaacattaaaaaaaactcaaccattacaaatgagggaaaattgggaggtggtgttacatgtatgtaaaactttttccccccaaaaaggaggacatagagagattaaagaatattcacaaatcatcagtgtgtctgctgttttaatttagccttac

SEQ ID NO: 51304 - DNA, 543 bp, Homo sapiens
tgtatttctaacattgcaaaaatgatctcaacatacctcttctaaaggtaaggctaagttaattttaaagccttcaggtaggcccatcctgcttaccctgtgtcctcaatgcaaattaatgatgctcagcctgcactttcttttagtatttccagactcctgaagcatgtgtatcctatctcccagcccaccttgcacttacacaaatgattaactacatagagagggctcatttctcctaagtggagctgcagtattattttttagaaggaaaatatgtgggtgaaccagcacttactcaacctaactatatctaaatttcaaatatctgctatacatatattatttattcattaatgaaaaaaatagagaagatgctggcttcaaaaaacattaaaaaaaactcaaccattacaaatgagggaaaattgggaggtggtgttacatktatgtaaaactttttccccccaaaaaggaggacatagagagattaaagaatattcacaaatcatcagtgtgtctgctgttttaatttagccttac

SEQ ID NO: 51305 - DNA, 593 bp, Homo sapiens
ctctctccagcctctgggctttcacgcatgctgttccctctgcctggaacccccgtctggctaacccctactcattagcaggtcaaagccgcagcttcctccgggaagccctccctgacattctccaatcagctcccttgccaagagctccctgcatctcccctttgttgtacgtttcatcacagtatattgtcactgttggtttaattgtaaggcgcgtgaaggcccctgttgagracactattctgggtctgggaagttagcaatgaacaaaacagacaaaatcccgggccatcgtgaagcttatatcccagtgaagcggggcagacgaggaccatctgtctctttcaacctttgtggacatgtcactaaaggtatggctgagtttaaacctgaaaaggggccaggtgcagtggctcacacttgtaatcccagctctttgggaggccaaggcaggtggatcacttgagcccagaccagcctgcacaacatgatgaaactccatctctacaaaaaaatacaaaaaaaaaaaaattagctgggcatagtggcataagcccatagtcccagctactcgggaggctgagaggcga

SEQ ID NO: 51306 - DNA, 593 bp, Homo sapiens
ctctctccagcctctgggctttcacgcatgctgttccctctgcctggaacccccgtctggctaacccctactcattagcaggtcaaagccgcagcttcctccgggaagccctccctgacattctccaatcagctcccttgccaagagctccctgcatctcccctttgttgtacgtttcatcacagtatattgtcactgttggtttaattgtaaggcgcgtgaaggcccctgttgagaacactattctgggtctgggaagttagcaatgaacaaaacagacaaaatccckggccatcgtgaagcttatatcccagtgaagcggggcagacgaggaccatctgtctctttcaacctttgtggacatgtcactaaaggtatggctgagtttaaacctgaaaaggggccaggtgcagtggctcacacttgtaatcccagctctttgggaggccaaggcaggtggatcacttgagcccagaccagcctgcacaacatgatgaaactccatctctacaaaaaaatacaaaaaaaaaaaaattagctgggcatagtggcataagcccatagtcccagctactcgggaggctgagaggcga

SEQ ID NO: 51307 - DNA, 523 bp, Homo sapiens
agaaaggaggcagagacccggtggggagctggggaggcttggcctggctgcagggggcctggcttccttcccagcccccacacatatgcagatcccccacaaactctcactgtgtgcgtgtgtatgtgtgtgtgctcacacgcccagatgcacatgcagtccctgtatgaggacctatcggtacctttatctgtgtgtctgtccatctgtctgtctgtctgtgtctggggaggagatgaatgggggactgggggcggtttctgttctgtgtcacagactctgacctctcatctcagttcacaatcccaacagccatgagcaagtccaagacaggatgacagggactgtctgaaagggagtgaacagtgggcgagggaggggtcccagccgggcctggtggtgggtcgtcttgcctcaccctccctggcgaaggctgctccagggagcagcaggcagcccatctggtgcaggagctgcagagaggtgggcagyggggagggggctgctccccacaggccagcca

SEQ ID NO: 51308 - DNA, 536 bp, Homo sapiens
catttcagatagtggctgctccattagctgaggtcctagcatggacatgacaaagagcacagcccctggccaacctrtgttgggccagcagcatgaaggaaaggctccacggagcagagctcaccttgcaaggttatgtgcataaaatataaactttgttttttaagtcacatgattgttggaactctcataatagcagcttgggttcttaacatcctaattaacacaggaatagataaataaaccaataaaacagatcagaggacccgagaacagatttctatctatatataagaatgtagcatatgttagagatgtcaccactaatcattagggaaaagaaagactatttaataacagagctgtgacatgtcattaacaaaagtaaaatatagatgttttagtgacctaaacatgaaaaacagttagaagaaattataagaaaatatttttcatgacccaggatagagaatgatttctcaaacaagaaagacacagtaagaacatcctataaaataaaaaaatagattacttaa

SEQ ID NO: 51309 - DNA, 550 bp, Homo sapiens
gtaagtattaactaatattattacaatttatcctcatatagtaacatatcaaatattttcagtcagtgatgcaatatgaataaaatgaaatgatgcagtagtgacagaactgagagaaagctggtacraatttatactgactggtcagggaaagcttcacagaaaaggtgaactttcagctgacacctgagtaccatggtctggaggtaagagtgtcccatgcatatggaacagcaaatgaaacttcccagagcataatctgagaggggagatttcaggagtggagccacatcattgaagttccttagtcctggtaagtgtggattttattctaagtgtggtgaaatgcccctgagaggttttgagtagtagatggaattccatttttaaaagtcactggtgagtcaagtagtgtactatggttacatttttttccccttatacctcattttgtttttcctgcagttaattcttgcattatttccttttatttacttaccttactatatatttattatgaattctttccaattcccaacttcctgacagc

SEQ ID NO: 51310 - DNA, 550 bp, Homo sapiens
gtaagtattaactaatattattacaatttatcctcatatagtaacatatcaaatattttcagtcagtgatgcaatatgaataaaatgaaatgatgcagtagtgacagaactgagagaaagctggtacaaatttatactgactggtcagggaaagcttcacagaaaaggtgaactttcagctgacacctgagtaccatggtctggaggtaagagtgtcccatgcatatggaacagcaaatgaaacttcccagagcataatctgagaggggagatttcaggagtggagccacatcattgaagttccttagtcctggtaagtgtggattttattctaagtgtggtgaaatgcccctgagaggttttgagtagtagatggaattscatttttaaaagtcactggtgagtcaagtagtgtactatggttacatttttttccccttatacctcattttgtttttcctgcagttaattcttgcattatttccttttatttacttaccttactatatatttattatgaattctttccaattcccaacttcctgacagc

SEQ ID NO: 51311 - DNA, 658 bp, Homo sapiens
agcttgtagaagtcacttcgagctaggtctttgttttgtcaaccaccttcaccccttaaattcactgaacgtaatgtagcagcatggctggggaaagaaactgtagctagtacgccgtgttcatttgcaactcatggctccttcgcatgcctagtgtctaacacaggctgcagaaacttttcctgccgctttgttttagragatgaagaattcttttcccgaacaactgctgctccagggcactgtgctcacttttctaggggaagtgactctgaaacccaaaattccctggataccaccagagaatggctgaacaggaagttttcttctttatttaaattagtaaattcgactgttcatgcgagccaaaggcagtgtcataggtgtctgtgtggacccgaaggtgaccttgtcccatgagagggatgctgtccaccagggaagggaccatcccagattgatgggactctgggtttcgctatgagcacccacgtcattttccacaggtaaattcctttggatgtttcttattcttaggcaggttaatggtcactttgtaccacggcaagaagtaactgcgtgagtgcatgtggccggggctttgtgtttctgttttaatcggttaggaatcttctcctgtataatgttctaacgacat

SEQ ID NO: 51312 - DNA, 366 bp, Homo sapiens
ccattcatatgagaaaagtcagtgattgttatcctcaacctcacagaatccttaacaccttgcttgtygaagcatatagatcatgatcctgtttgaacagtattgttcaaaatttctgttaataattcctcacaaccatgtgactagtgactaaaatgaccttggattctacaaatgaaaaattatcccaaccacacgcgggggtgggaggtaggcaggaggctgccggggccctggcactgtgacattatacccatagccttcctaggcagcttcacttcaaagtctattttaacttcccttgggctatttcttgggtgtgcattcatagaaaacacttcctgtttatttatttttatttattta

SEQ ID NO: 51313 - DNA, 451 bp, Homo sapiens
attatttgtgttgcatgcttcctttagcttttgagaaatctcggaacaaaatcttcagcgctcaagwccagaatgaatttggtggtttcacgacccaccccctcccatcttttatttaaaataattaaaaaaactccaatctcctgaaattcttaagacagaagaagctttagagtcaacaagaacgagatcttttgctttcattagaaatgtctgcatttctctctggttaaaggagggtgggatatattggaatattaatgaggagcatttagatgaggctcttaatttgaaaagaatatgagaattaatgcttgagtttaattggagcctgaatcatcacagatagatttttaccctcttctccttaatcaatttcaccctaattaattcttctgtggctaagtcttgttacattagatagtctgctgattatttccacaatcaagag

SEQ ID NO: 51314 - DNA, 588 bp, Homo sapiens
gcatccacgaagagatttctcaatgtatttgtttcctttaccatgtctctggagtcaaaccttgtagatccctggaaatttgtgataaaatctcaaggtaatgcttcacttccacatctttaattgaacacagacacaaaaatgggcatgatctctgaggttgtttccagtctttagatcaataactttgagtatagtaataattataataatagcttctataattytacctttttgaaaaataacaaaaggcaagttcaatctacaaagcatataatttttaaaaaagcatttcttggagtttataaggaaagtaaacattttctcacaaagaacatataaactttatagtacaagctatacaacaaaaatatgactgctctggcaagccaaggtcctctgcccagccatagaggttccatagttatattagggtaggtggccttttggtttcccagggaaagcccaggaagaagttatagattgaggattaaaatgcaccatttcccctcaaatctgtcctttccaaaattattattaccataatttctgattctggccttctttctatgtattagtaatgggtga

SEQ ID NO: 51315 - DNA, 544 bp, Homo sapiens
ctagatacaggcatcttacaaaatctcatatcttaattacttttaattattatttacatgtttggaccctgtcttcatgttttgtttgcttgttttaattcagtaaggagcattttgtatatgtattctttgcaacargaaccctttgtagggggagatttgccccttccccagtgagagagatgaagtattttaatgttacctaatttgcctaaagcactttcatgaagattgaaactcagatccttcactggagaatacataataataacaaaaaaaagaaatcctctgtttataaaagttgcccaacatttaaaattattggaaaatatgaggaagaataagacatacaacatgaaagcttaagaatgttttacataaaatacactgaatattcattcaaagatccttcagaggaaaacttgagttgcaaaattgatgcattagcaaacattacttaaggtattaggacatgctgtatttttatgtactaagcattagttggttttctttttttttagagacagagtctgatatgatttgg

SEQ ID NO: 51316 - DNA, 544 bp, Homo sapiens
ctagatacaggcatcttacaaaatctcatatcttaattacttttaattattatttacatgtttggaccctgtcttcatgttttgtttgcttgttttaattcagtaaggagcattttgtatatgtattctttgcaacaagaaccctttgtagggggagatttgccccttccccagtgagagagatgaagtattttaatgttacctaatttgcctaaagcactttcatgaagattgaaactcagatccttcactggagaatacataataataacaaaaaaaagaaatcctctgtttataaaagttgcccaacatttaaaattrttggaaaatatgaggaagaataagacatacaacatgaaagcttaagaatgttttacataaaatacactgaatattcattcaaagatccttcagaggaaaacttgagttgcaaaattgatgcattagcaaacattacttaaggtattaggacatgctgtatttttatgtactaagcattagttggttttctttttttttagagacagagtctgatatgatttgg

SEQ ID NO: 51317 - DNA, 604 bp, Homo sapiens
tgacagagcaagaccctgcctttaaataataaataaatagaataaaataggagatattagaaattagaagtatgtaaatgataggataagaagttattgtgttagaacccataggccttcatattaaattattttaatatcagatggcatgctagaataataakgtgactcctataactggaaccatagaatagaattttttaaatgctctctgaatgtataaagaaaaaataagatttaattgtgacattctgacacccacatgctagggtaagttcaacacctgtgcaggctgccttccctcccagacagttgtgtctgaacaccaccgtggactaaaactaacaaaactaacaatttatgatattggcacccttcttccctatgtcattcacaggtctgcttcattcctacggattaaacacctctccaggatcctagattcaagccattgcttctcgcatttccaccttctcactcctaaattaaatgagggctggctctgtccaagaacacaatctttactttgtagagaaggtatctacctcacaattggctttgcatttctccaaattccagacttctgctggcaggatgttctagt

SEQ ID NO: 51318 - DNA, 604 bp, Homo sapiens
tgacagagcaagaccctgcctttaaataataaataaatagaataaaataggagatattagaaattagaagtatgtaaatgataggataagaagttattgtgttagaacccataggccttcatattaaattattttaatatcagatggcatgctagaataataatgtgactcctataactggaaccatagaatagaattttttaaatgctctctgaatgtataaagaaaaaataagatttaattgtgacattctgacacccacatgctagggtaagttcaacacctgtgcaggctgccttccctyccagacagttgtgtctgaacaccaccgtggactaaaactaacaaaactaacaatttatgatattggcacccttcttccctatgtcattcacaggtctgcttcattcctacggattaaacacctctccaggatcctagattcaagccattgcttctcgcatttccaccttctcactcctaaattaaatgagggctggctctgtccaagaacacaatctttactttgtagagaaggtatctacctcacaattggctttgcatttctccaaattccagacttctgctggcaggatgttctagt

SEQ ID NO: 51319 - DNA, 1781 bp, Homo sapiens
tcaagcatgcatggattgacaaaggaggagttttttttcttctctgaaggcactgccctcggtgtgagggttggggaggaaagtgagatttcctagctatcttagagtttagaaccacagagcacagaggaagtgaaagcagaaggggagcctttgctcctcctcacacagcaacagagcaggagagctgcatgctgaaaagagctgcacacaaaaatgcttgtgcatgccactcaatttcttctgcttccaaacacttcagtttacttagttgcactgaagcacattttacacgggactaaaggaaaaggaatatgtcacggtaaagtgggggcatggtgtatccttatgttttgcaagaagaaaatctgagcttcctttaaataaacaatcatttatttatgaaggcatctttttgggacaaaatgacaagatccttatttcctcattgtctgtgagtcagagcaataatttccctttaatgctgggggtcaaaagatgacatatctgatcaccattcaccagatacatatttgagaaacaggaggacagacttcagtgacagaatagagcttagtgtgtgagaatgtgtttggctgcaagtaagaaacctgacttggccaggcacggtggctcacacctgtaatcccagaactttgggaggcccaggtggacagatcacgaggtcaggagtttgagaccagcctggccaacatggtgcaacctcatctctactaaaaatacaaaaattagcatggtggtgggtgcctgtaatcccagctcgggaggctgaggcaggagaattgtttgaacccgggaggcagaagttgcagcgagccaagattgtgccattgcactccagcctgggcaacagggtaagactcagtctcaaaaaaagaaagaaagaaagaaagaaagaaaagaaaccctgacttatagtagcatacttttctgatgtaaaaattaagtggtttctggtattggttcagcagttcaatcatgttgaggcatgtatctctccaattcccttgactttttctctcactgttccaagatagcttctttagacccaaccatatgtcaacatctaagtcaggataaagtgaactaggaaaaaggatgcataccagccacatctgtctatttttatagggaaaacaaagtatttcccccaaattttccccagcagagttctgagtgcatcacacagccacctctgtctgcaagaaaggctgggaagcccagcatcagggttgtcaggactggctgtgatccatcacctggagctctgttaccctgagcaaaactggatcctgttattaaggacaaaggttggaagcgttctgggaaggcaaataaaagtgtctatctaacacagtaacttggaaagagtaaggaatttattctagacaggactgagttccaagtcccaacactattattgataagaaataattatagagaagtagaagaacttgggaccagccatctggaaacctgagtccttcgtctctcttgtgtctccaagaatgaacccagttgactagaagactctgagagtttcttccagcccaacagtggctcgttccargctctgatgtgtcatgactagggtttggaaggggcatggtttctgcccttacgaccaatgagcagtaggtgctgctgggtctctccccttccccaagtcatcttatcaccttggaaagtgttgtatgaggcacagaggagaggcacttttgagcacattaagatcaaacagacttgagtttgagtttttg

SEQ ID NO: 51320 - DNA, 1686 bp, Homo sapiens
acctattttctttgtaaattacactgtcttaggtatttcttaatagcagtatgaaaattgactaaaacacatactctgtgtagcaatgcaccactatgtaggtgattatggatgaataataaatttcatctaacaaaacttttctatttgttattacacatttcctctcataaatctgagatctaaaatacatacaaaacatccattttaagtcgagggtacaaattattttcactgtggtcactactggaatcaagtcaatttaaggaaacyaaagaagaggaataaatgaacaatgccttcagaacactgccagtggccgtaaagtgttttttctccctatgttactttgcttaataaataaatccctaaaaagagaatttgaatagagtatcttgatttgtgtgcctgtccttgaaaaagtgaaggtaattggaatagatgaataaaatttgacaatcccagtagaaccacagaaatagtaaaacagagttctccagtgagaaagcagaatgttgctactgaaaaaggagaagagatgttggctagacataaatgatgaatgtctattatacagatttactattcagtacaatcaacacttcaggaatatatggtttaacattgagttatcttggcaactatgaacatatatcacactgtatatcatctttaacttatcgaaatgattggattctgaagtcaaattctcaagattcacacttagtaaggtttttactccgtgaagagtttcaaagatttttatctagcaaaaatattattaggtattacatataaatttatttttacttttaaactttattttatacatggtcttactatgttgcccaggctgatcttgaacctctcctgtcaagcattcctcctgtctcaccctcccaaattgttggaattacaggcttgagccactgtgcttggcagtatcaaattctaagagtaatttcaaggatacaagaaatcaagaggctagaagaagcatggaatgtttttggagattgagggctattctgaatatttcttttctgcatggaggcaccctgttgtctcagagtagataaggcctccaagtgaggtactaattttattacctcacatagcaagaagtgttcagtctttttataacagagaagtgatgacattttccggagatccacatcttataatgcataaattctaagtgtattcgtccatccttgcattgttatacaaaaataatggagactgggtaatttatagagaaaagagatttaattggctcccacttccacaagctgtataggaagcatggttgggagacctcaggaaatgtacagtcatggcagaaggggaaggataagcaggcatgtcttacatagcccaagaaggaggaagacagtgaagggggaggtgctacatacttttgaacaaccagatcttgtgagaactcactcactctcaggagatcagcaagggggatgtccgtccccatgattcaattacctcccaccaggcccctgttccatatttggggattacaattaaacatgagatttgggcaaggacacaggtccaaacttttagtttatcacgaaactgtttctataagcaattgccaaccaggcatgttatgttaggaacgtttctcagatatacctccaagtaaacccccctactactaaatatagc

SEQ ID NO: 51321 - DNA, 1686 bp, Homo sapiens
acctattttctttgtaaattacactgtcttaggtatttcttaatagcagtatgaaaattgactaaaacacatactctgtgtagcaatgcaccactatgtaggtgattatggatgaataataaatttcatctaacaaaacttttctatttgttattacacatttcctctcataaatctgagatctaaaatacatacaaaacatccattttaagtcgagggtacaaattattttcactgtggtcactactggaatcaagtcaatttaaggaaaccaaagaagaggaataaatgaacaatgccttcagaacactgccagtggccgtaaagtgttttttctccctatgttactttgcttaataaataaatccctaaaaagagaatttgaatagagtatcttgatttgtgtgcctgtccttgaaaaagtgaaggtaattggaatagatgaataaaatttgacaatcccagtagaaccacagaaatagtaaaacagagttctccagtgagaaagcagaatgttgctactgaaaaaggagaagagatgttggctagacataaatgatgaatgtctattatacagatttactattcagtacaatcaacacttcaggaatatatggtttaacattgagttatcttggcaactatgaacatatatcacactgtatatcatctttaacttatcgaaatgattggattctgaagtcaaattctcaagattcacacttagtaaggtttttactccgtgaagagtttcaaagatttttatctagcaaaaatattattaggtattacatataaatttatttttacttttaaactttattttatacatggtcttactatgttgcccaggctgatcttgaacctctcctgtcaagcattcctcctgtctcaccctcccaaattgttggaattacaggcttgagccactgtgcttggcagtatcaaattctaagagtaatttcaaggatacaagaaatcaagaggctagaagaagcatggaatgtttttggagattgagggctattctgaatatttcttttctgcatggaggcaccctgttgtctcagagtagataaggcctccaagtgaggtactaattttattacctcacatagcaagaagtgttcagtctttttataacagagaagtgatgacattttccggagatccacatcttataatgcataaattctaagtgtattcgtccatccttgcattgttatacaaaaataatggagactgggtaatttatagagaaaagagatttaattggctcccacttccacaagctgtataggaagcatggttgggagacctcaggaaatgtacagtcatggcagaaggggaaggataagcaggcatgtcttacatagcccaagaaggaggaagacagtgaagggggaggtgctacatacttttgaacaaccagatcttgtgagaactcactcactctcaggagatcagcaagggggatgtccgtccccatgattcaattacctcccaccaggcccctgttccatatttggggattacaattaaacatgagatttgggcaaggacacaggtccaaacttttagtttatcacgaaactgtttctataagcaattgccaaccaggcatgttatgttaggaaygtttctcagatatacctccaagtaaacccccctactactaaatatagc

SEQ ID NO: 51322 - DNA, 1294 bp, Homo sapiens
ttccttagacctgggtttttctctagctgtattctcccaggtcaggtcagatatggagcttggacaacatataagggtgcttctagattactaggaggaacactgtaaacatgggaagtcctaaaatcctctccccagagatgtggtttggaagaaagctcaacaatctgtgcatgtcataagtgctgcaagaaattctagtgccggtggtccatgggccacctgtgagaccccccagagcacctctcactgctgaactcccagaaaatccccctggccctcttttgcatcatttctcccaacatgggacagcagcttggcaggatctaggttacatgacaaacatttagtgaacagccccacttgggccaggcagtcactcctctgggaccctatgactcctgcctttcccctctccttccttttaccattcccccatttttgcttctcacttctggctcctttgctctcgctgcctacctgaactctctgaagccgctgaacttctgaggctgggagtcctcttctctaaacttccctttccttagctgagtggggacctagccccagtaaatgggatcctggctctgatacgttttggctgtgtccccacccaaatctcatcttgaactgcaactcccacaattcccacgtgtcatgggaggaacccagtgagaggtgatttagttatgcgggtgggtctttcctgaactgttctcatgagagtgaatgaatctcacgagagctgatggtttaagaaaatggaagtttgccagcacaagctctctgtttttgccgccaccatccatgtaagacacgacttgcccctccctgccttttaccttccaccatgattgtgaggcctccctagccacgtggaactgtaagtccaataaatctccttcttctgtaaattgcccagtcttgggaatgtctttaccagcagcgtgaaaacggactaatataggctccaaagcttcaatcaaaaagaagggaaggtatgtgatttggcagcccaagtaacttcggagaattaaaacgaatctgacccaagaaggagttttgyatttcctaatttaaaacaaaaatttctccttaagtcttacactttctgaaagtaattcatttgggacattgctagcataggactgataccttgtactagagaaagaaagatgaattcaagtcagaaagttagcatgcaaagtccagtatgtgtgcaaccagatcagaaagggatatttgatgggatacatatgaaagcaatggttagagaaaaataaaccacttcatg

SEQ ID NO: 51323 - DNA, 570 bp, Homo sapiens
cttcttgtctaccaggtcttttagcattcattttgtaagtcattcaacacctacttactgagaaggaatactgggctagacagtgtgctaggggctggggaaaccgcaatgcataggagagaattcccatctccaagaggctcacagtcaaacagacataaataggtgattacaatatacactaacaacatagttttagaaacaactagcagaattatatagacgaagatgccaggaaaggcttctcagagaatctggcttggcaaatatctcaacaaagagggctgagcagggatgagccgaaggagaggatggaaagtaggttgtgggtgagttttccaggcagcatgtgcaaaggtccaggagaaagaggaaggagcctgtacttggaggaatattcgattactattatcagtgtcacacttgctattcatctagacagaagctcctgaaacaaaaaggatacacttcaaaagatgccaatatatccatgaccacacaaaagagtgtctagtcatataataaagggtgtacatakgcaggcaactcacatcctgccaaatattaaat

SEQ ID NO: 51324 - DNA, 575 bp, Homo sapiens
agccatctatgtgttcttctatttcttttagggtttcatattctacatttaacatttactgtgcagaaattattttatcttttctccaaattgttcaccaggagacataagcttattatttgtatatttgtgtattttgtatatttgtgtatatttgtatatttattgatttattgaatagtagtcttgctatatatataatatatgtattatgcatatatatttcatgtaaaataatccccactctttttttttgagacagagtcttgctctgttgcccaggctggggtgcagtggcgcaatctcgtctcacaagctccgcctcccgggttcacgccattctcctgcctcagcctccctggtagctgggactacatgcgcctgccaccacgcccagcgaattgtttgtctttttagtagagatggggtttcaccrtgttagccaggatggtctcaatctcctgacctcgtgatccgcctcccttggcctcaaaaagtattgggattacaagcctgagccaacacgccaggccaatcctcactctttcctgacttataaaatcctttttatgaaa

SEQ ID NO: 51325 - DNA, 587 bp, Homo sapiens
ccctttgaggcaaatactattttaatctccaatttagaaaagaggaagctgaggctcccatagatcacataacttgcccaatattgctccaacaatgggaaactgagccagaatttgaatccacttgtactggaccctaaagcccctgctcscaatggcagcttgagagaaaagctcttggtaagtccagagatctcaccaaggcatctttctttaggaatcagaggcgcaattcagcccgccgtgcagcaagagtgggaatcacagctctgatgtgacaagcacaggggtttggcatccagctctcacagctgccaaaaagaattaaacaaagtcaatgaaagcaaaggaaaggcaacaacaaaaatgccagcagcagcagcagcaggagggagggagggcccaattactactggttgaagtgtgaagaaaattaaagttggtgatggttcaaggttatgttgaaattccaaggcagtgggcttgcataaccatgaaacatggaaattaaagcattactgatgttcacactgtttatttcaggacttcactctgtctcattttgtctcaacaagtctcagttcaat

SEQ ID NO: 51326 - DNA, 559 bp, Homo sapiens
taaacctacactaccattgccaaaaaaagggcttaaatcttatgtcatggtaaagatatccctgccttttccagcctacatttatttcttcattgtatacgtcatgttattatcattaatttgtaataaaattaacattttatagtatgttatccttaacctgctttgttatatatagttttctattctgacagtctcatgcttgctcaaattgtctattcaactctagtgatagggtaagtaaaaaaccaataaccggccgggcgcggtggctcatgcctgtaatcccagcactttgggaagctaaggagggcagatcacgaggtcaggagattgagaccatcctgactaacacggtgaaaccctgtctctactaaaaatacaaaaaattagccgggcgtggtagcaggagcctgagtcccagctacttggaaggctgaggcaggagaatggcgtgaacctgggaggcggagcttgcartgagcctagatcgcgccactgcactccagcaacttaagagttttaattattactcctcttctagcatctaacatattgc

SEQ ID NO: 51327 - DNA, 564 bp, Homo sapiens
ttccaaatgcattccactatggaattcaagctgtctttggttttcagattattctccttcattatattattggtttcatgttattattactcatttcaccatattagattttatattatttaaagtgaaatgtgtatcatgttcatctttatattttgtttttatacatcaataagaacatacctagaaaaatgccttgtatagcttaagtgtctaatcagtgtatattatataaaggtgaatttcaatatgaataaacccatcaactattttattttagtctctaaattgaaaaagctgttctttgtaacatggaccagtgaaaatgaagttacataaaatatgtgatgataataatacaatatttaatattatatataaaacaatatcaacacaatttaatgtcagatcaaaacaacaacagaaattyattagagtaagaagagaaattgagaagggtgaagtttctcgaatacagaaacattgtgtatacatcctcctagatttagcgaggcatccctattctgtgattcaccattggtgaatgattaattaagagttgat

SEQ ID NO: 51328 - DNA, 564 bp, Homo sapiens
ttccaaatgcattccactatggaattcaagctgtctttggttttcagattattctccttcattatattattggtttcatgttattattactcatttcaccatattagattttatattatttaaagtgaaatgtgtatcatgttcatctttatattttgtttttatacatcaataagaacatacctagaaaaatgccttgtatagcttaagtgtctaatcagtgtatattatataaaggtgaatttcaatatgaataaacccatcaactattttattttagtctctaaattgaaaaagctgttctttgtaacatggaccagtgaaaatgaagttacataaaatatgtgatgataataatacaatatttaatattatatataaaacaatatcaacacaatttaatgtcagatcaaaacaacaacagaaatttattagagtaagaagagaaattgagaagggtgaagtttctcgaatacagaaamattgtgtatacatcctcctagatttagcgaggcatccctattctgtgattcaccattggtgaatgattaattaagagttgat

SEQ ID NO: 51329 - DNA, 578 bp, Homo sapiens
gctggaatgcaatggcatgatctcggcttactgcaacctccgcctcatgagttcaagcgattctcctgccttagcctcctgagtagctggaattacaggcatgcaccaccatgcctggctaattttttgtatttttagtagagacggggtttctccatgttggttaggctgatctcgaactcccaaccccaggtgatctgcccgcctcggcctcccaaagtgctgggattgcaggtatgagccaccgcgcctggcctacagatgcatatattgagtggctactatgtgctgggcagtgtactaattgtgtaattagctttatgtccctcaacctgaaaaatattatgtgrtggatcagtcctgaaagctagagacatgtattcatttaacaaatatttattatctcatattctatgacagataccattcttttgtagactaaaaactcaaactccataaaatatttaaagaggtttacgttcagccaatatgagtgactatgtacccaggaatagtctcaagaagtcctgagaatgtgtgcctgaggtggttgggttacagtttggttttatatatta

SEQ ID NO: 51330 - DNA, 638 bp, Homo sapiens
tttttttttttttygctatcaatcacaggtatacaagtacttgcctttactcctgcatgtagaagactcttatgagcgagataatgcagagaaggcctttcatataaatttatacagctctgagctgttcttcttctagggtgccttttcattaagaggtaggcagtattattattaaagtacttaggatacattggggcagctaggacatattcagtatcattcttgctccatttccaaattattcatttctaaattagcatgtagaagttcactaaataatcatctagtggcctggcagaaatagtgaatttccctaagtgccttttttttgttgtttttttgttttgttttttaaacaagcagtaggtggtgctttggtcataagggaagatatagtctatttctaggactattccatattttccatgtggctggatactaactatttgccagcctccttttctaaattgtgagacattcttggaggaacagttctaactaaaatctattatgactccccaagttttaaaatagctaaatttagtaagggaaaaaatagtttatgttttagaagactgaacttagcaaactaacctgaattttgtgctttgtgaaattttatatcgaaatgagct

SEQ ID NO: 51331 - DNA, 464 bp, Homo sapiens
aaagtacacaaattagaatacatttgatttccagagaaacaktaagctgtgaaggttaagaaaaataataaaacaggttacactgatattgtcatacctgggagcacacggtggacaagacaaaaagggaagacggaaaagatctagaggatagtgttaggacggggaagctaagtttttgacacttggagggtgggtatctattttaattttataatagcagtaaaggaagttacaaatttaaaaatgcatgtgaaactgggaggttctttattgtgtatgctgcttatttattagacaaaatcatgatatataaacgcataatctttaaaacaagggattactgaatatttcaaaacacgttacattgaaagaattcgacccaggagatgatcttttaatcatactgtatctataaatataaaaacaggaagatatctgaaaacgaggaggatccattacag

SEQ ID NO: 51332 - DNA, 551 bp, Homo sapiens
gtcagacaagcctggaatgtaagcgctctgaccacatgtgtagatgtactgaaacaatatttaactgcactaagaggaactaaagatataatttattagatataattataagatatatgatatcatatattaaaatatataagataagaataagataatatataacatattataagatataatttataattttctccygataaaaatctttttgctgtatatgtaagacatctcagctatatgaagagacaatatgcatttagtgtagaatattcttttaaatagagatttaaagagatgaaacagcagtgcaaaaatgtgtgtattgataatcctggagactatcaatgtccagcctttttagagtccttactctatgacttttggtaagtctcttaaattacaaatctcagttttctcttctgcaaaaaaaagagaatggctttactttccaattttgtattttgaagtaatgttagtttagagagcagttctccagaaggtaactaccattgcagagacatgatattgctgctttaatttatttttca

SEQ ID NO: 51333 - DNA, 442 bp, Homo sapiens
ttacataaaaatgaaagcaatattraaattaatttataaatgggtttgcaaatatcttaaaattctgattatgatggttccaaatcagattttaatccagggctatgaatattttaacatcaccctctgtggcctaaagagtaaaggcaggctgggcagcggctgcacgcctgtaatcccagcactttgggaggccaaggtgggcagatcacgaggtcaggagtgcgagaccagcctggccaatatggtgaaaccccatctctactaaaaatacaaaattagcatggcatgatggtgcatgcctgtaatctcagctactcgggaggctgaggcaggagaattgcttgaacccgggaggcggaggttgccgtgagccaagttacgcctctgcactccagcctgggcgactgagcaagactctgtctcaacacatcccacacac

SEQ ID NO: 51334 - DNA, 596 bp, Homo sapiens
tgcactccagtctgggagacagagcgagactccgtcttggggggacggtcgggggaaagtagctactagctacctgtggctaagcatttgaaatgaagcttgtccaacttgagatgtgctataagtataaaatacacattgaggccaggtgcagtggctcatgcctgtaatctcagcacttygtgaggctgaggcgggcagattgcttgagcccaggactttgagaccagcctgggcaacatagtgaaaccctgtctctacaaaaaatataaaaattagtcagcgtggtggcatgcgtctgtagccccagctgctggaaaggctgaggcaggagaatcacttgagcctgggaggcggaggttgcagtgagccaagaccatgtcactgcactccagcctagatgacagagggagaccctctctccaaaaaaaaaaaaccagacacattggagtccagaaactaggccgagcatggtggcagaaactctcccaaagagttaaaatatctcattaataattttttatttataacactgaaatgaaaatatttgggatatattaggatgaataaaatagaatttttaaattacatgtgtc

SEQ ID NO: 51335 - DNA, 596 bp, Homo sapiens
tgcactccagtctgggagacagagcgagactccgtcttggggggacggtcgggggaaagtagctactagctacctgtggctaagcatttgaaatgaagcttgtccaacttgagatgtgctataagtataaaatacacattgaggccaggtgcagtggctcatgcctgtaatctcagcactttgtgaggctgaggcgggcagattgcttgagcccaggactttgagaccagcctgggcaacatagtgaaaccctgtctctacaaaaaatataaaaattagtcagcgtggtggcatgcgtctgtagccccagctgctggaaaggctgaggcaggagaatcacttgagcctgggaggcggaggttgcagtgagccaagaccatgtcactgcactccagcctagatgacagagggagaccctctctccaaaaaaaaaaaaccagacacattggagtccagaaactaggcygagcatggtggcagaaactctcccaaagagttaaaatatctcattaataattttttatttataacactgaaatgaaaatatttgggatatattaggatgaataaaatagaatttttaaattacatgtgtc

SEQ ID NO: 51336 - DNA, 572 bp, Homo sapiens
tctcctgcctcagcctcctgagtagctgggactacaggtatgtaccaccatgcccgactaattttttgtatttttagtagagatggggtttcaccatgttagccaggatggtcttgatctcctgacctcgtgatccacccgcctcggcctcccaaagtgctgggattacaggcatgagccaccgtgccaggcccaatgatgttttttatggagaatggggatggacgtattcacaacatatccttttgttatgtttctttctttttttttttttgagacggagtctcactctgtcgcccagagtggagtgtaatggcgctatctcggctcactgcaacgtccgcctcccgggttcaagctattcttctgcctcagtcccttgagtagctgggattacaggcacgcgccaccacgcctagctaatttttttgtatgtttagtagagacggggtttcaccatgttggtcaggctggtctcgaactcctgacctcgtgatccgcccggctyggcctcccaaagtgctgggattacagacgtgagctgccaggcccagcctgtaatttttcatttt

SEQ ID NO: 51337 - DNA, 580 bp, Homo sapiens
cagttagctagaagcaggttctgatcttggttctgccacagactggctgcgtgagtttaggcgtgttacagaatctctctgatctacttctgcatctttgaaaaatttggataatgatacagcctgaccattctcctttgatcataccacttttctcatggcatttaatatggcctactataattacacatggctttatctcccctgtagaccaaaccaagagctcctgagggcaaaggcctttgcttatttactctgaaacgcagcccagtgcyagctgtgctagcagacacattgtcaatgccagcttctaccctttctgttggattcccacttgctatgaaaatcctttcctttgttctacaaagtacactgttcttcaaatcatgaagtaacccagtttcaaaattttagttttactttgtaagtttcagcatatctctatcccagtatggtggggtttcttgttgttgttgtttttgttttgttttgtttttaatattgtaaatgttataggtttcaaagattatctatttgggaacttgggcataaactcaacatatatacttctcatgcttcc

SEQ ID NO: 51338 - DNA, 1587 bp, Homo sapiens
gctaaagaaaaagatgctggaaggatttcaagagtcagaccttatttccattctaaacttctaactttagccattcgttagttcatcttctcagatggcagagaaaagcyaaactgttgatgataataatagtaataattataattaaaggctctaggagaggaagagtatcaccacataaacctgtgactttggataaggcacaaattctggacctcagttttttcatgtctacatggagaggctgcactacgtgtaacattccttctcactccagcattttgattcgaactcagtatttccaatgactggatgagtcaaataatttgctaggtgtagggggaacaagggaagagatactgaggagcaagaatgtggtaattattaagtaattacttaagccacatgtagagaacatgcacatttatatttccttttactgaattcctcctaagtttttttgactaccaatttaatttggaattaatctacatcactgtctcctgatgttggtttttgactccaagtatagttacaataaattaaatagttgtcaggcaagattcaaatcaaaataattaattttaaatgacatgcatactttttggagagaaaagtttgggttacaattagccaatctgttaaaactcaaagaaatctaatccaaacgtaatacacatgtctgtaccattttttttagcctattctctcttcagacttatacttaatcacaaataacattcttctttctattaattaattccaaaaactggctcacagccatatatgacagtcatttattgctactagggacataaaatttctaaataatcagaaatccacgttgtcatttatgaatattctctctccttgcaaaccaaaaaaatcatctttaaccttacctgatagattttggcatccctcattagtttttctacaggatattctgtattaaatccattgcctccaagtatctgcacagcatcagtagctaactgatttgcaatatctccagcaaatgcctttgcaatagaagcataataggtatttcgacgaccagaatcaacctcccaagctgctctctggtaactcattctagctagttcaactttcattgccatttcagccagcataaatgatattgcttggtgctagaattaaaaagaaaaaaattaaaggatatttattgagaaaacttaaaagttttttcctggggctttttcatttttatagtgacggggtcttgctatgttgcccaggctggtctgcaactcctggcctcaagcaatcctcctacttaggcctctcaaagtgctgagattacaggcgtgagccactgtgcctgacctttttattttttaaacttttcattaacgaattttaggtttatagaagttacacccagcttcctctaatgttaacatattaccaaaccatagtgccatgatcgagaacaggacattaacactggtatagtattaacaactaaactataagccttactcaaatctggtcaagttttctactaatgttctttttccaccattatacgttgaatttagttatttcttcttattctttcccagg

SEQ ID NO: 51339 - DNA, 568 bp, Homo sapiens
cacaatagacaccatgatgaaacagtgcatacatttgaaagtgtagaatggatgccttctttctaacctgcatttctaacctctttctaaactgtctgtgtaattggatgggagaagccagaagtttaaatttgactacttctgtgcacatgctgaccaagtacctttctctcccttgcttctgtctttgcctttcttctattgccaaaccccagggatggcagaatgtaggagtctctggaagcacaaaatcaggaccaccctcaggccctctatttaggtttcagtgtcagcgtagggctggacaggataggggacattagttggtcaactgcaaactaaagaggagggtttgctcaaggaagcatgaacaactgtttcaagggaacraaatctaagagcaaactaggtcaaaaagtagaagaggtccacaatactttgttttcaaggccacacccaaagttcaagacaaagcttgaatgaagggtcaaggagtgtgagtagcaggaaggcaggtcagatgagacaccaggggcactgtgaaaactccacaaagggcctggccttt

SEQ ID NO: 51340 - DNA, 553 bp, Homo sapiens
tttctcagatgctggttctcctgcttcaaatgctcagacttgccagagtctgagagctattaccaccgtatgatcacaagaagacttgcaatatgtaaaagatgagtgaagcggcaaagggaatgggaattgcagatgacctgagaataatgttmaataggtaagcaaagcagagggtcaagaggcagggactaatacttaggtataaatctaacgaaacatgttcaagatctatatgatgaaaactgcacaactctgatgaaagaaatgaaagactaaataaatggagaaattattccatgttcacagataggatgacccaatagtgtcaagatgtctgttcttgtcaacttgatatatagattcaatgaaatctccccaattgatattttgtggatatcaacaaaataattccaaagtttatatggaagcaagagacctagaatagtcaccgtgatattgagttaaaggaataaatttgaagcactgacattacccaacttcgatacttactataagactacagtaatcaagattgtgtagtattggtaaa

SEQ ID NO: 51341 - DNA, 553 bp, Homo sapiens
tttctcagatgctggttctcctgcttcaaatgctcagacttgccagagtctgagagctattaccaccgtatgatcacaagaagacttgcaatatgtaaaagatgagtgaagcggcaaagggaatgggaattgcagatgacctgagaataatgttaaataggtaagcaaagcagagggtcaagaggcagggactaatacttaggtataaatctaacgaaacatgttcaagatctatatgatgaaaactgcacaactctgatgaaagaaatgaaagactaaataaatggagaaattattccatgttcacagataggatgacccaatagtgtcaagatgtctgttcttgtcaacttgatatatagattcaatgaaatctccccaattgatattttgtggatatcaacaaaataattccaaagtttatatggaagcaaragacctagaatagtcaccgtgatattgagttaaaggaataaatttgaagcactgacattacccaacttcgatacttactataagactacagtaatcaagattgtgtagtattggtaaa

SEQ ID NO: 51342 - DNA, 559 bp, Homo sapiens
aagtaagaaagggtttccaggctaaagaaacaggatgtgcaaaatctcaaaggcttgaaatcatatggtgggtacaaaaacctaaaaatacttgagtactactcaagtgcttaaagtggaaattacagagtgggcagatgaatacagtgaccatatgtccaggttttcctgggatgctacagttttatacacattgtaccakctaagttatcaattacacccacacttcacaccaaaaaatattctgttttgggtgaaaaattatatggccatcttataatcaccctatagatgaggctacccggtgaaatagaggccaaatcacagagtcatttacatcatgctaagaaattgacttagggggtatatgtgcgggtttgttacatgggtatgttgtgtgatatttacacacatgtttacttatctggacataacctcatcataagtcaaggagtatactgaatatgtgtagctttcctaccactataaagtcaaaagtcaaaacatcaaaagttggggaccatttgcactaggtttaccactggtaaaagggaggtgg

SEQ ID NO: 51343 - DNA, 613 bp, Homo sapiens
ttttcagtagagatggggtttcccatgttgcccaggccggtcttgaactcctgggctgaaacaatcttcccaactcgacctcccaaagtgctaagattacaggcatgtggcaccatgcccagtggtatttttctttaaatataatttttggtgtgttttaggtcaaatcactttatatttgaggtcatttggctcagaagtcctatacctcagcaatatatgttggaaacaggatgcaagtaactcaaacaggtgattaaagattaaacattttttaattccttaagttttcattctgtttccatattcataacacattctgatagctattaatttatatatgtggctatctgtgattctgtttatcaaaawttaggtactgtaactcccaattctgtgatgccagctgatcatttcctaatcaattcctagagaaatttcagattttacagaggctcctttccttaagcaaatcagtaatttccactgtggtcattattttccagggctaaaatcctaagactcctaatatctattgtgtatattaggagctactaagaaaaaaaaatattctttttttaaaaatttatttattttcaagacaagagtcttg

SEQ ID NO: 51344 - DNA, 627 bp, Homo sapiens
aaagaaagaggagaaataaaggaacaaagagaagaagattaagaaaagacagagaaatataaatataaaggaagaaaaagaggcagagaacagagggaaaaaggaatcagaaaagaagagagaaatttaaatttaaagagagtgaaatatgaaatagagctgaaagcagaaatagagtttgaagaatattatacggaactcagatttgttttaaaaagaaatgggacactgtgtcctctaagcttgaagaccatgaaggacaatgtaaagaagcttaargtacagattttcaattcatggtttcaattaaaaataataagttatagtaaaaaagccccaactattcatgatattccttggctaaatctgatattaagattgaattaggtaaccccaaagccaactgctcagaagagtgcctgacatctagtaagtactcaataattgttggatattattattttttatgatatagtttagaggtttttcagactgtgaccaaccaaggcagaatataattcagcctaaataaattccaggcaataatctgcaagtgaaaccatactctaaatacacttataacctgaaatgtacattttaacgctctacatttttctcaaaaatttt

SEQ ID NO: 51345 - DNA, 607 bp, Homo sapiens
tctgtggctcataaacatttaatagagacattgatgaaactgtaaaaccctgagttgtaggccggagatataaaatttcaacataaagaatgaacaaaatgaccagaggcagaggtaccctgagagacagtgatagctgtatctaaagagtactgatattaaaaatagagaaaaacatatatctcattatatccaaagggttacataagttttaagagtggaaataacatgaaggaccctaaacaattaggaaacagaaatttgacttgcttcagataaaagcttttaaaatattttatctgaaacaagtaagcttgttcaaaaaatataggatatatgtgtacatagtgagatgattacttcaatcaagcaaattaacctatccatcaatacaacaccttccatagwtaccttttgctttttctttgtgtaagggcatctaacatctactgtcataacaaatgtttagtttacagtacagtattaagtcttcatgccatacactagatctctaaacttatttatcctatacagctgcaagtttataacctttgacctacttctccctattttctctttctttcttcccctttttacactgtttcta

SEQ ID NO: 51346 - DNA, 607 bp, Homo sapiens
tctgtggctcataaacatttaatagagacattgatgaaactgtaaaaccctgagttgtaggccggagatataaaatttcaacataaagaatgaacaaaatgaccagaggcagaggtaccctgagagacagtgatagctgtatctaaagagtactgatattaaaaatagagaaaaacatatatctcattatatccaaagggttacataagttttaagagtggaaataacatgaaggaccctaaacaattaggaaacagaaatttgacttgcttcagataaaagcttttaaaatattttatctgaaacaagtaagcttgttcaaaaaatataggatatatgtgtacatagtgagatgattacttcaatcaagcaaattaacctatccatcaatacaacaccttccatagataccttttgctttttctttgtgtaagggcatctaacatctactgtcataacaaatgtttagtttacagtacagtattaagtcttcatgccatacactagatctctaaacttatttatcctayacagctgcaagtttataacctttgacctacttctccctattttctctttctttcttcccctttttacactgtttcta

SEQ ID NO: 51347 - DNA, 609 bp, Homo sapiens
tacaacccttcaggcagccactaccaatcgattaaggattgctatcctaggtgtagtagatgtcaactaygtgatcagctgggtgaccttgggcaattcttactggtcttcccaatggaaaaacaggaagatggactagaagtcctgtgtttctgtggaatggcctgttgataagtcctgtttcatccttctttgcttctttccacacagtggtagctcagtatcttgctacctcttgcatggaatcccttggtggcctcctttctgggctctagtgcattgtggaaactgttgcccgtttacccttcttaacattgtctgctcaagaacttccacagggaggggaacatcacatgccggggcctctcagggggtggggggtaaggggaggtaaagcattaggacaaatacctaatgcatgaggggcttaaaacctagatgacgggttgatgggtgcagcaaaccaccacggcacatgcatgcctatataacaaacctgcaagttctgcacacgtatcccagaatttaaagtaaaataataataataaaaaagaacttccaaaggctctccatgcccttcccaagagagtcccactgcagagtggccat

SEQ ID NO: 51348 - DNA, 573 bp, Homo sapiens
  misc_feature (1)...(573): n = A,T,C or G
ctacagctttgccttcaccagaatttcatgtaaatggaatcatagccttttgggtctggcttctttcatttacaaaaatgcatttgagatcnatccatgttgctgcttacatcaatagtttgtttcattgwatagctgtgtaggatcctactcattaagagtgtcttttcatcatttgaaagtcaattgttttccctccaatttggggcaaatacatgatgtgtattttgggcatatactcatggacatgttttcttgtgaacatacatttgntatatttngaacaaggctgcctggtaacaagttccatgcaatttgatggtatgatgacaaaaattccatatcctaatttattattaaaaaaaaaatcagggccaggcacagtggctcatgcctgtaattccaccactttgagaggcagaggcaggaggatagcttgagaccaggagtttgagaccagcccaagtaacatagcaagaccctatctcaacaaaaaatgaaaaacttagctgggcatggtggcacacacctgtagtcccagctatgcaggagattggcatgggaggatcactt

SEQ ID NO: 51349 - DNA, 587 bp, Homo sapiens
catttgaggacatatgaggcaagaggcagctaaggataaacttcatgcttggcagcactgctttcaactaatagccttctcgtgcctgttatacacctctgagacttagctgcagyggcatatcctgatactaggtttgcccaggaagtaaaatgttttaaaccaaatggaattattgacaacagtattcaatgagctttttaactttgcccattataaaccaccaaattctaagaaactaattccatggaaggatgcaaaacctgcttagaaatattttttttcagatttgggttaggctttcagagcttagttttgtgtttgttgaatatccgtaagttattcttatgagaaaatgtagcccacactcacaaggttgtttgaccatgaggcttaagctttcagtatttcagaaagaaatttgaaaagccacactgcctttgcttgaggtgtgagatgtgattagctagtaaaacaacttacctttccaggtcttaccacctagttcaaaaatgaatagtgattttgaaaatctctagtaagaagctgcttggatgagcaaagtagatttagctggttatttggat

SEQ ID NO: 51350 - DNA, 544 bp, Homo sapiens
taattggggcattaattaatatttttctacaattcttcagtatttactacttttagcaatgactacaatccagaatcaagcaatttggtaaataatgagtaattgtaggtgctttcttattagcaacttacttcttctaataagcagtttagcattctggaaggtttcaaaattttggaaaatactatgagcaaaaaaaaaatggttaaagtaatgatatccatattcaataaaatgaattttttttaatttaaattcatctgcaaactccctgcttcccaaccagaaatatttaagttcaatcaaaaaggaaaggatcagggcttattctcaaggagtcatcttattctaaagataagtaataggaacaattaatcttcggagaagcatatcaaaaagtattgaattaaatcctkaaaggaaataataaaatgactaacagaaaacattgcagcatactaaaatgttggtagaagagacttttaaaaatggatcaagagactgaaaaatatatcaagtctttaatgacacactgtggatgagg

SEQ ID NO: 51351 - DNA, 1561 bp, Homo sapiens
tatatatttctggaagcatgcctatttacactagttattattactttaggagacagatattctctttgtttaaattgtttccacaaagcataccacgaagtacagaggggacattagtaactattttatgatgattatggtattcatttaggccaatttaagtgaattggagatcctaattttctctataaggagacaatactttttcatacaagattatttttgtggaggcttcatttatgtgaagtttttgcacccatttattgtcatgattattcttcagtgaaacaaaagtctgtagtagatatgctgctgctgctggttttaggtaaattgactaaatagttatacaaaactctgtctctaccatatatgaattcaaactgtatcaacaattacagaatactatgctaacatctaataagagagttagcccatgtagaagagaaatataaatacagctatcagatcagtctcatgttatttcagcttcaaggagcctcttagcaaaaatggtttcctttctccatacatgttgcaggtgtttactattttaaatgagacttttttgttaaaaaaaaattaaaataagatcatttagagaacgattctcagcttgttcagatgattatttggttttaaaaaagcagcctggagttcctcttaatctcaaatctccataaaacttacaagagatgttttcatttactgaaaggaatagttttttcttaatcaaatgtagagccattatcactagagggcagtaaatacaaacagatttagtggatttactggcactaacgatgttttcagaatactagcattaatcaaagaaagtatagtttttataatatgaaaatacatgtaacattctgttatgtaaaatattggttatgaatcaattctagattattgtctgcctctaaaatatttttaaggcatttgaaagcaaagggaggctgagaaacactagttttctgtggctattctgtttaatacttgaagtttaactttgcctcagaattcttcaagggacatttaaaaattagatttgcatttgttcaagctgaacagtactggatatatgagagaccacgttatatagatttgcttcttgattaataactaccacgacttttaattttaaggtgaaaggtgtaaaataaatgtagattgattataggataaaatattttccaataatgtaagtcctactgcaaacagtgctactgcctggaaaactccttatgttggagaggtcyaagagctaatacacttattttaaacaatatttcttaaatatttcaaacacagtaatataatatacagcttagaattgattatattaacggatctattatgtaggctctaggctaaatataaaataatgcctgaaatagttttctttttttggcaatttagagtactctgaaaccagacagtctgggttcaaatcctggccctgttacttactactggctttgtgaccttgagcaagacaacttgacctctctgagccttagtttccccataatttagttttgtttttccctattcaaaa

SEQ ID NO: 51352 - DNA, 521 bp, Homo sapiens
gcaggggccctctgctcgacactggcggcttgcgtggcttctggctggagtctgggtggggtctgggtggggtctgggtgggtgtgttcatcctccgtgaacacacaagcacaccccaaagccggcgctctctttctggcactcagatttctcaccatcttttccagctatggaaaccactcccaacataaggaacacaccgccccagaggctgttaggtgatgcgtgggtgggatattaaatacgcctgtccgctccagagagcatcgccgccttccagttccttctcagtggtgtcaggagaaaggctcctgttgggggccgtgtgtcgctaacgcctctgcagcgcctgcagtttccctttgtcastagcatggaaggcaggcctcggactccagcctgctgcagtatccgcttataatttcataacttcccttctttgtatttatttttagagtttctttctatttttggcaagtggaactggttttttgtttaccatagtgtataatgtttacttt

SEQ ID NO: 51353 - DNA, 569 bp, Homo sapiens
ttattttaattattcacaaggaaagcagcaacgctgttttgtaagagaatcgyattctgagtgagaaaatcaagatatgtgctgttgatttgccaaattcttgacaataacaacttaaccctgtacacaaaataacttttacaaccaactcaagccatctgcaagttgtcatggagaccagaaaatagtgatttaggttaagcaaatgaggcacatcttctagaacgacaaaaactataggtatagcatgttttaaagagaaacatttaacattttaatgaaaataacagacatcgtgacatttcacaactaaacactccaggctgcatcttttcaaaaatgacattttccttcctaaccacggtaccatactgacatctgacaaaattaacagtattctctcaacactatcttataactagtatatattcaaatttctccatttgtttcttatcttttacagcatcacattgcatttgttgtctctatcaagactcttttgacccagaacagtctcatttctttcctcttccttttcttttttaatttttaatgaaaatgatattttg

SEQ ID NO: 51354 - DNA, 1475 bp, Homo sapiens
tggctccaaccgcctgcaggtccctttcrctagaataatgtatctatgttctgatggtcacttgaaagcccctaggcaacctcctccagtctctcgttgctggggtccctctgcttccccacatgaccttagtggagcgggtctgttactgaaccaaactgggtccgttttgcctgcatttaagggaaaaccaaacacagaagcactaggtttttgcagtgtggaaagtttattgtgagtcagagaggaaatgctcaaatctgtctccctgagctgtggtggttgtggtaggttttatagtcagaagacaatgaggtgtgatctggtgtgtgaccagatgtgaaaagtgtgaccctttcagctccctcaaagcagttcaccagcttctctaaccctctagtgtcctaggcaggagggattccctggtcgactacccccaactccatgggtaatgggctccctgagcagcagtgtgaggtcctccttcctcctcactgataattaagctggtggagggggtgaggctcacagcacagctctctgccaaggtctcctcacaagatcctttattctctactctctcaactcttttgcatcctcatattgggagaggggttcaagagttgttgaatacatttgggagcatctcctttgccatcctgaatacctactagcaacccactggaatttcacctgcatatcacagcatgacaaagtttacttccattttcacaactttttttttcattttggaatcaggactccactcttgagtctcagctcatggtccacactgatgctaatttcctgtctataaaaaatattcttttgcttcttgtcaggaccaatgtaaatttatcaatccctttcaaaaagggagttttgaattgattcttaaatggatgtaatctaggttgtgttttctaagatcaaaatacataccaaagtaacagtttttattgtcctgaacaaacatttttgaagggtgattacaaagtagtttttagaaatgtaacattccaagtaaagaggcatttcttaaaatagtgtatcagaggggttggaaagtttagtgatttagtgctgtttatgaaagtcacacaatgcttgagtacatttacatttgtagaaaaaagctttcttatctattaatccaattcttcttagaacttttataggatctgaatacttgctatgagggaacagtatgtattcaaagagcatggactttgaattccaactctagtactaacaccaaatgcctgtggctttgcacaagtgacttcactctgaagaagccagagggcacaaatctgaagaacttgtgtcagaatacctgaggaagttactcctgagcacaccctcaaaaattcataaacagctggagaatattgtgatgcagatgaaccaggtggggacttagtaacattcaccacaagaagtgattgtactaataacaacaacaataaatgatg

SEQ ID NO: 51355 - DNA, 610 bp, Homo sapiens
acatcctcacccccttccactcctttatgctcttcctttcatctctcctcatcatccctggggcccaaaattgtttcctgtgctttacagctggactaagggacaccttgggcccttctgctcaaatctggcttttggtttccataacaactagtaaagcacacagcactaaatacaacaaagatttctctctctctctctctctctctctatctatatataaatatatatataaatatagataaagagtgcacacatctatatatattcacacacatatatacagcacacacatgaatgaatgcagacatacacacacacacacacacacacrtatattcactcacatatttaagggtaaagtgcaagaagggtaggaggactgaagtccaaaaaagaaagtaaataaaccttgacaacaaatagagaccattctagggaagagcaaagggacatggagctgcctataattagcagccgccacatcccaaaacaaaatcagacgttcaggccttgcagctttgttgccatagaaatggggcccaagatccatcaggctgtcttcctaaagcgattccgtccctgaccatgcccacatcaaagggagcct

SEQ ID NO: 51356 - DNA, 610 bp, Homo sapiens
acatcctcacccccttccactcctttatgctcttcctttcatctctcctcatcatccctggggcccaaaattgtttcctgtgctttacagctggactaagggacaccttgggcccttctgctcaaatctggcttttggtttccataacaactagtaaagcacacagcactaaatacaacaaagatttctctctctctctctctctctctctatctatatataaatatatatataaatatagataaagagtgcacacatctatatatattcacacacatatatacagcacacacatgaatgaatgcagacatacacacacacacacacacacacgtatattcactcacatatttaagggtaaagtgcaagaagggtaggaggactgaagtccaaaaaagaaagtaaataaaccttgacaacaaatagagaccattctagggaagagcaaagggacatggagctgcctataatyagcagccgccacatcccaaaacaaaatcagacgttcaggccttgcagctttgttgccatagaaatggggcccaagatccatcaggctgtcttcctaaagcgattccgtccctgaccatgcccacatcaaagggagcct

SEQ ID NO: 51357 - DNA, 2176 bp, Homo sapiens
tttcaatggttaggaacatggcatattacaacctttacacagattgaggaatctctgaatattataatatacctgtcacaggtgaagaaatactctaaattttcaactaatacacataaggcacacgaatataatgaaatgggaaaaaactctggacttggaatcagaagacctagctctgccacatacttgctctgtacgtttagcctacttaatcattaatatctctgggcctctgttttcatctgtaatgacatatatgtctaataaaaaattcatataacctaggtcaatgaggtaataagtcaaataatgtatacaaaagtactttttaaatagaaaatgycacacagtttagaatgacagcagggaataaaatggtagggagaggtctatgttgtaagtaaactgtaagatccttaagctcagcatccagaactaccatcttgtagttcttatgcttaacacgggacctaaaagaataccaaatgaaccaccaatgctagcctttgaattggagacaccaacaagacatatgcattcaattctcttagcggctcttctaagctcccttgtgagaaactctccaacactggtgctcttcaaagagtggcccttccctagctagcaccatatttggctagattcatttaaaatgcaggctctcaaaactcatccaaggacactgtaatgcaatacggcaaatatccaagatgactcttatgtacactggtacagtaggttctaaattgacttttgaacatctggtaaccacggcacccgatcagttccatcagaaaaggtatgtgctcatctattaagttacatatatgtaactcatatatcaaggtttttacagttaacaaactgttttcaaatatatgaaatataatatgcagaacaatcagaaatgatttaaaagctttaaagtagtacagaaataaaatacaatataatttttaaataaaattgaatccataatcaatttatgtttgttttttcaaaatgttattttggttattatctgttctccttatgagactgtgttcaatatggtgctggaacttggttttgttcccagctgtatcctgatcatagaaaggtcctgtcatgcagcagaagctcaaaaaatatttcttgaacagaataatgatcatctataagtgaatatacatgtctcagaagaggtgtcagttcaaaatcttcctgctaatacataaggatgggttcatgtgacagaggttatagttcggattatctttatcagaagcagggacacagggtacaaacacaggctatcagccaaagaaagtttatatacatatattccccttagatactaatttttaaaccgaggttgaaaatggaaactggaaggcaatatccttaatcaccagatgcttttattccaaaataaaattcagttgcataaaaaggcttcctactgaagaatggcactgtgctccacattaagggggtgaaagggcagtttagggatgtgcggatgtgtaaggttcagtagatatcagaagaatgacaatgggctggtagagacattaagttcctgagtgtgatcttggctatctcccatcccttgtcctccagttcttacctaatcactctgtgccctcctactcctcaaagatgagggaaaattgcaggagagaggcacatggagctggattccagaatatggaacagagtaaaggttgtggatacaaatacctccaaatgaaataatcactagggccgggtgtggtggctcatgccattaatcccagcactttgggaggccaaggtgggtggatcacgaggtcaagacatcgagaacatcctgactaacatggtgaaaccctgtctctactaaaaatacgaaaattagccaggcgtggtggtgcacacctgtagtcccagctactcaggagtctgaggcaagagaatcgcttgaacccgggaggcagaggttgcagtgagctgagatcacatcactacactccagcctggcgacagagcgagactccatctcaaaaaaaaaaaaaaaaaaaaagaaaagaaaaaagaaaaagaaaaagaaataatcactaaatgagttcaacgctaaagtctatacttttagttgctcatttcttacaatgaccaatgtcaaccaggaacttcttcactttgtgcccaggcc

SEQ ID NO: 51358 - DNA, 2176 bp, Homo sapiens
tttcaatggttaggaacatggcatattacaacctttacacagattgaggaatctctgaatattataatatacctgtcacaggtgaagaaatactctaaattttcaactaatacacataaggcacacgaatataatgaaatgggaaaaaactctggacttggaatcagaagacctagctctgccacatacttgctctgtacgtttagcctacttaatcattaatatctctgggcctctgttttcatctgtaatgacatatatgtctaataaaaaattcatataacctaggtcaatgaggtaataagtcaaataatgtatacaaaagtactttttaaatagaaaatgccacacagtttagaatgacagcagggaataaaatggtagggagaggtctatgttgtaagtaaactgtaagatccttaagctcagcatccagaactaccatcttgtagttcttatgcttaacacgggacctaaaagaataccaaatgaaccaccaatgctagcctttgaattggagacaccaacaagacatatgcattcaattctcttagcggctcttctaagctcccttgtgagaaactctccaacactggtgctcttcaaagagtggcccttccctagctagcaccatatttggctagattcatttaaaatgcaggctctcaaaactcatccaaggacactgtaatgcaatacggcaaatatccaagatgactcttatgtacactggtacagtaggttctaaattgacttttgaacatctggtaaccacggcacccgatcagttccatcagaaaaggtatgtgctcatctattaagttacatatatgtaactcatatatcaaggtttttacagttaacaaactgttttcaaatatatgaaatataatatgcagaacaatcagaaatgatttaaaagctttaaagtagtacagaaataaaatacaatataatttttaaataaaattgaatccataatcaatttatgtttgttttttcaaaatgttattttggttattatctgttctccttatgagactgtgttcaatatggtgctggaacttggttttgttcccagctgtatcctgatcatagaaaggtcctgtcatgcagcagaagctcaaaaaatatttcttgaacagaataatgatcatctataagtgaatatacatgtctcagaagaggtgtcagttcaaaatcttcctgctaatacataaggatgggttcatgtgacagaggttatagttcggattatctttatcagaagcagggacacagggtacaaacacaggctatcagccaaagaaagtttatatacatatattccccttagatactaatttttaaaccgaggttgaaaatggaaactggaaggcaatatccttaatcaccagatgcttttattccaaaataaaattcagttgcataaaaaggcttcctactgaagaatggcactgtgctccacattaagggggtgaaagggcagtttagggatgtgcggatgtgtaaggktcagtagatatcagaagaatgacaatgggctggtagagacattaagttcctgagtgtgatcttggctatctcccatcccttgtcctccagttcttacctaatcactctgtgccctcctactcctcaaagatgagggaaaattgcaggagagaggcacatggagctggattccagaatatggaacagagtaaaggttgtggatacaaatacctccaaatgaaataatcactagggccgggtgtggtggctcatgccattaatcccagcactttgggaggccaaggtgggtggatcacgaggtcaagacatcgagaacatcctgactaacatggtgaaaccctgtctctactaaaaatacgaaaattagccaggcgtggtggtgcacacctgtagtcccagctactcaggagtctgaggcaagagaatcgcttgaacccgggaggcagaggttgcagtgagctgagatcacatcactacactccagcctggcgacagagcgagactccatctcaaaaaaaaaaaaaaaaaaaaagaaaagaaaaaagaaaaagaaaaagaaataatcactaaatgagttcaacgctaaagtctatacttttagttgctcatttcttacaatgaccaatgtcaaccaggaacttcttcactttgtgcccaggcc

SEQ ID NO: 51359 - DNA, 541 bp, Homo sapiens
tctctctgtccgtcacccctggacagccggcctccatctcctgcaagtctagtcagagcctcctgcatagtgatggaaagacctatttgtattggtacctgcagaagccaggccagtctccacagctcctgatctatgaagtttccagccggttctctggagtgccagataggttcagtggcagcgggtcagggacagatttcacactgaaaatcagccgggtggaggctgaggatgttggggtttattactgmatgcaaggtatacaccttcctcccacagtggtacagaccaatacagaaacctccctgctggggtgtcccagctgctcacttgcactgcttgtctggggagtagctcagcagggactctgagtctgcagaagaggagactgttggagaactcaggggcagggcttgctgttgaggactctggcccatgagagtctcagcagcacctcagtcccacatggtcaaagctttatcagttgccaggctcatcctcaccctgcctgtcttgcccacgtttgccgagtacactc

SEQ ID NO: 51360 - DNA, 580 bp, Homo sapiens
catcatctatagactaacacagattctcagtttagttggcactagagcaaatgcaaacagtgctaaaattattcaaaaaagggtatgcagcatataaattactgtgaaaacttaaatgtagatcaaggttaataaaaatttgcttattaaaaaaggctatcaccaaaactaggatggcaccaaaattcaagttcccgcagggaaaggaaattttttttccctcttcccttgatctgccaagggctatgtcaggtcaccccacagtcacatttctctgaaagcccaggcttgtccagggcccaagtcartgaatatgagattgcatctcggggaatgagcggcgctgtgagttacagtggaggagggctcacttcccctggtcatttgagtactcgacagcatcgccttccatcaggtgcttgagttgaaggacaaatctaccagtgaaccatgaatgatttcatgattaatctgaggtttgccttgaatacacagaactcagggtccactccccaaatcaatgaaagctctacttctgggcagtaaaagcaagtggaggaaaccactaaagacatggata

SEQ ID NO: 51361 - DNA, 522 bp, Homo sapiens
caggtcctatgccaatgcccacacacaggatgatcaattaagcactattgtggaaaaggcattcaaagggcagtttgttccttgctatcatattatgccccatgaagatggaaatagatgattcagtaacggaaaactcagccaatttacttacccatggccaagagactggcttactttgacacttctcataattctgtggtgattactcaaaggaaatgaatgactccaggaaactgagggatatgtctatctatgtgacagtccaggtggtgtctgaacttgtggcaggttgcccaacagaatttcttatctgagatgtggaaagcccagcaagagctgttcacaggaagaggctctgaggaggagctagaattggaggaagagtttgggctctcaagtcaaaaccggaagggaaacagggccagaaggggtgatgctggctaatgtggctgcacagagagttttgtcctccaratttcaggtatctgatgatactgatgagctctttactggggtgca

SEQ ID NO: 51362 - DNA, 528 bp, Homo sapiens
aacattttttattgcattagagctcactatttccatgtcagcttctcacactagactatgagcccttgagggtcagtgtctcattaacttctgtattcagttactagcacagtgcttggtatcagattttcaaaagatgttcagtatattttttaaacacgtattttataaacaaagtatataatggtaatgtcacatataattatctagttgaatcgtttgcaattccaatgttgattgatgtaaatagttaacccaaaatgagaattaatttagcatcttgattgtgttgctaaaataaataagtggagacctttctacgtagaatgcagaattctgtgtttttattactgaccacctgtaaacgcattgagaatcaagtatgtaaatcaaaacactacttttacacagatatacgtaaaggtatatatatattttaacatatatttatatattttgcttatatgygcatacacacatttttcaaagtaatagaaaatgatgtagttagaacagtaatttttgttg

SEQ ID NO: 51363 - DNA, 512 bp, Homo sapiens
ttttttttttttttttgaaatgtagtctctatcgcccaggctggagtgcagtggtacagtctcagctcactgcaacctctgcctcaggttcaagcgattctcctgcctcagcctcctgagtagctgggattataggcgtgtgtcaccatgcacagctagtttttgtatttttagtagagatggggtttcaccatgctggccaggctggtcttgaactcctgacttcaagtgacctgtccacttggcctcccaaagtgctgggattacaggcgtgagccaccacacctagcctttttcagataatttcttcaagattaaactctacaaaattattatattagtctcttttgtttggaggttagactctcacacagatttaagcaaacatgagaatgtatttgttcttaaacctgaaaaattcatggagagttctaatgtaacctccactagatccaagtktttaaaaatgtcaatagcaaactttccatctccccctcttgcctgggttttcc

SEQ ID NO: 51364 - DNA, 550 bp, Homo sapiens
tcatgaggaattggagctcagaaaagttcatttatcttatgctgagtttcgctctgagtgattttgggttatgcagaagctatcaaggacataagacaatcctagtggagggaaaagttcataatgtccccaaagacaaaaatacagcacaatgagttattccttcaatgagcatacttaggcaacactttctttccatcaaygcctaaagcgatggttggagccctttgaaatcaagttaaatggggagaggtgcacagaagcactagaacttgcaattgtttaagagacagaaaagaattgtgctgtctgagcaagacaatcctagccatgtgcctgctgagagcccagagcatgtgagctttaactaaggaaaccaactccaaatcctcagcagctacggaaatatgaaatggatttcaggtggactgagacagagtttagaaatgggaccaaatgtgcagtctcttttaaccaaagtttaaaggatgatttgcttcttcttttcccaagcagaatgcaattttagatcactcattacatcccaaga

SEQ ID NO: 51365 - DNA, 2225 bp, Homo sapiens
  misc_feature (1)...(2225): n = A,T,C or G
tgggcattgtgtttgaatggtatgccctgaaaaagctagaccctgtttaaaagccccccacacatattccttccattcacgtaataatttgctattaataaaattgctgttattttcacatttatcacaattgatcctcatggccacactggaaagtagcctagcaggtatgatttctcccaacttatgcataaggaatgtgttgctcagggcaattgaaggtgtcattgccattaggaactgatagaggagggacttaaatccaggtgtcacctatcagaacttgctgtttccatcatatcataatgtcccttggctagtccattaggagtgcctctcctcactagtgaatctaatgaacagaataaaacaatcattcatttatgaaatatttgctgagtacctgctatattttgtgcaatgcaattggcactaaggatttaaggtaaacacaatatgattcttgtccttcaggaacacaaaatttactactggaaatagattaacaaaattcgtgatattgtacagcaagtaagctatagggttgcaagtaatcaatactgtagaaccatgaaagaactgcataactctgcctgtgatagtcagctcaggctttgctatgacaatctctctttgtcaagaaaattgcatagcacacaaaaacagtactgttttggctggagagtcctacataagaactgcagtaggttaggaatcaggagatctgactttatagaactaatttttagagcaactttggcaatttgccctcctttgaagcctcaatttcttcatctgtgaaatgaaagaatcaagctaaatgataggtaaattccctgccagccccgaggttttgtttgtttatttatttatttattttttacttttctcacaaatgtgcataaactccctgtggggctgtttcagaaattgcttcttagatttttctttcaagttaggacctcattcatgatgttggtttctcttttcactgggaggttgattctcatttccattgcctattggcccacagagtctgttgtttgccaggaagtctgggatcaaagcccagactgtntcaattgggattattgatatgtgctttactgcattatccagtatttagtttgagctaagaactttctaaactatgaattgcattttcatttctataggtgaaggataagaaaaaggagaaatcttctgacttttattatcgtagaactgctgtgaccacggatacacaaaatagctaatgttgctctagggaaactcgagactgggggccatatatatccatatttaaacttaggctgaaagcatatctagtttccattaaagatgatgagtgtgttattttaagtttgggatatctttgctgtatgagtttctacttctttgtattatttatttcattgtctacttatccatattatatataactccactgcactcataataaaacataatttgttcatatgcttcaaaaatttccatgcactcacatacctatatcaaaatgcatcacatgtataataatgtgcctaattctcttgaagtatacatatatagatagttacaaaaaatgatattaatactgtatatactgttttatagtccctaacttaactattgttgataaattgctatgttaaacggttagctttaaatcttcatttttaatgtgtttaatcttttttaaggttctgctgtaagttatttagaaaattaatgcaaatctaattttcataattataagcagcattcatgaaaattctcatataaaaatatgtgaacattttcttagtagcttttaagagaaatttctaaaagtgccaaatactttttaagttaaaggccatgtactttttagaactctttatgcgtattataaaatttcccttcaaaagggcacaagagtttctgtttttcacatctttactaactttggatactaaacagagatttatttatgaaaacaaaagcttttattttttctttatacctttttaatttaacatacatctagatctagcttagaacaggtgccaaggtttcatgctttactccttttgagtcttccctggattgtcatataaaataagctccactgttgcagttttttkttgttgttgttgttgtttttttgtttttttttttttttttggtgttttcattaggtagcaaagagtagagaaacactcatgactttgactcagtgtcag

SEQ ID NO: 51366 - DNA, 2225 bp, Homo sapiens
  misc_feature (1)...(2225): n = A,T,C or G
tgggcattgtgtttgaatggtatgccctgaaaaagctagaccctgtttaaaagccccccacacatattccttccattcacgtaataatttgctattaataaaattgctgttattttcacatttatcacaattgatcctcatggccacactggaaagtagcctagcaggtatgatttctcccaacttatgcataaggaatgtgttgctcagggcaattgaaggtgtcattgccattaggaactgatagaggagggacttaaatccaggtgtcacctatcagaacttgctgtttccatcatatcataatgtcccttggctagtccattaggagtgcctctcctcactagtgaatctaatgaacagaataaaacaatcattcatttatgaaatatttgctgagtacctgctatattttgtgcaatgcaattggcactaaggatttaaggtaaacacaatatgattcttgtccttcaggaacacaaaatttactactggaaatagattaacaaaattcgtgatattgtacagcaagtaagctatagggttgcaagtaatcaatactgtagaaccatgaaagaactgcataactctgcctgtgatagtcagctcaggctttgctatgacaatctctctttgtcaagaaaattgcatagcacacaaaaacagtactgttttggctggagagtcctacataagaactgcagtaggttaggaatcaggagatctgactttatagaactaatttttagagcaactttggcaatttgccctcctttgaagcctcaatttcttcatctgtgaaatgaaagaatcaagctaaatgataggtaaattccctgccagccccgaggttttgtttgtttatttatttatttattttttacttttctcacaaatgtgcataaactccctgtggggctgtttcagaaattgcttcttagatttttctttcaagttaggacctcattcatgatgttggtttctcttttcactgggaggttgattctcatttccattgcctattggcccacagagtctgttgtttgccaggaagtctgggatcaaagcccagactgtntcaattgggattattgatatgtgctttactgcattatccagtatttagtttgagctaagaactttctaaactatgaattgcattttcatttctataggtgaaggataagaaaaaggagaaatcttctgacttttattatcgtagaactgctgtgaccacggatacacaaaatagctaatgttgctctagggaaactcgagactgggggccatatatatccatatttaaacttaggctgaaagcatatctagtttccattaaagatgatgagtgtgttattttaagtttgggatatctttgctgtatgagtttctacttctttgtattatttatttcattgtctacttatccatattatatataactccactgcactcataataaaacataatttgttcatatgcttcaaaaatttccatgcactcacatacctatatcaaaatgcatcacatgtataataatgtgcctaattctcttgaagtatacatatatagatagttacaaaaaatgatattaatactgtatatactgttttatagtccctaacttaactattgttgataaattgctatgttaaacggttagctttaaatcttcatttttaatgtgtttaatcttttttaaggttctgctgtaagttatttagaaaattaatgcaaatctaattttcataattataagcagcattcatgaaaattctcatataaaaatatgtgaacattttcttagtagcttttaagagaaatttctaaaagtgccaaatactttttaagttaaaggccatgtactttttagaactctttatgcgtattataaaatttcccttcaaaagggcacaagagtttctgtttttcacatctttactaactttggatactaaacagagatttatttatgaaaacaaaagcttttattttttctttatacctttttaatttaacatacatctagatctagcttagaacaggtgccaaggtttcatgctttactccttttgagtcttccctggattgtcatataaaataagctccactgttgcagtttttttttgttgttgttgktgtttttttgtttttttttttttttttggtgttttcattaggtagcaaagagtagagaaacactcatgactttgactcagtgtcag

SEQ ID NO: 51367 - DNA, 2225 bp, Homo sapiens
  misc_feature (1)...(2225): n = A,T,C or G
tgggcattgtgtttgaatggtatgccctgaaaaagctagaccctgtttaaaagccccccacacatattccttccattcacgtaataatttgctattaataaaattgctgttattttcacatttatcacaattgatcctcatggccacactggaaagtagcctagcaggtatgatttctcccaacttatgcataaggaatgtgttgctcagggcaattgaaggtgtcattgccattaggaactgatagaggagggacttaaatccaggtgtcacctatcagaacttgctgtttccatcatatcataatgtcccttggctagtccattaggagtgcctctcctcactagtgaatctaatgaacagaataaaacaatcattcatttatgaaatatttgctgagtacctgctatattttgtgcaatgcaattggcactaaggatttaaggtaaacacaatatgattcttgtccttcaggaacacaaaatttactactggaaatagattaacaaaattcgtgatattgtacagcaagtaagctatagggttgcaagtaatcaatactgtagaaccatgaaagaactgcataactctgcctgtgatagtcagctcaggctttgctatgacaatctctctttgtcaagaaaattgcatagcacacaaaaacagtactgttttggctggagagtcctacataagaactgcagtaggttaggaatcaggagatctgactttatagaactaatttttagagcaactttggcaatttgccctcctttgaagcctcaatttcttcatctgtgaaatgaaagaatcaagctaaatgataggtaaattccctgccagccccgaggttttgtttgtttatttatttatttattttttacttttctcacaaatgtgcataaactccctgtggggctgtttcagaaattgcttcttagatttttctttcaagttaggacctcattcatgatgttggtttctcttttcactgggaggttgattctcatttccattgcctattggcccacagagtctgttgtttgccaggaagtctgggatcaaagcccagactgtntcaattgggattattgatatgtgctttactgcattatccagtatttagtttgagctaagaactttctaaactatgaattgcattttcatttctataggtgaaggataagaaaaaggagaaatcttctgacttttattatcgtagaactgctgtgaccacggatacacaaaatagctaatgttgctctagggaaactcgagactgggggccatatatatccatatttaaacttaggctgaaagcatatctagtttccattaaagatgatgagtgtgttattttaagtttgggatatctttgctgtatgagtttctacttctttgtattatttatttcattgtctacttatccatattatatataactccactgcactcataataaaacataatttgttcatatgcttcaaaaatttccatgcactcacatacctatatcaaaatgcatcacatgtataataatgtgcctaattctcttgaagtatacatatatagatagttacaaaaaatgatattaatactgtatatactgttttatagtccctaacttaactattgttgataaattgctatgttaaacggttagctttaaatcttcatttttaatgtgtttaatcttttttaaggttctgctgtaagttatttagaaaattaatgcaaatctaattttcataattataagcagcattcatgaaaattctcatataaaaatatgtgaacattttcttagtagcttttaagagaaatttctaaaagtgccaaatactttttaagttaaaggccatgtactttttagaactctttatgcgtattataaaatttcccttcaaaagggcacaagagtttctgtttttcacatctttactaactttggatactaaacagagatttatttatgaaaacaaaagcttttattttttctttatacctttttaatttaacatacatctagatctagcttagaacaggtgccaaggtttcatgctttactccttttgagtcttccctggattgtcatataaaataagctccactgttgcagtttttttttgttgttgttgttgtttttttktttttttttttttttttggtgttttcattaggtagcaaagagtagagaaacactcatgactttgactcagtgtcag

SEQ ID NO: 51368 - DNA, 552 bp, Homo sapiens
catattaatataattaagttctctaatctactcataaactactatcatctcactcgagatagacacatatgagttttgacacgtatcggagtagaacctatcttaagatcttaagctagtcctgcttttctaacacgtgagttattcattcttaataaaatcatcttatataactcgaagaaatacattgtttagttttatttttttwaatgatgatattcaccacattctcactcctgtctcatgggcttttccttcatttgcccaaagatagctgttactttaacagtgatatgaaatctctcagcttctctggcactttgtggtcagtaaattttgtctaaaaatgtagctttgccaacattcattttgctgaaaaatgaaataaaacgagttttcaggataaacgttttctgtgcccattaccttgttgtttggtttcacactggtaaaactttgtttgtccctgttgctatcatctttgccaactttctctccacatagcaatctgcaataataacttccccaggagtgagcttagtcctcagtctc

SEQ ID NO: 51369 - DNA, 1763 bp, Homo sapiens
gtgcccagcccccagtctccttttctaaatgtcctttgcttctgctcaatatcttttcctttctcttgatacgtagggtgcttaattaaaccccattaactaatgatatggccattaacaacaaataccacctgagaacacttttaactttcagctctttaaagaaaaaatgctataatcacttgctatgtaatgcatcaccatctgcagtttaaaagaacataaaagtaactcacctgccgtcccacctaagatgttctcaagacaaaattagcccaacactgaagaagtgagacacctattcaataattataatttgaactttaaagaggcctccttgtataaaaccacaattagggtgttgtttttctctcaaaataatgtgtttttttttcttttttttttgcctactgttgttcaacagatgttgatacctttaattactgtggttgtcacttaaatctaatttcaaagctcttttcactttgccaagaatcaagtagtgttcatgctttggggccgggggcggggaggtgtagaaggggtagtttattttcttagacaagttggatttatttttattatggatgcttccttaagtagttactcattacgatgaaacacacattcaggtctggctttggtgctgtttctcgctcatgatctgatgtaggcatgcatttcttcattgtcgagagagagacaaaaaaactgtaaactaacaaatttgggaggaagctcataaatacccaatgttttaattggtacatcaattggaagaataaaagtattcatattaattttgttaacactacaaatatttaaaagactcaatatatagagatgcatatagacatgctgttctgaaatgaattacctttgaccagaatggttatgtcaacaccatttagatttatgtggcactggttgtgctggacagtttggtactccgctggtctcctttcccaggctgggatatctatccctcagttgctgagtgtgttggctgctaaatggctcaggactgcccctttctccaaagcagaggttctcaaagtgtggtccctgagctgagccagctgcatcagcatcacctgggaacttgaatgcaagacttttatcctactccagacataccaaatcagaaactctggattgaggcccagcaatctgtgttttagtaagttcacccagcaagtgattcagtaaatgcaaacatttgagaagctttgctctagagaatctttggtcctttggtcaaaatttctttgtatttttgttcacaaaataattccctttaggtaaaacaagacctaacgaaggaagtaaccatctccctcacctcacttagcatggtgacagctcggtaaatatatttgagaactttcaatacccagawtcccctgaaacctctggcccactcttcatgttagaagacagttgaggggctcttgtttgaagattctggaaaagcttagaaggaagcaggtggtctgcaaggcaatgaggctctgtctcttctcccatcctggcgactgaaaaaatccactgggtttaaatctctgtgtggcccaactgagaaagtgctagcctgctaagtgaggagataaattacacgttggaaaagctgcaggacctggctgatatatactggaagaaactaggagagtatgtttaaaaatagattctacaggtgctgggccaaggttagaagaggccagactataaagctggatacaagagaatttgctgatattggagat

SEQ ID NO: 51370 - DNA, 1763 bp, Homo sapiens
gtgcccagcccccagtctccttttctaaatgtcctttgcttctgctcaatatcttttcctttctcttgatacgtagggtgcttaattaaaccccattaactaatgatatggccattaacaacaaataccacctgagaacacttttaactttcagctctttaaagaaaaaatgctataatcacttgctatgtaatgcatcaccatctgcagtttaaaagaacataaaagtaactcacctgccgtcccacctaagatgttctcaagacaaaattagcccaacactgaagaagtgagacacctattcaataattataatttgaactttaaagaggcctccttgtataaaaccacaattagggtgttgtttttctctcaaaataatgtgtttttttttcttttttttttgcctactgttgttcaacagatgttgatacctttaattactgtggttgtcacttaaatctaatttcaaagctcttttcactttgccaagaatcaagtagtgttcatgctttggggccgggggcggggaggtgtagaaggggtagtttattttcttagacaagttggatttatttttattatggatgcttccttaagtagttactcattacgatgaaacacacattcaggtctggctttggtgctgtttctcgctcatgatctgatgtaggcatgcatttcttcattgtcgagagagagacaaaaaaactgtaaactaacaaatttgggaggaagctcataaatacccaatgttttaattggtacatcaattggaagaataaaagtattcatattaattttgttaacactacaaatatttaaaagactcaatatatagagatgcatatagacatgctgttctgaaatgaattacctttgaccagaatggttatgtcaacaccatttagatttatgtggcactggttgtgctggacagtttggtactccgctggtctcctttcccaggctgggatatctatccctcagttgctgagtgtgttggctgctaaatggctcaggactgcccctttctccaaagcagaggttctcaaagtgtggtccctgagctgagccagctgcatcagcatcacctgggaacttgaatgcaagacttttatcctactccagacataccaaatcagaaactctggattgaggcccagcaatctgtgttttagtaagttcacccagcaagtgattcagtaaatgcaaacatttgagaagctttgctctagagaatctttggtcctttggtcaaaatttctttgtatttttgttcacaaaataattccctttaggtaaaacaagacctaacgaaggaagtaaccatctccctcacctcacttagcatggtgacagctcggtaaatatatttgagaactttcaatacccagaatcccctgaaacctctggcccactcttcatgttagaagacagttgaggggctcttgtttgaagattctggaaaagcttagaaggaagcaggtggtctgcaaggcaatgaggctctgtctcttctcccatcctggcgactgaaaaaatccactgggtttaaatctctgtgtggcccaactgagaaagtgytagcctgctaagtgaggagataaattacacgttggaaaagctgcaggacctggctgatatatactggaagaaactaggagagtatgtttaaaaatagattctacaggtgctgggccaaggttagaagaggccagactataaagctggatacaagagaatttgctgatattggagat

SEQ ID NO: 51371 - DNA, 1763 bp, Homo sapiens
gtgcccagcccccagtctccttttctaaatgtcctttgcttctgctcaatatcttttcctttctcttgatacgtagggtgcttaattaaaccccattaactaatgatatggccattaacaacaaataccacctgagaacacttttaactttcagctctttaaagaaaaaatgctataatcacttgctatgtaatgcatcaccatctgcagtttaaaagaacataaaagtaactcacctgccgtcccacctaagatgttctcaagacaaaattagcccaacactgaagaagtgagacacctattcaataattataatttgaactttaaagaggcctccttgtataaaaccacaattagggtgttgtttttctctcaaaataatgtgtttttttttcttttttttttgcctactgttgttcaacagatgttgatacctttaattactgtggttgtcacttaaatctaatttcaaagctcttttcactttgccaagaatcaagtagtgttcatgctttggggccgggggcggggaggtgtagaaggggtagtttattttcttagacaagttggatttatttttattatggatgcttccttaagtagttactcattacgatgaaacacacattcaggtctggctttggtgctgtttctcgctcatgatctgatgtaggcatgcatttcttcattgtcgagagagagacaaaaaaactgtaaactaacaaatttgggaggaagctcataaatacccaatgttttaattggtacatcaattggaagaataaaagtattcatattaattttgttaacactacaaatatttaaaagactcaatatatagagatgcatatagacatgctgttctgaaatgaattacctttgaccagaatggttatgtcaacaccatttagatttatgtggcactggttgtgctggacagtttggtactccgctggtctcctttcccaggctgggatatctatccctcagttgctgagtgtgttggctgctaaatggctcaggactgcccctttctccaaagcagaggttctcaaagtgtggtccctgagctgagccagctgcatcagcatcacctgggaacttgaatgcaagacttttatcctactccagacataccaaatcagaaactctggattgaggcccagcaatctgtgttttagtaagttcacccagcaagtgattcagtaaatgcaaacatttgagaagctttgctctagagaatctttggtcctttggtcaaaatttctttgtatttttgttcacaaaataattccctttaggtaaaacaagacctaacgaaggaagtaaccatctccctcacctcacttagcatggtgacagctcggtaaatatatttgagaactttcaatacccagaatcccctgaaacctctggcccactcttcatgttagaagacagttgaggggctcttgtttgaagattctggaaaagcttagaaggaagcaggtggtctgcaaggcaatgaggctctgtctcttctcccatcctggcgactgaaaaaatccactgggtttaaatctctgtgtggcccaactgagaaagtgctrgcctgctaagtgaggagataaattacacgttggaaaagctgcaggacctggctgatatatactggaagaaactaggagagtatgtttaaaaatagattctacaggtgctgggccaaggttagaagaggccagactataaagctggatacaagagaatttgctgatattggagat

SEQ ID NO: 51372 - DNA, 1763 bp, Homo sapiens
gtgcccagcccccagtctccttttctaaatgtcctttgcttctgctcaatatcttttcctttctcttgatacgtagggtgcttaattaaaccccattaactaatgatatggccattaacaacaaataccacctgagaacacttttaactttcagctctttaaagaaaaaatgctataatcacttgctatgtaatgcatcaccatctgcagtttaaaagaacataaaagtaactcacctgccgtcccacctaagatgttctcaagacaaaattagcccaacactgaagaagtgagacacctattcaataattataatttgaactttaaagaggcctccttgtataaaaccacaattagggtgttgtttttctctcaaaataatgtgtttttttttcttttttttttgcctactgttgttcaacagatgttgatacctttaattactgtggttgtcacttaaatctaatttcaaagctcttttcactttgccaagaatcaagtagtgttcatgctttggggccgggggcggggaggtgtagaaggggtagtttattttcttagacaagttggatttatttttattatggatgcttccttaagtagttactcattacgatgaaacacacattcaggtctggctttggtgctgtttctcgctcatgatctgatgtaggcatgcatttcttcattgtcgagagagagacaaaaaaactgtaaactaacaaatttgggaggaagctcataaatacccaatgttttaattggtacatcaattggaagaataaaagtattcatattaattttgttaacactacaaatatttaaaagactcaatatatagagatgcatatagacatgctgttctgaaatgaattacctttgaccagaatggttatgtcaacaccatttagatttatgtggcactggttgtgctggacagtttggtactccgctggtctcctttcccaggctgggatatctatccctcagttgctgagtgtgttggctgctaaatggctcaggactgcccctttctccaaagcagaggttctcaaagtgtggtccctgagctgagccagctgcatcagcatcacctgggaacttgaatgcaagacttttatcctactccagacataccaaatcagaaactctggattgaggcccagcaatctgtgttttagtaagttcacccagcaagtgattcagtaaatgcaaacatttgagaagctttgctctagagaatctttggtcctttggtcaaaatttctttgtatttttgttcacaaaataattccctttaggtaaaacaagacctaacgaaggaagtaaccatctccctcacctcacttagcatggtgacagctcggtaaatatatttgagaactttcaatacccagaatcccctgaaacctctggcccactcttcatgttagaagacagttgaggggctcttgtttgaagattctggaaaagcttagaaggaagcaggtggtctgcaaggcaatgaggctctgtctcttctcccatcctggcgactgaaaaaatccactgggtttaaatctctgtgtggcccaactgagaaagtgctagcctgctaagtgaggagataaattacacgttggaaaagctgcaggacctggctgatatatactggaagaaactaggagagtatgtttaaaaatagattctacaggtgctgggccaaggttagragaggccagactataaagctggatacaagagaatttgctgatattggagat

SEQ ID NO: 51373 - DNA, 800 bp, Homo sapiens
tgtccagctctcctggcagaagggatcagagaaggcatcactagtcaccgaccaaagctcaatctgtacatgcatgcagtgtcawaggttttcccttcactgtgctctggcaaaagacaccgaataagtagagtaaacactgataataagcagcagcagcaaagattaagaagttgcctctttagtttgcctctgtacacatgaacagtatttgaagtctcagttgcgtatcagcaaaatagggcaataacaaataattaataatttaaatttaaaaatttaaaatgcttacacctgggtctgatatacagtgatgatgagaagaaggaggaagaggcagctaggaagggatggggaggagaatccacctctcatctcctggttgtgaatcttctgatacagaacaatctgaatcatgttgataatgaaagcaccaggtcactctcataaatatgtttagtatattggcagtaaagggagtcagaggcacatgcatacattccatgaaaaaaatatttttcctagattaggtctacattagactatgagattatggttccctcacctatttacagctatattttcaatttgactgatgtttattatagatatttatattaatgatcttaatggagcattggtcccttatatctgtgtcattttgtaatggacattgtcacttctcccaccagaattgaagtacatttatcataccctaaaatctggactcgtcttgttatttgctttaatcaatacagaatgtggtgaaagtgattctgtgttctgcagcttagacctta

SEQ ID NO: 51374 - DNA, 800 bp, Homo sapiens
tgtccagctctcctggcagaagggatcagagaaggcatcactagtcaccgaccaaagctcaatctgtacatgcatgcagtgtcataggttttcccttcactgtgctctggcaaaagacaccgaataagtagagtaaacactgataataagcagcagcagcaaagattaagaagttgcctctttagtttgcctctgtacacatgaacagtatttgaagtctcagttgcgtatcagcaaaatagggcaataacaaataattaataatttaaatttaaaaatttaaaatgcttacacctgggtctgatatacagtgatgatgagaagaaggaggaagaggcagctaggaagggatggggaggagaatccacctctcatctcctggttgtgaatcttctgatacagaacaatctgaatcatgttgataatgaaagcaccaggwcactctcataaatatgtttagtatattggcagtaaagggagtcagaggcacatgcatacattccatgaaaaaaatatttttcctagattaggtctacattagactatgagattatggttccctcacctatttacagctatattttcaatttgactgatgtttattatagatatttatattaatgatcttaatggagcattggtcccttatatctgtgtcattttgtaatggacattgtcacttctcccaccagaattgaagtacatttatcataccctaaaatctggactcgtcttgttatttgctttaatcaatacagaatgtggtgaaagtgattctgtgttctgcagcttagacctta

SEQ ID NO: 51375 - DNA, 800 bp, Homo sapiens
tgtccagctctcctggcagaagggatcagagaaggcatcactagtcaccgaccaaagctcaatctgtacatgcatgcagtgtcataggttttcccttcactgtgctctggcaaaagacaccgaataagtagagtaaacactgataataagcagcagcagcaaagattaagaagttgcctctttagtttgcctctgtacacatgaacagtatttgaagtctcagttgcgtatcagcaaaatagggcaataacaaataattaataatttaaatttaaaaatttaaaatgcttacacctgggtctgatatacagtgatgatgagaagaaggaggaagaggcagctaggaagggatggggaggagaatccacctctcatctcctggttgtgaatcttctgatacagaacaatctgaatcatgttgataatgaaagcaccaggtcactctcataaatatgtttagtatattggcagtaaagggagtcagaggcacatgcatacattccatgaaaaaaatatttttcctagattaggtctacattagactatgagattatggttccctcacctatttacagctatattttcaatttgactratgtttattatagatatttatattaatgatcttaatggagcattggtcccttatatctgtgtcattttgtaatggacattgtcacttctcccaccagaattgaagtacatttatcataccctaaaatctggactcgtcttgttatttgctttaatcaatacagaatgtggtgaaagtgattctgtgttctgcagcttagacctta

SEQ ID NO: 51376 - DNA, 565 bp, Homo sapiens
ctcattctcttatccttttaaatctcacagcttcataatcctccctaaacctgaccttcctttcttttttttatttttttatttttatttttatttattttattttatttattttttttattgatcattcttgggtgtttctcgcagagggggatttggcagggttataggacaatagtggagggaacctgaccttcctttcaacttstattggaaactctccagtactgaagtctattgtccaactcaaatgataacctttcctatcttctttcttcttgcccaccctatacaaataggtggtatggtttttgcttttattaaaactgtttttgtaaccaatgtttattttttatcaaaatattccatgcaactagtctaggggtcaaataatgctaaaaaggcttagagcaaaagcagcagtttcactcctaccccttcatcacttcctaccactcagaggcaactactcaacttgttcaatttattgctttgtgggtacataataagagtgggaaaacaggccgggcacagtggatcatgcctgtaatcccagcactttggg

SEQ ID NO: 51377 - DNA, 510 bp, Homo sapiens
ctgtgccctgccaggctggtcccgggccccctcycagcccactcatccagggatgcagctctggccttggcccacccccatcagagggcctgtggccctgatcaccgcactccccactctgtgaccagacgttctctcctgagcatcgctgaccctgcagctgtccaaatagagcaagaagtgaatgttctctttggggcacagctggactggcagccctgcagggtcaggtgagctgccagtcctgggtgtgttctcgggggtgggggtgggaggatcacgtcctgggctgagatcccttcagctcctcctgggcaggaggaaacagccatgcaggggcggccaggaggactgggtggcgggtggttctgggctctcccagcttcggttggggctgggaccctgggggacatgctctcctgggtgttcccaggctctgtgtttggcctgtgcctcagtgtgtgggttttctggcaccaggcttccttgggaagagcctctggttgtgca

SEQ ID NO: 51378 - DNA, 510 bp, Homo sapiens
ctgtgccctgccaggctggtcccgggccccctctcagcccactcatccagggatgcagctctggccttggcccacccccatcagagggcctgtggccctgatcaccgcactccccactctgtgaccagacgttctctcctgagcatcgctgaccctgcagctgtccaaatagagcaagaagygaatgttctctttggggcacagctggactggcagccctgcagggtcaggtgagctgccagtcctgggtgtgttctcgggggtgggggtgggaggatcacgtcctgggctgagatcccttcagctcctcctgggcaggaggaaacagccatgcaggggcggccaggaggactgggtggcgggtggttctgggctctcccagcttcggttggggctgggaccctgggggacatgctctcctgggtgttcccaggctctgtgtttggcctgtgcctcagtgtgtgggttttctggcaccaggcttccttgggaagagcctctggttgtgca

SEQ ID NO: 51379 - DNA, 510 bp, Homo sapiens
ctgtgccctgccaggctggtcccgggccccctctcagcccactcatccagggatgcagctctggccttggcccacccccatcagagggcctgtggccctgatcaccgcactccccactctgtgaccagacgttctctcctgagcatcgctgaccctgcagctgtccaaatagagcaagaagtgaatgttctctttggggcacagctggactggcagccctgcagggtcaggtgagctgccagtcctgggtgtgttctcgggggtgggggtgggaggatcacgtcctgggctgagatcccttcagctcctcctgggcaggaggaaacagccatgcaggggcggccaggaggactgggtggcgggtggttctgggctctcccagcttcggttggggctgggaccctgggggacatgctctcctgggtgttcccaggctctgtgtytggcctgtgcctcagtgtgtgggttttctggcaccaggcttccttgggaagagcctctggttgtgca

SEQ ID NO: 51380 - DNA, 1824 bp, Homo sapiens
cctgatgctctcctgacatcctcttctaacaggcasacagacctttcctgtagcccaggacgtcaccttccccttctcccaggcagggtccaggcaccagccttttactgggatgcgtacttagaccaaatgccactgtcatttgtttggcgtttcccccttcttccctcctttcctgtcttcttttccttccttctctccctgctttctcctactcacttggtgtccagttgcagcttccgctgtctctctcctctcttcttccagtcacctgtgggtgtccaggctctgctcgcttcccttccccacagcagggcctcctactgctcctgactgtgatctcatttcatacctgctcgagtttctagtttctctagatggtgcctttcttagtatctgctgccttcacctatcatctctgcaaaatgtattaaatctactgctttcccaagtacttgccctaccctttaaaggatctaaataagaatcaagtttaacaccgctgccgcagcagcctctttactccatgttacctagctcttacctgcaccctctgtttactgcaccgtgagtagtaaatttccgttcctcgtgaggtgacttcatttgtagtagaaactcctgctgtgtggtgtggcagagactacatgctttggctacggtctgacctggcttcaaatccaggttctaacacttgctagctgtgtggccacagcaggtaatttaatctttctgatcttcattttcctcctcagtaaaatgggaagaataaataatacccaccttgcagataggattgtgctatgctgtggataaaaatgtgtgtcagatgcctggcacatgacgggtgaacaaaaatgctagctactgttgtcattatagctcagtttctcttttgcaaatttgttgatttttagcagatctcattatgtgttataagggatcaaagaattgatgtatccaaggtcctattagaaatggatcccataatgatttacaattttgaacataaatatctttgccagcagttcccatctttctagcaatagtaaatagagtaattaataaaacaacaatttagaacaagaacttagatattttcttgaagtcccttgtgctagaaataatttatatttttcagagaatagctgttcccattcaccccaaatgatttccagaatcaggatttttttttttttttttttttttttttgaggcagtgtcttgctctgttgcccaggctggagtgcagtggtgtgattatggctcactgcagcctcaacttcatgggctcaagtgatcctcccacttcagccaagtagctgggactatacatgcataccaccatgcatggctaatttttaaatgtttataaagatggggtctcaccatattgcccaggctggtctcaaactcctaggctcaagtgatattcccgcctcggcctcccaaagtgtcaggattataagcgtgggccactgtgtccggcccgggattgttttttctctcctagatccagcagttgtgctggatgatgctctttgtggtttcattattgccacaaatatgcaccaaaggctttctaatccaagacttcagcagttcatttgagggtttgctatagattaatatggcaatagttctctggtaccctcactatcaaatttgtgtattgcggtcacatgctgcattttgcggtttcatacgcagcattctggggttacttggtttggagtccagtctttactggtttctggtgctaatccctcaaagggtttcacaggaccatatgaacaaatgataaggaaattaaagcatagactc

SEQ ID NO: 51381 - DNA, 1824 bp, Homo sapiens
cctgatgctctcctgacatcctcttctaacaggcagacagacctttcctgtagcccaggacgtcaccttccccttctcccaggcagggtccaggcaccagccttttactgggatgcgtacttagaccaaatgccactgtcatttgtttggcgtttcccccttcttccctcctttcctgtcttcttttccttccttctctccctgctttctcctactcacttggtgtccagttgcagcttccgctgtctctctcctctcttcttccagtcacctgtgggtgtccaggctctgctcgcttcccttccccacagcagggcctcctactgctcctgactgtgatctcatttcatacctgctcgagtttctagtttctctagatggtgcctttcttagtatctgctgccttcacctatcatctctgcaaaatgtattaaatctactgctttcccaagtacttgccctaccctttaaaggatctaaataagaatcaagtttaacaccgctgccgcagcagcctctttactccatgttacctagctcttacctgcaccctctgtttactgcaccgtgagtagtaaatttccgttcctcgtgaggtgacttcatttgtagtagaaactcctgctgtgtggtgtggcagagactacatgctttggctacggtctgacctggcttcaaatccaggttctaacacttgctagctgtgtggccacagcaggtaatttaatctttctgatcttcattttcctcctcagtaaaatgggaagaataaataatacccaccttgcagataggattgtgctatgctgtggataaaaatgtgtgtcagatgcctggcacatgacgggtgaacaaaaatgctagctactgttgtcattatagctcagtttctcttttgcaaatttgttgatttttagcagatctcattatgtgttataagggatcaaagaattgatgtatccaaggtcctattagaaatggatcccataatgatttacaattttgaacataaatatctttgccagcagttcccatctttctagcaatagtaaatagagtaattaataaaacaacaatttagaacaagaacttagatattttcttgaagtcccttgtgctagaaataatttatatttttcagagaatagctgttcccattcaccccaaatgatttccagaatcaggatttttttttttttttttttttttttttgaggcagtgtcttgctctgttgcccaggctggagtgcagtggtgtgattatggctcactgcagcctcaacttcatgggctcaagtgatcctcccacttcagccaagtagctgggactatacatgcataccaccatgcatggctaatttttaaatgtttataaagatggggtctcaccatattgcccaggctggtctcaaactcctaggctcaagtgatattcccgcctcggcctcccaaagtgtcaggattataagcgtgggccactgtgtccggcccgggattgttttttctctcctagatccagcagttgtgctggatgatgctctttgtggtttcattattgccacaaatatgcaccaaaggctttctaatccaagacttcagcagttcatttgagggtttgctatagattaatatggcaatagttctctggtaccctcactatcaaatttgtgtattgcggtcacatgctgcattttgcggtttcatacgcagcattctggggttacttggtttggagtccagtctttactggtttctggtgctaatccctcaaagggtttcacaggaccatatgaacaaatgataaggaaattaaagcatrgactc

SEQ ID NO: 51382 - DNA, 610 bp, Homo sapiens
gggcgttaccattcatgcttgacttctagccagtgtgacgagaggctggagtcaggtctccagagagttgagcagctccagccttagatctcccagtcttatgcggtgtgcccattcgcctggtgtctgcagccccctggccacacccagtaacagttctgtgatctatgagaatagtttccttagcgagctttcccttcaaatactttgcagccaggtagagaagtttggagtgaaggttttgttctttgtttctttgcagtatggatatgaatcttcttttgaaaatgttaaagtaaattacctcttttcagatattgtcttcatgcgaacttggtatcctgtttccatcccagccttctataacccagtaacatctttgttgaaaccagtgggtgagaaagacacctggtcaggaatgtggaccacgggccacctcgggctcgcccatggtgtcagactaaagacaaacaaggactctctgtataaggtactggtcgtgtgtgtgttagtggagatgaagcctgtgccctacagacagggagtcacrcagacacttttctataatttcttacgtactttgaatgttcaagtataaagtctaatgtta

SEQ ID NO: 51383 - DNA, 940 bp, Homo sapiens
gctgggattacaggtatgagccactgtgcctggcctcaagtcacccttgttagtttggcttaccaactttaaagttttggattgcttttgtcaaaccactgggttgcaagttcagatggtctctcttgtttttcttagctaattgtaagtaaagttcactttggtaatttattgtgttacatagaattgaagtttttctcttgctaatattattcctattttcaaattttggggctcctgttagcctgattttcggatagctgccacaggagttgtccttgatctggataaatccataaaaattgtgaagaaattaaagctaactggttttccatataaaattttcaagaacacttcatttattaaggtctgtatatctatatattctcatatttataaatgtccatattgtttgagaaaaggaatgaaatacctctaaaatgtgggcctcatrtttttagaaaagtgtttgaaatcttttataaacttcatattttgtttgctcctttatattctgtattacttaaatatgctcaaaaaagcagtggtaaacagctatttaggaattgaggctgttactcctgacttccatgtgagactgccacggaactcatattgaaaatatgtcattttatccactaggttttgtttcctactttttaaattggtgttaagaaagggaaaaaaatcacaagtttgtctaactcagtagaaaaaccgacaaagcatttgcagacaacttggcaagggtacagagaaacggatgtactgttttacagtatttggggagggtggtttgagcagcatttattgacaatttcattagtggggatgtttctattgaaaacacagagttaggaagtcataaaatgttcttgcaatataaggtaataataccaccggcgtttatcttatgttttcatgttctaagtgcatgcat

SEQ ID NO: 51384 - DNA, 940 bp, Homo sapiens
gctgggattacaggtatgagccactgtgcctggcctcaagtcacccttgttagtttggcttaccaactttaaagttttggattgcttttgtcaaaccactgggttgcaagttcagatggtctctcttgtttttcttagctaattgtaagtaaagttcactttggtaatttattgtgttacatagaattgaagtttttctcttgctaatattattcctattttcaaattttggggctcctgttagcctgattttcggatagctgccacaggagttgtccttgatctggataaatccataaaaattgtgaagaaattaaagctaactggttttccatataaaattttcaagaacacttcatttattaaggtctgtatatctatatattctcatatttataaatgtccatattgtttgagaaaaggaatgaaatacctctaaaatgtgggcctcatatttttagaaaagtgtttgaaatcttttataaacttcatattttgtttgctcctttatattctgtattacttaaatatgctcaaaaaagcagtggtaaacagctatttaggaattgaggctgttactcctgacttccatgtgagactgccayggaactcatattgaaaatatgtcattttatccactaggttttgtttcctactttttaaattggtgttaagaaagggaaaaaaatcacaagtttgtctaactcagtagaaaaaccgacaaagcatttgcagacaacttggcaagggtacagagaaacggatgtactgttttacagtatttggggagggtggtttgagcagcatttattgacaatttcattagtggggatgtttctattgaaaacacagagttaggaagtcataaaatgttcttgcaatataaggtaataataccaccggcgtttatcttatgttttcatgttctaagtgcatgcat

SEQ ID NO: 51385 - DNA, 940 bp, Homo sapiens
gctgggattacaggtatgagccactgtgcctggcctcaagtcacccttgttagtttggcttaccaactttaaagttttggattgcttttgtcaaaccactgggttgcaagttcagatggtctctcttgtttttcttagctaattgtaagtaaagttcactttggtaatttattgtgttacatagaattgaagtttttctcttgctaatattattcctattttcaaattttggggctcctgttagcctgattttcggatagctgccacaggagttgtccttgatctggataaatccataaaaattgtgaagaaattaaagctaactggttttccatataaaattttcaagaacacttcatttattaaggtctgtatatctatatattctcatatttataaatgtccatattgtttgagaaaaggaatgaaatacctctaaaatgtgggcctcatatttttagaaaagtgtttgaaatcttttataaacttcatattttgtttgctcctttatattctgtattacttaaatatgctcaaaaaagcagtggtaaacagctatttaggaattgaggctgttactcctgacttccatgtgagactgccacggaactcatattgaaaatatgtcattttatccactaggttttgtttcctactttttaaattggtgttaagaaagggaaaaaaatcacaagtttgtctaactcagtagaaaaaycgacaaagcatttgcagacaacttggcaagggtacagagaaacggatgtactgttttacagtatttggggagggtggtttgagcagcatttattgacaatttcattagtggggatgtttctattgaaaacacagagttaggaagtcataaaatgttcttgcaatataaggtaataataccaccggcgtttatcttatgttttcatgttctaagtgcatgcat

SEQ ID NO: 51386 - DNA, 1662 bp, Homo sapiens
aaaatgaatttcctttcttcgttccaccattctccagaaagatgacattttagactcttctctcttgcggggggagggggctgttaaagaaacactatctrtctatcccacacacagaatggagcagaaaacatggaaatagctggttgcttcttgaccaaaaaatggaaaggaaactggctcccaggaatccctatgcttttctggaaaactgcttcaattatcacaatgctgatcaccttctcctactcctctaaaagcaatttccagataggacagtaccagtccacagacactactcttttacatcctgctgttacctctcagggctcatgggcagtgttacttgggcaccatggttagagcaccagcaaaagtagggcaacaaaaaagccaacaatttggggagacattttaatagttgacatttaaaaataaaagacataatcaggaggaaaattagaactttattgggcttcttctcactcatttcacggttaagaatggcttttattttgaattgaatgtgggagaaagtaccaaaaccttttgtttgcttaagatttctaaagctcttatttgggccacaggcagaacctgaggcagacccccgagatgtctgagaacctttcagattccactgagggaaggctgggagtcagctctgggcaaagcagtcttccaagtgggaagcacccacatttttctgagtagctgcaactggttagcaaagggtttcctggggactgctgtcctcataagaagcagacaaggtgtggaaagaagctcctgtaagctcctgactcaggctggagactgatgcccaggggcatcaccgtggtgaatgaaaaagtgtacagctaataaaatgttcaaagatagatttgcctaggaagtgccaaaagaaatacaggaggaaagggtgggggagaaaagaaaggatggtctaagtgacacatcttcagctgcctgaccctcaagtcaaaatgatttaaagtttttattgaaagaacagatggaagatgagagcatttcttgatgcaggatggcacttcttgggcactcacatgctgcacgatatattataatctccgtatagctcaagatataaataaaatgaagaatatatcaaaactcttctatttgccagcaacctccctgggattgctaacactgatgagaaaacagtaggagaacggaggctaagaaaaaccaagagctactaatgtgacccgattgctactatttatttaatggaacagccattatttttcttcaacatatgtgtctgataatgaggcaaaaagaaaggaaaataacgatcaatgtgccatttcagaaacacacaaacatttgttagctttttcattttattgatgttcttttaatatatgtatttaggattaaactagtgttcaagtactaataatccagcaattctgaattggggctttattttttaaaaaatacaagcacagttagggaacagagatgaaattcttgtcaaacataaaaatatgaattgaattgcttctttttagatggatctttaacattgacttgaccatatggacactgcagaagaaataaaacaaattattattaaattatttaacaatcatcttgaaaaagcacacttctcatggtgacaaaaagagactg

SEQ ID NO: 51387 - DNA, 1662 bp, Homo sapiens
aaaatgaatttcctttcttcgttccaccattctccagaaagatgacattttagactcttctctcttgcggggggagggggctgttaaagaaacactatctatctatcccacacacagaatggagcagaaaacatggaaatagctggttgcttcttgaccaaaaaatggaaaggaaactggctcccaggaatccctatgcttttctggaaaactgcttcaattatcacaatgctgatcaccttctcctactcctctaaaagcaatttccagataggacagtaccagtccacagacactactcttttacatcctgctgttacctctcagggctcatgggcagtgttacttgggcaccatggttagagcaccagcaaaagtagggcaacaaaaaagccaacaatttggggagacattttaatagttgacatttaaaaataaaagacataatcaggaggaaaattagaactttattgggcttcttctcactcatttcacggttaagaatggcttttattttgaattgaatgtgggagaaagtaccaaaaccttttgtttgcttaagatttctaaagctcttatttgggccacaggcagaacctgaggcagacccccgagatgtctgagaacctttcagattccactgagggaaggctgggagtcagctctgggcaaagcagtcttccaagtgggaagcacccacatttttctgagtagctgcaactggttagcaaagggtttcctggggactgctgtcctcataagaagcagacaaggtgtggaaagaagctcctgtaagctcctgactcaggctggagactgatgcccaggggcatcaccgtggtgaatgaaaaagtgtacagctaataaaatgttcaaagatagatttgcctaggaagtgccaaaagaaatacaggaggaaagggtgggggagaaaagaaaggatggtctaagtgacacatcttcagctgcctgaccctcaagtcaaaatgatttaaagtttttattgaaagaacagatggaagatgagagcatttcttgatgcaggatggcacttcttgggcactcacatgctgcacgatatattataatctccgtatagctcaagatataaataaaatgaagaatatatcaaaactcttctatttgccagcaacctccctgggattgctaacactgatgagaaaacagtaggagaacggaggctaagaaaaaccaagagctactaatgtgacccgattgctactatttatttaatggaacagccattatttttcttcaacatatgtgtctgataatgaggcaaaaagaaaggaaaataackatcaatgtgccatttcagaaacacacaaacatttgttagctttttcattttattgatgttcttttaatatatgtatttaggattaaactagtgttcaagtactaataatccagcaattctgaattggggctttattttttaaaaaatacaagcacagttagggaacagagatgaaattcttgtcaaacataaaaatatgaattgaattgcttctttttagatggatctttaacattgacttgaccatatggacactgcagaagaaataaaacaaattattattaaattatttaacaatcatcttgaaaaagcacacttctcatggtgacaaaaagagactg

SEQ ID NO: 51388 - DNA, 638 bp, Homo sapiens
acccatttatctgacctaccacctgtcctgtgctgcaccctgcatttgaaagatggatgggggtcagggtgcataagacccataatagcagccaatgtttgttgagcattgtctgtaccaaggactatcctaagttctcttaacatcgattactttgcttaatcctcacaatacacccatggagcatacactactactwcattcatcttacagttgacaaaactgtagcaaacacagttagacaatttgccaaggtcaaatggaggaacaagggttcaaacttctgaaaaatctgatttcaaagcatattctccttaccaccgacccctcagtcctcaccagctcactgccagtagatgaccatagaacagaaccaagcatcctgttcaaacaagttcaaacccaaggtattctgaggaatctactaagcaagatatcaaactgaaatctaactgtaataatattgcattccagaactacccatcttcctatcttgctttgtaatgaaaaaataataaagatttactgttcctaggcttaaacatcctgggatattggtaaaaattttaatggaaactttaaaaaactgcatgatattttttcagcttatactgggaatgacattggtcaaagctgta

SEQ ID NO: 51389 - DNA, 638 bp, Homo sapiens
acccatttatctgacctaccacctgtcctgtgctgcaccctgcatttgaaagatggatgggggtcagggtgcataagacccataatagcagccaatgtttgttgagcattgtctgtaccaaggactatcctaagttctcttaacatcgattactttgcttaatcctcacaatacacccatggagcatacactactacttcattcatcttacagttgacaaaactgtagcamacacagttagacaatttgccaaggtcaaatggaggaacaagggttcaaacttctgaaaaatctgatttcaaagcatattctccttaccaccgacccctcagtcctcaccagctcactgccagtagatgaccatagaacagaaccaagcatcctgttcaaacaagttcaaacccaaggtattctgaggaatctactaagcaagatatcaaactgaaatctaactgtaataatattgcattccagaactacccatcttcctatcttgctttgtaatgaaaaaataataaagatttactgttcctaggcttaaacatcctgggatattggtaaaaattttaatggaaactttaaaaaactgcatgatattttttcagcttatactgggaatgacattggtcaaagctgta

SEQ ID NO: 51390 - DNA, 639 bp, Homo sapiens
aataatcgagattgctttgaactagctcaataactctcagctcctcttggccttcaatatattgctagtggtagcacataaataatctgggttttcttttcagattccaaagcagggttgtctggcctttggcaaaacagctaggtagacacagtttgtgctccacagtttgtgctccattttccagctcttttgctatgctctactcagcatccacagtttccctgcatctcaggtttctcctgctccccctttcccctcaggggcaagtgctaggaaatatttatatacacactgttgagagtcagcctttctgacttcactcatcctgtgccttctgtctgaagtagctttctgcctttcaaatccagatatacaaagtgagatcatggttcacaccaaacaccaccatctccacagctctcctgcggacctccccaggtagaagaggacattcagytccctcaggacttctctgtatctctcctatgcttcttcatctccctacactgatttagaggcattcacatggctcccccaactagtacacaatcaatttcttaagggtgtgaataacaagccattcatctatttatttcacgtagtgcttagccaacttccctgtcaaaaaaacatctg

SEQ ID NO: 51391 - DNA, 1057 bp, Homo sapiens
ccctactttttaagagtcctttgatgtttaagctcccttaaggagtctttttttgttttaagggacattttaaagcttttcttcttagaaacaggaaatcagattttggcatgggaaaagaaattcgaacacaccaagacttggggggtgggagcagttggtttgctttcaaacaggattctagagggttcccaagattgggcagaagagcccaggccaccctgactcagcctcccaagsgtttgccaactcaaaaggcggtgtggacgtctggggcggtggcaagggaagtgagcctgaagcatttccttggccttttcggacttgttgaatgttttctttttgccctcagtcccatgtcttacttcttagtctcttttgtgatatttggcaatccaaattgccaaataccttaagtgatctctaaggaaaatatttttcactagatgattgctttttccttccagaaaaagagaaagaaaagagaagaaaaacagacaaatacacaaatacgtgtggcagagtgagttccagttaccactttgaaaagctcttaagcattctgtcaagccaaatgatttcacaaagtttaagcagtcatcaaacaggcaactggggtgggggaagaagatcccagctcgaacttccagcagccaagtgactcaaaacagtccccttcacccctctgagcttcagtttcttatttaggaggtggagaaatgaggactgttccaccggggtggctgataaggtcatgtgtgatcagggatagtctgaggccccagtagatgctcaacgaatgccccctttcttgatctggatgggcagtgcttttgttgactgaccagtctgtcctttgtcctcctgcaaatgactgatgtggatgctgcaggcttagagaggtggtgtgccatggaaggtggaatgctgggcggggggccagatgaccttgctgcagctgctgcttcttctccctctccttctccttcttctcccttttaaattgtgatgaaaacaaaacccacataataagctaaccctcctatcaagttttagg

SEQ ID NO: 51392 - DNA, 614 bp, Homo sapiens
agtgactgttgtccactgtaccttgctagaagtgtctgcaatggctggcactgacagccagtgagccaggggcctgggagagacaaagagccttcctcctccaccctcctgcctcctcaggccaggtaaacactcgcaacctgatctgggaactcctgaaactttgaaggagtagactctggatatgaaatatgaaattttcagctctaatctctgatattctaagtaatattagctttgcaggaattactatttgattctttcaataatcttgagaagtgggtgttatcatcaaacccacctggcacatgaaggaagcaactgtgcgttggaaaggtgaagggactygtccaacattttcgagggttaaaagagaagccagaagctgagcacacccctgcctgactccaaagtctttgaaactgctgtcaccaagaggataagtgggctgccctgcagaggagtgaaggctgtgtaccacacaaagatgcctcagttaaggacactccactctcatggtagatgctgtagatttgtatgcttattaagacgtttaccaacagatgaaagtggagggtactgagaaagtggcacctttcaagaattcccaccaa

SEQ ID NO: 51393 - DNA, 574 bp, Homo sapiens
tacgtttctgctgaaatcaattgaataggaaattgtatccaaattacatatatattacacacatatgtaaatatatattatacacatataaatatatcatatctatctatctatatatatttctcccagataattaagtttggcctgacaaaaaaattactaaaatacaggtaattttgtaaaactccaacactgtattttcactcagctattaaggcttagagtaccttaaatggtatttggatttcaaagagcagatgcttaaactgttttatttatttatttatttattttatttttttgagacggagtctcactctgtcgcccaggctggagtgcaatggtgtgatctcggctcactgcaacctccgcctyctaggttcaagtgattctcctgcctcagtctcccaagtagctgggattacaggcgtctgccactgcgcctggctaatttttgtatttttagcagagacagagtttcaccatgttggtcaggctggtctcgaactcttgacctcaggtgatccacccgccttggcctccaaaagtgctgggattacaggcgtgagccacc

SEQ ID NO: 51394 - DNA, 630 bp, Homo sapiens
agcagctgcctgagctcaccttgtcctcatcaccttttctcctttccaggccgcacttggtgagagtcttcacggaccacagtgttgcacgaggtgattgtgtttgcagaggtttttttgtccttgaagagcacttagggctggagagcaagacacatgctgacgagcagaagctgacaggcttgctgccatgtgggaaagtccttggacgagttgtctgcttgcggagaggtgtctgcggctcaggtagggtgtcccagctcggtgggtctctgggttccagagttccagagtttatttggtgaaacacagcaggggttatcactgtggcccatggcagggctgagctgccaacttgatgcccgttgttaggaacagatgtgaattgtgtgtccgggtgaataagcctcactgtggagcctccatgctgtagagaactggaggagccaggtttgcagagtctgcaaggcgatcgtgtctatgcgaggagaaatccctcactcggagggattgcattccaagagggctgggaagtgaagcccagtcttcgtgacttctcttttcagacccaggaaacatgggttctgtgttccctaaaagtacctggtagaccatttatcaygtgagacc

SEQ ID NO: 51395 - DNA, 618 bp, Homo sapiens
tcaggaacaggcagccactggaaaacccagtgccaccctcaccagctgtcctcggctgccaaccctcccagcatctccccagccccaccaaaaatatgcctgagcagcagcttgccacacagggcatcatcaggtctgcgtgcccaccttccttctccctgcctgttagagtctcattgattgatttaaaccggaaacgagtattcccaggaatcttttctgagccaagaaggctcacatctagattgttaagattcatatgaaaagcccgagcgaaggcgtcccgggggtgtgattgagctcaccttccccacgcacccgtggtgacagcagccragtggtgtctggtgtgtggaccgaggtacaaagtgggacctgacggagagaagggcttcttgggaattattcacctgagtcagttgtccttcaccaccttgagctggccccacttcctgtcccccccatccgtgtctgctcctggagttggaaaggaaataataagacagaggattctgggaaaggtggagggtctgttttttccttcaggctccaaaacagctcttcaggcatgtctatgttgatgccaagaagctgccagaaggaaaaggaaaaaaaaaa

SEQ ID NO: 51396 - DNA, 618 bp, Homo sapiens
tcaggaacaggcagccactggaaaacccagtgccaccctcaccagctgtcctcggctgccaaccctcccagcatctccccagccccaccaaaaatatgcctgagcagcagcttgccacacagggcatcatcaggtctgcgtgcccaccttccttctccctgcctgttagagtctcattgattgatttaaaccggaaacgagtattcccaggaatcttttctgagccaagaaggctcacatctagattgttaagattcatatgaaaagcccgagcgaaggcgtcccgggggtgtgattgagctcaccttccccacgcacccgtggtgacagcagccaagtggtgtctggtgtgtggaccgaggtacaaagtgggmcctgacggagagaagggcttcttgggaattattcacctgagtcagttgtccttcaccaccttgagctggccccacttcctgtcccccccatccgtgtctgctcctggagttggaaaggaaataataagacagaggattctgggaaaggtggagggtctgttttttccttcaggctccaaaacagctcttcaggcatgtctatgttgatgccaagaagctgccagaaggaaaaggaaaaaaaaaa

SEQ ID NO: 51397 - DNA, 618 bp, Homo sapiens
tcaggaacaggcagccactggaaaacccagtgccaccctcaccagctgtcctcggctgccaaccctcccagcatctccccagccccaccaaaaatatgcctgagcagcagcttgccacacagggcatcatcaggtctgcgtgcccaccttccttctccctgcctgttagagtctcattgattgatttaaaccggaaacgagtattcccaggaatcttttctgagccaagaaggctcacatctagattgttaagattcatatgaaaagcccgagcgaaggcgtcccgggggtgtgattgagctcaccttccccacgcacccgtggtgacagcagccaagtggtgtctggtgtgtggaccgaggtacaaagtgggacctgacsgagagaagggcttcttgggaattattcacctgagtcagttgtccttcaccaccttgagctggccccacttcctgtcccccccatccgtgtctgctcctggagttggaaaggaaataataagacagaggattctgggaaaggtggagggtctgttttttccttcaggctccaaaacagctcttcaggcatgtctatgttgatgccaagaagctgccagaaggaaaaggaaaaaaaaaa

SEQ ID NO: 51398 - DNA, 661 bp, Homo sapiens
agctaatttttgtatttttagtagagacggggtttcaccatgttggtcagactggtctcgaactcctgacctcctgatccacctgcctcggcctcccaaagtgctgggattacaggcrtgagccaccgcgcccagcccagcaagtagttaatacaatttacttcattttcacaaatagatcatgactttaggcaagtaacctctcttaacctggacttctcatctctaaaataaaaagactggattagatgacctttaagtttccttctactaggaaggaaataatgattctatgattattttatcataaaaattactattctgattttatcaaattataattttgattattttatatcgactaagtagattcttggactaaaatattattggactaaacaaagcatcattggtgaatgatgcttctagtatactgtacctaaatatccagttcaaacagttctagcttctctgatagtttctgcaatagaattattgccatatctattgtgattctgtctgcaagacgacatccatctctttaataatgcaaaatatacaatttaaagcagcttctaatcactgtaatcttactgcagccagaaaaatgataagaaataccatcacatgagttcttaaatctagatgccaagttactgtt

SEQ ID NO: 51399 - DNA, 661 bp, Homo sapiens
agctaatttttgtatttttagtagagacggggtttcaccatgttggtcagactggtctcgaactcctgacctcctgatccacctgcctcggcctcccaaagtgctgggattacaggcatgagccaccgcgcccagcccagcaagtagttaatacaatttacttcattttcacaaatagatcatgactttaggcaagtaacctctcttaacctggacttctcatctctaaaataaaaagactggattagatgacctttaagtttccttctactaggaaggaaataatgattctatgattattttatcataaaaattactattctgattttatcaaattataattttgattattttatatcgactaagtagattcttggactaaaatattattggactaaacaaagcatcattggtgaatgatgcttctagtatactgtacctaaatatccagttcaaacagttctagcttctctgatagtttctgcaatagaattattgccatatctattgtgattctgtctgcaakacgacatccatctctttaataatgcaaaatatacaatttaaagcagcttctaatcactgtaatcttactgcagccagaaaaatgataagaaataccatcacatgagttcttaaatctagatgccaagttactgtt

SEQ ID NO: 51400 - DNA, 942 bp, Homo sapiens
tgagaataactcggagttggaagcgacacgaagcagtgactttggaaaagaccatgagaattctggtctgaccatcatcatttacctctcttctagcagtattttaaagtcctttgtacatttgctagctaagggtgtgtatgggtgtgtgggtgtgtgtgtgtgtgtgtgygcgcgtgcgcgcgcgtgtatatgtgttataggccatattaaatcaagcattcaagcattgtaaacaattttcaggtcattataactagttgtgtgaacctgatgaataactttttctttaagttccaaatttcctcattcataaaatgaggttaagatagttaacttgtagatttatttcaggactaagtcccaataactcaatttcttagaaactgatcacatgcttgcattatttcttttcctacacatacatatatactgccccctgccctatgatgtatgtttatacaaagagtggaaagactatttttttctaacttggaaaaaaacagggacattacttctttcccacacctccaaaaatagaaagggcaagcaggtatcttagcaacagtctcttactctaattaaatagatggcaaattcaggtctttcaattggtctttctcaaacgtgtacctttaatttttttcttccaaagatttaataaggtgtaattccaggaagcattgctctccttgtatccttgtgtgatcaaaagtacgacactagcaccacctatcagagcaaaccgccaaggcaaaaatgagctccccattctgaatcagagtgcacattctctttccagccgtctctgtggcaagctccaaatggatatgagtcaggtttctatgaccaaatatgacaaaaaagcatatgccttatctttggagaaagttactcttccaatccccttctctattgccacatccttccagatccaggtca

SEQ ID NO: 51401 - DNA, 638 bp, Homo sapiens
aaagttaaaaaagccactgtgacatttttaattacctttgctataggctgaattgtgtttctcaaaaaagatatgctgaaatcttaatccccagtacctcagaatatgagcttattttgaagtgggatttttacaaaggtaatcaagttaaaatgaggtcattgggtggaccacaatccaacatgatgggtggccttataagaaggggaaatttggatacagaggcaggcatgcaaggaaagctgatatgaagggacacaaggagaacaccatgtgaagacaggggactagagtgatgcatcaacaaaccatgtgattccagagattgccagcaaaccactggaaacttgaaagaagcaaggaaggattcccctacaggttttagagagatgccctgctgacatcttgattttagacttttagscttctaccacacaatacatttctattgttctaagctacccagtttatggttctttcatacaccaggcctaggaagctcatatgcttccattacaaagctagtgtcagagcccaaaaataaatccatgcatttatggtcaatcaactgattttcgacaacagtacaaagaacacacaatagggaaaggacagtcttttccgtaaatggtgctggg

SEQ ID NO: 51402 - DNA, 584 bp, Homo sapiens
cccaggattcctggcctggttctgcagaattcttttattaatcacttattctggactgaagcctggataggtaattatcagccttagatttctactcaagcaaaattagcagaatcccacctttccccgttggatcaagcgtgccatgaaatccatgccttctttattccttcctgttggctcctgtgccaygctgccttgctggggatttgtctgtgcaattgtcaagaggccacgactgtgtgcccacgtttgcatggcacgtaagcacatcacacccaactgcaggcatgcagccggtggtcaggtctccccccagagcactgcgtactgcagaaacacacccagttttcatccacgcaggatggcttggatgccccctgcccgtgcccagcctcaggcccctcctcgggttgcctcccctgcaaccaaagtttcagcttggccgtcatcccctgcagggagcatccttgacctcttgccttggagggcctggcatgcttcacacacagcactcaccagcctgtttcacacgctcctacgcagtaagggtgtgagggcagcagcacctcttctcctcctca

SEQ ID NO: 51403 - DNA, 584 bp, Homo sapiens
cccaggattcctggcctggttctgcagaattcttttattaatcacttattctggactgaagcctggataggtaattatcagccttagatttctactcaagcaaaattagcagaatcccacctttccccgttggatcaagcgtgccatgaaatccatgccttctttattccttcctgttggctcctgtgccacgctgccttgctggggatttgtctgtgcaattgtcaagaggccaygactgtgtgcccacgtttgcatggcacgtaagcacatcacacccaactgcaggcatgcagccggtggtcaggtctccccccagagcactgcgtactgcagaaacacacccagttttcatccacgcaggatggcttggatgccccctgcccgtgcccagcctcaggcccctcctcgggttgcctcccctgcaaccaaagtttcagcttggccgtcatcccctgcagggagcatccttgacctcttgccttggagggcctggcatgcttcacacacagcactcaccagcctgtttcacacgctcctacgcagtaagggtgtgagggcagcagcacctcttctcctcctca

SEQ ID NO: 51404 - DNA, 2080 bp, Homo sapiens
tcaaaatgtatttacatcttagttactttgaatgagacttagagattttcacacatgattataatcaagtattttaagtaaaagtaaactagttttatgtaggttatgaaatataggaggaatatctctagcacatgaggaatcactttcccatattagaaagactacttcctttcaaggaagagtttatcaataattaataatttcctcctcagttaaaaaatgttttacacattcaaaaagtaaaaaagaatacaaaatcaatgagaaaatattcaaatatataaacttatataaagtgaaaataaaagactcaatcacctctagaaaaaaaccctgattgacatctggatatgtgtacttcagtataattttccgagtccatttgtgcattattttaaattgtctatatttttgtgtaagttgctcttttaaaaaacattaataatgtattgtggtcattaatccacaatcattatgcatacagattgactgtcccttttaacaattgcataacaatctatcaaagaacatcttttatttatggccttctaaattatttccaccattgtttttatatattcagtgtgtgtgtgtgtgtgtgtgtgtgtgtgtgtgtgtgtgtatacacattatacatatataaaatgtatatgaaatgagtatattcacaagggtaatgctttatatagatataaaagtatattaaaatatctaatatatatgtatctatatatgtatacatactatataaaacatatatataatctgttttattcattacaacatgcctatacacatgtatgtcttgcctctattaaaaatgtctttgaagcatattataaaaagcctaattgcatgtcatcaatgaagatatatttaattccaaaactatatatatacatatatatatatatgattatttttacctatggaaagaaaaatactgcttttcccagatatacattattacagttaaataaagcaaaggagcaaatgatttctaaagaacattgttcaagaagagtaacaacagattctctgcaagataataatcttccaaatatgtttatttcactaagtaccatgattcacacatctcttgggtagtgcacttacttataatgaagaataaatcaggttaaaattactgtaaatcaagtttctgcagatgaatttctctagctgcagaaatgctaatatgaccacctgcttcattttatcaagctggttttcattaatctacagatgttatttttccactgcatactatttgagaaatgattgtgattgggtggctgtcactttgacagtggagaagccacaccacctgtttgttgggaaaatacacaaagtaatgtttccttttaaaggaactgctgtagaatgaattttaaaacatcaatgtgagagtaataaatcatactttatgctaaattaaaatatatatgaggagactatgaaagccatacgtttaaaaatttcacagaaatggaaaaaaaagactaatgttaaaaatgagctaaaagtaataggaagtcaaatattggggataaatatttttaatattatcattttgagttgctttcagaaagattcagcgtaagaaaacatccatctaaatttatccctaattcagtcattttccccaaagtaaattaaaaagtatcaagaaaatcatatgtaaaaagattcaattcacttcatactttttytcatacttagtagaagattaatattagaaatttagagattttatacataatgtcacaaccataaatcagaattaagaaatctgccaatgttgcttaatctttgcatattttaaacaaatacttactaaataagaatgatcatttgccctgtgcataaccaatagtttatgactaaatataggaattgccaatattcagaagtccttatgcagccagcttaatggacctcattttgtgcctcattatatgaaacacatgtatttccttttagcacctgtctaaaaatatgtaagagatttcctttttagtttatatttgttttaaaaatatctctacatgtatgtacaatgttaacacatataaat

SEQ ID NO: 51405 - DNA, 619 bp, Homo sapiens
aagtcattatcttaaagcaaagtcctttaatcattctgcaaaattcaacctttttacccagaagaaaaatataattcaaatgtgcaaaacaccatacaatactagttgctctgtgtttcactttccctcatcccgccaagagaaaaacctcaaaatattccctttagaaactcatcaaagagaaaccacaaaaaaagatcatcctgtttttgtgtgtttttaaaacaactaacaaaaatttaattatatagaaggaatagaccagttacttcactcgtcaaaccatgggtcagactaascattctttttacagggaattgaactttcaatgaccttaacttccaaagaaacagtatcttttcacatatctccccttcagtaggctcatttggttcttagtgtggttggctctgagatattctcaagtcctttctgaggtttagaagagcaatctaccattcactgtgtattctgcaattatgccttttaaaattctcattcattgtctctctcttctctgtttgaaaatggtaaattaatatatgcccatttggaaaagaccacgtttgcatagatgggaagggctatattttgcacaattagtaaaagcctgcaattg

SEQ ID NO: 51406 - DNA, 584 bp, Homo sapiens
ggtgttaaggctgaacttgataagaactgtattacaataaatcacactggtagcagcatggatggaatgggattgtatcagaggcagagaggctagcatagtgtagaggctctcattctgcaagtaaaaaataaatcatctaagaattaatgaggatctgagctgaaattgtgattgtggggatgaagaggaagagagcaattgaaagtatatttttggaataaattggcagggctcaggaatgtggtagaatgaagaagataagagaattcttgcactctctggaaaagctttcagcacaaggagaatggagwttagctttccctatactggatgaccctcagtaataattaaggtatttgaatgttctgtccttaacacctgagcttgataaagaacctactttcagttctttgatctgtgtgtaacccagcaatgcctctcatccctagtgttcaaccgagtttatagtctttgccagagaaaagaaagcatcattagagaaacaggccaccagtttcttctcctgacacttggatacttcacaatgtgagttaaatgattacttacatgcagtgatttta

SEQ ID NO: 51407 - DNA, 567 bp, Homo sapiens
tgtgcggcaaggacccagcgcctcctcctgagcttatctgagccacgaggacgggccttgcccatgttctctgctcactcactcgtccacattttccacattttcagcaggggccgggggtcgggggtatagarttccccaccagcccggctggggctgcggggttgggactgtcatctggaggctcagaaacgctgcccccccttgtctgggaccccagcagccccagcccatgttagcaggccagggagccagggcagggtggtgggggcgggagggttccccatggctgcttcccatgaactcctccaaggcaggcggccacagtggcgaccttgagcactctagggtcagtttcccaggaggtgggggtggggtggctaaatgcggggggtcgcttctccccgattcccagccctgagtggctctgcctctcctcaggctcagaccctgggcaaccaggggtgctcccagctgtgacctccgtggttgggtactcctgcctgggaccccaggaggggctgcggtggtcgttggctggcagctggcaccctttccagggccctt

SEQ ID NO: 51408 - DNA, 567 bp, Homo sapiens
tgtgcggcaaggacccagcgcctcctcctgagcttatctgagccacgaggacgggccttgcccatgttctctgctcactcactcgtccacattttccacattttcagcaggggccgggggtcgggggtatagaattccccaccagcccggctggggctgcggggttgggactgtcatctggaggctcagaaacgctgccmccccttgtctgggaccccagcagccccagcccatgttagcaggccagggagccagggcagggtggtgggggcgggagggttccccatggctgcttcccatgaactcctccaaggcaggcggccacagtggcgaccttgagcactctagggtcagtttcccaggaggtgggggtggggtggctaaatgcggggggtcgcttctccccgattcccagccctgagtggctctgcctctcctcaggctcagaccctgggcaaccaggggtgctcccagctgtgacctccgtggttgggtactcctgcctgggaccccaggaggggctgcggtggtcgttggctggcagctggcaccctttccagggccctt

SEQ ID NO: 51409 - DNA, 567 bp, Homo sapiens
tgtgcggcaaggacccagcgcctcctcctgagcttatctgagccacgaggacgggccttgcccatgttctctgctcactcactcgtccacattttccacattttcagcaggggccgggggtcgggggtatagaattccccaccagcccggctggggctgcggggttgggactgtcatctggaggctcagaaacgctgcccccccttgtctgggamcccagcagccccagcccatgttagcaggccagggagccagggcagggtggtgggggcgggagggttccccatggctgcttcccatgaactcctccaaggcaggcggccacagtggcgaccttgagcactctagggtcagtttcccaggaggtgggggtggggtggctaaatgcggggggtcgcttctccccgattcccagccctgagtggctctgcctctcctcaggctcagaccctgggcaaccaggggtgctcccagctgtgacctccgtggttgggtactcctgcctgggaccccaggaggggctgcggtggtcgttggctggcagctggcaccctttccagggccctt

SEQ ID NO: 51410 - DNA, 525 bp, Homo sapiens
ggagtgcaatggggcaatatcagctcaccgcaaccgctgcttcccaggttcgagcgattctcctgcctcagcctcccgagtggctgggattacagacatgtgccaccactcccagctaattttgtatttttagtagagatagggtttctccatgttggtcaggctggtattgaactcccgacctcagatgatccgyccgcctcggcctcccaaagtgttgggattacaggcgtgaaccaccgtgcccagccaagatctacactattatgtcaccccagaaagtgaactctcactcttcccagccagtctctttcttatcataggttagcttgcttattctggaatttcgcgtatacagatgcatgccatgccataggtactcttttgtgtctgctttattctgctcaacaccatgtttctgaaatcattaccattgttgtatggttctctaactccatcatttccatttcagactcacgagttcaaccagttgaagggctatctctgtttaattcaccatcttga

SEQ ID NO: 51411 - DNA, 656 bp, Homo sapiens
aatccctgaatctaacattctgtaatcttttactcaataatactaacattggtataataccagagtttttcagatatcttaayggaacactcttacatacaatgtactatttaaaaaatatactccaatggaaaattttaaatttccaacaaatttttaaaaatatattttattttacataagataatgctttattagagatgcacatcaagaaaatagcatgatgaattataatttctctttatttgcttatgagcagctcttgacctaatcagaattacaaatgaaagagaaagaataagaaaacattaacattttgtgacttccaaattaggcttttgataaacaaaatggaacaccttaagtgtaattataatgtagaacttattacatttataaaatcagtttagaggggcaaaaaagaactagactgtccttctttcaggccttgggagagacttgatgagggtaaatttagtttgcatcggaaattttctagaaaaggatggggaaatacaaagactatggagacagcagcataaagtgctgagcacaattgccggtgctgagtcctaaggaagcagaagttatgccctcagtctccattccaggaaggcatcatggccccgcaagtcgggatcaaagccagcacgcct

SEQ ID NO: 51412 - DNA, 659 bp, Homo sapiens
tggacagattggtctcgaactcctgacctcaggttgatccgcccacctcggcctcccaaaatgctgggattacaggcgtgagccaccgctcccggccgaatctctcaacttctcttctcagtccgttttaagggccctgtttctttcaagtcaggctttttttggctttgctcttgggcatgtggaactaaatgcttctgacagccccacacattcttcttcagggctggttctttacctgtggcttgactttatgctggtaatacagaaatattttatgccagtaatacataaatgatgtacattataaaataaacaatatcaacacagagatttatagaggtaaaaagtcttaagttttctttttcccgtcttattgttgtcctattcctrtttctttcttcagaggtaaccataatatagggtgtatccttctggattttttccatttaatactgtagatgaaatatataaccctgtatgttaaaaaaaccatttcatgaatgcctactaagtaccaggtactattttaatcactagggttgcaaaaataagagacagacgctttcaagatgttcatagtctaccaggacaagcaattacagtgcagtgtgataagtaccatgatagagtcagtaatcagtgagggatgtaggagc

SEQ ID NO: 51413 - DNA, 567 bp, Homo sapiens
tccaaatttttgaaattggactaaagcaataccatattcctagtgtctttagctgcctatagaagcaaatttatctccattctgggggaagataatattttyctagatgccacattattttttatagtttttttgtatacaatgttctgcacacaagcaaaaataaccaaacacacaaagagacaagacaacagaaataaaaacaagacaaacaataaaaaacagaaacataaccacaggggaagaagttaatagcattatccaatgtaagcttcaaaataactatccttaacatattcaagaagataaagacaaaactgagaattttgtcagagaagtgaaaaattataacagaaagtaaaaaaaaaaataactaaaattaaggactcattagatgggtttaactgcagacaagatgagtctgaagaaagaagtagtaaactggatgatcagtcaggagcagatatttaggatgaagcacaaagaagtgcatggatgggaattgcaaaagagaaggtaagaaaaacagggaacacagtaagaatatctaacatacatgtaattgga

SEQ ID NO: 51414 - DNA, 653 bp, Homo sapiens
ttttattttcagctctgcttctcaccagcttgtgtgatattgggaaatttattcttctgctctggatcagttttcaatatttcaaatatgcgtggacctgtttccaaagagctaaaagacctccagaggtcctctcattattaagatatgatgatgctaataaaagcgtaacatccgaaatgctacctattacttctgtggaatgatttctccctggatgccttcttgttgcttactttcatttccttcagagaaaccaacaacccatagaatgttgcctttacagtactagaatggattgagggcatatcgagaaaaaaaaattccagcaattcctcttttagctcatctcacttctcacattctttattgtaggcaattaaaggaaccacttggtgcattcrccactctgcacggaaattttattagccagatttgcaagtttattagccacatttgctatcttccacataagaaggtggcagcttcactgatttttgtgccaatatcattaaggtccatttgttttttgctctttctaacagtttcctcaaggtttttagtccataacttccacctgatcataaagccagtgctgcatattttgatattttgttgctgaagcacccctcttctggtgtcattctatcttt

SEQ ID NO: 51415 - DNA, 653 bp, Homo sapiens
ttttattttcagctctgcttctcaccagcttgtgtgatattgggaaatttattcttctgctctggatcagttttcaatatttcaaatatgcgtggacctgtttccaaagagctaaaagacctccagaggtcctctcattattaagatatgatgatgctaataaaagcgtaacatccgaaatgctacctattacttctgtggaatgatttctccctggatgccttcttgttgcttactttcatttccttcagagaaaccaacaacccatagaatgttgcctttacagtactagaatggattgagggcatatcgagaaaaaaaaattccagcaattcctcttttagctcatctcacttctcacattctttattgtaggcaattaaaggaaccacttggtgcattcaccactctgcmcggaaattttattagccagatttgcaagtttattagccacatttgctatcttccacataagaaggtggcagcttcactgatttttgtgccaatatcattaaggtccatttgttttttgctctttctaacagtttcctcaaggtttttagtccataacttccacctgatcataaagccagtgctgcatattttgatattttgttgctgaagcacccctcttctggtgtcattctatcttt

SEQ ID NO: 51416 - DNA, 1824 bp, Homo sapiens
tgtagtgaagacccatcagtcccaggcaaacccagatgtttaatcatcctgatttacccatgatccctctcagaagtggtccaggagcaaagctgcagcagagagaattcgtaagactgatcttgcagcaatttctcctggttctctgaacaacactgatcatggttctttcctggcagctctggtcccttagacgaggctgacagtttcctagaaagaaacaatccctcaggtcattaccgttttcatttcagagttaatcaaattcatcaaaaaagatttaccagatgkttattatttgcaaaatacagtgacaaatgtggctggagacatgaaagtattaaaaaactattcctgccctcaaaaaaaaaaaactaatttaattgtgaatacaacacaaaaatctgcaggatgaaaaaagcctaagtaataataaaactgacacagagggcaagcgtttaaaaaatcgcaactcagaatatgattaattgcaaatatatccttggaaaaagagtggcttttagactcagaaaattcattttgttttgtttttttaacaaaataaaggtagcttttgtaatgacctgctaccattggttgaacaaagcagaggagaggaatagttgtcacttcagacaactttttttttttccgagttagagtctcactctattgcccaggctggagtgcagtggcacaatctcagctcactgcaacctctacctcctgggttcaagcaattctcctgcctcagcctcctgagtagctgggattacaggcgtgtgccacgacgccagctaatttttgtatttttgatagagacaggacttcaccatgtttgccaggctggtcttgaactcctgacctcaagtgattcacccgcctcagcctcccaaagtgctgggattacaggcatgagccaccgcacccagccacttcagacaactttttaagcttgaaaactatgaacacagcctttaaagtgagacacactgggtcccaacatcatcgctgtcaccaagtaagggttgggaaactcaccaatgcatttttttctcacctgaaaaattgggataatctacctccatcatagagttggtgagagaattccttgaaataagctgcaaattattattatcaggtgtccaataaatagtttctgtcatgatttgtgtaagtattaaaaggaaaatggcaattatcacttcatcttccctccacatttttcaattgctttcatctgaaaagtctggtgcaattcaaattgcatattaagtcacgagtgctgcttcattgcctctgtggatttaaaagatacagaggactctcacatgttcttgtctgaatgcactttcattcaaaatgctttacattttgaaattgtcaaattcaggtcatttgtgatgcaaaaattagtatggctggcaatgcacttaaacttatgcttacaaccttgtcttaccttttttcctatcatattagttatctattgctacataacacatttcttcaaatgtggcagcttaaaccaacacatgtttattatctcatagcttctgtaagtcagggagctgggaagggtgtaactgcatcttccactgcggggtctctccgcaggctgcaatcaaggtgtgagctgggctgtagccatcttatggctcaactggggaagacttgcttccaagctcatgagactgttttcaggattcagttcctctcagacagttgaacttatagtctcagttccttgctgctgttggctggcagccaccctcagaagttccttgtcatgttggcttcttcatcatggcagcttgcttcctc

SEQ ID NO: 51417 - DNA, 627 bp, Homo sapiens
ctgcagttttcttttctctgccccgggatccctgtgggggcgcgctggtctcgctggagctccgggagctagagtggcagcaccttaggtgggcgtttggtctgcaggttctttaggaggccggtgtccgcaggttgagcgtggatacagctcctgagcaactggaatctgttgagggtggggaagactgattttggyttgctttcctaggtggtggtctgctttgctcatcctgcatgattagatctgttctgaagtcttgcctgagtgaatgttaggcagagtcggatagtgcagggaagcgtgttctgtctggcttctttctgtcctttgaaaagcatttgtagagagggataacgtcaaattcagcctccagaaaacaatggaatttgaaatcccaaagctagaactctgcaaaaacgttttctgtgacctgtaaggatggttaatcgagcttttttagagaattctgcttaacagtttcattgtattgtaaaagtgtatttagccttggatattacagaggttttggtaactagcgtaggcgtaggtgggatttaaataaaatgacttgtatgtatgtgtattggttaaaaaaaaaaacagcgtataggtgagaaagcctat

SEQ ID NO: 51418 - DNA, 527 bp, Homo sapiens
ccctctctgccaaatggagaaataagggcacctaccccatagggtagttgtgtgattacacaagttaatacacttcaatcagtagcaagaaagtgaatgtcaagctgtatttgttcaggcagccatatggtagccccacgtccttagtaaactgaggtattgaagtatcttctttttctttyagaaaatatttgtcaagcaccttctgtgttctaagaactgttctagagctttgcatgctatggaggtctagaaattcacattatggtggcaggtgacagacaatacaaagagataaagcaatttcatatagtgataagctagggaggagtgctaaaaggagccaaggtgtagtggtgactggaaggtgaccagggaaaccactgtagggtttctaagtgatgagatctgtgacaaatccctgtggtcagcagcaggcattggatatgtaactttattctgtcccattgatcttgtagtcaaccctggtctgttctgtattggtttaattacataatctttgtaat

SEQ ID NO: 51419 - DNA, 548 bp, Homo sapiens
tgtcattacttwtgttaattttctcaatttcctccatgtgtcaaaattaatatcatctcagcaaaccaaataagtactctagcctcctcttgccacctctggtttgctttctctgttacgacagcactttgtctaaggtggtactttctgaagtttactcggagttgttttcaatatgttatgttttcatgtatgttttagggtatgataaacaccactaccattgattctggaaccctcaattctaacaccacggtgtatttctcttcttagtggagtatgtcctctaggcattttcaaagggatttatttgaaataaaacttttgaggccttactttataatgtctttttctgtgctttcatatttaaaagattttggctgcaaataattcaaggattaaaaattgtttccttttaatccttgaaaaatattacttcattttattcttgtctccagcattgctgttggaaaggctgatgccaatcaaaaccaatttttccctaaaggatgatctgtcttctcatcattttgacaggatgtaacaaa

SEQ ID NO: 51420 - DNA, 581 bp, Homo sapiens
tctcaaataaagtacatataaatactgttcaatatatttattattacatgcatagtgcttcaggaacaacacttacacgaacttaacatcttaacatctgagacactatataaaattgctaaaaatcattgaacactggcgaatgtatgtccacccacacacacccccaacagaatgatgttcaatattgaacaagtgtcatattatacaataccatttacccatactagttgagagaagcagagatcattcaaaagagactagccaaagcctttatacttaattgtaaggttactgtaagaattttccccatagaactacttttcttgaaatattctatttagtttcgaagaggaaaatttttcagacattaatttgatttcacctgtatttctagtcattcatataactttctctctcaaaaaaaaaacccttaatttttttatgtcaatgttgttcagtaggtgttattaatccttaatgtgttaatgatcttccttaggataatgttcccaactcttcataagaagaagagtcagttctccaattaccaaaattaattcttagtatrcaacacattc

SEQ ID NO: 51421 - DNA, 604 bp, Homo sapiens
tgcatgcttgatgaggccataatgtgatgtacaaatagaaaagcatagaaaaatgtgcatgggtaatggtgcaatgagatgcataaatagatgagtgtaatgataaagacatggggggtgtaatgtgatttacaaatgggagcattaaatgggagggtggaaagggcaggttgtggtagataagaagcagagagaaagaatgcagtactaagcatgaatggaggagctaatatgtgcatgatgaggatgtgatgagatagaaatgggatggcataaggcagttcacagatggaggggtgtaatgagttgtgtagaaaggagggaataatgacaagcataaaaggagggatttaatacgaygaagaaagaaataggcataagaagatgtgaagactgaaaggaggtgcagaaaaaagggacattagtgaagagacgggaaataacaaggtgggccaatggagcactctaatgaggctgaaataaaaaggtgcaatgaagtgtgtccattcagggaataattagacacacacacaggatgataatgaggtacccaggccctgatcagacatagaccatggcactcagttcttactgaggaggccaa

SEQ ID NO: 51422 - DNA, 604 bp, Homo sapiens
tgcatgcttgatgaggccataatgtgatgtacaaatagaaaagcatagaaaaatgtgcatgggtaatggtgcaatgagatgcataaatagatgagtgtaatgataaagacatggggggtgtaatgtgatttacaaatgggagcattaaatgggagggtggaaagggcaggttgtggtagataagaagcagagagaaagaatgcagtactaagcatgaatggaggagctaatatgtgcatgatgaggatgtgatgagatagaaatgggatggcataaggcagttcacagatggaggggtgtaatgagttgtgtagaaaggagggaataatgacaagcataaaaggagggatttaatacgacgaagaaagaaataggcataagaagatgtgaagactgaaaggaggtgcagaaaaaagggacattagtgaagagacgggaaataacaaggtgggccaatggagcactctaatgaggctgaaataaaaaggtgcaatgaagtgtgtccattcagggaataattagacacacacacaggatgataatgaggtacccrggccctgatcagacatagaccatggcactcagttcttactgaggaggccaa

SEQ ID NO: 51423 - DNA, 552 bp, Homo sapiens
tgacatttatcatctaaattcacataaggatgttttactacctgcttctgtttttatttctgacccctgcctgatttcttgtactttaygcttctacaaaaccaatgttaatccatgcccttgacttggcacatgacagaatcaggagaagtagaaaagggatgaagtaaagataaacttgagagacaggttgattcagtgtctaaatgttattatcctaactaaagtgtaaatatcacaaaacctaatattaccttaatatagtaaacatttgatatatttttgttagagtggattaaaaagtggcatttgtggttttatctggcttcagattcattaggaatgagtgagtgaaaggaacctaaaagggtgagttcatttgtacatgaacaatttaatcctttttcggtctcaatagctattattgtggctaacaaagcaactcttataagttgcacacaaacaagaagtaggagagtgtttatgatgtcatcataaatatttataatagggacatgatacaatgttttgtgagacattgttgagaaaggt

SEQ ID NO: 51424 - DNA, 537 bp, Homo sapiens
ggaaaatgttttatgtttaattagcgaaactgaatataaaaatttactatcaagtgagtaaaaaaatgcccaaatcctggaaatgatatataaaaacgttaacagtgtttttctttaggtggaaagattgattttttcccctcctttcatatgtatttagtgaactccaagttttttccatcacatgatttcagtctctaaaaatccgtgatccatcacgccaactrgattttgtcaattttaccctctatggtttgtactgtgcaaaactaggcttcactttattttccaaacaaaaaatactattactgagtatgttttctcaaattaccaccccactgcccaaaaaatgacacctgccacactcaagattatggtggcccccaggaggtgtgcccatcccagccctcactgggtgcaagctctctctttcttctatcatccttctgcagagaaggattttgtaattgttgttgctttgttttaaagtgggaaagaaaaatattgacgaacttaaaactcgacatagacagagac

SEQ ID NO: 51425 - DNA, 579 bp, Homo sapiens
gagaaagatgcagtgtttcatcattacctacccatgataaatgctgtaggggttttttcttattcaactgcagatgattcacattagaagctgcctggtgaccagactaactttcctccctacttgggcaaaaagttgtcacctagccaacacatttcctgggggtagactgtgccttgtggattccatcagctttgctatttacttctcccttcaccctggcagttaacatttcaaccctgatggccacggccacctgttgctcctcctcccccctcagatctaaagtgcgtgtcacctttctaggttctgggtcacatcttctgggctggccaaggcctgggcgagagaaccctgtatcctggaactgcctgggcattggaggaggtgatgggttaataacaatcgttttgcaggcaggggaggcgagggggcaagaggaagtggaaacatgacgtgactagggacgctgccccaggctgctcgctgcccgctcctgacttctcccatctggtttccatctgacccaagcagctrgccagatggttttcatttgcagatgaaaccccagcagttcca

SEQ ID NO: 51426 - DNA, 459 bp, Homo sapiens
tccctgagagctgctgggaggaccagcagcagtggccagcacttgcagtgcctggcagcatttgcaaggtccctcatgggtcctttcccacagggtcccaggatgatgagcgtgaaatgagaccaataaaagattgcacaaatcttgttggactcacacataggatggaaagcaatatccatgtctgaaacatgttggagcaggccttccaccaagccctttagaaaaagggttgtatgtgttgtgtagagcaaacctggctgacaggcattagcatgcccattttacagatggtgaaacgggatctgagaatttacgagccttgctcaagcttccacagctatgccaatgccgccakcccgccatccctggggttggagccagggcatgtggggtgatgtttttcttggtcgtgagcagatgggctagtgccctacctgcacagtctcaccgtagctc

SEQ ID NO: 51427 - DNA, 424 bp, Homo sapiens
aaccattcaaatggtcttttggcctccttcatgctcaccatatagttatcactgatgggaatttaattcaaagtccaacaagcaataactgcattaatagacttagtttcacttgatatatcaagtttatgaagaaagaaatactttcttcacataacaaataccaaaacatacaacaaaatgtggaaggttgtattctcctctctaggaaaccttatgccaaaataaattctaagtaatcacaatttaaatgtcataggtgaaaccattaattgtttaattaaaggtacatttgtaaacattctaaaaatatcrtcaaaagcaaaaacactaaaaaaatgattgagaggtatgggtaaactaaaattagttccttggtagaaaagagaaggatgactaggcagagcacagaggatttttaggg

SEQ ID NO: 51428 - DNA, 424 bp, Homo sapiens
aaccattcaaatggtcttttggcctccttcatgctcaccatatagttatcactgatgggaatttaattcaaagtccaacaagcaataactgcattaatagacttagtttcacttgatatatcaagtttatgaagaaagaaatactttcttcacataacaaataccaaaacatacaacaaaatgtggaaggttgtattctcctctctaggaaaccttatgccaaaataaattctaagtaatcacaatttaaatgtcataggtgaaaccattaattgtttaattaaaggtacatttgtaaacattctaaaaatatcatcaaaagcaaaaacactaaaaaaatgattgagaggtatgggtaaactaaaattagttccttggtagaaaagagaaggatgactaggcagagcacrgaggatttttaggg

SEQ ID NO: 51429 - DNA, 651 bp, Homo sapiens
gaactaaaaaggggcatagaggaattatgaaacagcaaaaagggatgagacgggtttctttttagaaaagggaggactggaaacgcataaaaaacattcattgtcatcgtcaccagcagagagcatccattaataactccttgaaagctgagttcctgacacaattaaaaagttgccatcctttacttaatgaagccaggaacgcctcagtggtttagatattgggtttccctcgggagtttacttcccacactatggctgtctctcggctgaccccatgccggcttctttttaaaaaggtcctctgggcgcactaattttgaaaaatcaaattaggtttgctttttattacctcgtctgagctctgttttgtgygcatggaggagtggcccagagcactggccgcattaacattccactgtgcacacagcaccccaggggcgcagagaccctccacggaggcttggaggtgaaatcgccgcttggctgcggcccccacgcagctaggggcacacaaacctcaattacgaatgtgtgatcaggggaactttgaggtgctaattagatgatattcttgtttattgataccataaaatgctatacaatacccttgtgcgtaaaaaggtataggagaacactcctacaaacaca

SEQ ID NO: 51430 - DNA, 651 bp, Homo sapiens
gaactaaaaaggggcatagaggaattatgaaacagcaaaaagggatgagacgggtttctttttagaaaagggaggactggaaacgcataaaaaacattcattgtcatcgtcaccagcagagagcatccattaataactccttgaaagctgagttcctgacacaattaaaaagttgccatcctttacttaatgaagccaggaacgcctcagtggtttagatattgggtttccctcgggagtttacttcccacactatggctgtctctcggctgaccccatgccggcttctttttaaaaaggtcctctgggcgcactaattttgaaaaatcaaattaggtttgctttttattacctcgtctgagctctgttttgtgtgcatggaggagtggcccagagcactggccgcattaacattccactgtgcacacagcaccccaggggcgcagagaccctccacggaggcttggaggtgaaatcgccgcttggctgcggcccccacgcagctaggggcacacaaacctcaattaygaatgtgtgatcaggggaactttgaggtgctaattagatgatattcttgtttattgataccataaaatgctatacaatacccttgtgcgtaaaaaggtataggagaacactcctacaaacaca

SEQ ID NO: 51431 - DNA, 628 bp, Homo sapiens
ctgcagcctcaaactcctgggctcaagcaatcctcctgcctcagctcccaagtagctgagactacagatgcgcaccaccatgcctggccaagtttttaatttttttatagagatagggtcttgccatgttgctcaggctggtctcgaattcctggccttaagcagtcctcccatctcagcctctcaaagcactgggattacaggtgtgagccaccacgcccagcccatatcagatttctaacaaagaataggaaaaggagcagattccgagttttccacccctctgaattcatgctgatactgtttgaatrttaggcctctttatgaataatattgggtctctgcagaagctgttttccgcaacctgcacttgttgatgctcttcaacaaatttggaaggacaggaattggaaatcatgtggctaagatcatatggtcaaggaccttgggcatcttcttcattggtgtggattcagcagttcacaaagtgcctggctaaaagtagaggttcagtaatattcctgaggaagcatgaacaaggagatggtgaagtaatacagaaaaaggggggaagccaatacagggtgcgtttctgagcaattgagacaattttactgggggttctggg

SEQ ID NO: 51432 - DNA, 593 bp, Homo sapiens
atcccagctactcaggatgctgaggcacaaaaattacttgaacccaggagatggaggttgcagtcagccgagattgtgccactgcacttcagcctgggcaacagagcgagactccatctcaaaaaataataataataagataccattttggggggaaaatattgggggaaatatttaaaatattggtagcattcagtgctgacaaagatattgtgcaatagacattgygatatgttgctgttaagactttgagttactacaagttttggggaaggaaacgtagcagtatgcaccaaaataaaaaatatgatacccctttacccaggaattgttcttcctgaagtctctcctaaataaatgaaagtaccagaatataaagctattcatataaggatgtttactgaagcattatttgggcaaaaattttggaagcaactcgaatgaccaataagatggaaaaaatgaaaaatttttatatattcacactaataaaaatagtgaattagtgctatatgtattgccttagtaatattcgagatatattgagggaaatcaaaaatttgtactataatgtgcatagttcaatctattca

SEQ ID NO: 51433 - DNA, 622 bp, Homo sapiens
acatggtatttggggcagaaaatgtaaagaaggataagtcacaatccctgaatatcagtagctttccacctagtagaagaaactgaatgcaatgatatctataatacagataatatttgacaaackctatgatttattcattcattgaacaaaaatgttttatgcatctctcatattctgaacactatgggagattctggggatagagacatgaagaaggcagagacattttgtgacctcacagcttggtgggaatgacagacatttaccaagaattaaagagccttcactatgggccagacatgtaagaaccagagatagaaaaccctgagtaaaggtgctgataacttaatgaagaagagcaccagaaaataagcaatgactaagtattatgataaactcacaaaaaaggtgtaggtaggacattacaaaaggacataaaaaatgaagccatcatcctattttctaatcatgtatttccatacgttgttttattacatgctatataaatatgggcaacattttacaaatgcttggtgagtgacttattatatgttatgttgaatgtcacagagtgatatgagaatgtagaggaaaaattactctctttggtattttcaga

SEQ ID NO: 51434 - DNA, 636 bp, Homo sapiens
ttaaaaaatagcaatgccagagacctaaaggttattctcattcactggtgatgtaaagggaacaacctagttacgtgacgatttaaaatactgacccaaactttagaaatgcaaagatctccagggggattcctggctttatgtttcgatcagtcaatcaattaatctagccatctatcaaatcatcaagttatactcaatatacaaaaactgtatatttaaaatttacaataattgcatatatttaaatcatagaatgtaatgtcttgacctatttataaacttgtgaaccctttgtaacaaakataatgaacatatccttcacctcccagagtttactcatgcctctctgtaatcctttgctcccacatttgctcattccccactcctcatacacatagagtgttctcctttttgtcttgtcttttgtttcatccagaaaaattattttgagatttatttttgagatccatatttttacttatgccaatagttcatttcttgttgcttaatagtagtccactgtatataatcaccacagtttttctatatttcatgatggatattgagggcattcctagtttttggctattacaaataaaactgctgtgaacatcaatatgcaagtctttgcat

SEQ ID NO: 51435 - DNA, 549 bp, Homo sapiens
tgcccaagaaggataaaaagctagggcttggcaatgaaggagaagctctgagatgtcaaagcactgattgagtcagcactgaaggctttgcacttggggttagcaaggcgaagaggagcaagcacaggcttatagaccagcagaaagcagaggtcgaaggaagggagcatttaatatagtacctatggctctgcatgtgggaagtttgggcaaagtattgagtgtaccaagcttactggaatacaaggaattaggttttgaggtttaaattctagttataygtaattttgtgacatagaatttataataaatgctattaatagaaaaattatactttctctgagcttcagtaacctcatttgtaaaatgagtctaatgatgctattcagagttgtttttaaattaaatgagattatgtgaaagccctttgtggctagcaacagtctatatgaatgaaagacacatttgatttattgtaaattaaaagtgaatgatggctttaggttacacgtggccattcaattccaataaggccattataaaataatt

SEQ ID NO: 51436 - DNA, 506 bp, Homo sapiens
agtggtcattgccctggtacgtggtctgatagagcacctctgtttgtaaatctgcaggtgtttcaactgcaaaggaaagggggccaaggcaaacagcacataacatttccacttctattcagggtacaaaccaagtcacatagcaatctctgcatttaagggggcagggatgtggaattctcctgcagtgtgaggaattgaattgagtagttatgaataacaccctgatttgtccttcaaatattgtctcaggtagcactgtaaccatgaagcagtcccagtgaaaagtcaggacacctgtaatattttttcctcttttcatgatacagttttcatcttatttttttgttatttgtgaatgctatgatctgaatgtttgtgtcaccttacaaatttatatgttgaaattctgacccccaaatgatggtattaggagaaggggctttggggaggtgattatgtcatgaaggaagagacctcatgattgggattrgtgctgttctcac

SEQ ID NO: 51437 - DNA, 474 bp, Homo sapiens
gggggtggtgttggagacacttgtcatttaacaaatattcttcacagttttttcaagaattaggattatgtatttatgttgtactcatgttttcctatctttatctagataacattgttattttatctatgaaaatgtagactgttatgtagtatttatatatatagttataactatttttatagtttattcttataattattgtaactatagcacatgttgtattatccaaagtagaatccacttaattttctgcaggtatggtgttctaacatgtacacttcatgaaatgctttctattacttatggttattgtgtcttagataacatagccctgctcatagtaaatctggatctaggttataggtgttctcacctatatcacacataaattagcaccagcaacagccccggtatactctaatgttttatgacttttatttattatgataaaagtaaatttwgttatactcc

SEQ ID NO: 51438 - DNA, 596 bp, Homo sapiens
taaatatatatcttatggaacaagacattattacagaaattaataaatatctttaacaaaataacaaaccaatattgaaatgttttacaacaaatgcttagattactgtgcaagcagtgcctatacctatatagcactttcagtattgttgcttcatattatcatatgaaatacatttataytttataaatcttcttttttgcagattggctaagattatgtatttttttaatatttaagtctttttattctaaaaattttgaggaatcaagcacaaaaccattacatatggaaagatgagtaagagaaggaaaaaaagataataaaaataaaagctacaaaaataaaaactgaaaataaaatttacactgtaatgtatataccattaaaatttcatagcaaataaagaaaactactttgtttagttcttgccatcatacatgtatgcacacacatattattcaaactgtttactaaaaagaaatggaaaaatagataacttcaaaagataaaataagttataggttcctttatctttttcattttattttaaatacttttagttgcaggtaagtaatatgccgggaattccagag

SEQ ID NO: 51439 - DNA, 596 bp, Homo sapiens
taaatatatatcttatggaacaagacattattacagaaattaataaatatctttaacaaaataacaaaccaatattgaaatgttttacaacaaatgcttagattactgtgcaagcagtgcctatacctatatagcactttcagtattgttgcttcatattatcatatgaaatacatttatattttataaatcttcttttttgcagattggctaagattatgtatttttttaatatttaagtctttttattctaaaaattttgaggaatcaagcacaaaaccattacatatgraaagatgagtaagagaaggaaaaaaagataataaaaataaaagctacaaaaataaaaactgaaaataaaatttacactgtaatgtatataccattaaaatttcatagcaaataaagaaaactactttgtttagttcttgccatcatacatgtatgcacacacatattattcaaactgtttactaaaaagaaatggaaaaatagataacttcaaaagataaaataagttataggttcctttatctttttcattttattttaaatacttttagttgcaggtaagtaatatgccgggaattccagag

SEQ ID NO: 51440 - DNA, 641 bp, Homo sapiens
ggtgtgtgtgtttggagtgggtgctggggcatgggattctgttctctacttcaaggcctggagaggcaaaatagcatagatgttaagagctggcccgtgsgagtcaggccaacctccattccatagacacttactaagtatatggttttgataatgttattcaacttctctaaacctcagtttgatcatctgtgtaatgggcctaatgcaattgttgtgaggattgagagaatgcatataaatcacccagcatcatgtctgccacatagtgttttcaaaaggtggtggtaattatattaactagtagtagtcttagaacttctttgaaacttcagaaagggctagaaacatctccaccacaaattatggctggcacagagttcccagtttcagcagggcctccaactgccatcctcctgcttactcccaagcgctgcctcagaagcctctgcctggccaaatgacagcactgagctgagtctcccataatctggtatttattttaaaaatccaggaatgtgcctggcagactaaacagtcccgctcccctcaatatacaggcaggcagcccaggccgatgtgtgaggcagaaggccaggatagcaggcatctgtggagagaagggaggaggaacctgtgag

SEQ ID NO: 51441 - DNA, 641 bp, Homo sapiens
ggtgtgtgtgtttggagtgggtgctggggcatgggattctgttctctacttcaaggcctggagaggcaaaatagcatagatgttaagagctggcccgtgcgagtcaggccaacctccattccatagacacttactaagtatatggttttgataatgttattcaacttctctaaacctcagtttgatcatctgtgtaatgggcctaatgcaattgttgtgaggattgagagaatgcatataaatcacccagcatcatgtctgmcacatagtgttttcaaaaggtggtggtaattatattaactagtagtagtcttagaacttctttgaaacttcagaaagggctagaaacatctccaccacaaattatggctggcacagagttcccagtttcagcagggcctccaactgccatcctcctgcttactcccaagcgctgcctcagaagcctctgcctggccaaatgacagcactgagctgagtctcccataatctggtatttattttaaaaatccaggaatgtgcctggcagactaaacagtcccgctcccctcaatatacaggcaggcagcccaggccgatgtgtgaggcagaaggccaggatagcaggcatctgtggagagaagggaggaggaacctgtgag

SEQ ID NO: 51442 - DNA, 641 bp, Homo sapiens
ggtgtgtgtgtttggagtgggtgctggggcatgggattctgttctctacttcaaggcctggagaggcaaaatagcatagatgttaagagctggcccgtgcgagtcaggccaacctccattccatagacacttactaagtatatggttttgataatgttattcaacttctctaaacctcagtttgatcatctgtgtaatgggcctaatgcaattgttgtgaggattgagagaatgcatataaatcacccagcatcatgtctgccacatagtgttttcaaaaggtggtggtaattatwttaactagtagtagtcttagaacttctttgaaacttcagaaagggctagaaacatctccaccacaaattatggctggcacagagttcccagtttcagcagggcctccaactgccatcctcctgcttactcccaagcgctgcctcagaagcctctgcctggccaaatgacagcactgagctgagtctcccataatctggtatttattttaaaaatccaggaatgtgcctggcagactaaacagtcccgctcccctcaatatacaggcaggcagcccaggccgatgtgtgaggcagaaggccaggatagcaggcatctgtggagagaagggaggaggaacctgtgag

SEQ ID NO: 51443 - DNA, 641 bp, Homo sapiens
ggtgtgtgtgtttggagtgggtgctggggcatgggattctgttctctacttcaaggcctggagaggcaaaatagcatagatgttaagagctggcccgtgcgagtcaggccaacctccattccatagacacttactaagtatatggttttgataatgttattcaacttctctaaacctcagtttgatcatctgtgtaatgggcctaatgcaattgttgtgaggattgagagaatgcatataaatcacccagcatcatgtctgccacatagtgttttcaaaaggtggtggtaattatawtaactagtagtagtcttagaacttctttgaaacttcagaaagggctagaaacatctccaccacaaattatggctggcacagagttcccagtttcagcagggcctccaactgccatcctcctgcttactcccaagcgctgcctcagaagcctctgcctggccaaatgacagcactgagctgagtctcccataatctggtatttattttaaaaatccaggaatgtgcctggcagactaaacagtcccgctcccctcaatatacaggcaggcagcccaggccgatgtgtgaggcagaaggccaggatagcaggcatctgtggagagaagggaggaggaacctgtgag

SEQ ID NO: 51444 - DNA, 641 bp, Homo sapiens
ggtgtgtgtgtttggagtgggtgctggggcatgggattctgttctctacttcaaggcctggagaggcaaaatagcatagatgttaagagctggcccgtgcgagtcaggccaacctccattccatagacacttactaagtatatggttttgataatgttattcaacttctctaaacctcagtttgatcatctgtgtaatgggcctaatgcaattgttgtgaggattgagagaatgcatataaatcacccagcatcatgtctgccacatagtgttttcaaaaggtggtggtaattatattwactagtagtagtcttagaacttctttgaaacttcagaaagggctagaaacatctccaccacaaattatggctggcacagagttcccagtttcagcagggcctccaactgccatcctcctgcttactcccaagcgctgcctcagaagcctctgcctggccaaatgacagcactgagctgagtctcccataatctggtatttattttaaaaatccaggaatgtgcctggcagactaaacagtcccgctcccctcaatatacaggcaggcagcccaggccgatgtgtgaggcagaaggccaggatagcaggcatctgtggagagaagggaggaggaacctgtgag

SEQ ID NO: 51445 - DNA, 641 bp, Homo sapiens
ggtgtgtgtgtttggagtgggtgctggggcatgggattctgttctctacttcaaggcctggagaggcaaaatagcatagatgttaagagctggcccgtgcgagtcaggccaacctccattccatagacacttactaagtatatggttttgataatgttattcaacttctctaaacctcagtttgatcatctgtgtaatgggcctaatgcaattgttgtgaggattgagagaatgcatataaatcacccagcatcatgtctgccacatagtgttttcaaaaggtggtggtaattatattaactagtagtagtcttagaacttctttgraacttcagaaagggctagaaacatctccaccacaaattatggctggcacagagttcccagtttcagcagggcctccaactgccatcctcctgcttactcccaagcgctgcctcagaagcctctgcctggccaaatgacagcactgagctgagtctcccataatctggtatttattttaaaaatccaggaatgtgcctggcagactaaacagtcccgctcccctcaatatacaggcaggcagcccaggccgatgtgtgaggcagaaggccaggatagcaggcatctgtggagagaagggaggaggaacctgtgag

SEQ ID NO: 51446 - DNA, 602 bp, Homo sapiens
ttccactcaagaattctcgtgcttatgaaaaaagaatactgatatggtttggctctgtgtccccacccatatctcaccttgaattgtaatcaaaggcaggaccaggtggaggtaattgaatcatgggggyggtttccctcatgctgttctcgtgataatgagtgagttctcatgagaactgatggctttataagcatctggcattccccctactggcactcattctctctcctgctgccctgtgaagaggtgccttccaccatgattgtaagtttcctgaggcctccccagtcatgcagaactgtgagtcaattaaacctcctttctttataaattacccagtctcgagcatttctttatagcagcatgagaacagactaatacaaatatcatgaatggtagcccctgacacacacacatatgtactccattactccacaaacccatacccatactcgtgtacacacactcatgaacacaaacacacatccataccacacactcacagtgcacaccaatacagtgacaccatgcacgaacttcacacatgctcacatcacagctcacacggatactccatacacacattcatgtcccacaca

SEQ ID NO: 51447 - DNA, 1827 bp, Homo sapiens
ggtagctcttggctgtgtcttcctgtcctaggttttcaggaaatgattgccgaattgaattaaaccagcctaaagtaaaatgttgaagcaatggaagggaagaaaattgtatttcagcttcattgaataacttccaataaaatctgataagccaatttattccattatacagttgcaatggctctgtagttctcagagtagtgggatcatcatggaatatttattcttgaagtcatctctgttttataaagacaacaaacaagactatctctgttaataacatagtaaatccttgtaacagaccactagattttccattgtcaaaacttcttgtaagtcacagtttgagtttccattcaacaaacatttattgggcatccacagtgaggtagaattctgaagatgagaatttaaaggtagactctatagggcaaatggttaagaacatatacttgggagtcagttgatctgggttcaaattctagctgtgctactttctacctatgctgtattggacaaatgatactgtgtatctgtttcttcaaccgtaagttgggtatattaatatccttacctcaaaaggtcatgatgattaagtgagttaatgcatgtaaaatgccttctgtgccgggcagtcagaaaccactcaataaatattgattattctcaccaaagatgtgcttcctgacctcaaaagcctgtcagcctaatataaagacagtgtgacaaatgccaatcctgcctcaggacatcttgcacttgctgatccttctgtctggaacatgcttcacttggattcttttgtggcttccactctcccctctgttgggcctgaaatgctaacatctcagtgaagagttttccttcacaaccctatttaacaatgaccatcatccctctttttggcaccctatattttcatttcttgccaaatttttcatcttattgccatataacaaagcattacttttcttatttatgctgtttattctctgtctccccccgcagtcaaatgaaagttccaaaaggtcaaggattttggtcttgtttgtcaccggtttattagtgcttaaaattatgtgtggcttgtattaggtgtgcaggaagtatttgttgaaagaatgagtgaaggaccattcatgggagcctagaggagggcatgtccagctccgcctatggggatcagggggcttcacagagaggcaattgttagtgttgagtcttagaacagcagttctcaatttttcatccataaagacacacatggagagttatattcctatgattgatatctgattcacagtttctaagatactgccatattcgtactcgtttctctacagtcaagaaagccaattagaattcaagtcagagagtgacactattctggagataaggtcaaatccacactaatatttattttaaaagataaactacttgcatactttatacagtgataattttttaataataaagatgttgtgactcatcttcccactgggatattgagaaatgtatttgaggatgggtaggagttttccaggcagacaaccagtgtgacagtgtttgagatagaagaaatagcatgagtgaaggcacagtgtgattgtggaaccacarataatctggtatgactaaagagagattcctgggagagaagaagtgagagatgaggctgccaaggatcaaattacgaagagtctcatttgctaaactaaaggaattttatctagaagacagagggagatattgcctagtttaagtggggttgtgttgtatttctaaacttttatttaattatttttataacttaatttaaaaaactga

SEQ ID NO: 51448 - DNA, 568 bp, Homo sapiens
cttcctagaacatggggctgagaaggatggcaaggcctcatcaaggttaagcaggaaagagtgctaggatagattatgcatgtctgccctcagtgtgggtggagcagaagccatcatgtatttttgcaacctagggtttatattttctgcctaccatgcttgaaaggcaattagaacattgtcatgtctgattctataattctggttactcttaggatcaattcatttatttaatcaatgtacatttattgagtactttcaatgtatgagacatactgttaggcaacttgggtaataaaaaaatgaattggacacagatccaaccagtaaagaacttaagtctgatagaagagaaagataggtgcatgataaaatgctgcaagayaggactagataaggggagggactgcaggatatgccaaaggtgggaaaggtacctttagtgagtgtggaaggaatcagtaaggcatactggggaaggtgtattagaagtgagccttgtagtgatgtaagattgttcatgtggatagaaggggaagactatttcagactgagtggccagaatgag

SEQ ID NO: 51449 - DNA, 632 bp, Homo sapiens
cgttactgggttgaattgtgttcccccaaaattcatatgttgaagtcctaacccccaggactgtagaatgtgaccttatctgaatatacggttgttgtatatgtaattagttaagttgtactggggtctggtgggcccctaatacaatatacctcttgtctttacaaaaagtggaaatttggagatagctgcacacacagcgagtgcatcatgtgaagacgaaggcagggtccagtgtgatacagcagaagctgaggaatgccaaagattccagcaatcttccagtagctgggagggaggcctggaacggattctccatcacagtcctcagagggaaccaacctgctgaccccttagtcttggacttctcacctcctgaactgtgagacaataaatgtctcttgaagccactcagtctgtactactttcttttggcagccctagcaaactgaaacggtcaccaagccaagaaacagtgaaatcagtattcaagttcaagcaatgaggcaccagaatctgccttcgcaatcattaaactgctcrcactgctgaaggcatcgacctatgtattataacaagcacttccctacatataaggacgggagacacaggaaggagcacataaactgagt

SEQ ID NO: 51450 - DNA, 574 bp, Homo sapiens
aaatccccatggatgactaatacttaaattgagtaaatatctcacacaccgtaggaatcctagaagtagcaacagaggaatcagccagttgacctctgctacacttctgagaaaggcaaccaaagacattcatgtctttcaatcatcacccattgaaaaatgataagtaattaattgtctttttgtttaacataatgagaaaataagaactwttaccgagttctcgtttcacatataatgccacgtactgcagatatggaatgagtggagggaaagagggctctgttgattaattgcattgccatagtccaaaaacagccaaaatattggtccaaataattgatacaaatgtccacctaggttaatagttcctttagttacatatcttcattttgtgattttttataaggaaacaagtaatataattattattatttctttagttctaagaccacaagtagggatagaccatggaagagacagaacaagaaactagaaatggaaaaaatagagaaatctgcaaacattagaagtctggacggagatgtgtttgagaaaccacttagatacctac

SEQ ID NO: 51451 - DNA, 350 bp, Homo sapiens
caaattttatgccaaattgcgtttagggagtctgatgattaccaaaaacttttaacccaactgattataatagctaatgtaacaatctttccagcattttgaattcccccatcacaatttaacatataaacaggttcaatctgggaagataaagtatttagtgactctgatagtagaactagtattatcagactgtaggtaccaatcattaccatttatttctccatgccaacccttgggaaatcagttttactaaccttaggtgtttttattttataagagacagaactamattactatcagcagagattcaagcaataaagttatataaatgtactttaaactcatta

SEQ ID NO: 51452 - DNA, 517 bp, Homo sapiens
tatttttttccttctcatcaatgttataacgaaataatattgaatgaaacattatttgaagacctgctgttgaagtgggtagaacccctataatctgcccgggaaagactgtgttggagagaacttggacttggggtcagaaaacatgagacagctctggaaatggctatgggaacctgagaagctattcaggccctgatcttcaatttcatatccacacactctcaaacagaatatcagctctgcttgctttgcagagttgggaagataaattaagataatgtagatgtgagataataaactacaaagaattctcctttttatcataatggtgcaagaaacaagttgaattgatatctcaaatcctagaatgtcttttgttcacaagttcaataacatattccagaccttaggacttttgatttgatawggaatccgttgattgtacccttacctctttctaacctgataaggaaaggaatataaatcaccagtaaaggaatgtagggttataaaa

SEQ ID NO: 51453 - DNA, 587 bp, Homo sapiens
ccctctaaacatcaatgtcttaaagggttgacattataacaatggaataactgaaaagcgaagttttctgaagtcatatgaccctgctgtgtgcccaagtcacctattcacatggctgttcacatcatctgcatgaaaatattttcactttctgttaaccatagtgatttacaattctatgactattaaagtttattaaacacaagtttagaaagtatctttaacaaaggtgtgtttatttccatatattgctcattacatttttcttgccacagttttatctaaagccaggtcaaaatctttctctaaggtatttattaatagtgtatgttcttcagatataaaatccctctggtcaacatgcaacatttgaatatctattggcactgtacctctatgagatatttatgacatttgttaatagtgaacctcaacctcctgaccscacatccgaagttgggggcgatgtgggggaacatacacaaaattacaaccacattactggtcaagcactttatagctaaaatctattgactttaaaatagcattgtatgtgaattcagagttttaatgtattttgtggatca

SEQ ID NO: 51454 - DNA, 589 bp, Homo sapiens
ggaatgaagtcagaactttaaattataattgcagctacatccttaagaacattgagatcttgggcctgttatcttctctaaactctcagaagcccctttttcttcatctgttaaaagattaatagaactaatttgataattagggagataatctataaagagcctgacatgtagtaggtgaccataaattactaggtttgttattagcactaaaattattatgaaaatattaattgatggactactattggttgggcatgtacaagatagtccaagttccctgagctatggaaatcctagtagggtggacaraaaataaacaagtactgaatgtaaatagaaaatagtttcaaatgtcactaaatgttaaaaagaaaataaaacagagtaaggttttgagttaacaaggtgttggcaacattaatggccagagataacctgttcaaggaggtgatatgacactctcttgatactgaatgatgaaaaggaagctgttgttcatgatctgaagaggaagctgttgttcatgatctgaagaggcattctggatggaggtgggcatgtgtgtattgtttacaataaatgtaaa

SEQ ID NO: 51455 - DNA, 549 bp, Homo sapiens
tggcttcaaatgacagaaacttattgtttcacagttctagaggttggatgtccaaagtcaagttgttggtggggccatgctcccgaaacctgtacagaagaattcttccttgcctgttcctagcttctgaaaattgccatcaacctttgtcattccttggctttcaactgtatcactccaatctctacctctgttgttacatgcctttcctcttgtcataaggacactagtcatgtttgattagggtctcccctaatgatttcatcttgactacatctacaaagaccctatgtccaaatargatcaccttcacaggtaccagtgttaagacttcaacatatctttttggaggacacaattcaacctataagtgttccaaggagagtgacaattctgcactttgattctccacctggctctgtctctgccatacttaattatctaaggaagacaactcacctcttggaacttcagttgctgtttctgtaagatgagagcaatgcctttctttggctttggatctatgtgaacatacaaagcattaacaaa

SEQ ID NO: 51456 - DNA, 549 bp, Homo sapiens
tggcttcaaatgacagaaacttattgtttcacagttctagaggttggatgtccaaagtcaagttgttggtggggccatgctcccgaaacctgtacagaagaattcttccttgcctgttcctagcttctgaaaattgccatcaacctttgtcattccttggctttcaactgtatcactccaatctctacctctgttgttacatgcctttcctcttgtcataaggacactagtcatgtttgattagggtctcccctaatgatttcatcttgactacatctacaaagaccctatgtccaaataagatcaccttcacagrtaccagtgttaagacttcaacatatctttttggaggacacaattcaacctataagtgttccaaggagagtgacaattctgcactttgattctccacctggctctgtctctgccatacttaattatctaaggaagacaactcacctcttggaacttcagttgctgtttctgtaagatgagagcaatgcctttctttggctttggatctatgtgaacatacaaagcattaacaaa

SEQ ID NO: 51457 - DNA, 629 bp, Homo sapiens
gcagtagttctaagggcactctaaagccaggctgcccggattctcaaagctctgcctcacactagctgcatgaccacagacaaaatagccactctggggcttaatttcgccatctgtgaagtgggaatcatatatattgaatataatttatgatgaggattaartgaattactacttgtaacgaactcagaagagtggcctataaatagcaagcacaatgtgttgtattgccctattattagtggtagaacagtatcctgggcactatgctaggcacagtcttataacagtcttataactttgatctacttagggatttaatttattggaaaactaacaaattacagcaatagcaagacctagaccttgaccccacactgtcacatcttttctcttatttgtctagccagtgtttatactccaaggggaacatggctgaaaatagggaaggtctggatgaaatgtcagcctagagtggcccatttcccaagaccctccagggtaattctggatatggtgatgttcgcatgctcccctgcctagtcagcaccagggcagcatgcaacctcactggccacacatgggctgctgcccaagacctttcaatgtaacattctgcttcagctgga

SEQ ID NO: 51458 - DNA, 573 bp, Homo sapiens
gcattggtccttaccaaaatttaattaactakcatttgaataaccactatccaggcaatgatagggaacagaaaaaagctctggaaaagatgggagagatgtcataactttattgtaattcttttgtatgatcagtgtttccacatcaagttctcaccccccaaaaggacagcaataaatcctgatgattaacaaaaagaattaatttcattttgttgtattttgtaattttcaagacttagcccagttgaaaacatacattgccaccacttcaaccagcccacccccactttataaaagaaagcaatctgtacaaccaaaccaaatgctttccattttttttctcctctcagaaacatcagcagacttagtcaagcacaggctgagtgccagccacagcaagattatgctaaccccaagatgtgggagttggctgtgttcctctgaggcttgcacagaatggtattaaaagtaatgaacacacagagagaccctgcagggcacgccatggtttgcgtttatgcctcattggaacactgcgggtattagcaattcttctaaatctacatgtgc

SEQ ID NO: 51459 - DNA, 2189 bp, Homo sapiens
tgcatgctctagtttctcttgggtacataactcccaatatattgtgaagaatgaaactggcctacaaagtttaattaagaagcagtgaactagagcttacttagacaatacttgtactagtgtgggttcatgttgtccatttgtctttagaggtgtagaaccttgaaagtcagctaattaatcactattactgttgtgtacagtattggcaatctcctatgctaaaattttttgtgatgatttgaaggtgggaggggcaatatttactaagtctctcaacctacatggcaatatctgaaacctgcttataatgtagtaatagcttaggcaccacctatttctgaaacataaatcatcccacaatataagcctcccagttttattcatgcgtcttaccatgtataaatatcttttaatataccatttatttccttgagggacagttatttgtagcataaatctgcctggataaaatagtaaaaattgctatgccccagtgaattcagtttacaaaagcttacatacgtgaatgagacattggaaatgtggtttatagttaaggagaatggatcacgcggattatacctgtataacttccctagaaggttgataccactaagatattaacaccaaaaaactgaaaatagtatttttcatcttactttgttatgtaccctttgtgaatttctgaaaaacacctttctattatgatgggataaattacggtgtggtaacaaacaagcccaacctgtttgttccggtcaactagttgctttataacaaaccaccccaaaatttgtttaaaacagctatcatttgattgtgctcacaagttctgtgagttaggaaataagacacaacacagtggtcttatgtctgttgtgtaatgtctgggttctcagctgtgaacactcaaatggcttggaaactgaaatcagctggaggcttccttattcatatgtttggtgcctggctgggatgactcagattagttggggctcttgacaaaagcacctatacatgaaccctctcaggagccttggctctatggtggctggattctgagagggagcatgcagagaaaagaattccaagacaatggatgctctaagagaagctacttggccttttctgatctagtcttggtggtcatgcagcatcacttttgccacccagatcaaaggggaagaggagacagactccacctgtggatgggagagtgtcaaattcacacagaagttgtatgcaagctattcttggtcatcttgctcatctatgaaatataccctcctccatgcattgacttacaacaagggtttatttcttgctcaaagtctgctgtgaatctaggcaattctccagagcagctgttcttttgttggcttagcaatccaagctgctgcttccatcttacagcttttccatatcaactcatgattccacaaccattgctacgaggcaagagtagtatggaggatcacacactactcttagaaaccaccagctggaagggamttatatcactcctgcttacatttgatggctcacatagccatgcccaaattcagtagagcaagcatggccctcctgtgtacccagaaaggaaggagagctagaaatattggtaaatagcaatattgtttaccatagcctcagagatattgcctcgtggtgaaaccctataattcccctcaattctgatttttgccctttatcaaatcattttattcattccttcatccatccaacaaagatgttttatatgcctactattagcaactatcagtagcttgttcctggagggaatgcagctgctccccgccaaaacaccatataattcactctagaaaactaaaatttcagatgctttgtcattgattattgtggggagaaaatgtctctttcagctccgactttgtcctgtctcctctaaggcatgtgaaataagatttttttttcctattcttacctcctatggtcccattttatggttttcatgcactactgtcagtcaaatatttatcatatgtctttcaatatctttccaatatttatcatatatctttccccttgtaggccttaactttatgacccactattaagcacgcagctgtatttccagaaaatgtagatggtttaattcaatactgcatggcaattaactgtcttataaattaaatcattttaat

SEQ ID NO: 51460 - DNA, 585 bp, Homo sapiens
  misc_feature (1)...(585): n = A,T,C or G
caagtcattttatgcaatgagaatgtatggaagatttttgagctcattctctacttcctcagtctccctgttcttttctttccttcttttctatctctcaggctgtctgcttctgttccttgctgtctctcttttcttcccgttttccacaacctgcaatccctcaatccctctttcctttytccctcacccactccttttcccttaatcgaatatcttcctgattatctttcccatctctttggcttgcaaccttttattcccttttgtactttccttccctctttcatcttctctccacagtttgcgcttgctccagctcttgcacttcatcctacttgctagttatccccctactattagaagtcttgctcctattgtcccctgttcgcttgcttgttgcctgaggctcctggccctgcccagggcctcctttctctcttcactcagtctttctcaaacactccccttctatacttctatannnnnnnnnnnnnnnnnnnnnnnnnnnnnnnnnnnnnnnnnnnnnnnnnnnnnnnnnnnnnnnnnnnnnnnnnnnnnnnnnnnnnnnnnnnnnnnnnnnnt

SEQ ID NO: 51461 - DNA, 636 bp, Homo sapiens
tctatctgctatctcctgggtttcacatccccatagaaaagtgagggtaagaagaaatggaagagaaaaaaaaaactaacaaagaaaaagtcttgtttcytgcctgcctccctcccacccagaggcgatttcagcttctgatgttgttcaggaaagttccggaaggaggggaagctggtcagcaacagtccactcacctgcccaggacccttcaggcactgcacagcctgcttgtgggtgaggccgcacagaatcactccatccacctgcaggagtcggtcacctgggaaagggatagatgtcatgtcatgacctggtgcttgaggctgcaggaggttcccttccaggaggcccctgcccggcacccctccatgcagcctggagaagtgggaaaggaagctgaggtgccaggtgtccccctggagtcagcaggaatcctgcctctctgagcagtctcactcccttcttctcaggcacatcacagatcagggatataaaagcctttctattattggctcacagaatggttgagccagctctgttcaaccttatccttcctcctgttttcctgtgaaaccatttttggaagtattttcaagtcacttagatatttatatctccagcatgtattttttt

SEQ ID NO: 51462 - DNA, 385 bp, Homo sapiens
ctttctcatctttgtcttttctgtattaattaaattatttgtaagtgtcatatgtaatttttacagaagctaaatttaattttatttaattaaaaaaattaagtcaaatattaccccacccaaaggttccagtccacagaattttattggtgaaatctataacaacttcaaggagctgtatttactttgtttgaaagaacagagagctagaaaatttccaacttgttctgcaatatatcattgataccaaaccaagacaattaactaccaaaaaacagacatatcaatygctttgaagatagatgcaacaatgataagtaaaatcttttcaggtggccacaccctttcaaatccagccatgtgggtgtgggtgtgggtgtggggg

SEQ ID NO: 51463 - DNA, 622 bp, Homo sapiens
tccagacaagattagcatttgaattggtggactgagtaaagcagctggccctccccaatatgagtggacaccctccagtctgtgaggacctgaatagaacaaaaagatggaggaaattaactctgcctgaccacttgaactggaacatcaatcttctctgttctcagtgaatctggtttgcaggcctttagacccagactatcatctacaccatcagccctctgtctttcaggcctttgaactaccctaccagtttttctatgtcttcagcttgtagaacagcaaaccaagggacttctcagcctccataattgcataagccaataccgtataataaatctcttcctttataggtagagagagagagatggcatgaaatgagccaaaggcatagccttgcagatagaggaaacagaatgtgcaaagacactaagttgaggaataacttggaatttcctagacatataaagaaagccggtatgaccagaaagcagtgagtgagagaaagatggtgtggaccatatttgaataactaccagaaaaaagccatatgacacargccaaaggaagaactgggggttcattctaaggactatgtatagatggattgtgtaatataatt

SEQ ID NO: 51464 - DNA, 2220 bp, Homo sapiens
tgcatagattttattagattgctgaaggggatcatgatatgaaaaagttaagaatctctgtttaagacctctgctttttaaaaaaaaaataatgtgaacatctcagtatttttaagaataataacaagaacaaatttaggaaatctctgcttgaaagagaattaaaaattcctgatccatatcactcattttcttgagctattgccaaaaacccggtgaaatattttactcattttatttcttctaggcctctacagtgtaaggaccaacccaagccaagcatatcccctattgcaacttccttccacagtagctggaggtgcaacttttaagggtgcctgagtttaaagtgtctaagtgtctaatgttagttaactaactaaataaaagtggtgtattcttctttcattaggcctagatcttttgaaagcttaatagtgtgttggtcctgactgcccacaaatgacagggcagtaaggtatcagccttggaccataaacactgtgtacaaagggttttggcatctctaccgatgggggtaccatcaacatgtcagtgcccttttgacacattgcagaatcatgtgatttgatagtttgccatccactactaactcttaagtattaatgaaacaacaaaaatatactatctgtgtctttaaatttaagaaatgcaaagccctattttttaaatgaagcaagtactattgccctaattatgtacacagtggaaatgaaaacaaaagtagttaagcttcttgtaaaaaatgtctaaaaatgaaggtgatagaacttgcagcaggtgccaaaatgcctaactccacagtttttcttttcagtttattgaattaaaaagctattacaagtattggacatttgcaaataattaacatacatttaaactgaaatactgccttaaaaataaaatacaactgcaaagtgtattgccaaatccagcacttaattatttccttattttttatgctaatgaagtgtggtggtagaaagtgtggagtttgaagccttaactaaatcctagcttgaccacttcctagttttgtgtttctgaacaagtttcctaatctctccaggtctcggttttcctatgcagccataaaaaaagatgagttcgtgtcctttgcagggacatggatgaagctggaaaccatcagtctgtctattcataagaaatcatttggccatcttggtctttacaaatataatcaccttactcattgcagctgtcttcttcaaccactaaaatgctctataaagaccaaccacaaattttcagtggcatacaacaataagtgtctacttctcacatatctgcagctaagcgtttctataatcaagacagggtttgctcacctatctcagtgttggctaactgatggctgatgtgacatggctgtgcttacgtcagctgggatgtcaccattatacttcccatgaatcttatcatccaggttagcttagacatgttgtcatggtgatggcagagggcaaaagcacaagcagaaaggcacacacactttttcaagctcggttggttatattttctacatcctatttgtgaaagcaagccaaatcaccaagctaagaatcaagaggcagagaaatatactcctgagggcaagagctgcaaagtcgcatggtaagggacatggatctagggaaggatgaagaactgaaatggttaatactaccagtctgccacacccatgttcatgtagatcattgccacaaagtttatcaggctaatataattcacaacttggaccagtaactttcatacatcataatataataatgtagacatgcattgccctttaaatgccacttggatcaccttttatctttcttgtatttatcagtttatctcacaagatatcttatgcaaattaggctccatttctcctattctagaagaaccataattttatgatcaagcaaataatataatatatatatatattttctctacattctagtgtgcctctgttgactgcaactgaaacatttaaattttgcacaagccaaatttaagtatacctaaaacccaaatttacgatggttatctgacaggcaaatatatctcctgtaggtttgcagaattatcatggaaaagagtcatggttgatggtttatactagtygttcctagtcacaatagccccatatatttatattcttccataaatacctcaaatctgcctaga

SEQ ID NO: 51465 - DNA, 598 bp, Homo sapiens
ggcgtagaaaatgatcatatgagcaaaaaggaggaattagaattggcactttttaaattagatttttatgaaataataacgcagtgtaaagacaaaggaaattactctttccagctactagataataagtttgttaatgcaattacgtgcttaatttacayctgagctccccagtacccaagataataggaaaccaaatggattatagagagttctattatatagaaaagaaagaatcaataaaagaaaaagactttttttccccaggcacggaactcaaaaaggaatccataaattaggtacttattaaagagataccacatgaattaatagaaaattacttctgttatagttttgaaaactattcttcaaatggatgtttccatttcatctttctgtgaaagctgaaggaataacattaaactttaactccataaacttatgtgggtaaaagattaatgtggttctgtctgagaaaacctctgggaacccctaatttttatatcacaacttgcaattggtttcttaccaggcccgagctagtcgaagtataggcagagaggtacagagaatgtagtaattttctaaacaaatagaa

SEQ ID NO: 51466 - DNA, 418 bp, Homo sapiens
ttgcatgagtccttgtaaaccatctgagtgatgttattttccatcctaagatgaaggcagtgagtggtttggagyacagtgggggcgtgatctgggttagaaggatcactttgctgtatgtggagccaggccatggtgagagaacggctgtatagctataaaaactctcttccagcatttgcaaaatgtcgatgagaataactgctttaaaatatctttatagaatactctatccagttaaaagaaacaaaagtttggcatgatcttcaaataacccaagggggagaaaaatattaggcaaatataaacagcattgcattcaagaggtgaagttgagacatgctttcaatctagcctctgcaacagccaagtcatcacagcgcaatcaaatccagctgggaccacggaagatgactcc

SEQ ID NO: 51467 - DNA, 617 bp, Homo sapiens
gttaatattatttccattttatcaaatatacttctgccatcattttaatgactacaaagtactctgttacatggatatgccataattttaaatagttcccctaatggtttacatttagagcttttctgaaggctaattatccacatagtgattaactttcttattgctaagactttgcatatatcaattattaccttaagacaaattaccagaggtgaaactgcttagtcaaagattcaaaatttcaaaggttttgataaattgccaaactgaccttctgaaaggctggctatatgatgctttgtaaattataatttttcaaggctacataatttgatttttattttccatatctgaaaaggcactatatgtacgtgttttgcatatattctattcagccatgcagttagacatcctaggcattaatgttcttaaaagcraacattttttatccattttttttaatttaactcagactatttcttctctaggagtagtatcccttttagtgcagcatttttgaagctcagtcattttgaaaagtattccccatttatataactattatcatacttagcattacaaatcagtggccctaggcttgcgatgggattcag

SEQ ID NO: 51468 - DNA, 624 bp, Homo sapiens
ttttctttcatctatccatctacatatctaccaaagaaactttaaatgtatacaaatataaattaactggtattgttacgatacacactatttcatgtaaatatttacatgacttcaccatacaactagagcatacatttagaaaatgttttgactcctaacacactgaagcatgcaggggcaaagttattttgtctccactatgagttcatagggttatgcttaagggcatacacaaatgcctgttatacttcattctgtttcaactacactctcaatgctcattgctatccatggacctgactttcaaattgttctcctattgatcttctctcttctccctaccacagtttgcacattccatattactttatgctgagtcttagcttaatattagattggtgcagaagttatcatggtttttggcattactttcaatgtaatgwgttaagtaaattgttggagcaagctagttttattcttttcttccttgtttatatcctatgagaggagttgataatgtaattgagtaaaacacagatcatttattgggtcatattttaaagtagagagtgttactatacctccaatgccatgacccatgcatttccatatcctatccct

SEQ ID NO: 51469 - DNA, 631 bp, Homo sapiens
cctcagcctccctagtagctgggactacaggcgcccgccaccacgcctggctaattttttttgtattttttttagtagagatggggtttcaccgtgttagccagaatggtctcaatctcctgacctcatgatccgcccgcctcagcctcccgaagtgctgggattacaggcatgagccaccgcgcccagccctatctgcttacttcttgaagaggatggcattcatgtgtggtgctaatggatgtgtataaaatgaacgaaacttgcaacacctacatgaagaccagcgtgatatacattttacacactgacacgtgatctgcttacgggggaaaacaagtgcaggagtcagtctgtatctgatgatccaggggacatccaagctatgacaagcaagagcccggtatgcrctgggaacagctggaggatgcacggtggctttgaatgctggtgacaacttggacctaaaaatacttcatgatcttgaaaagctaacagacctacccctagggaaaatgtgcctgcagcccccgggtctgtcaggagactgagcagttctcacattaacattctcttataaatggtaggacatgggaggatgctatgctcgttatgttttctcgcttggaat

SEQ ID NO: 51470 - DNA, 677 bp, Homo sapiens
gtaactgtctctaagtagttgagttgtatttaaggaacccaagttatataattatagctacagacatattctctgaattaactggaaaaaaaatacatattctcatgtctcgtattttaactgtgtctgttagtttggcattttctctttcttacttagtagttagtggccttgccacttgtgtgccatactgatatatttcaaatggacctcaataatcttttcattttttagttaaaattctcacttctctaaccctggcaggtgctggtacactagcttcctatctttttccctgatttcagtcttcagtcagttctgcacactgctaccacacaatcaagttctgatgtaaatgckaaaaaagcctcaccctccccgacccccccaacccacatcttcccaccatatccatccctaacatttaaggtctaaaattatgagtctggcattcaatgccatgtctcacccaactgtaaactacctgcctctccagccttattttcttcttcccacctgtgttcctactaagctgtataaactacagaacaacataccttatggtgagacatgatgttttctttagtttacagtttttactgagaacgtctaattctgtggcaggatgtcaggtggttctggctctgtatatgtttgaactttgtgattacttgcac

SEQ ID NO: 51471 - DNA, 1295 bp, Homo sapiens
taatctttttattcagaggtaggatgctagttctacaattgcctaggtcttctttaatttgtatatgttaagaaattttaatgggcaatttaataagtgttgaaatttctaagaattatttctgtatgttagagttgtgataacgcagacattttccctgaagtacttctctgagtctgatttgttttcctccatgggtgccacataggtttattttaagaaggtaaaaaataaaagctgactaaggtacatattgattattccagacaacatgcagacatcacccaatgagtgcagttctcatcaactcaccatttgtttcaattagaaaaaattctcatcaaaactaatttttctgcatgaaataccttttcaaatcacactgaatgtgatttattaattgtgatttatcaaattcagttttctgctggatactaaaggcacacctcattaagactagtgattatggaaatagtacaatattttagaaacttttgattgtaaaaatttcttttaaaatgaatacatacagatatgttattgttcagatatttagcacttacgtagaaactcactgatctactaacaagtagaaaagagacctttagccaaatgcctctgtactcagcaataaaatgattaattactgtgttgctcttttctctggttaaggcttttaacaaattttgtttttccttttactattacaccataacttgtttaaattttgttgctgttgcagaattacagcagacattacagttcatgtctccctgtgtatacgagggagagtttctctgggctgtgtacatgggggagtgtgggcctgacctgtcacattcaatttttatttcacagtcttatatctaatgctcatcattgcataatgtaactagctggggttagtttcctcagtccctgactcttctcttcagagcctgttttctctccgtttacagatgggccaaggttgctcgggtgattggtttactggcttcgcacaaaactgatctccaggaaaatacacctgttgttgaggtaatgtcttttatgactgaaatgtgatgaatgacaagaartactgttgttgattctgtaatttagaacatgtggctttccttgaccttcacttgacttttctttgtgggattgtggaaattgttcaaaaacttatcacctcaacagacctttaggcttaaacatagcggctcatttacaatgtagtccatcattaaaatggcacagcagagttaacaaggctcgtgaaccctactcatcattatttcatttgtttt

SEQ ID NO: 51472 - DNA, 1295 bp, Homo sapiens
taatctttttattcagaggtaggatgctagttctacaattgcctaggtcttctttaatttgtatatgttaagaaattttaatgggcaatttaataagtgttgaaatttctaagaattatttctgtatgttagagttgtgataacgcagacattttccctgaagtacttctctgagtctgatttgttttcctccatgggtgccacataggtttattttaagaaggtaaaaaataaaagctgactaaggtacatattgattattccagacaacatgcagacatcacccaatgagtgcagttctcatcaactcaccatttgtttcaattagaaaaaattctcatcaaaactaatttttctgcatgaaataccttttcaaatcacactgaatgtgatttattaattgtgatttatcaaattcagttttctgctggatactaaaggcacacctcattaagactagtgattatggaaatagtacaatattttagaaacttttgattgtaaaaatttcttttaaaatgaatacatacagatatgttattgttcagatatttagcacttacgtagaaactcactgatctactaacaagtagaaaagagacctttagccaaatgcctctgtactcagcaataaaatgattaattactgtgttgctcttttctctggttaaggcttttaacaaattttgtttttccttttactattacaccataacttgtttaaattttgttgctgttgcagaattacagcagacattacagttcatgtctccctgtgtatacgagggagagtttctctgggctgtgtacatgggggagtgtgggcctgacctgtcacattcaatttttatttcacagtcttatatctaatgctcatcattgcataatgtaactagctggggttagtttcctcagtccctgactcttctcttcagagcctgttttctctccgtttacagatgggccaaggttgctcgggtgattggtttactggcttcgcacaaaactgatctccaggaaaatacacctgttgttgaggtaatgtcttttatgactgaaatgtgatgaatgacaagaaatactgttgttgattctgtaatttagaacatgyggctttccttgaccttcacttgacttttctttgtgggattgtggaaattgttcaaaaacttatcacctcaacagacctttaggcttaaacatagcggctcatttacaatgtagtccatcattaaaatggcacagcagagttaacaaggctcgtgaaccctactcatcattatttcatttgtttt

SEQ ID NO: 51473 - DNA, 521 bp, Homo sapiens
tgggactacaggtgcccgccaccacgcccagctaatttttttgtatttttagtagacacggggtttcactgtgttagccaggagagtctcgatctcctgacctcgtgatccgcccgcctcggcctcgcaaaktgctgggagtaattacaggcgcaagccacagcgcccggccaaggtttctacatttttaaagggtgggggaagaatctgtgacagggactgcatgcggctgcaaagcctcacatattcactgccagccctgcacgggaaacgtttgctggcccctgcttgtggcctagaccactgtgcagtgtgcctgccttggagggcattgctaaatggaccaaaaacatttcaggattgcacagtgggcagccaggacaaccagtgccccacggaaagataggagatgccaaggctgcacactctgcttctctccaggagctggcagggcagtgtggtctctgagggaggcacaaggtagctctttagcaacaggttttcttttatttttttctttt

SEQ ID NO: 51474 - DNA, 521 bp, Homo sapiens
tgggactacaggtgcccgccaccacgcccagctaatttttttgtatttttagtagacacggggtttcactgtgttagccaggagagtctcgatctcctgacctcgtgatccgcccgcctcggcctcgcaaagtgctgggagtaattacaggcgcaagccacrgcgcccggccaaggtttctacatttttaaagggtgggggaagaatctgtgacagggactgcatgcggctgcaaagcctcacatattcactgccagccctgcacgggaaacgtttgctggcccctgcttgtggcctagaccactgtgcagtgtgcctgccttggagggcattgctaaatggaccaaaaacatttcaggattgcacagtgggcagccaggacaaccagtgccccacggaaagataggagatgccaaggctgcacactctgcttctctccaggagctggcagggcagtgtggtctctgagggaggcacaaggtagctctttagcaacaggttttcttttatttttttctttt

SEQ ID NO: 51475 - DNA, 521 bp, Homo sapiens
tgggactacaggtgcccgccaccacgcccagctaatttttttgtatttttagtagacacggggtttcactgtgttagccaggagagtctcgatctcctgacctcgtgatccgcccgcctcggcctcgcaaagtgctgggagtaattacaggcgcaagccacagcgcccggccaaggtttctacatttttaaagggtgggggaagaatctgtgacagggactgcatgcggctgcaaagcctcacatattcactgccagccctgcacgggaaacgtttgctggcccctgcttgtggcctagaccactgtgcagtgtgcctgccttggagggcattgctaaatggaccaaaaacatttcaggrttgcacagtgggcagccaggacaaccagtgccccacggaaagataggagatgccaaggctgcacactctgcttctctccaggagctggcagggcagtgtggtctctgagggaggcacaaggtagctctttagcaacaggttttcttttatttttttctttt

SEQ ID NO: 51476 - DNA, 642 bp, Homo sapiens
ccactggtttttagatactactgttttgctacagatacaagatatagactactcataattccctatgtatttgctgtaacttcgtcttttttctcacctgcatagaaggcatatcccttttttggatggcagtgggggcattattattatggacaaatgttttgaatttattctaatgtgtattttaaagcaaattattcatactattaaatatatttgtatttagttacaaattattttcatataatttaaaatttatcataatgtgtaatcggaaaactccaggcccaggataaaagagacaaaatttaaagccatcataaaaagaacaaactgaaacaaaagcatcattgrcaacaaaacctgtgttgccccacacctggagataaataatgctccctaaagaaagaagaatgattgctatttcagacattgttcactcacctgatggtcaagcccaacccatgtgaatacctgtcttctgtaaggaataagatagttgcatttgtttcatgttatgctatattcaaatagcccagagccttcaaagaagtttgcagagaaacaactaaaaatttaaatatttacaaaaagaaaggactttttaaaaaatgattacttggacatcatagttaaaggtgt

SEQ ID NO: 51477 - DNA, 642 bp, Homo sapiens
ccactggtttttagatactactgttttgctacagatacaagatatagactactcataattccctatgtatttgctgtaacttcgtcttttttctcacctgcatagaaggcatatcccttttttggatggcagtgggggcattattattatggacaaatgttttgaatttattctaatgtgtattttaaagcaaattattcatactattaaatatatttgtatttagttacaaattattttcatataatttaaaatttatcataatgtgtaatcggaaaactccaggcccaggataaaagagacaaaatttaaagccatcataaaaagaacaaactgaaacaaaagcatcattggcaacaaaacctgtgttgccccacacctggagataaataatgctccctaaagaaagaagaatgattgctatttcagacattgttcactcacctgatggtcaagcccaacccatgtgaatacctgtcttctgtaaggaataagatagttgcatttgtttcatgttatgctatattcaaatagcccagagccttcaamgaagtttgcagagaaacaactaaaaatttaaatatttacaaaaagaaaggactttttaaaaaatgattacttggacatcatagttaaaggtgt

SEQ ID NO: 51478 - DNA, 642 bp, Homo sapiens
ccactggtttttagatactactgttttgctacagatacaagatatagactactcataattccctatgtatttgctgtaacttcgtcttttttctcacctgcatagaaggcatatcccttttttggatggcagtgggggcattattattatggacaaatgttttgaatttattctaatgtgtattttaaagcaaattattcatactattaaatatatttgtatttagttacaaattattttcatataatttaaaatttatcataatgtgtaatcggaaaactccaggcccaggataaaagagacaaaatttaaagccatcataaaaagaacaaactgaaacaaaagcatcattggcaacaaaacctgtgttgccccacacctggagataaataatgctccctaaagaaagaagaatgattgctatttcagacattgttcactcacctgatggtcaagcccaacccatgtgaatacctgtcttctgtaaggaataagatagttgcatttgtttcatgttatgctatattcaaatagcccagagccttcaaagaagtttgcagagaaacaactaaaaatttaaatatttacaaaaagaaaggactttttaaaaaatgattacwtggacatcatagttaaaggtgt

SEQ ID NO: 51479 - DNA, 537 bp, Homo sapiens
ttagttgttactatgggcagtttgtaacaagagatgcttttccaaatatctgaaattaggaacagcatagcattgtaagagataggaagtcagtctcctcagaatatggggtacgtatccagttgtacaygctaattgcaggtgtcccattactgccagtgtgcagggtcatgtgcttcgtgaagagagatgcacagggagatgtaactgaaaaagattcataaccagctttgatttttgtctgctccctgcatttcccccaacccacaaacattaagcccaaaacagagaattgctctcagtattcctgctccagaaccatgcaacataatcagtacttcttactttcttgaatttatttttatttcaatggttttaatgaatatttcctagaaagttcacaatactcatttttatgtttcaatttatattcaaatttactcaaagataatatcacccggtattattagagaagtctctctaaatactagaactgacatttcagatccatttgtaataatactgcccccataaaat

SEQ ID NO: 51480 - DNA, 537 bp, Homo sapiens
ttagttgttactatgggcagtttgtaacaagagatgcttttccaaatatctgaaattaggaacagcatagcattgtaagagataggaagtcagtctcctcagaatatggggtacgtatccagttgtacacgctaattgcaggtgtcccattactgccagtgtgcagggtcatgtgcttcgtgaagagagatgcacagggagatgtaactgaaaaagattcataaccagctttgatttttgtctgctccctgcatttcccccaacccacaaacattaagcccaaaacagagaattgctctcagtattcctgctccagaaccatgcaacataatcagtacttcttactttcttgaatttatttttatttcaatggttttaatgaatatttcckagaaagttcacaatactcatttttatgtttcaatttatattcaaatttactcaaagataatatcacccggtattattagagaagtctctctaaatactagaactgacatttcagatccatttgtaataatactgcccccataaaat

SEQ ID NO: 51481 - DNA, 676 bp, Homo sapiens
ttttggcatatacaattttattgcttagattaatttgcatttcttttttttttaatttttwattttatttttttatttttgagacggagtcttactctgtcgcccaggctggagtgcagtagcgcgaacggggctcactgcaagctccgcctcgtgggttcatgctattctcctgcctcagcctccagagtagctgggactacaggtgcccaccaccacgcccggctaatttttcgtatttttagtagagacagggtttcaccgtgttagccaggatggtctcgatctcctgacctcgtaatctgcctgcctcggcctcccaaagttctgggattacaggtgtgagccaccgcgcccagtcaaatttgcatttcttaatatgggctagacttctatttttttttttttcctgaagaagcaaaattaagctttcttccagagttaaaaacttattctattgtttacactgactgataagatttacttaaataagagtggagaattcaaatgagtggagaatatgacttatttttcctttgccaaaaacatctttttctatcagaacctgtttttatttagacagctttctgtttttttctcctcagacttattactgttgatttcccataagcttataaataattgattataacaaaataaaatataaacaaatcaa

SEQ ID NO: 51482 - DNA, 676 bp, Homo sapiens
ttttggcatatacaattttattgcttagattaatttgcatttcttttttttttaattttttattttatttttttatttttgagacggagtcttactctgtygcccaggctggagtgcagtagcgcgaacggggctcactgcaagctccgcctcgtgggttcatgctattctcctgcctcagcctccagagtagctgggactacaggtgcccaccaccacgcccggctaatttttcgtatttttagtagagacagggtttcaccgtgttagccaggatggtctcgatctcctgacctcgtaatctgcctgcctcggcctcccaaagttctgggattacaggtgtgagccaccgcgcccagtcaaatttgcatttcttaatatgggctagacttctatttttttttttttcctgaagaagcaaaattaagctttcttccagagttaaaaacttattctattgtttacactgactgataagatttacttaaataagagtggagaattcaaatgagtggagaatatgacttatttttcctttgccaaaaacatctttttctatcagaacctgtttttatttagacagctttctgtttttttctcctcagacttattactgttgatttcccataagcttataaataattgattataacaaaataaaatataaacaaatcaa

SEQ ID NO: 51483 - DNA, 676 bp, Homo sapiens
ttttggcatatacaattttattgcttagattaatttgcatttcttttttttttaattttttattttatttttttatttttgagacggagtcttactctgtcgcccaggctggagtgcagtagcgcgaacggggctcactgcaagctccgcctcgtgggttcatgctattctcctgcctcagcctccagagtagctgggactacaggtgcccaccaccacgcccggctaatttttygtatttttagtagagacagggtttcaccgtgttagccaggatggtctcgatctcctgacctcgtaatctgcctgcctcggcctcccaaagttctgggattacaggtgtgagccaccgcgcccagtcaaatttgcatttcttaatatgggctagacttctatttttttttttttcctgaagaagcaaaattaagctttcttccagagttaaaaacttattctattgtttacactgactgataagatttacttaaataagagtggagaattcaaatgagtggagaatatgacttatttttcctttgccaaaaacatctttttctatcagaacctgtttttatttagacagctttctgtttttttctcctcagacttattactgttgatttcccataagcttataaataattgattataacaaaataaaatataaacaaatcaa

SEQ ID NO: 51484 - DNA, 676 bp, Homo sapiens
ttttggcatatacaattttattgcttagattaatttgcatttcttttttttttaattttttattttatttttttatttttgagacggagtcttactctgtcgcccaggctggagtgcagtagcgcgaacggggctcactgcaagctccgcctcgtgggttcatgctattctcctgcctcagcctccagagtagctgggactacaggtgcccaccaccacgcccggctaatttttcgtatttttagtagagacrgggtttcaccgtgttagccaggatggtctcgatctcctgacctcgtaatctgcctgcctcggcctcccaaagttctgggattacaggtgtgagccaccgcgcccagtcaaatttgcatttcttaatatgggctagacttctatttttttttttttcctgaagaagcaaaattaagctttcttccagagttaaaaacttattctattgtttacactgactgataagatttacttaaataagagtggagaattcaaatgagtggagaatatgacttatttttcctttgccaaaaacatctttttctatcagaacctgtttttatttagacagctttctgtttttttctcctcagacttattactgttgatttcccataagcttataaataattgattataacaaaataaaatataaacaaatcaa

SEQ ID NO: 51485 - DNA, 676 bp, Homo sapiens
ttttggcatatacaattttattgcttagattaatttgcatttcttttttttttaattttttattttatttttttatttttgagacggagtcttactctgtcgcccaggctggagtgcagtagcgcgaacggggctcactgcaagctccgcctcgtgggttcatgctattctcctgcctcagcctccagagtagctgggactacaggtgcccaccaccacgcccggctaatttttcgtatttttagtagagacagggtttcaccgtgttagccaggatggtctcgatctcctgacctcgtratctgcctgcctcggcctcccaaagttctgggattacaggtgtgagccaccgcgcccagtcaaatttgcatttcttaatatgggctagacttctatttttttttttttcctgaagaagcaaaattaagctttcttccagagttaaaaacttattctattgtttacactgactgataagatttacttaaataagagtggagaattcaaatgagtggagaatatgacttatttttcctttgccaaaaacatctttttctatcagaacctgtttttatttagacagctttctgtttttttctcctcagacttattactgttgatttcccataagcttataaataattgattataacaaaataaaatataaacaaatcaa

SEQ ID NO: 51486 - DNA, 569 bp, Homo sapiens
tttggaaaatggtaggagtaggtggaagacctcttcctccctccctgactacaagaatattcgacctgctagctgtaaactgaaacagacagtagagaggtggctgggacttctggagtcaggccttgccttgtttgcttaacaaatgcaattcttgtgaagtttaaggatagagggtcgagaagccaagatggccgaataggaacagctcyggtctacagctcccagcgtgagagacgcagaagacgggtgatttctgcatttccatctgaggtaccgggttcatctcactagggagtgccagacagtgggcgcaggtcagtgggtgcgcacaccgtgcgcgagccgaagcagggcgaggcattgcctcacttgggaagcgcaaggggtcagggagttccctttccgagtcaaagaaaggggtgacggacggcacctggaaaatcgggtcactcccacccgaatactgggcttttccaatgggcttaaaaaacggcgcatcatgagagtatatcctgcacctggctcggagggtcctacgcccacggagtctcgctgattgctagcac

SEQ ID NO: 51487 - DNA, 569 bp, Homo sapiens
tttggaaaatggtaggagtaggtggaagacctcttcctccctccctgactacaagaatattcgacctgctagctgtaaactgaaacagacagtagagaggtggctgggacttctggagtcaggccttgccttgtttgcttaacaaatgcaattcttgtgaagtttaaggatagagggtcgagaagccaagatggccgaataggaacagctctggtctacagctcccagcgtgagagacgcagaagacgggtgatttctgcatttccatctgaggtaccgggttcatctcactagggagtgccagacagtgggcgcaggtcagtgggtgcgcacaccgtgcgcgagccraagcagggcgaggcattgcctcacttgggaagcgcaaggggtcagggagttccctttccgagtcaaagaaaggggtgacggacggcacctggaaaatcgggtcactcccacccgaatactgggcttttccaatgggcttaaaaaacggcgcatcatgagagtatatcctgcacctggctcggagggtcctacgcccacggagtctcgctgattgctagcac

SEQ ID NO: 51488 - DNA, 569 bp, Homo sapiens
tttggaaaatggtaggagtaggtggaagacctcttcctccctccctgactacaagaatattcgacctgctagctgtaaactgaaacagacagtagagaggtggctgggacttctggagtcaggccttgccttgtttgcttaacaaatgcaattcttgtgaagtttaaggatagagggtcgagaagccaagatggccgaataggaacagctctggtctacagctcccagcgtgagagacgcagaagacgggtgatttctgcatttccatctgaggtaccgggttcatctcactagggagtgccagacagtgggcgcaggtcagtgggtgcgcacaccgtgcgcgagccgaagcagggcgaggcattgcstcacttgggaagcgcaaggggtcagggagttccctttccgagtcaaagaaaggggtgacggacggcacctggaaaatcgggtcactcccacccgaatactgggcttttccaatgggcttaaaaaacggcgcatcatgagagtatatcctgcacctggctcggagggtcctacgcccacggagtctcgctgattgctagcac

SEQ ID NO: 51489 - DNA, 632 bp, Homo sapiens
aaataaataaataaataataaactagaaaaagatatgtaatcatcaatctcactaagtatacatttcttcattcttataatgattcttttatttttagtgtgagcccacttgaaataccagttgtacttttctccttkatattcacacatactctcttctgttctctatagtcacaccttgggaatcatttgatttccataaaaattattaatttttgtatccttgtttgcttattcaaatccttgaaataaactgtaaatggcaaaatagacatgatatacttcttgatagattctgaatgtcaacatcatgatgaaatttccaacaatgtttattttctttcacatccaatgacaaggccttatctctgtctcacctcacagcccccacctctgctcccaaggacttgacagtcattactagggaagggaagcctcgtgccgtcattgtgagttggcagcctcccttggaagccaatgggaaaattactggtaagcatctccactttctctcccagcatagctctcccttgtcctataattgcttaccccctacatgagctgctcctgcctttcgtgtggcattattctgtccctacatctcagctgactccatgaccctttttgattgt

SEQ ID NO: 51490 - DNA, 1248 bp, Homo sapiens
catttgtgataatattgctatacaacaataggcttctaatactacaggtcaagggtaacctcagtaatctacaccccaaatgattactgtgatcaacaaggtcagggacataatggatatgtgggatctgtacatttttggcatttgttgtgatgtcaatgatgaaaatatgaatatcttgagatgttgagagcttcgaaactaaaagccttaccaacataaagaattccacaaaccttaaaaagttgtatgacctttctgtctgttaaatattaaacttggagttctaaaattcaaaagggattatgaatatcgtttgataaaggagttgttttctgtctcatgtgtgtccatccctttgtaattcagcccccatgataaacatcaataaaattgcctcatattctttgaaccagagcagtctccaatcttgtccatgaagatccacatctccacatctattaaaaagaagaccctgctactggagatatatgtgtgtgtacatacacacatttctgagtatacatttctataaatatccatatattactatgtaatatatctaagataaatatgttatagatatatatgaaatatttgccttcactatgtttttatctatgtaaaagttactgaacatatatatatagagagagtaatagtgaatatatatatatatatatatatatccagaataaaaatcactggagatatatatatgcagctaaatataaaagatatatataaaatttgtatatatatatgtatatattctattatgtgcatgtcctacctcttcaaaaggataaaaacatttctttagttcaggagccatatcttattacttttttattccccccaaaaatctaataaaatcatattcacataagaggtatcgaaagtcacttattgaatgaaatcctttagcctgtaagtacataagttttacatttagatatttaatgaaatcgttaaaaattttcatgggctgttttaagtgcatgatgaaactggaaaattggagaattttgcccccatcccaggtcaactgcactgattcccgaktctcctcatttatcagatgatgataaaatatttgtcttcactatgtttttaatctatgtaaaattattcacttaagcatttaaaaatgacagctctgggatcaaactaaagttgaaggtgcagacatcagtttctgacaattccaaattgtatctgagcaaattccttatatatgtggtgaag

SEQ ID NO: 51491 - DNA, 581 bp, Homo sapiens
atatgtaatcatttatatcatactaaagatctcagaagaatgccaagcatataataaatgcttaatgtattttgaatcattttcttctgaaaatgtcrgtccaaattcctaagtttccagtttatgatcagagaatttaggcactgtgattatctgaatttcctccttttttgtttaatctttttgagtacttatatttaaaaactgatgatctggattctgtataaagcacattagtaaagcctcaccctagaatggatttcaaactggaataataatagccgattcgtgtcagtgcccactgggtatcaggggcttttctcagcactgtattacaacaattattctagtgcggttctattactatctttattttataggtgagaaaccgagaaagtgggactcaaggatgttaaatgacttcctcatgtgtctcccttagaagcctgagttcttaactatcctgctctactgcctgccatacacatgaaagatttaggaaaacaaaacaatacagaggttacatgagagcacatccctccttggcacacatctacctggtcgcactgagaaagagctca

SEQ ID NO: 51492 - DNA, 581 bp, Homo sapiens
atatgtaatcatttatatcatactaaagatctcagaagaatgccaagcatataataaatgcttaatgtattttgaatcattttcttctgaaaatgtcagtccaaattcctaagtttccagtttatgatcagagaatttaggcactgtgattatctgaatttcctccttttttgtttaatctttttgagtacttatatttaaaaactgatgatctggattctgtataaagcacattagtaaagcctcaccctagaatgkatttcaaactggaataataatagccgattcgtgtcagtgcccactgggtatcaggggcttttctcagcactgtattacaacaattattctagtgcggttctattactatctttattttataggtgagaaaccgagaaagtgggactcaaggatgttaaatgacttcctcatgtgtctcccttagaagcctgagttcttaactatcctgctctactgcctgccatacacatgaaagatttaggaaaacaaaacaatacagaggttacatgagagcacatccctccttggcacacatctacctggtcgcactgagaaagagctca

SEQ ID NO: 51493 - DNA, 581 bp, Homo sapiens
atatgtaatcatttatatcatactaaagatctcagaagaatgccaagcatataataaatgcttaatgtattttgaatcattttcttctgaaaatgtcagtccaaattcctaagtttccagtttatgatcagagaatttaggcactgtgattatctgaatttcctccttttttgtttaatctttttgagtacttatatttaaaaactgatgatctggattctgtataaagcacattagtaaagcctcaccctagaatggatttcaaactggaataataatagccgattcgtgtcagtgcccactgggtatcaggggcttttctcagcactgtattacaacaattattctagtgcggttctattactatctttattttataggtgagaaaccgagaaagtgggactcaaggatgttaaatgacttcctcatgtgtctcccttagaagcctgagttcttaactatcctgctctactgcctgccatacacatgaaagatttaggaaaacaaaacaatacagaggttacatgagagcacatccctccttggcacacatctacctggycgcactgagaaagagctca

SEQ ID NO: 51494 - DNA, 529 bp, Homo sapiens
cctggagatttcacttaaatcctgtgagctcagccatctatccccaagatgcagttcctccaagatacctggcaggcaccctggcaggagggtgtcacggttctctaacctggctgactactgagcctctgggctccatgaggacaggatgtctctctcactcgctgctagcccagtccctggcacagccctggggcttggcaaatatttgttgaatgaataaacaggctgtggcttataagctggttcagattccagctccccactcactccgcatggaagaatcacttcaatcctccaagccccmcgttcttcatctgcatgggggatattttgttgttattgttgttttttaaacttgggatttttttttttttgaaaaatagaacagatacagatacaaaaaccacacagcataagcacgtgacttaataatttattataaggcaactgaacagccttgtgaccacctctaggtcaagaaatgtaactttgcctgccacccctggaaacccctgcagaaccctgt

SEQ ID NO: 51495 - DNA, 621 bp, Homo sapiens
cagtcataaaaatatataaaacaaaaccttttagaaattcaaagagaagttagcaaaaaaaatcaatcataatgaaaaaaaaacatacagaagtttaaactggtggcatatgggtctaatttgacccacaattatctttactatagctgccttatattactcttcagactgtttgttttatgtttaaatttgatttgattccaatattttaaaatctagggcaatcttttagtggacaaccatgaacactgctatgggaactaataacctcaaaattgtagtggcttaaaaccacaaaggtgtatttctttctcatgccaatatccaactagggttggyaagggcctctgctcattgtggtcactcaaatattcaggctgaagaaagttcaatcttctttcatgcttctaagatcaccatatttcaatgaaatataagaattaagttttgattaaatttttttacccaaaagtgaatgacacacattattttccctattatttcactgtccaaagcaagtcacttgtgcaaatctaattttaaatgggtggaaaagaacgttgtcaacacagctcacaaaaagcaagatggtgaaataggactctgcagcaattgtccccc

SEQ ID NO: 51496 - DNA, 635 bp, Homo sapiens
tccgcccacctcggcctcccaaagtgctgggattacaggcgtgagccaccacgcccagccacaaaatattttttaaaattatctgggcatggtagtgcacgcctgtagtcccagctacttgagaggctgaggtgggaggattgcttgagcccaggatttggaggctgcagttagctatgatcatgccactgcactccagcctgggtgacagagcaagacccagtcactaaaaataaaaattaaaaaataaataaataaaaggggccctggagaggyacctcagcccttctgccatatgaggaaacagaagacagacgtaaaccaaaaagccagccctcaccagacaccacatctgccagcgccatggtcttggagttgtccagcctccagaactgtgaggaataaatgtctgttgttgaagccacccaatctatagtctttggttatggcagcccaaacggactaagacacgaagcttaccaaatggcagagccatgtgcttcccgagatcagcgatgctgaggagaaggctgatctaccccagttcaggaagagggacttagggctttccttggcaatgttctgctcctggggggtccttggtactcaaatctgaactctgttcctctgcctat

SEQ ID NO: 51497 - DNA, 635 bp, Homo sapiens
tccgcccacctcggcctcccaaagtgctgggattacaggcgtgagccaccacgcccagccacaaaatattttttaaaattatctgggcatggtagtgcacgcctgtagtcccagctacttgagaggctgaggtgggaggattgcttgagcccaggatttggaggctgcagttagctatgatcatgccactgcactccagcctgggtgacagagcaagacccagtcactaaaaataaaaattaaaaaataaataaataaaaggggccctggagaggtacctcagcccttctgccatatgaggaaacagaagacagacgtaaaccaaaaagccagccctcaccagacaccacatctgccagcgccatggtcttggagttgtcyagcctccagaactgtgaggaataaatgtctgttgttgaagccacccaatctatagtctttggttatggcagcccaaacggactaagacacgaagcttaccaaatggcagagccatgtgcttcccgagatcagcgatgctgaggagaaggctgatctaccccagttcaggaagagggacttagggctttccttggcaatgttctgctcctggggggtccttggtactcaaatctgaactctgttcctctgcctat

SEQ ID NO: 51498 - DNA, 661 bp, Homo sapiens
actcatctgtagtaactgttaaaaatggagattcccaggcctttccctgggagattctggaataaggctaaggaattgtttaaccagtttcctgcatgtgttttatgataaagccagttgagggaataatgtagtagagggacgctggaaaaaaaaaaaaaaaaaaaagtatgtttgacaggcagsgtgtcccaataagaatagaacaagggcatggagaggaccaggaattttgccttctagctgctttttcagtgggttaaccactagaccacacttcctctctaggagaggcaagggattaaaatcaaaggtttgccactgattcatgctgcctgctaatgctgcttattgcgccatgctgtgaccctaagctctctggcttggaaacagatgtggggagtgagaggcctgaggtactgggggatggaggaggcgggggaaggcagacggccagggaaagaacttcctctgctgcaaaatttcaggcaggagtggaagtcagtctaaattgttaccatgcagatctggaatcatttttgcaatctcctggctccaattccaggtttgtgcattctgcaacaagaactgaaaacttgttaattaatgctcctcgcctgacttttgcctctgccctcgtctgaatacatattaatattac

SEQ ID NO: 51499 - DNA, 574 bp, Homo sapiens
gtctcttaaaccacccacgccataagccaataaagcagccacaaggagatgttagcaaagcaaactctgagttctacacatcaaccaagtcatcatcaactgaaaaataaaatgtactggacttggcagtcagttttcagagagggacattttaagtaatctaaaataagtttgttaaaaatctccatttacatgtagttttataagcaaagtataaaaaggagctgaatttcatttttattctgattattaacgcatttatttcctacctgtaacttttggaaagtagtaagcaaagtactattgaaaaagtaaatttaattatttggaagaatggtgtcctgcacttaaaaagcactatcayggtacctcgttccgattgtacttactcagatccacatatccgatatccacatacattttagcaaacagagatcccagcataaaggcaaaaactagaccagtcattcccattacattcacagtacctgtcggtattacaaaacaatttaatcagataccgcaaatacttggtttttattcaacatgtttttaaaagtaatattacacaata

SEQ ID NO: 51500 - DNA, 574 bp, Homo sapiens
gtctcttaaaccacccacgccataagccaataaagcagccacaaggagatgttagcaaagcaaactctgagttctacacatcaaccaagtcatcatcaactgaaaaataaaatgtactggacttggcagtcagttttcagagagggacattttaagtaatctaaaataagtttgttaaaaatctccatttacatgtagttttataagcaaagtataaaaaggagctgaatttcatttttattctgattattaacgcatttatttcctacctgtaacttttggaaagtagtaagcaaagtactattgaaaaagtaaatttaattatttggaagaatggtgtcctgcacttaaaaagcactatcatggtacctcgttccgattgtacttactcagatccacatatccgatatccacatacattttagcaaacagagatcccagcataaaggcaaaaactagaccagtcattcccattrcattcacagtacctgtcggtattacaaaacaatttaatcagataccgcaaatacttggtttttattcaacatgtttttaaaagtaatattacacaata

SEQ ID NO: 51501 - DNA, 563 bp, Homo sapiens
caccaagaacggcatctctggaaatacgcgttaattctcctttgtctggccttgtagatggcacagtccacycaggccaaccagctggaaacacagaggcgtcctcaccctcgtccccatctctcatttccatttcctttcctgcacagccccaaatccagccctcctcttcaccccacgcctcttggtttacagccttcatcgtttcttccctggaattctgggatctctgtgcttgcaatcacagttcctccattttcgcaccacgaaacacacccacacacacacgggaacgcacacacgctcctgcaccccccacccccatcctgtctccctctgtgaccctctcgctccctctgtctctctccttctctctctctggctccagtccatcttgcacacagctgccagagtgaaaataaaaatcagattcagtcacaacttaaactcttcagcgtcccccatgctttcagggacatgaggacccagctcctgttgtctgccagggagtcacccagtttgatgccagctcagtgccagctcagatgccagctcctctggac

SEQ ID NO: 51502 - DNA, 1420 bp, Homo sapiens
agctaacctgtcccaacaggggattaaaaatatggtcctaactattaaagtacccatttctttacaggccaagagactgggaggatatatttttaaatgttaacggtgatgacatctaggttgtgggattatagatgatgtaggaaattacatctgtgcttttgtatttctaaaaggaaactatatcacatctatgattagaaaaatatkataataaatgttaggcaaaacatcataataagacccgcatgctgacttcaaagaactcacactcaggtggaggagtaagacacgtaaacattgtgtagatttttaaacaaatgtggaagaactttaaaacttgtaaagaattctaatttgggaaatttacaggaaatccttttgggggaggcatttgctgaagctgtgctttctgtgaggtttttgaaagatcaatttgcagatgttagtccccacccctttgtccacagggaggagagttggctgggctaatttgattctgatcttttgaaatattatttttgattacagaagagacccaggagggcttggggcacgaagaacaaataagttaaggaacatctctggaactgaaaatgaggttctgagattcctccaaagtctagactcctcatttcaagctttatttgggaaagagaatagttttactttaaattaacctaataaagttgagggggaggaaaacaataactgcttggtttacaaaagcattcccacgagtcttggtttcagattcacagacaaaatgaggccgggtatgaattaattagctttgttttgcatggaacatgagccgtcaagggcccttcccatgtgagcacaggtcagcaaaggtgcatgctcttgggcctaatctccatccaggtaagcccagggtgggctgattactcgtgcttccctcactcttcttcagcatctgctcatcaggatgctcaggccagcacacgttttcaagccagttatcagaaacaaaggaaaacatatcccccaaacttctctctccccactgagattcaaaccagtaaaactggtattacagtgaatgtgctgacagggcaccagtcagcaagaccgaatcagaaaagcttaaaattgagaagacaaaagcagtgctgagtttagccaaccagagcaggcatctctgtgctgctctctggtgctcctggacaatgcttaaatactctttaagggggaattcacttttacatatcaggtattgtgagaatgatagggtaacctatgactcagtttgcccctgcctgtccggtttacacttactatcatggcttaattattaacactgttccctctcactttcaaaagtgtcccaatttggacaatatattttacgaccacttgatgataatcattttcatagctagtatttagtaagagctga

SEQ ID NO: 51503 - DNA, 1420 bp, Homo sapiens
agctaacctgtcccaacaggggattaaaaatatggtcctaactattaaagtacccatttctttacaggccaagagactgggaggatatatttttaaatgttaacggtgatgacatctaggttgtgggattatagatgatgtaggaaattacatctgtgcttttgtatttctaaaaggaaactatatcacatctatgattagaaaaatattataataaatgttaggcaaaacatcataataagacccgcatgctgacttcaaagaactcacactcaggtggargagtaagacacgtaaacattgtgtagatttttaaacaaatgtggaagaactttaaaacttgtaaagaattctaatttgggaaatttacaggaaatccttttgggggaggcatttgctgaagctgtgctttctgtgaggtttttgaaagatcaatttgcagatgttagtccccacccctttgtccacagggaggagagttggctgggctaatttgattctgatcttttgaaatattatttttgattacagaagagacccaggagggcttggggcacgaagaacaaataagttaaggaacatctctggaactgaaaatgaggttctgagattcctccaaagtctagactcctcatttcaagctttatttgggaaagagaatagttttactttaaattaacctaataaagttgagggggaggaaaacaataactgcttggtttacaaaagcattcccacgagtcttggtttcagattcacagacaaaatgaggccgggtatgaattaattagctttgttttgcatggaacatgagccgtcaagggcccttcccatgtgagcacaggtcagcaaaggtgcatgctcttgggcctaatctccatccaggtaagcccagggtgggctgattactcgtgcttccctcactcttcttcagcatctgctcatcaggatgctcaggccagcacacgttttcaagccagttatcagaaacaaaggaaaacatatcccccaaacttctctctccccactgagattcaaaccagtaaaactggtattacagtgaatgtgctgacagggcaccagtcagcaagaccgaatcagaaaagcttaaaattgagaagacaaaagcagtgctgagtttagccaaccagagcaggcatctctgtgctgctctctggtgctcctggacaatgcttaaatactctttaagggggaattcacttttacatatcaggtattgtgagaatgatagggtaacctatgactcagtttgcccctgcctgtccggtttacacttactatcatggcttaattattaacactgttccctctcactttcaaaagtgtcccaatttggacaatatattttacgaccacttgatgataatcattttcatagctagtatttagtaagagctga

SEQ ID NO: 51504 - DNA, 1420 bp, Homo sapiens
agctaacctgtcccaacaggggattaaaaatatggtcctaactattaaagtacccatttctttacaggccaagagactgggaggatatatttttaaatgttaacggtgatgacatctaggttgtgggattatagatgatgtaggaaattacatctgtgcttttgtatttctaaaaggaaactatatcacatctatgattagaaaaatattataataaatgttaggcaaaacatcataataagacccgcatgctgacttcaaagaactcacactcaggtggaggagtaagacacgtaaacattgtgtagatttttaaacaaawgtggaagaactttaaaacttgtaaagaattctaatttgggaaatttacaggaaatccttttgggggaggcatttgctgaagctgtgctttctgtgaggtttttgaaagatcaatttgcagatgttagtccccacccctttgtccacagggaggagagttggctgggctaatttgattctgatcttttgaaatattatttttgattacagaagagacccaggagggcttggggcacgaagaacaaataagttaaggaacatctctggaactgaaaatgaggttctgagattcctccaaagtctagactcctcatttcaagctttatttgggaaagagaatagttttactttaaattaacctaataaagttgagggggaggaaaacaataactgcttggtttacaaaagcattcccacgagtcttggtttcagattcacagacaaaatgaggccgggtatgaattaattagctttgttttgcatggaacatgagccgtcaagggcccttcccatgtgagcacaggtcagcaaaggtgcatgctcttgggcctaatctccatccaggtaagcccagggtgggctgattactcgtgcttccctcactcttcttcagcatctgctcatcaggatgctcaggccagcacacgttttcaagccagttatcagaaacaaaggaaaacatatcccccaaacttctctctccccactgagattcaaaccagtaaaactggtattacagtgaatgtgctgacagggcaccagtcagcaagaccgaatcagaaaagcttaaaattgagaagacaaaagcagtgctgagtttagccaaccagagcaggcatctctgtgctgctctctggtgctcctggacaatgcttaaatactctttaagggggaattcacttttacatatcaggtattgtgagaatgatagggtaacctatgactcagtttgcccctgcctgtccggtttacacttactatcatggcttaattattaacactgttccctctcactttcaaaagtgtcccaatttggacaatatattttacgaccacttgatgataatcattttcatagctagtatttagtaagagctga

SEQ ID NO: 51505 - DNA, 1420 bp, Homo sapiens
agctaacctgtcccaacaggggattaaaaatatggtcctaactattaaagtacccatttctttacaggccaagagactgggaggatatatttttaaatgttaacggtgatgacatctaggttgtgggattatagatgatgtaggaaattacatctgtgcttttgtatttctaaaaggaaactatatcacatctatgattagaaaaatattataataaatgttaggcaaaacatcataataagacccgcatgctgacttcaaagaactcacactcaggtggaggagtaagacacgtaaacattgtgtagatttttaaacaaatgtggaagaactttaaaacttgtaaagaattctaatttgggaaatttacaggaaatccttttgggggaggcatttgctgaagctgtgctttctgtgaggtttttgaaagatcaatttgcagatgttagtccccacccctttgtccacagggaggagagttggctgggctaatttgattctgatcttttgaaatattatttttgattacagaagagacccaggagggcttggggcacgaagaacaaataagttaaggaacatctctggaactgaaaatgaggttctgagattcctccaaagtctagactcctcatttcaagctttatttgggaaagagaatagttttactttaaattaacctaataaagttgagggggaggaaaacaataactgcttggtttacaaaagcattcccacgagtcttggtttcagattcacagacaaaatgaggccgggtatgaattaattagctttgttttgcatggaacatgagccgtcaagggcccttcccatgtgagcacaggtcagcaaaggtgcatgctcttgggcctaatctccatccaggtaagcccagggtgggctgattactcgtgcttccctcactcttcttcagcatctgctcatcaggatgctcaggccagcacacgttttcaagccagttatcagaaacaaaggaaaacatatcccccaaacttctctctccccactgagattcaaaccagtaaaactggtattacagtgaatgtgctgacagggcaccagtcagcaagaccgaatcagaaaagcttaaaattgagaagacaaaagcagtgctgagtttagccaaccagagcaggcatctctgtgctgctctctggtgctcctggacaatgcttaaatactctttaagggggaattcacttttacatatcaggtattgtgagartgatagggtaacctatgactcagtttgcccctgcctgtccggtttacacttactatcatggcttaattattaacactgttccctctcactttcaaaagtgtcccaatttggacaatatattttacgaccacttgatgataatcattttcatagctagtatttagtaagagctga

SEQ ID NO: 51506 - DNA, 667 bp, Homo sapiens
aaatgtaactagaactcttcagtatcctagaccagtatgaaatgacagattttctattattttccttctgtttgtgtatagtttgtcactttttttcagcagtttgtgtccttagtgaatcacagagtaagattctaagcactttctgaacaaagtaacccctgcattagaaattggatactatgcaacagttgaaaagcaaagcctttcatgcatagtttcttgagcctcctgagcctttctccaaggtcaaggtgagggctccactcacaattctgaaactcctctttgtgactttagacaaataaccttcctgtgcttaaactacattacctacaaagatggtaatgcctgcccctagccacttctcagttaccttttttsaggaagtgagaaagtctaaaaaggactttggatccctttaagggacctgttattttagaaatgcattattgggagtcagggccacataatcagggcagtcagatatttgccacaaaggctcttgagacttcaaagaataaaaaaatcaatgaattgcttactttatcaaaactctgtatttgaaactttggatcttttaaaatttatatggttatagttaaaatactttacttctctggacctccatcattaataaaatgggcataaaatagtacctgtccca

SEQ ID NO: 51507 - DNA, 667 bp, Homo sapiens
aaatgtaactagaactcttcagtatcctagaccagtatgaaatgacagattttctattattttccttctgtttgtgtatagtttgtcactttttttcagcagtttgtgtccttagtgaatcacagagtaagattctaagcactttctgaacaaagtaacccctgcattagaaattggatactatgcaacagttgaaaagcaaagcctttcatgcatagtttcttgagcctcctgagcctttctccaaggtcaaggtgagggctccactcacaattctgaaactcctctttgtgactttagacaaataaccttcctgtgcttaaactacattacctacaaagatggtaatgcctgcccctagccacttctcagttaccttttttcaggaagtgagaaagtctaaaaaggactttggatccctttaagggacctgttattttagaaatgcattattgggagtcagggccacataatcagggcagtcagatatttgccacaaaggctcttgagacttcaaagaataaaaaaatcaatgaattgcttactttatcaaaactctgtatttgaaactttggatcttttaaaatttatatgrttatagttaaaatactttacttctctggacctccatcattaataaaatgggcataaaatagtacctgtccca

SEQ ID NO: 51508 - DNA, 581 bp, Homo sapiens
gtttcctgaggcctcccagtcatgtggaactgtgagtcagttaaaagctcttttatgtataaattacccagtcttgggtatttctttatagcagtgtgaaaatggactaatacacccactgttatgacgataaaggctgaaacatgtcttatcaggggtggrtgaaacatggaattaagtaactgatttaatgttacctaatttttctgtaaatttatatatctttctattaaaattaaaaaatacacagcaggaacaacaacaaaatccttccttattagtcccttgctgtgcattttcactgtcctcgcaggccccatctcctattgtggggaaaaatccaaccatatctcctgactgctgtcttcccttccttccgttcattctgtgattgctggtttttctttccttagttcttcatttatgtttctctttcttaaaagccccctgcagagttgcctttaaaattttataattggtttaatttttatttatttatttggcagagaagagcaagttagtaccttgtaccaaaacatcaaccttgtggagccaagattaattcagccatatgaacatgt

SEQ ID NO: 51509 - DNA, 581 bp, Homo sapiens
gtttcctgaggcctcccagtcatgtggaactgtgagtcagttaaaagctcttttatgtataaattacccagtcttgggtatttctttatagcagtgtgaaaatggactaatacacccactgttatgacgataaaggctgaaacatgtcttatcaggggtggatgaaacatggaattaagtaactgattwaatgttacctaatttttctgtaaatttatatatctttctattaaaattaaaaaatacacagcaggaacaacaacaaaatccttccttattagtcccttgctgtgcattttcactgtcctcgcaggccccatctcctattgtggggaaaaatccaaccatatctcctgactgctgtcttcccttccttccgttcattctgtgattgctggtttttctttccttagttcttcatttatgtttctctttcttaaaagccccctgcagagttgcctttaaaattttataattggtttaatttttatttatttatttggcagagaagagcaagttagtaccttgtaccaaaacatcaaccttgtggagccaagattaattcagccatatgaacatgt

SEQ ID NO: 51510 - DNA, 581 bp, Homo sapiens
gtttcctgaggcctcccagtcatgtggaactgtgagtcagttaaaagctcttttatgtataaattacccagtcttgggtatttctttatagcagtgtgaaaatggactaatacacccactgttatgacgataaaggctgaaacatgtcttatcaggggtggatgaaacatggaattaagtaactgatttaatgttacctaatttttctgtaaatttatatatctttctattaaaattaaaaaatacacagcaggaacaacaacaaaatccttccttattagtcccttgctgtgcattttcactgtcctcgcaggccccatctcctattgtggggaaaaatccaamcatatctcctgactgctgtcttcccttccttccgttcattctgtgattgctggtttttctttccttagttcttcatttatgtttctctttcttaaaagccccctgcagagttgcctttaaaattttataattggtttaatttttatttatttatttggcagagaagagcaagttagtaccttgtaccaaaacatcaaccttgtggagccaagattaattcagccatatgaacatgt

SEQ ID NO: 51511 - DNA, 463 bp, Homo sapiens
atctgctccatctaagattaacttacaaaaagtttatgagccagtaccaaccaatataaaaattttatgtgcattttgacaagaagcatctttcaaaaatttaaaatttttgaacctctaagttaaaatagtgttttaaataaagaaatatgagccaaaaccgattctttgagccttaaagacttagttttggggccacamaaatcaacaaatatagcaataaagccaaagaaaacttcttgatcatgaaagcagtcatgctgtcaccacggagagtatcaacatcatcaacattcatgttgttctcttggactcacaggaccatgtgtggtttattttcatttttattaatttaatttaattttgagaccaggtctcactctgccacccaggctagggtgtggtggcatgataaggagtcactgtaggcttgaactcccgggctcaagcgatcctcccactt

SEQ ID NO: 51512 - DNA, 309 bp, Homo sapiens
ccccagaagcatgcggcctgggcctatgctggttaragcatcacattcctgttttattttcacaatttagataaaattcacagctatgtgaattcacccactaaattcacggaattggatggttttaatttactcagagatatgtgaaaccacccccacagtcaatttcagaacatttctgccctttagctatcactctcctacccacccatcacccccagccctgagcaatcactaatctactttctgtttgtatggatttgcttattctggacatctcatataaatgggattatatagtatgtggtc

SEQ ID NO: 51513 - DNA, 632 bp, Homo sapiens
tttgaaaaagaaatacaacaacaaaaataatgcaaatttaaaaaatgctgtataaccaccaattaaatagcatttacattttcttagatattttaagtagtctagatattatttaaagtatatgaaagatgtgcataggccatatgcaaatactctatcattttatattaaggacttgaacatccacagatattggtatctgaaggggattctggaacccaaccattttggatacttaggagcaattttacacatattattccaatgcatagtcttatcaactaatttacaggaatctgtcaattcaccctggccctttactcatttgtttccattstaagagtgttggactgaaggaaggaaactaagcaaaatctgagtgacttcagattaataaggtcaatgcattataggtcttcatatatattacagaaggaatgggaagtggatctaaaaataaatgattgtgagattctcaaaaattaggaaaaaaatatttaaatatttaaatcaagcaataatttgtttagtaatggaatatatttaaaaggtattacttttaattttgatgtagctgaagttatttttctgctatcatattttaattaaaagatataggtattacagggaaa

SEQ ID NO: 51514 - DNA, 614 bp, Homo sapiens
catacattaaatatgcccagcacaatcactcccacccacagactcmcattttatatctccttcaggggccctcccaggagctgagctaagggagacccttttctcggtcatgctgaaagtttccttgttgtcaggtttgactccaggaacatccaaggacctcgcttcagatgtcagagataacaccacaaccttctatttggacagtcctttgtaaaagtcaaatcactttatcagatgatatcccacttgatcctctcagcagacctgagggaggcctttgagctggggttatcctctccatgttacagacagggtaacagagacctgtagagattaggtcatttgtccaaggtcagaaagccagctagtaagtgaatcacccaaccagaacccaccccgcctgctccccgcccccccttcccccgtctcgggctctttccgttgcctctcccagtgactggtttaagaggattatttattcttcagttgttttcgccgcctaatttctgtctttctttatcctttttttatcccccgtttccgcctccaaagagtagagtttcagtagggagtaagggaggccaagttcaccatcagaagaaaaatctaaa

SEQ ID NO: 51515 - DNA, 1629 bp, Homo sapiens
cctcagtcttgtctgcaaatttgggataatgattccaccttcacgcaaggatgctgtgaggcttgagtgagataatacaagtctataacacacttcagactgtgcctggcatttcaaactattccattattgttgttgttattcagtaacacacctggagggggccctgttgaacagctaatcttaggaacacagcatgaggactgggagttcgagggagggccagtcaatggagtgcagactgtggactggcttgtttttttttaaccccgagcatcagaaaagctgagttcatcctccctccaaaactgaatgcaaaccaagtcctggtccacaactgggggttgagggagaatttaaaccaccctctggtgggcctgactggtacttgtgccagcgtaagacacccatggtggatacaagccgggctgctgggtttcggaccctctgggctcagtgactcgggacacacttcccagccctgctcttcctcctccctttcagcacaatccagcccctccagggatcagactctgtggcccaggagtggggcagcttttggcaggagatcagagccgtggcctcaggcagggacgtggacaggagcaggcaggaggggtcccagccatgggcgagtgaggtgggagggagggtgagagacatctctctgggctctgcagagccagtgcccaggcaggccgaaggtctgactcagcctggctccttcttctgggccctcatcacatgtttgtggtctggaccacaggccccagcgacgacagtgtttgaccatgaactacacagcagacaagtcgtccattccatttctggtagagtcctgtaggatttcttgaaatcttgttcatgtggttgctatggaccagacactctttcagttctaaaattcaaaagtagctttttctttagaaaaaaaaaaaccgccacaattcaaagtgaaatttgtttctataaaaaggaaaaacaaatagtgcctttttaaaaaaccatagcccaaactggaacactgaaatatgagactgatatgtaaatatgcataccctctcataaaaatagggtggttttggtttatttacttttcccccttcatttgttgaatgtcattgaaaatccaccaagagccatcctgtaatgaggagagtgaacgcaacactattcacacctctccctgtttacagcagataattttttgtttttttttttttgagatgaagtctcgcgttgttgctcgggctggagtgtagtagcgtgatcttggctcactgcaacctccgcctctsaggttcaagcgattctcctgcctcagcctcccaagtagctgggattacaggtgcctgccaccacgcctggctaatttttttgtatttttagtagagatggggtttcactatgttggccaggctggtcccgaactcctgacctcataatccacttacctcagcctcctaaagtgttgggattataggcgtgagccaccatgcctggccagcagacaatttttaatccagggaatggatatcgagctgcttacaggggcatggtttgttgttgcaaaaattatccagttacccattctttattctctggtagggaggtgaatttccaaagtcc

SEQ ID NO: 51516 - DNA, 1629 bp, Homo sapiens
cctcagtcttgtctgcaaatttgggataatgattccaccttcacgcaaggatgctgtgaggcttgagtgagataatacaagtctataacacacttcagactgtgcctggcatttcaaactattccattattgttgttgttattcagtaacacacctggagggggccctgttgaacagctaatcttaggaacacagcatgaggactgggagttcgagggagggccagtcaatggagtgcagactgtggactggcttgtttttttttaaccccgagcatcagaaaagctgagttcatcctccctccaaaactgaatgcaaaccaagtcctggtccacaactgggggttgagggagaatttaaaccaccctctggtgggcctgactggtacttgtgccagcgtaagacacccatggtggatacaagccgggctgctgggtttcggaccctctgggctcagtgactcgggacacacttcccagccctgctcttcctcctccctttcagcacaatccagcccctccagggatcagactctgtggcccaggagtggggcagcttttggcaggagatcagagccgtggcctcaggcagggacgtggacaggagcaggcaggaggggtcccagccatgggcgagtgaggtgggagggagggtgagagacatctctctgggctctgcagagccagtgcccaggcaggccgaaggtctgactcagcctggctccttcttctgggccctcatcacatgtttgtggtctggaccacaggccccagcgacgacagtgtttgaccatgaactacacagcagacaagtcgtccattccatttctggtagagtcctgtaggatttcttgaaatcttgttcatgtggttgctatggaccagacactctttcagttctaaaattcaaaagtagctttttctttagaaaaaaaaaaaccgccacaattcaaagtgaaatttgtttctataaaaaggaaaaacaaatagtgcctttttaaaaaaccatagcccaaactggaacactgaaatatgagactgatatgtaaatatgcataccctctcataaaaatagggtggttttggtttatttacttttcccccttcatttgttgaatgtcattgaaaatccaccaagagccatcctgtaatgaggagagtgaacgcaacactattcacacctctccctgtttacagcagataattttttgtttttttttttttgagatgaagtctcgcgttgttgctcgggctggagtgtagtagcgtgatcttggctcactgcaacctccgcctctgaggttcaagcgattctcctgcctcagcctcccaagtagctgggattacaggtgcctgccaccacgcctggctaatttttttgtatttttagtagagatrgggtttcactatgttggccaggctggtcccgaactcctgacctcataatccacttacctcagcctcctaaagtgttgggattataggcgtgagccaccatgcctggccagcagacaatttttaatccagggaatggatatcgagctgcttacaggggcatggtttgttgttgcaaaaattatccagttacccattctttattctctggtagggaggtgaatttccaaagtcc

SEQ ID NO: 51517 - DNA, 538 bp, Homo sapiens
aatgtctcataaatatatgattagaattgatgtactttaattagtgtcttcattgcgtattgtcagtatgtcactaagtctcttttaatctacctgtcactcttttattttaaacatcaatttacttgttgaaaaaagtgtgtcatttgtcccattattcctctacattctacattttgataattggatccccatgatatcatttcacatgttgctctgtttcctgtgttttttataaactgagagtgatttctagatgtttgatcagatttggttcaagattctccccccatgttacatgtagtcagtcactctcccctagggcccacccaggcgctcacctacctccccaactttaagaactgcttaagataccatcccaaacatgagaataaactagtaaaattcacaaagcagctgagaattgtcctttattcagctgagtcttcagaaaatcacagtaactgtggttcattaatgtttcaggatattcttcattatcccaatcaatattcaattggaaatattyataaaaata

SEQ ID NO: 51518 - DNA, 557 bp, Homo sapiens
caatatggttctatagttctcaactcccaggctcaatgccccttcttggttttaaagaaatattttrtaacattgtcttgctacactaaaacaatgaaatttattaataatgtaatttaacctacatataacttttaaaagtaatgttatgtcctgattataaagtaaataaaaggaatttataaaaatgctatttgttgtagtatataaacattcatacacaaatataccagaaggcagaagaagctgtgagatgtgagatgactgacctacagatgctaaggaagactgatgagttttattatatctctgaagcagttacgtagtgctgtgatctacaaaatgatgaataattcttagcagatgtctatgttaagcaaaatatattgtaattggattcctataattcagtatacattaaaactgtgccaaacatttcttgtacttgtatgtaaaacagagagaagctctgaacttaggcaattataaatgaatttttcaccttcattttgtctggcaggactgctgttatttgcccaagacatcagataattttc

SEQ ID NO: 51519 - DNA, 549 bp, Homo sapiens
atgtcatggtaaaggacaacctaaaagtgatttctccattactcttgtactgttctagaacacttacagggtaagaatctctggagtcaagtctgccttaggtttgaattctggttatggtatttccagatgtgagaacatggggaagttactaaacttctttgagcctttttttccttgggtataaaatgggaataatactagtatcctatggctcttagtatttaataggtatcaggtgtaacttttattagtagtaaacktagactttgctagtgaatgatatatctttgttgtattatatttgtacttataacatctatttatatattatcttatttttatttattgttgatattcatctctacatgggattgtgcttctgcatatttacaggatttacatcttgcctgtgcagtgtttgctcttacagttgtttaccccaaagcatgagtcatctacaaagcacattttagttaagattgggcatatttatttctcaattctgttttcctttaaatgactcttttggccttcttaaattttggc

SEQ ID NO: 51520 - DNA, 566 bp, Homo sapiens
ttaaccttccgaycccttcaaaagagttatttttcttgttgctgaccaagaagaaatgccgggagaaaacgcagaggacgcattccctctcatcagcaaaagggttctatttgcaaagcaatattcaaataagaaataactgcgggctgcttttaagttaacaattgcaatcacagagaatgagcttctgtctctatgcatgtcagagtgccaagcccacagagtagcttcctgtgaatttggtcgtcaattaaagtcatgattgctggaacgtcacgacaactaggaggctctacattaccatgtcgcgacaggtagaagcccacagttactaccagcaggaaaagtcagggaatcaaaactgaatataggaaataaaattgggcggtgccttcgccttctacgaatcttgacttactcgggctgccgtcgttgccctgggatatctgaagacgccgtttcctgcgcgtcctgtatctatggagacggcaatatggaggcgatgtaagttctgagcgttagtcccaaggtcccagggtctcagggagcggcgcgagtggccaggg

SEQ ID NO: 51521 - DNA, 566 bp, Homo sapiens
ttaaccttccgatcccttcaaaagagttatttttcttgttgctgaccaagaagaaatgccgggagaaaacgcagaggacgcattccctctcatcagcaaaagggttctatttgcaaagcaatattcaaataagaaataactgcgggctrcttttaagttaacaattgcaatcacagagaatgagcttctgtctctatgcatgtcagagtgccaagcccacagagtagcttcctgtgaatttggtcgtcaattaaagtcatgattgctggaacgtcacgacaactaggaggctctacattaccatgtcgcgacaggtagaagcccacagttactaccagcaggaaaagtcagggaatcaaaactgaatataggaaataaaattgggcggtgccttcgccttctacgaatcttgacttactcgggctgccgtcgttgccctgggatatctgaagacgccgtttcctgcgcgtcctgtatctatggagacggcaatatggaggcgatgtaagttctgagcgttagtcccaaggtcccagggtctcagggagcggcgcgagtggccaggg

SEQ ID NO: 51522 - DNA, 560 bp, Homo sapiens
tacagtcaatgtattatattttaattaaaatttaatgtgaagaacataaattgataatttattaacataatttccctgtgtagactgaatattacatattctctcttagctcagacacttttgtagcctcagatatctcttgtgcatgaaattattaccgttccctgtatagctgagtctattacatatcggaatggacaattaacttaaatcacagtcagtaacgccactttggggatgcacatttagatatttcttttccaaaccgcaatcccttccctttaccacattctgccttttcctaacgctgtactamatttacgactttttgaactcagggattaggccacgttaatacctgcaccatatacagcaccctttagagtatcagtaaaaatatactcgctgaacttcgaatgtattcactaaaattacaatgaagtgtatggaaaatagatgaattccaaaacatgcctcagctggagcagaaatactagagtttcttctctttcttcaggcaagagccagtcttgagatgtgaaatgtgctttatcaactga

SEQ ID NO: 51523 - DNA, 1824 bp, Homo sapiens
taaaaacaggagggaagagaacaacagaatgaggcagtccaacgaatggcttagagtaactgctgaagacaagaccagagaaagtagccaacaggtatagttgaagagttagtagctgtaacttcccagagttgtctttcgaaaaattctcagatcttaaaacaaacaaagtctcaagcaggataagtaaaaataattccacacctaggtaggtaaaactaagagcaatataacctaaakgtaattagaaagaaaagagtgtctgttattatttgaacagacaactaagagcagaattcaaatcaacacaaaagaggccaggaagaaatggaagaattctatgaaaatacggaaaattactaaaagcctagaaacccagacccatttgaattcaagattgaggattaaatatatgtctataataacaaaaccttgaaagagtttgccactcatagactcctgctgcaaaacccctgaaggatgtacattggtgggaggcattagcaacaagacacagaggtagttggtaatacctgtgtgcctatgcagaagtgtggttatttaaaaagagtaacagtgaagtttaggattttttaatataaaactaaaatactaaatatttagtgtttaaaatactaggtattttagtactggaactgtaggcagagatttggatcaaattctaaagtccccatatatctaggagagaggaaagatgttaagaatacaaataaaatgtctacaggtaattgtcctaaaaaaacacacagaaatcagatgtacacgtttaaaaacaatagcggtgggttgaggtgaataaagaaacagcctcgtggaaagtaaaagtggcgaaaagaaaagcaaagaggacgcacagcagagtgcgcatccaagctgatgccaacaggaggtcagctaccttgacctatttcttttggcactgtacgcagcttaatttagtaggtctgaaaatgaggtgtcatgccacacatcaccatgagctcacatctgacctccaactattttgagatgacagagaaggtggatcatccttgaaaggtttggaagaacagcccttggaacaaggctgcagctgagcagcaaggactcttaagttttctccagtttgccttgccggaagaaaatcagagaaaaaaccaggagtttatacaagcttgcctatagaaatgaagtaatcaattcattctgtaagaccggcacatgctgctgaaatgcaaatttgagtaaggcagttgtgttaacaagatgttcaatcatactgcaatttacaaactgcaatgtccaagtgcacccttctaatctattaactaagtatccatccaaacccaaagcttccaaacagcattcacgtgtttcctgtgccaacggcagctcctttatgggcctcggttcttcctccttctgcagaccatgctttaatatacagagagaagcattttcctgcagtcttttcagaagcagaggtgcagacacagaggctgcgccagaaagaacatgggtggactttacaagcgaacaggatttggtaacaccacagaatatcccatgtgatgtatatggcatttgaagagatctattcactcccttaaggccatatgaggtcacctccaaactaaaaggaatggagggaagcagttgcataaaattactcaatccacaaaggttctctgagcacatactctattatgtgctggacactgcagagaatacaaaagagtaaaagaagaggtcatctctctccgtggggaagcaagtctaagccagagcataatgcacagttatttatccttaggtctgagatat

SEQ ID NO: 51524 - DNA, 1824 bp, Homo sapiens
taaaaacaggagggaagagaacaacagaatgaggcagtccaacgaatggcttagagtaactgctgaagacaagaccagagaaagtagccaacaggtatagttgaagagttagtagctgtaacttcccagagttgtctttcgaaaaattctcagatcttaaaacaaacaaagtctcaagcaggataagtaaaaataattccacacctaggtaggtaaaactaagagcaatataacctaaaggtaattagaaagaaaagagtgtctgttattatttgaacagacaactaagagcagaattcaaatcaacacaaaagaggccaggaagaaatggaagaattctatgaaaatacggaaaattactaaaagcctagaaacccagacccatttgaattcaagattgaggattaaatatatgtctataataacaaaaccttgaaagagtttgccactcatagactcctgctgcaaaacccctgaaggatgtacattggtgggaggcattagcaacaagacacagaggtagttggtaatacctgtgtgcctatgcagaagtgtggttatttaaaaagagtaacagtgaagtttaggattttttaatataaaactaaaatactaaatatttagtgtttaaaatactaggtattttagtactggaactgtaggcagagatttggatcaaattctaaagtccccatatatctaggagagaggaaagatgttaagaatacaaataaaatgtctacaggtaattgtcctaaaaaaacacacagaaatcagatgtacacgtttaaaaacaatagcggtgggttgaggtgaataaagaaacagcctcgtggaaagtaaaagtggcgaaaagaaaagcaaagaggacgcacagcagagtgcgcatccaagctgatgccaacaggaggtcagctaccttgacctatttcttttggcactgtacgcagcttaatttagtaggtctgaaaatgaggtgtcatgccacacatcaccatgagctcacatctgacctccaactattttgagatgacagagaaggtggatcatccttgaaaggtttggaagaacagcccttggaacaaggctgcagctgagcagcaaggactcttaagttttctccagtttgccttgccggaagaaaatcagagaaaaaaccaggagtttatacaagcttgcctatagaaatgaagtaatcaattcattctgtaagaccggcacatgctgctgaaatgcaaatttgagtaaggcagttgtgttaacaagatgttcaatcatactgcaatttacaaactgcaatgtccaagtgcacccttctaatctattaactaagtatccatccaaacccaaagcttccaaacagcattcacgtgtttcctgtgccaacggcagctcctttatgggcctcggttcttcctccttctgcagaccatgctttaatatacagagagaagcattttccygcagtcttttcagaagcagaggtgcagacacagaggctgcgccagaaagaacatgggtggactttacaagcgaacaggatttggtaacaccacagaatatcccatgtgatgtatatggcatttgaagagatctattcactcccttaaggccatatgaggtcacctccaaactaaaaggaatggagggaagcagttgcataaaattactcaatccacaaaggttctctgagcacatactctattatgtgctggacactgcagagaatacaaaagagtaaaagaagaggtcatctctctccgtggggaagcaagtctaagccagagcataatgcacagttatttatccttaggtctgagatat

SEQ ID NO: 51525 - DNA, 624 bp, Homo sapiens
atttttaccatatgtaagttctaaaacagtataatctgccaaaataatgacggaatcaaagctaagaaagctaaaatgaagtattcttaatatttcaaagccacaaaaaagaagcaataaaaaaaacagaaaagtgttgtttcattacacattcctaggtcataaatttcacgtagacttaaactaactctatataatacttgcccactgagtgatacaaagttattagttatattatgccaaatttagaatttcattaattccaaatgtaatatagtattaaaatgtggccaaaagaatcctggagcctgggtgacatggtgaaacctcgtctctacaaaagacacaaaaattagccaggcatagtggcccttggaccacctggtctatattaacgagctactagggaggctgaggtgggaggatggcttgaccccagaaagtggtggttgcagtgagccaagatggtgccactgcactccagcttgggcaacagaatgagacccctgtcctcctacccytgcaaaaaaaaaaagaatcctggtagtttcatagttaacactgtttcatatggtaatactgaaatgtcttagaaaactcaaaggacaaagttgtgaaaactgt

SEQ ID NO: 51526 - DNA, 1708 bp, Homo sapiens
cttttttcaaggtacccagatttcatactgctcaaacacacatgctgtacaatttgtgcagttaatgcaattattacagggtcctgaggtgacatacatcttcgtcagctgacaggattaagagattaaagacaggcataggaaatcacaagagtattgattggggaagtgataagtgtccatgaaatctttacaatttatgtttagagattgcagtaaagacaggcataagaaattacaaaagtattaatttggggaactaataaacgtccatgaaatcttcacaatccacgttcttctgccatggcttcagccggtccctccgtttggggtccctgacttcccgcaacaaacagatatgcatgaaaatgaaatatgcaaagcacattgatgaccttgttctttacggacattgtaatcagcctctagccatacagaacaaatgagaaattagaagcacttccaagaacgtgtgatggtgtgaaacccacttttgaccatcatgyacatttcaacatttgaagtgagacaggctacctggtaactgccccatggcggggtcatagtttaaatggcccaatgtcctgtagaggttaatttaatcaaaatgagctataaacatagaacaatcactatgtataattttaaaatagtttacctggcccgtcatggtggctcacgcctgtgatcccagcactttgggaggccgaggtgggcagatcacccacggttgggagttcgagaccagcctggcccgcatggcgaaacccccatctctactaaaactacaaaaattaggcatgctggtgggtgcctgtggccccagctgctcaggaggctgaggcaggagaatcgcttggattcgggaggcggaggctgcaatgagccaggattgtgcctctgcactctagcctgggtgacagggcaagactccatctcaaaaaataaaaataaaaatagtttatctgggtgggcattccaaaatttccgcatagatgatcacgtgaaacaatcactgtgctaaatgtggaggaaaattcatcacgataatcacaaaatttgtatcagaaaaaaattacaaatgtactttgtttcatgtaattttatgagttggaagtattttcttaaattggaacactataagataatatctttaggaaatggatatgccacaataggaagtatagtggggcaagtcttgtttttctcaagggaaaagccaccagcctgctttcataggcattgataaaaccaggaagaaaataaagtcacaaccaaatagtatacactgtctctactgaattcttctaattccttcccaacagaagtctaaatcctgcttagcctaaacatatctatagccagcgatgggcaaattatatttgctgtcagcatgatagaataagaatcagaaaccccccagcagtggggtaagatcgtgcacttcatcccctcaaaatgctgtcaaccccattccctctccatgccctcaaacaactgcacagtcacttgttagtgaatttctcgttcagcgttttgtttttttctctccatacttaaagaccaaatcatttgtttgctctgaagaaaaagaaaaaacaaaacaaaacaaaaaaccacccaccaaatcatttgaaatcactacccgttaaaaaaaatcaccagtggaactaaacagttgagtggtttgggatgtgttcgccatttc

SEQ ID NO: 51527 - DNA, 566 bp, Homo sapiens
acagtgtttattttaataattctaatattgttataagttgtcataagcttaytttcgtaattagagaatagtcttcaatttacactgaatgcatgtttggcaaatatactaatgttatatatgtacttctcttgttcagggcagtcacttgttttaagtaacatgtttatctttattaaaatatgaatttcatgcggttttacagcaaggttattggttaaatcaatattctcaattaatgaaactagtgacatcatcatcaagagcaatagctagcatttgttgaatcctgactatgtgtcaggcattattttaatcacttcatatattttaactcatttaatcttcacaatggctctactatatagaaacatgtattaacccaattttgccagagggttgagacacagagattttagggaacttaggcaaagttacatagctagaaattacagtcagtgattgcaaagcttgtgctcttaacttctattttatcttgtatctgtaaagatatttactaaccaagttaagtgtccttagagcatatttttatagtataaaaattg

SEQ ID NO: 51528 - DNA, 537 bp, Homo sapiens
tgcatatgaaagcatctgacatgggttatgcactcactaaaactggstgaacctggaaattctgcatttattcaataaatattaagtgaacgtctacaatatactagtcagtactctaggcactaggaaagggccataagcaaaaagcacaaaaatcttgttttcttggagacaacatctacctcctgtaacttctccgactggcccgcctggcttctttggacctccgtctggcttttatataacacctcctccacggaatattgtcctttgagattctgcagatcgctgtggtgtacctcccctctccacgcccctttcctccatcctaaacaagcagccttaattatttcaaggagtaagcaaggatgcggaaacaggagcgaaaactggactgggtggggtgaaggcgggtgctaagacgccagggctgaaaaagaaatcaacagaaccgctccgactccgggccaacgtcaagacgggcgggtccgaatcaggtgtgtcacctgacacctctcccgggaagggccatcgtcc

SEQ ID NO: 51529 - DNA, 537 bp, Homo sapiens
tgcatatgaaagcatctgacatgggttatgcactcactaaaactggctgaacctggaaattctgcatttattcaataaatattaagtgaacgtctacaatatactagtcagtactctaggcactaggaaagggccataagcaaaaagcacaaaaatcttgttttcttggagacaacatctacctcctgtaacttctccgactggcccgcctggcttctttggacctccgtctggcttttatataacacctcctccacggaatattgtcctttgagattctgcagatcgctgtggtgtacctcccctctccacgcccctttcctccatcctaaacaagcagccttaattatttcaaggagtaagcaaggatgcggaaacaggagcgaaaactggactgggtggggtgaaggcgggtgctaagacgccagggctgaaaaagaaatcaacagaaccgctccgactccgggccaacgtcaagwcgggcgggtccgaatcaggtgtgtcacctgacacctctcccgggaagggccatcgtcc

SEQ ID NO: 51530 - DNA, 568 bp, Homo sapiens
taaagcccctcagcccgtgcgttacatataaaaaggaatcaatagatgttagctatttaaatgttttccactccatttgcgtgatcttgggcaagtcacctctaccgcctgaggttctgtttcctcaaatgaaacaaaaaatgagttctacggcgcaggctagagggggagtgggcgagagcctcccacttgaagtgcacctcccccctgacctccacgaccctttgtggagggcactggaggagctggcatttaagccctgtccagcttgaaggtctatgaagcaagcattagggatggctccttcccttggggckttccagtggggcagtggggctctcctacttcagccccgagtaaacactggggtttttctagcccagcacttaacacagttctttgtaatggttccttagatgtgtctgttgccaagtggaaccagattaagacctttagaagctaatttgaaaacgatctgaaaacattatgacttccttattttataaaaataatactaaatcataaaataaataaatagaaatccaacaaagtgctgggtttttccatg

SEQ ID NO: 51531 - DNA, 630 bp, Homo sapiens
atatagtttcaaatactcatatgaaagctaaccaaagtgactgataataggtccactaaaatggctataaatagctcacgtatcctggagtgggttcctgctaatttatcgtctatgtaaatgtcgtatatatgatagatacacacaaacatatataattatttaagatgtgtatgtaaggttatgaaagataattttgctatgattagtacagaattgattttatttttctgaagatgttttgctcaatataagaatttagctgggagcagtgctcacacctgtaatctcaatactatgggaggctgaagcaggaggatcacgtgagccccagagtttgaggccagcttaggcaacatagtgagagctcatctctaccaaaaataaaaaatgtaattagctgggcataatggtacacaccttgttcctagytacttgtcaggctgacgcaggaggatctcttgaacacaggagtgccaggctgcagtgagccatgattgtgccactgcagcccagcctgtatgacagagcaagaccctgtctcaaaaaaaaacaaaaaaaaaattaaaatttaacttataaatcctccagtagtaccagagcttttcattgagtactacaaattaagtc

SEQ ID NO: 51532 - DNA, 624 bp, Homo sapiens
gcagacaccaggtcctgccaaatagccagtacaaaactcaccattaaggttggctcagcagatgtccagcacaattttcttctcacttttcaaaccatttggggaatcatgaggtstttccctcatccagaagaacactcacctacatatcagccactccttccctagaacctacaggtatggagcaggctgggttttttcaagagcctcttatcctgtaaatctttacacagggcaatggcaggtgcatgtacagcccatatgagcatggggaatgcttggtgttatagaaaggggatcacagtggtgcccaactgatggatctatgttcagtttggctccaagcaggaagagactcttcccaccaaagaggtttgttaatcccggggtccccctcccagcccctggaggcatcagatacagctgtcagaaacattgcagacacagagtgatctcacagagacattcagtttgactggttttactgctgttcccagggttgacaagcagaaatacagaactaatcatggttcctgatacagacgccaaaacaaggaagtgatctgttccagtccaagcttccaagaaataaagaactaggtggggcacactaaacaagccccc

SEQ ID NO: 51533 - DNA, 537 bp, Homo sapiens
ataagcatcagccgggtgctacacaggtagtgtgatgaacgaggtctttatccatgtgtgatgatgttgtgggaggaaacagtggctgcttgaagaaaataatctaaactgagaactgaagaaattttaggagtcatgcagataaataggatgaggagggargatggagagatagtgtttggcagaagaaggcataaattcaacgtccaagacagtgcatgggccttcccaagaattaaaagaagttcaatacagcaaatcttcaaaagccttatagatcaagttaaggaattcaggttatgggctaatgattttggagaaatgtcactaaaggactcaggaattatataaagagtttgatgaaaccagagcagtatttgataaagataacggaatggagcatacaggacggaggaaggcagcgatggtggttgggggaggacggtgcacaatattaggttctggaaggccactgaagagactctgacagtggttcaactatgaaaatattcataactgggactaggaaaatggcga

SEQ ID NO: 51534 - DNA, 539 bp, Homo sapiens
caatttttgtctttccactgactcttttctctacccagaatattttccccagtcttcctatctgtcctatcttgttatccagcttctagccaaactgtcactatcatgttatttctcttcagagcacttgttgccacctgacacttttctaatagatgttaattaatagattgattagatagagtattgctttcttcacactagaacatactctctgtgaaggcagtgacccatttgcttcattcacctctatattcccagaggaaaaaaacttatsttctcatggtaaggttcagaaaaccttccaaagcacactctgttctgctatgttgcagaattagagttctgttccccttagccctgccagctcatgtacaattggtaagtagggaaatgacgtcagcataatgcaaaagtcatgtctgtctgttcacatttttttcctagaaaattaatattttaagtgaatagggcaagtttttcaaaattaaagataaagtctggacatatatgaagttcttacttaaatataatcctaa

SEQ ID NO: 51535 - DNA, 1436 bp, Homo sapiens
agcatgttaatttctaccaaaagtctcttgggatttttattaggataacattaaatctatacatcaatattgggagaattaaaatcttaacaatatctgctctccatatagtatgtctttacggacctactatatttctctgcttatttaggtatcttaaaatttctttcagcagtggtttttcagtttatagagaataggtcttattagattatcctaaatcatgtatgtttcaayggtcctgtaagttctacttttaattgcatttgccaatttttcattgcttgtatatggaaatacaattcatttttgtatattgatcttatatttcatgaccttgctaaatttacttaatagtagctgttttttaaagtagattccttagagttttcttcagagtctatcatgttatctgcacatcaggaaagtttacctctctatacctagtcagttttgtgcctattgcattccttacctcatttcctgtgctgcccatggtccattgtctgaaaataaattttagatagtttgtccagattcctaactgtttacaacaggaggacaaatctggtacagtaattcatcagagccagaagacagaatttcatgagatcaattttagcacagcttattccaccaaatcctactttgtatacttcatttccattaaacaatatcattaaaatgtcttcatatcgtcaaaaaacttcataaaaacttccatttaataactagtattctatcatgtgaatattttgtaatctattcaattctttattatcagactattaggttgttttcatgagtttgaatattgctgtagcaaaccttcttatgtgctctctttgtgtttctgatactttttacttacttttggaatagtaattctctcactgtattataggatttttgtgggtttctcgaggaggagaacaatgaattacaactctttacatctgcccgatgcctagcagtccagggaatatcaaagaaactcagtaaatttcccatgaacaaatgggacttggtgctccttgcgaagtgattgacctacacagatgatgccttttatgtttgtaagcttgaaccttttcaagacacacttacgatcttcacattcctgggaggtcagaaagttgtatatcagttctgctataagatagaagaaacaaatacagagaggtaggaagtcaggccaagcagctagtccctcgcagtgacaggaccagggtctcagtcacctctctcctattcctgtgccttttctacctgctcctctggattctctgaaccaaggcagccacccagaggtctttggaatttctaggctccagtgctgcatgctgctctccaagtaagagcagaacacagtgagcttccaaaggccttcctaggacagagctttcctctgggaacctggatttaggggttggtca

SEQ ID NO: 51536 - DNA, 638 bp, Homo sapiens
gctccttttaatcaattttcctgtagaataagtgactacagagtgagtggcactgttttctkgttgcgtgcatggcaagggatacatgcggggtccaactgctcaaccttgtgcctctttcctgcttcccacagtacctgatgcctccaagtgctgagacttttgagggtttctgaggcaatattacctactgtaggcagtcagctgcaacctacttgtctgctatgctgggtaatgcttccaacattttatggtaatcttacattttccattgcatcctctcactttctttgtccttgtaaatgaatacctttatttcattcctttagacatggtggtatggtgagaaatacaatttatgtgacagaagtgttctgaaagaaccttgaacttcaccaacaaaaagcactcaggtggtggcccttgagttaatctctctgtaccaaagaggcaactcctccagttttgagtcttcagctctggcggttttcaaatgtggaccctgcaggtggcaagcaatgagcaagtaaacagtttaagaaggtcagccagtgggtagcagggaaatctaattaatttgtactatacaagtagtacatgactcagtccttttgtaaaaatgtagaatagtgcagcca

SEQ ID NO: 51537 - DNA, 747 bp, Homo sapiens
tactgttatgtaagtttcacaacagtatgaggtagacttttcaattatccctattttaaacataaggaagttgaagtttaaatatgttaaggagttttcctcagaacgtattaaaaaaaaagaaaaacaagacctagtggtagacataagggcacgcactagaaaaaaaaaaaagtcaccttagagctgtcatattgtgtctcagggcctctttgtggcttactcaaaggagcaggaagcccctgccaggccttatttgctgttcccagcaggtgcttacaacatggcagagtttgtgagcacttggtggggacagagtgtatggcctgtctccagcagatcataagctaattgcacacaatcattcccctggaccaggcccattgtgcactgttagaattctcctcttacagattttcttaacaaattgtatttatattgatctttaccctgatgactactactaatatgacttaaaacaaaacaactggagcctaataaactgactatatcctacacttatacatgttccataaaatctatggtagaaaggcattcrttcccatgtctaatacttgcctgtattttgagatttgactacattgtcttctgcaatttgaattttctagatcccctgggtaaaaatactttcgcctattactctttctaatcatatctattgtttgacttcttcacattttatatatagtttgggttattatggtctaaactaccattttttctcag

SEQ ID NO: 51538 - DNA, 519 bp, Homo sapiens
tgaagccttctatagtgaaacaaaatcagaaaagcatacataaatttaaactctgggtcacttaataaaagtctgtcagtggagtcatacacatttcctacatcattacctactcttcttgtgcatagtatgaaaattatctctagatgatgtgattgaytgaagataacatgtattttgtcctctgaaattacaacatacttcaaaaatggtagcttaaatgacctttacaagcaaaatattggcattaacatggtctcaagtgttctacagaagcagtggctatttttggtttatgatctccttttccccatctctctgattatttataaaatttctgacactgagtaagcaacccgatacatatttccctgaaaaatggaaatgatgtgggtgggtattccttgacactaaggaatgaatatctttaaacactttccaaaaaaaatctcatgtttcaatacaaatcaatgaaaggaaaacataaggtcaagttacttagaaattaatacattcaag

SEQ ID NO: 51539 - DNA, 538 bp, Homo sapiens
tgacctcgtgatccgcccgcctcggcctcccaaagtgctgggattacaggcgtgagccactgagcccggcgaaatgtgtttatttataagaatgagtctaaatagtctaatatggaatgagttacacaagttaaataagtttgctttcaatatactatttccataatattttaaaataatattttatataggcatacatatataacaattatatgtaaatatacaattcatggtaatgtagaatgaggaatggactaggtagagttacaacgtaggcccttattatatattgtattagtattttcattttatgaatactgaagatgttaaatctccaataaaatttagcatttggtaattctgggggtgggaattggtcattattaaatttaatccttacctgaatacttaaaatttcccactatatatatatatatatatatatatatrtgtgtgtgtgtgtgtgtgtgtgtgtgtgtgtgtgcattactgccaaaagaattcaaagacttatgtaacacctaaaacttgtcttgtg

SEQ ID NO: 51540 - DNA, 542 bp, Homo sapiens
gtgacactctcactgagtgggggagtcgtcagagagcccgggtaggtccagtagtgccggctggcaggcaggaggcacttggggttgaagcagctgaactgggctttggtgccctggaacaaggtggaggaacccaggaatcagcatagacctcccactgggaccaaatcagcaacttctccaccmatctctttctttcttttttcttttcttttctttttttttttcttttcttttctttctttttctttctttctttctttcttccttccttccttcctttcccttccttccttccttccttcccctctctctctctttctttctttctttttctttttctttttttttgaggtggagtctcactctgtcacccaggctggagtgcagtggcacgatctcggctcactgcaacctctgcctcttgggttcaagcaattctcctctctcagcctcccaagtagctgagattgtaggcatgcaccaccatacctggctaatttttgtatgtttagtagagacagggtttcaccatgttagcc

SEQ ID NO: 51541 - DNA, 337 bp, Homo sapiens
  misc_feature (1)...(337): n = A,T,C or G
cnnnnnnnnnnnnnnnnnnnnnnnnnnnnnnnnnnnnnnnnnnnnnnnnnnnnnnnnnnnnnnnnnnnnnnnnnnnnnnnnnnnnnnnnnnnnnnnnnnnntgttttgttttgtcttacacatttgatgttccctgtgtagttatttgtatgcctggaaggggttttatatatatatttttagatcatttaacttttttataaagggtacagggttgaaaaatgtgaaactaatgttattttcattatgatgcycttcacttttactattttatccacccaccttgtattatctttgatcctgcagagtctttcaagtctcaacttgaaaatccact

SEQ ID NO: 51542 - DNA, 788 bp, Homo sapiens
acagtaaaaataagaacatttaataatgttcatcaagaagaaataacaatcctaagtaactcttataaaaaggcttcaaaatacataaagcagaaatggttataactaaagggaaaagaatagatgaatccacaattttgttggaaatttaaatatctctttctcattaattagtaacacaaataggagaagaaaaatcagtaagaatatagatgattgacatttatagactattataaccatattgcagaatacacattgttattgagtgcaaaggaagcatttgccaagttacacagtagtcccaccttatccacaattgtaatttctgtggtttcagttacttgtggtcaaccatggcttacatagggttccagacctcataaaccagtctagtgggagagacagatattgatagcataataagtcctatatacattgaataataaaagagaatactatcaaaacttttttttactgttcttattttaacccaacaaaaattttcctctttgattttataaaaagctgataaaaataatatgtattcttgactacagggttaatcttatatacagcatatataatatgcaataatgaaatcaatttatatatataaaagccaagataaagttaaaataattgtgtataatgacatatgtaatagcctaattaacttatatatatatttgtaatatgyaggatggtaatttttacataaaggtatatgtgtactatatatgtgatttaatagataaaaaatttatatatatgtgatttatgtattt

SEQ ID NO: 51543 - DNA, 605 bp, Homo sapiens
caatctataaataatctgctgatgactctaacattatcaaaattaagaatgtctgctcttctaaagacaatgttaagataataaaaataaaaaaatgcagactgagaaaatagttacaaataaattagttgataatggtactttacctggaatatataaagaattcttaaaacacaataaaagaatattttccgatataaaawgtgcaaaatttaaacaaatactttaatgaagaagatatagaaaacaaagaagcacaagaaaagacactcaaatctatcagttattaagaaaatacaaattgaaaccacaatatgatactactatgcacttattagacagactaaaatgtaaaaacctgacaatggcaattgttcatgagaatgcagagcaactgatattcctctatactgctggtaagaaatgtaaaatgccttatccattgaaagaaacagcatggcaatttttatttttcaaaacttcaaacccttttttgataagtgtgaaatgtttttggcatttttaatgtaatttaattttaatataattgaatgttactataaaaagtatgaaaataatgatttatagtttttctttgcttgtaa

SEQ ID NO: 51544 - DNA, 605 bp, Homo sapiens
caatctataaataatctgctgatgactctaacattatcaaaattaagaatgtctgctcttctaaagacaatgttaagataataaaaataaaaaaatgcagactgagaaaatagttacaaataaattagttgataatggtactttacctggaatatataaagaattcttaaaacacaataaaagaatattttccgatataaaaagtgcaaaatttaaacaaatactttaatgaagaagatatagaaaacaaagaagcacaagaaaagacactcaaatctatcagttattaagaaaatacaaattgaaaccacaatatgatactactatgcacttattagacagactaaaatgtaaaaacctgacaatggcaattgttcatgagaatgcagagcaactgatattcctctatactgctggtaagaaatgtaaaatgccttatccattgaaagaaacagcatggcaatttttatttttcaaaacttcaaacycttttttgataagtgtgaaatgtttttggcatttttaatgtaatttaattttaatataattgaatgttactataaaaagtatgaaaataatgatttatagtttttctttgcttgtaa

SEQ ID NO: 51545 - DNA, 553 bp, Homo sapiens
gcacatagaaacttcattcagggtggactaggactgcagggctgctgggggacacagcatggctggagcgatgcgggatcgggggtgggcacagcgatgcgggagaggcagaggmgtggggatcgggggtgggcactccattctggcctgtgtcaccaatttactctgaaatctgtaaagtggcagtttggatgttacaagctgagctgtgtcccttcaaaccacatgagaagtcttaactttcagtacctggaaaccatcattctcagcaaactattgcaagcacagaaaaccaaacaccgcatgttctcactcataggtgggaattgaacaatgagaacacatggacacaggaaggggaacatcacacaccggggcctgtcatggggtggggggaggggggagggatagcattaggagatatacctaatgtaaatgccgagttaatgtatacatatgtaataaacctgcacgttgtgcacatgcaccctagaacttaaagtatgataaaaaatatgatacatgtatatgatagaagattattaagccatta

SEQ ID NO: 51546 - DNA, 553 bp, Homo sapiens
gcacatagaaacttcattcagggtggactaggactgcagggctgctgggggacacagcatggctggagcgatgcgggatcgggggtgggcacagcgatgcgggagaggcagaggcgtsgggatcgggggtgggcactccattctggcctgtgtcaccaatttactctgaaatctgtaaagtggcagtttggatgttacaagctgagctgtgtcccttcaaaccacatgagaagtcttaactttcagtacctggaaaccatcattctcagcaaactattgcaagcacagaaaaccaaacaccgcatgttctcactcataggtgggaattgaacaatgagaacacatggacacaggaaggggaacatcacacaccggggcctgtcatggggtggggggaggggggagggatagcattaggagatatacctaatgtaaatgccgagttaatgtatacatatgtaataaacctgcacgttgtgcacatgcaccctagaacttaaagtatgataaaaaatatgatacatgtatatgatagaagattattaagccatta

SEQ ID NO: 51547 - DNA, 553 bp, Homo sapiens
gcacatagaaacttcattcagggtggactaggactgcagggctgctgggggacacagcatggctggagcgatgcgggatcgggggtgggcacagcgatgcgggagaggcagaggcgtggggatcgggggtgggcactccattctggcctgtgtcaccaatttactctgaaatctgtaaagtggcagtttggatgttacaagctgagctgtgtcccttcaaaccacatgagaagtcttaactttcagtacctggaaaccatcattctcagcaaactattgcaagcacagaaaaccaaacaccgcatgttctcactcataggtgggaattgaacaatgagaacacrtggacacaggaaggggaacatcacacaccggggcctgtcatggggtggggggaggggggagggatagcattaggagatatacctaatgtaaatgccgagttaatgtatacatatgtaataaacctgcacgttgtgcacatgcaccctagaacttaaagtatgataaaaaatatgatacatgtatatgatagaagattattaagccatta

SEQ ID NO: 51548 - DNA, 580 bp, Homo sapiens
caagctgggtcccgaggtcacctggagtgcagaaatgtccgcccagccactccccctctgctggccaatcagcttataacccatcactcaaacaacatgggggcccccgggagaagggccagcctgggcatccacattccagctcaagtcctgatgccagttctggttggccaagcctgggccagaggtcctacagaccaagagaggggagaggtgattccccaggtgacaacatcaaggcagttcccagcaaacaggatagtaagggtggccagggaaaactgccagcgtccaccatggctccagcgcttctgctgggagggcaggttggtgtgtttgaaaaacataggtccaccgggcgcagtggctcatgcctgtaatcccagcactgtgggaggccraggtgggcggattgcctgaggtcaggagttcgagatcagtctggccaacatggtgaaaccctgtctctactaaaaatacaaaaaaagtagccggacgtggtggcgtcctcctgtaatcccagctattcaggaggctgaagcaggggaattgcttgaaccaggggtgtggaggttgcagt

SEQ ID NO: 51549 - DNA, 424 bp, Homo sapiens
tgggtaatattaggtaaattaatgaaaagaaaaacaaagatagcaggataggagactgggacaatgaataaaggcatgatgatgacattagggtggggaaagcattgggaagctcggagggaaccaacaggaatacaacttaggaagaaggcctttaaaaccacaatttactcttcaaagcttcagatccttgactcctaagaatcaaagtttaagatggtaagaatttggggtctccacctcacctccatatccctcaaagtttacactattaataaattccgtgcattttatcatctgattttttyttacacattcaataaatgtttgccaaaaccctgctcccttcaacccccagtccctagcatcaagttttacaatactatcacaggagaaagagacctgccacataaatgaacgccct

SEQ ID NO: 51550 - DNA, 1523 bp, Homo sapiens
tttttattatcctgacaaagaaagggcccttaattattattgtctaaacaaattggtaagtcacagtttgaagtaaattagtaagagtggatattttcaaatgtgataaaatagcacaagtggctagtgataaaattggaagttacagttaacctggttggctgtgatcttacgtataaaaggaaaatttaagtatattatgagatactgattacaaaaatccatagtaaatgtcattttattttagtttttatttgaattattgttccatttattctgttttcatatagtcttaattttatcacattttgttgttactctattacttttggaaaccatcaaattagaattcattgtacagttgaagaaattgatttagtacttgaaagaaatatttcttgcacataggtagttggaaaatttttccttgggttgcctttaaggaagttggctttctggcccttggcctttaattttcttcatcaacccaactacatcagaatagaattctcataaaagaagagacattaagagttctcaaagtttatctggcatatggataggcttatattcaaaacatcttagtcatgtggctataaattcaaagtagaatcacgaagtagttttaagtttctgatatgagcataggtgggtatgaaaacaagacaaatgctgttcaaggaaaaaagttggcaagcttaaggttaaacaaaagtaaaattacttttcacgtgttctcaccttttcttccaacctccctatcatttctaaatacctgtttcaattgaacttggtatctctttccttcatagatagtacttttgtgggttgtgtgcacgtgtgcatgcacacatttgcatatatttgtgtattttgctgtcttgtggagaaacgaaatctttcagaatgagaaaaaaatgtatttcttcttttttccagtatatttcttccctcataggcctgtaacataaatgctagctaaatattaaagtggattgagttacttcctttaaaaaaaaaagggggctctataattaactgtcaggcccgctggtgcctttcctgggaggggctcagcacttctggctgggttgcctgtggaaggtcaccattgtcagcagccatcccagcccccatagcaaggactggccatccagagctcacaaagcagtcaatcccagcagcttccacaataacatgtgtatatctctgtygctatacgtccacattgttctggaatcatcttttgggccatcttccctacttgaagacactgtcatgcatcttggtgtggtaggtgctccgcaaagtgctaaatgaatgagcgagtcagtgacagtagagggcaggatgcagtgctggggatgcagggctgttccaggctgagcctagctggggaccatgtgggagcagaggcccaggccagagctcagcctgtaggagggcatagaccctgacagctctatagggagttttccaagagcagaggctttggatatagggttggctgagaaattaccatc

SEQ ID NO: 51551 - DNA, 1523 bp, Homo sapiens
tttttattatcctgacaaagaaagggcccttaattattattgtctaaacaaattggtaagtcacagtttgaagtaaattagtaagagtggatattttcaaatgtgataaaatagcacaagtggctagtgataaaattggaagttacagttaacctggttggctgtgatcttacgtataaaaggaaaatttaagtatattatgagatactgattacaaaaatccatagtaaatgtcattttattttagtttttatttgaattattgttccatttattctgttttcatatagtcttaattttatcacattttgttgttactctattacttttggaaaccatcaaattagaattcattgtacagttgaagaaattgatttagtacttgaaagaaatatttcttgcacataggtagttggaaaatttttccttgggttgcctttaaggaagttggctttctggcccttggcctttaattttcttcatcaacccaactacatcagaatagaattctcataaaagaagagacattaagagttctcaaagtttatctggcatatggataggcttatattcaaaacatcttagtcatgtggctataaattcaaagtagaatcacgaagtagttttaagtttctgatatgagcataggtgggtatgaaaacaagacaaatgctgttcaaggaaaaaagttggcaagcttaaggttaaacaaaagtaaaattacttttcacgtgttctcaccttttcttccaacctccctatcatttctaaatacctgtttcaattgaacttggtatctctttccttcatagatagtacttttgtgggttgtgtgcacgtgtgcatgcacacatttgcatatatttgtgtattttgctgtcttgtggagaaacgaaatctttcagaatgagaaaaaaatgtatttcttcttttttccagtatatttcttccctcataggcctgtaacataaatgctagctaaatattaaagtggattgagttacttcctttaaaaaaaaaagggggctctataattaactgtcaggcccgctggtgcctttcctgggaggggctcagcacttctggctgggttgcctgtggaaggtcaccattgtcagcagccatcccagcccccatagcaaggactggccatccagagctcacaaagcagtcaatcccagcagcttccacaataacatgtgtatatctctgttgctatacgtccacattgttctggaatcatcttttgggccatcttccctacttgaagacactgtcatgcatcttggtgtggtaggtgctccgcaaagtgctaaatgaatgagcgagtcagtgacagtagagggcaggatgyagtgctggggatgcagggctgttccaggctgagcctagctggggaccatgtgggagcagaggcccaggccagagctcagcctgtaggagggcatagaccctgacagctctatagggagttttccaagagcagaggctttggatatagggttggctgagaaattaccatc

SEQ ID NO: 51552 - DNA, 580 bp, Homo sapiens
tgggccaaagtaaagacagctgcttctgctgccttctgtgacatttcctgagttcttactaagtgccaggcattctttcacttaattctctccagaaatctaggagatagagattagcattgtaggattcagactctagctcctagagctctggagtgactccaygtccatgcctttctgtgacccccagccctcaaatagggcaggacctgtgagtagctcctaaacaaggaaatatagcaaagggaatgggacgtcatttctatgattatgttatattataaaaaacgtgggctcgcaaggatgacatgcaaattcatgaagcattccataaaagacgggggcttggccaggcatggtggctcacacctataatcccagcactttgggaggccaaggcgggcggataacctgaggtcaggagttcaagaccagcctggccaacatggtgaaaccccatctctactaaaaatacaaaaattagctgggcatggtggtgcgtacctgtaatcccagctactcaggaggctgagacaggagaatcacttgaacctgggaggcggaggttgcagtgagccga

SEQ ID NO: 51553 - DNA, 551 bp, Homo sapiens
attgtaatccctaatgttgtaggtgaggcctagtgagaggtgatttgatcatggggatggtttctcatgaatggtttaccactatcmccttggtgctgtacttgtgatagtgaattttcatgagatctggccttgtaaaggtgtgtagtaagacgactgctcctcctttgccttccaccatgattggaagctttctcaggtctcccccaaagcagaagctgctatgtttcctgtacagtcagcagaaccataagccaattacatctccttgctttataaattacacggtcggactaatgtatcaggattacactggaattatttattctgggaaagaatatcaaagaaatatccctcgccactttccatatactagttgttggaagcaagccactaagtccagcccatgctaaaaagaaataaaattcagctccacctcgtagaggagagtataaaaacatttctgaatattttgaagccacacagtatttaataattatttgtgaagtgatagtttgagtggcattcacctgtggatgttgcctgtagca

SEQ ID NO: 51554 - DNA, 551 bp, Homo sapiens
attgtaatccctaatgttgtaggtgaggcctagtgagaggtgatttgatcatggggatggtttctcatgaatggtttaccactatcaccttggtgctgtacttgtgatagtgaattttcatgagatctggccttgtaaaggtgtgtagtaagaygactgctcctcctttgccttccaccatgattggaagctttctcaggtctcccccaaagcagaagctgctatgtttcctgtacagtcagcagaaccataagccaattacatctccttgctttataaattacacggtcggactaatgtatcaggattacactggaattatttattctgggaaagaatatcaaagaaatatccctcgccactttccatatactagttgttggaagcaagccactaagtccagcccatgctaaaaagaaataaaattcagctccacctcgtagaggagagtataaaaacatttctgaatattttgaagccacacagtatttaataattatttgtgaagtgatagtttgagtggcattcacctgtggatgttgcctgtagca

SEQ ID NO: 51555 - DNA, 627 bp, Homo sapiens
ctgggcatgtagaagtattcagtaaatcttaaataattgactaaatgaactaacaaaggaacaacttacttatacccccggatttagctcatatccttcctgataagatttacctgtggtacattttgttcaaatgtatccttcttccatctcagttgcagtacttattacaggtttctgttgcagtataaaattcatagttccttatgaatgtgtatgcttttcttttcagtgaaaatctagaggatagaaactccacatatttcatgtgtgtacttgttattgtcttacaatagcaactgttcaatgaggaagagggcattagataaaagtatggtgtatgatataaaacaaaattagacatgtattgtaatagtaaaaaaagacaacaagcaaagcactctggagtaacagaaggaacatttattttgactgaagatcttagggaagctacaattaatataagcaagtgaaataagctttgaaagcaggattrcaggctgggtgcggtggttaatgcctgtaatcccagcactttgggaggcagaggtgggtagatccatgaggtcaggagtttgagaccagcctggacaacatggtgaaaccctgtctctattaaaaatacaa

SEQ ID NO: 51556 - DNA, 631 bp, Homo sapiens
gtatcataatgtctttctataccatttatcatactatatatacagaatatcataaatattacatgaaaaaggatgatgattaggaaaccaatgcaaagggaataagtcaaatttcatccaggagcatcatttcttcttaatctatatctggctcctttcataaccmgctctagctgtcattgaggaaaatccatgagattaaattaagaagagcaaagacatcaaagaaaaaaaaagcagcttgaagtttgatcaaaacttatgctaattctttgctggcacttaataaatatatattttaaagttctattaagcacatgctttttttcttgaattctgcatgtaacatctgaagaaagtaggagtacataaagatatattggcaaattatgatatataacaaataaagaagaaatctgatttttaaaaataaactgatcaaatgaaaattgtttttaaatccctaagaataactttggttaaagtggaaaatgcagagtgaaaactaccataataatacatctgcctgcttagacattttgtgtgtatggaaacaaactttaatagctgaaaagctactaaattaaataatgttattttttggaaagagaaattaaaataaatgagacaa

SEQ ID NO: 51557 - DNA, 508 bp, Homo sapiens
tgtgttctaaatgttttcaatttgatttcacattttggccagataatattttgttgtagaaatacattgtagatgtaggtgtcagtagactatccctactcttcagttgtgacaatcraaaagttcacagacattgccaaatatccctggggtacaatgttattcctagttgagagactgttttatttgtctgactcacgatgagattactattaactaacgtcaagaaaattcacacatactgctaggtaatatctcccgtattttgtatgtttttgttgatttttgtaaattcaaagatagaaacatattttttcctactaattacaattcaaagtagttgattttcaacataaagctttgtagtaagaaatttacactgtaaaactgattttaagagaaaaaactactaaaatactgaactgaaaatcagatataacaatcacttgtttcatctctcaatgaaacaatgtacttttcaatgtatctcttcattctgtagttctct

SEQ ID NO: 51558 - DNA, 508 bp, Homo sapiens
tgtgttctaaatgttttcaatttgatttcacattttggccagataatattttgttgtagaaatacattgtagatgtaggtgtcagtagactatccctactcttcagttgtgacaatcgaaaagttcacagacattgccaaatatccctggggtacaatgttattcctagttgagagactgttttatttgtctgactcacgatgagattactattaactaacgtcaagaaaattcacacatactgctaggtaatatctcccgtattttgtatgtttttgttgatttttgtaaattcaaagatagaaacatattttttcctactaattacaattcaaagtagttgattttcaacataaagctttgtagtaagaaatttacactgtaaaactgattttaagagaaaaaactactaaaatactgarctgaaaatcagatataacaatcacttgtttcatctctcaatgaaacaatgtacttttcaatgtatctcttcattctgtagttctct

SEQ ID NO: 51559 - DNA, 547 bp, Homo sapiens
gagcaaattcttggtggtttcttacatttatgcattatcttacaaatgaggacacatttgtacctttttccaaactgtgtttttaaaagtgtttgtataagagccttagaaaatacagagtatctacttttgaagagcaaaaaataaacattctaactgaacagttaaaaataatgggcatacataaactcgggatttttctgcagtaaggaagcttaccgcttatgcaggtttaactatccctcttcacattaccmtgtgaaaactgggtctcagaaactggtgcagaaatgccagtactctagctatgctgattgttgataataaaaaactcttctttgtatctgattcaggagtcttttatcttctactgtaattcatacaattttgaaaagatacctacttagatttctcgtagggtaaaaactttctaatctttcacagtccttaaacacagctatacattttctacttgaattccttaaataaccacttactttgagcacaaaccatgatcaagacaatattatgcacattgtaatttatt

SEQ ID NO: 51560 - DNA, 547 bp, Homo sapiens
gagcaaattcttggtggtttcttacatttatgcattatcttacaaatgaggacacatttgtacctttttccaaactgtgtttttaaaagtgtttgtataagagccttagaaaatacagagtatctacttttgaagagcaaaaaataaacattctaactgaacagttaaaaataatgggcatacataaactcgggatttttctgcagtaaggaagcttaccgcttatgcaggtttaactatccctcttcacattaccctgtgaaaactgggtctcagaaactggtgcagaaatgccagtactctagctatgctgattgttgataataaaaaactcttctttgtatctgattcaggagtcttttatcttctactgtaattcatacaattttgaaaagatacctacttagatttctcgtagggtaaaaactttctaatctttcacagtccttaaacacagctatacattttctacttgaattccttaaataaccacttactttgagcacaaaccatgatcaagacaatattatgcacattgtmatttatt

SEQ ID NO: 51561 - DNA, 473 bp, Homo sapiens
tttttaatcgtttgtttttatttgaactgccaactattttccattaaaatacagattattggcttatcttgagaagttacaatgtctggttacactggaccgcatttccacatggcagctgcaggttggaactgagtagctgcattcacaattagatggaccatgggctttccaggttgctgtggccccagcaccctgcattgcttcactgaccacttgacatttacattattattcccagccctacatctagatgaaggcattgacaattatgactcctatygtagggtcagtgacgtgaagtagggtatccaggagccccttacctatgtaaccagtttttaacgctgtattcccccaactttatttccttcattctgcatccttggtgccctactcttgatgcctctgccccttctagattttccccccaggagtcccatcgagcatttgggtttctaccttcccagccc

SEQ ID NO: 51562 - DNA, 538 bp, Homo sapiens
atataagatcttatgtaccttctgatggaagaacaaagaatcccctatgaaattgtcatgcaaaaaaaaattaataaattgaccaagcttctgggtacagctaccagtagtagataacattttaaagttggaattagcaaaaattcatactgtagtaaactccattggacaaataatgaaatttctacacaaagagaaaaactttagaggtaaaaataccaagaagatatawcaaccaatcaacaagattggttccttatttggttcctcctgattttttaatgtattttttcaaagacaaccatttatgacacttatgagacaatagggaaaaaagatcttctgagttatcttaaacttacatttccctttagtgatgtacattttgccctgtcctactccaaccattgttttcctggataaagaacatagaattaaaagggaaacttggctcactcctaaaccttgagggacttgggtcaagagtacaaatgacccacttactgtagcccaaatatctaaaagttaaagattctct

SEQ ID NO: 51563 - DNA, 538 bp, Homo sapiens
atataagatcttatgtaccttctgatggaagaacaaagaatcccctatgaaattgtcatgcaaaaaaaaattaataaattgaccaagcttctgggtacagctaccagtagtagataacattttaaagttggaattagcaaaaattcatactgtagtaaactccattggacaaataatgaaatttctacacaaagagaaaaactttagaggtaaaaataccaagaagatataacaaccaatcaacaagattggttccttatttggttcctcctgattttttaatgtattttttcaaagacaaccatttatgacacttatgagacaatagggaaaaaagatcttctgagttatcttaaacttacatttccctttagtgatgtacattttgccctgtcctactccaaccatygttttcctggataaagaacatagaattaaaagggaaacttggctcactcctaaaccttgagggacttgggtcaagagtacaaatgacccacttactgtagcccaaatatctaaaagttaaagattctct

SEQ ID NO: 51564 - DNA, 579 bp, Homo sapiens
aaagccttactctcaaatctggttcttgaactgttaatcgtaaaaatagcatgactatgtgaaaatactagattgttcttttaattataactctgaactatattgtaaatccatttgttagctttcttcttctttgtcatctaattccatttctagcacttagcatagtgtggagagagttttaggtcgttagtaaacaaaagaatgagcaaactaatagatggrcatgaaaagcactaaatttatgtcttgctgctgtcatatagtagctaagattctgatctcatcacatatgtggacacacaagctttcgctaagatatatacagcattgtttggtttacaatattcttttacctatagtattgaagttgatgctcagaggagctatgtggaaatggccggaaggaaaattattatccacaattcataatatagaaaggtgaaggtagggcattaagcctcagttttatgttgaattgagatgatattatttatagctgaactgtggaaaggagtcagtaagaatttagtataagggtatttggtccaaaattgctttcttctgatcacataaaaa

SEQ ID NO: 51565 - DNA, 579 bp, Homo sapiens
aaagccttactctcaaatctggttcttgaactgttaatcgtaaaaatagcatgactatgtgaaaatactagattgttcttttaattataactctgaactatattgtaaatccatttgttagctttcttcttctttgtcatctaattccatttctagcacttagcatagtgtggagagagttttaggtcgttagtaaacaaaagaatgagcaaactaatagatgggcatgaaaagcactaaatttatgtcttgctgctgtcatatagtagctaagattctgatctcatcacatatgtggacacacaagctttcgctaagatatatacagcattgtttggtttacaatattcttttacctatagtattgaagttgatgctcagaggagctatgtggaaatggccggaaggaaaattattatccacaattcataatatagaaaggtgaakgtagggcattaagcctcagttttatgttgaattgagatgatattatttatagctgaactgtggaaaggagtcagtaagaatttagtataagggtatttggtccaaaattgctttcttctgatcacataaaaa

SEQ ID NO: 51566 - DNA, 552 bp, Homo sapiens
ctctttcagagagaagccagggaactcggtgacacaaggtgctgaatggcagaagcatcatgctgcayggtgggtgcaaacgcagttttgagactaattttaccccgcccctcaaagcttcctgtcacgtgtgtttgttgcgaggtgtctacagtttttcatggttagttgtctttcagtgatttaaaaatacatcctggtttctggtaacgagagccttgccagccttcttttgggttttgggttttgtaattcaaacatgtttcagtgttgttgtatcccattctcatttgtgtaagcctggcagtatgaattaaatccacagctgggagactgcagacaatggggcaacatttatagtggcaactgtggctttcttctgtcatgaaagcctcagtcataatcaataaagctaaaaggtagccatcccagaggccccagttaggtcatttcaatgttccttgttttcctaaaggcttcacaatgacctttctaaatattaaccagcttcggtccatgtgccaagtcttcccaggaaaggtttttgtattt

SEQ ID NO: 51567 - DNA, 552 bp, Homo sapiens
ctctttcagagagaagccagggaactcggtgacacaaggtgctgaatggcagaagcatcatgctgcacgstgggtgcaaacgcagttttgagactaattttaccccgcccctcaaagcttcctgtcacgtgtgtttgttgcgaggtgtctacagtttttcatggttagttgtctttcagtgatttaaaaatacatcctggtttctggtaacgagagccttgccagccttcttttgggttttgggttttgtaattcaaacatgtttcagtgttgttgtatcccattctcatttgtgtaagcctggcagtatgaattaaatccacagctgggagactgcagacaatggggcaacatttatagtggcaactgtggctttcttctgtcatgaaagcctcagtcataatcaataaagctaaaaggtagccatcccagaggccccagttaggtcatttcaatgttccttgttttcctaaaggcttcacaatgacctttctaaatattaaccagcttcggtccatgtgccaagtcttcccaggaaaggtttttgtattt

SEQ ID NO: 51568 - DNA, 612 bp, Homo sapiens
ttcgcatagccaacgtgtcaatgagcaatgcactctaggacattaggcatataaattggtaattcatagattgatctgaaatgccagttgggtgaactggtagggagtggagggcagaagtgtgacatccataaatggatttcatctgataggctggggctcacagtggaaatgtagwcatccaaggataggttttgctcagaagcctttcagaagtgcatgtcactacactgacaaccacatgagttagccctcctgtgctcattgtctgaacaatttctttgccccgcatgccaaaataacaacatacaatgtttatgtatctgaggaattagaaacatgtggtctgatttggtttacttatgggaaagaatatctaaagtctatattcttccagaaatctaatcactgtaattatgctttgaacagattatttgaaattgaaaaaaaatattagcatagtattagggaaagtttttcatatttaggacttgaaaaatcaataagacatgggttcacaaatgcttattatttttgacagtgaatgagacatgtgggagctgccagggccccagatcaggggatggatcacaagacaataatgagaaacaa

SEQ ID NO: 51569 - DNA, 566 bp, Homo sapiens
gtgctcttgggccctttcacttccacaccccttgtctcttttgaccagcctcacagtctcttgagataagcaggacagtgagcattaaaatcattcccatgtacagataaggagactgagactgggagaagtgaaatggttttcsggaggtttcagacagccaagggtggaactcaggtctctgggcctctgacccagagctttttaggatgaggtagcagggtgaaagtgagtccaacacatctctgtgagcccctgctccttaggatgaacgaaggagcccatcctaagctactccaccgttaacaaaccaagcagcccacagtcaggagagggtcagggggtctccctatcttccagcgttttgggtgttcataggagctagatgctccagtctctccccctcctccccaattatcaatatctctaattttattttattttattttgagatggagttttgctcttgttgcccaggctggagtgcagtgatacaatctcggctcactcactgcaacctccacctcctggattaaagcagctctcctgggtcagcctcccaagta

SEQ ID NO: 51570 - DNA, 606 bp, Homo sapiens
cttaatatatgcatrtaagtatttaaagagaaaaaatatttttgtcttttgtttgagagatcttgagtaatttataagtttatccagagaaaactatacaatccagaatcatattaaaagtaattggtgatttaaatttttaaaaatttaatagtatggctaaatatatgaaacttttttcaagtgataaactatccttagattcctggtaagtgtaattcatataattaaccatattatctggctaaaatgaaaacaaaatcatctcaatatatgttaaaaagtaatttaataagattcaataattgataactcaatagcataggaacaaacacacattttaatgtgaaataattaattctatcttgatatcaatataaattatcagtaattattgttgtggtcacaccgcagaggcagaatggttttctcattcaaaagtagttcatatgtcaagacagatgatcacacacacacacacacacacacacacacacacacacaataaatttatagcagagtgaggttttccaagaagatctgggaagacttctaagcagacttaaaaataacaagagaatgagcaggagcaataagaatacactg

SEQ ID NO: 51571 - DNA, 572 bp, Homo sapiens
tagatgcagccaatagatggaacagtggtacaggatgctatgcagatcctagttgtgactttcatattacccattgttgttctccatcatcttaatattttcttttcaacctctagcacaatttccttgaattgaaatggaagttattgaaaactctgcaaccaacctttgtttacatcattgatctctctgctctctcaacagttgtttaaactttcagatttagaggtggagttacagatgtacctgttctctttgattatcatctttcaataataataaaaattgctgtatttttcatgatggtcaccttattttaacaacgaaattttatmactcatagcactttttcagcatttctcttggtaaaaaagctatcaaaataaacaatcagtttctataatattagtgtttgtcattataatttgttggagaaataacatttaactgaaaaatatattttattaaatcatggaagcagatatattatttaattacttatcacaatgataaatatgaataaaatgatgaagacaatgataaggagacagtatagctctgtgattgaatct

SEQ ID NO: 51572 - DNA, 659 bp, Homo sapiens
gcccctctttatccttcctgtgatggctaaactaatttcatcaaattttgatttctgtgtggtgatgttgtgaacagtgcctgaaataataaaattaccctgagcagattgcatataaaactgtttgcaatgggagaagcagtctttggggctgtggtttcctttggctgcagtgtaatatattcctttgtttcttttgtgaagtatttattgtgggtctcctgtagtctgagtttcttgtggaagtgggcttgtgttttgcttttgtagactgacactgagaatagcatccaaacatctttttcccaccaaggcatcaaactccatcrttaggaattccttcatagaatcaaagaatcagaaagagctgaaacatagaccacggacactcaaattgtttatcctgaaatgaatgggaaaacctaagctgaagaaaggaagtgtctggccaagaagctggcgggagagtagaatcaggaaccagggcctcctcgtatctggtctcacgcttcttccgtggtgttctttcttaagttgagcattgcattctccttggataggatggatattttcctgggaaggatgatacatgatgtatttatccataaaactgaacaggtgttatgtgtgccttttctaataggaaagaccatcatgct

SEQ ID NO: 51573 - DNA, 705 bp, Homo sapiens
agtagctgggactacaggcgcctgccaccatgcccggctattttttttgtatttttagtagagacagggtttcactgtcttagccaggatggtctcgatctcctgacctcgtgatctgcccgccttggcctcccaaagtgctggcattacaggcatgagccatcgcgcccggccagagggctattctttgtcttttatttgctttgagtccggtataaccatgtggcacatacccctgtacatgtttgccaagactgctatatggcagagcttggaattcttaggagctttatcaggtaattgcaagtcccccacctccaasaaagcactctctaggtcaagaatcagcaaatgttttctatagaggcccgtaaaattaatattttatactttgtgggtcatatagtctctgtttcaattacccaactctgctgttgtagtgcaaaagcagctgtagacagtaagtgaatggatgggtgtggccgtgtgccaataaaactttatttacaaaaacaggcagcaggccagaattagccctgtgggatgactcacatgagcagagagttctggcatcaactttgttcggagagatactgacatacttctactcaagtaagtcaatgtttctgtctcaactggttgattggaacaacatacaaactgacccttaggaaccttctaccaaaaatatcctgtgaatcttca

SEQ ID NO: 51574 - DNA, 1742 bp, Homo sapiens
gcttgttgctggaaaagagggtcctgatccagacacctagagtggattcttggatctcacgcaggaaataattcaaggagagtcacagaggacagcgaaagaagcaagtttattggaaactactttgttacagagtagggcatcctcagcaggaggaggagcatgccatcctttgtgagtgtgtctacttgcaagaaattagaaggagctctacacttggaatgtgtagatgtgcttaccaaaggtaagggctattggtgttatcaatgaccatgaatcttttaccctaagcctgctaaccgatgttatctttaagtaaaattggctgtactcttaagatatccggacattgtacaggcttgstgggagatgctctgtatggccataaatattacataattataagtggtggtcagcttagaatttggctattttcagaccattagcattaaccttaaacacgctttgtgaatgcctgcctgctcacttcaatatggagtcactctagtcgcattttattaaaccagaggcctggtaaacaggggtttctataacaggcctacatgaccactttgtccttgagtaatgttttctatttacaaagtaatagaggtaagtcatagagaacttgataatacagaaaagtaaaaaagggggaaaataaaaatcaatcaagattcaatatcctgaggaaaccacagtcaaaatattagtggattatgttctaaagattgatacaaatcctttctaaaaacaaacttaggaatatactatacaatttaaaatgtgttcttattttaaatagaaacactttccccatttatgtaatattgcttttcaaaataccagtacttcatggccctataatagtccatcatatagatatgtcataaaatgttttactatttcctcttctgagacatttaagctattttccaggttttgctattataaactactctccagtgatgatctgttcatgtcatctttgctcacctctctgattatttccttccaacaggttcctaaaagcatgatcagagccaaagaatattagccattaaaagcctctgcctcttctctttttctggaagcataggatctgataaaatacacacctctgttctgttggtgagccatgtgagctcagacaggtgcagtgatttgcccaaagccacatagctttgttagaccagggattggaattcaggcctgtctcgacagcctctcgtgagtgccagaacccagccaggagtccatgcttcctgactcctatgccatattcttgccttattccttgcattagtccgttttcacactgctataaagatactacccaagactgggtaatttataagcaccagaggtttaattgactcacagttctgcatggctagggaggcctcaggaaacttacaatcacggaggaaggagaaggggaagcaggcacctcttcacaaggtggcaggaaaaagagagagaagcccaggggaaattaccatttataagaccatcagatctcatgagaactcccttactatcatgagaacagcatgggggagacttcccccatgatccaatcaccccccaccaggtccctccctcaacacctgggtattacaattcaagatgagatttgggtggggacacagagcctagccatatcattcctctttgtagaatatttctccactagtgagaactctcaattactgatcaccaacatgtgccaagaactgtgc

SEQ ID NO: 51575 - DNA, 1742 bp, Homo sapiens
gcttgttgctggaaaagagggtcctgatccagacacctagagtggattcttggatctcacgcaggaaataattcaaggagagtcacagaggacagcgaaagaagcaagtttattggaaactactttgttacagagtagggcatcctcagcaggaggaggagcatgccatcctttgtgagtgtgtctacttgcaagaaattagaaggagctctacacttggaatgtgtagatgtgcttaccaaaggtaagggctattggtgttatcaatgaccatgaatcttttaccctaagcctgctaaccgatgttatctttaagtaaaattggctgtactcttaagatatccggacattgtacaggcttgctgggagatgctctgtatggccataaatattacataattataagtggtggtcagcttagaatttggctattttcagaccattagcattaaccttaaacacgctttgtgaatgcctgcctgctcacttcaatatggagtcactctagtcgcattttattaaaccagaggcctggtaaacaggggtttctataacaggcctacatgaccactttgtccttgagtaatgttttctatttacaaagtaatagaggtaagtcatagagaacttgataatacagaaaagtaaaaaagggggaaaataaaaatcaatcaagattcaatatcctgaggaaaccacagtcaaaatattagtggattatgttctaaagattgatacaaatcctttctaaaaacaaacttaggaatatactatacaatttaaaatgtgttcttattttaaatagaaacactttccccatttatgtaatattgcttttcaaaataccagtacttcatggccctataatagtccatcatatagatatgtcataaaatgttttactatttcctcttctgagacatttaagctattttccaggttttgctattataaactactctccagtgatgatctgttcatgtcatctttgctcacctctctgattatttccttccaacaggttcctaaaagcatgatcagagccaaagaatattagccattaaaagcctctgcctcttctctttttctggaagcataggatctgataaaatacacacctctgttctgttggtgagccatgtgagctcagacaggtgcagtgatttgcccaaagccacatagctttgttagaccagggattggaattcaggcctgtctcgacagcctctcgtgagtgccagaacccagccaggagtccatgcttcctgactcctatgccatattcttgccttattccttgcattagtccgttttcacactgctataaagatactacccaagactgggtaatttataagcaccagaggtttaattgactcacagttctgcatggctagggaggcctcaggaaacttacaatcacggaggaaggagaaggggaagcaggcacctcttcacaaggtggcaggaaaaagagagagaagcccaggggaaattaccatttataagaccatcagatctcatgagaactcccttactatcatgagaacagcatgggggagacttcccccatgatccaatcaccccccaccaggtccctccctcaacacctgggtattacaattcaagatgagatttgggtggggacacagagcctagccatatcattcctytttgtagaatatttctccactagtgagaactctcaattactgatcaccaacatgtgccaagaactgtgc

SEQ ID NO: 51576 - DNA, 629 bp, Homo sapiens
agcatgctggggtgaccgtgctcaggtttttgctgagataagatatcaatgagatatttccaccatggctttttgaagagattctttactgtgtrattgctaagacaattagctgcaagctacagctactattccttagaaatgaaagatgctttccactgtaagaattatgttactcctcagtggtgttgacaagatgaagaaccattttggatgttatgattctgaaatggctatctgttggtgatccatgcttcaacgtggttatgagtcagttctagtcaactgacatttatagcttttagtttatagactggggctttcaattcagctcaatcaggtgtctgcaaataaacatctgttatatttaagttttccagtgtctttctttcaactcttatttcccttaaatcaaatgcttatttagcagagcctgaaaataaaaataaataaataaatacataaataattaagaaatgaaaacaactccaaatggtctcaatggaatacttcacagaaaactgttatgaaaaggcacaaagaaagtatatgaaagggtttaaaatggagatagcctaatttctttcatgtccattaaactgttattaataaagagggtaataacccag

SEQ ID NO: 51577 - DNA, 500 bp, Homo sapiens
ctttttaacctcttttctgacgaccaaggaggagaataaaaaggaatgctgaccarcaggataatgtgaatatgaaaataacactaaaatatccttcccactaaccaaagcaagttgaattaatgttcatttaactaccaaattactgcttcatccattaaaagttaacatattaaatgtgcttatgaaataatattttggcagtcgcattagaacacatatgaatgactattgttctcagaagaccaatcaataataacctgtgacaatcacacacgtcgataacttttttctgtataagagccagatagtaggccaggtgcagtggctcatgcctgtaatcccggcactttgggaggcccaggcgggcagatatgttaggtcaaaagttcgagaccagcctgaccaacatggggaaatcccgtctctactaaaaatacaaaattagctgggtgtggtggcacgtgcctgtaaccccagctactcaggaggctgaggca

SEQ ID NO: 51578 - DNA, 548 bp, Homo sapiens
cacaaaactccttgaggatagtaattttttgtgcatgtttgtcaatgcagtatcacagtcgtcctgagaattagcacacagtagatagcaatatttttaccttgagctgacaagtggaatggtatcattagaaagttacaaaattgattttgtgatactgagcctccaactagttggaaattagtgtgctgctaaatttgcattagtgtgctagtcaaagacaaggatattcaagtacagcatttcttagtttcatattaattgcatatttctgtttatttcatattagacaaaaattactgaaaagcagcctaatatactgcgttggaaacaatatgatagagactttaatactagtacttgtactgrcaatactgacaatattatcttgtatatgtataggtttttacaaatttaaaagcctttcatatatctcaaggaaatatcctaagaacctgtttctactcaacattaaagacctaagtgaaatctgagactttcaatgcctttggatatgtaattagacaggagtttagccttttgtaaca

SEQ ID NO: 51579 - DNA, 543 bp, Homo sapiens
ttttttgagacagggtctcactctgtcacccaggctggagtgcagtggcgcaatctcagctcactgcagcctctgcctcccaggttcaagcggttctcctgcctcagtctcccgagtagctgggattacaccaccacacctggctaatttttgtatttttggtatagacgggttttcrccatgttggccaggctggtgtcaactcctgatctcaagtgatctgccagcctcggcctcccaaagtgctattacaggcgtgagccaccacgcctggcttaggctgcttaaatattctttcttaggtatccttggttttggaaaaaaaagaataacagaaaactaaaaattcccagtggcagtctctgtatcactggaatttaactttttgtttgtttgttttttgagatggagtctcgctctgttgcctaggatggcgtgcagtggcgtgatctcggatcactgcaagctccgcctcccgggttcacgccattctcctgcctcagcctcctgagtaactgggactacaggcgcccgccaccacgc

SEQ ID NO: 51580 - DNA, 559 bp, Homo sapiens
cctctcacttgctcactctgatgaagcaagatgccgtgctggaacctgccctgtggagaggcatacatggtgaaaaaccagggaaggcctctgagcaacagctcttgagaaactaaagccctaaacccatcaacttgcaaagaactgcatcctgccaccaactgcgtgagtgaggtcaggtggatctttccctggtccagccttgagatgactgcagtcccagacaacaccttgactgctgccttgtgatgcagctggcgccaagcagtgccaattcctgrccctcaaaaaccatgagataatagtgctgttgttgtaagtcacccaagtttggggtaatttgttatctagcagtagatagccaatacatcaaactagaaacattctccatcattgattggaagactttgggtttttaaaaagggtaaacacacatatacacagcttattatatttccttccacatttattttggaggggaaatgttttacttcttatcccaccgctttgccctttctaaaagaatgtgttaggattactgtgattcaaatggtaaaaa

SEQ ID NO: 51581 - DNA, 562 bp, Homo sapiens
attctacacccatgagggtgtagttggaggtggaagaggaaccatcgtgggtgggagggtatcttgcatttgtcttggtattgccctcccacccctctagcctgccctcccccattggggtggcatagcactgggcccactatactctaaaagtgggcaactaggcattagatagctcctaatgcaatactgactgcacagcaccacctgtgaaatactcttaacaggagtccaacttgactctaatccaggctctagagctaccttcactgatggaratataggtgatagaggaaacaattaaataacatgggaataaatgggcaaatccagaatatgaagctttccacagggctacctggtttctacaacataggcatggggggaaattacaaaagactgctgaggattgatatagatttaggagccttaagaaccaaatgtaatctgtgggccttgttttgttcctgattcaaacaaaaccccaatgtaaaaagagatgttttgagatagtcatggaaatttcattttgaactgcatattagatgatgtcacggaatta

SEQ ID NO: 51582 - DNA, 584 bp, Homo sapiens
aaaaataattattatcctaagataaaaatgttaatatttaaaatcaaatttgaacaaaaatcagtaatggggggtagatgtatatttatgaaccttttaggaaatatttcatattgacattttctatgatattatagtctctattatatttctattataattcattaatttttagacatatgcataaaaaatagaattgttaaaagtaatattgggttagcataatacccacgaaggattgtttttatttctatggatcacggctagagaacaaagacagaagtgattaaccctaagtgtgaaaattgsttatctgtataaattggccccaaaggaaaattttccagataggttttcttgtcccttgacatgatcccatcaaaatcatatttgcccccttgtcacgttactttagaagggtgtgcttaggaaagggaacaggtgcccatgtgtattgatcagtggtcatggtaaaaggctcttattagatgttgaagggtaccaggaaggcgtgagaaatggaggcgagagggcaggacaggttattgatgatggtaataaccgagcgcaaggggctccgacac

SEQ ID NO: 51583 - DNA, 541 bp, Homo sapiens
aaaaataattctatatttttgctggaatgcagagatctctaaagtaagagacaggcaattctcaatatacattttgcttcagggttaaacttgcttcctctaaggaaaggtcacagcaggatccaatgtttctaatcctactacagtgtaatgacatttatgggatgtttgcaaatgtgtaccaagctgccctgttcagagcggtattttattgtagcacctcgattagccctgcctgctacccttggcatccgtgtgaagtcccatctaggcacgaggaagagaacaagagtggcagcatgttggsggtcctcaccgggactggagcagatgccactggacccttccaggaattcttcagttctgttcagttctggttcccaccgtgtgatgaaaagcaactcaacaaacctattcacctttgtaggtttccagaataaaaagttgtcttatgagaaacttggttagttccatggtttttactcatttaaaaactatgacatttccacagttacatataactgtatatataacgtaagtc

SEQ ID NO: 51584 - DNA, 541 bp, Homo sapiens
aaaaataattctatatttttgctggaatgcagagatctctaaagtaagagacaggcaattctcaatatacattttgcttcagggttaaacttgcttcctctaaggaaaggtcacagcaggatccaatgtttctaatcctactacagtgtaatgacatttatgggatgtttgcaaatgtgtaccaagctgccctgttcagagcggtattttattgtagcacctcgattagccctgcctgctacccttggcatccgtgtgaagtcccatctaggcacgaggaagagaacaagagtggcagcatgttggcggtmctcaccgggactggagcagatgccactggacccttccaggaattcttcagttctgttcagttctggttcccaccgtgtgatgaaaagcaactcaacaaacctattcacctttgtaggtttccagaataaaaagttgtcttatgagaaacttggttagttccatggtttttactcatttaaaaactatgacatttccacagttacatataactgtatatataacgtaagtc

SEQ ID NO: 51585 - DNA, 541 bp, Homo sapiens
aaaaataattctatatttttgctggaatgcagagatctctaaagtaagagacaggcaattctcaatatacattttgcttcagggttaaacttgcttcctctaaggaaaggtcacagcaggatccaatgtttctaatcctactacagtgtaatgacatttatgggatgtttgcaaatgtgtaccaagctgccctgttcagagcggtattttattgtagcacctcgattagccctgcctgctacccttggcatccgtgtgaagtcccatctaggcacgaggaagagaacaagagtggcagcatgttggcggtcctcaccgggactggagcagatgccactggacccttccaggaattcttcagttctgttcagttctggttcccaccgtgtgatgaaaagcaactcaacaaacctattcacctttgtaggtttccagaataaaaagttgtcttatgagaaacttggttagttccayggtttttactcatttaaaaactatgacatttccacagttacatataactgtatatataacgtaagtc

SEQ ID NO: 51586 - DNA, 1403 bp, Homo sapiens
ttggaagtaatctcctatgacttgatcagttagacatatttttaagtatggatagtagacaggatgctgtgtatgatatctattatatacaaaacatcacattaataagcacatatgctgaagatgaatgagatgactagctagtttgaagtacagtatcaatctgattttgagataatactctttattgggtggccagggttggggatgagaatggcaggggttgtgggatgtagactggacaggctgttgccatcacagtgaatctgttgatagtgaatgtcactcttcctgctttcatgacatccagagattctctaatttagactttccagatttaggtatatccaatttaagatatacctaaatattgtacaagacatacttatgtataaaaagttatttattgtttatctgaaattcaaatttaacagggagttctatattttttctggcaactctaagtatctcaaggggtgttatgaaactctaataacattcatttcttttaatttttgaaactaagcatatgctatataggtgcaacttgcaaagagaggattaaagattaacagaaaatcaaatgaatagtgttaggatattaatttcaatagactgtaagttttatgaggtcaagaaacttgaccatcatgctcactgatgtaactccactcaaagtaatgttctagggaatggtaaaggctaaataatttttgagtgaaaaataacagaaatacatatcttaattttttagaaaatgcaaattcttctcttttatcatcagtaataaatggttggctagctcatttttttagttacctcagctcaaataacttggcagaagctactggtgaagctgaagtccacaaactggctttggccataatccagataccttcccaggtgtagacaaagtgtacatggagccactgtttataaaaatacaaatatgggcacctttaataataatttgtacactttcattcttttcagcttataaactcactagacaatagaaatttaggtccactctgatttttgcatattaattttataaaaggaaaatagcttttacagtccacctaaaggcatttattagaagatagcctcattattcttgggatttcagtarcaagataagtgaggttaaaaaggaagaagaagttataagggaaggatctggcaatttctagaaagaaaaaagaaagaaattttaagagggaaagatagtttttaagtatatataaataaggaaatatatgtgaataaaaaatagaaacatggtgataatgaagaaatactgtactatttagagaatacttagagaaaagaaaaagggagctcttaacaaaagaccaattaatagaatgaataaattaatactatgaaataggagtagattt

SEQ ID NO: 51587 - DNA, 534 bp, Homo sapiens
tcttaggatcatgaggcacaccagcatgtcaacatcacctctgaagtgcatagcaagtaatttgtaaccagactttttaaatgattcattcctttttaaacacgttagtgtataggcaaggtcattcccataacttatgctctttctgctaatgccttgaatgggagaaaaaggaatggatattacaataagcttacaaaaattacatatatcycaaacctacaataagtgtctattttggctgtattaatattatagctatatcagtagctataattataaattataatttaaaaatttgtgatagtagggggtgtttatccaagcctggtacctgtccaagaatattttatacctatgaatgtcatttttcatgctgctcatggatcagtgaacagaatttgatactttttgcccttgtgggtcaaaaattaatgcaatgtgaatagctaatatagtctacaaagaagcttaggtaaatacaaataatgacaataaaagcaataataaaaattgtgaaatgtagtcaaacca

SEQ ID NO: 51588 - DNA, 528 bp, Homo sapiens
tccaaccctatggtgggctcctagggcagggccactgttgaccagagtggattaatggctaaatttggggtttgggcccctcttcccatccctgcccccaggaacattggagtcacgacccctttgaggccttcaaggattctgagggctacatctatgccaggggtgcccaggacatgaagtgcgtcagcatccagtgagtgtcctccattcctactcctccacaatgtccccactggtccagtggattgacgcaggacctgagggggtgattggagaaactcaaggccaaggaayaccgtgacctcttggacaggaactactgccatgaccattgcatggatagggagattcagaccagagaggggcagggactttctggagtccctatcagggtgtggcagggtaaagtccaggacacaggactccagcctgctggccctgcctgtggggccagcctgcgcatctggtggctcccccagcacctggcttatgccccctcaggtacctggaagctgtgaggaggct

SEQ ID NO: 51589 - DNA, 540 bp, Homo sapiens
aaamaaacaaaaggggtaaggcgcagtggctcaagcctgtaatcccagcactctgggacgccaaggtgggaggatcacttgagcccaggaggtcaagactgcggtgagccatgattgcaccactgcactccagcgtggcaacagaatgacactgtctcttaaaaaataaaaaataaaaaattaaaattaagaaaaaagaaatgaatatctcaatctataaaacacatactgcttttaccatggcccatttattttaattagatacttccccaaataataacagaaccaagtaagtagagccagaggacccaaagtaaatcagtggcctaattcagagttccttgttcgtggcttaaccaaccaacaaaggtacccagtgagctatctggtccttaaagagcacatggctcagctcagtgataaatgaggggcaaagccattccattgtgggtcccaaattatctgccaaactagttaatcactgagaaatacatcagaactgaaatatttggtgagaccataaagatgaaccatgcgcgt

SEQ ID NO: 51590 - DNA, 525 bp, Homo sapiens
ggtcccatatatattttaaagcccacaataaaaaatagtatataatatagaatttacacatataaacatatgtrgcatataaaacatatttatagaacatatgtaaaatcatatgtatcatatgtaaatgaagagcaacagtgatcaattctaaggggaaggcatatgggtaggggattggaggaacagagatttatcaaggttgaattttgtttgctgtgtattgactgaattatttacaataaggatgcattcacttacggattgtgaaattttaaaattaaaaaaaaagacctgacatataggtaatattcagtaaataattgctgttattgtagatgtgaatgtaattattaatcttgaaattatgtattagtctcttgctcttttttttttgagatggagttttgctcttgttgcccaggctggagtgcaatagcatgatctcggctcactgcaaccctcgcctctcgagttcaagtgattctcctgcctcagcctcccaagtagctgagattacaggtg

SEQ ID NO: 51591 - DNA, 525 bp, Homo sapiens
ggtcccatatatattttaaagcccacaataaaaaatagtatataatatagaatttacacatataaacatatgtggyatataaaacatatttatagaacatatgtaaaatcatatgtatcatatgtaaatgaagagcaacagtgatcaattctaaggggaaggcatatgggtaggggattggaggaacagagatttatcaaggttgaattttgtttgctgtgtattgactgaattatttacaataaggatgcattcacttacggattgtgaaattttaaaattaaaaaaaaagacctgacatataggtaatattcagtaaataattgctgttattgtagatgtgaatgtaattattaatcttgaaattatgtattagtctcttgctcttttttttttgagatggagttttgctcttgttgcccaggctggagtgcaatagcatgatctcggctcactgcaaccctcgcctctcgagttcaagtgattctcctgcctcagcctcccaagtagctgagattacaggtg

SEQ ID NO: 51592 - DNA, 583 bp, Homo sapiens
atatgctcaacatcataatgatggaaagtcatatttggaaactctgagggtatcttcaacttggaagttaacttctttaagtaaattaggattgtccttggcagatggtgaaggacctcactaaatgaaacacataattagttttacactgacataaatatatctccttatgcctgtatttgttcattttaaaaatgagattygattagatgatctaatcctatctttcagttacaaaagaatgtatatacacatatatgctctcctatagatatcataccatataaaattagaacaattgtaaattatttctaaagaagaaaataaaatataggtctaactctgatgaaatttcagaacagatcatcaaagatgtgttccattagtacttggcaaatgaaaataaaatgatagtaaatgtaataatagtgattagcatgggttgcatgagaaattttatcaaacaatactaatcagtaaatacgacatgccttcgggttgttatcaagatattttttataagaagattgaaaagtttcaataacaaggtcttcttgtggcttgtagaataaaaaggattgat

SEQ ID NO: 51593 - DNA, 551 bp, Homo sapiens
cttgcctccccaacagaacagtatggaatgggttctgcttctcccatgtaggaagtagctgatggttaagagcatgggatctggcactgcatggcctgggttcaaataccagctgcgtgacaggcaaggtactgaaacgctgtgtgcctcagtttcgtcatctctgcggtggggttgataactgcctgccgcatgggatagtggagagaataaatgaatgaacaggtggaaagtgcctggcatgtagcagacgctctgtgattgttagctgctagtgctcttgttactcctcctcycttgatagttttgattggctttctctggacaatgtcttgaccttccgtagatgcagtggccaaaactacacctagttctccatgtgggggcacaccagggtttctacaaggtttctacaagggactctacaaatcagcctttgtttgattaccagtacccttcctggtgacaccagccccagtgtccattccacacctatcttggggacaatttaagctgaaggagcacagcatcttaaatatctctgggggaac

SEQ ID NO: 51594 - DNA, 635 bp, Homo sapiens
ttccctccactccccaccccctaattttgtagcctcctttgtctgtatgcagtagttaccttgtgcttctcttttgtttagggacctccaagatgttcctcccttcaagccccaatcatgctgctctctggacatgaaggggaagtctactgctgcaagttccaccccaacggatccaccttagcatctgcaggatttgaccgactgatatgtgaggcatagtttttgaatctggaataatttttcctgccagatagtgatttttttttttaaatcttgggtgccacagaaggtatcactctatgttgrcaacataacaggctgcatggctaatatgctaaaattggggcatgaacatgctgaatgatcttgggtgtagaacttggagtccatggggtaaatacagaagccattattttactagttggaaagtgagttgttctggtttgagaatgtcttcctcatagaggcaaatctccagctaatttaccaaggcacttagcaatctagacataacaggttaatggcagtaatgaggagagaaataacttttattttcccaaaggtataaggtcctcttaattcacacccagaatcctagctagcatatgggaaggaaggaatcctaaagtggt

SEQ ID NO: 51595 - DNA, 548 bp, Homo sapiens
agaatggcaactaattctaatttttatttattaaatatttggggttttggttttaaagccagaattacggctagcacctagcatttcagcagagggaccattttagaccaaaatgtactgttaatgggttttttttaaaaattaaaagattaaataaaaaatattaaataaaacatggcaataagtgtcagactattaggaattgagaagggggatcaactaaataaacgaagagagtctttcttaygccttccttgcagttatgtaatattttcttttttaaatttcacatgcatgtaatttgagcactttgaggggccaaggagggtggatcactagaggtcaggagtttgagaccagcctggccaacatggcgaaaccccatctctactaaaaatacatctagctgggtgtggtggcgggcgactgtaatctcagctacttaggaggctgaggcaggagaatcacctgaacccgggaggcggaggctgcagtgagtcgagattgcaccattgcactccagcctgggtgacagagcgagaactcca

SEQ ID NO: 51596 - DNA, 548 bp, Homo sapiens
agaatggcaactaattctaatttttatttattaaatatttggggttttggttttaaagccagaattacggctagcacctagcatttcagcagagggaccattttagaccaaaatgtactgttaatgggttttttttaaaaattaaaagattaaataaaaaatattaaataaaacatggcaataagtgtcagactattaggaattgagaagggggatcaactaaataaacgaagagagtctttcttatgccttccttgcagttatgtaatattttcttttttaaatttcacatgcatgtaatttgagcactttgrggggccaaggagggtggatcactagaggtcaggagtttgagaccagcctggccaacatggcgaaaccccatctctactaaaaatacatctagctgggtgtggtggcgggcgactgtaatctcagctacttaggaggctgaggcaggagaatcacctgaacccgggaggcggaggctgcagtgagtcgagattgcaccattgcactccagcctgggtgacagagcgagaactcca

SEQ ID NO: 51597 - DNA, 2244 bp, Homo sapiens
tagagtccaaaggccaggcgcggtggctcatgcctgtaatcccagcactttgggaggccgaggtgggtggatcacgaggtcaggagatcgagaccatcctggctaacatggtgaaaccccgtctytactaaaaatacaaaaaattagccaggtgtggtggtgggcgcctgtggtccctgctactcgggaggctgaggcaggagaatggcatgaagctgggaggtggagtttgaggtgagctgagatcacgccactgcactccagcctgagtgacagagcaactccatctcaaaaaaaaaaaaaaaaaaaatagagtccaaaaaagccacagaaaaataaaaattttaaacatttaaatgtccacaaacagcacattatcaattggtcagtggctgctcagcccagtccttccagattgacccataaatgctgtttaatgtgggaaatgggttcacattaatgcttgctgtgctgaaagtgggggctccaaagacaagattcccaggacccacaacagtcctggagcagctcccacaagccccttagcagcccacactgctggggtgtgagttagatgtgagtttgcatgccacagatgaagcctaggccgcttaaatggaaggacatgcctgagtgcagggccagcctgacagggaagccccatagagcagccccagagcttccccttctgccctggtcctcagggcgctgcctcctccccattctagatccaatcctttccctaagtgggaatagcctccagggcctgggatgtgtcagggctccatgaacttcaaggatctttgtttctttagctggggagagtgttaacagtacacagagtcctgggactcaacagtaattcccaaggtctaggcaggctacagtctcctcttggaccccgtcggttagtcacactattaaacagagtggcactggctcctttcctggtgcaggagaaatgctgctaacagcagcctccttcgttcctccaggaaggcattgggattgaaaggaaaactctcacaaggacccagctcacttactagctagcatctttgttcttctttagtctccttctccatcgccatctgtgggaagtggaagcatgtgtccaactctagacaccgatctagaagctgtatagtctgatggttaagcccatggactccaagaacaagatggtttgggtttaagtattggttatatgatccgaaagttacttaaacactcagtgtttctgcttcctcgtttgttaagctttccatctgttgttaggaagaataaatacgttaataaatccaaagcactttagatgagtgcctggcactgagtaagccctgcttgtgtgtttactattaataccatcgttattgtcatggctactaatggtcaaaaaaggtcaaccaagcacctgctctgtgccaggccctgggtgggtcctgcaggggacagagaaccatacccaatgcttatcaggttcttggtggggcaggagctcctctggaagagataatgttcacagaggtgagagtgattcatcctagacagggtcatgacagacatcttttcaggggaggtcacatctgaagaatggctgaatgggttcaactcagacatccagaggaggagttgggggaagactctggagcccctgagggtcaggctaaacagtttagactttattcaattagcaacagggagcaactggccttctacagagttctgtagaggtccacagagcttctctggtttttactctcttgggtttcttttggccaaaccatctatttttctctcttgggatttagtattagctctttgctttcagaggacattttcttaacattggcacagactgcatttgtaaagaactcttaaagaagtgttaaatgttgcatagtttttgatgcgccagactaactttccaccagacagggtcattaggacatggcatgttggctgtggccagcctaatgcaacagcatgcaaattatttacagaacttcaaccttcttcccacattggttggtgcaattagaagtgcctgtgaatatatactttgttctagacaattacagaaattggggactggcatgattttttagagcatgactggtctgcttttgggaaaatccagtttgcttgtccagatggtgattgcaggattttttaagtgcttgtttgtattcacccaagtccttcattctataaaacagaaaactgaggtcccatgagagggtg

SEQ ID NO: 51598 - DNA, 2244 bp, Homo sapiens
tagagtccaaaggccaggcgcggtggctcatgcctgtaatcccagcactttgggaggccgaggtgggtggatcacgaggtcaggagatcgagaccatcctggctaacatggtgaaaccccgtctctactaaaaatacaaaaaattagccaggtgtggtggtgggcgcctgtggtccctgctactcgggaggctgaggcaggagaatggcatgaagctgggaggtggagtttgaggtgagcygagatcacgccactgcactccagcctgagtgacagagcaactccatctcaaaaaaaaaaaaaaaaaaaatagagtccaaaaaagccacagaaaaataaaaattttaaacatttaaatgtccacaaacagcacattatcaattggtcagtggctgctcagcccagtccttccagattgacccataaatgctgtttaatgtgggaaatgggttcacattaatgcttgctgtgctgaaagtgggggctccaaagacaagattcccaggacccacaacagtcctggagcagctcccacaagccccttagcagcccacactgctggggtgtgagttagatgtgagtttgcatgccacagatgaagcctaggccgcttaaatggaaggacatgcctgagtgcagggccagcctgacagggaagccccatagagcagccccagagcttccccttctgccctggtcctcagggcgctgcctcctccccattctagatccaatcctttccctaagtgggaatagcctccagggcctgggatgtgtcagggctccatgaacttcaaggatctttgtttctttagctggggagagtgttaacagtacacagagtcctgggactcaacagtaattcccaaggtctaggcaggctacagtctcctcttggaccccgtcggttagtcacactattaaacagagtggcactggctcctttcctggtgcaggagaaatgctgctaacagcagcctccttcgttcctccaggaaggcattgggattgaaaggaaaactctcacaaggacccagctcacttactagctagcatctttgttcttctttagtctccttctccatcgccatctgtgggaagtggaagcatgtgtccaactctagacaccgatctagaagctgtatagtctgatggttaagcccatggactccaagaacaagatggtttgggtttaagtattggttatatgatccgaaagttacttaaacactcagtgtttctgcttcctcgtttgttaagctttccatctgttgttaggaagaataaatacgttaataaatccaaagcactttagatgagtgcctggcactgagtaagccctgcttgtgtgtttactattaataccatcgttattgtcatggctactaatggtcaaaaaaggtcaaccaagcacctgctctgtgccaggccctgggtgggtcctgcaggggacagagaaccatacccaatgcttatcaggttcttggtggggcaggagctcctctggaagagataatgttcacagaggtgagagtgattcatcctagacagggtcatgacagacatcttttcaggggaggtcacatctgaagaatggctgaatgggttcaactcagacatccagaggaggagttgggggaagactctggagcccctgagggtcaggctaaacagtttagactttattcaattagcaacagggagcaactggccttctacagagttctgtagaggtccacagagcttctctggtttttactctcttgggtttcttttggccaaaccatctatttttctctcttgggatttagtattagctctttgctttcagaggacattttcttaacattggcacagactgcatttgtaaagaactcttaaagaagtgttaaatgttgcatagtttttgatgcgccagactaactttccaccagacagggtcattaggacatggcatgttggctgtggccagcctaatgcaacagcatgcaaattatttacagaacttcaaccttcttcccacattggttggtgcaattagaagtgcctgtgaatatatactttgttctagacaattacagaaattggggactggcatgattttttagagcatgactggtctgcttttgggaaaatccagtttgcttgtccagatggtgattgcaggattttttaagtgcttgtttgtattcacccaagtccttcattctataaaacagaaaactgaggtcccatgagagggtg

SEQ ID NO: 51599 - DNA, 2244 bp, Homo sapiens
tagagtccaaaggccaggcgcggtggctcatgcctgtaatcccagcactttgggaggccgaggtgggtggatcacgaggtcaggagatcgagaccatcctggctaacatggtgaaaccccgtctctactaaaaatacaaaaaattagccaggtgtggtggtgggcgcctgtggtccctgctactcgggaggctgaggcaggagaatggcatgaagctgggaggtggagtttgaggtgagctgagatcacgccactgcactccagcctgagtgacagagcaactccatctcaaaaaaaaaaaaaaaaaaaatagagtccaaaaaagccacagaaaaataaaaattttaaacatttaaatgtccacaaacagcacattatcaattggtcagtggctgctcagcccagtccttccagattgacccataaatgctgtttaatgtgggaaatgggttcacattaatgcttgctgtgctgaaagtgggggctccaaagacaagattcccaggacccacaacagtcctggagcagctcccacaagccccttagcagcccacactgctggggtgtgagttagatgtgagtttgcatgccacagatgaagcctaggccgcttaaatggaaggacatgcctgagtgcagggccagcctgacagggaagccccatagagcagccccagagcttccccttctgccctggtcctcagggcgctgcctcctccccattctagatccaatcctttccctaagtgggaatagcctccagggcctgggatgtgtcagggctccatgaacttcaaggatctttgtttctttagctggggagagtgttaacagtacacagagtcctgggactcaacagtaattcccaaggtctaggcaggctacagtctcctcttggaccccgtcggttagtcacactattaaacagagtggcactggctcctttcctggtgcaggagaaatgctgctaacagcagcctccttcgttcctccaggaaggcattgggattgaaaggaaaactctcacaaggacccagctcacttactagctagcatctttgttcttctttagtctccttctccatcgccatctgtgggaagtggaagcatgtgtccaactctagacaccgatctagaagctgtatagtctgatggttaagcccatggactccaagaacaagatggtttgggtttaagtattggttatatgatccgaaagttacttaaacactcagtgtttctgcttcctcgtttgttaagctttccatctgttgttaggaagaataaatacgttaataaatccaaagcactttagatgagtgcctggcactgagtaagccctgcttgtgtgtttactattaataccatcgttattgtcatggctactaatggtcaaaaaaggtcaaccaagcacctgctctgtgccaggccctgggtgggtcctgcaggggacagagaaccatacccaatgcttatcaggttcttggtggggcaggagctcctctggaagagataatgttcacagaggtgagagtgattcatcctagacagggtcatgacagacatcttttcaggggaggtcacatctgaagaatggctgaatgggttcaactcagacatccagaggaggagttgggggaagactctggagcccctgagggtcaggctaaacagtttagactttattcaattagcaacagggagcaastggccttctacagagttctgtagaggtccacagagcttctctggtttttactctcttgggtttcttttggccaaaccatctatttttctctcttgggatttagtattagctctttgctttcagaggacattttcttaacattggcacagactgcatttgtaaagaactcttaaagaagtgttaaatgttgcatagtttttgatgcgccagactaactttccaccagacagggtcattaggacatggcatgttggctgtggccagcctaatgcaacagcatgcaaattatttacagaacttcaaccttcttcccacattggttggtgcaattagaagtgcctgtgaatatatactttgttctagacaattacagaaattggggactggcatgattttttagagcatgactggtctgcttttgggaaaatccagtttgcttgtccagatggtgattgcaggattttttaagtgcttgtttgtattcacccaagtccttcattctataaaacagaaaactgaggtcccatgagagggtg

SEQ ID NO: 51600 - DNA, 555 bp, Homo sapiens
acaatggaaactatacaacaattaaaatgaatctccatctatcaagaatctaatgttgagttacatagcaaaagaatttataggatactgcttatgtaaaaatttatatatacatacaaatatacaagggaaagaaaaaactgcaggaatgataggcatcaacctctggataaggattatccctgagaagggggtgggaaatggctgagtgggacatagttatactcttaatgttcatcaacttctagataagggttatccctgagaagaggcggggaaatggctgagacataattatactcttaaygttctagtttttaagtttttaaaaaagcaaaatattaacactgaataaaacttggagatgaacaagtttcattattttctatatgtatgttttttaaaaatcacaaaatgataaaatgtttaaaagatttaaaaagatttaagtatccttaaaacaagatgttctgttgaacatcatttattcttagtttccatgtaattcttttgaacttccccttttgtaacatttcccagaattagggtttccat

SEQ ID NO: 51601 - DNA, 1438 bp, Homo sapiens
cataaaatttttaaaatggtattttgacatttgaaatttggaggattttatattaaggtctagattttgctttaaaagtctcctgaaaaatcttctaatactagctyataagtgagtagctgcttcctactttaacatgggcaaaatctgtccagttctcatctaggtttgcaacccggcattgttctgtcccatctttgcttcaacaaaaatgtagctcatttactatttataataatcaggcagaaaaaatattgtgccttctgctttcaatactatctctgcaataaggagaaattaacatttatccttatcttacatatggaaaacttagtaattgtagagtttttttgtcagattcttctgggtattttctttcttataataaaaattagaagcactggtaaggaacaatcagaactgatattctttttctatctttgttaggagacttacatggccaattggatgacttaatatttatattttataaggtatgaatgttcaaattaagttgctttcttgctctgaggcttaatttagaagctcaaattcagtatcaattgaacaaatgcttaaatattacttgaatttttaaaatgttattatttacttttattttttttttgagataggggtctcactctcacttaggctggagtgcagtggtgcgatctcggcttgctcaacctctgcctcccagattcaagcaattctcctgcctcagcctcccgagtagctgggagtataggcgcgcgtcaccacatccagctaatttttgtacttttagtagagacgggggtttcaccatgttggccaggattgtctccatctcttgacctcgtgatccgcccgcctcggcctcccaaaatgctgggattacaggcgtgagccactgtgcctggcccaggtaattttattttaaggatgttgttatctgctccaagcagcatccctaacttgaggagattaatagtgttaatatgtattgagccttttccaaataggcgctgttctgggcattttctataaattagttgattaaccaccataccactcctataagatagcatcttttatagtacagataagaaaactgaggcacaaaatactaagactcttccaggactgaatccagatagtctgactctggagcccatacctctctgtacttctctctcaagtagtccttggactgtatcatttgctgcatcaccctctctccagagctttgcaaaccaaacattgggaagttagttttttgctaagccacagaaaataaacttttcgttagcattctttcccagagttccttcttctatgtttacataattaaatatgattcttcccatgagataatttgctctactgtggcttgctgtctctgcctccagacatacatgcagctggacagaatgtttgagttgaaagtttgtga

SEQ ID NO: 51602 - DNA, 1438 bp, Homo sapiens
cataaaatttttaaaatggtattttgacatttgaaatttggaggattttatattaaggtctagattttgctttaaaagtctcctgaaaaatcttctaatactagcttataagtgagtagctgcttcctactttaacatgggcaaaatctgtccagttctcatctaggtttgcaacccggcattgttctgtcccatctttgcttcaacaaaaatgtagctcatttactatttataataatcaggcagaaaaaatattgtgccttctgctttcaatactatctctgcaataaggagaaattaacatttatccttatcttacatatggaaaacttagtaaytgtagagtttttttgtcagattcttctgggtattttctttcttataataaaaattagaagcactggtaaggaacaatcagaactgatattctttttctatctttgttaggagacttacatggccaattggatgacttaatatttatattttataaggtatgaatgttcaaattaagttgctttcttgctctgaggcttaatttagaagctcaaattcagtatcaattgaacaaatgcttaaatattacttgaatttttaaaatgttattatttacttttattttttttttgagataggggtctcactctcacttaggctggagtgcagtggtgcgatctcggcttgctcaacctctgcctcccagattcaagcaattctcctgcctcagcctcccgagtagctgggagtataggcgcgcgtcaccacatccagctaatttttgtacttttagtagagacgggggtttcaccatgttggccaggattgtctccatctcttgacctcgtgatccgcccgcctcggcctcccaaaatgctgggattacaggcgtgagccactgtgcctggcccaggtaattttattttaaggatgttgttatctgctccaagcagcatccctaacttgaggagattaatagtgttaatatgtattgagccttttccaaataggcgctgttctgggcattttctataaattagttgattaaccaccataccactcctataagatagcatcttttatagtacagataagaaaactgaggcacaaaatactaagactcttccaggactgaatccagatagtctgactctggagcccatacctctctgtacttctctctcaagtagtccttggactgtatcatttgctgcatcaccctctctccagagctttgcaaaccaaacattgggaagttagttttttgctaagccacagaaaataaacttttcgttagcattctttcccagagttccttcttctatgtttacataattaaatatgattcttcccatgagataatttgctctactgtggcttgctgtctctgcctccagacatacatgcagctggacagaatgtttgagttgaaagtttgtga

SEQ ID NO: 51603 - DNA, 533 bp, Homo sapiens
atgttgcaaagcattttgctaagtggatatattacaatatatttatctatctctttttgttagacatacaaattaattctaatatcttgctattaaaatatgcatccttacatgaacttctgaagttaattatctatttccttttaaaaagatgttagatacatttttaaycattaaataataacaatcttgtaatttagaaagccaatctactctgaaataattttctcaggaaaaataatttcagacaatacaaaactatcattggggaaggaaattttaatttaacattatctaatgtttaatctctattacctctccaaaaacaacatggtgtacttaaaggtaatctagtatactaggtgtgttagggagaagaagtaacaccttttacagcaacatcttttattttcattaatttatacttcttgaaaataaaggccaggcgcagtggctcatgcctgaaatcccagcactttgggaggccaaggtgggtggatcatgaggtcaggagatcgagaccatcctggcca

SEQ ID NO: 51604 - DNA, 533 bp, Homo sapiens
atgttgcaaagcattttgctaagtggatatattacaatatatttatctatctctttttgttagacatacaaattaattctaatatcttgctattaaaatatgcatccttacatgaacttctgaagttaattatctatttccttttaaaaagatgttagatacatttttaaccattaaataataacaatcttgtaatttagaaagccaatctactctgaaataattttctcaggaaaaataatttcagacaatacaaaactatcattggggaaggaaattttaatttaacattatctaatgtttaatctctattacctctccaaaaacaacatggtgtacttaaaggtaatctagtatactaggtgtgttagggagaagaagtaacaycttttacagcaacatcttttattttcattaatttatacttcttgaaaataaaggccaggcgcagtggctcatgcctgaaatcccagcactttgggaggccaaggtgggtggatcatgaggtcaggagatcgagaccatcctggcca

SEQ ID NO: 51605 - DNA, 596 bp, Homo sapiens
ctcaagtcttgcatagatgaatgcaggaagaaaagattgaggatctgcactttggagcacatatttttaaagaatggactcctatttcattttccacatggcaagtatgttatcctcagtaacagactaaggtctttgcatgaattattaaaaatccagggcagaaaactctagataactgcttcaatttgtcgatagagatgcaacttgtgaccagaccaagaagattagagacaaaaatcaagcaaaaagagattctatagcacagctcttaaaaacaacaggcccgttggctacttcaaacactaactctcccacctattaattgcatcaccttaagcaagcttctaaactctgctctgtgacgcaattccctagcctgtgaagtagcactggtgtggtcacttataaaccctccctcctgagagcatgacaaactccagtatatacagtaagcacacaaggcaaggactctataaatattctytattgttaaagctcaattacttgtgaggtaagtaggagagttgtgtaggattgtgaaagggctttgatttttggtgcagacagtccagagtttaaaagttgtttctccc

SEQ ID NO: 51606 - DNA, 1347 bp, Homo sapiens
ccatagtgataatgctaagagggctttatttttgttttatggatgtggaaactggacacaggagtgctcagcagtggaggtcagttgttgcgtataataagtggggaagtgagaactggagaccatggctctgaagttgagtctctgctcccccgcatcctgctaggcctgatcttttctctgtcctccccttcctattcaccctaacctgatagaagagttccatcattgacattaagagcacttttcacagctaatcaaatattgtgactcactttgaccaccccttaccagatagaagtttcacactgraaagggcaaaaggcgccctcatcttggtaacaaggttgggatgggggtgagggctgggggcgtggaggtaaagggggtcagtcctcacttcttgtattttaccttacagaaggcagactatgctgtgctttggggttcagaaaatttgggtcccttattcccaagtaagattgttaacccacggggacttcttgataccaagacccctaagcccattcagaatagtctgagcgaccctcaccaggcaggaacattgaagtcctgtggacaaaacagaggctttgggacctgcagagtgaggttccagggaccccagctggctactctgggtgagtcgttttatttccctgaggccccattttctcatccgtaaagttgggagaataacacctgtattccagaaaagctcaaatgaaatgagttaggggatgtgtctggcccaaagtaggcaaaaatacacttttcctcccggtcatacctgtgaacagtgttacagggaggtcccaggtagtgcatacggatccgacctcaggaaacacatgatctgtttaatatgattagatacctgctctgagaatattcggaattacggatttgagatcaggaagttcaaaacagtctacattataaaatttttgcttctttccaaacttgcctacacagggacaagtaattatttaaagagatattgggattctgagtccagaagacacatttcttactccggggcttactggaagaggagctggttacctactagccactgagctttcaggtcatttgcctttggaagacggccccattggactgatttctcctcattgaatttcctggtgcatccagtccctgcacatcctatgcctccagacccttgaagggaactgggaatccgccagtggcaagagagggaggtccttgtccatcacagcctggctatctggggaggagggagaggcaaagggtgtccctctgggtctgggacaggaaatgtgacccagggtggctgagccagcccagcaccagctcctctctgca

SEQ ID NO: 51607 - DNA, 1347 bp, Homo sapiens
ccatagtgataatgctaagagggctttatttttgttttatggatgtggaaactggacacaggagtgctcagcagtggaggtcagttgttgcgtataataagtggggaagtgagaactggagaccatggctctgaagttgagtctctgctcccccgcatcctgctaggcctgatcttttctctgtcctccccttcctattcaccctaacctgatagaagagttccatcattgacattaagagcacttttcacagctaatcaaatattgtgactcactttgaccaccccttaccagatagaagtttcacactgaaaagggcaaaaggcgccctcatcttggtaacaaggttgggatgggggtgagggctgggggcgtggaggtaaagggggtcagtcctcacttcttgtattttaccttacagaaggcagactatgctgtgctttggggttcagaaaatttgggtcccttattcccaagtaagattgttaacccacggggacttcttgataccaagacccctaagcccattcagaatagtctgagcgaccctcaccaggcaggaacattgaagtcctgtggacaaaacagaggctttgggacctgcagagtgaggttccagggaccccagctggctactctgggtgagtcgttttatttccctgaggccccattttctcatccgtaaagttgggagaataacacctgtattccagaaaagctcaaatgaaatgagttaggggatgtgtctggcccaaagtaggcaaaaatacacttttcctcccggtcatacctgtgaacagtgttacagggaggtcccaggtagtgcatacggatccgacctcaggaaacacatgatctgtttaatatgattagatacctgctctgagaatattcggaattacggatttgagatcaggaagttcaaaacagtctacattataaaatttttgcttctttccaaacttgcctacacagggacaagtaattatttaaagagatattgggattctgagtccagaagacacatttcttactccggggcttactggaagaggagctggttacctactagccactgagctttcaggtcatttgcctttggaagacggccccattggactgatttctcctcattgaatttcctggtgcatccagtccctgcacatcctatgcctccagacccttgaagggaactgggaatccgccagtggcaagagagggaggtccttgtccatcacagcctggctatctggggaggagggagaggcaaagggtgtccctctgggtytgggacaggaaatgtgacccagggtggctgagccagcccagcaccagctcctctctgca

SEQ ID NO: 51608 - DNA, 654 bp, Homo sapiens
tgcccatgcctatgtcctgaatggtattgccaaggttttcttctagggtttttatggatttcgtcttaacgtttaagtctttaatccatcttgagttaatttttgtataaggtgtaaggaagagaaccagtttcagttttctgcatatggctagacagttttaaaaaccaggaaactaacttttggagaggataatttatcacatattatacaagtgataaaaccagaacttaaggragccttgattcttagaacccctgttggaacgtcatgtttctcctttgattaaagtacccattacatagttgcagcactctcttccaagcaaatgtaatcttccaggaaattggtctgaaagcttctttgtagagcaaatgactttgtagagaaaatggctttgaaaagtctgttgaggggcagaactctgcaagcatgttaaagcagaaagagaaagacatctagctcaataaagaaaagagggaggaagctaaaaagctgagcaatgtcagcgggtagggtaaggggagtgggtggtccctagttgctagaaagaatgaacagagactttaaggaaagtctgattgtctcctggaattgatggtggtgcctcaattttttttttgtgcacaatctatagtaaatctcagattgcat

SEQ ID NO: 51609 - DNA, 654 bp, Homo sapiens
tgcccatgcctatgtcctgaatggtattgccaaggttttcttctagggtttttatggatttcgtcttaacgtttaagtctttaatccatcttgagttaatttttgtataaggtgtaaggaagagaaccagtttcagttttctgcatatggctagacagttttaaaaaccaggaaactaacttttggagaggataatttatcacatattatacaagtgataaaaccagaacttaaggaagccttgattcttagaacccctgttggaacgtcatgtttctcctttgattaaagtacccattacatagttgcagcactctcttccaagcaaatgtaatcttccaggaaattggtctgaaagcttctttgtagagcaaatgactttgtagagaaaatggctttgaaaagtctgttgaggggcagaactctgcaagcatgttaaagcagaaagagaaagacatctagctcaataaagaaaagagggaggaagctaaaaagctgagcaatgtcagygggtagggtaaggggagtgggtggtccctagttgctagaaagaatgaacagagactttaaggaaagtctgattgtctcctggaattgatggtggtgcctcaattttttttttgtgcacaatctatagtaaatctcagattgcat

SEQ ID NO: 51610 - DNA, 640 bp, Homo sapiens
tttcctcaaaatcttactcattaaaattgacagtgtagactggcaggtcgagaatgtgatggcaaagagaaagttgcaagttcccttgaatgkttaatcctaatcacacatgcatttattatttgcacatttttttttttttttttggaggggggacagagtctcactctattgcccaggctagagtgcagtggtgtgatctcagctcactgcaacctcagcctcccggattcaagtgattctcctgccccagcctcccaggtagctgggattacaggctcccaccaccacacctggctaatttttgtatttttagtagatatggggtttcaccacattgaccaggctggtctcgaactcctgatctcaagtgatctgcccacctcagcctcccaaagtggtgggattacaggcgtgagccaccatgcccagcctatttgcgcatgtttcctactgccggaagaaggaacagttctcccatataccacattccagggcatcctatgatcacataagaacacaatcctcctgccacaggtaagtgcaatgtaccaggaaacaggttgcgggtaaaccattgttctccctctgccattatgatagaaatatcatgacaggcagctctgcccccaaatcttgc

SEQ ID NO: 51611 - DNA, 1316 bp, Homo sapiens
tggaaaatcacataagatggaaaatattgctcctgccatttttgatacagtctaccctatgaactcacaggaagaatttgtctccaattctatatcaggaattgatgtgctgctactaagaatatgttagcttagctcatgaagctgtggatcttgttttcctcttttctattggcttccagaagactcatagacaaatgygttgccttcctctagccagatcccctgtaaaatttcatatgcaataacttaccctgtcttcattttattttcccaccattattttccctttgcttcaattttcctcacttttaaaataccctgttgctgtatatgtattctaccagctgcaaagaaagtgagatatgaattttaaaatattccaagaattagctgggtgtggtggctcacacctgccatcccagctactttagaaactgaggcaggaagatcacttgagcccaggagttcaaggctgcagtgagctatgatcacaccattgcactacagcgtgggtgacagagcgagaccctgtatcaaaaaaaatgaatagagtaaaataaaatactctcaagaaaccagagaatccacacagtagaaaatacatctagttaaaaaaaaaaaaagatagcaaaagaggttaaaactcactagtaatgataaaaatgaacattaaagaagtcaccattttttcttatcatttaattgggtcctaggctcagtgctcagtccttcactaacactgtgattattaaaattattttctttccattagtcaaggatgaggatcaggatatggacaatgagatcagtacttctggatgtacctaggagaacagtaaaactgcacaattgcttccacaaaataatttggtgacacttattaaaggccagaaaataccatgaactttgatccagtaaaatcccttctaggttctagaacaaagaaataacccagattctgggaaatctgatttatgcatcaggacattgtctcattgtctaaatgcattagaaagtcatcttagtttacctttttaaaaattattataaaatatacacatataaaatgtaccatttaactacatgtaagtgtacagttcagtggcattaagtgtattcacattatgtggccatcaccactatacatgtccagaagtttttcatcatctttaacgtaagcactgtacccattaaacaacaactccccattcttttttttttctttctttctgacatggagtctcgctctgtcgcccaggctggagtgcagtgacgcgatctctgctcactgcaacttctgcctcccgggttca

SEQ ID NO: 51612 - DNA, 675 bp, Homo sapiens
gatctatcagaaagaaagaaaaaggaaggaagaaaggaaggaggaaggggagaaagggaggggggtgggggagagagagagaaagagaaggaaggaaggaaagaagaaaaggaaaactcagcagtttaaacaaacagggttacctttattttacataataagtttacaagaaaacagttacaagttgatttagctactcaaaatgtgaacactgatcgagcttgttttctatcattctgaatattgaatgtttttatgctctctcttttcatggttgcaaggtggctccattgctccaggcatcatatttgcattcaagatagaaagcagaaaggggctggttgcagctggatatgttccttttttttgttttgttttgttttttttttgagatggagcctcattctgtcacccaggctggagtgcagtggcgcgatctcagctcactgtaagctccgccttccgggttcatgccattctcctgcctcagcctcccgaatagctgggactacaggcgccygccaccacgcccggctaattttttgtattttttagtagagactgggtttcaccatgttagccagaatggtctcgatctcctgaccttgtgatctgcctgcctcagcctcccaaagtgctgggattacaggcgtgagccaccacgcccggccggat

SEQ ID NO: 51613 - DNA, 576 bp, Homo sapiens
acaactttgctgtcattgctctttctctctgtatatgacacaggggctccctgacagagctcctaacacatagagtcttgtattgtcttgactggataaactggtattgccagctaggttttaaagcccctaaggtatgggccacagcctttgctatataggacgaattggagggatgcttgtgaatgaatacctagctgtgttagtttgggttcctccagaaatcatctstaagacaaggattagagtggagacagtttgagatttgggaaggaaggggacattaggaggcaggtcaaggtgaagagaaggaagggataaaagttaataaagggtatgttttcaagctagctactcctgtgggtgactagagcttagtcccactgaggaaactctaggattcagtgtagaaatgtgcctctgaggtatcctgctccaagggtgagggggctagggtatttatatacccaatcccattagtaattggttgagggctgctctcgggggggttccgtcaggaagagaaactcccaggcaaaaaaacagagatgccagcagttggaagtcaggccagta

SEQ ID NO: 51614 - DNA, 632 bp, Homo sapiens
gcctgtgatggtgatgtctcatgttatttagggagtcgggttctaaatttctacaaagatgaaaattgtgtacagttaaaggtgcatttggaaaatcccttcaaatgcccactagcacagtgaggtgcttgcaccgtgagaggtaggaagtaaatctgattacttcagctctcacatgccccttgcaggtgaggatgggcagaaccaacaccatgtcagccctctttttcactcttcttgctgagggcatggagatgaattcactttagttaactgtataggttatataatttcaccttgatcagctcacccccaggagggttagtcctgtctacaaatacaaaagccactcgtgtcttttttgtaggaaaaattcctyactacctggtaaggaagaccctccattgtctcagccactaaaaacactcccagtgtcttccatccctttttcttcccctttctctcctaaaaagactgactttggcttttgaaaattggttaaaccttctctctctccctcttttctctctttctcattagcatttctaagtgtaatgttcaaagcttccaatggggacaatgccctgaaatttcagacagctccaaaggactccttcccacgctgatgtagg

SEQ ID NO: 51615 - DNA, 632 bp, Homo sapiens
gcctgtgatggtgatgtctcatgttatttagggagtcgggttctaaatttctacaaagatgaaaattgtgtacagttaaaggtgcatttggaaaatcccttcaaatgcccactagcacagtgaggtgcttgcaccgtgagaggtaggaagtaaatctgattacttcagctctcacatgccccttgcaggtgaggatgggcagaaccaacaccatgtcagccctctttttcactcttcttgctgagggcatggagatgaattcactttagttaactgtataggttatataatttcaccttgatcagctcacccccaggagggttagtcctgtctacaaatacaaaagccactcgtgtcttttttgtaggaaaaattcctcactacctggtaagraagaccctccattgtctcagccactaaaaacactcccagtgtcttccatccctttttcttcccctttctctcctaaaaagactgactttggcttttgaaaattggttaaaccttctctctctccctcttttctctctttctcattagcatttctaagtgtaatgttcaaagcttccaatggggacaatgccctgaaatttcagacagctccaaaggactccttcccacgctgatgtagg

SEQ ID NO: 51616 - DNA, 542 bp, Homo sapiens
taataagttttcaaagtgagacgcaaaatggtggcgccaacacatttcaaatctgctacattttgaagacacttattggagaaaagaccttctcatcatttttctcttacaggaaaggaaataacacgtacrgttgacccttaagcaacacggaggttggggtgctggaccccctgcacggtagaaaatacactataactttgactcccccaaaacttaactactaatagcctactgtaagcctgacaaataacacagtcaattaacacatatttaatatgttatatgtcttatatactgtattcttaacaaacatgccagagaaaagaaaaaagaaaatcataaggaaaatagatttactagttattaaatggaagtagatgatcaaacaggtcttcatcctcatctttctcatgggcaggatgtggataaggatgtagaattgttggttttgctaagtggacgtgcacagttcaaacccctgtggtgcaaaggccaactgtatagccattgaatagcaatttatatttagaaattaacct

SEQ ID NO: 51617 - DNA, 542 bp, Homo sapiens
taataagttttcaaagtgagacgcaaaatggtggcgccaacacatttcaaatctgctacattttgaagacacttattggagaaaagaccttctcatcatttttctcttacaggaaaggaaataacacgtacggttgacccttaagcaacacggaggttggggtgctggaccccctgcacggtagaaaatmcactataactttgactcccccaaaacttaactactaatagcctactgtaagcctgacaaataacacagtcaattaacacatatttaatatgttatatgtcttatatactgtattcttaacaaacatgccagagaaaagaaaaaagaaaatcataaggaaaatagatttactagttattaaatggaagtagatgatcaaacaggtcttcatcctcatctttctcatgggcaggatgtggataaggatgtagaattgttggttttgctaagtggacgtgcacagttcaaacccctgtggtgcaaaggccaactgtatagccattgaatagcaatttatatttagaaattaacct

SEQ ID NO: 51618 - DNA, 542 bp, Homo sapiens
taataagttttcaaagtgagacgcaaaatggtggcgccaacacatttcaaatctgctacattttgaagacacttattggagaaaagaccttctcatcatttttctcttacaggaaaggaaataacacgtacggttgacccttaagcaacacggaggttggggtgctggaccccctgcacggtagaaaatacactataactttgactcccccaaaacttaactactaatagcctactgtaagcctgacaaataacacagtcaattaacacatatttaatatgttatatgtcttatatacygtattcttaacaaacatgccagagaaaagaaaaaagaaaatcataaggaaaatagatttactagttattaaatggaagtagatgatcaaacaggtcttcatcctcatctttctcatgggcaggatgtggataaggatgtagaattgttggttttgctaagtggacgtgcacagttcaaacccctgtggtgcaaaggccaactgtatagccattgaatagcaatttatatttagaaattaacct

SEQ ID NO: 51619 - DNA, 1599 bp, Homo sapiens
tgatgaaatggcaatgtcacagactgactgtttatgtccccccaaatttgtatattgaaatcctaacccccaagctactcgtgttaggagayagagccttggggaggtgattaggtcatgaggacaagattctcatgaatggaatttgtgcccttataaaagagatcccagagagctcattggccccttccaaagtatggggatacagcaggaagttgccatctatgagccagaagggtgaacctcaccccagatgctgaatctgccttgatattggacttcccagcctgcacaactgtaagaaatttctgttgtttataagttactcagcttgtggtattttgttacagcagcctacacagactaagacaagtagcattttgaggattaaaatttcttcataaatgaatagagtatgccctgttaaaccatattctcagctaaccccgtttactcactgttcctctttattttagtttcacatttttgctatttatctctgtaattttattcattcttcacaatttgccattcttatacttcgaatcatgttatcagtttataatacctccatcaaatgatagtctgcatttgtttatccttggctgattcaaaacacttggcataatttccttaaaggaaatcatcttcatcccacctcacaacactgtattattttcaattaatttccaataaactcttaattgtccatgctctgtcagagttggcagagttaatccctgtttaagctaataggttcaacttcttcaacaaacaaatctttcatgaaagctgctgacaagccagagtattaattaaatctagtttcattgcttctcactttccttgatccttctctcttgttctttgggaaacagtcacagagttctggcgctaataaatactataaaaagtaggaaatacagtctaaagaagcagaatattctgtttaaagttgatgtggtgctttttgtgcaccaagcattggctcaaaagcctgaaaattaggcagcaatacttcctaagctcatcttcaaccataaggcagaaaagccaaacatatctgaaaatataatatcactggtaccttataccagcactaagaataagaaaaccctggaaagtggctcgagtacagtatttttctattggaattaatttttcaaaatggaaaggacttcattgttatttttattataaaattagtatatgtttattattaaaaataagtacaaaaatctctaaaagaaaaagggaaaaattaccagcagttccacattccagatatcatcactgttagcatttaggatacaaatatccaaacactttttctatcaatacatttaatttttaaatttgaccattacgcaatgtacacatgcactaaagcaccacactgtaccccataaacatgtgcaattattatgtcaattaaaaacaaaataaaagcattttacaaaaaatcatgttatttttaataacttgtttttctaattttatacaccataaaataaatgtctttacatgacatttattttatgataataactaatttattcatttaaacagcaaggtacatttcattctacagatatacta

SEQ ID NO: 51620 - DNA, 1599 bp, Homo sapiens
tgatgaaatggcaatgtcacagactgactgtttatgtccccccaaatttgtatattgaaatcctaacccccaagctactcgtgttaggagatagagccttggggargtgattaggtcatgaggacaagattctcatgaatggaatttgtgcccttataaaagagatcccagagagctcattggccccttccaaagtatggggatacagcaggaagttgccatctatgagccagaagggtgaacctcaccccagatgctgaatctgccttgatattggacttcccagcctgcacaactgtaagaaatttctgttgtttataagttactcagcttgtggtattttgttacagcagcctacacagactaagacaagtagcattttgaggattaaaatttcttcataaatgaatagagtatgccctgttaaaccatattctcagctaaccccgtttactcactgttcctctttattttagtttcacatttttgctatttatctctgtaattttattcattcttcacaatttgccattcttatacttcgaatcatgttatcagtttataatacctccatcaaatgatagtctgcatttgtttatccttggctgattcaaaacacttggcataatttccttaaaggaaatcatcttcatcccacctcacaacactgtattattttcaattaatttccaataaactcttaattgtccatgctctgtcagagttggcagagttaatccctgtttaagctaataggttcaacttcttcaacaaacaaatctttcatgaaagctgctgacaagccagagtattaattaaatctagtttcattgcttctcactttccttgatccttctctcttgttctttgggaaacagtcacagagttctggcgctaataaatactataaaaagtaggaaatacagtctaaagaagcagaatattctgtttaaagttgatgtggtgctttttgtgcaccaagcattggctcaaaagcctgaaaattaggcagcaatacttcctaagctcatcttcaaccataaggcagaaaagccaaacatatctgaaaatataatatcactggtaccttataccagcactaagaataagaaaaccctggaaagtggctcgagtacagtatttttctattggaattaatttttcaaaatggaaaggacttcattgttatttttattataaaattagtatatgtttattattaaaaataagtacaaaaatctctaaaagaaaaagggaaaaattaccagcagttccacattccagatatcatcactgttagcatttaggatacaaatatccaaacactttttctatcaatacatttaatttttaaatttgaccattacgcaatgtacacatgcactaaagcaccacactgtaccccataaacatgtgcaattattatgtcaattaaaaacaaaataaaagcattttacaaaaaatcatgttatttttaataacttgtttttctaattttatacaccataaaataaatgtctttacatgacatttattttatgataataactaatttattcatttaaacagcaaggtacatttcattctacagatatacta

SEQ ID NO: 51621 - DNA, 1599 bp, Homo sapiens
tgatgaaatggcaatgtcacagactgactgtttatgtccccccaaatttgtatattgaaatcctaacccccaagctactcgtgttaggagatagagccttggggaggtgattaggtcatgaggacaagattctcatgaatggratttgtgcccttataaaagagatcccagagagctcattggccccttccaaagtatggggatacagcaggaagttgccatctatgagccagaagggtgaacctcaccccagatgctgaatctgccttgatattggacttcccagcctgcacaactgtaagaaatttctgttgtttataagttactcagcttgtggtattttgttacagcagcctacacagactaagacaagtagcattttgaggattaaaatttcttcataaatgaatagagtatgccctgttaaaccatattctcagctaaccccgtttactcactgttcctctttattttagtttcacatttttgctatttatctctgtaattttattcattcttcacaatttgccattcttatacttcgaatcatgttatcagtttataatacctccatcaaatgatagtctgcatttgtttatccttggctgattcaaaacacttggcataatttccttaaaggaaatcatcttcatcccacctcacaacactgtattattttcaattaatttccaataaactcttaattgtccatgctctgtcagagttggcagagttaatccctgtttaagctaataggttcaacttcttcaacaaacaaatctttcatgaaagctgctgacaagccagagtattaattaaatctagtttcattgcttctcactttccttgatccttctctcttgttctttgggaaacagtcacagagttctggcgctaataaatactataaaaagtaggaaatacagtctaaagaagcagaatattctgtttaaagttgatgtggtgctttttgtgcaccaagcattggctcaaaagcctgaaaattaggcagcaatacttcctaagctcatcttcaaccataaggcagaaaagccaaacatatctgaaaatataatatcactggtaccttataccagcactaagaataagaaaaccctggaaagtggctcgagtacagtatttttctattggaattaatttttcaaaatggaaaggacttcattgttatttttattataaaattagtatatgtttattattaaaaataagtacaaaaatctctaaaagaaaaagggaaaaattaccagcagttccacattccagatatcatcactgttagcatttaggatacaaatatccaaacactttttctatcaatacatttaatttttaaatttgaccattacgcaatgtacacatgcactaaagcaccacactgtaccccataaacatgtgcaattattatgtcaattaaaaacaaaataaaagcattttacaaaaaatcatgttatttttaataacttgtttttctaattttatacaccataaaataaatgtctttacatgacatttattttatgataataactaatttattcatttaaacagcaaggtacatttcattctacagatatacta

SEQ ID NO: 51622 - DNA, 407 bp, Homo sapiens
gcctctgcctctgcagcaggctactccccctacctactacccaccaccctcccaccaccctacagccagcctactcttccccaccctacccaccccttttttcttccacccctaaccctcccacccatgattaaataatctcccaccaggccccaactccaacatttgggattgcaattcaacatgagattttccagggacacacagccaaatcttattatgctgaccttgacccccccaaatctcatatccttctcacagaagaaaatacaattgtgycttttcaaagtttccaaaagccttaactcattcccacattaactcaaatgtaaaaagttcaaagtctcatctgagacaaggccacagtctcttctgcctatgagtccctgaagttaaaagtgtgttca

SEQ ID NO: 51623 - DNA, 407 bp, Homo sapiens
gcctctgcctctgcagcaggctactccccctacctactacccaccaccctcccaccaccctacagccagcctactcttccccaccctacccaccccttttttcttccacccctaaccctcccacccatgattaaataatctcccaccaggccccaactccaacatttgggattgcaattcaacatgagattttccagggacacacagccaaatcttattatgctgaccttgacccccccaaatctcatatccttctcacagaagaaaatacaattgtgtcttttcaaagtttccaaaagccttaactcattcccrcattaactcaaatgtaaaaagttcaaagtctcatctgagacaaggccacagtctcttctgcctatgagtccctgaagttaaaagtgtgttca

SEQ ID NO: 51624 - DNA, 606 bp, Homo sapiens
ttttagaatagtgaactggttagataaattatatgtaataggatattaagtgttcattagacatggcaagtgaaaatatataatacatcattaagcttagaaaacaggttataaaatggtaataatgataacataccataycaatatttaataatttttctctatataatataaatacagactatgcacaacttttggttatgtgcatatgtaagtatagatctgtatgtaccaggtgtgtgtgtgtgtgtgtgcttgtgtgtgcattagaaaaagtatgtatgtgactgtaaaaaacttaaactacattattctttgaatttatcttaagattatgacagtttttttcttcttagaatttgtttccaaattttctgtaataaaaacaaattactttttataaacataaaaagcactaaagaaggcacctagtttatgtttcaggaaagaaaaatttaatttatattattagaattcctgaatgttaagaaagacatttgaaaatgtctatctgtcatttttggtgaaacctttttaactgcatagatttttttagagaaaaaaaaatgtaaggaaggaaaggagaaagggcaggtatcgtgagga

SEQ ID NO: 51625 - DNA, 606 bp, Homo sapiens
ttttagaatagtgaactggttagataaattatatgtaataggatattaagtgttcattagacatggcaagtgaaaatatataatacatcattaagcttagaaaacaggttataaaatggtaataatgataacataccataccaatatttaataatttttctctatataatataaatasagactatgcacaacttttggttatgtgcatatgtaagtatagatctgtatgtaccaggtgtgtgtgtgtgtgtgtgcttgtgtgtgcattagaaaaagtatgtatgtgactgtaaaaaacttaaactacattattctttgaatttatcttaagattatgacagtttttttcttcttagaatttgtttccaaattttctgtaataaaaacaaattactttttataaacataaaaagcactaaagaaggcacctagtttatgtttcaggaaagaaaaatttaatttatattattagaattcctgaatgttaagaaagacatttgaaaatgtctatctgtcatttttggtgaaacctttttaactgcatagatttttttagagaaaaaaaaatgtaaggaaggaaaggagaaagggcaggtatcgtgagga

SEQ ID NO: 51626 - DNA, 606 bp, Homo sapiens
ttttagaatagtgaactggttagataaattatatgtaataggatattaagtgttcattagacatggcaagtgaaaatatataatacatcattaagcttagaaaacaggttataaaatggtaataatgataacataccataccaatatttaataatttttctctatataatataaatacagactatgcacaacttttggttatgtgcatatgtaagtatagatctgtatgtaccaggtgtgtgtgtgtgtgtgtgcttgtgtgtgcattaraaaaagtatgtatgtgactgtaaaaaacttaaactacattattctttgaatttatcttaagattatgacagtttttttcttcttagaatttgtttccaaattttctgtaataaaaacaaattactttttataaacataaaaagcactaaagaaggcacctagtttatgtttcaggaaagaaaaatttaatttatattattagaattcctgaatgttaagaaagacatttgaaaatgtctatctgtcatttttggtgaaacctttttaactgcatagatttttttagagaaaaaaaaatgtaaggaaggaaaggagaaagggcaggtatcgtgagga

SEQ ID NO: 51627 - DNA, 652 bp, Homo sapiens
tggcaaatgctaagcactggtgaacctagtgtacaattatactattcttgcaacttttcttaaagtatgtaatcattttaaaataaatatttgaacatcagaaaaatcccatatagtaaacttatgtcttatttttatagaatcatttcagacaaagcccttttttaaacaacatttttctgaagaaatggaaacttgttttaataaagctataatttaatygtttaaatctttgtttttatttctgactgttaatattttgcatatgaaaatataaagttatcaactagcaatttcagtacaaacaaatcttggattcagacatgggcgtatcctcatctactgccatttcatatgacttgtgcaaaggatcacttttcttgggccttggttttcccatttgtagaataggaacagactaccttataggattgcagtaagaatcaaataaataatatgtataacagcactaaaaaatacaaatggtacagatatgtatgtgtcatgtaaaggtccttgattaatcactttcacttaggtaaacagaaatggttaccatcttgtaaaaattattttctgctgtagactatattgtctagaaaaaccttgttttcagtaccatcttataggcaggaaaagataagatatatat

SEQ ID NO: 51628 - DNA, 555 bp, Homo sapiens
cacagaggtacttctgcaatatttctaccaaaaatacataaactgaattttttcataaatatcagaaaagtccaaatgagggatagtcttaaaaacagccygcatgtaatcttgcaaagtatcaaggtcagggacaaactgaggattccagatgaaaggaggcaaaaaatcatgacaactaaatgtaatacagggttctaaactagatcctctgtcataaaggacattattaggacaattggcaaaaccgtgaatggggtcagaggatcagatgggagtaatataccaatgtcaatttcctgactttgatgattgtatcatggttgtgtagtagaatatcctttttgtagggaatacaaactaaagtgtattagaatggtgaagcattgtgtcagcaacttactctaaaaaggttcagggaaaaaaaaagttctttgattggtgcagattttattataagcttaaaattgttttaaaagatttttaaagtaaaagagaagagaaaggcgaaaatacaatatatgtagcttagagaaattccctttgcatagaaaa

SEQ ID NO: 51629 - DNA, 555 bp, Homo sapiens
cacagaggtacttctgcaatatttctaccaaaaatacataaactgaattttttcataaatatcagaaaagtccaaatgagggatagtcttaaaaacagcctgcatgtaatcttgcaaagtatcaaggtcagggacaaactgaggattccagatgaaaggaggcaaaaaatcatgacaactaaatgtaatacagggttctaaactagatcctctgtcataaaggacattattaggacaattggcaaaaccgtgaatggggtcagaggatcagatgggagtaatataycaatgtcaatttcctgactttgatgattgtatcatggttgtgtagtagaatatcctttttgtagggaatacaaactaaagtgtattagaatggtgaagcattgtgtcagcaacttactctaaaaaggttcagggaaaaaaaaagttctttgattggtgcagattttattataagcttaaaattgttttaaaagatttttaaagtaaaagagaagagaaaggcgaaaatacaatatatgtagcttagagaaattccctttgcatagaaaa

SEQ ID NO: 51630 - DNA, 555 bp, Homo sapiens
cacagaggtacttctgcaatatttctaccaaaaatacataaactgaattttttcataaatatcagaaaagtccaaatgagggatagtcttaaaaacagcctgcatgtaatcttgcaaagtatcaaggtcagggacaaactgaggattccagatgaaaggaggcaaaaaatcatgacaactaaatgtaatacagggttctaaactagatcctctgtcataaaggacattattaggacaattggcaaaaccgtgaatggggtcagaggatcagatgggagtaatataccaatgtcaattkcctgactttgatgattgtatcatggttgtgtagtagaatatcctttttgtagggaatacaaactaaagtgtattagaatggtgaagcattgtgtcagcaacttactctaaaaaggttcagggaaaaaaaaagttctttgattggtgcagattttattataagcttaaaattgttttaaaagatttttaaagtaaaagagaagagaaaggcgaaaatacaatatatgtagcttagagaaattccctttgcatagaaaa

SEQ ID NO: 51631 - DNA, 593 bp, Homo sapiens
tgaaacagatccagtaacgttgtcaaggagacgggaaaataaattaacaaaacaaagtatagtacagtggttaagagcacaaagcctagagccagacttcctgcctacaaatcttagctctaccactgtagagttgtgtgatcttcgggacattacttaacctctctgtgcttmaggcttcccaactgtaaaatgaggataataacagtgtctactccatagagcttttgcaagatttaatgggttgttttatagcaagtgatttagatagtaattagctcatggtaaatgatcagtgagtgccagctattatttaaatttttattatttatcacttttgtatacagtagagctgttgatcccaaaacagaatcctaaagctatttctctagggacagcacataaactaccactctaccttctgatgtatttttcttagtcttttgaaaatgctaaatcctgctaacccaaaataattattttccatacaaatattaaaaatgaattctaatttgggaggaatgcaggagaaactaaaaccaacatattttaaatttttatgcagaaaaagcagttaaataattaattcagaa

SEQ ID NO: 51632 - DNA, 593 bp, Homo sapiens
tgaaacagatccagtaacgttgtcaaggagacgggaaaataaattaacaaaacaaagtatagtacagtggttaagagcacaaagcctagagccagacttcctgcctacaaatcttagctctaccactgtagagttgtgtgatcttcgggacattacttaacctctctgtgcttcaggcttcccaactgtaaaatgaggataataacagtgtctactccatagagcttttgcaagatttaatgggttgttttatagcaagtgatttagatagtaattagctcatggtaaatgatcagtgagtgccagctattatttaaatttttattatttatcacttttgtatacagtagagctgttgatcccaaaacagaatcctaaagctatttctctagggacagcacataaactaccactctaccttctgatgtatttttcttagtcttttgaaaatgctaaatcctgctaacccaaaataattattttccatacaaatattaraaatgaattctaatttgggaggaatgcaggagaaactaaaaccaacatattttaaatttttatgcagaaaaagcagttaaataattaattcagaa

SEQ ID NO: 51633 - DNA, 558 bp, Homo sapiens
taaaacctaaaatagtacctgacacatagtaggtcactaaacatataaagcatacaggagagaaacactgaatatgaacactagggaagtgatagaatacattccctattacagaatatcatgaaggtattttaaaagcatgaataaaatcagtatctggtgatttccagaggttcatgatggagaagagataaagtgatatgtaccaggctgtttatactagttaccttgaagaagagaagaaaaagttgtaaaaataataaaatagaaaagacagtgtaatattaagtaaaaatatgcactacaaagatgtatgtaaatatatgtgtacatatgtattattactatgctatgtaaaggtttyaaatggatatcactaatgattagtaaaacaacttgaacataaaaatattaattagggttctgcgggcaagttttgcctcagaattcttattgttttaatgggatttgtaataaagtaacatttataaaagaaagaaaatagagaaatcttgcctttcatattttcacaaataacttctaaaaggagtattttca

SEQ ID NO: 51634 - DNA, 548 bp, Homo sapiens
gtgttcctgtcttccccaagtcttcccatgagctctcagctctgtgattcctttcaccagttgagcatcagctccaactctctccagttttgtctatatccctctcaaagtatggtatccagaactgacctccatactccaagggatgttctgatcaagaaaaagaacaaagcaatcctcccaataatgaattgggatacagatgtatctgatgccacctgatatgtctttgtggatacagatgtgaagtccatttctgagtgcacgcatataaataaactccagatatttacacaacacattgctgattcccaccattcctgagctcttttatgctttcttctttctttcttttctatttttttggagatgaggtcttgctccagcccagcctggagtgcagtagcatgatyatagctcactgcagcctcaaactgctgggctcaagtgatcctccccgctcagcctcccgagtagctgggactatgagcatgcaccactacctcctggctaatttttatgccttccatttctattagtgtcatgaa

SEQ ID NO: 51635 - DNA, 526 bp, Homo sapiens
atgatgarcactgttctcccctcccttcaaaactggtgaaatgcttcgaattaaacagattattcataatatataaaaactgccacttttcaagtcagatcattttggaagaatgtcaaaagagaggggtaagacagagattaaaatcactttcaggatggctgtacattttcagggctttaaaggtttactgtgtggccagcctggaggctgtaatgtctcttgtgtgattgaggagctgagaggtgattaaaggacttaagccaaaagggctgcctcccagtgtgttcgaagaagaaaaataccattaatcataataatgatgtgtgtttatagaaggcctttcatctgtgcctctcaaagtgctttaaccaccattaattatacctcccagtgcacctctgaggtagataaaaattattatacccattttacaagtgaataaaggcctacagggcgagtaggagtgaattatttggggtcacacataaaccagtggcaaaggaagcaattcctgtcccgggtc

SEQ ID NO: 51636 - DNA, 526 bp, Homo sapiens
atgatgaacactgttctcccctcccttcaaaactggtgaaatgcttcgaattaaacagattattcataatatataaaaactgccacttttcaagtcagatcattttggaagaatgtcaaaagagaggggtaagacagagattaaaatcactttcaggatggctgtacattttcagggctttaaaggtttactgtgtggccagcctggaggctgtaatgtctcttgtgtgattgaggagctgagaggtgattaaaggacttaagccaaaagggctgcctcccagtgtgttcgaagaagaaaaataccattaatcataataatgatgtgtgtttatagaaggcctttcatctgtgcctctcaaagtgctttaaccaccattaattatacctcccagtgcacctctgaggtagataaaaattattatacccattttacaagtgaataaaggcctacagggcgagtaggagtgaattatttggggtcacacataaaccagtggcaaaggaagcaattcctgtccmgggtc

SEQ ID NO: 51637 - DNA, 614 bp, Homo sapiens
ggatttatctctggtgctttttgtatgagtaacaatgccaagccctgggtctgacccttaatagattcttatttgcagaatgtgtaaataactactctcctttattcactcctcttgaagagccaaacatgcttctgtcttcaacccttctacccagtccctagttcacttaatataaatgctaattaggatgtgggtttaaggtcactcttccctctcagggagaagggaccaaacacaggctttccatctgcagaggttggcagagctcaggttrcctgtttttcttttgcttctaccccttcatctagtaaagaaggtgggtatccctgctctttgtaacaggagaaacacatttctttgtttgagtcatttgcacagttctggcaaaatcaccctagcagcatcttgtggaaaacaaaaatgcaaaggcacagatgactccagcttcccacagtgggtagccctaaataggacacttgccaatggcaccaaaacaatcgttaaactgtccaacaacgagctgggtaaactgagagaaaataaacctagttcaagcaaagaaacaaaactagggactccagcaagggcggagtaaatggagtgcctcctcc

SEQ ID NO: 51638 - DNA, 186 bp, Homo sapiens
tgactctaggaatttccttgttggctcctcttcccaagcctcagtttcctgccttgtaaataggctcattaygtttccaagaacccagtcaccccattgctcttttttgtttgttttgtttttgagacagagtcttgcttggtcatcaaggctggagtgcagtggtgcaatcacagctcattgcag

SEQ ID NO: 51639 - DNA, 611 bp, Homo sapiens
agcagaagagtgaaatgaaagtggcatttaagaaaaattgatctggtgaaagcgtgcagaatcgattggattggaggcattagaggtggccagacaaagagatgctgatgtaaataatgggatgggagctgaggggaacctggactgaggtgtttataagaatgggaaagaggcgtggaggagggaagcagttcaacatccatctctgagtgtaggaagaggcatcggggaccaaggaagctgaagtgacgctttgggtttttagcctttgcacctgaggagggaaaaggtggaaatatggtcaaaaaaatgtgagtcaggaagaggagctggctttaggaggatgatgaatgtggcttttcttaaacttgttaagtatgaggtaatagcasgatatcctaggataggaaggtagagaaactcaattagaacttgagcttcaaataacaccttggatctgtgcagaactaattcctggctcctgcatgtatgatagcattttataatcacacgctacacgctgcatatgaacatgaatgtggtaattacaggataaatcctccggctctctgcctctccggctcctctgtgtggaatcagattgctctggg

SEQ ID NO: 51640 - DNA, 625 bp, Homo sapiens
tgagatgcgaggatctggcgtgtttgacaagctggttgctccagcgggctcaggcgctggaatgggagattaattgatgctaaaagacacagtttgatgtggcaatgaaatttcgattataataatctctrattatcttgtacctcgagtgccctggctctcccaggtgtttcttcttggttggaaattgctatttgtgcatgaataaagcaggcggcttttatttatttattttttttgtgggtttgggggtatggggaaggacgtaaataggagtggaaaaagaatatacactgccacgtttgagagcagaggaatgtctgaggtagagtgtctctgaggaaagtatagcattcgaggaaagtaaagttcacattactttatagcaaatgttactaagacaagataaaggcaaacgtaataaagatagtagactaaactggaattcttatatcttgactattgatggccaggcaaggacctccatgactagattataccatctctaagactattggagaaaaagggtcaaagacaaaattaaacctcatctgggcgggcaaggtggctcatgcctataatcccagcattttgggaggctgaggaaggtggatcgcttgagtcc

SEQ ID NO: 51641 - DNA, 625 bp, Homo sapiens
tgagatgcgaggatctggcgtgtttgacaagctggttgctccagcgggctcaggcgctggaatgggagattaattgatgctaaaagacacagtttgatgtggcaatgaaatttcgattataataatctctaattatcttgtacctcgagtgccctggctctcccaggtgtttcttcttggttggaaattgctatttgtgcatgaataaagcaggcggcttttatttwtttattttttttgtgggtttgggggtatggggaaggacgtaaataggagtggaaaaagaatatacactgccacgtttgagagcagaggaatgtctgaggtagagtgtctctgaggaaagtatagcattcgaggaaagtaaagttcacattactttatagcaaatgttactaagacaagataaaggcaaacgtaataaagatagtagactaaactggaattcttatatcttgactattgatggccaggcaaggacctccatgactagattataccatctctaagactattggagaaaaagggtcaaagacaaaattaaacctcatctgggcgggcaaggtggctcatgcctataatcccagcattttgggaggctgaggaaggtggatcgcttgagtcc

SEQ ID NO: 51642 - DNA, 625 bp, Homo sapiens
tgagatgcgaggatctggcgtgtttgacaagctggttgctccagcgggctcaggcgctggaatgggagattaattgatgctaaaagacacagtttgatgtggcaatgaaatttcgattataataatctctaattatcttgtacctcgagtgccctggctctcccaggtgtttcttcttggttggaaattgctatttgtgcatgaataaagcaggcggcttttatttatttwttttttttgtgggtttgggggtatggggaaggacgtaaataggagtggaaaaagaatatacactgccacgtttgagagcagaggaatgtctgaggtagagtgtctctgaggaaagtatagcattcgaggaaagtaaagttcacattactttatagcaaatgttactaagacaagataaaggcaaacgtaataaagatagtagactaaactggaattcttatatcttgactattgatggccaggcaaggacctccatgactagattataccatctctaagactattggagaaaaagggtcaaagacaaaattaaacctcatctgggcgggcaaggtggctcatgcctataatcccagcattttgggaggctgaggaaggtggatcgcttgagtcc

SEQ ID NO: 51643 - DNA, 530 bp, Homo sapiens
gccctcatgtccacacgggtcctccctgtgtgcatgttggtgtctggatctgccctttctactgtggggcaactgtcgtcgaggatagggcccaccacacaacacggcctcatcgtaactaagtatagtcagcagtgatcctatttcccaataaggtcccattctgaggtcctggacttcaacatgtgaattttgggggccacaactctaccctggcatgcagagagagaaggggggcgtggagtcccccyggggggaagtcccttgggaagtcacaggcccccttggtggggcaattgggacgtgggtgtgagggtcctgggtacagggagcctgcctaccaaggctctgccgacagctatttctaaattcctcgtggaaaataccctgtggccctcctcatctggagcgagcgacgggctggagggtgtctgagccaggctggtgccggggagcagatgtgggtggcccaacccagccccttgttcttgttccccacctcccaggaaagggggagggtgggcggagcc

SEQ ID NO: 51644 - DNA, 530 bp, Homo sapiens
gccctcatgtccacacgggtcctccctgtgtgcatgttggtgtctggatctgccctttctactgtggggcaactgtcgtcgaggatagggcccaccacacaacacggcctcatcgtaactaagtatagtcagcagtgatcctatttcccaataaggtcccattctgaggtcctggacttcaacatgtgaattttgggggccacaactctaccctggcatgcagagagagaaggggggcgtggagtccccctggggggaagtcccttgggaagtcrcaggcccccttggtggggcaattgggacgtgggtgtgagggtcctgggtacagggagcctgcctaccaaggctctgccgacagctatttctaaattcctcgtggaaaataccctgtggccctcctcatctggagcgagcgacgggctggagggtgtctgagccaggctggtgccggggagcagatgtgggtggcccaacccagccccttgttcttgttccccacctcccaggaaagggggagggtgggcggagcc

SEQ ID NO: 51645 - DNA, 784 bp, Homo sapiens
cggatggaatttagaatcttccaattcaaagtactccttgaatacagactccccagtgtcttctatcgattcagctgtcctttcacctgatactgtcccactgggaacaggaacttccatatgatctaaacaggttcaacataaaccaaaaactggtcgaagtttattaggaggaccagcagctgttagtccattaaccccaagtgttggcattttgccattagaaaccccaagtcccggagacggaccctattgacaaaactgcactggtatgagacaccgtctgtcattgacgtgccatccaccggagccccttcaaaaaagcctgttgccagaatcggccaaaccggaacaccgtctgtcttctcgcagaggggaaagagccgaaaggtaactccagtccttgcaaaaacacaaagttctggtccgccgacaagggcaacacctcaggtattgagccccactatggcatctcccccaaatgcaccgcctcgaagamattcacgactcttgactagtgacagctccacaaccgaggagaataggagaaaattaaaaatgaagtttccacctaaaatcccaaacagaagaaccaaaagtaaaactaataaaggagcaataactccaccgaacataagtgatagcctggaagtgacaaaattggactcttccgtcatttcagaagggaaaatagccgcaatcgcgcctcagattcaggcttttaatctacaaaaagcagcagcggaaggcttgatgagccttcttcgtgaaagggggaaaggtt

SEQ ID NO: 51646 - DNA, 942 bp, Homo sapiens
ggtggatgaatagattgcaccactttacatctatcaaaatgaatatgattaagatacacacaataacatctgtgaatcttgatcataattttgagcaagaggaacaaatacaaacacattctgtattagtctatttatagggggtaaattattctttgycatttgacatcagaacagtggttacattttgggagaagagagagggaaataatatggttagggcatgaggagcctcctatgtgtcctttgagtgtttcttgaaccaggttgatagtttcatgggtgtgttcactctgaactaattccttgagctatacagttatgatttgcacaattcaattatattatatttcagtggaagctaatgaaagagaaacattgctgctaaaattcattaagtgaaggcttatggggaagtagaccttcatagcatcctatacttgcaaaagtggcaatctaactgaaggatgacatcagtatcagatatcagatatcacacaaaccaatgatcactcttactgtctcaactgtgggtcaacctgacattacaaattttctgatgtagtacaacatgaggtacaaaatttcacctgtgatttattctagtcaagcgtgtttaactggcagccattaaggcatcagatgtaaatttagacacagaaagcaatcaagcaaagccttaaggtatgccattttgtaggtcaattggcctctttccttcaacaagtcagtaccatttaaaaagagggggtaattctaaatgtaaaaaaaaattaaggggtggacaattagatataatgtgcaggactgcactgagactggtttaaataaatcagccctaaagaaaaatatttaattaattaaagacatctaaatacagcatggatattatatataatgaaaatgcatgaaaataaaaatgtgaaaattattgactgaaaa

SEQ ID NO: 51647 - DNA, 553 bp, Homo sapiens
tttacttaagatggagctttattgctgtgtcattcagaggtgtgatagttaatactgagtgtcaacttgattgaattgaaggatgcaaagtattgatcctaggtgtgtctgtgagggtgctgccaaagattagcatgtgagtcagtgggctgggaaaggcagacccaccgttaatttgggtgggcaccatctaatctcgtgccagtgcagccataatataaagtaggcagaaaaatgtgaagagatgagactggcctagcctcccagcctctgtctttctcccatgctggacccttcctgcccttgaacgtcagactccaagttcttcagttttgagactcagactggctttccttgctcctcagcttgcagatgacctattgttgtgggaccttgtgattgtgtgagttagcacttaaaaagtccccttcatatatatatatatacacacatatatatacatatatatatacatatatatacacatatatatacatatatacacayatatatacatatatacatatatatatacatatatatacatatatat

SEQ ID NO: 51648 - DNA, 553 bp, Homo sapiens
tttacttaagatggagctttattgctgtgtcattcagaggtgtgatagttaatactgagtgtcaacttgattgaattgaaggatgcaaagtattgatcctaggtgtgtctgtgagggtgctgccaaagattagcatgtgagtcagtgggctgggaaaggcagacccaccgttaatttgggtgggcaccatctaatctcgtgccagtgcagccataatataaagtaggcagaaaaatgtgaagagatgagactggcctagcctcccagcctctgtctttctcccatgctggacccttcctgcccttgaacgtcagactccaagttcttcagttttgagactcagactggctttccttgctcctcagcttgcagatgacctattgttgtgggaccttgtgattgtgtgagttagcacttaaaaagtccccttcatatatatatatatacacacatatatatacatatatatatacatatatatacacatatatatacatatatacacacatatatacatatatayatatatatatacatatatatacatatatat

SEQ ID NO: 51649 - DNA, 1302 bp, Homo sapiens
  misc_feature (1)...(1302): n = A,T,C or G
ggactgagcatttattgagcatctgttatatttttggtgctttataagttattgtattaatccttatataaccatctgaagttgatgttaaggaacattaaacagcaattttaatataagacttttcatattttaatatgaaacttaaattgaaagtgaatgtggcagatgggacattttgttttttctctttcccattttcacctaaggatgtcaaaacagaatggctttgcatggctgcgaatgtccaagtatttgcagaatggctattcattttatcttcccaatgctccaaggaatttttttagcaattccttctcatttcctaacaaacaccttctcttccctcttccttcattttcctgataggaaccagcttcactaatatggacaatgaaggtctagtaactgctttccccaaagaacaatggaagacctaaatcaaattttaaatcatggactatcaaaggagataaaatctctgggcaagacagccccagaaaccttttcttcccatttgttatatgggttgttggaccaggtatttyctcacagaagactaggaaaatattgtaacattctggatgacatactctctgagtcaggtgtgtctggaacatagcctgactcccaaggctgggccgcattcatttaataaaatctaagatacttcttgaccaaacatttttgtcttttttaaacctccagactctgacaactaaaaggaaagcctagactcctggagctttaaatattattattttaccaatgcagaatctgaggctcaggaaggttatgtaaagtggccaagtgaacatcattggtgagagatnnnnnnnnnnnnnnnnnnnnnnnnnnnnnnnnnnnnnnnnnnnnnnnnnnnnnnnnnnnnnnnnnnnnnnnnnnnnnnnnnnnnnnnnnnnnnnnnnnnnctgagaaaactagattaaaatctcccactcacctaccagatatgtctggcatggttgtctctttacagttctgtcaactcttgttttatgtattttaaaatgatattagtgtatatcagtttaagtttttatatctccctggtgaatcgaaactttattgttatgtagaaaccctcttcatctctaatactctttttcttgaagcctcttctgtctgacttaattttgctacatcatctttttctaatcatgtggactttattacagtctatgctaagaaattgaaaatgggtgaccatgttctgacctctttgttcaagaggcccaaatgactccagccacatttttttttccttgatagaatatgata

SEQ ID NO: 51650 - DNA, 624 bp, Homo sapiens
ttaacataaattaattcatgttttctgtttccacaccacacaaaagagctgtattgtttttcatcaagtttggcaaatacatttgagatggcattgttaccataccctggacctggattctttggctctcgcagatgtagaaattagcatcaggccaaacagaaatttttctcaggcaagatttaacaggccggtggcttcaatagcacaagggagcagcgaacaggaaaggggccctggtgctagctcctcaaaggactcggctcccctgtcattttaaggaagctagaatgggaaaaagagtgkcttggcatgcaggcatgagtaggcggggcttttcctgcgcctttggagtggggcatcaggccctaacaggcgtcccacgggcagaaaatagtgaatgaaccgtgccttgcggtgaatgccggtcagcactagagaccatcttgttgcccgccagctggatctgatgaggttctaatcggaaatggcagagcccacttcagcaaccttggaagacatcactcaattagataaacggttaagttcgtccttttagggttaggaatttggtccggccggccaagttaggaggaaacagctttctgctataggacttgggtc

SEQ ID NO: 51651 - DNA, 624 bp, Homo sapiens
ttaacataaattaattcatgttttctgtttccacaccacacaaaagagctgtattgtttttcatcaagtttggcaaatacatttgagatggcattgttaccataccctggacctggattctttggctctcgcagatgtagaaattagcatcaggccaaacagaaatttttctcaggcaagatttaacaggccggtggcttcaatagcacaagggagcagcgaacaggaaaggggccctggtgctagctcctcaaaggactcggctcccctgtcattttaaggaagctagaatgggaaaaagagtgtcttggcatgcaggcatgagtaggcggggcttttcctgcgcctttggagtggggcatcaggccctaacaggcgtcccacgggcagaaaatagtgaatgaaccgtgccttgcggtgaatgcyggtcagcactagagaccatcttgttgcccgccagctggatctgatgaggttctaatcggaaatggcagagcccacttcagcaaccttggaagacatcactcaattagataaacggttaagttcgtccttttagggttaggaatttggtccggccggccaagttaggaggaaacagctttctgctataggacttgggtc

SEQ ID NO: 51652 - DNA, 658 bp, Homo sapiens
tgaaggggatgtccccacgaaccacatctacaactcccctctggccactccctcctttgggctgattccagccaccttcctaaactcccctctcccaacatccacactaacgaaagaatattcaggaaaagccctacttcctttcatctctacccattccaaccttggtttaaagccccccaggcccagcacatcagcacaggaacttcggaaatcttaactatagctttgtactttgaatactggctttgaagtatgtgctaacagctrtaattggcattatggaagaaggttaaaataaattacttgtagctaaggagccagcaaagtggaaattatccaagtcatgttgtatttggtccgtaatccaacactgtaaaactaaatccttgtcaccctgactccttgttaggctgaagtacaacacagcatttcacaatcccacactgtgtctgacagccttgagatctggccccctctacccccaggaaaaacctcaaaaccatcaaggaggcaccatgcggtttcagagagtcccatccacccctgacacatgtgacgcatcaaatacctctgcctctctcctagaaccttgacttcagcagctgagagttgatcctcaccagggttctgcctacaaaaacattcaaggaacacc

SEQ ID NO: 51653 - DNA, 541 bp, Homo sapiens
cgcccctggatttgtgtgaacattctatctgtcatggatttgtgtttagactgtgattaatgtcaaagttagcataatgttgatttagagaaagtgacattttgccatgttttttacagaattgcctccaagacacacttaaggaacgcattccatgacacatgtttgactcctggaaaacttctctgatgctgaatgtcaaaatactgcatttcactgaaaaaagctagtctgaaaacataaaccatataacgagtcagacatatatagcacatgccagaaatgaagcactttctgtcatgtgaaccagtcataccaagagtataaatattgctctcaaaacagtcgctctcggaggaagtcaaaatttgatttaaaattggtatccgaccgaacaagcttgggrtgctcaacataatggagtgcataatcacggactgctaagaatgtgcaaagctgacagtcacgttttttcctaactttccaccaaaaatattatcttcagactttaccgggttggtttataactttaatacctgaa

SEQ ID NO: 51654 - DNA, 528 bp, Homo sapiens
atgtaactgctataaaaatatggagtaaatgatatgggaagagtgcagaggaggtggcattttagctcagctaggaggatgagtaatccaggctagagatctgaaggacctgaacttgggcagtggccttagaaaaagaggtttgtactgtttcaagagaaccccatttgatttctcggctgcatctgactagcacctggtctgcccatggayactagaggataaccacacatctgacagaggaagagcattacagtctcatggttttccgacagggtgccagctttcccgtgggtccccagtccactccctctccctagccccttcatatttgattctcaatctactgctcttctcatgcatttttttctacacttcttcaggtctcagcagatggcattccccttcctacacacccatacctagttagtcaccacatcttagaagccacctccaagtcatctttcctcttcttttccccaacaacactgcctcaatccagaatctcatcacttctttcctacacgt

SEQ ID NO: 51655 - DNA, 602 bp, Homo sapiens
aataacctatgttaatcaaaataaactccttagcattagttaaggttctttacctcaatctctcaaaattaatgttattctgaactaaaacttaaaaaaaaaaaaaactaaatctctcagttctacttgtcttattacacatatactcatcttcttttccagaaaaaaataatattcatgtcctaaacttagaaacctaacctgaagttttgatctggatttttaggaagaaggaagtattgatggtttcatcattcttagctctataaaagaacctattaatttttcataacttttagcttagtattatagttggccttttctctgtaagggacattcttaaatattcaagtctaattttctttaaaaagttcgcttgctttctttcttccaggaggatctacctytgaacttcattccaaaaaaaaaaaaaaaaacctaaatacaaattgcataataaatttctctttagattgatattagagtttaaattagtaaggtaccaactatacaaaaggacagagaatccttgctaaaataaagtagattttgtataaggcttccatctatccaaaaaggtttaatatttaaaaatgccagaa

SEQ ID NO: 51656 - DNA, 519 bp, Homo sapiens
ctgctgtgacccagcccctggctcaccttttggatcagcagggctgtagctggtgctgagcacctggaagtattctccctggtgctcctgctgtggggtgtctcctcatgaagagaccctggtgtggagctctttctgtcctcaggcatggaggactccaccctggggcactgttccaaaggtacaaaagcaaagaccccgacaggggtgctggagcccaccartgagcaaaattccagatcatctgagggcaactcaaccaagatccacagaaaggggaggatggagggatcccgtcccttctgtactgttggacacattgctgccacagccttcccctgccatgatcccactccaagtatcaggccaggcagggtctctgtatggagtttgctcccaggcctctgccactgttacctggcagggggcaggaggtgcctggcctctgggcattgccctctgggtcagcagtcccttcagcatctccacacagggtttgctgtggggtcctgtatgcaa

SEQ ID NO: 51657 - DNA, 608 bp, Homo sapiens
caagtttgtctaatccttttgatcttggcacacagcaatacagacttcagttgagattaaaactatgaatttcaaaggaaacatggccttcagtgtataaaatatataacagctggttgactagtccatttaaaactacacaataacaatcgtagacagaatgattctcctgccaaaagatgcacgagtgcttgatrgttatatcaagatacgatactaactcacacttttctttagtaatgatataaatgtagaaatgaactgtgtactgctggctcaaaatatctcttctgcccaacagttcaagggcagtttagaagtatagaaccccttttagtgatttctctatctgcttttcaggctgaacttcagtatgttgttgactaaatttcattttttaaaactgtctgatacaatttttattcttagcatcccacagttttttccctaaatctttgatcctccatttttactttcttgggcttcatgacttattgatcttaatgtcacaatttcacacatatttttaagctctcaaaattaaacttttctttgtaaataggataaagcttgtttcacattatatatatatgtatattaaggtaaat

SEQ ID NO: 51658 - DNA, 555 bp, Homo sapiens
gacttcaacttaactttcttgtggggaaaatagctcaacccataacagcacttatgtgagtgatcacagcaaccacactagagataagaagaagaaaactatttcctcagtgacagaccctcattctctattaatggtattctactggagtggacacaaacagctgcatgaaacatatctcattctctctgcagggttctctgcttctcttttccccacaattgatctctctttgtttaatcatgtggaaaagagccatataccattcagtggtgatagtgcaaagcttttgactaaaacaaagcctctactgatatttatggagagttattgaccattcacttgggcttaatgtttgctactgcttccaaggactcaagctgaaggatgcaactctgctattttctgagctagcsttacagtggaaatcagaaggtatctgccttttttcttttttaaatctacccttccaatttgtttgccaaggtcatgtctccccttgatagaagcattcacacttcacataccagccagttgactatggttctgaggtta

SEQ ID NO: 51659 - DNA, 576 bp, Homo sapiens
ggctttctgttacctcaggcaatgggctgatccatggartgcagagtggtctgagctccctgctcagccctagggtggtggggacaaagatgggtgagactgaactgggggagtccacatacaggtccccagatgacaggcacaagaaccaatgccaggagagaatctagtgagcagctgctaagcacccagaggtgtgcctaggcatgaatctgttaaacctccttggccccaggttcttgcatggggatgggaggttacctacactcctaatccaggagagtaagtgttccaggtggaatgtctttcacaattccagtgcattcccattttcatcttgaattaaagctcacagtttatgtattatcttcctcacagtttatctttatgtattatcttgctcttttcaactggctaaggcacactaaaagcctctaatcttggaggagaaaaggttccttatgacttttaaaagtaactcagaagtagctttggttttgtcatttgggtttcctagattatattagatgcctcaagttgtttctttgtttctgaggaaaacactcagactcctca

SEQ ID NO: 51660 - DNA, 640 bp, Homo sapiens
tttgtgtaaggttgtggtggcctttgtgcaaggttgtggttttgtagagtctttttttgctatcaggcatgtaagcacgagaaccttctcttcatggcctttccaggctttgtttgtcaggattttcccaatggagtcattagtgattccattttgattctgacaaytttcataacaccaagctaactgctgaaatatagaaagcttgtttgttgcgtatttatttctgcattctatctgcaagcctatatggataaaatagataccagactcttcattgtccttgtacactagttccattttgtttcactacaggactgattacctagtaattttattcctaggattctaactcacacaaataattctagatgctcatatatttgatgtataaggttgctcaccatgttatatatcataataatgcttaaatatattatggtataattattagaagaaataatatggaaaccttgaaatagatttgtagggatccaattgtcatgtataattggaaagtaggaaagtaaattgtatcaacagtctgaagtgattttattaaaaatacaaatagactgcacacacagagaagactggaaagaagcacattatgtttgagaggttattaatatgtggtaag

SEQ ID NO: 51661 - DNA, 640 bp, Homo sapiens
tttgtgtaaggttgtggtggcctttgtgcaaggttgtggttttgtagagtctttttttgctatcaggcatgtaagcacgagaaccttctcttcatggcctttccaggctttgtttgtcaggattttcccaatggagtcattagtgattccattttgattctgacaactttcataacaccaagctaactgctgaaatatagaaagcttgtttgttgcrtatttatttctgcattctatctgcaagcctatatggataaaatagataccagactcttcattgtccttgtacactagttccattttgtttcactacaggactgattacctagtaattttattcctaggattctaactcacacaaataattctagatgctcatatatttgatgtataaggttgctcaccatgttatatatcataataatgcttaaatatattatggtataattattagaagaaataatatggaaaccttgaaatagatttgtagggatccaattgtcatgtataattggaaagtaggaaagtaaattgtatcaacagtctgaagtgattttattaaaaatacaaatagactgcacacacagagaagactggaaagaagcacattatgtttgagaggttattaatatgtggtaag

SEQ ID NO: 51662 - DNA, 640 bp, Homo sapiens
tttgtgtaaggttgtggtggcctttgtgcaaggttgtggttttgtagagtctttttttgctatcaggcatgtaagcacgagaaccttctcttcatggcctttccaggctttgtttgtcaggattttcccaatggagtcattagtgattccattttgattctgacaactttcataacaccaagctaactgctgaaatatagaaagcttgtttgttgcgtatttatttctgcattctatctgcaagcctatatggataaaatagataccagactcttcattgtccttgtacactagttccattttgtttcactacaggactgattacctagtaattttattcctaggattctaactcacacaaataattctagatgctcatatatttgatgtataaggttgctcaccatgttatatatcataataatgcttaaatatattatggtataattattagaagaaataatatgsaaaccttgaaatagatttgtagggatccaattgtcatgtataattggaaagtaggaaagtaaattgtatcaacagtctgaagtgattttattaaaaatacaaatagactgcacacacagagaagactggaaagaagcacattatgtttgagaggttattaatatgtggtaag

SEQ ID NO: 51663 - DNA, 640 bp, Homo sapiens
tttgtgtaaggttgtggtggcctttgtgcaaggttgtggttttgtagagtctttttttgctatcaggcatgtaagcacgagaaccttctcttcatggcctttccaggctttgtttgtcaggattttcccaatggagtcattagtgattccattttgattctgacaactttcataacaccaagctaactgctgaaatatagaaagcttgtttgttgcgtatttatttctgcattctatctgcaagcctatatggataaaatagataccagactcttcattgtccttgtacactagttccattttgtttcactacaggactgattacctagtaattttattcctaggattctaactcacacaaataattctagatgctcatatatttgatgtataaggttgctcaccatgttatatatcataataatgcttaaatatattatggtataattattagaagaaataatatggaaaccttgaaatagatttgtagggatccaattgtcatgtataattggaaagtaggaaagtaaattgtatcaacagtctgargtgattttattaaaaatacaaatagactgcacacacagagaagactggaaagaagcacattatgtttgagaggttattaatatgtggtaag

SEQ ID NO: 51664 - DNA, 555 bp, Homo sapiens
aatttaaaatcataattaaactgtgataaaatataaagttaactatagaaggtttgaataaaacaaaaaaaaatctcatcaagcactttgcttttgattatcctgctattgatctcttctatcggtaagtacagtacctagaatttcagagttttgttattggaaagagattggcagttgttcaagtaaatgggttccctttacaaatcascagaataaagtagaataattcagtgatttatacaaggtcataacactaattaatgttaaataatatctctaaatatatagtcttataaagcagactttttctgaacacattgtgaaaactcattttaacacattagtgctattttgtgtctaaggggtttgagtagagaattattttactctgttatttttttcaagaggttttactcttacataatagttgacttatatcctaaaaaatgctaacatggcaagcttagttcactatctttcagttcaaaaaaagtctatttacatgctaagaaatattaaattttacaagttattttaatttcatagaaaatt

SEQ ID NO: 51665 - DNA, 1496 bp, Homo sapiens
ctaagatttaagtcgtgttaagtctaatgcttaaaaagaaaaataaagaaaggtccagaatgttcacatggagaaggaatataatatcctcaaggtctaaaagaaagagcaaaccaactatcatttacctctaggaaatagaaattcaactttcaccttgaggcctaaggtctcatttctggttttctgtaagctcaaaatggaagtcctttgaggctgagaaaataccccggaactgcctcacgttagccttcccccgtccaatatattatacttacttcctaaagttttactttagtaacagactgagacccaacaaggaaagacgtcagttagcatttaaatacaagtacttcaaccaaaaagaaagttaagctaaaatccttgatcttctatcttactggattagtttactttagccaagataaggagcatggttttacatatattgtctctatatacttgtctgaagattatgcttttggatgacaacattattttatattgcgtaagagtcatttcttctggtagctctcagaaagctttggaggaaagaaatgagttcattcctgttttagttattttgcggaagagtttagctgatgacattagcaagcaagtagagatgcgggctgtgtgttatgggaagggtttatggggctccaagagttaacccactaaaggtcaatagtaaaaagacatttttgaggtttttttgtgtgtgaactatgaaataagttgtttagcctaagggcccccaaaatgggatgtctattcccctgggctgcaaaaaacaatttttggaagagaagtagatatctcttcccatagataagaaaagacgtcaacctccctggtatttgatgcccggagtgacaccagtgagctcccatcagatggtcccaagacacaagtagcacaagagccagcctgagggcacactgggacttctgcatgcagaggctgcaaatcttgtcaaaaggaatccacatgacattatctagcatttgccagctaaccttcacaaagtggacaagtggcttgaaagcttcaagaaaaagagcttcaggtttgtactaatacaaataagcaggcatattaaacagggaagaagcctgcctccttctcccattaayagctgtttcagccaattaaaagggagccattaatttccataataaagggcaaataacagagaagatagacacgtttctccccttaccttattcctatctgttcaggatgctcatgggagtgagtacaggacaactggatccacagcagtcattttgcaaacatgaggtatgaacatgaggagaaaaataagcatgccgagaatggcagagagaaaaaaagaaactacatcctcgatgacatcacagatcttctattccatctttaaggcttttttattacattcttttttcaataccatcatgacctaagccatttttcatcaagttgcctgctatttgctgacaaatgcatgttagctg

SEQ ID NO: 51666 - DNA, 544 bp, Homo sapiens
taaaaagaagagtaacaaatgtatctaaactgttcaagtaagatatatgttagacaaaaaagaatatttcccttatttgtaaactcatttgagttttaatagaagaaaatatatttttattaattaaaagtgcaacacatattaaaactactgtaaatataaagaaatataaagaaaaccctacagaagcacaagtgtacagcattctatagaatcacaaatataatacatagaatcctatttccaacagagaatattcttttgttttcaagtcattagattccatttataatgttttactatgcattattacatgacaacaactcaayacattctaaaatacaaggataatacacaggccacagtgtttaagataatataaaaaagtttaaactaataattaaattataaacatgaaattctttgccactaaaaagcactattttgaaatattcttaggtaaaaatacaaaccaaaattgcaactacatgctggaaatgttccataccttgatgtgtatgttgatttcatgtatatatgtctg

SEQ ID NO: 51667 - DNA, 544 bp, Homo sapiens
taaaaagaagagtaacaaatgtatctaaactgttcaagtaagatatatgttagacaaaaaagaatatttcccttatttgtaaactcatttgagttttaatagaagaaaatatatttttattaattaaaagtgcaacacatattaaaactactgtaaatataaagaaatataaagaaaaccctacagaagcacaagtgtacagcattctatagaatcacaaatataatacatagaatcctatttccaacagagaatattcttttgttttcaagtcattagattccatttataatgttttactatgcattattacatgacaacaactcaacacattctaaaatacaaggataatacacaggccacagtgtttaagataatataaaaaagtttaaactaataattaaattataaacatgaaattctttgccactaaaaagcactattttgaaakattcttaggtaaaaatacaaaccaaaattgcaactacatgctggaaatgttccataccttgatgtgtatgttgatttcatgtatatatgtctg

SEQ ID NO: 51668 - DNA, 450 bp, Homo sapiens
taacacctaggagttagaagatatcttgttattcatatttctatttgaatcatgtggtcattgttgaatggccatgttttaatgagtcaggcacattttacttagctaactcttcctaaaattggaactaagaactgatttgaatgcygcccatctcctcccactttatttttccaagcgaaacataaattcagtcatatttatgagcccaaccctgatcctcaggtgccttgggttacattactgggatctaccaaatggtcagtttctatctgctcagttcacaatcacaggaaagaacaaactctcttagttatttgacaatggcagagaccaaagagagattggacttttggatatatatgtctacaagaaacaaccaaaagaacagtgtattcccaagaacaaatgacaatcgtatcacataaataagtcaaaaggaggagctga

SEQ ID NO: 51669 - DNA, 450 bp, Homo sapiens
taacacctaggagttagaagatatcttgttattcatatttctatttgaatcatgtggtcattgttgaatggccatgttttaatgagtcaggcacattttacttagctaactcttcctaaaattggaactaagaactgatttgaatgctgcccatctcctcccactttatttttccaagcgaaacataaattcagtcatatttatgagcccaaccctgatcctcaggtgccttgggttacattactgggatctaccaaatggtcagtttctatctgctcagttcacaatcacaggaaagaacaaactctcttagttatttgacaatggcagagaccaaagagagattggacttttggatatatatgtctacaagaaacaaccaaaagaacagtgtattcccaagaacaaatgacaatcrtatcacataaataagtcaaaaggaggagctga

SEQ ID NO: 51670 - DNA, 671 bp, Homo sapiens
ttgttgtgaggattaaaggagtttgtatatgtgaggcacttacaatattgcctagcacacagtaagtgcttaatgaatgttagctcttattattaccattaggtgcaataatttagcagctatgcttaaagatgggaaaggaggaaggggtgtggctaacagcaatttataccaattctgctcctttgggacatgcaggtagagggtgttgtagtgagagggaaacaaactatttctatcattattattattgttattgctttatagagacagagcctcactatgttgcccaggctgttcttgaaatcctgggcttaagygatcctccctcctcagccctcccaaagtgccaggattacaagcataagccaccacacccggctatcatcattattaatgaacataggtctgtcataggcctgcagctatttctctgcatgtctccagtgcctcaaggtgtggatgccatctctgtcagtgtgcatgttgcacacttcccccacccttaggctgggcaggtggccttgccccacctttcctccacagggaggtgggcaggagcatttcatcatgtattcaacaagccattagaaagcacatacaggccgggcgcggtggctcacgtctgtaattccaggactttgggatgctgaggcagatggatcacaagg

SEQ ID NO: 51671 - DNA, 1690 bp, Homo sapiens
ccgaagagtcggttcatcttgagcagccgcgaagaaacccaaacactagagcaaaaccagaaacggaagcagagtcactcccgcctcgacttccggcccctccgtgcgcaagcgcaatatgcctcctggcgttwcccgattctttttccggattttcagccgggtcttccggggatggagagcaaaaggacttggtgctctcggagagagcctgcagggggcggggtgttggtagaaggagtgggaggggttttactgtagcaaggcggggcctcagttgagtgggtggggcctggaggcaactaacgcggcatagggcgagggcggggccggcaggccggggcggggctgggaagtagtcgggcggggttgtgagacgccgcgctcagcttccatcgctgggcggtcaacaagtgcgggcctggctcagcgcgggggggcgcggagaccgcgaggcgaccgggagcggctgggttcccggctgcgcgcccttcggccaggccgggagccgcgccagtcggagcccccggcccagcgtggtccgcctccctctgggcgtccacctgcccggagtactgccagcgggcatgaccgacccaccaggggcgccgccgccggcgctcgcaggccgcggatgaagaagaaaacccggcgccgctcgacccggagcgaggagttgacccggagcgaggagttgaccctgagtgaggaagcgacctggagtgaagaggcgacccagagtgaggaggcgacccagggcgaagagatgaatcggagccaggaggtgacccgggacgaggagtcgacccggagcgaggaggtgaccagggaggaaatggcggcagctgggctcaccgtgactgtcacccacagtgagtgtcgggcgccaggtgggctccatgcaggtcccgaaagcccggcggggtctgtgggtttagtcacgtgtcctccagaagcgtgtgaccttgcgcttgtcctggcgtccggaagcgtgggttattggttgtgtccgtggaactgtcttttgtcccgggcttgtgtctgtacacttttccatgtggccggtgtattttgtctctggtcatttgtgcgatcctgggtgtttgagcttctccgtgctttacgtcgtgggcctggttgtgtttgtgtgcccgcgcagttattgtgccctttgtgtcaggcatatattgggccatgtggtctacgactgctccgtgtgtgataagtcagaacttcgtgcatgccggggtgctcctcgtgtgctgagtgccttctccgtgtgcgccgcttgagttggccgtgggtccaagcgttgtactctgggcaccctttgggtctgcctactgttggagttgacacaccaccaaatgaagtcagtacaccggagagctgagtccatgaggtttctctagaaccagctaggggaggcccaagggtctgggaatctggagacctggattctagatcctgcggttttgagtgaccttgggatggacggcttcttctaagaatccggtttctcctctgtgaagtagatttggtaaccctggctcctgctgacctcacggagctgttgggggaaccaaaccttggtgtaatgtactgtacacaggctccctccttgctgtccgcatccctggaaaagaattggcgtctcttcttcagaaagaaaggctctgctgttcgtatg

SEQ ID NO: 51672 - DNA, 1955 bp, Homo sapiens
ggaaacttacaatcatggtggaaggtgaaggggaagcaagcagtttattcatgtggtggcaggagagagagagcgagggggaagtgccacatacttttaaacaatcagatctcatgagaactcactatcacgagaacaaggtggaaatccactcccatgattcagttacctcccaacaggcccctcctccaattcaatatgagatytgggtggggacacaaatccaaaccatatcatttctccatttccactagtagtggatgaaaactctgtatcagcacataccttctaacacttgacatcatccaagctgtctaaaaagcagtcacttggtatctcacagtcattttaatctgcattgtttgattactaattaacttttaagattctttttctgaaaattacatgttcatgtcatctacccattttttcactgtggttcctgtttgttgtttggtgaagtttggaagcaagacaaagcaacttgcgtacagaaaaatgaaaagagggataggataaagccagggtatttctaagaattccatggcttatatgctatagagtgttcagaggtagtagtccttcatgtatcaatacattgtttctcttcactgagagaaaaccatgaatagcttaaagtcaaatgctctgtgttgttgcatagagactctggagagatatattaaggaagggaaagaaagacataaagataaagttgctgtgttttctaagcatatttgggatgaaatgaggttgagagaaaagctatgaagtatattagcccagaactaacttcctagcagaattcaggaagcctccatcacttacatcgattaaaagtggcagcctctattggaagaagcactgagaaatagagtacaactgatggccctccgttactatgggaatgaattagatacctcagatgatgctttctgcttttttgccctgatttaatgtggcacacatgatagctgaataaaactattctttcttccccactgtcatcttttaaatactcatggataggccaggcatggtggctcacacctgtaatcccagcactttggaaggccaaggcaggcggatcacaaggtcaggaaatcgagaccatcctggctaacacggtgaaaccccgtctctactaaaaatacaaaaaattagatgggcgtgatggcaggtgcctgtagtcccagctactcggaaggctgaggcaggaaaatcgattgaacccgggaggtggaggatgcagtgaaccgagatcacgccactgtactccagcctgagtgacagagtgagactccatttcaaaaaaaaatactcatggatggaggttagtttggtgccatatccagttattttataaactcctttttaaagccaccaattacatgggtaagttagagaagttacctaaactagtggctatacaatgtccgctaacttaaaggagagaggatgcaagaaaataattatcaagaaagtgcagctctggttattttattccctgcagtgacaactgggatatctggggcccaggggctttgaatcccagagggaacacttaaattatttatcctctggtaatggcttcttctcagcaagatgcattgcacatggggtgctgagtcatttttcttaagttgaacagagagattacaaatgatagaaaggacatcctaggtgcaggtagctctttatcagcttacagtttaattttatgagcccatttgatgagctttaatttcctcttttcggagtcttatctagaaaaactgcttgattcatataagcctttgataattgtattaggctttctgtatccactattaaatacatatcccaccatttgacatttttatggaagggaccatgcttatttctggaattgaacacaaatatagtaaaattttagttaaaggctggtttgtgtcttgaagtccaataaataaaaa

SEQ ID NO: 51673 - DNA, 532 bp, Homo sapiens
caaggatttcttgctggtactctattaattggtaccctaattctagtcatyggactatggaaaatcagagtgagcagaaattctgatgatttttaaaaatttattcctagtttatttccagtaaaatttggtactgtatcagtagatgactctcttagctttatttaaattttggcgtgtctctgtattcatttttgtctgtaattactatcctggattaacagacttcatgtctgttttttctcaatatattcaaaggcgcatttcaaagcaaagtgacttgaagtctcattttgtgatctattaatccactgatttttttccactcagtgtaatttatgatagtatctagtgttgcacagaagcaaagaaatctaggaaaaatcaacctctaacatactgtgaaattgcctgtgattagggctttttctcacttatattaatagatgccagtccagctcaaaacagcacagtggttaaggcagcagacaaatgggggaaatatagtacctacctcatatgattataatca

SEQ ID NO: 51674 - DNA, 532 bp, Homo sapiens
caaggatttcttgctggtactctattaattggtaccctaattctagtcattggactatggaaaatcagagtgagcagaaattctgatgatktttaaaaatttattcctagtttatttccagtaaaatttggtactgtatcagtagatgactctcttagctttatttaaattttggcgtgtctctgtattcatttttgtctgtaattactatcctggattaacagacttcatgtctgttttttctcaatatattcaaaggcgcatttcaaagcaaagtgacttgaagtctcattttgtgatctattaatccactgatttttttccactcagtgtaatttatgatagtatctagtgttgcacagaagcaaagaaatctaggaaaaatcaacctctaacatactgtgaaattgcctgtgattagggctttttctcacttatattaatagatgccagtccagctcaaaacagcacagtggttaaggcagcagacaaatgggggaaatatagtacctacctcatatgattataatca

SEQ ID NO: 51675 - DNA, 506 bp, Homo sapiens
actctgttcctagcaccaccagccaaatagtcctaccttaatcctaccctaaycctgttttacagcctggactcagctagaccctgctactaaaacattaaaccaaaggatattgaggattcctttccgctctgtatcacacggttatatactaaaggcacatagtattgcgagggcgataaatacaaacaaaattaaacagaacaaaagacaacagtactgaaggagcacagaaaagaagaatgacatcagggaatgattattagtcttagctttggaactggaacttgaagaatgagtaagattggctgggtggagttgagatgatacggtttggctgtgtccacacctgaatctcaccttgaattgtaataatccccacgtgtcaaggttggggccaggtggagataattgaatcacgggggtggtttcccctatactgttctcatggtagtgaataagtctcgcgagatctggtggttttataaacaggagttcctccgcac

SEQ ID NO: 51676 - DNA, 506 bp, Homo sapiens
actctgttcctagcaccaccagccaaatagtcctaccttaatcctaccctaatcctgttttacagcctggactcagctagaccctgctactaaaacattaaaccaaaggatattgaggattcctttccgctctgtatcacacggttatatactaaaggcacatagtattgcgagggcgataaatacaaacaaaattaaacagaacaaaagacaacagtactgaaggagcacagaaaagaagaaygacatcagggaatgattattagtcttagctttggaactggaacttgaagaatgagtaagattggctgggtggagttgagatgatacggtttggctgtgtccacacctgaatctcaccttgaattgtaataatccccacgtgtcaaggttggggccaggtggagataattgaatcacgggggtggtttcccctatactgttctcatggtagtgaataagtctcgcgagatctggtggttttataaacaggagttcctccgcac

SEQ ID NO: 51677 - DNA, 594 bp, Homo sapiens
tcgcccaggctccagcgcagtagcgggatcttggctcactgcaagctccgcctcccgggttcacgccattctcctgactcagcctcctgagtagctgggactacaggcgcccaccaccacacccggctaatttttttgtatttttagtagagatggggtttcaccgtgttagccaggatggtttcgatttactgacctcgtgatccgcccgcctcatcctcccaaagtgctgggattacaggcgtgagccaccrtgcccggccaattcttatacacttttagtatctcttatttataaagcacacttcacttataaaacatgtcatgtgtgttgtctcatttaatcttcctgtgttttcatctgctacaagcaattttagcatatccatttgaaactccagtcttgtgaatattacctccataagaagcaaacataggattttgtgaaagaaactagccttacttcatgactggtattgatggatttgaaggaaatttctcaacctctttataatgaccatccattttatgtcatattttcagaacaaaaaaaaatgtggtaggaaattacctgacagcaaagatttttagaaa

SEQ ID NO: 51678 - DNA, 594 bp, Homo sapiens
tcgcccaggctccagcgcagtagcgggatcttggctcactgcaagctccgcctcccgggttcacgccattctcctgactcagcctcctgagtagctgggactacaggcgcccaccaccacacccggctaatttttttgtatttttagtagagatggggtttcaccgtgttagccaggatggtttcgatttactgacctcgtgatccgcccgcctcatcctcccaaagtgctgggattacaggcgtgagccaccgtgcccggccaattcttatacacttttagtatctcttatttataaagcacacttcacttataaaacatgtcatgtgtgttgtctcatttaatcttcctgtgttttcatctgctacaagcaattttagcatatccatttgaaactccagtcttgtgaatattacctccataasaagcaaacataggattttgtgaaagaaactagccttacttcatgactggtattgatggatttgaaggaaatttctcaacctctttataatgaccatccattttatgtcatattttcagaacaaaaaaaaatgtggtaggaaattacctgacagcaaagatttttagaaa

SEQ ID NO: 51679 - DNA, 563 bp, Homo sapiens
agagggcatgcctctgcagtagcttatcattaggatgaccaaactggggcatttttgagagtgaaagggatgctattaataaatgcactggataagaggcacggcaaagacccatttggctccaaaccaagatgaattggcttcaaatgtaatcatactagttagggagttaagatacctgattagctagatttttctgatcttctacttagatgtattgcagatgaaacactgaattattgaagaaggctagragagtgctgaattcttgaatgctgggcacaagaggtggaaggaggagataaaatttgtaaaacactctcagaggaccaactgacattggttaaacaccaaagatgtgttatccatgcaaaacagagcatgttctcacattgtcttctagaatgttataaatttctaagggaagcaactttatacaaatcacattctgtaacttagtgatgcattgatggtattttcatttaagtctagatccattcatttcaaagctaattattgagtatgtgtcgggcaccatcagctcagtactcagagaaagtgcc

SEQ ID NO: 51680 - DNA, 566 bp, Homo sapiens
atcggtctttgttaattaaaaaatatggaattggagagggatcaatttactttttcatttaataactatttaccaaaaaactaagcagcataatgtttgttctagatttgagattagagataaatatgacatggtgctgaaagatcctattctggcaattgatggcctagagatcctgaaatcctcctgtaatacaatatttgaaaattctcaatgtaccattattaataatagctttataaaaatgaaatgatgttataagaattttttttgaaggaattctgttcaagtcgaaaagtgagaatattgggaacaggaaagtacgcccatctgagccacttctcgtcytgagagttaagggaagcctgtgcactggagctttggcctgctaagggaaggggagaacaattttgccttttaaaccctataaatgttgcacatgttcagaaaataaaattttaaaaagagaagtaaaggaaaatctgaaaactgaaaacaaatataaacaattgtatatcaagcataatagtgtatcaaactagaaacaaaacttgcaaataaaatgt

SEQ ID NO: 51681 - DNA, 585 bp, Homo sapiens
ccaaagtggaaacaatccaaatgccatcaacagcagaaacatttatactattggacaccttacagcaggcaacaggaccaagtacagatacacagaacaacatagatgagggaaataaaacaaacaaaaaaaccattaaactgcataaagcaaaattctacttatataaggttatataacattttcaaaatgagcaacattttagtaaatttatttagaattcttctgcagaggggttttgtctcttctctccaatttgttaaatttactcatttattcataacagcatgaactcscaggtatttattttattctttggattataattcaataatattttagttattctgttgcttaacttgtttaagatttggccattgggagctgttttcattggttcttgtgctcttctaatataaccccataaatgttctaacataacctcatcaatacttttgtttgttttgtgtttaccacattcttattttccaacattccaagatggctataggctctttctatatttcctgcacaggtctagaaactttatttcttcataagtattgccacaccttttttttttaa

SEQ ID NO: 51682 - DNA, 550 bp, Homo sapiens
tgttttataatccaattatgcatatagtgaattttgtccattaaaaattcttgatatgtccttgaagtcttttatagtctgtagggccccttgcatttctttcttttccttacaacttatctgctaaagaatccaagttgtttgmcctaaagaatttcccacagtatggattttgttggtggcatactcatggtgtggtttagcatgttcctctgtccttcatattttctgaaagactggcagctggctccagagagttgatcagataagtttgatccctttgtaagactataagaagtgatgcatttatcactctttttttaatattagttatcaatactcactacttagattcattaatttattaggggttgcaaagtagaaataacctaattatatcatcttgttttcatttactaactgtgataattttataaatagacagttacttctcagtctactatttggttaccaagttgtacagttcatataggaaaggcaggataaataattgattatatctttttatttttccagttctcaaaataat

SEQ ID NO: 51683 - DNA, 546 bp, Homo sapiens
agcatcctcgattacattcctgcggggcccggggtgagaagaggactgactgactacggcgtccagggggcgccctcgcccgctcctccgtgccgcgcgtctggggcactgcacgcgactccacgcccccaaccccctgtcccgcggatttcccctccccagttccctaaccccggatcaggcaggccagagacccgagcccgcagcggcctcgggtctaggccccacctgggggtgagtgttgcctggggttttgagcgagctcggcgccttggcgcggcagagtctggcacaggagggagggactcgtttgcagtctwtaggagttgtgagggtggggggcaccgggggataggactcctcccctctgtggatgtggaaacaagcccaggtttgggatttctggttcagacctccctaggaggagaaagggaaggatttggggtcgggggcaggagaatcagcggcacttgacctgctggaaatcctgcttcacactcccctttctccgtccctgcgtccccacccacacacacatcttgggca

SEQ ID NO: 51684 - DNA, 596 bp, Homo sapiens
tccccttcccytggctgaaagctcagctgaccccgaggctcttctggtcatgcttaggtatgtacattttatgtcacgaaatccagtatcgacttagagatttaaagcagccacccaaagatattaaatgactcttgcatttttcttcaaagagaaatcttcttcctcctgccctagttaaggccttagttgggggctgccagctgccagggactgggcatggtggcttttgtctattctctcccgaatacccctctccccacttgctggttgctttcagagtctaagtggaggtggtgggtgaggatgcagggaagcggatggggagcaggggaatagggcagtttttacttgactgtatgattgccagctctctgggtgtggcagatggtgaaagctctttctggagggttccctgtgttcttcagaagttcccatctcagccaggcttggtggctcacgcctataatcccagcactttggaaggcggaggcgggcagatcactggagcccaggagtactagaccagcccgagcaacatggctaaacctcatctctaccaaaaatacaaaaagtatctgggggtggtgctgcac

SEQ ID NO: 51685 - DNA, 596 bp, Homo sapiens
tccccttcccctggctgaaagctcagctgaccccgaggctcttctggtcatgcttaggtatgtacattttatgtcacgaaatccagtatcgacttagagatttaaagcagccacccaaagatattaaatgactcttgcatttttcttcaaagagaaatcttcttcctcctgccctagttaaggccttagttgggggctgccagctgccagggactgggcatggtggcttttgtctattctctcccgaatacccctctccccacttgctggttgctttcagagtctaagtggaggtggtgggtgaggatgcagggaagcggatggggagcaggggaatagggcagtttttacttgactgtatgattgccagctctctgggtgtggcagatggtgaaagctctttctggagggttccctgtgttcttcagaagttcccatctcagccaggcktggtggctcacgcctataatcccagcactttggaaggcggaggcgggcagatcactggagcccaggagtactagaccagcccgagcaacatggctaaacctcatctctaccaaaaatacaaaaagtatctgggggtggtgctgcac

SEQ ID NO: 51686 - DNA, 640 bp, Homo sapiens
ggctcatctctgtaatcccagcactttgggaggccgaggcaggtggatcgcctgaggtcaggagtttgagaccagcctggccaacatggaaaatacaaaaaaaaaaaaattagctggacatggtggtgcatgcctgtaatcccagctgcttgggaggctgaggcaggataatcacttgaacctgggaggcggaggttgcagtgagccgagatcgcgccattgcactccagcctgggcgacaagagtgaaactccttctcaaaaaaaaattcaggccaggtgcggtggcttatgcctgtaatcccagtactttgggaggctgaggcaggaagattgcttgaggccaggagttggagaccagcctgggcaacataacaagacctcatctttactaaaaaagtaaataaataaaattagtcaggtgtgttggtacacacctgtagtgccaactactcgggaggttgaggtgggaggattgcttgaacccaggaggtcayggctgtagtgagccacgatggcactgctgtactccagcctgggtgacagagtgagaccctgtctcaaaaaacaacaaaaaaattttcagtggccagttactagatagcattgttttattttttgaggacactctctctctctct

SEQ ID NO: 51687 - DNA, 471 bp, Homo sapiens
  misc_feature (1)...(471): n = A,T,C or G
gaacagccggagcakgcacttgtctcaatggtcgggggaggcccaggtctctctgcacactggaatcttcaggaactttaaaaagtacccaccccagaacaattaaatcagaatatctgggcctggagcttttttcagtgctccctgggctgagaaccatgggtctggtagagggaacccagagatcaaggtggaaattccacttctgctacaaaccagctctgtgctcttcaacacggtccttcaacatctgagccccagttttcttatctgctctgtgggggacagcaatgcccgtgccatgggtggggttggggataatatacctattgtttcactcttcctggggcgctactgcacccccaggtagatggtgagtgatggagggcagggagcctgactatagcctggacgcagtgcttccctcagtgctgtgtgcagagacgcctggatgaagattnntgatgacgg

SEQ ID NO: 51688 - DNA, 471 bp, Homo sapiens
  misc_feature (1)...(471): n = A,T,C or G
gaacagccggagcatgcacttgtctcaatggtsgggggaggcccaggtctctctgcacactggaatcttcaggaactttaaaaagtacccaccccagaacaattaaatcagaatatctgggcctggagcttttttcagtgctccctgggctgagaaccatgggtctggtagagggaacccagagatcaaggtggaaattccacttctgctacaaaccagctctgtgctcttcaacacggtccttcaacatctgagccccagttttcttatctgctctgtgggggacagcaatgcccgtgccatgggtggggttggggataatatacctattgtttcactcttcctggggcgctactgcacccccaggtagatggtgagtgatggagggcagggagcctgactatagcctggacgcagtgcttccctcagtgctgtgtgcagagacgcctggatgaagattnntgatgacgg

SEQ ID NO: 51689 - DNA, 653 bp, Homo sapiens
atgatgacggccgggcgcggtggctcacgcctgtaatcccagcactttgggaggccgaggcgggtggatcatgaggtcaggagatcgagaccatcctggctaacaaggtgaaaccccgtctctactaaaaatacaaaaaattagccgggcgcggtggggggcgctgtagtcccagctactcgggaggctgaggcaggagaatggcgtgaacccgggaagcggacttgcagtgagccgagattgcgccactgcagtccgcagtccggcctgggcgacagagcgagactccgtctcaaaaaaaawataaaaataaaaataaatgatgacatttcatcctgctcaaggaaaccttctggtaactttattactagagattgaagtcctaatttattggccaagcatctaagacttcaatatctagatccaaatttttctcacagtcatattccccgacagtacccatcatcacaccccatattcaaagacaaacaaaaaagtctcctgcttgctgctctgcttcaagctccccaacctcacaacctttgtttttgctgctctccctgaatctaatagtctttacaaaattatcatggccaaatactaacctttcctcaacaaacaatttcagcatccctgcttcatttccttatttc

SEQ ID NO: 51690 - DNA, 653 bp, Homo sapiens
atgatgacggccgggcgcggtggctcacgcctgtaatcccagcactttgggaggccgaggcgggtggatcatgaggtcaggagatcgagaccatcctggctaacaaggtgaaaccccgtctctactaaaaatacaaaaaattagccgggcgcggtggggggcgctgtagtcccagctactcgggaggctgaggcaggagaatggcgtgaacccgggaagcggacttgcagtgagccgagattgcgccactgcagtccgcagtccggcctgggcgacagagcgagactccgtctcaaaaaaaaaawaaaaataaaaataaatgatgacatttcatcctgctcaaggaaaccttctggtaactttattactagagattgaagtcctaatttattggccaagcatctaagacttcaatatctagatccaaatttttctcacagtcatattccccgacagtacccatcatcacaccccatattcaaagacaaacaaaaaagtctcctgcttgctgctctgcttcaagctccccaacctcacaacctttgtttttgctgctctccctgaatctaatagtctttacaaaattatcatggccaaatactaacctttcctcaacaaacaatttcagcatccctgcttcatttccttatttc

SEQ ID NO: 51691 - DNA, 653 bp, Homo sapiens
atgatgacggccgggcgcggtggctcacgcctgtaatcccagcactttgggaggccgaggcgggtggatcatgaggtcaggagatcgagaccatcctggctaacaaggtgaaaccccgtctctactaaaaatacaaaaaattagccgggcgcggtggggggcgctgtagtcccagctactcgggaggctgaggcaggagaatggcgtgaacccgggaagcggacttgcagtgagccgagattgcgccactgcagtccgcagtccggcctgggcgacagagcgagactccgtctcaaaaaaaaaatawaaataaaaataaatgatgacatttcatcctgctcaaggaaaccttctggtaactttattactagagattgaagtcctaatttattggccaagcatctaagacttcaatatctagatccaaatttttctcacagtcatattccccgacagtacccatcatcacaccccatattcaaagacaaacaaaaaagtctcctgcttgctgctctgcttcaagctccccaacctcacaacctttgtttttgctgctctccctgaatctaatagtctttacaaaattatcatggccaaatactaacctttcctcaacaaacaatttcagcatccctgcttcatttccttatttc

SEQ ID NO: 51692 - DNA, 653 bp, Homo sapiens
atgatgacggccgggcgcggtggctcacgcctgtaatcccagcactttgggaggccgaggcgggtggatcatgaggtcaggagatcgagaccatcctggctaacaaggtgaaaccccgtctctactaaaaatacaaaaaattagccgggcgcggtggggggcgctgtagtcccagctactcgggaggctgaggcaggagaatggcgtgaacccgggaagcggacttgcagtgagccgagattgcgccactgcagtccgcagtccggcctgggcgacagagcgagactccgtctcaaaaaaaaaataaaaataaaaataaatgatgacatttcatcctgctcaaggaaaccttctggtaactttattactagagattgaagtcctaatttattggccaagcatctargacttcaatatctagatccaaatttttctcacagtcatattccccgacagtacccatcatcacaccccatattcaaagacaaacaaaaaagtctcctgcttgctgctctgcttcaagctccccaacctcacaacctttgtttttgctgctctccctgaatctaatagtctttacaaaattatcatggccaaatactaacctttcctcaacaaacaatttcagcatccctgcttcatttccttatttc

SEQ ID NO: 51693 - DNA, 613 bp, Homo sapiens
tttgattttttcttaaatgaagaaaaactgaggatcagagacaaatgattggctcaaaggaacagaaacagaagtgagagaaactggttattatgctaagtccctgaaatttggaactgtccagaaaagatttgaatccaggcattatccatagaattaggtaaccttgaacaagttgtgtgtgtgtgcatgtgtgtgtgtgtgtgtgtgtgtgtgtgtgcatgtacatttagcaaattcctttttttccccccaaggcttatagttttgtgttttttaatttttctactttatcttaggttcagggggtaatgtgcaggcttattacatgggtaaattgcatgatgctgacacttcgtgtatatgaataatctcaycaccacacctgcctcctaccccctactttgtttattgttcccatgtttatgtccacgtgtatttaacctttagttcccattcataagtgagagcatgcagtatttcattttctgatcctgcgttagttcgttagttcatttaggataatggcctccagctgcatccatgttgctgtaaaggacatgatttcattattttttatggctatgtagtattccacagtatatatatatat

SEQ ID NO: 51694 - DNA, 613 bp, Homo sapiens
tttgattttttcttaaatgaagaaaaactgaggatcagagacaaatgattggctcaaaggaacagaaacagaagtgagagaaactggttattatgctaagtccctgaaatttggaactgtccagaaaagatttgaatccaggcattatccatagaattaggtaaccttgaacaagttgtgtgtgtgtgcatgtgtgtgtgtgtgtgtgtgtgtgtgtgtgcatgtacatttagcaaattcctttttttccccccaaggcttatagttttgtgttttttaatttttctactttatcttaggttcagggggtaatgtgcaggcttattacatgggtaaattgcatgatgctgacacttcgtgtatatgaataatctcaccaccacacctgcctcctaccccctactttgtttattgttcccatgtttatgtccacgtgtatttaacctttagttcccattcataagtgagagcatgcagtatttcattttctgatcctgcgttagttcsttagttcatttaggataatggcctccagctgcatccatgttgctgtaaaggacatgatttcattattttttatggctatgtagtattccacagtatatatatatat

SEQ ID NO: 51695 - DNA, 613 bp, Homo sapiens
tttgattttttcttaaatgaagaaaaactgaggatcagagacaaatgattggctcaaaggaacagaaacagaagtgagagaaactggttattatgctaagtccctgaaatttggaactgtccagaaaagatttgaatccaggcattatccatagaattaggtaaccttgaacaagttgtgtgtgtgtgcatgtgtgtgtgtgtgtgtgtgtgtgtgtgtgcatgtacatttagcaaattcctttttttccccccaaggcttatagttttgtgttttttaatttttctactttatcttaggttcagggggtaatgtgcaggcttattacatgggtaaattgcatgatgctgacacttcgtgtatatgaataatctcaccaccacacctgcctcctaccccctactttgtttattgttcccatgtttatgtccacgtgtatttaacctttagttcccattcataagtgagagcatgcagtatttcattttctgatcctgcgttagttcgttagttcatttaggataatggcctccagctgcatccatgttgctgtaaaggacatgatttcaytattttttatggctatgtagtattccacagtatatatatatat

SEQ ID NO: 51696 - DNA, 603 bp, Homo sapiens
ttccaaagaaggaatttggagttgattaaagctattttccctttatttcatgtttttccactcccaataaagaatttctaacaatgccaaattgtttctttttcttttttttttttttcatttttcatcttctaaaaaaactctggtgctttcacttcttacacaggtatcaagatttatcatctgatcattttcacaaaagcctttacttttgagctttcctctaacattgtaattgtgaaaataaaacaacacatatgaaatcctaattggcattatcctttttttgatgtaacaatgtgcctctttcagaaacgcaaatgtcaacacttgtcacctcacttttttccagctgatatgtgaataattaatctttcaatgtgtccacaccctgaaggaagtcacaagaaggattccctactcaaataaagaagagttagagtacataagtgatagtgctgagataagtctccaagtccattttcagcacttaaacatgaatggcaatacatatatagtaagtggtttggtttkgttttgttgatggaaattctaaggacaaagtcttgttcactctgtcatctgtgcagaaataatggagat

SEQ ID NO: 51697 - DNA, 516 bp, Homo sapiens
accatgttggccaggctggtcttgaactcctgacctcgtgatccacccacctcggcttcccaatgtgctgggattacaggcgtgagccaccatgtctggccaggattaattcttaacaatctaaaagtagtatgcccctttccttggtctttaagccactctcgcttttgctgcttttactctgctatagcattccctgaagagagtatttatgctaaggcccattttggtcccagagcagtaggcatttccctatgctttcacactgttggggctaaactctctcatggccttcaactttgcctgcatttctgaacacaactgtcccatactcttctgagatagaaatgatgtcccagacctggattcatgaagcataatctttgctagttccctctaaatcttcacttgtgtgtacattctacatcattcagaatagtctacytaattttgcggtagcaggtaattctcaaatcttcatagtttaaatttacaagcatctatttcttccttgta

SEQ ID NO: 51698 - DNA, 550 bp, Homo sapiens
cttccacattttttgatatctttatagcagtaccccactctctrtggtaccaatttactatgttagctggttttcacactgctataaagaactgcccaagactgggtaatttataaagaaaggaggtttaattaactcacagttctaaatggctgtgtaggtctcagaaaacttacaatcatggcagaaggcaaagaggaagcaatcttggatcttctcacatggtggcaggggagagaagagtgagtagcgaagggagaagaccctcttttaaaaccatcaggtctcatgagaactcaccatcacaagaacagcattggggtaaccatccccaagatccagtcacttcccaccaggtctctccctagacacatagggattatgggaactaaaattcaaggtgagatttgggtgggaacacagccaaaccatatcagtaggctagagaaaatttgcaacaaatagagaaagaattattataatatccaaattgatcaaaataaatgacaaattaatagatctaaaataatatatatttgaaattcacaaa

SEQ ID NO: 51699 - DNA, 550 bp, Homo sapiens
cttccacattttttgatatctttatagcagtaccccactctctgtggtaccaatttactatgttagctggttttcacactgctataaagaactgcccaagactgggtaatttataaagaaaggaggtttaattractcacagttctaaatggctgtgtaggtctcagaaaacttacaatcatggcagaaggcaaagaggaagcaatcttggatcttctcacatggtggcaggggagagaagagtgagtagcgaagggagaagaccctcttttaaaaccatcaggtctcatgagaactcaccatcacaagaacagcattggggtaaccatccccaagatccagtcacttcccaccaggtctctccctagacacatagggattatgggaactaaaattcaaggtgagatttgggtgggaacacagccaaaccatatcagtaggctagagaaaatttgcaacaaatagagaaagaattattataatatccaaattgatcaaaataaatgacaaattaatagatctaaaataatatatatttgaaattcacaaa

SEQ ID NO: 51700 - DNA, 558 bp, Homo sapiens
cgccatgttggccaggctggtctcgagctcctgacctcaagtaatctgcccactttggccacccaaagtgctggggttacaggtgtgagccaccacacctggccttgttaggttttcttatatgtaatttaatatctactcttaaaaattgtttagattgcatttaatcgagaaatccataaaacaccaaagcaggatcacctgttatcaataaaaactaaataattcccacagatcagtatgttctggacaaactctttagagagaacgattgccaagcacccttttgaaaatctccaagaatgtccttggtggctctgagtaattctgatctaatagttctgagctccagtccccatccctcacttccaaaatatctacatgaaacaatacccaaaaccttcataacaagcaamatgagaatcctgtgacttcttcaggctaacctaaaaggctctcaggaatcctgatgctaactaggatcttgggtgtcacagaatttgcaaccaaatgtgtttctagtctcttcttgatacagatgggaaaacgttatggctc

SEQ ID NO: 51701 - DNA, 560 bp, Homo sapiens
tgtcakgtttattcaagtcctagaaccttggatccagaatttttcctcttccaggaagcctcttctactcaaatgttaaacatgtctctgcttaaatgttgcttccttagggaacctttctgacagcttgatataaagaagtcatccagttactgtctgttgaatctccctattctaattctctgtgtagtgcttcccactctctgatacttttcttgtttatgaattttgtttgtttgattattggccatctcccttcactagaataggggaaggaatactttgttcatgtctctctctagcatgtttccaagtggctagcacatagtaggagctccataaatgtttattgaataaataaataatcccaggaggctaaaaaagaataaaaaagcaaacgttttgttttgagatagatttgtaaatatactgaatggccaagttgggatgtgtctcaaatgagaactacaagatggcatatttgtcattctgcatcaaagaaaaaccaatgtcaattggcatcaatatcttgactcttttttaaattaaattttctcaag

SEQ ID NO: 51702 - DNA, 560 bp, Homo sapiens
tgtcatgtttattcaagtcctagaaccttggatccagaatttttcctcttccaggaagcctcttctactcaaatgttaaacatgtctctgcttaaatgttgcttccttagggaacctttctgacagcttgatataaagaagtcatccagttactgtctgttgaatctccctattctaattctctgtgtagtgcttcccactctctgatacttttcttgtttatgaattttgtttgtttgattattggccatctcccttcactagaataggggaaggaatactttgttcatgtctctctytagcatgtttccaagtggctagcacatagtaggagctccataaatgtttattgaataaataaataatcccaggaggctaaaaaagaataaaaaagcaaacgttttgttttgagatagatttgtaaatatactgaatggccaagttgggatgtgtctcaaatgagaactacaagatggcatatttgtcattctgcatcaaagaaaaaccaatgtcaattggcatcaatatcttgactcttttttaaattaaattttctcaag

SEQ ID NO: 51703 - DNA, 603 bp, Homo sapiens
ggagcagcctctgtwttttggggatgaggacagcaagggtcaggagatgctcgtggtcttgcagagtttgcagtaggggctggacaaggtcttctgacactcaggcaaaagcgctttccccaatattacactgttccaccaccttggccccggccccctccctgctcctgtggggctctctctttcccaaactccagcttcagtttgagtctctcctgttgtctatctccttcacttcttccatgttctctttcttcttaagaaatgtctcagatatatttctgaggctgtagcttggaattccacagtccactcagactcctgtgaaggtgtacacccaacctttcccggaaatgcctgcctgagtgatgcccgctcctcacagttttccacaattgggcccttgctggcattcatttttgaggagttctgggctccagataattccagttcagctcttggaagagaaagtcaaaagagaaatggaaaaagaaaaacaatctccctactcccaccacacattttcataacccgttccaaacttcccagctatgatgacataagttttactgttttacaagcaacttgcccttaaaatggatg

SEQ ID NO: 51704 - DNA, 548 bp, Homo sapiens
ggtgaaaccccgtctctactaaaaatacaaaaattagccaggcacggtggcgggcgactgtaatgccagttactcaggagrccgagggaagagcatttattgaacccaacagacagaggttgcagtgagccgacaccgcaccactacgctctagcctgggcaacagagcaagactctgtttcaaaaaaaaaaaccccaaacaagaaaaattataatattatctgatctcattgtgaaaagtaattacttgttgatttttaaagaattatctgtagttataaacaaataaattggaaagtggtaaatatctgtaggaatatctcgtgcaatatcgaagaacagagtaagactgttaagatcaagatctattcttttggcttggttactgaatctgtatttgtgtgcatgagaatgtggtttaataatatccatgaaattgatatcctgagaattcaagacagtgctatttaacaatagttctcttttagtttaatgaaaatggttggctacagtaaataacaacttaacataaacttgcctacacctaa

SEQ ID NO: 51705 - DNA, 564 bp, Homo sapiens
gtctcctaggtattacagaaagcaacagcacctagcagaattcctagcytgtaattggtactcaggacaggtcagttcccttctctgccattaatatttacaactatgttaaaataaactatagcacaatacctggtttatctttctaagagcagcttctgcctctggtcgggtaatataagaaacgtaccactcttcatttaatgaattctgaaaatgtaaatttttagaaactgaataaattttacagttacagatgtaagtgaaaagaaaagcctctgagtaatcatttccataaatcaacacctcaattccaggaggtctgaaacatttgttttcttaatttgcattcagagtcatttagctggggctaaatagaagatattttgtgcgaactgctttttatcatgacactggttgcaaaaatgcctgtgaataagagttccttacagtatggaacctcttcaggaaagatacagatacaataatttcttcagtttagcataataacctgcttgattaaaaaaatgggttattgagcagttaagtgacgaatcaaggtca

SEQ ID NO: 51706 - DNA, 1031 bp, Homo sapiens
gctaggtaacagggatgagaggcaatgctcattagatactcttttagacccctttaagccatgtaaatgcactgcctattttaagaattaaaaaaaaaaactttttatcaggtataaggaaatgcaactgtaaggatctcagttcaacaacagacctttttcaaaacaagaaccctatgaaagccagcaaatgaattgctctcctattactctttagttttctgaagcaaataaccattaatccaatgagtaagttcatagataacatctgatggcaactgttcacatctcctgaagtggagtgatgataccagccagcscacgtgcctcacttcaaagtcagccctgcttaactataaagattttcctaataagatttttctcttcagaggtttaagagctctaaagacagagaatgttataacatgaaagggaaagagaacttctagacctcacactgcctgtcctaccgtctttgtttttgtttttgttttttaaatacataggctatgcctaggtttactgtttttggttaattattcaaccagttctagggtgtgtaaattctcttaaacaatgagatagtgggtttgttaaaacaaaaacaacaaaaccctattcataatagctttttcctctagtgctaattttaaaaaaaaatagagaggaaatacaacttataaaaaatgaacatgaaactacatgaatagttacagtattcaaataaacagtctacttcaaatgcaatcaccaaataaagccaaaaccagtaggaaagaataatcaagaaattttatacagagatgcctatacaaaactcaattcagagaatgaacactgacgatcagagccatgcttccccatgccagataactcagaattaacaataaagaagtatgccaggcagggcaaggtggctcacgcctgtaatcccagcaatttgggaggccgaggcaggcatatcatgaggtcaggagttcgagaccagtctgaccaacatggtgaaaccttgtctctactaaaaatacaaa

SEQ ID NO: 51707 - DNA, 522 bp, Homo sapiens
tacttgatgtattaacatagtcatattcctcaaatatacatccagtccaaccaaagtatgtccagttactgcattcttcttttgggatcctacaactactatgtccaaygttttcaggcaagaacaaagataaaatgtatccttaagaaacattatccttacaaggtcctaaattgaaccaattttcttctatctaaaactacagttttaagtattaaaagaatacaagttataatagctactatgcatggactaccatgccattctggacattgaacaaagttgatcctaacctctcatctactcaccttagctggttggttacttattggttagaactatccaacagagatacaatgcaagccagaaataaaccacccatataatttttataacatatatacaagttatagatacatatataaccaatgtaaatatgatttttctcgtagccataagtgaaaagaaacaggtaaaaataaagtttaatagattttatttaacccaatatatctaaaataa

SEQ ID NO: 51708 - DNA, 633 bp, Homo sapiens
aaatagaacacgcacagaacactttgctcataatgcaataaaggtatttgcatataatgcaatagatgtaattattttctggctaactttgagtcaggtgtggtgaccagggtcacagatcaatccaagtaaaatattaaagtgatgattggtgtgctttcagaaaggaaaatgctgaccactaaagagccaccattgggtcactaagagccaaaatggcaaaacagtctaacttctcaacataatttttagcctaatagaataaagaaaatatagtagatttgatatgtcaggacttcagccaggcctcctatgatagatrccgttttggacaaggtggagaaagatgaattggatgtacaattagataaatttgtcactactaaatttcagtgtaatagcatgctcattaacggatctagtcatttgagaaacactgtgccaggcactgtaccagatgttgaagacacaaacatgaaagtaacatgattcctgctggcatctgtataagcttaagctggcctggatgatggtgggtcatgtcatgaagtataatgctggacaggcagcagggagatcctgtgcctgagagcctcaagcatcaggtgggtggttgaagtctacatcttaaag

SEQ ID NO: 51709 - DNA, 633 bp, Homo sapiens
aaatagaacacgcacagaacactttgctcataatgcaataaaggtatttgcatataatgcaatagatgtaattattttctggctaactttgagtcaggtgtggtgaccagggtcacagatcaatccaagtaaaatattaaagtgatgattggtgtgctttcagaaaggaaaatgctgaccactaaagagccaccattgggtcactaagagccaaaatggcaaaacagtctaacttctcaacataatttttagcctaatagaataaagaaaatatagtagatttgatatgtcaggacttcagccaggcctcctatgatagataccgttttggacaaggtggagaaagatgaattggatgtacaattagataaatttgtcactactaaatttcagtgtaatagcatgctcattaacggatctagtcatttgagaaacactgtgccaggcactgtaccagatgttgaagacacaaacatgaaagtaacatgattcctgctggcatctgtataagcttaagctggcctggatgatggtgggtcatgtcatgaagtataatgctggacaggcagcagggrgatcctgtgcctgagagcctcaagcatcaggtgggtggttgaagtctacatcttaaag

SEQ ID NO: 51710 - DNA, 633 bp, Homo sapiens
aaatagaacacgcacagaacactttgctcataatgcaataaaggtatttgcatataatgcaatagatgtaattattttctggctaactttgagtcaggtgtggtgaccagggtcacagatcaatccaagtaaaatattaaagtgatgattggtgtgctttcagaaaggaaaatgctgaccactaaagagccaccattgggtcactaagagccaaaatggcaaaacagtctaacttctcaacataatttttagcctaatagaataaagaaaatatagtagatttgatatgtcaggacttcagccaggcctcctatgatagataccgttttggacaaggtggagaaagatgaattggatgtacaattagataaatttgtcactactaaatttcagtgtaatagcatgctcattaacggatctagtcatttgagaaacactgtgccaggcactgtaccagatgttgaagacacaaacatgaaagtaacatgattcctgctggcatctgtataagcttaagctggcctggatgatggtgggtcatgtcatgaagtataatgctggacaggcagcagggagatcctgtgcctgagagcytcaagcatcaggtgggtggttgaagtctacatcttaaag

SEQ ID NO: 51711 - DNA, 642 bp, Homo sapiens
acagaattaaatgtagacaaatcgttagttatatatttgaaaactctattcctactatgaaattagtaacttgttaagaagaccagagtagctgttaagtaaaggagccggctagcaatcatttaataagatgattaaactctacttctttgtcacacttgcttctgggcaaatggagtagacgggtatgaaataacaagactagaatcttttagttgaatattccagatatcaatgaaaaaaattaatttaaaaccaacttacaatgtagatcaagtggatttgcataccaatccaaggaaaaaaccctagttgtaaatggcatrcttaaccataggtaaagaaatgcacaattagaaaagtaattcagggtgaaaaaaatccgatttctgtatcaatgcgcagatatggataaatgacaaagtttccttcaaaacagagccttattttcgctcattgttctgtgcagttttcagagaaggagaggcagattccctgatattcttctggaaccactcacctagcagagaaaattgtttgccggagtaatgttcatcagctgctactcttcgaagagccagtgttgatgctgcagctgccacagaaaaccaggcagatgtggtctcagccctcagggcttca

SEQ ID NO: 51712 - DNA, 642 bp, Homo sapiens
acagaattaaatgtagacaaatcgttagttatatatttgaaaactctattcctactatgaaattagtaacttgttaagaagaccagagtagctgttaagtaaaggagccggctagcaatcatttaataagatgattaaactctacttctttgtcacacttgcttctgggcaaatggagtagacgggtatgaaataacaagactagaatcttttagttgaatattccagatatcaatgaaaaaaattaatttaaaaccaacttacaatgtagatcaagtggatttgcataccaatccaaggaaaaaaccctagttgtaaatggcatgcttaaccayaggtaaagaaatgcacaattagaaaagtaattcagggtgaaaaaaatccgatttctgtatcaatgcgcagatatggataaatgacaaagtttccttcaaaacagagccttattttcgctcattgttctgtgcagttttcagagaaggagaggcagattccctgatattcttctggaaccactcacctagcagagaaaattgtttgccggagtaatgttcatcagctgctactcttcgaagagccagtgttgatgctgcagctgccacagaaaaccaggcagatgtggtctcagccctcagggcttca

SEQ ID NO: 51713 - DNA, 642 bp, Homo sapiens
acagaattaaatgtagacaaatcgttagttatatatttgaaaactctattcctactatgaaattagtaacttgttaagaagaccagagtagctgttaagtaaaggagccggctagcaatcatttaataagatgattaaactctacttctttgtcacacttgcttctgggcaaatggagtagacgggtatgaaataacaagactagaatcttttagttgaatattccagatatcaatgaaaaaaattaatttaaaaccaacttacaatgtagatcaagtggatttgcataccaatccaaggaaaaaaccctagttgtaaatggcatgcttaaccataggtaaagaaatgcacaattagaaaagtaattcagggtgaaaaaaatccgatttctgtatcaatgcrcagatatggataaatgacaaagtttccttcaaaacagagccttattttcgctcattgttctgtgcagttttcagagaaggagaggcagattccctgatattcttctggaaccactcacctagcagagaaaattgtttgccggagtaatgttcatcagctgctactcttcgaagagccagtgttgatgctgcagctgccacagaaaaccaggcagatgtggtctcagccctcagggcttca

SEQ ID NO: 51714 - DNA, 628 bp, Homo sapiens
caagatcaagagcctttacaaacatgcttacgcttctaacatgggaatttcactttttggaatctagctgaaggaaatgatttttaaaaggcggaataggtttataaaaatacaagttcatagaaatactaatcctacaagggaaaaaaatggttaagaaaaatgatgtgagaaacaaggacatatccaaacacagaactccacaaagccatcaagtgacatccatggaactgaataacatgagacaatgtctgttgtttactgtattattgtaataaaaaacttttcaaagtagaccctcaatttatagattcagaatgacctgaattatataaaatacatatatgcataaaaataaactggaataaaatgccccataaataataaattcattgatggtaattgtgttcaggtgattttcctctttaaacttttctggtattcccggacttaagaattctaacttgcaaattactttcatatgcaggggggaaaaataccctaacttaagggraaaaccttaaggattcgaacgtacacattacatttatgaacagggaaaaaaaatcttgtatttaaacataatttgaaatctacatagcaacagaataaaataaacagaatgtaa

SEQ ID NO: 51715 - DNA, 560 bp, Homo sapiens
aattcttatcagtgtatactttttttttctttttttttttttttttttgagacagagtctcgctctatcacccaggctggagtgcaatggtgcaatcttggctcactgcactctccacttcctgggttcaagcaattctcctgcctcagcctctcgagtagctgagattacaggcacctgccaccatgcccagctaatttttgtattttttgtaaaratagggtttcaccatattggccaggctggtcttgaactcctgacctcaagtgatccaccagcctcagccttccaaagtgctgggattacaggtgtgagccactgcgcctggccagtatatactgctttcttttcatgttagtctccaggtacagcatcaagaagtcagagcaggcaaaaatggaatatatgttcttttagaatatattcttttaaatatatttaataaatatattcctcactgtgaagaaatcttatgttccctggtgtttcctctctttatctcttagcctcaaacgagctacaggaagctggagcagagacaaattcaacattctttaaaa

SEQ ID NO: 51716 - DNA, 550 bp, Homo sapiens
gatgacattttctaagacctaggttcctttcatatttcctttctgccatcctcagtgtctgggttggctctcctcatgggatcaggatggctgcagtcactccaggcatcacatcttcatttgctgaaattcagagacagcaaaggagagccatatggtccctatgtctcattttccaatataaaaytttttttccaaagcccacccgctctctcttctacaaaaagcctttcctttcatcctcattggtcagaatggcaacaggacctatcctaagcaaattgcgggcaacaggaatgattgattttatggttgatattaatttctcttaaagctggggatagggtagccttttctgaatacaaaaccatgagacagaaggtgccatccaagcaaaatcagggtcctgccagcaagataagatattgactgtataggttacctgcagtgtctccttctgaggccttcaccccatatcagaccctttaatctctgattccagcatccaattatctatacaatcagattcaggaagagcagaattaagaca

SEQ ID NO: 51717 - DNA, 643 bp, Homo sapiens
taaaaagtaagttcatactttttttgctatctcccgaaataatataattttccctcctgtctgttaaaaaaaaaaacccacactttctcttctttctttcasttacctattctaagcagcgtgtgtgtgtgtgtgtgtgtgtgtgtgtgcgtgtgtgtgtttgtgttggggtttaagaagccttgacaccacatttcctggaaatactaaattagtcacagcatttattagatgagagtgtctacaacaacaaaaaactttctttttctgaagacttaactccatgcaagtgtcaatctctgagcgtctatttgtttttcaaataagaaactgtgccagggaaagatgatttgaaatacaaaatgcttgcaagtgtttttagtttggggtaaggtaaagtcaataatgattctttgggacatttttcgggacccaactaaatttcatttgccaaacttagcaataaaccatgtttataaagaatgaggttaagttcttgttctggggcaggacatggctgtgaccctgaggtgcttgtgctctggagctccttgactcttctttcatgatgggagcaggcctgagtagcccctgctatgctgtacattgagcttgataaaactccggccttttgaaaatactg

SEQ ID NO: 51718 - DNA, 522 bp, Homo sapiens
acctatactggagtgccgtggtgaaatcatggctcactgcagcctcgaagtcctgggctcaagcattccactcacctcagcttcccaagtagctgggagcacaggcacatgctaccatgccttgctcattttttttttaatcttctcttagagacagagtctcactatgttgcccagtctggtcccaacctcctgggctcaagtgatcctcccactgcagccatccaaagttctggggtcacaggtgtgagccactcctcccagmttttagtgtttctttttttttaattttattattattatactttaagtttgagggtacatgtgcacaatgtgcaggtttgttacatatgtatacatgtgccatgttggtgtttcttgaatcatgtggaatatgatggagattagttttgtgatttgggactgattttgttgaatacttacaaatctaacattttaatttttccattttgcagtaatttgaacacagatatatgtgtgtgtgtgtgtgtgtgtgtgtgt

SEQ ID NO: 51719 - DNA, 388 bp, Homo sapiens
ctatttcaagtcacatagcctcacttgcaccttacactgccagttgaggcagtcacaaaagttcaaccagtttcagtgagaaaagatgtacattccatgtcttgttggcaaggtaataaaaacataggtcataataaacataggtcataaacaaggtcgtaataaaacatggcaaagtcataataaaaacaatacatgtgagatagaagatacttttacaatcatcttaggaaaatacaagctgccatattgccaataactgtaatayagttccccatgttcaaaaatgttaagatatgaaaaaaattatctaataattaatgaatgtagtaattacctatacttaaggaagtatcaaatgagaagcaaggcaagcccatcttgcaga

SEQ ID NO: 51720 - DNA, 311 bp, Homo sapiens
tattttacaaatatcttgatagctagttgaaagctattatgagataacactaagcaacataaatgtaatttccttatatgttcattaaattgctcaaaatagtaacattcttaaagaaatgaagtctttttatccttgtggttgtggatttttatatataaactgtatgtgtatatatgtatatgtatgtgcatatgtgtacatacatatacagtacatatatagatacacakgtttatatatgtaaacttctatttaatggagaaaaattattcatggcaaaaaagtaaagtttcatgacgagggtatta

SEQ ID NO: 51721 - DNA, 1966 bp, Homo sapiens
ataagatactttttaagctaatgcatgtaaaaaatcctaatatgtaatgatcactaagatactaactattgaacctaaatctgaatcatgrgatgatcaattctagaaattttaatctagaaatattgctaggatatgatgagatttattaaataataaatagacatatggcctctaaaattaggaaggtaattcttaaaagggagaatgcatcacattcatgggtattatcattgtaatatttcagctgaacaatttttggattactaagaaatgtaacattataagagcataaattaaattatctaaatgtatagaaaataatgtaaaatgacctaattataatcatggttccttgagaaattcttggcatatcatctgtacaaagcattttttgaaagttagtttctaatgtgactatcttgtcacatatatttatactaacttttcatttagtgtaaatttgacattattgtggtaattgattttcagcatattatttaggtaaataaactaaatttcagaaagaataaaattatgcattttggagagaaaaattcatacacaaaatgttgattctaaattttatgtgagcatttctgttgaaaagactgtggtttatacagggcactcttgtctcctttctttggggatagggaagctgaaatcaaggttgaatacaaagtcaagaacaaaggtcatagaaggcaatttaatattgtcactagccagaatatgaagccaattgttcaagcaccaaagggatgaaatgagtcaaattattaaatggtagtagaggtagcacagtgatggataagtaaccagcatccacgttgaccctgttaaattttgtgtatttgtgctaaaaagaattgaattgcccactgcatttaaagagtaatagatgaagcacacataaatggtaatgcttttaattataaactcattttatattataaaataatataaccagattataaatatcgagaaaatatacaagagaaatgacattcataatcttatgcctttggttacatctctgtaaacatttggtcatcttttgaacaaacttagactcttctgtccctgctgttccaaatgattactatgtatgttcatgctcatttcacattgaagttgtaacaagttaccacaaattgagtggcttataggaaagcaaagttttatttcatatatatggaggtcaaagtctaaaaaagagtggcagggctgcattccttctggaggccttaggaggcaatccatttccttgcattttctagattctagagaatgccagcattcctcagcttatgtccccttccttcatctttaaagcagtagtgtagcatgctctaatctttctttctgttcctttgcttctgtcgtcacttcatcttctgtctgattctaatcctgtcccactcttaaaaggacccttgtgattatccaggccaacctggataattccggataatctctccatcacaaaatcctcaaattaattacatctgcaaaatttccttgaccatgtaaagtaacatattcccaggttttgaggattgagacatggacattgctgtgggagagggagtcatcattcagtctatcacaccatggtttcttctggaaccaacgagcagaaaagctaatgacaaataatatatcagtaaccctaaatttacaaattatcagaatttgaaaataatttcttttatttgctgcagattgacttctctaaggaactacctcagaactatgtatgtgtgaagtatactggggaaggctctaagaaacacctgtgagagtaaaggaagcagcattagtcagaagtttaactgggatgcaacagagacctcatccaatctcagagacagctctgaagctgaaatgcatgtgggctttgcctttgtgttcttcattggtgccgctgttggggagtgtgaagcaaaatcttgagaaaagc

SEQ ID NO: 51722 - DNA, 546 bp, Homo sapiens
gaagaagattgtggtcctataatcactgtttaattaccacatataaattatctgccaattagattgtttcctcttcatgacttaattgtccaattttgtctcaggatattaagagcaaagaaaagccaacagtctttgtacaatggggrcatacgtgttaatatataattacatgtgtgtattttatacagaatgtttgtttaatagaatattttcacctgtctgcattccctatactctccttctcagtcaacatactattaaaatggctacttttgtcacagactacataaagcttgaaattattagaaaatatttaccatattctatattggacactttatattcatcttgacccacattacctgccagttattcttttcctatttccactcatgagtgcctaattcggaataccacctacttttacgggttttataaagcgctgggcctagatttattaattcttgaaatacagaacccacctcagggcctatgcagtttgctacagtcactaatgcaacagtccctcacaactaatgaggt

SEQ ID NO: 51723 - DNA, 546 bp, Homo sapiens
gaagaagattgtggtcctataatcactgtttaattaccacatataaattatctgccaattagattgtttcctcttcatgacttaattgtccaattttgtctcaggatattaagagcaaagaaaagccaacagtctttgtacaatggggacatacgtgttaatatataattacatgtgtgtattttatacagaatgtttgtttaatagaatattttcacctgtctgcattccctatactctccttctcagtcaacatactattaaaatggctacttttgtcacagactacataaagcttgaaattattagaaaatatttaccatattctatattggacactttatattcatcttgacccacattacctgccagttattcttttcctatttccactcatgagtgcctaattcggaataccacctacttttaygggttttataaagcgctgggcctagatttattaattcttgaaatacagaacccacctcagggcctatgcagtttgctacagtcactaatgcaacagtccctcacaactaatgaggt

SEQ ID NO: 51724 - DNA, 541 bp, Homo sapiens
cagagagctctaaagggcatgagcaacttgggggtctcataaccacagacactctcttttcagtggccagcaggtgctgggtgtagtttgatggagtatgcaaagcaggcaggctgttactggctaaaaatctgattgggctatttttaaaatacttcgatatataaaaatttaagtttgatactagtgaggttttgaactgacaggtctcagcctgcagtggagaaataaacaactcaggagccaatccatagagactatatttggttaatttatataatagctgagaaggggcaagagggaattatttggagtgatgatcactttctaaatcttgttagaggcttagattacacagataagtacatttgtcaaaagtcagtggatatacacctaagatttctacattttgttgtatgtaaatttgatatcaagagaaaaattcaaaataaataattgaactctagttmatgatatgtatgctgaagcattcagggggatgtgtactgcctgtatgtagtttaccctgaaatgccaaaaa

SEQ ID NO: 51725 - DNA, 541 bp, Homo sapiens
cagagagctctaaagggcatgagcaacttgggggtctcataaccacagacactctcttttcagtggccagcaggtgctgggtgtagtttgatggagtatgcaaagcaggcaggctgttactggctaaaaatctgattgggctatttttaaaatacttcgatatataaaaatttaagtttgatactagtgaggttttgaactgacaggtctcagcctgcagtggagaaataaacaactcaggagccaatccatagagactatatttggttaatttatataatagctgagaaggggcaagagggaattatttggagtgatgatcactttctaaatcttgttagaggcttagattacacagataagtacatttgtcaaaagtcagtggatatacacctaagatttctacattttgttgtatgtaaatttgatatcaagagaaaaattcaaaataaataattgaactctagttaatgatatgtatgctgaagcattcagggggatgtgtactgcctgtatgtagtttrccctgaaatgccaaaaa

SEQ ID NO: 51726 - DNA, 1204 bp, Homo sapiens
ccttttccyttttatcctatggggacacagtaagaggatgccatctataaatcagaaagcagagtctcaccagatactgaatttgccagtgccctgatcatggaccctccagccttcagaattgtgagaaatttctgttgtttataagctacttatataagctatatggcattttgtggtagcagcccaaatgaactaagacacttatcaacaaaccctcttcagtaaagtcctactttaaaaagtgtgcaccctatgccatggtgtatcagtcaattattaccataatcattttgtgtgacaaacaacctcaagatcttaatggattacaacagtaactacttattttccttgcttctgtgagtcaggtatggctttactaggataggatgggcttggctacaggtcagattagcattgttccaaccattttttcttttgcaggcaacagacacctgagccatgtactcctcctgatggatcgcaggagcataagatggtaagccgaaacacagaatacatcacaaagcccatccttgaaactaggacaatgtccatcagctacaagccctatgattaagtccatcaaaggtgaagtagatggaactccatatagacaaaaataaaggtgacaggtaagaataggaaacggttgaagtggatgagataaaattctaaccttatgaataatttcaggaatataacaagtgtctttccaagttatggttggctatgtatgatagatttatttatttatcccaattttgccctccctccaaggtatgagattatacatttaccccctttatagtatggcttcttagttactggatcttgggttagtctagccttcaatttgatactgtaaacaagatgttttatgctgattcttttcttatctatgctgatgcaaatttctcctaatatgtatcctggtgtgatacacacacacattatttgacacccatatatctatgtatatatgtataggtctgcatatatatttgtgcaagcataaatttgtaagggaggggaattaaatgcataaggcttaaattgccatcttgaaccagaagacctttgggtgtaatttttccatgtttgtttaagtgtgtttctcccaaagagactgtatatcatcttggtattctaagcacataatattgttccaggactagtcatataaataaataaataaataaat

SEQ ID NO: 51727 - DNA, 1204 bp, Homo sapiens
ccttttcccttttatcctatggggacacagtaagaggatgccatctataaatcagaaagcagagtctcaccagatactgaatttgccagtgccctgatcatggaccctccagccttcagaattgtgagaaatttctgttgtttataagctacttatatargctatatggcattttgtggtagcagcccaaatgaactaagacacttatcaacaaaccctcttcagtaaagtcctactttaaaaagtgtgcaccctatgccatggtgtatcagtcaattattaccataatcattttgtgtgacaaacaacctcaagatcttaatggattacaacagtaactacttattttccttgcttctgtgagtcaggtatggctttactaggataggatgggcttggctacaggtcagattagcattgttccaaccattttttcttttgcaggcaacagacacctgagccatgtactcctcctgatggatcgcaggagcataagatggtaagccgaaacacagaatacatcacaaagcccatccttgaaactaggacaatgtccatcagctacaagccctatgattaagtccatcaaaggtgaagtagatggaactccatatagacaaaaataaaggtgacaggtaagaataggaaacggttgaagtggatgagataaaattctaaccttatgaataatttcaggaatataacaagtgtctttccaagttatggttggctatgtatgatagatttatttatttatcccaattttgccctccctccaaggtatgagattatacatttaccccctttatagtatggcttcttagttactggatcttgggttagtctagccttcaatttgatactgtaaacaagatgttttatgctgattcttttcttatctatgctgatgcaaatttctcctaatatgtatcctggtgtgatacacacacacattatttgacacccatatatctatgtatatatgtataggtctgcatatatatttgtgcaagcataaatttgtaagggaggggaattaaatgcataaggcttaaattgccatcttgaaccagaagacctttgggtgtaatttttccatgtttgtttaagtgtgtttctcccaaagagactgtatatcatcttggtattctaagcacataatattgttccaggactagtcatataaataaataaataaataaat

SEQ ID NO: 51728 - DNA, 550 bp, Homo sapiens
ctcccctctccacattaccttcttgctgctcccagatttcttctggtcattaagcactttgagccatttttctgtgcagccgatctgatatttttgctatcagatgaaacatgacaaagtaagccgagccaccaggattcctggagggaaccttggatgctgcgtcttgggatccagagccctgatgggactgaaccagaaggagccagggaaggacaaacactggggctcaggccctatgacccaacggccattggtggcctgtcctcatggccccaagacaccctgtcctcaggccacagacaccatgggctttggtcaggtcccagcctcccagtagtgccctggcactggtgggtgctgacctccaaaccacaatagcagttctgggttatgggtttggtaaaaccacctcagggagaattctggggttgggtttggcaggaaccacggggyctcccaggaatgatgtgtcactcctacttgccacaaaatgtgcacagaggctatcccactgaccagcccatcctgctggacaggatggaggaaa

SEQ ID NO: 51729 - DNA, 546 bp, Homo sapiens
tgggatacctacactacgtgtgaagtaacaattttatttgaagatagayataaaatgtatataatcaattctaattaatttaaagatagacttaaaatgcatataatcaatcctaagaaaaccaccgcaaatttttaaaagaagtgatgagatcacatctcatgaggtgatgagatacaccaagagctgagacaaaaatgcaatcatagaagatgctcaattaaaataagagaaggcaggccaggcacagtggctcctgccagtaattccagcactttgggatgccaaggtggttggaccacctgaggctagcccgaccaacatgatgaaacaccgtctctattaaaaatacaaaagttagcctggtgttttggcacacatctgtaatcccagctactctgggctgaggtgggaggatcactttaacctgagatgtggaggttgcagtgtgccaagactaccactgcactccagcctgggtgacagagtgaggctctatctcaaaataaaataaaataaaataaaattaaaataaaataaaataaa

SEQ ID NO: 51730 - DNA, 546 bp, Homo sapiens
tgggatacctacactacgtgtgaagtaacaattttatttgaagatagacataaaatgtatataatcaattctaattaatttaaagatagacttaaaatgcatataatcaatcctaagaaaamcaccgcaaatttttaaaagaagtgatgagatcacatctcatgaggtgatgagatacaccaagagctgagacaaaaatgcaatcatagaagatgctcaattaaaataagagaaggcaggccaggcacagtggctcctgccagtaattccagcactttgggatgccaaggtggttggaccacctgaggctagcccgaccaacatgatgaaacaccgtctctattaaaaatacaaaagttagcctggtgttttggcacacatctgtaatcccagctactctgggctgaggtgggaggatcactttaacctgagatgtggaggttgcagtgtgccaagactaccactgcactccagcctgggtgacagagtgaggctctatctcaaaataaaataaaataaaataaaattaaaataaaataaaataaa

SEQ ID NO: 51731 - DNA, 546 bp, Homo sapiens
tgggatacctacactacgtgtgaagtaacaattttatttgaagatagacataaaatgtatataatcaattctaattaatttaaagatagacttaaaatgcatataatcaatcctaagaaaaccaccgcaaatttttaaaagaagtgatgagatcacatctcatgaggtgatgagatacaccaagagctgagacaaaaatgcaatcatagaagatgctcaattaaaataagagaaggcaggccaggcacagtggctcctgccagtaattccagcactttgggatgccaaggtggktggaccacctgaggctagcccgaccaacatgatgaaacaccgtctctattaaaaatacaaaagttagcctggtgttttggcacacatctgtaatcccagctactctgggctgaggtgggaggatcactttaacctgagatgtggaggttgcagtgtgccaagactaccactgcactccagcctgggtgacagagtgaggctctatctcaaaataaaataaaataaaataaaattaaaataaaataaaataaa

SEQ ID NO: 51732 - DNA, 546 bp, Homo sapiens
tgggatacctacactacgtgtgaagtaacaattttatttgaagatagacataaaatgtatataatcaattctaattaatttaaagatagacttaaaatgcatataatcaatcctaagaaaaccaccgcaaatttttaaaagaagtgatgagatcacatctcatgaggtgatgagatacaccaagagctgagacaaaaatgcaatcatagaagatgctcaattaaaataagagaaggcaggccaggcacagtggctcctgccagtaattccagcactttgggatgccaaggtggttggaccacctgaggctagcccgaccaacatgatgaaacaccgtctctattaaaaatacaaaagttagcctggtgttktggcacacatctgtaatcccagctactctgggctgaggtgggaggatcactttaacctgagatgtggaggttgcagtgtgccaagactaccactgcactccagcctgggtgacagagtgaggctctatctcaaaataaaataaaataaaataaaattaaaataaaataaaataaa

SEQ ID NO: 51733 - DNA, 557 bp, Homo sapiens
gtgactcttgactggaggctaagggaaaaggcccatttggagaacgccgaatgaggcatggctttctctttctggaaatagtggtctccccgctcccctacctcccttgctttcgggcctgggatgatgtgctctctctctcckgaggcaggcgtgagctggtgtctgcaggtgggagattctcgccctgcttggtgcttagaatgccctggcccccgacgcaggactctgaacccaagttctctggcctgtgtgttcactgtctgggtccctggagctgaggggccagcaggcagcagagctgggccctcctgctgacagtaatcccggggctgcagcagccttggcattagcggtaccaggtgaccctgaggctctcaagccctgcccaggcttccctgtgttcaggtgaactgcccagcatctgctcatcatgctggctgctgcctgcttagggcctggacttgagagccagggtcccagggtgtgaagccttccccaatgtctctgggtgatcttgggcaagacttttgttatggtttgaatgtgtcccccca

SEQ ID NO: 51734 - DNA, 1442 bp, Homo sapiens
tttttgagacgaagtcttgctctgtcgcccaggctggagtggagtgcagtagcgcgatctcagcccagtgcaagttccgcctcccaggttcacgccattctcctgcctcagcctcccaagtagctgggactacaggtgcccaccactacgcccggctaattttttgtatttttagtagagacggggtttcaccatgttagccaggatggtcttgatctcctgacctcgtgatctgcctgcttcggcctcccaaagtgctgggattacaggcgtgagccactgcgcctggcctatattcagaatcttttctatcacattccttaatgctgcagcgttggtatttggcacaggcttttagcaccaaaataagacagaccatagttcaaccagcacgtgcaataccttgtaatgggtatggcaaaaggtagtgcccagacaggacagcatggtgaatatcacctgggaacatgggagaaatgaacattctaagccccacttcctttcttaatggactagggcccagcaacctgtgttttcacaaggctccaggtaattctgatgcatgtaaggtttaaaactccttccatttcacaaggtcctccccaaattaccactttctcatttcagccagttccacacttcagtcagggcctgtgacttttaacaaaccctgtgtctctgcacagatgcagatctcgtatctctcaggatgctggcagtttccaggcagaaagcaaacaagcaaaccaaactcaaagaggctttgagtaaatgcacgttgtggctccaagactatagggcatcgaggtggccctagctccaggcaaggctggacgcagcagccctatggtatctcatgagtcctctttgcttctctttctgatctccctttcctgtgagaggccctgggtggctgccagtacctgccagtgttacatgaatcctttgttcattttctgcaaggaagagtgagtctgtgatcccactggaaaaaaacatcactaggccctttcggatgtgactgacttaggaaccgaatttcctaacctgtcgctgtggttatggggatgggtttcattgatttgcttaagttaatcaaggcacataacttgaatctttgggtttactgaattttacataaacttaaagcctgagaatggtgcagaagggagattttcctgaggaaatgtgagtttcgggcatcaggaaacatgcagaatagatgctggttaggaaaaacaagttttcactataatgtgtttgtctttttcctgttatttttgtyttcgtgatataaaaggcactaatactttgtgtgtggtaaacatttcttctcctatgctctctagattagaaactgtcgtccactttcctgaatgactttatttttaataagatgctgactcgtgtatttcctgttgcacagtgaatgactattgccc

SEQ ID NO: 51735 - DNA, 551 bp, Homo sapiens
caataaaaaatgtttccatatagtaccttcacagtcaccttgatacatatatatataacaaggctgtagtaaccaaaacataatatgggctaaaaacagacacataaaccaatggaacagaatagggaacccagaaataaatccccacatgctaaagaatgaaactgggcccctgtctctcaccatacacaaaagtcaactcaagatggattaaagacttaaatgggaccacacctataatcctagcactttgggagcccaagcctggaggatcacttgacccaggaattcaagaccagtctggacaatgcagtgagatcccatygctacaaaaaaaaaaaaaaaataggcatggtggcatgcactggtagtcccagttacttgggatgctgaggtaggaagattccttgagcccaagagttcaatgctgcaatgagctatgatcgtcctactacaccctagcctgagtgacagagtgaaaccctcctctcaaaaaaaaaaaaaaaaaaaaaactaataaaactttatactagaagaaaacatagggaaaa

SEQ ID NO: 51736 - DNA, 551 bp, Homo sapiens
caataaaaaatgtttccatatagtaccttcacagtcaccttgatacatatatatataacaaggctgtagtaaccaaaacataatatgggctaaaaacagacacataaaccaatggaacagaatagggaacccagaaataaatccccacatgctaaagaatgaaactgggcccctgtctctcaccatacacaaaagtcaactcaagatggattaaagacttaaatgggaccacacctataatcctagcactttgggagcccaagcctggaggatcacttgacccaggaattcaagaccagtctggacaatgcagtgagatcccatcgctacaaaaaaaaaaaaaaaataggcatggtggcatgcactggtagtcccagttacttgggatgctgaggtaggaagattccttgagcccaagagttcaatgctgcaatgagctatgatygtcctactacaccctagcctgagtgacagagtgaaaccctcctctcaaaaaaaaaaaaaaaaaaaaaactaataaaactttatactagaagaaaacatagggaaaa

SEQ ID NO: 51737 - DNA, 1460 bp, Homo sapiens
agaccaggcttactaaagcaacaacagtcacactgaaatgctaattcaaagaatctgcactccagtctcccatgacaagcaatgcctcagattctttaggaatcagagtgcagggccaaggtgatgaatgtggttgtacagttatccagtctcatacatctgcatccctgaggagtggttctgccttccgttagtcaggaggcactgcacactctccaagcccaatataaatgagcgtagtcaagagcagaattaatcaactcaataaccaagtcatgggaaaagcagggatggagccagcttcagaaattactggaaccctgagctctttcttcttcttgtggttccttatgctggtttcattcgcttcagattcactttcactgtggaccatggcttacaccttcagagcactctgacattaagaaaagcaggcagctctctcccagctccaatttgaaaaaatcctagaagaggactttgattcccctagcttgggttgtgtgcccatccttttggccaggaggtcaagctctgttactatgtaacaaggagaagagctgagcagacaaaagtaatagaggtctacaattccctgccaccacagctcgtgtttattcagtcactgctccctgaaaaagtggtcctcaaagtgcactttctggctacaatggccacagaggcataaggtctgggttaagaaatatctaagactgcttcatctgtgttccaccctcatagactcatgagtcctttctcaagcaagcataaaatcaatgcaattgaatctttttgttgttgttgtttttacaaaacactttgtgcagaaggctgaattttaatctaagcaaattgtttctggtgattataggataactaaagtttactgttctagatcactctacaagtcaactttccttctctgattttagatctattcagagagcatctccactgtgaaaaacatttatgataatttgctgccactacacggacttccacaaactcaaccttccttaaccccagaaaccacaaactttcaaaaatgatgacaaggggaagagatgaaagaygctggagcaatgcagcataaatcccaacccactcctctgctctccacactgtatggatggaggtgctgaggaagttggtggggtgaggagaggcctgagaacactcactgatagcctccagtttggagtgacattgatctaagtgggtgatcgtgtggcctgggaaaaatgtacaataataaccaatgtcagtagggccctgacttaccacaccagtagttgggcacccagtggaatggggaaggggcctgagggctgtaagaacagactccagggctcaaagctgttagaagagtgacacgaaggttaaagaggggtcccccactgcaatctcccaggaaaaagatacaccccctcctgcttgtggagggagccctggaatggccc

SEQ ID NO: 51738 - DNA, 1460 bp, Homo sapiens
agaccaggcttactaaagcaacaacagtcacactgaaatgctaattcaaagaatctgcactccagtctcccatgacaagcaatgcctcagattctttaggaatcagagtgcagggccaaggtgatgaatgtggttgtacagttatccagtctcatacatctgcatccctgaggagtggttctgccttccgttagtcaggaggcactgcacactctccaagcccaatataaatgagcgtagtcaagagcagaattaatcaactcaataaccaagtcatgggaaaagcagggatggagccagcttcagaaattactggaaccctgagctctttcttcttcttgtggttccttatgctggtttcattcgcttcagattcactttcactgtggaccatggcttacaccttcagagcactctgacattaagaaaagcaggcagctctctcccagctccaatttgaaaaaatcctagaagaggactttgattcccctagcttgggttgtgtgcccatccttttggccaggaggtcaagctctgttactatgtaacaaggagaagagctgagcagacaaaagtaatagaggtctacaattccctgccaccacagctcgtgtttattcagtcactgctccctgaaaaagtggtcctcaaagtgcactttctggctacaatggccacagaggcataaggtctgggttaagaaatatctaagactgcttcatctgtgttccaccctcatagactcatgagtcctttctcaagcaagcataaaatcaatgcaattgaatctttttgttgttgttgtttttacaaaacactttgtgcagaaggctgaattttaatctaagcaaattgtttctggtgattataggataactaaagtttactgttctagatcactctacaagtcaactttccttctctgattttagatctattcagagagcatctccactgtgaaaaacatttatgataatttgctgccactacacggacttccacaaactcaaccttccttaaccccagaaaccacaaactttcaaaaatgatgacaaggggaagagatgaaagatgctggagcaatgcagcataaatcccaacccactcctctgctctccacactgtatggatggaggtgctgaggaagttggtggggtgaggagaggcctgagaacactcactgayagcctccagtttggagtgacattgatctaagtgggtgatcgtgtggcctgggaaaaatgtacaataataaccaatgtcagtagggccctgacttaccacaccagtagttgggcacccagtggaatggggaaggggcctgagggctgtaagaacagactccagggctcaaagctgttagaagagtgacacgaaggttaaagaggggtcccccactgcaatctcccaggaaaaagatacaccccctcctgcttgtggagggagccctggaatggccc

SEQ ID NO: 51739 - DNA, 1460 bp, Homo sapiens
agaccaggcttactaaagcaacaacagtcacactgaaatgctaattcaaagaatctgcactccagtctcccatgacaagcaatgcctcagattctttaggaatcagagtgcagggccaaggtgatgaatgtggttgtacagttatccagtctcatacatctgcatccctgaggagtggttctgccttccgttagtcaggaggcactgcacactctccaagcccaatataaatgagcgtagtcaagagcagaattaatcaactcaataaccaagtcatgggaaaagcagggatggagccagcttcagaaattactggaaccctgagctctttcttcttcttgtggttccttatgctggtttcattcgcttcagattcactttcactgtggaccatggcttacaccttcagagcactctgacattaagaaaagcaggcagctctctcccagctccaatttgaaaaaatcctagaagaggactttgattcccctagcttgggttgtgtgcccatccttttggccaggaggtcaagctctgttactatgtaacaaggagaagagctgagcagacaaaagtaatagaggtctacaattccctgccaccacagctcgtgtttattcagtcactgctccctgaaaaagtggtcctcaaagtgcactttctggctacaatggccacagaggcataaggtctgggttaagaaatatctaagactgcttcatctgtgttccaccctcatagactcatgagtcctttctcaagcaagcataaaatcaatgcaattgaatctttttgttgttgttgtttttacaaaacactttgtgcagaaggctgaattttaatctaagcaaattgtttctggtgattataggataactaaagtttactgttctagatcactctacaagtcaactttccttctctgattttagatctattcagagagcatctccactgtgaaaaacatttatgataatttgctgccactacacggacttccacaaactcaaccttccttaaccccagaaaccacaaactttcaaaaatgatgacaaggggaagagatgaaagatgctggagcaatgcagcataaatcccaacccactcctctgctctccacactgtatggatggaggtgctgaggaagttggtggggtgaggagaggcctgagaacactcactgatagcctccagtttggagtgacattgatctaagtgggtgatcgtgtggcctgggaaaaatgtacaataawaaccaatgtcagtagggccctgacttaccacaccagtagttgggcacccagtggaatggggaaggggcctgagggctgtaagaacagactccagggctcaaagctgttagaagagtgacacgaaggttaaagaggggtcccccactgcaatctcccaggaaaaagatacaccccctcctgcttgtggagggagccctggaatggccc

SEQ ID NO: 51740 - DNA, 303 bp, Homo sapiens
agttctagaacagcctggccaacatggcgagactgtgtctcttaaaaaaaaaaaaaaatagagagagagagaggaaaaggaaatacctggccaacttaaacctctttttgttaagaatgagaattcttaagagataaaaagtagataatttttttatttcaaggataaaggaagatgcctattaytatctaggcatgtagaacattgtaggcaatggaagaaaaatggagctagcctcagtgtactccagcagctacataaattgtgagggggaaagtttgcaaagcaagatttcaaacccca

SEQ ID NO: 51741 - DNA, 504 bp, Homo sapiens
atggagggagaggacatctacagatgaaaggtggaagtcatggagatagccatcctagtactacaagagcttccttctctctctctcctggagtgttccctttctgtgcaaaaacctggaattccacacaagttccaaccagaaagaacaatgttggctcttccaastggaatggttcatgatacaaagcaagtagggaaggttgtaagaaaagatgaaagcaaaaaattttcccctttaattaaaaaaaaaaaaaattttgagagaggatctagcattgttgcccaggttggagtgccctggggtaatctcggctcactacaacctcgacctcccaggctcaagcagtcctcctacctcagcctccagagtagctgggactataggcatgtgccactatgaccagctaatttttatatttttttagagatggggttttgctatgttgtccaggctggtctcgaactcctgggctcaagcaatccacctgcctctgcctcccca

SEQ ID NO: 51742 - DNA, 504 bp, Homo sapiens
atggagggagaggacatctacagatgaaaggtggaagtcatggagatagccatcctagtactacaagagcttccttctctctctctcctggagtgttccctttctgtgcaaaaacctggaattccacacaagttccaaccagaaagaacaatgttggctcttccaactggaatggttcatgatacaaagcaagtagggaaggttgtaagaaaagatgaaagcaaaamattttcccctttaattaaaaaaaaaaaaaattttgagagaggatctagcattgttgcccaggttggagtgccctggggtaatctcggctcactacaacctcgacctcccaggctcaagcagtcctcctacctcagcctccagagtagctgggactataggcatgtgccactatgaccagctaatttttatatttttttagagatggggttttgctatgttgtccaggctggtctcgaactcctgggctcaagcaatccacctgcctctgcctcccca

SEQ ID NO: 51743 - DNA, 504 bp, Homo sapiens
atggagggagaggacatctacagatgaaaggtggaagtcatggagatagccatcctagtactacaagagcttccttctctctctctcctggagtgttccctttctgtgcaaaaacctggaattccacacaagttccaaccagaaagaacaatgttggctcttccaactggaatggttcatgatacaaagcaagtagggaaggttgtaagaaaagatgaaagcaaaaaattttcccctttaattaaaaaaaaaaaaaattttgagagaggatctagcattgttgcccaggttggagtgccctggggtaatctcggctcactacaacctcgacctcccaggctcaagcagtcctcctacctcagcctccagagtagctgggactataggcatgtgccactatgaccagctaatttttatatttttttagagatggggttttgctatgttgtccaggctggtctygaactcctgggctcaagcaatccacctgcctctgcctcccca

SEQ ID NO: 51744 - DNA, 588 bp, Homo sapiens
tttttttctgggaaaattatctttcataaatgtattagaattaattgtcttttctttgttaatatttatttgattcagtatctgtgattcattttccattctcatccctaatactatattgagatttgttttgttgattaggttagttaatgtatcaattttattttttaaacaatcagttcctatttttaaattatttttaattatttctactttatatctcactaatttccactttcattatcataaattatttgtttcttttcacaatatgccctaatttcttaacaaaatgcataatttaraaaaaattccaagttaatccttcttttaaggccataaattatcaactaagccctgctttagccatgtagtaaatactgtatactttgaatttttatttttttctagcttgcaattacagcttgaatgattttgtcaaacaattttttccctatatagtttttagaatactttcttaattaaagtgtcctagaatttggatttttgtattttgattttttaaaaaactatatttttagtcaatatataatgttattcttctgtagctagaaatttaatttttat

SEQ ID NO: 51745 - DNA, 588 bp, Homo sapiens
tttttttctgggaaaattatctttcataaatgtattagaattaattgtcttttctttgttaatatttatttgattcagtatctgtgattcattttccattctcatccctaatactatattgagatttgttttgttgattaggttagttaatgtatcaattttattttttaaacaatcagttcctatttttaaattatttttaattatttctactttatatctcactaatttccactttcattatcataaattatttgtttcttttcacaatatgccctaatttcttaacaaaatgcataatttagaaaaaattccaagttaatccttcttttaaggcyataaattatcaactaagccctgctttagccatgtagtaaatactgtatactttgaatttttatttttttctagcttgcaattacagcttgaatgattttgtcaaacaattttttccctatatagtttttagaatactttcttaattaaagtgtcctagaatttggatttttgtattttgattttttaaaaaactatatttttagtcaatatataatgttattcttctgtagctagaaatttaatttttat

SEQ ID NO: 51746 - DNA, 1523 bp, Homo sapiens
tttttcagggtgcactgatttcatattgttcaaatacacgttttaccaacaatttgtacagttaactcaatcatcacagggtcctgaggtgacatacatcctcagcttacaaagatgatgggattaagagattaaagacagrcataagaaattataaaagtattaatttggggaactgataaatgtccatgaaatcttcacaatttatgttcttcttcctaggctccagccgatctctctgttcggggtccctgacttcccacaacaattttataatgcttttatatttctaacactctgctcatcctctacaatttttgttttatagatttttaagattttgaattttataccaaaagattatatattaatgtaacatcaagattttccctttttaaactgttaatcaacatttttagctttctattttatcaccttaacactgatagtttttaatatatattctataatttttatatttaaaattcaattgaagcatctttttttataagcaaaaattggcttatatcatttttatttgttggaatttcatgtctgtttgccctctgttctttcatattacctcatgtaaaaaattttatttttaatcttgctttattttctatattttcttatgtctctggttaagtgtgtgtgagctgagctctgacgaattatttgaagggtgataggaaagaagtgtagacaccattttaatagttttcaaagtatgccaggcaagtgaagattgtgggctggattcatgttacttgtggacaacgttagttgtgccaatgtagaaaatatgatatgcatttacgtgtgtaaatcaactaaggatgaataacaccctgtggtggtcattgtttgaagtacttaacatatattatcacattttatactcccacaatgatatgagctaatatttgcccccactttatcaatggggaaaatctgatgtgcagagaaatcactcattttataacagagtgctctggatttgagcccaagcagtctaggttcagaatccaccctcttaacccctgtattataagtaagcatgctatctatgccttagctccaggttgattatatttaattacttattgttttgaatagggaatgtttttaccagtgtaggtatttgttgaaaagtagtattgatagagaactgataaatatgctgtggctgaaactgtctccaattggggatgatgatatgactcagaatgccatcataccataaatgaggcagataatgatcagtgttctcttacagtgtgtagttccattggacaaataaaaaaatcttcctggttcccagacaaaccccacttattttaggttatttattttttacaggtaactgagtcaatttattttttctcgactgacaataatcagaagttccagagtagattgccacccagtgtgatttcttcaagccaccacactgacaatatgtaaggatagcatgtctctgcagtacttttccccagttccacttttgctgttattccgca

SEQ ID NO: 51747 - DNA, 1523 bp, Homo sapiens
tttttcagggtgcactgatttcatattgttcaaatacacgttttaccaacaatttgtacagttaactcaatcatcacagggtcctgaggtgacatacatcctcagcttacaaagatgatgggattaagagattaaagacagacataagaaattataaaagtattaatttggggaactgataaatgtccatgaaatcttcacaatttatgttcttcttcctaggctccagccgatctctctgttcggggtccctgacttcccacaacaattttataatgcttttatatttctaacactctgctcatcctctacaatttttgttttatagatttttaagattttgaattttataccaaaagattatatattaatgtaacatcaagattttccctttttaaactgttaatcaacatttttagctttctattttatyaccttaacactgatagtttttaatatatattctataatttttatatttaaaattcaattgaagcatctttttttataagcaaaaattggcttatatcatttttatttgttggaatttcatgtctgtttgccctctgttctttcatattacctcatgtaaaaaattttatttttaatcttgctttattttctatattttcttatgtctctggttaagtgtgtgtgagctgagctctgacgaattatttgaagggtgataggaaagaagtgtagacaccattttaatagttttcaaagtatgccaggcaagtgaagattgtgggctggattcatgttacttgtggacaacgttagttgtgccaatgtagaaaatatgatatgcatttacgtgtgtaaatcaactaaggatgaataacaccctgtggtggtcattgtttgaagtacttaacatatattatcacattttatactcccacaatgatatgagctaatatttgcccccactttatcaatggggaaaatctgatgtgcagagaaatcactcattttataacagagtgctctggatttgagcccaagcagtctaggttcagaatccaccctcttaacccctgtattataagtaagcatgctatctatgccttagctccaggttgattatatttaattacttattgttttgaatagggaatgtttttaccagtgtaggtatttgttgaaaagtagtattgatagagaactgataaatatgctgtggctgaaactgtctccaattggggatgatgatatgactcagaatgccatcataccataaatgaggcagataatgatcagtgttctcttacagtgtgtagttccattggacaaataaaaaaatcttcctggttcccagacaaaccccacttattttaggttatttattttttacaggtaactgagtcaatttattttttctcgactgacaataatcagaagttccagagtagattgccacccagtgtgatttcttcaagccaccacactgacaatatgtaaggatagcatgtctctgcagtacttttccccagttccacttttgctgttattccgca

SEQ ID NO: 51748 - DNA, 2705 bp, Homo sapiens
gcatgaggcactaaggtggttaacaaagatgaacaagaaatgatctttgttctagagaagaatgggaaaagagtaccttaaaaacaacgcatgacattacaatctattaaggactttaaaagtggtaatgtgcagtgtcttgctacattggtaaaataagtcaatgtccaatttcttccagtgctgtgtgaaattctgaaaatcaaatttacttatataagcaatatggacccacaacaaaataaattaatgtttgtgtacatgttacacgtatacataaatctcaattccattacatatcaatttctcaaaagcatatttccaagtcttcttttccctctgagtattctgtcttacacaagccacacaaaataaaatataatatttggcctgatctagcacccagaacactgcctgaaatatattgggtattcggtaagtatttatcggatgacaatgatttcactttatctagcttgctggtatttacttcagaagccaaatctcaaaggtaacagaagcgtctacttcagatctttcaccatgtgtagttcctcctactatcagtgggcaaatctgaaagaaaactcttatttcaaaagccacacagataaggagggaccattgtatattcatttgcatcttaaattagcaaagtcttggaatcataagttaacaaacaacttacaggatccttttttctcagagatgcccctgatgatgaattctgtcctatgcaggaagttctttttttctgagggggaccagaagctcagagatactatctccaatgtgtgaagtgatggtatttcaaccaagctctcatgctcttgtctctttaatatgacaagtttttatctaccattattctaaattttctattaatatataaagtgagcctcatgatgtaaaggaacactctctgcccttaactgacaaagcaactgaggaccaaacttacaaactctgtgggtcttgtgatatctgtaagattaatggggctgaggctgatgagctctaatgttgtctttagcccccaaatgtaattattctacgtagcttgatctagaaacccacttgttcctcattttactactgtgttaaacagaaaattcaaccactgagagggcaggcctgtaccttttgatatattaaaagacccaatttttaatctatttcctgagactgctggagaagacataagcaatggttctttaaacatcatcccgaagatcttttttttcctgatgtcacctgatgtccagtatcttatttcactcattatttttactggaaattctggccaaaaaccctgattttagtggaaggaacttaaacaggtaagtctgcttaacctggctgtaaatcttagctttgccatttatttgctgcataactttacacaagttacttaattccttagagactgctttcttatctgtaaaatgaggatgatgatgataccaactctaaaggattgtcatgagaagtaagagaaatgcacataaaattccttacacgcagcaaacactcaggaaagcaattggtcagttggtcattgcctcatctttattctgtattggttcacatttacacactcaacaactgctaactgaacacctgctaaatgccagatatgttatcaaaataaaacataaaacatggccattaagatactcataccctagtaaaagggacagacacaacagaagctaacaatttcattaccatgtgatcagtgctagaccacagatggttacaagcttcaactctgcctggagataagaggtggagagatcactcttaggtgggaattgaacaatgagaacagttggacacagggcggggaacaacgcacactggggcctgttgggggttggggatctggtgggggaatagaattaggagaaacacctaatgtaaatgacaagttgatgggtgcagcaaaccaacatgacacatgtatacctatgtaacaaacctgcatgttgtgcacatgtaccctagaacttaaagtataattaaaaaaaaaaaaaaaagaggtagagagataaccagcaaaggtgatgcctgggctgggctaaaaagctgagtaagttggtagatggcaaggcaaaggcacatcccaggccaagggctcagtgttgtgaaatacaagatgagtatgaagaaatacaaaaagtaagaaacagcttatattaatttaaatatatccattttaatactccttcctctccccacactcaatccacatatacacgtttctactatttaaaagaaactaaaaccctgtattactccattttcacactgctgataaagacatactcgagactgggcaatttacaaaggaaagaggtttaattggacttacagttccacgtggctggggaagcctcacaatcatggtggaaggcaaggaggagcaagtcacatcttaacgtggatggcggcaggcaaagagaggagcacttgtgcagggaaactccccttttataatcatcagatcttgtagacttattcactatcacaaraacagcatcggaaagacctgccccatgattcaattacttcccactgggtccctcccacaacacgtgggaattcaagatgaaatttgggtggcaacacagccaaatcatatcaaacccaaaatgacttctttccagtcttatgtttatttcttcactcatttttcaacaaaa

SEQ ID NO: 51749 - DNA, 544 bp, Homo sapiens
gccacccctcccccaccattctcgcacccccgcccctgccactcagcttcaccgacaccaagcccagcaatatggggagcggtgcaaggactggtgagatttttaagaatttcatttttaatttgtactaaaagcttacaaattggtgatttttttcaaaaaagtcagcaaactgcaagcacctgttaataaaggtcttaataaattatcaaataaataaataaaatggaaaaaagaaaggaacattcttcagtgaagtagacagcataaacaaaaagaaatcacaacttctggaaatcaaagacacagagaaatgcaaactgcacttgaaagtctcagcaagagaatcaaataagtagaagaaagaacttcagagctcaaagacaagccttttgaattaacccaatccaacaaaaacaaggaaaaatgaattaaaaaaaatgaacaaggccttcaagaagtttgggactaygttaaacatccaaacctaagaataattggtttattcagaagagaaatataaaagtttggaaaacatctttga

SEQ ID NO: 51750 - DNA, 640 bp, Homo sapiens
atgaatcaggccaagagacaggacccctttttgcagtttgcacgaaggtgctgaggatgctggctgcagccctgtgcagtggaacctgctctctgggacttgccagggccatgtgtgccttttctgttaggacaggggaaagggaaagaaaatgaaagtcttttgttcagtacgtggaaaaatgaagaggcagaaaagtgatctttccaataccttaaatgatgaaggcactgccttcaatggttttaagtcttcctgactgtttactcttagctactttgattttctaggtaaaactggtttaaaatttttgtttttgagacagagtcttgctctgtcacccaggctggagtacagtggcgtgatctgggctcacygcaacctctgcctcctgggttcaagtgattctcctgcctctgcctcctgagtagctgggactacaggcatgcgccaccacgcctagctaatttttgtatttttagtagagacagggtttccccatattggcaaggctggtctcgaactcctgatgtcaggtgatccgcccgcctcggcctcccaaactgctgggatcacaggtatgagccaccacgcccagcctaaattttgattcctgacttccagggtctttttactagat

SEQ ID NO: 51751 - DNA, 551 bp, Homo sapiens
acttagccaagcctagattcaaaacaccaaaaaaatttgactctatttctggatggaagaagctgcaatatattgtgggcttcctcccaractaactcattgtgtggtgagggtggtggtaaagcaatggtggagatgttcaagagaagtgccacagacaagccacctaatgttgacaatataaatgaactgaatctaccctataattatcttagacttcccacttggcgttagcaataagtgcataaccaccaaagacggtggtatataaagttataaatagagatatcatggaatggtagaatgcatttaagtgaccagttaagcccatccagcttaccagtttgcagttcatgagaagattatccgccctttacatatttctggtatgagcattatcccaggttttatctcagaagcttggcagcttctgaaaaccgactgtttcactggaaaatgttgtgcaaactagatccagcagggtctgcatgccaacagtgaacatatcctttccaagaaggggctctccaaaacaatacgtcctaatgttc

SEQ ID NO: 51752 - DNA, 551 bp, Homo sapiens
acttagccaagcctagattcaaaacaccaaaaaaatttgactctatttctggatggaagaagctgcaatatattgtgggcttcctcccaaactaactcattgtgtggtgagggtggtggtaaagcaatggtggagatgttcaagagaagtgccacagacaagccacctaatgttgacaatataaatgaactgaatctaccctataattatcttagacttcccacttggcgttagcaataagtgcataaccaccaaagacggtggtatataaagttataaatagagatatcatggaatggtagaatgcatttaagtgaccagttaagcccatccagcttaccagtttgcagttcatgagaagattatycgccctttacatatttctggtatgagcattatcccaggttttatctcagaagcttggcagcttctgaaaaccgactgtttcactggaaaatgttgtgcaaactagatccagcagggtctgcatgccaacagtgaacatatcctttccaagaaggggctctccaaaacaatacgtcctaatgttc

SEQ ID NO: 51753 - DNA, 1340 bp, Homo sapiens
taaatgaaacacagaaaactaattatggtcaatagctgaatacctataccttgggttgagggcattagtaatctcatgtttttgtcatttttaatcatcttaaatcattggtacagtgcctgtcaaagtaccaactgcaacaactgactgtgaaataagttggcaaaagatttatgcttgtcaatctgaccctatattcttaaagctctacccttgtactaaatctgattctcaaagaggcatatacctaacttccctaagaaatactaagcactacagcaagcttgcccgacccgcagcccacaggccacatgtggcccaggatggctttgaatgcagcccaacacaaattcataaactttctaaaaatgttatgagatttttttttttttacattttttttttagctcatcagctattgttagtattagtgtacttcatgcgtggcccaagataattcttcttcttccaatgtgactcagggaagtcaaaagattggacaaccctgcactacagtgtaacactatggtctcattttgtgtgtgtgcaagtcactatttaaacaacagtcatatgaagactgaatttttaaaataattctatcaaaaacagtgtccattatgtggttctgtgctccttatagaaagacctacatgagagctctttcatgagtacaattctagagagattgcatcctttctaacaaacttgcacacatccttttagaagctaatgacagctacatgaccctacacatttcccatcagcgctaagaagcatggagttaagttgcatgcattattaattaatagctttttatttaaagctcaaggtaaattccattcttaatctctgtcttaatggttttattggttctaggccatttgttgttagtagtctcagatcattttatattatcaaatgtccttttagatactataaatgttaaataaataaaatatacaacgtttcccattttaaatgatctatttgcttgtatctgtcttttctctgcagcagattaatgccttaaagacaggaactcaccttttctcacctgcggcatcctcactgtggctgtcacaccatcctgcatatagtcagtactcaataaatagttattgagtaatggtattgaagctaattaattcatccaaaataaaayctttgtggtctaattctaacattgaaaaaaactacttgtaaagctgagctctatattaataaatcttaaggctaaaacaaaaaaatatgtttagtttcattaacagtcaaagaaataaaaatcaaaatactaagttactattcttggattgtctcattagcaaatttttttaaaa

SEQ ID NO: 51754 - DNA, 1340 bp, Homo sapiens
taaatgaaacacagaaaactaattatggtcaatagctgaatacctataccttgggttgagggcattagtaatctcatgtttttgtcatttttaatcatcttaaatcattggtacagtgcctgtcaaagtaccaactgcaacaactgactgtgaaataagttggcaaaagatttatgcttgtcaatctgaccctatattcttaaagctctacccttgtactaaatctgattctcaaagaggcatatacctaacttccctaagaaatactaagcactacagcaagcttgcccgacccgcagcccacaggccacatgtggcccaggatggctttgaatgcagcccaacacaaattcataaactttctaaaaatgttatgagatttttttttttttacattttttttttagctcatcagctattgttagtattagtgtacttcatgcgtggcccaagataattcttcttcttccaatgtgactcagggaagtcaaaagattggacaaccctgcactacagtgtaacactatggtctcattttgtgtgtgtgcaagtcactatttaaacaacagtcatatgaagactgaatttttaaaataattctatcaaaaacagtgtccattatgtggttctgtgctccttatagaaagacctacatgagagctctttcatgagtacaattctagagagattgcatcctttctaacaaacttgcacacatccttttagaagctaatgacagctacatgaccctacacatttcccatcagcgctaagaagcatggagttaagttgcatgcattattaattaatagctttttatttaaagctcaaggtaaattccattcttaatctctgtcttaatggttttattggttctaggccatttgttgttagtagtctcagatcattttatattatcaaatgtccttttagatactataaatgttaaataaataaaatatacaacgtttcccattttaaatgatctatttgcttgtatctgtcttttctctgcagcagattaatgccttaaagacaggaactcaccttttctcacctgcggcatcctcactgtggctgtcacaccatcctgcatatagtcagtactcaataaatagttattgagtaatggtattgaagctaattaattcatccaaaataaaacctttgtggtctaattctaacattgaaaaaaactacttgtaaagctgagctctatattaataaatcttaaggctaaaacaaaaaawtatgtttagtttcattaacagtcaaagaaataaaaatcaaaatactaagttactattcttggattgtctcattagcaaatttttttaaaa

SEQ ID NO: 51755 - DNA, 1340 bp, Homo sapiens
taaatgaaacacagaaaactaattatggtcaatagctgaatacctataccttgggttgagggcattagtaatctcatgtttttgtcatttttaatcatcttaaatcattggtacagtgcctgtcaaagtaccaactgcaacaactgactgtgaaataagttggcaaaagatttatgcttgtcaatctgaccctatattcttaaagctctacccttgtactaaatctgattctcaaagaggcatatacctaacttccctaagaaatactaagcactacagcaagcttgcccgacccgcagcccacaggccacatgtggcccaggatggctttgaatgcagcccaacacaaattcataaactttctaaaaatgttatgagatttttttttttttacattttttttttagctcatcagctattgttagtattagtgtacttcatgcgtggcccaagataattcttcttcttccaatgtgactcagggaagtcaaaagattggacaaccctgcactacagtgtaacactatggtctcattttgtgtgtgtgcaagtcactatttaaacaacagtcatatgaagactgaatttttaaaataattctatcaaaaacagtgtccattatgtggttctgtgctccttatagaaagacctacatgagagctctttcatgagtacaattctagagagattgcatcctttctaacaaacttgcacacatccttttagaagctaatgacagctacatgaccctacacatttcccatcagcgctaagaagcatggagttaagttgcatgcattattaattaatagctttttatttaaagctcaaggtaaattccattcttaatctctgtcttaatggttttattggttctaggccatttgttgttagtagtctcagatcattttatattatcaaatgtccttttagatactataaatgttaaataaataaaatatacaacgtttcccattttaaatgatctatttgcttgtatctgtcttttctctgcagcagattaatgccttaaagacaggaactcaccttttctcacctgcggcatcctcactgtggctgtcacaccatcctgcatatagtcagtactcaataaatagttattgagtaatggtattgaagctaattaattcatccaaaataaaacctttgtggtctaattctaacattgaaaaaaactacttgtaaagctgagctctatattaataaatcttaaggctaaaacaaaaaaatatgtttagtttcattaacagtcaaagaaataaaaatcaaaatactaagttactattcttggattgtctcattagcaaattttttwaaaa

SEQ ID NO: 51756 - DNA, 554 bp, Homo sapiens
catgtgaatagttacttgatgcttatagtgatgtctgggaaaatgacatgaaatacttataatctgtttctcacacatgtaattcaaaagaataaagagaagatgatttgaaatattcttgagtttgcaggaaaaaagctacttccatatgcataattgcatgtattttgatactgccattattaataactatctaagagggtccattaaaaataaaatttcttggctgggcatgatggctcatgcctgtatcccggcactttggaaggctgaggcaggtggatcacctgaggtcagaagttcaaaaccagcctggccaacatggtgaaaccctgtctctaccaaaaatacaaaaattagctgggcrtggtggcgtgcacctgtagtccgagctacttggggggctgaggcaggataatcgtttgaacccaagaggtgtaggttgcagtgagctaagatcacatcaccgcactccagcctgagagacaaagtaagactctgtctcaaaaatattaaaataaaatttctcattcctattacagagtaatttaatt

SEQ ID NO: 51757 - DNA, 554 bp, Homo sapiens
catgtgaatagttacttgatgcttatagtgatgtctgggaaaatgacatgaaatacttataatctgtttctcacacatgtaattcaaaagaataaagagaagatgatttgaaatattcttgagtttgcaggaaaaaagctacttccatatgcataattgcatgtattttgatactgccattattaataactatctaagagggtccattaaaaataaaatttcttggctgggcatgatggctcatgcctgtatcccggcactttggaaggctgaggcaggtggatcacctgaggtcagaagttcaaaaccagcctggccaacatggtgaaaccctgtctctaccaaaaatacaaaaattagctgggcgtggtggcgtgcacctgtagtccgagctacttgggggrctgaggcaggataatcgtttgaacccaagaggtgtaggttgcagtgagctaagatcacatcaccgcactccagcctgagagacaaagtaagactctgtctcaaaaatattaaaataaaatttctcattcctattacagagtaatttaatt

SEQ ID NO: 51758 - DNA, 1567 bp, Homo sapiens
tgaaagttgttgagattctgtcctgactgatgctcctaaatcctttctatactatttggcccaattatctttgtagatatatttccccccaggaaagaatcaatagatactctgctctgtttcaatttcttcccgtattacttatatgttttctttctatctataaaaaaataagattgggttttctgaaatatattttttattcctgtgagaatcagtttttctacaccacagacacaaatcagaactaattcacagcagatgtgagcattcataaggagaagtatgttttatatttcctgcatgaaagtatagtgaaggttcaggacatgcgtgaaggcccattgtgttgaagtaagggtgtttcttctatgttcctccccacttttcaggtgaggaactaaagttcaaatcaatcagaaagataactgagcagatgtgtatctggtcagggatctgggtcctgatctctgtgttgccaaagtatatactctttcctacatcttctttacattaatacatcctgatttgttgtaataactagacagaagtagaaataacagcacaacgtatatgcaactggtggcagcaacaatctatcagaatggtcaataatgatcatatcagctttggtacagagttgcacctgtgtacaccttgggttggagcctcagggtcaggaaggcaacaaaaatggatctagacaggagccatgacagtctctgcagtaaccagtctcagctgagtgttcaccagtacacgtgtgaggaaggatggaaagttaatcctgctgcacagttttttatattgggttcttttctatgcatttgcttacttaattgaatatctattaaacaaattgtaacctttctgcagttccatcaatcttggttcttctaaataatcatgttcctggctttataaatactcaagccataagaatttgctactaaaagggtagcctgaaaaggggaaggcaaccaaaataggtgttactcacctagcgcactgaatgcttgataaagcgcaaagttgcagaagcaactattgtactamggatttcatttgtacttccttctatattattttaaaaagaattagagactgttttgtttatcttgttagtcaaaattacataaacctttaaatttgcagtttgtaaatgctatgacaaattcaaatataaatcttagtctagtaataattctttaatgtatttttcataattctattacaaaaaagagataggtaaaaataacaaatactataattatgttgaattattacaaagactgttatgtcctaatactgcttattctcttcatatccaaattatgtaataaaatgattgcgttctgtgttatgaaactgtgaactctttgagaactgtaaacttaacaagtttcctcaaataactttgactctttcagacaggccctccaagagcatctgttgaattaatgttgtagcaaatgggaaggtaaaatgtgcttgcgtgtgttaatgacatgttattattgtcttccctgcagagaaattgtaatgagcagttgcacctattggctgg

SEQ ID NO: 51759 - DNA, 1567 bp, Homo sapiens
tgaaagttgttgagattctgtcctgactgatgctcctaaatcctttctatactatttggcccaattatctttgtagatatatttccccccaggaaagaatcaatagatactctgctctgtttcaatttcttcccgtattacttatatgttttctttctatctataaaaaaataagattgggttttctgaaatatattttttattcctgtgagaatcagtttttctacaccacagacacaaatcagaactaattcacagcagatgtgagcattcataaggagaagtatgttttatatttcctgcatgaaagtatagtgaaggttcaggacatgcgtgaaggcccattgtgttgaagtaagggtgtttcttctatgttcctccccacttttcaggtgaggaactaaagttcaaatcaatcagaaagataactgagcagatgtgtatctggtcagggatctgggtcctgatctctgtgttgccaaagtatatactctttcctacatcttctttacattaatacatcctgatttgttgtaataactagacagaagtagaaataacagcacaacgtatatgcaactggtggcagcaacaatctatcagaatggtcaataatgatcatatcagctttggtacagagttgcacctgtgtacaccttgggttggagcctcagggtcaggaaggcaacaaaaatggatctagacaggagccatgacagtctctgcagtaaccagtctcagctgagtgttcaccagtacacgtgtgaggaaggatggaaagttaatcctgctgcacagttttttatattgggttcttttctatgcatttgcttacttaattgaatatctattaaacaaattgtaacctttctgcagttccatcaatcttggttcttctaaataatcatgttcctggctttataaatactcaagccataagaatttgctactaaaagggtagcctgaaaaggggaaggcaaccaaaataggtgttactcacctagcgcactgaatgcttgataaagcgcaaagttgcagaagcaactattgtactaaggatttcatttgtacttccttctatattattttaaaaagaattagagactgttttgtttatcttgttagtcaaaattacataaacctttaaatttgcagtttgtaaatgctatgacaaattcaaatataaatcttagtctagtaataattctttaatgtatttttcataattctattacaaaaaagagataggtaaaaataacaaatactataattatgttgaattattacaaagactgttatgtcctaatactgcttattctcttcatatccaaattatgtaataaaatgattgmgttctgtgttatgaaactgtgaactctttgagaactgtaaacttaacaagtttcctcaaataactttgactctttcagacaggccctccaagagcatctgttgaattaatgttgtagcaaatgggaaggtaaaatgtgcttgcgtgtgttaatgacatgttattattgtcttccctgcagagaaattgtaatgagcagttgcacctattggctgg

SEQ ID NO: 51760 - DNA, 484 bp, Homo sapiens
tcttggataatatcctaaataaactacctgcacggaagtccttatctcagrattttctatttaaggaactcaaactaagagggataataccagaagttatattaaaaagcagattctaagaatggggttccaattggaggactcactggtcatatagcaacaaaaactattgctagtgatggcgagtgggggtagtgataatccctggagcttggagcatcatatttactcagtctcccctgtggtgaattgggttgaggtaaagattgaagctgaaccattaacttatgcaacaacttttatacttgaacacatatgggagcaatgctaattatatgggttgtggagttgtctggcatgtgttcacatctctagaatccttgatgaaagaaaataacaggctcagatccataactatcatccagggcacactttaagaactggaaaatgttctgtagccacaggacagactatattaaaaaaa

SEQ ID NO: 51761 - DNA, 556 bp, Homo sapiens
ccaggtctcgggcaccagtgttcttatggggggaaactgaaatcaccttcacagatttcatttttatataattgttttgtaaatatgcatgtgttacttctatatggatatataaatatacttaaatagacttatttaaagataaatatgtgtacatatacgtatatgcarccaataatttttcaaaaatataaatgcaccaatatgtatgttatatacactcaaatatgtattttccccaaatgacatcaatttcatggtttttattggtattaagttttaatgttttaaatgttgtcttagtatctctatatatggattaataaatattcatatttatgccatcaattttaataaaatgcatctatctaaataggtagatgtataaatactgtattggtcagtttttgcacaataattattgacaatcaaccacttaaactcttagtgtcttattaacactaagtatttattttcatattcctgaatgttcattttaataatcagttggctgatcccaaggcagggctcagctggttggttcggctgcagggaa

SEQ ID NO: 51762 - DNA, 607 bp, Homo sapiens
ggactgggacgtcaatgtgacttagcattgcaagtagcggcttttgcttcaggaattaaaagtgcatcctgcaagtgctactttagtttcacttttcatcaaaggaaaaatattttccatgtgagctattttatgtacttttcctattccttccatccaggaagaagtatccgtcagaaagaaagtggtcatgtaaatcttctccttagaacgttttttaaaaaatactatgataaaaaaaaaacctgacttgttcatatcatggtcctttctccaatgagatcaattttctccaaatactaatggaaagtttctgacccaaaacacctctgtcacgatagcttccacgtcacttctgaggacagcgctcgtctcccagagatgagccaccagggagagaggtcgcractctgccgctcactttcctaaggggaaggctggaaccagaggtttcaaaatggcctattctggcctcaaaaatagaagcacgcatgagaacaaagttagtaaacgcagcccaggactgtgaacgtttcttggtgaatgaccagaggttgggggaagtggatgagggagagagatgggacctgtacttagccttgacgcc

SEQ ID NO: 51763 - DNA, 528 bp, Homo sapiens
gctttgtgagagtatcttaaataactctatatgagaagctggtataaaagaaattgtggttgtgacagctctcacccttccattgatctccagcgttggtcaaatttagccatcatgtttttcctggattctggtgattatcctggagttcctcagtcaacaatgtaccttccttttttctcctgttgctacaaatgacattcattcatttataatccctccatgtgaaagtgtattcttattttatactccacagataatctaatctgatgttaatttttactagaaattgggtaattctttagccaagtatgaaaagagcatcctgtaatctttattttatgcctccaattctttctctcatacttaaaaaaattcacatacatgcataaagtatttttcacataagttacaaaraagtctcacactttggggaaactaaagttttttgatatgaaaaggtaggcttctgtttccaacactcctgaaattcctccttgtgttcctatattcttgtggttggaattc

SEQ ID NO: 51764 - DNA, 526 bp, Homo sapiens
caattaaaaaatggttttttttagaacaatgataaagtgaacataaggagccaaacatttttatacactatggataagagtgtwaattggtaacacatattatgtaagaaactatagttggaatcatacagacattccagaacagcttctttcacctaccaatatgcatttaaggtttctccatttcttttcatggcttgataactcacttgtttttaggacagaataatattccattacagaattaccacaatttatctatgcattcacctattataggacatcttggttgtttccacattttggcaattataattaaagctgaaataaacatctgtgtacaggtttctaattaattctaattaatttctaattgtggtcacatattttcaacttcttgtcaatattttgtgttgtcggtgttttggattcaggccatactaaccggtgtgtagtgatatgtcattgcttacatttgcaatcccctaacggcatatgaagttgcgagtcttgactgacttgccta

SEQ ID NO: 51765 - DNA, 554 bp, Homo sapiens
ttttgaatttctaacctccacattgcaagcagcatgttgggaaaaggttcaagaccttttacttttcctctcccccaacccctttatttatttatttttacttttttttctcttctttttttttaattcaaagaagaaacgctgagatttcccctcctccctcctagatcagatttctccaccgcatgccattgaagcttctcggggttaagatttgtgcctgtcatttccgacattttcctcagaatcgcaaactttaaaatacctttcagggaaacttgtttggaatttcattttaatgggatttatgaataaatctccatcttaatgctgactaagctttaaacatccattccaggagaacgctattggatttttatattttaaaatttaaatcacttgagtgtgaaggcataaaacatttttatatttgtgtgagtgccttgtgcttgagcatttctgttaaagactgattttttttttwaatttggttgcttgaataaatctgggctgcaaaggaggagatgttgcatcatgtcctttcctttctcgtg

SEQ ID NO: 51766 - DNA, 555 bp, Homo sapiens
tctctctctctctctcttttgttttcctttatttttgttcccaaagacttacctccctcaaccagccatttgtcctgactctgtgtataagctgatgctcagctgctggagaagagatacgaagaaccgtccctcattccaagaaatccaccttctgctccttcaacaaggcgacgagtgatgctgtcagtgcctggccatgttcctacggctcaggtcctccctacaagacctaccactcacccatgcctatgccactccatctggacatttaatgaaactgagagacagaggcttgtttgctttgccctcttttcctggtcaccccccactccctacccctgactcatatayacttttttttttttttacattaaagaactaaaaaaggaaaaaaaaaagcctagggcagatacaatctagtaaaagaaaatctttgatataccaaagtgttggataacaaaggctagaaaattcagataatttataaaggttaactatacttgtgcttataaatgtgcagattctacaatatttttccatgtcattctaaaa

SEQ ID NO: 51767 - DNA, 496 bp, Homo sapiens
cctttgataactttcttgttttccgaaagaacaaggtatttcaagctcattttgaacatgtacagcacccgacgtggaatcaaccatttcaagaaatcttgattccttttagtaggaaatggtatttagaaaacacaaactgggtagtagggatgctcattactaataggttgtcattgtttcttggatttttcggtggaagaaagcaatgaaatatgtatatttaaaaagaaagattgtgagtttacattgttacttccaattcaaattaaagataaggtttttatttaaagttgattttatacgttcatctctattatttatgctraatatcatgtttcctaacaatgttaacagcattttcttcatcctattattcaaaaagcaataccaatattattactagcaacgtaactattgaacattaagatttcttagcaattctcttttctttgtcctgagaatatatcctactaagaatgtgcagtcaaagcac

SEQ ID NO: 51768 - DNA, 595 bp, Homo sapiens
aaattgatgctgcctcttgtgttgtttctccaaatactcttcttgttaaacaagatctcctgtttctagaatggtgtgcacatttgcacattctattagaaaaaaaccagattccctctcaaaatatttgcaagtgccacaccttcaaaacacaagacagatcctccattcagacaatagaaaagaaaacaggaccacccrtgtgcttttaagacactcaggaagctgaatgccgaaatgtatatttgttttaaaatatagatgattgatcatttctttaaaaatgttttgggccgggtgtggtggctcactcctgtaatcccagcactttgggaggccgaggcaggcggatcacaaggtcaggagattgagaccatcctggctaacacggtgaaaccccgtctctaataaaaatacaaaaaattagcctggcaatgtggcaggcgcctgtagtcccagctactagggaggctgagacaggagaatggcatgaacccgggaggcggaggttgcagtgagccaaggtcacgccacttcattccagcctgggcgacaagggagaccccgtctcaaaaaaaaaaaaaaaaaaaaaaaa

SEQ ID NO: 51769 - DNA, 559 bp, Homo sapiens
atgtacaacatatatttattgtttcagaaaggtccattttagaggtatgtaattcacatattaaatacagaggaaaatattatataatagaagctctatacattaaaatcacattttaaatggcttatttattgaccwctgtatacactttacagagtgtatacactttaccattgtatatatagattcctcaatttatatgagaaaatatgttaaattaccaaaaaatatacactgagctcctactgtttggcagctgcttgcccaggtgctggaaaaaatgtgatgagcaaaaacaatggacagaaagagagggacagaaacacaactctgatttcccgtcttgccttaaacacctggaactcccaacaaaatatgtaaaatatcatcttttcagggaaaatggaaacaaataacactgatatcaaagataaaaacaagcaagatgagctcattgcatggaatgaatttccaaactgctgtgcagatttgggggacccaaacaaagctcattattcttgctgagtttggagacaggtttcagaggtcagggaggcta

SEQ ID NO: 51770 - DNA, 534 bp, Homo sapiens
tgtgactaaaaccaaaactctatacactacgatcaccaattctgaactgcatttgctagaaggaagccagcagacaatcttgaaaaacgaaatagcattagttaaacccatttttctcttgaattaatttgaaaattctcagcctgctattcaagacctttcatttgttcattgattgcttccctccctccctcccttccattgctgcttccttcctagctcattccctccttccctctccctctctttctttctctttctttctttctttcttaaacatgtattagtgtctagaaaacacttcttaagctcaactgtactatttattttactctctaatcatatttcattcttttcagactctgtgcccttgctcacattattttttctacccataatatgctstttatttcattttctgtgaaaatcctaagctgctcctattctgaagccatttgatatatttattcttccactaagtctttaacaaacaattctatgtgcacctctttgcttgtacctctctcctatggc

SEQ ID NO: 51771 - DNA, 631 bp, Homo sapiens
tgttcaataggttaggtatattagacgcatttttgatttatgatacttgcaatgggtttatcaggatgtaaccctattttatgccaagaagcatgcgtgtaagaaagggagtgctgaaacacgtagtttagtctagccaagctgacacattacaaatccacgacaacatccacatggagctgttgagtgaatggttggaaatatgagttcagaattcagagaagaggttcaggctggaggtagcatttggcagttatgataaagccatggttcatgaaatcatggaaccatataagatcatctagggagacaggtggacagagaatgaaaagaacaaaagacagcaccctggagtrcttcaacatttagagatttgttagagaacaagaaatcagtaaagaatttaaaaagtccagtgaggtgtgagaaaaactaggcaagtatgtgtcacagaggtctagaaacaaaaggaggaagaagcggtcacctcaaatacttctgaaaactcaaggtggatgaagaccgtgtcaggactctgcaaaagtaacatccaagtaccacttaggatgtcatccaagtataaatacagcactgatcaaagggatcatgggtgatcaggagtggaaagaat

SEQ ID NO: 51772 - DNA, 591 bp, Homo sapiens
caaatccttacttttctagtgcaaacctgggcatttcttctaagttcattaaaaatatgttctttaaggaactgttgttgaactagagcttcacaagcaagtgttctttcagcactgaaaagttgagaatgttgccctggrccttccaggtgtgacaaatctcagagacttttctggaaggaataagaatctttaggtttagttctaggcatttataatgctgtgaacaataatgtcttccaagagaaaccattgtcagcatgaagagtggattcaagctatctcaggcaccaatggcctccacggggcagtgggaggagaaaaaagagccactaatattgctgccaaagcacttcatgggagccactgttgatggaggtggtagtgagagccctgtttgcgaggtgaagatgggcctcatttcctccttagtctatccagggccagtcaccatgagggagaatacatcatgtctaaatgcttgatcaagaatagatgtggggtgaaaagagtctggggatttggttaattatacactttaataaaaatagaaatttaaaacagtgtggtataaatcccagtgcgactgga

SEQ ID NO: 51773 - DNA, 549 bp, Homo sapiens
ttttctccttccttcctttcttttccctccccctctctctctttctttctttctttctttctttctttctttctttctttctttctttctttctttctttctatcattctctgcatattttctcagatatyacccagaaattaaagtgaacttctccaggcatatacatctgtgaagccataacagactaaaaaaatcaatattgaaatctatatgggcttttactaaagattaaactaaacatgtacttaaaacattttaatgcaaacataattgtaagtgcttcttggtcaacaaagaattctcagtttgacataatagttctttctgcaatttctgttttttttttcttttttaaacagaggtacaaggtatatgaaatctgaagggcagaaagtatataactcaatgtgatatgccatcactttctagataattccgaacattttaaaaggctttactgtgccccttttcagtcataggccccagatataacaactatttctgacttctgacttctagtattatagatcagttttgcctattctt

SEQ ID NO: 51774 - DNA, 1857 bp, Homo sapiens
tttcaatttcttaagaaaataggacttcctaggaaatgagttgctcttaggaaccaaacgttggcatcctatggtacagagagctatagtcaccaaacttaagcacagttgtgtgcaaagagctgatatctttacttattgataatgacaagattgaacaacatttgtttatttgtcaatagggtaatccaacaatttggaaytcaaccttttctctattcatttagaataacaatatgcaaactactgatatattttagagggcataatactccatctggttagaacttcaaactcaaacctggctccatattagtctcacctggagcactttaatagaaaaccatgcctgaatcccaccctgaaccaattacatgatagttaagaggtcagtctgcagtacttttagaaactttaacttcctgctatactttagatatttgacccctccaaattttatgttgaaatttgatcaccaatgctaaaggtgggacctaatgggagggggttgagtcatggagatggagctctcacaaatagaccaatgccctttggggagggattgagtgagttctcactctaaaagaaccaggcacctcttctctctctcttctttatcctttctctcttacttccccactttctttctttcttcccctctcaccatgtgatcacagcacatgccagctctgcttcaccttttgccatgagtagaagcaacctgaagccctcatcagagtagatgctggcaccatgcttcttgtacagcctgaagaactgtgagccaaataaagctcaattctttataaattacgtagcctcaggtcttcctttatagcaacataaagtggctaagacactcccccattgtaacatatagctaggtcaagaaaccattaatttatctgcagtatagtagaaagagatgtccaggctatgctgatcaaagtccattggaatgtaaaactttcagcataaattctcccttaatgctttctataaattccacttcaggacagtgacatagaatttctaatccagtggcctggtctggtatttacctgacccctggccaaagcaagagaaaatctaaggtttagagtttactcaaaaccagtccctttcttagtgcctctctttctttttcatattaactgatctcttccacctagagcaccaactcaaagtcttctctcttcacacgaatattaccagttacctcaatgggacatttggattctgagccctcaggagcgcatacattataagtagtgtccacctccttttagggttgctaatatcaatgttattatttttctactgacagaaatttcagtgtcacaatgtaactattatagttccattttttctaatctaccatcttgaatgaaatttggatgtcaaggcactctggaaagtaaatatttccctgagtttaaaactgcagccagagaatacagcctaaggaaagcagatctggagactagacaaggagaacacagctaccaggggaaaactggtgccaaaggatcttttccactacacgtgtatagtagtctaccaggaggccgatgtttaatataaagagctgggtttctgaactccgtgggcctggattggaatttggtacactactttttacctttgtgacctagaacacaatattaaatcttgtgtcaaaaatgggttaatattactcacttgaaaagataattgggaagattaggcaaaatatatgtcatttgtctccagttccccagagcttaccacagtttacatcacctggaaggtgtttatcagtgaaataatagcaactttctttcttccctataatacatactcctactatccttgcca

SEQ ID NO: 51775 - DNA, 1857 bp, Homo sapiens
tttcaatttcttaagaaaataggacttcctaggaaatgagttgctcttaggaaccaaacgttggcatcctatggtacagagagctatagtcaccaaacttaagcacagttgtgtgcaaagagctgatatctttacttattgataatgacaagattgaacaacatttgtttatttgtcaatagggtaatccaacaatttggaactcaaccttttctctattcatttagaataacaatatgcaaactactgatatattttagagggcataatactccatctggttagaacttcaaactcaaacctggctccatattagtctcacctggagcactttaatagaaaaccatgcctgaatcccaccctgaaccaattacatgatagttaagaggtcagtctgcagtacttttagaaactttaacttcctgctatactttagatatttgacccctccaaattttatgttgaaatttgatcaccaatgctaaaggtgggacctaatgggagggggttgagtcatggagatggagctctcacaaatagaccaatgccctttggggagggattgagtgagttctcactctaaaagaaccaggcacctcttctctctctcttctttatcctttctctcttacttccccactttctttctttcttcccctctcaccatgtgatcacagcacatgccagctctgcttcaccttttgccatgagtagaagcaacctgaagccctcatcagagtagatgctggcaccatgcttcttgtacagcctgaagaactgtgagccaaataaagctcaattctttataaattacgtagcctcaggtcttcctttatagcaacataaagtggctaagacactcccccattgtaacatatagctaggtcaagaaaccattaatttatctgcagtatagtagaaagagatgtccaggctatgctgatcaaagtccattggaatgtaaaactttcagcataaattctcccttaatgctttctataaattccacttcaggacagtgacatagaatttctaatccagtggcctggtctggtatttacctgacccctggccaaagcaagagaaaatctaaggtttagagtttactcaaaaccagtccctttcttagtgcctctctttctttttcatattaactgatctcttccacctagagcaccaactcaaagtcttctctcttcacacgaatattaccagttacctcaatgggacatttggattctgagccctcaggagcgcatacattataagtagtgtccacctccttttagggttgctaatatcaatgttattatttttctactgacagaaatttcagtgtcacaatgtaactattatagttccattttttctaatctaccatcttgaatgaaatttggatgtcaaggcactctggaaagtaaatatttccctgagtttaaaactgcagccagagaatacagcctaaggaaagcagatctggagactagacaaggagaacacagctaccaggggaaaactggtgccaaaggatcttttccactacacgtgtatagtagtctaccaggaggccgatgtttaatataaagagctgggtttctgaactccgtgggcctggattggaatttggtacactactttttacctttgtgacctagmacacaatattaaatcttgtgtcaaaaatgggttaatattactcacttgaaaagataattgggaagattaggcaaaatatatgtcatttgtctccagttccccagagcttaccacagtttacatcacctggaaggtgtttatcagtgaaataatagcaactttctttcttccctataatacatactcctactatccttgcca

SEQ ID NO: 51776 - DNA, 1966 bp, Homo sapiens
cccttcatgctaaaaactctcaataaattaggtattgatgggacgtatttcaaaataataagagctatytatgacaaacccacagccaatatcatactgaatgggcaaaaactggaagcattccctttgaaaactggcacaagacagggatgccctctctcaccgctcctattcaacatagtgttggaagttctggccagggcaatcaggcaggagaaggaaataaagggtattcaattaggaaaagaggaagtcaaattgtccctgtttgcagacgacatgattgtttatctagaaaaccccatcgtctcagcccaaaatctccttaagctgataagcaacttcagcaaagccttcctgaaatcttgtttgaaatttactctcgtcccaatgtagtataacgtcccccttaggtcctagacctactcagtcatttagtcatattagcactacttccaaaatctctgtccagtttacatccccaccatgctgacttccactgcctgcttcaggttatcattatctctcaccctgatcactacagccaccttttcatggttaccccgtctctaatatcatccatcgcaatctcactgttacattgattttaggcgatccctagacttgcagacacttgttaaatgaacacttgttggtgcccactctgttttagggctttagaagtgaatgaaacaaggtccccaccttaatggattttatgtgctattgtcatagattaaatttaataacttttctgcttaaaaatctttgaaaacaattcatcctcagagagcataaggtccccagttgcagtggtgtgcaaagcccttaacagtctagcttctaacacatttccagtcccattatcaaagccaacctcatcttctcaccctgattttctagataggctattctagctgccactacctgaacgtgattttacttccacgttccctcctgcacctctttatttccttgtaaaatttctattcaaacttaaagactgaggttgagattttcactttctgtggtgttttcctcaagatactagccaggctgaattgatttttccctctgtggttatgtttgttcacgcttccatcaccacccatattcacagagtattatgattctttgcttatctatctctcctaccaggctgttagtttcttaaaatgatgcagtcatccttgtatcctgagccactagcaaaaattctgccacaataggaactcagtaagggtttgtgtgatgaccaagataaaaggaagaagagagagataaagagaagagtgaacagaaagtcagggggctgggaagtctacagggatgaaagtattagtaataaaatagttaacgatctttattctatactgagtaaatgctaaggactaggtgtcattgttaactgatagctaagaggaaaggcgctgattgtcctcaacagacctttcatcggtccagtgattcattttctcaggttgacttttcaaaacagggaatctttgctttcctacaaccctgacagcatgatgggaaggaaactatatatacatcattacctaaaaaatgaaaattgtaactcctttttcagatcatggatttaggtatagaaggaggaggaggaaaaagaggcaattaaaaaaagaaagagatggcaataaaagtcttggagggtcaataaaagattcttccaggactcagaggatttatgtatagataaggcgtttaggggggattaagaaataatgtgctgtgattgctcttgctactatcagctgtaaatgatagaagtaccaggaagcagggcattatttatagaagaggccatttcagttgctgtgtgaatttcaggagaattaatgtttggaactttaaccagtgagatagttggagttctcccctggcattccatccattttgctctgtacacattagtaaacaagcagctaaatagtcgtggaaa

SEQ ID NO: 51777 - DNA, 1966 bp, Homo sapiens
cccttcatgctaaaaactctcaataaattaggtattgatgggacgtatttcaaaataataagagctatttatgacaaacccacagccaatatcatactgaatgggcaaaaactggaagcattccctttgaaaactggcacaagacagggatgccctctctcaccgctcctattcaacatagtgttggaagttctggccagggcaatcaggcaggagaaggaaataaagggtattcaattaggaaaagaggaagtcaaattgtccctgtttgcagacgacatgattgtttatctagaaaaccccatcgtctcagcccaaaatctccttaagctgataagcaacttcagcaaagccttcctgaaatcttgtttgaaatttactctcgtcccaatgtagtataacgtcccccttaggtcctagacctactcagtcatttagtcatattagcactacttccaaaatctctgtccagtttacatccccaccatgctgacttccactgcctgcttcaggttatcattatctctcaccctgatcactacagccaccttttcatggttaccccgtctctaatatcatccatcgcaatctcactgttacattgattttaggcgatccctagacttgcagacacttgttaaatgaacacttgttggtgcccactctgttttagggctttagaagtgaatgaaacaaggtccccaccttaatggattttatgtgctattgtcatagattaaatttaataacttttctgcttaaaaatctttgaaaacaattcatcctcagagagcataaggtccccagttgcagtggtgtgcaaagcccttaacagtctagcttctaacacatttccagtcccattatcaaagccaacctcatcttctcaccctgattttctarataggctattctagctgccactacctgaacgtgattttacttccacgttccctcctgcacctctttatttccttgtaaaatttctattcaaacttaaagactgaggttgagattttcactttctgtggtgttttcctcaagatactagccaggctgaattgatttttccctctgtggttatgtttgttcacgcttccatcaccacccatattcacagagtattatgattctttgcttatctatctctcctaccaggctgttagtttcttaaaatgatgcagtcatccttgtatcctgagccactagcaaaaattctgccacaataggaactcagtaagggtttgtgtgatgaccaagataaaaggaagaagagagagataaagagaagagtgaacagaaagtcagggggctgggaagtctacagggatgaaagtattagtaataaaatagttaacgatctttattctatactgagtaaatgctaaggactaggtgtcattgttaactgatagctaagaggaaaggcgctgattgtcctcaacagacctttcatcggtccagtgattcattttctcaggttgacttttcaaaacagggaatctttgctttcctacaaccctgacagcatgatgggaaggaaactatatatacatcattacctaaaaaatgaaaattgtaactcctttttcagatcatggatttaggtatagaaggaggaggaggaaaaagaggcaattaaaaaaagaaagagatggcaataaaagtcttggagggtcaataaaagattcttccaggactcagaggatttatgtatagataaggcgtttaggggggattaagaaataatgtgctgtgattgctcttgctactatcagctgtaaatgatagaagtaccaggaagcagggcattatttatagaagaggccatttcagttgctgtgtgaatttcaggagaattaatgtttggaactttaaccagtgagatagttggagttctcccctggcattccatccattttgctctgtacacattagtaaacaagcagctaaatagtcgtggaaa

SEQ ID NO: 51778 - DNA, 1966 bp, Homo sapiens
cccttcatgctaaaaactctcaataaattaggtattgatgggacgtatttcaaaataataagagctatttatgacaaacccacagccaatatcatactgaatgggcaaaaactggaagcattccctttgaaaactggcacaagacagggatgccctctctcaccgctcctattcaacatagtgttggaagttctggccagggcaatcaggcaggagaaggaaataaagggtattcaattaggaaaagaggaagtcaaattgtccctgtttgcagacgacatgattgtttatctagaaaaccccatcgtctcagcccaaaatctccttaagctgataagcaacttcagcaaagccttcctgaaatcttgtttgaaatttactctcgtcccaatgtagtataacgtcccccttaggtcctagacctactcagtcatttagtcatattagcactacttccaaaatctctgtccagtttacatccccaccatgctgacttccactgcctgcttcaggttatcattatctctcaccctgatcactacagccaccttttcatggttaccccgtctctaatatcatccatcgcaatctcactgttacattgattttaggcgatccctagacttgcagacacttgttaaatgaacacttgttggtgcccactctgttttagggctttagaagtgaatgaaacaaggtccccaccttaatggattttatgtgctattgtcatagattaaatttaataacttttctgcttaaaaatctttgaaaacaattcatcctcagagagcataaggtccccagttgcagtggtgtgcaaagcccttaacagtctagcttctaacacatttccagtcccattatcaaagccaacctcatcttctcaccctgattttctagataggmtattctagctgccactacctgaacgtgattttacttccacgttccctcctgcacctctttatttccttgtaaaatttctattcaaacttaaagactgaggttgagattttcactttctgtggtgttttcctcaagatactagccaggctgaattgatttttccctctgtggttatgtttgttcacgcttccatcaccacccatattcacagagtattatgattctttgcttatctatctctcctaccaggctgttagtttcttaaaatgatgcagtcatccttgtatcctgagccactagcaaaaattctgccacaataggaactcagtaagggtttgtgtgatgaccaagataaaaggaagaagagagagataaagagaagagtgaacagaaagtcagggggctgggaagtctacagggatgaaagtattagtaataaaatagttaacgatctttattctatactgagtaaatgctaaggactaggtgtcattgttaactgatagctaagaggaaaggcgctgattgtcctcaacagacctttcatcggtccagtgattcattttctcaggttgacttttcaaaacagggaatctttgctttcctacaaccctgacagcatgatgggaaggaaactatatatacatcattacctaaaaaatgaaaattgtaactcctttttcagatcatggatttaggtatagaaggaggaggaggaaaaagaggcaattaaaaaaagaaagagatggcaataaaagtcttggagggtcaataaaagattcttccaggactcagaggatttatgtatagataaggcgtttaggggggattaagaaataatgtgctgtgattgctcttgctactatcagctgtaaatgatagaagtaccaggaagcagggcattatttatagaagaggccatttcagttgctgtgtgaatttcaggagaattaatgtttggaactttaaccagtgagatagttggagttctcccctggcattccatccattttgctctgtacacattagtaaacaagcagctaaatagtcgtggaaa

SEQ ID NO: 51779 - DNA, 622 bp, Homo sapiens
ttctctagtgtaaagttgtccagatggcctatcagagtttgcatttttacataatatcacatttttaactatgaaaacagaagataaatctttccgctatctcctctttattagaaaaaatactgaacataatttccttcttcttgaaaactcagaggccactgttatgctcctttattgtaccctwgtgtaaagataagaaacttcttatgtctattttaaatgaacccaggctaccctatgtcttgaattcttctgcaggattattctcctaattttacgttcttatcctttagttttatcaactatgaatgcatcaggttggagctggtagcagttcctttgctctggcttcttcctctccctgccacaattttgttgaaaactgggcaacacacttgatggatgagaacaaagttcagaattttaagtatctgaccactgaaacatctaattttgtttgggaggcaattactggagacagaatctattgacaaccattcccatcccctgtctgcttttttttttttttttttttttttgacggagtcttgctctgtcacccaggctggagtgcagtggcaggatcttggctcactgcaagctccgcctcccgggttca

SEQ ID NO: 51780 - DNA, 622 bp, Homo sapiens
ttctctagtgtaaagttgtccagatggcctatcagagtttgcatttttacataatatcacatttttaactatgaaaacagaagataaatctttccgctatctcctctttattagaaaaaatactgaacataatttccttcttcttgaaaactcagaggccactgttatgctcctttattgtaccctartgtaaagataagaaacttcttatgtctattttaaatgaacccaggctaccctatgtcttgaattcttctgcaggattattctcctaattttacgttcttatcctttagttttatcaactatgaatgcatcaggttggagctggtagcagttcctttgctctggcttcttcctctccctgccacaattttgttgaaaactgggcaacacacttgatggatgagaacaaagttcagaattttaagtatctgaccactgaaacatctaattttgtttgggaggcaattactggagacagaatctattgacaaccattcccatcccctgtctgcttttttttttttttttttttttttgacggagtcttgctctgtcacccaggctggagtgcagtggcaggatcttggctcactgcaagctccgcctcccgggttca

SEQ ID NO: 51781 - DNA, 386 bp, Homo sapiens
ccaccaggcccaaccagtgccagagtctttaagacctcaagaaaatgagccaataggagcattcccctgaccttcaaagggaaaaggatcatgaagtacaggtgygggaattgtgccagctctaggagacattctcataggccaatcaccgccttccaatcccatggataagaaggaattcccacagtgaagaataaaacatcataagctcagggaatgactgggtggaaaatgccaattcattttcttttatttcatttcttaaacaaattatttccaaaattctaagccagagattcttaacctgataaataacaatgggcttctgaggactccataaactcagggtccccagaaataaaaagcgaagtctgtgtcaatgtgca

SEQ ID NO: 51782 - DNA, 537 bp, Homo sapiens
ttaaatccgattttcatatatgaataataaatatgacttaagtgcttatttgcaaattttatgcaaagtaaaataagtatctctgtaattattctttggtaaatttgaagtagtttttcttctagctcaaaactcatgtacatattataaacaaaaggaaaattgtttacattttagatttcttgtgccttatttctttaatttttctagatttccctcaacatgatattcattccgagggtgtattaagtcaagagtcttcccagtccacattcctctgtgactttttatatcaagctccttctgctgcttctaaactctcttcagagaaaaaactgcttgaaggtattttttctmttctttttagatattatcagataaaaactttattccattatcaaaacaattaggtttagattttgatttttttgagatgttagatttgatctccaagtagagatatttttgaggatttataaatgcttctaggtgcaaatattatttcatgtactgcagcagggatttaccattggttgg

SEQ ID NO: 51783 - DNA, 544 bp, Homo sapiens
attgagccataccttagctagctgtgcctgtggatttatcatgagccaatgagccagtgctggtgagttttaaaaacttttttttttttttttgagaggaagtctcagtctgtcacccaggctggagtgcagtagcgcgaactctgctcactgcaagcaagctccgcctcctgagttcaagtgattctcctgcctcatcctcccaagtagctgggattataggcaagtgccaccatgcccggctaattttcatattttctgtagagatggagtcagaactcctracctcaggtgatccgcccacctcagcctcccaaagtgctgggattacaggcgtgagccaccgcgcctggcttaaatacactttttgatctaatccagttggagctgggttttctgtttaaactgactccaaactaagagtattcacagtacgtccctaatgattagcattgggaacagggatcatctttgaaattcactgctcttgggctggtgtcttgatgaggatagaaaacaaaacgatgtccgtagccactgtgga

SEQ ID NO: 51784 - DNA, 596 bp, Homo sapiens
gagattgatggtggaatggctggtgatgagggaggaaagaggacagatgcatttaatgattttatccaaagagcatcacaaagaataagagaaaatggctgactagacacagccagaaggacctcccagctgggacactgggaagactgctacccacactccaagcagatattcagaaggaaggcatcaagaatggatggagggaggacacagatgctaggctgaagtgggaggaaatgaggaacccaaaaggggctaccaagcaccaggatttgtttctgacccctaatgaacaccgaggaagggagaatcaaagaagataaaagcaaaaaaatcccatccaaaggatagcaacttcaaagactgaaggaatttcatcccacgcagataataaagatccagtacaagaactctgrcaactcaaaaagccagagtgtcttcttagtgccaaacaactgcactagttccccagcattggttttactaggccaaaatggctgaaatgacagaaatagaattcagaatatggataggaatgaagatcattgagattcaagaggaagctgaaacctagtccaagaaatctaaggaacaca

SEQ ID NO: 51785 - DNA, 1336 bp, Homo sapiens
  misc_feature (1)...(1336): n = A,T,C or G
tgcattaaaacggtgaaataccccatacaggaacttttttcccagctttgatttttgtattgttttcttcgagtatacaggagtaaaaagtcaaagaaccacaccaggttaaggcaaggaaggggcacgcccctcctgccatgcgtgcatagtaaaagctcaatacatatcttgaggtcattaactagttaatattaggataaacgctctgtgagaatttaattaggctttttatctcccccttccgtcccttcttttcccatgtttgtcctcttctgcttttttcccaagggcgttgtggagggtctcctatgtgtcctgaaacctggaaatagatggatgaataagatagacatggtcctagaccccttgtagcttacaattcagtaggaaaaaacagaaaatgaacaattacacaagctagttgcctttcttgtgctcagctgtttgaaataattctgcctttcccaaagtgttgactcttgaagactaaaagtcacgtnnnnnnnnnnnnnnnnnnnnnnnnnnnnnnnnnnnnnnnnnnnnnnnnnnnnnnnnnnnnnnnnnnnnnnnnnnnnnnnnnnnnnnnnnnnnnnnnnnnngattctgtttctcactttgtgttggctactagggagtgtatggctagaattgtggtccatataagctagcgtacagtaccttagcagatctatatttatgtgtagacatttcccctgggtttatctaatttgtttcttccttagtttacccttttctaggttcttttctttttatttgattttgttgtttgtatttatgtttacaaggttcagatataagaaaaagatgtatgtgtatgtggcaagagacagagaatccctctctccaggcatgtattttcacttaacttggccttcctggagtagctccaaggatttcttaggcagatatccttaagcaatggggcattgaagtctcaagaaatcatgccataaaaacttatattgggtccattcggctttccactgactgggggaaatgtagcagacaatggcagagggattcgggggagacctaggatctcagttaaaataataattctgccactgagtgatcttggacagagtcttgttctttcccccaggctggagtgcagtgcgcactatctgggctcactgcaagctccgcctcccgggttcacgccattctcctgcctcagcctcccaagtagctgggacwacaggcccctgccaccgtgcccggctaattttttgtatttttagtagaaacggggtttcatggtgttagccaggctggtctcgatctcctgacctcgtgatccacccaccgcggc

SEQ ID NO: 51786 - DNA, 486 bp, Homo sapiens
taaaagcctgtccgcctctcactcttctatttcaagcagctctatcaatccccactagggtaacaacgggatgtacaatcccaggtacagaccacatgtcactggacattggtataatttgaatacaccaacatctgtcctctttgttaacagtgccccagtcttcacaagaggaaaatgcctcatctcatgggatgtattcttaatgaagggtaattcgaggaaccattttacttcatggaagctgcatctggtccctctcytacccctggcacagccagctagtagacaggtgattcagcaggggctgcatggaggtctctgcagcttatgtgcggataacgagaggaactattgaaggaattcactgtgagggcgggagagagttgctgagaggctgctgtgtccacacgcagccaccaacctccatcagaatctgcatggccaagctgggtcccatgatatccatccagtaaacccttttat

SEQ ID NO: 51787 - DNA, 612 bp, Homo sapiens
ccattttaagtcaatggtcttttactttccacttttctccctcttccttccgtttttagttacatttattctcctttgtcatgcacataatatttatatcgctattcagtgccattacctcacctttgtttttctcaactctataattgagtatttaaatattcaccatcagtccccttgcagttttcccggtcttgttttttaaatgtttgtctttatcctttttttccaaatttacttttaaaaatttagaacctacacaaaaccttgaagatcttcaccagttgtagacactgccacattttacagtggtcttytgggtgaatgaggctcatcttctctagtagaatcctcagcagaggcacacggcacagtgtcccggtacagtcaaaactgcttttttgtggcttcaaaccttttgagggacatcttggctggctgtaatatccttggtttgtcctttctttcccttcttgaaagtactactacactcttgccttactgtgtgtattgttttttaataacctggtgccagtctaatcttcttgcctttgtaaattatttcatcttttttgcctggacacactgaggattttttcattatctttaaag

SEQ ID NO: 51788 - DNA, 1779 bp, Homo sapiens
cctttttgcatcttctgtggttttgttactgttttctcactttcttagaattaaaatttaaaaaatacgtgttttgatttctataatgtctttggcttagctgtctattctgcctcttctcattctgtgctggtattgttttaggccctgcttctctccccagcttcagcctcatgtttatgtaccttctgacacagagcatgaactttgtttagaagttggtcagagagcttgattttagaagtaaaagttgatgctacctgtaagtttatatatatgcaagggggtggctaagattggtttcattgttcaaattaccttgatgtttgttccagagtgtctttctgttctgtggattctgaaattgggatttttctggaactctttctgtctttgcaatgtcattttcttttttgtgattgtagctatagcttttcttttctgggctagttcttatctccattttttcttgggagttcctccatatttattaatgatactttttattataacattacagtagacttactgtgatgattccagacattttgaaggacatatggaaactaagtatcttaatagtatcttaatagaatccactcatttaatatgttaaaaatcacaggcaggcaggctttatcttgaagggtcatatagtaaatattgtaggttttatggtgccatatggtctctgttgcagctatacaactctgactttatagtatgaaagcaaccatagatgatgtatcaacaaatgtgtgtggctctgttccaatacagctttatttatgcatacccaaatttgaatttcatttgatttttatgcattttgaaacaattttttattttgatttttttccccaggcatttaaaaatgtaaaaaccattcttagctcacaggtttgtactaaaacaggcagtgggtctgatttttctttgaatgtcatttgtctcctatcttcatttttcctgttgtttggagttaattcctctatatttattcaagaaatctcacttcagttctaatttgaacaacttgatgcatgcttggcttatacctttgtcattgggttttgctttttggagwcataaagcttttaattttaaggtcttcgctttgatagggagtttaaaatattgcatctgggggttttgtattcttgataaaattcaaagaaaacaaaacaaaacagttcaagaaaaaacaaaacaaaaaccaaagataagttcatccaatcttaaaaaaatgtaaagagaaaaaatagcataaacttagaacatcttgaatagtaagatgttgaaataagtcaagtactcactattaatgttagttgattaaacttgcggtttaaagacatagatgttcagatttgactaaataattgacatcagctgaatattgttaaaaatagccacatctgggatacctctttttgtacctgaagattactagccaaaaaaagatatatcagtattgatattggtcaaaatacatttcaaaataaaaagcattactagagagagagttgctgcatgtgataaaagattcaatttttcaagaaacatacccttaaacttgtatgcacttaaaaacaaaagtctcaagatacacacataaaatgatatggataaattggtaatttgtcatcactgacaaaattatcaacccatctccctcaatttaccatgaggtcaaaaagacaaaagttaataaaaattttttagtgatttgaacaacataattatcaagtttggtttaatagactcaaccccaactta

SEQ ID NO: 51789 - DNA, 415 bp, Homo sapiens
tctttttgaaggatatttctagatatatttagtagtttttaytttgttatatttacaactttatgaagcatgtttttagatacatttagtagtttttactttgttatatttacaactttcacgttcatttctgaatcaattcctaaaggtgtactgttgaccactgtcttagtccatttgtgctgctataacaaaatatttggaactgggtaatttataaagaacagaaatttattgctcacagttctgtgggctagaaggtctaagattaaggtgctagcagatttgatgtctggtgaggatttggtttctgcctccaacatggcaccttgttgctgtgtccacatggcagaagggcaaaaggatctaggggctgggcatggtggctcatgcctgtaatcccagcactttggga

SEQ ID NO: 51790 - DNA, 415 bp, Homo sapiens
tctttttgaaggatatttctagatatatttagtagtttttactttgttatatttacaactttatgaagcatgtttttagatacatttagtagtttttactttgttatatttacaactttcacgttcatttctgaatcaattcctaaaggtgtactgttgaccactgtcttagtccatttgtgctgctataacaaaatatttggaactgggtaatttataaagaacagaaatttmttgctcacagttctgtgggctagaaggtctaagattaaggtgctagcagatttgatgtctggtgaggatttggtttctgcctccaacatggcaccttgttgctgtgtccacatggcagaagggcaaaaggatctaggggctgggcatggtggctcatgcctgtaatcccagcactttggga

SEQ ID NO: 51791 - DNA, 352 bp, Homo sapiens
gcagcttccgcctcccaggttcaagcaattctcgtgcttcagcctcctgagtagctgggattacaggcccttgccaccacacctagctaatttttgtatttttttagtagagatgggatttcactatgttggccagactggtctcaaactcctgacctcatgatctgcacctcggcctcccaaagtgctaggattacaggcgtgagccaccgtgcctcrcctgcattctgcaaagttttgtctagaatttccatgtcccacatctccaccaatgcttagtgttatataacacatgcccatctgattgatgtggaatggtatacgtgtatatgtgtgttttgttgttgtttta

SEQ ID NO: 51792 - DNA, 561 bp, Homo sapiens
tgttgttcttctgtagaatttcaacgctcatatgtatttttgtgagtcaccacgaaaacagttaaactgatcaaccgttttccaaactgcagacaccaaattgaaatcacaaagcactttctttttttcccctaagttgactcttctattcctgcctgctgtgctttatgtcagcaagtgaccctttcctgtattataatgcagtatagtatagatgcatcatgtaagaccagagagaaaccgattccaaaaccacctttcctcaagccgccgtttgtaacgaccatatgggyggttggaaggacacagagagagcctattgacacttcactttcgctacacgtggtgatttttccagtgcttccggagacactgaaatttagttccaaacattgccttagaggattctgcattttattcattctaccgatgatccactcagaaaatcaaacctgagtacggagacattggagaagtcgttaaagtattggaccaagtcggttcgtcacgagtgacaaagttattccacactctacttgtacatactctgctttgccttca

SEQ ID NO: 51793 - DNA, 561 bp, Homo sapiens
tgttgttcttctgtagaatttcaacgctcatatgtatttttgtgagtcaccacgaaaacagttaaactgatcaaccgttttccaaactgcagacaccaaattgaaatcacaaagcactttctttttttcccctaagttgactcttctattcctgcctgctgtgctttatgtcagcaagtgaccctttcctgtattataatgcagtatagtatagatgcatcatgtaagaccagagagaaaccgattccaaaaccacctttcctcaagccgccgtttgtaacgaccatatgggcggttkgaaggacacagagagagcctattgacacttcactttcgctacacgtggtgatttttccagtgcttccggagacactgaaatttagttccaaacattgccttagaggattctgcattttattcattctaccgatgatccactcagaaaatcaaacctgagtacggagacattggagaagtcgttaaagtattggaccaagtcggttcgtcacgagtgacaaagttattccacactctacttgtacatactctgctttgccttca

SEQ ID NO: 51794 - DNA, 561 bp, Homo sapiens
tgttgttcttctgtagaatttcaacgctcatatgtatttttgtgagtcaccacgaaaacagttaaactgatcaaccgttttccaaactgcagacaccaaattgaaatcacaaagcactttctttttttcccctaagttgactcttctattcctgcctgctgtgctttatgtcagcaagtgaccctttcctgtattataatgcagtatagtatagatgcatcatgtaagaccagagagaaaccgattccaaaaccacctttcctcaagccgccgtttgtaacgaccatatgggcggttggaaggacacagagagagcctattgacacttcactttcgctacacgtggtgatttttccagtgcttccggagacactgaaatttagttccaaacattgccttagaggattctkcattttattcattctaccgatgatccactcagaaaatcaaacctgagtacggagacattggagaagtcgttaaagtattggaccaagtcggttcgtcacgagtgacaaagttattccacactctacttgtacatactctgctttgccttca

SEQ ID NO: 51795 - DNA, 561 bp, Homo sapiens
tgttgttcttctgtagaatttcaacgctcatatgtatttttgtgagtcaccacgaaaacagttaaactgatcaaccgttttccaaactgcagacaccaaattgaaatcacaaagcactttctttttttcccctaagttgactcttctattcctgcctgctgtgctttatgtcagcaagtgaccctttcctgtattataatgcagtatagtatagatgcatcatgtaagaccagagagaaaccgattccaaaaccacctttcctcaagccgccgtttgtaacgaccatatgggcggttggaaggacacagagagagcctattgacacttcactttcgctacacgtggtgatttttccagtgcttccggagacactgaaatttagttccaaacattgccttagaggattctgsattttattcattctaccgatgatccactcagaaaatcaaacctgagtacggagacattggagaagtcgttaaagtattggaccaagtcggttcgtcacgagtgacaaagttattccacactctacttgtacatactctgctttgccttca

SEQ ID NO: 51796 - DNA, 1208 bp, Homo sapiens
caacctggtttggctgaggtattgtagctttcttttatttcctcacatattccttcatataattttgagctcacattctcaaaatgaatggctctggttcagtaaagagacataaataagactgatttttggacagacataaacgttatttttatagaaagtagagctcatttcttgcacacccatacctgaagttcagccaaaaatgtcttctcccttcagaaatctgtgctgctggtatttcttaaagaaagaattctaaatcagggagggaagaatgacctgaaatctcatcagtgtcctaaattctctactagtaattttagaaccataattttagaacatgagattgcgctgaggagctaataatactactaaaacttgttgctaccttttctcagcctagatcaaaggttttataagcaaagaacaccatagctctaaaaaaattgtaattactactatgtcatttgcagggcaacctagattaattctttgttctgagaggccaccttgtcttctctgtatgctaaaggtagaggaaatagaagaaaaaagcaaattctttttaaatatcagcttacttaaatggttaaaaaatatttttcaggtagaaagtccttggtctgtgatttaacattctgtagagttttcccttgctattcaaactttgctcattataaaaaggaggaaaataaaacatgagatagcccctggggtcttgttttattaaagtcctccagggatctcatatgatgcatcagtgttgactatatcccccttcattgttttctccattttcaattatttttgataattgttgactgttactagaggccaagcactgtgctaggatctgaagttattaggttgactccattyctgttgtcaagacagtaactcagtctttttttaacttttattttaagttcaggggtacaagtgcaggttgtgttacattgctaaacttgtgtcatgggggtttgttgtgcagattattgtatctaccaggtattcagcttagtgcccattagaataattcagtcttaaagattgctgattctaatcagtgcctctacttacaatgaaagtcatcatcatttgcctctgaaatccatcaactcttctttttcttttcagtgctttactctctcagaaagctcttctctaaaatgtagctactgtttgactactaacctctcctttta

SEQ ID NO: 51797 - DNA, 1208 bp, Homo sapiens
caacctggtttggctgaggtattgtagctttcttttatttcctcacatattccttcatataattttgagctcacattctcaaaatgaatggctctggttcagtaaagagacataaataagactgatttttggacagacataaacgttatttttatagaaagtagagctcatttcttgcacacccatacctgaagttcagccaaaaatgtcttctcccttcagaaatctgtgctgctggtatttcttaaagaaagaattctaaatcagggagggaagaatgacctgaaatctcatcagtgtcctaaattctctactagtaattttagaaccataattttagaacatgagattgcgctgaggagctaataatactactaaaacttgttgctaccttttctcagcctagatcaaaggttttataagcaaagaacaccatagctctaaaaaaattgtaattactactatgtcatttgcagggcaacctagattaattctttgttctgagaggccaccttgtcttctctgtatgctaaaggtagaggaaatagaagaaaaaagcaaattctttttaaatatcagcttacttaaatggttaaaaaatatttttcaggtagaaagtccttggtctgtgatttaacattctgtagagttttcccttgctattcaaactttgctcattataaaaaggaggaaaataaaacatgagatagcccctggggtcttgttttattaaagtcctccagggatctcatatgatgcatcagtgttgactatatcccccttcattgttttctccattttcaattatttttgataattgttgactgttactagaggccaagcactgtgctaggatctgaagttattaggttgactccatttctgttgtcaagacagtaactcagtctttttttaacttttattttaagttcaggggtacaagtgcaggttgtgttacattgctaaacttgtgtcatgggggtttgttgtgcagattattgtatctaycaggtattcagcttagtgcccattagaataattcagtcttaaagattgctgattctaatcagtgcctctacttacaatgaaagtcatcatcatttgcctctgaaatccatcaactcttctttttcttttcagtgctttactctctcagaaagctcttctctaaaatgtagctactgtttgactactaacctctcctttta

SEQ ID NO: 51798 - DNA, 1056 bp, Homo sapiens
atttgaggaaattcttaatcacctaaatatctctaccaatagtgttcatcattaaatacttgctgtctggcacatagtgcttttttaaaattattttttgttcaataaatgaaagcagttttagtggatcggttcaagaggagtctttgtattagctttgtttactgtggagtttggaactgaagaagcatttaataattaacattttaaagtgtagactacggtatatcagacctttctggaacactccctagacactgaaatgcggcaaagacactgcattggaaacctccgaaagagtctgtatccttggccagcagatggcattcttatactatagtttagagaaagcaagtagcaaaaggtaaagaagcacttcttaatgatgaagtgaccatctacctcctttttcccttccccatcaccacataaccttatctcacttccattttatcccaggcaactatcttttccatccatccattcacccttctttaggtgcctrgagatgtcttgctaccattctctctagttgctcataggaaaatatcttttgtacttattaatagtcaatccatagaaataggacaagccacataattttcagggccctgtgtaaaatgaaaatgcagaagttgttcaaaaagtattgagaattttaggacagtaagaaaagagcattaaaccaagcacagggccctctgagcccacacaagccatacacccatgaaaccagccatactttataatgtaaatatttccctcttcccatcctaccttccattgttctaatgtcctgtcccctgtgacccacaccaaaaaggctgcttaagaaaggaaggaatcactaaatgtcattcagacatcatagaatcttagcactgaaagaaaatttggagatctagttcaatcctctcattttaaagatgattaaactacattccaaagagatgaagagactcttccaaagtccccagctagttatgtcacagactggactggaactaaatattctcatctaccaagccaaggctcactctcttacgcagactccat

SEQ ID NO: 51799 - DNA, 531 bp, Homo sapiens
tactttgcagaagaggagactgtaaaatggcacagtgattcacctaaagtcacagagtgaggattgaacctaggccattgggctacagagtatgtgttgataaccattatgcttgttctcttcaataatttccatacgctgaattttaaggcagatgagcagcacttctttctgaatctttcatgttacgtgtccagaaatatagtcatggttaaaattagtttcayggagatgttaacaactctgtgcttgttttaatttgtgtgattgtggtactaattaaagaaagacataacttatgataaaacattcagtagttaaattgtcattacaaacatgtaatttaaatagaaaaatgttgaggctaaaaaaagtttttaaaaaatttgttgaaaatgatgacttcctaaaatgtgttatcttaaacatgaaaaggtacactcccaatgacctacaatacatcaaatctttccatttggtaactcactcatttgttcatctattcatttcttttattatttcaacatgtta

SEQ ID NO: 51800 - DNA, 531 bp, Homo sapiens
tactttgcagaagaggagactgtaaaatggcacagtgattcacctaaagtcacagagtgaggattgaacctaggccattgggctacagagtatgtgttgataaccattatgcttgttctcttcaataatttccatacgctgaattttaaggcagatgagcagcacttctttctgaatctttcatgttacgtgtccagaaatatagtcatggttaaaattagtttcatggagatgttaayaactctgtgcttgttttaatttgtgtgattgtggtactaattaaagaaagacataacttatgataaaacattcagtagttaaattgtcattacaaacatgtaatttaaatagaaaaatgttgaggctaaaaaaagtttttaaaaaatttgttgaaaatgatgacttcctaaaatgtgttatcttaaacatgaaaaggtacactcccaatgacctacaatacatcaaatctttccatttggtaactcactcatttgttcatctattcatttcttttattatttcaacatgtta

SEQ ID NO: 51801 - DNA, 531 bp, Homo sapiens
tactttgcagaagaggagactgtaaaatggcacagtgattcacctaaagtcacagagtgaggattgaacctaggccattgggctacagagtatgtgttgataaccattatgcttgttctcttcaataatttccatacgctgaattttaaggcagatgagcagcacttctttctgaatctttcatgttacgtgtccagaaatatagtcatggttaaaattagtttcatggagatgttaacaactctgtgcttgttttaatttgtgtgattgtggtactaattaargaaagacataacttatgataaaacattcagtagttaaattgtcattacaaacatgtaatttaaatagaaaaatgttgaggctaaaaaaagtttttaaaaaatttgttgaaaatgatgacttcctaaaatgtgttatcttaaacatgaaaaggtacactcccaatgacctacaatacatcaaatctttccatttggtaactcactcatttgttcatctattcatttcttttattatttcaacatgtta

SEQ ID NO: 51802 - DNA, 531 bp, Homo sapiens
tactttgcagaagaggagactgtaaaatggcacagtgattcacctaaagtcacagagtgaggattgaacctaggccattgggctacagagtatgtgttgataaccattatgcttgttctcttcaataatttccatacgctgaattttaaggcagatgagcagcacttctttctgaatctttcatgttacgtgtccagaaatatagtcatggttaaaattagtttcatggagatgttaacaactctgtgcttgttttaatttgtgtgattgtggtactaattaaagaaagacataacttaygataaaacattcagtagttaaattgtcattacaaacatgtaatttaaatagaaaaatgttgaggctaaaaaaagtttttaaaaaatttgttgaaaatgatgacttcctaaaatgtgttatcttaaacatgaaaaggtacactcccaatgacctacaatacatcaaatctttccatttggtaactcactcatttgttcatctattcatttcttttattatttcaacatgtta

SEQ ID NO: 51803 - DNA, 546 bp, Homo sapiens
attttcagatctggaagttatcattacacgctgccattttcttactgtaaacaacaaaaaaagtcatttttcagttaaagagggaaggaaacatttctggatctttttggtgtgtttcagagaacagcactcaaagaatcttttcttccattagtgagatagtggattcttcctaatgtaagaagggaraatatggtttccctcctctgaacatcttctggatcctctctaccacatcaggagctatctgtaagctatctgtaatctcctagagatttaggagttagaaagaaaaatgtttgtaagaaagcaaagaatgagccacaaagaaataaagtctttacccattttttccatgaacttgtcatagttttcactccggtctaccttccaagtgctgtcaaacgccatgatttcagttgagtcagcctctaggcagctagagattcaggtctgtccttgggcgagaatttattatatttcttatcttagaaccaacttcatactgtgatgtggaagcttaaagttcaggaaatcacctaacta

SEQ ID NO: 51804 - DNA, 1090 bp, Homo sapiens
tcatctctagattacttataatacctaacacaatgtaaatgctatataaatagttgttatactatattggtttaggaaataatggcaagaaaaaaaagtttgtatatgttcaggacagatgcaaccattcatttttttctcgaaatattttcaatttgtcattggttgaatccacaaatgtgtaatacacagacatggagagccatctgtattcttcccagatttttcctacgtagactttctgcagataatgtcttcattcaaaggaaccaccagcaggacaatttgaaaaagattggttgctcgcatgtaggccttccaggttcctctagatctctcactctgctggcttcactgtttctagctccatcctgaaccagctatttgttaagacactttgttcctaaaccacgcattacttctccatccatgtaaatctgaaataagtgtcttcctcagttttaccctgcgctggtctattacgcataggctcggagaacagggctcaatgagtattaaaattaaggcatcatatataaccattatagaacatcacaaaccacatcacaactaaggtattctacttacttaagaaagaatatttcaggtcaggtataaactattaatttctacaaataaatgcttttaaacggtcactttaacaaatatgaacgtctttctgcaagatacacatatataatttcaaaaataacaaacttactcatcattgtcttttgttgtagattctttgctttcagttaaactggggtgattcaatttttttctcttttctatatatgtgtaataaagaaaaggacataaagttaaaggagaaatcatcaaattttaaatagaatttagtttgtcaaattttaaatagaaagtaaaaaggacaaatggaagggaggtgggcaaagaaaaagtatcctattttgttttttttcatttcccattttcctaatttcttactcacaataccatataagaaaaaataatcttttgaataaaatttccactgaaggttggtatattaaagagaaatcaaatatrattctataattaggttaaaatgcattagtaaactttatta

SEQ ID NO: 51805 - DNA, 644 bp, Homo sapiens
agagaatagatcacatgttaggtcacaaaacacaccttaacaaacctgagaaaaattaatcacaccaagtgtcttttctgaacacaatgaaactagaaatcagtaggagaagaacaactaagaaattctcaagtattggaaatttttgatttcattgcatcaaggagaaacagaagaggggaattagaaaatatctccacmcaaattaaaatgaaaacacaatataccaaagcttatgaaacacagcaaaagcaggctaagagggaagtgtatagttattaatgctcacataaaaaaataagagtgcagataaacaatctaactttatattaaagaaatgaagaacaagaactagaactagaaaattaagaacaaactaagcctaaaagtagcagaaggaagaaaataataaaaattagaatagaaataagtgaaataactaacagaaaaacaatagaaaaaatcagcaaaacagaatttattttctgaaaagatgaacacaattgataagcctttaactagactaaaaaaaataaaaaagactcaaataagaacagaaatttaaaaggagatactataattgatacacaacctaggtatggtcatctgacagccaactcaagcaaattttgaggatatttgtg

SEQ ID NO: 51806 - DNA, 644 bp, Homo sapiens
agagaatagatcacatgttaggtcacaaaacacaccttaacaaacctgagaaaaattaatcacaccaagtgtcttttctgaacacaatgaaactagaaatcagtaggagaagaacaactaagaaattctcaagtattggaaatttttgatttcattgcatcaaggagaaacagaagaggggaattagaaaatatctccacacaaattaaaatgaaaacacaatataccaaagcttatgaaacacagcaaaagcaggctaagagggaagtgtatagttatwaatgctcacataaaaaaataagagtgcagataaacaatctaactttatattaaagaaatgaagaacaagaactagaactagaaaattaagaacaaactaagcctaaaagtagcagaaggaagaaaataataaaaattagaatagaaataagtgaaataactaacagaaaaacaatagaaaaaatcagcaaaacagaatttattttctgaaaagatgaacacaattgataagcctttaactagactaaaaaaaataaaaaagactcaaataagaacagaaatttaaaaggagatactataattgatacacaacctaggtatggtcatctgacagccaactcaagcaaattttgaggatatttgtg

SEQ ID NO: 51807 - DNA, 644 bp, Homo sapiens
agagaatagatcacatgttaggtcacaaaacacaccttaacaaacctgagaaaaattaatcacaccaagtgtcttttctgaacacaatgaaactagaaatcagtaggagaagaacaactaagaaattctcaagtattggaaatttttgatttcattgcatcaaggagaaacagaagaggggaattagaaaatatctccacacaaattaaaatgaaaacacaatataccaaagcttatgaaacacagcaaaagcaggctaagagggaagtgtatagttattaatgctcacataaaaaaataagagtgcagataaacaatctaactttatattaaagaaatgaagaacaagaactagaactagaaaatkaagaacaaactaagcctaaaagtagcagaaggaagaaaataataaaaattagaatagaaataagtgaaataactaacagaaaaacaatagaaaaaatcagcaaaacagaatttattttctgaaaagatgaacacaattgataagcctttaactagactaaaaaaaataaaaaagactcaaataagaacagaaatttaaaaggagatactataattgatacacaacctaggtatggtcatctgacagccaactcaagcaaattttgaggatatttgtg

SEQ ID NO: 51808 - DNA, 644 bp, Homo sapiens
agagaatagatcacatgttaggtcacaaaacacaccttaacaaacctgagaaaaattaatcacaccaagtgtcttttctgaacacaatgaaactagaaatcagtaggagaagaacaactaagaaattctcaagtattggaaatttttgatttcattgcatcaaggagaaacagaagaggggaattagaaaatatctccacacaaattaaaatgaaaacacaatataccaaagcttatgaaacacagcaaaagcaggctaagagggaagtgtatagttattaatgctcacataaaaaaataagagtgcagataaacaatctaactttatattaaagaaatgaagaacaagaactagaactagaaaattaagaacaaactaagcctaaaagtagcagaaggaagaaaataataaaaattagaatagaaataagtgaaataactaacagaaaaacaatagaaaaaatcagcaaaacagartttattttctgaaaagatgaacacaattgataagcctttaactagactaaaaaaaataaaaaagactcaaataagaacagaaatttaaaaggagatactataattgatacacaacctaggtatggtcatctgacagccaactcaagcaaattttgaggatatttgtg

SEQ ID NO: 51809 - DNA, 644 bp, Homo sapiens
agagaatagatcacatgttaggtcacaaaacacaccttaacaaacctgagaaaaattaatcacaccaagtgtcttttctgaacacaatgaaactagaaatcagtaggagaagaacaactaagaaattctcaagtattggaaatttttgatttcattgcatcaaggagaaacagaagaggggaattagaaaatatctccacacaaattaaaatgaaaacacaatataccaaagcttatgaaacacagcaaaagcaggctaagagggaagtgtatagttattaatgctcacataaaaaaataagagtgcagataaacaatctaactttatattaaagaaatgaagaacaagaactagaactagaaaattaagaacaaactaagcctaaaagtagcagaaggaagaaaataataaaaattagaatagaaataagtgaaataactaacagaaaaacaatagaaaaaatcagcaaaacagaatttattttctgaaaagatgaacacaattgataagcctttaactagactaaaaaaaataaaaaagactcaaataagaacagaaatttaaaaggagrtactataattgatacacaacctaggtatggtcatctgacagccaactcaagcaaattttgaggatatttgtg

SEQ ID NO: 51810 - DNA, 648 bp, Homo sapiens
tttcttaayactcatatatctgcaaggtgagtcagaagaaatgttgttctgaaggggtgatgtttataagatggcacaataggaaattttgaactcttcccccccgccatgaacacaccagttcaacaacaatacacagaaaaaaaaaaaaaaacatccctctataaacaattcggaaacttgttgagaggctattggaaatgggacagcatgaagccagtcacactgaagctggtggggacacagcgccatgcaatcaggaagaaagccctgattcccagcttttctgtggggttggaaaaagttggactgcattttcaattttcaaatttttcaagggtttccaaggctctggcttttgtcttgcctgtgtcagagtactgacggtatctagcatactgtagatgcctgggagccacagaagaaagatggtattttttactaacatacaagcactcattttagtccatcttccttgctcaatgtggcatgagtgggtgaaaaatcacatattacatcttttccctgaagaagaagagagttgtaccatttatctaatattccaagtctttctgcctgagggagagagtatatcttaatttctgaaattgctggtggtacttgacatactctagatgctttagagtc

SEQ ID NO: 51811 - DNA, 648 bp, Homo sapiens
tttcttaatactcatatatctgcaaggtgagtcagaagaaatgttgttctgaaggggtgatgtttataagatggcacaataggaaattttgaactcttccccsccgccatgaacacaccagttcaacaacaatacacagaaaaaaaaaaaaaaacatccctctataaacaattcggaaacttgttgagaggctattggaaatgggacagcatgaagccagtcacactgaagctggtggggacacagcgccatgcaatcaggaagaaagccctgattcccagcttttctgtggggttggaaaaagttggactgcattttcaattttcaaatttttcaagggtttccaaggctctggcttttgtcttgcctgtgtcagagtactgacggtatctagcatactgtagatgcctgggagccacagaagaaagatggtattttttactaacatacaagcactcattttagtccatcttccttgctcaatgtggcatgagtgggtgaaaaatcacatattacatcttttccctgaagaagaagagagttgtaccatttatctaatattccaagtctttctgcctgagggagagagtatatcttaatttctgaaattgctggtggtacttgacatactctagatgctttagagtc

SEQ ID NO: 51812 - DNA, 648 bp, Homo sapiens
tttcttaatactcatatatctgcaaggtgagtcagaagaaatgttgttctgaaggggtgatgtttataagatggcacaataggaaattttgaactcttcccccccgccatgaacacaccagttcaacaacaatacacagaaaaaaaaaaaaaaacatccctctataaacaattcsgaaacttgttgagaggctattggaaatgggacagcatgaagccagtcacactgaagctggtggggacacagcgccatgcaatcaggaagaaagccctgattcccagcttttctgtggggttggaaaaagttggactgcattttcaattttcaaatttttcaagggtttccaaggctctggcttttgtcttgcctgtgtcagagtactgacggtatctagcatactgtagatgcctgggagccacagaagaaagatggtattttttactaacatacaagcactcattttagtccatcttccttgctcaatgtggcatgagtgggtgaaaaatcacatattacatcttttccctgaagaagaagagagttgtaccatttatctaatattccaagtctttctgcctgagggagagagtatatcttaatttctgaaattgctggtggtacttgacatactctagatgctttagagtc

SEQ ID NO: 51813 - DNA, 594 bp, Homo sapiens
ggctttatttaagattggggaaagggactgaagacccagagcttgcaatcccagtcytcttacccttcttatttttaactgcctggcactaagcctgagcctctgatgccagacaggtacaccctgtggccagccctcaccaggctcttacttgctgagaccagaatgaatagctttccaagtcctgtggaccacagcacaacctttccatctttcaaattatatgtcaaaacttgcctcctctgggaacctcttcccgaatcactataagctcataaatcctaccaccatgcctatcacacacaccatgcatttgttgacatatcagggtgatatatagtagaaaaggcaccagaccagaagtcctaaaccaggcatttattccaactctgtcaataaataatcgtgatcttgggcaaatcactacatttcacaggccccagtttactcatctctaaggtttaacttattaatgggcgaggccacttttgggcctattattctatgaatgtaatgtaggattatacatgtgtacaatttaaatcgagcacattcacagctgcttcatgccatctacaagctacaacagttcca

SEQ ID NO: 51814 - DNA, 594 bp, Homo sapiens
ggctttatttaagattggggaaagggactgaagacccagagcttgcaatcccagtcttcttacccttcttatttttaactgcctggcactaagcctgagcctctgatgccagacaggtacaccctgtggccagccctcaccaggctcttacttgctgagaccagaatgaatagctttccwagtcctgtggaccacagcacaacctttccatctttcaaattatatgtcaaaacttgcctcctctgggaacctcttcccgaatcactataagctcataaatcctaccaccatgcctatcacacacaccatgcatttgttgacatatcagggtgatatatagtagaaaaggcaccagaccagaagtcctaaaccaggcatttattccaactctgtcaataaataatcgtgatcttgggcaaatcactacatttcacaggccccagtttactcatctctaaggtttaacttattaatgggcgaggccacttttgggcctattattctatgaatgtaatgtaggattatacatgtgtacaatttaaatcgagcacattcacagctgcttcatgccatctacaagctacaacagttcca

SEQ ID NO: 51815 - DNA, 594 bp, Homo sapiens
ggctttatttaagattggggaaagggactgaagacccagagcttgcaatcccagtcttcttacccttcttatttttaactgcctggcactaagcctgagcctctgatgccagacaggtacaccctgtggccagccctcaccaggctcttacttgctgagaccagaatgaatagctttccaagtcctgtggaccacagcacaacctttccatctttyaaattatatgtcaaaacttgcctcctctgggaacctcttcccgaatcactataagctcataaatcctaccaccatgcctatcacacacaccatgcatttgttgacatatcagggtgatatatagtagaaaaggcaccagaccagaagtcctaaaccaggcatttattccaactctgtcaataaataatcgtgatcttgggcaaatcactacatttcacaggccccagtttactcatctctaaggtttaacttattaatgggcgaggccacttttgggcctattattctatgaatgtaatgtaggattatacatgtgtacaatttaaatcgagcacattcacagctgcttcatgccatctacaagctacaacagttcca

SEQ ID NO: 51816 - DNA, 591 bp, Homo sapiens
ttggggcagtatggcacggacacagctaggaacaggtggggcctgtgcatttctctgcaggtgagtctgggtttgcagcttcaagttgacagcagcgaggtctgcagacctgggctggctgcaccaggagggacggcgccgggagggtgctgcagacaggcctgggcattcaggacattttagggtgtttttcctcttattttgtcctatttattaactgttctgctaattttcctttcctactcgccatctttcattctgagtctcagtgttctgtaatttggggaggagccaccagctgtggccttctcatgtacttctttgcgggtgtgatgctgacatcgggatctctcttcagcctctagagctgtgctcgcttatagcaatagtcagcagtgtttccacctgacgcagtccgacaaggtgtctttcgtgggtggtttcagaatccttgttttctagacaaagaagrgggaatccagcaatggggggtgccctataccacgaaactgagcaaggggggtgcgtgatcggtaccatcggcccattcgactctctcagtgactctagtgggggctctaatattaaccc

SEQ ID NO: 51817 - DNA, 1159 bp, Homo sapiens
tttactttgcgtttgacctaaattgtatatgatagttcttgcttctgttaatgaggcctgagacagcatcaagtttttcttttctgattggagagctgtttaacttgcagaaggtttctctgaacatggaaactaagcaaagaacgggtttccaatgagtctaaacttccaaataaaacagacccaaattaccsctcttgtgaccactgacttgggacactgatattggtggacagtttgctactaacttctcctaacagcctatagtctatttaataatttttgactgcaacatctactgctggtttttactttatactaagttcttaaataagtcaatcatttttattccattccatttgaattattatccaagcaataatttgaataattgtggaaaaacaagaaaatatctgaatatttgtgacaattgtaccattattttaaatataaaatcacagttgcttcaaccttcaagacaagaaaattgaaatccttctctaatccatttttcacttattcaattattcaaacaatatatttaaagctattctatgcaagtcagtgtgggaagagctgtaagaatacaataatgaatggtatatgattccataccccaagggatatagactcataaggaaaatgctgtaaacacgaagtgtgcaaaataataaaaccataagaacagacacagttaaattactcctctctactcctaaagggacttgagaataaagaaaacaaagttgctacctgaaacctaatcaaataaagtctattggcaatgtatgagttacacatccctaggttattcatatcaaaactttattgttctgctgtaagtgagaattcttgaccatttcaaaaattcttaccataacctgctgtagtcttctcaaagcaagtctagaatgtaaatgaatccaaaaataattaaatttttattgagttttccctccatgaaattatacaggtgattcaaaaacaaacggagtagttagactggacctaatgataaatttgaggttgggggagggggagggatagcattgggagatatacctaatgctagatgacacgttagtgggtgcagcgcaccagcatggcacatgtatacatatgtaactaacctgcacaatgtgcacatgtaccctaaaac

SEQ ID NO: 51818 - DNA, 351 bp, Homo sapiens
cactccagctttgacctcccgggctccatcgatcttgccatctcagcctcccaaatagctgggaccacaggtacgcaccaccacgccaggctaatttttgaatttttaaatttttcatagggaccgagtctcaccatgttgcccaaagtggtcttgaactcctgggctcaagcgatcagccttcctcagcctcccaaagtgctgggattacaagcgtgagccaccactcccagcttcactcaraattttaaaatcaattttcccaagtagaaatctgtattttctgaatactcctaaaatgaaataatttagtagcattaaaggaattgtatgtagcatttggatgggtcg

SEQ ID NO: 51819 - DNA, 1947 bp, Homo sapiens
agagataatggagggttctttttttttttcttttcagacttttaaaggtgtcagatgctcagtctctcctaaatcctggaaaggtgctgataaggcagcactgatgtccatgcttttattttgacccatattgccaggktgttgtggctgcctgctccaggtctatcttgtccctaggtagggcccctctggctaagggaaatagagcaaaaagacttatagccaattaaacattttaggtcaggcagaaatggaagtgggcaggcattcataaatcccttaaaccttttagacaacatgagagtcaaaaagcaagtttacaaaattgatatccataagcactacctgttgagccatctgctgtttaagtgtctgttgaccatctttgatatggagggtctgaactaattatacggttatgagtatagcagaatacatgactcttagtagctacataagaagttttctgattacattgaaaaatgtagataaagccaagagtacagaatcaatttatactaaggaaaatattgctttttccatttttttagacctttaatataaaatatttcagcatcaggccataacagtagttagaatcagagggaaaaaaattacagaagctgactgataaaaaaattgaaggacaaagttattatcttaggccttctcaaagacagaaaaagctgaaagcagcaaaatttgaacgtctgagatatgaatctgagaagttgtcaaataaataaaacagtttatagaattaaacataaaaacatcttataattttattaggagaaactcaataccttaagaaaatcttgttttaacataggggaactatcattaaaaagttatataaatatatgtgtttaaaaattatagccaacctaattatatacacaaatgtttacctttctttcttttttataacttttaaagtccacaatttgaattaacctttaaataatttttaggcaatttttcaataaaaacataattttatgtctttttataattaattttatattaaaaataatttttaaccacttttaatgcctatgaacataagatattcacctaagtaagaaccttaacattaagcagatgggcttttgccgataactcagaggatttagctgttttcattaaaccaatgatcttaaattagttttagtcttatttttgtcatgggtttgtagctataatcttcttaatcagccagggtatggcccaatgggctcttaggtagaataaaaattgagctgcacattttgaagttagggaacaaaggagcacaaatacacagatcaaagaaaacagagtactcccaaacaaattcccatagagggagactggaaagttaataaatcttatctcaaaccagttggtactgcaaacaacatatgttaggtccaaatgccacaaaaccaaaatgccagagacagaggatgttcagtgtacataccagtttagcttaagcagtcctgaagcccttcagcttcccaatcatagtattccttgcaccagtgaagtgttgcaggcacctgatgccacaatggagaaagaagggaggatacctgagataaagaattcttagcagctcctggatgtctttagaatcccagctgtgaggtcagctatccatgagcagctggcactcgtgagcagttgtcactctgcccatagtgcgtacaggtaagtcctgacgctgccttggccaattactccatctgtttgaaaccagagaggctggatgcctgaggcctatcaccctgtgctgaatgccaggtaattgtaaccaaactcaggttcaactgctcactacttgatggaaagaaagcaggtttatttatgtgctagcaactttggagatggccagactgaaatctcaaaaagccatctcagagtctcaggctggctaaagggattttaaggggaaatgtggca

SEQ ID NO: 51820 - DNA, 585 bp, Homo sapiens
gacatcttgatcctctctacaattctgatttcccaatgcccatcctccataaactctcacttctctgttatttcatcctctggcagaaacaactctaggccaaaattcctatcatggactctatacctatggcctggatttcacgtacttttggccagccctcttagaggactaccactaattcaccaaatagaagcaacttcctctcttaatctgtcctgatggtaggagagctcaccaggcagccagcagcagaaataaatacccccacaacttcaggtgtcacatactaaagttcttatctatcccaccttgagtgggaggtacagattctcagggcaacagttctccccagtaacatttccttggggatttmctggaaattctcttttcttgactttctctagacttctgtattcttaaagcatttgacgagattagaagttatggaacctggcaggctgtggtgcctcacgcatgtaatcccagcactttgggaggctgaggcaggtggatcacgaggtcaggagttggagaccagccgggccaatatggtgaaatcccgtctctactaaaaatacaaaa

SEQ ID NO: 51821 - DNA, 440 bp, Homo sapiens
aacctattctacagtcagtccattgttttgcagtggttgactttatgcactgatcccagttgttctaacagttgttaccagttattctctttcagatagaacccagaagttaggaggtgtgagtaattggcttaaagcaccagaggatttgctaactagaactggaagagaaagaactactttcttttcaaacaatgaaactggaggaatgtgagtctggagttctaccacacacagagaaaacccatctgcatcagtgaaaaaataaagccaacccacacataaaggcagagagtctcgaaggtgatgacctccaaggcctccatcatccctaaggacagctctgcrcctatacgacctgcaattgcgttacaagtaccaataaaccacctttgtttgctcatgctaactggaattgggctttgacatcagcaactgaa

SEQ ID NO: 51822 - DNA, 576 bp, Homo sapiens
ttgggttaaaatttcaaaaactacttaagcgcaggcatggtatagtctaaccataacgttagattttataaaggttgtgactaggagtattcaagsctgatttctttccttgactggctttcattgcaaaataaccacttcattacgaaaaacattttgtttcattatgcctagcaatgcatccttaatgatacattgcaaaaggggcacacagaaatctgttacacggtgaaatattctttagtcaaattcctttggagtacatttatttttaccatcatttcttttcttgcagcagtctagctggtgtttaaatgattatctctaaggtagcttgccccagtcacactgtgctctaagttgttcctctctccttccatttgagcagggaaacactagatgggagaaagcgcggaaagggctagaagggacgtggtagaacacaccacgacgatattgagctcactcagaatcaaacttccacatctccatttggacgcccaccacaccccatcaataagacctgtccatatcacaacacacttgaaacccactcccctcccatcttctccatct

SEQ ID NO: 51823 - DNA, 576 bp, Homo sapiens
ttgggttaaaatttcaaaaactacttaagcgcaggcatggtatagtctaaccataacgttagattttataaaggttgtgactaggagtattcaagcctgatttctttccttgactggctttcattgcaaaataaccacttcattacgaaaaacattttgtttcattatgcctagcaatgcatccttaatgatacattgcaaaaggggcacacagaaatctgttacacggtgaaatattctttagtcaaattcctttggagtacatttatttttaccatcatttcttttcttgcagcagtctagctggtgtttaaatgattatctctaaggtagcttgccccagtcacactgtgctctaagttgttcctctctccttccatttgagcagggaaacactagatgggagaaagcgcggaaagggctagaagggaygtggtagaacacaccacgacgatattgagctcactcagaatcaaacttccacatctccatttggacgcccaccacaccccatcaataagacctgtccatatcacaacacacttgaaacccactcccctcccatcttctccatct

SEQ ID NO: 51824 - DNA, 547 bp, Homo sapiens
tcattcccttctgacaaagagtgagaaatcaatacagtggagtaaagggaagcctctgaaaataccttttcctctaagataaatgcctcccagaaagccacagtgtacatgcacacgtgtacagggccaagtaacatcctctttaatgccctttatcaccctaatgaagcattccctaattgatctctcacccccaatggctaatttgacaagtgaactctcagcctgtcaatagtcctcgtgttcgagaagcctggttctaggatctgcagaagtattccctggctgtggagatgggaaggcacatctgtgmccatttcctgccctgtctgggctgttttttccccttggtggagagcatcttctacaacattactgatgggcaccaggcagtatcactaaaaatactcactaagagattgaaaggtaatcatacatgagcaaacgatggtgcaaaccaccaggtggctcaagtcgctctgtcagaaccattgaggtacctgatgatatacataaaaagctatctagaggacttctacttatggaa

SEQ ID NO: 51825 - DNA, 520 bp, Homo sapiens
catcactgttggcttcaattaaaagagagcatattaattaagatagagagaaagtaggttttataaccaacttttcrtctccctccactcccataataattcaggaaaaattgagtaacttattaaaatctctgaatatgctttatcacctatgagggggcttcaatgaccagaggcgtttgttccttgaatgtttcacatttcaaaatttatgtctgttcgatggcaatttggggaaaatttgtcttttattttttattaaaaaaatttcttttgagacaaggtctcaatctgttgcccaggctggagtgtagtggtgtaatcatgactcactgcagccttaacctcctgggctcaagggattctcttgcctcagcctcctgaataactgggactacaggcatgtaccaccatgcccagctaattttttaaatttactttttttttttgtacagatgggggtctcactttgttgtccacgctggtctcaaactcgtggcctcaagcaaccctcctacct

SEQ ID NO: 51826 - DNA, 572 bp, Homo sapiens
gctctgcagggtacgtggacagaggaacaaagtgactcctctctattcttcactccccagtatatgtgccctatatagtcacagagggacctattagtaaaaagacacattgtctctgcttgaagtacatactggtgaccaataactgggataccaaaaacttgtgaagttatttatctattttagacwaattctctgtttctattatagctagtgttccagttttcaggacaattctataatattatttctcagttagtcatttgtgacattattctctacagaggtatgcagactgttcatcacacctgaagatacctctcacatgtggcatttgtgtgtggggtgtaccccaaggtacaatttaagatcatattcccatgtgcctcagcaacagaatcataggattcaaactctagatcaatttcctacaatttctgtaggatatacagctacatatgagacaataccatccaaatcaatcaatcagaacaaaaagacatggctgctgaagactaatcttctattttgaaagatattcagggattctataataattgtttactatactg

SEQ ID NO: 51827 - DNA, 589 bp, Homo sapiens
taccacctgtctttattaccatacaccatgtcttttcatacttttttcctggcatatctaggcatttttcatttttcatataaattttaaaatcaatctctcaagttctgaaaataaaatgycatattggaactttggagatttcatttgttttgaaaaaaactagcatctagacagcattatgcttccaattcatgatgacatcatatttctatatttttcaatttctctcacttgaatattttccttagtagtaatgagcatatttttgacttattcctagatattcaaaatgtttagatctataaaaatgacatatatatgtacaaatagatgatgtttatttaatttttaatttttttatatttagacataaagttgattttttgtattttgagtttatatcagcaaccataccatgttattatattaattccactagtttagattcttttggattttctatacatgatatcatatgagctatgaatatcatttgtgaataatttttcattcccccaaaatcaaaattttataacatctacctattatctatctatctatccatctatccacccatctgtctatc

SEQ ID NO: 51828 - DNA, 589 bp, Homo sapiens
taccacctgtctttattaccatacaccatgtcttttcatacttttttcctggcatatctaggcatttttcatttttcatataaattttaaaatcaatctctcaagttctgaaaataaaatgtcatattggaactttggagatttcatttgttttgaaaaaaactagcatctagacagcattatgcttccaattcatgatgacatcatatttctatatttttcaatttctctcacttgaatattttccttagtagtaatgagcatatttttgacttattcctagatattcaaaatgtttagatctataaaaatgacatatatatgtacaaatagatgatgtttatttaatttttaattkttttatatttagacataaagttgattttttgtattttgagtttatatcagcaaccataccatgttattatattaattccactagtttagattcttttggattttctatacatgatatcatatgagctatgaatatcatttgtgaataatttttcattcccccaaaatcaaaattttataacatctacctattatctatctatctatccatctatccacccatctgtctatc

SEQ ID NO: 51829 - DNA, 589 bp, Homo sapiens
taccacctgtctttattaccatacaccatgtcttttcatacttttttcctggcatatctaggcatttttcatttttcatataaattttaaaatcaatctctcaagttctgaaaataaaatgtcatattggaactttggagatttcatttgttttgaaaaaaactagcatctagacagcattatgcttccaattcatgatgacatcatatttctatatttttcaatttctctcacttgaatattttccttagtagtaatgagcatatttttgacttattcctagatattcaaaatgtttagatctataaaaatgacatatatatgtacaaatagatgatgtttatttaatttttaatttttttatatttagacataaagttgattttttgtattttgagtttrtatcagcaaccataccatgttattatattaattccactagtttagattcttttggattttctatacatgatatcatatgagctatgaatatcatttgtgaataatttttcattcccccaaaatcaaaattttataacatctacctattatctatctatctatccatctatccacccatctgtctatc

SEQ ID NO: 51830 - DNA, 1844 bp, Homo sapiens
tgttgcccaggctggtcttgaacttcagagctcaaggatctgcctgccttggtctcccaaagtgctaggattacaggcatgagtcaccgcacccagcccaataacaaaggctttaggagctaatgggttgatttgagtcctggatcctttcctctttagctgtgtcacctggggaaaattttgctctctaagatgtatttttcttctgtgaaatggggattatattaactcccaaagttattgtaagaatttcaaataatatataaaaatataatctcatattacacataggaagtaggtatgcgataaataacagctactaagatgcatttccttttacattactcctttagaaatttagaaaacatacctgcacttaaggtttaaattgctctggtttgggattgaaggaaatcaaaatgttttactccaaaatatatttctttgacataatctgaagtggccctgcaaagctgtcttttgttggggaaattcgcatctgtagatctgtagagaatctgtattaatgcaaccagcacttcctttgcccagatctaggaaagattaactgagagtctgacacctttaaaggactgaaaggaaacatttaccagctattctctctgagactcctacctgccagaggcttcatctatatgataaggccccctttgctagccaagcctcttcctttctccctcccataacgcatcctgcaaccaaaacctgtttttgcccatgctctgagcccatattctctccacaacctcaagatggtatataagcttctgtacctcactggggggttgggtcttcgttccgagggctcctgtgtatacacgttaagaacatctgtatgccttttctcccattaatcaatctgcctcatgtcagtggtttttcagcgaacctttagggggaccaagggctttggtcccctcaggatattgccaacatttaaattgttctggtttggaattaagactatgtgaatggaagcatttgctgtgccaaagtcagcaaaatcagtgagttacaaaattgtgacttggcacttggagagctggctgctgcacatcccagtaaaatctaaccgaggtctgcaaaagcctgtcttggagctccccttccaagtgtccaaatccaaaaaggcttgaaccatcagtctccagcagaagctgaattatttttcttttgcctcactaatcactatcttaacctatttgtggagaagggtaattttatgttactttctgtgtttttcttaattcttcaagtgttttctaattttttgggatatatgacttttaaaaacaactccagggaatattagttacacagtttgggtaagtgtcaagaaactttattcttaaaaacacagagattatataatttattatcacctccagtcactctgattagtgtattgttggggctcagaaaaatggtaccccaaaacatggcacttggacgtgccgggtactttgaactaaagaggcagcctcagaaccaaggtgtctctgaccttytcccattcccctgtctcttgcccctctgcctcccctgaagcacaggtagggactttctctgaagttcccagaagaaatgcaatctccttagaaaagattaactcccaggaaggaacactagagttgacaccacaccaactcagttaaagatcctgaaacttttctgcaatttagcagtgtgcccagacttgctggtttaggattgagaatgaaatacggattataacacatggtaaagatcagccttcccaatatggcttttgttatatatagatatctatataaatcaacttcttacatattttaagttcagcc

SEQ ID NO: 51831 - DNA, 1844 bp, Homo sapiens
tgttgcccaggctggtcttgaacttcagagctcaaggatctgcctgccttggtctcccaaagtgctaggattacaggcatgagtcaccgcacccagcccaataacaaaggctttaggagctaatgggttgatttgagtcctggatcctttcctctttagctgtgtcacctggggaaaattttgctctctaagatgtatttttcttctgtgaaatggggattatattaactcccaaagttattgtaagaatttcaaataatatataaaaatataatctcatattacacataggaagtaggtatgcgataaataacagctactaagatgcatttccttttacattactcctttagaaatttagaaaacatacctgcacttaaggtttaaattgctctggtttgggattgaaggaaatcaaaatgttttactccaaaatatatttctttgacataatctgaagtggccctgcaaagctgtcttttgttggggaaattcgcatctgtagatctgtagagaatctgtattaatgcaaccagcacttcctttgcccagatctaggaaagattaactgagagtctgacacctttaaaggactgaaaggaaacatttaccagctattctctctgagactcctacctgccagaggcttcatctatatgataaggccccctttgctagccaagcctcttcctttctccctcccataacgcatcctgcaaccaaaacctgtttttgcccatgctctgagcccatattctctccacaacctcaagatggtatataagcttctgtacctcactggggggttgggtcttcgttccgagggctcctgtgtatacacgttaagaacatctgtatgccttttctcccattaatcaatctgcctcatgtcagtggtttttcagcgaacctttagggggaccaagggctttggtcccctcaggatattgccaacatttaaattgttctggtttggaattaagactatgtgaatggaagcatttgctgtgccaaagtcagcaaaatcagtgagttacaaaattgtgacttggcacttggagagctggctgctgcacatcccagtaaaatctaaccgaggtctgcaaaagcctgtcttggagctccccttccaagtgtccaaatccaaaaaggcttgaaccatcagtctccagcagaagctgaattatttttcttttgcctcactaatcactatcttaacctatttgtggagaagggtaattttatgttactttctgtgtttttcttaattcttcaagtgttttctaattttttgggatatatgacttttaaaaacaactccagggaatattagttacacagtttgggtaagtgtcaagaaactttattcttaaaaacacagagattatataatttattatcacctccagtcactctgattagtgtattgttggggctcagaaaaatggtaccccaaaacatggcacttggacgtgccgggtactttgaactaaagaggcagcctcagaaccaaggtgtctctgaccttttcccattcccctgtctcttgcccctctgcctcccctgaagcacaggtagggactttctctgaagttcccagaagaaatgcaatctccttagaaaagattaactcccaggaaggaacactagagttgacaccacaccaactcagttaaagatcctgaaacttttctgcaatttagcagtgtgcccagacttgctggtttaggattgagaatgaaatacggattataacacatggtaaagatcagccttcccaatatggcttttgttatayatagatatctatataaatcaacttcttacatattttaagttcagcc

SEQ ID NO: 51832 - DNA, 1491 bp, Homo sapiens
gatccttccgcctcggcctcccaaagtgctgggattacaggtgtgagctacygcgcccggccattttgcacatttttgtgctttatgttggtgattttgatttttgaaatggccccgtgatgtagtgcagtctagtgttcctgggtgcaagaaggttatgacgtgcagagaaaatccccgtgctagagaagcacaagctaaggcatgagttaatgtgctgttggccacgagttcaatgagaatgaatcaatagtatatgttaaatagagtcttttaagcacaaacagacataaaataggtttatgtattgattggttgacaaaaatgtcatgcccaaagactggcaggaacctaaccctgtgtttcccctgtgagcagtggttcagcattgactaattcactgttcttcatgacttgaaagagcataactgcagtatatgatgacgagtaaccgtaattcaaagtagttgatatgtgctcagagatgctgctgagaaagtctgggaactactgtttctctggaactttcctttgtgtggtagagggcggagggcctatgagttcctctctgggagtcccttgtgctgctgactgtgtcccttccttccatgtgggtaggttggagccataatcatcacccccactcgagagctggccattcaaatagacgaggtcctgtcgcatttcacgaagcacttccccgagttcaggtgaattggatgcagtgtccctgttagtcatgggctgttttgtcgaacttaatcaaaggctgttttcttgttgtagccagattctttggatcggaggcaggaatcctggagaagatgttgagaggtttaagcaacaagggtgagtttgctcgtgtctgcttgtttctttgcttgcttttggcattgaacctaagaatcgatgtgtgatctcagcctaactgtgggtccccctttcagcagcctcctccccctgcaaaaaggtgttttctccaggccagcttcccattgtgctttgctggctccttcccataaggccctgatgagaacttcacaaactcaggttcttacagaggtcaagagaacgacgtgaagataaatgagtggtcaggggctgggggatggtgaggaactggccagcagctgccttgaatactcagctccagctggtagttgcctgggaggactcggctcagtagtggcaggttttgaattttttaaaaagaagatggaattccagatttgtgtgtgtaatctcctgattttttaactgttggcgtgtaatccacatttgaaaaacatatcttgtaggtgagccagtctgagggagccacatctggccctgagtctgccagtttgtgatctttacataggattctctaattctgtcaacatttccattttacaagtgagttacctgggacctacaatggttgagtaacttgcgtaagtcagaggttggtaagctttttttttataaaggagcagatggtaaatgttttcg

SEQ ID NO: 51833 - DNA, 1491 bp, Homo sapiens
gatccttccgcctcggcctcccaaagtgctgggattacaggtgtgagctaccgcgcccggccattttgcacatttttgtgctttatgttggtgattttgrtttttgaaatggccccgtgatgtagtgcagtctagtgttcctgggtgcaagaaggttatgacgtgcagagaaaatccccgtgctagagaagcacaagctaaggcatgagttaatgtgctgttggccacgagttcaatgagaatgaatcaatagtatatgttaaatagagtcttttaagcacaaacagacataaaataggtttatgtattgattggttgacaaaaatgtcatgcccaaagactggcaggaacctaaccctgtgtttcccctgtgagcagtggttcagcattgactaattcactgttcttcatgacttgaaagagcataactgcagtatatgatgacgagtaaccgtaattcaaagtagttgatatgtgctcagagatgctgctgagaaagtctgggaactactgtttctctggaactttcctttgtgtggtagagggcggagggcctatgagttcctctctgggagtcccttgtgctgctgactgtgtcccttccttccatgtgggtaggttggagccataatcatcacccccactcgagagctggccattcaaatagacgaggtcctgtcgcatttcacgaagcacttccccgagttcaggtgaattggatgcagtgtccctgttagtcatgggctgttttgtcgaacttaatcaaaggctgttttcttgttgtagccagattctttggatcggaggcaggaatcctggagaagatgttgagaggtttaagcaacaagggtgagtttgctcgtgtctgcttgtttctttgcttgcttttggcattgaacctaagaatcgatgtgtgatctcagcctaactgtgggtccccctttcagcagcctcctccccctgcaaaaaggtgttttctccaggccagcttcccattgtgctttgctggctccttcccataaggccctgatgagaacttcacaaactcaggttcttacagaggtcaagagaacgacgtgaagataaatgagtggtcaggggctgggggatggtgaggaactggccagcagctgccttgaatactcagctccagctggtagttgcctgggaggactcggctcagtagtggcaggttttgaattttttaaaaagaagatggaattccagatttgtgtgtgtaatctcctgattttttaactgttggcgtgtaatccacatttgaaaaacatatcttgtaggtgagccagtctgagggagccacatctggccctgagtctgccagtttgtgatctttacataggattctctaattctgtcaacatttccattttacaagtgagttacctgggacctacaatggttgagtaacttgcgtaagtcagaggttggtaagctttttttttataaaggagcagatggtaaatgttttcg

SEQ ID NO: 51834 - DNA, 501 bp, Homo sapiens
ggcttgtgttcaatcccttcacctctgcctccatcttcactttaccttctcctccttttctgtgtcgggtcccttcgcctctctcttataaagatgcttgtgatggcattagggcccatcaagataatccagggtagtctcatctcagaaatcttaatcacatcttcaaagaccctttctttcaaataaaatagttcacaaattccaggattagaacctgatatctttgggtgtccattatgcaacttactacagcaaccttcagtatcaggctttcttcagcctccagygctgagccgctgcagaggacaaataagacatgagaaggcaaggatcgtgtggatatccagctgtgccggcctgccttgttctccctcattaccagccccagcgcatggcactccactcaactgtgttctggagaagtgtgtgcagttcactattattccagattcagaggcttttctcagttgtagtgagtataagataagaagatatgtc

SEQ ID NO: 51835 - DNA, 536 bp, Homo sapiens
caatatccttgcaagggatgtgtggccatcctgcattatatagagagggcaatagaggatcatagagtccatataacttgatggatttaagcagctaaraagtgatgatgttggggctgaacccagacatttccgatcccaaagtttatgttctttccaccccgaactccccaccactcacacactaatgatgtcttgtcttaggacaggttgtctagaagtagaacctacaaaaggattcttgtacataggatatatcttgaggaagtgtaatcaggaggaggggagtaagaaagaaacctactaaagaagacctggagaaacaaatgattcctgaaaatctagttccactttacatttgataggaaatgtgaccaagttgctgttccttgtctgttgtccatagaggcctcttttcctcttcctaggatacagatcccaatataattccaaatctccctaacctgatatggttccccatggcatagtttaaaaatcctcaagccagtgttttttcaaaccagggaagtgttctt

SEQ ID NO: 51836 - DNA, 677 bp, Homo sapiens
atttggaattatattgggatcagtgtcctaggaagaggaaaagaggcctctatggataataggcaaggaacagccaacttggtcacatttcctatcaaatgtaaagtggaactagattttcaggaatcatttgtttcttcaggtcttctttagcaggtctctttctgctgaaggcccacagggaagttcccttcttctgccagaaatagtgggtggaaaagggtgtttcgttgtacctgaaattaagcccagaattaatttactcagtccaaagagtccaggctcctgcattatcccaccccactcccgatccttcactctcaccaggtagtggggaagacaaactgtctccccctgggtactaaaactgtctccaagtagctgcatcccttaactccatgggcsacttcctcctcctctatccctcacacacacttctctatattgacccagcggtccatagaactgtacttttggcccaggagcacttactgcaaggttctggctcatttcccctgttggtttacctgaccggcttgcccaggttgacctctgcaaccaggtaagccctgatccaccctggtggatggttcccatgccctatcctagttccccttcccaaattctaaaagctgatgcaattgtttcttgatatttgaggtaacttagttctttaa

SEQ ID NO: 51837 - DNA, 586 bp, Homo sapiens
ggggcccacatcttgcaaggaccttcttgctgtgtcatcccatagtggaaggtggaaggacaagacagcacacatgagcaagagatcaaactcacagactgaagccctttcataatcagcattaatccattayggggtggagccatcatgacctaaacacctcctagtaggccctgccccccaacgctgttgcattagggattaagttcccaacacatgctttttgttaaaaagaaatgtgttaaataatgcattggcacatattcactatagcatagggcatgattgctaagtcctgaaatatatggatatagcaaagagagaatgtttcacatcttatctctgtgtcaagccaaaattttcttctaggggtaggacaggtgaactgtcaccaggcagctctcctctcttctgtggcgcaatctgaggtcccaagctggcttgccacctctgccactgccccacagggagcacagcagcccggcatttcccctacactgctcccttcccctgggtggtctcccagtccacataagctaataggcatcctcccttgtttttctgaaaacctcctctgccacctctc

SEQ ID NO: 51838 - DNA, 618 bp, Homo sapiens
tggtgccactgcactctggcctgggccacagagcgagactccatctcaaaagaaaaaaaaagaaaagaaaaagattacaacaaaaatggatcaccattcaacaatttaagaagtaaaagaaaaaagtccaattaaatgaagcattatgaagtttcaagggaatataaaactagacacaagtctggttcatttccattttcctatcacctaaaaaactctagccaacatgttcataccaccatggactccacgatagcayagaattcagtatgagtctatttcaaaccccagcaatatttgaaaatactcaaggtgacacaatattaagtaaaataggcttccattcataagactacaagcaagaatattacacagatggtctagttcacacatgaagacactgagaaccatgtgtgcctacatgcaactggtttcagtttttcagtgcagggacttctctaaagatgaaaacacatcgatatcttatcctaagactaaataaaaatggaactactttttggtcatgtgaaactaaagcttttaaagactgcactagactttgaaggggaaaaaaaatcaagtttataaaaatattacctcctagctatataatcctga

SEQ ID NO: 51839 - DNA, 539 bp, Homo sapiens
ctgtgaccctggattggtcatttacccgcactcagcctcactttgttcatttcccagtactttgcctgagacgtctctggcttaacacttaaagtcctgtgtcctgggaaatgcctcagtccggacaaacttggggtggttcctcactctatgyataaattgacagcaattatacctacttcttagaattcctgtgaggataaactgttaggtaaaatgcttagcacattgcttggtagcatgtcggtgtccaactaatggcagctattattaccagtagatttggcattagggaaacttttctgttgtttaatgggattagttcatgaggtgcctggcacacagtaggcacacgataaatattaataaaataaatgttcatctgagccacagatttcattacccaaattagaaaacttctcctttcttaattatgagggcgtgccttcaaactgtttaacgacatcttgttttgcagcctgcttaataaatctttgctgccaatggcaagttccccatgtcggcaaatcatttaaata

SEQ ID NO: 51840 - DNA, 1332 bp, Homo sapiens
gatatacttctaatcatgttttagttgacctgaatataaggaatacatttgagtattttcagaaagtttaaaaaactctagctattaatatttctgaaaatataaacctgcaaatggccatttatgttattttagagagaaagtgggtagaagtttctcttccttgttgtagttaagtcagtcctaaaaagacgaataaggactttggaaccattctttacattttgaataaaacatatgtctatcccccttcctctagatatagcttatgcggtagttgccatttagcaattaatttaaagctatgtcaggaattgtcaccaacattagtcctgcttattatcctcgagagtcaacaaacagtaatacaactggcctcagaatttttttcagttgaaccacaggccactctgcaacctgtctttctatgaagcagttgtaatttaaccccaagattctgaatgtccagacctcaaaaggagaatagtacttattacaccttctttctcctttgcaatttttttcgagtgtgtgtttgtgcgtgtgagtttgtcactgagtggcttttgctacctaatctgaccttttaaactttctcatatacctttaaaatgattcttagggggagtttagtttgccatttaaaggaaattttagttctagtttcagcaaacataggtttgaattgtctgcaaatcacaatgagaaatccaggcttcataacctccaaccccacttcaaacattgatttaaaagaatgaacctaataatattaatgaatcccagggaccaaaagcatgccagtcagaatgggcatcctggggaacaggttaaccagtattctaacctctctgcccttgaagtttaagtacatttaaaaaaaagggggggtcgggggggcggatatcccgctgctgccttgggacttgaatccgtgagatgtaatgagcctgtgtttgggccaaaataaagggttaaaccctcttacttagcagttctttcaatggcacagaaagtgaacttgagataaaataacaaggaccagcagaatgraggacagctaagttacacctgatcatgaggccatcagtttttgcctgagtcctatagagttggcataatgagtatctatctttgctttgtagttttcagagtttgggctgcttagtaatctttcctgagtttgattagggaaaagatgccatgatatttgatttaataattattgtggagtcagatgaatttcattctgtatccagctaccatattaatctccaaaatgggttatatttttctttccgggattgggctaaaaatctgtccttgtcttta

SEQ ID NO: 51841 - DNA, 1332 bp, Homo sapiens
gatatacttctaatcatgttttagttgacctgaatataaggaatacatttgagtattttcagaaagtttaaaaaactctagctattaatatttctgaaaatataaacctgcaaatggccatttatgttattttagagagaaagtgggtagaagtttctcttccttgttgtagttaagtcagtcctaaaaagacgaataaggactttggaaccattctttacattttgaataaaacatatgtctatcccccttcctctagatatagcttatgcggtagttgccatttagcaattaatttaaagctatgtcaggaattgtcaccaacattagtcctgcttattatcctcgagagtcaacaaacagtaatacaactggcctcagaatttttttcagttgaaccacaggccactctgcaacctgtctttctatgaagcagttgtaatttaaccccaagattctgaatgtccagacctcaaaaggagaatagtacttattacaccttctttctcctttgcaatttttttcgagtgtgtgtttgtgcgtgtgagtttgtcactgagtggcttttgctacctaatctgaccttttaaactttctcatatacctttaaaatgattcttagggggagtttagtttgccatttaaaggaaattttagttctagtttcagcaaacataggtttgaattgtctgcaaatcacaatgagaaatccaggcttcataacctccaaccccacttcaaacattgatttaaaagaatgaacctaataatattaatgaatcccagggaccaaaagcatgccagtcagaatgggcatcctggggaacaggttaaccagtattctaacctctctgcccttgaagtttaagtacatttaaaaaaaagggggggtcgggggggcggatatcccgctgctgccttgggacttgaatccgtgagatgtaatgagcctgtgtttgggccaaaataaagggttaaaccctcttacttagcagttctttcaatggcacagaaagtgaacttgagataaaataacaaggaccagcagaatgaaggacagctaagttacacctgatcatgaggccatcagtttttgcytgagtcctatagagttggcataatgagtatctatctttgctttgtagttttcagagtttgggctgcttagtaatctttcctgagtttgattagggaaaagatgccatgatatttgatttaataattattgtggagtcagatgaatttcattctgtatccagctaccatattaatctccaaaatgggttatatttttctttccgggattgggctaaaaatctgtccttgtcttta

SEQ ID NO: 51842 - DNA, 1332 bp, Homo sapiens
gatatacttctaatcatgttttagttgacctgaatataaggaatacatttgagtattttcagaaagtttaaaaaactctagctattaatatttctgaaaatataaacctgcaaatggccatttatgttattttagagagaaagtgggtagaagtttctcttccttgttgtagttaagtcagtcctaaaaagacgaataaggactttggaaccattctttacattttgaataaaacatatgtctatcccccttcctctagatatagcttatgcggtagttgccatttagcaattaatttaaagctatgtcaggaattgtcaccaacattagtcctgcttattatcctcgagagtcaacaaacagtaatacaactggcctcagaatttttttcagttgaaccacaggccactctgcaacctgtctttctatgaagcagttgtaatttaaccccaagattctgaatgtccagacctcaaaaggagaatagtacttattacaccttctttctcctttgcaatttttttcgagtgtgtgtttgtgcgtgtgagtttgtcactgagtggcttttgctacctaatctgaccttttaaactttctcatatacctttaaaatgattcttagggggagtttagtttgccatttaaaggaaattttagttctagtttcagcaaacataggtttgaattgtctgcaaatcacaatgagaaatccaggcttcataacctccaaccccacttcaaacattgatttaaaagaatgaacctaataatattaatgaatcccagggaccaaaagcatgccagtcagaatgggcatcctggggaacaggttaaccagtattctaacctctctgcccttgaagtttaagtacatttaaaaaaaagggggggtcgggggggcggatatcccgctgctgccttgggacttgaatccgtgagatgtaatgagcctgtgtttgggccaaaataaagggttaaaccctcttacttagcagttctttcaatggcacagaaagtgaacttgagataaaataacaaggaccagcagaatgaaggacagctaagttacacctgatcatgaggccatcagtttttgcctgagtcctatagagttggcataatgagtatctatctttgctttgtagttttcagagtttgggctgcttagtaatctttcctgagtttgattagggaaargatgccatgatatttgatttaataattattgtggagtcagatgaatttcattctgtatccagctaccatattaatctccaaaatgggttatatttttctttccgggattgggctaaaaatctgtccttgtcttta

SEQ ID NO: 51843 - DNA, 544 bp, Homo sapiens
tcgcctacgcgcatactctcgccctgtatcacggcggtgacgacgcgctgctctctgacttctgtgccacactgctcggcgtttccggagccctgggtgcccagcaagtcttcgcctctgcggaagaagccctgcaggcggcagcccacgtgctggaagcaggcgagcacccgccgggcccctgggcacacgaggggctatgcacgaggtcgccgcatcctgctggcgagggcccgaccaaccagaaaggctacacgctggcagcactgggggacctggcacagaccctggccgtgcccggaaacaggccgtggctagagaagagcgagatcatctttaccgggcccggaaaaagtgccagttcctcctggcctggaccaacgaaaatgaggcggccctcacacccctggcyctagactgcgccagggctcaccaagcccatgctgtggtagccgaggaggtggccgccctcactggggagctggagcggctttggggaggccccgtgccacctgccccaagaactctcattgaggagctccct

SEQ ID NO: 51844 - DNA, 503 bp, Homo sapiens
ttctactctcctcctacttaataagtcaaaagggcaygttatagcatcttggtatatacaacaaaagcaaagatttaccttctctaggttaagttaccttctctaggcaagagaaaaaattctgcggtgttacattagaaattttgcgggtaagaaagtgagatattataatgaatagctcccttttggtaccaaaacccaattcagcactcttggttaccagaactcaataaaaattaactttagaagcacaagtaatagaaaaaagtggagtggggacaagaacagctccaagaattagaactggggactttactgggataaagtctctctcttcccatctttcctgtctgcttctttctacttattggtttcatatactcttatattaagtcaagctttttccaggattcagcaaacaaagagagaacagagccatgggatcagtttcagtttagtgagtgaaaatcagtttccctgttagatagtttaagaaccttcct

SEQ ID NO: 51845 - DNA, 613 bp, Homo sapiens
ttgcctgtcttcagtcttcaacaagtactggttgtacttttctaatgaggaggcctcctctttacgtggagcggacgtgctagtgggcactaagagaatagcctctatcagagaggagaatgcaattcaatttacctgaaattcctttcaggtatctggaaacaaatggccaattgcccgcatgctcacctgaatgatcaaagaccaggagaaaaccgtacccgtggaccaggaggaagccagcgaagaacaaggcagcccaggatgcgggaccagtgccattccttcccaccgcatgagagtgccagagggggtgaagggtggagtggccctttcagcacaccacgtggtccatattttatcatctgtcacaggcagtgccacctgcattgctttcatcgaaggcrccagaccaataccatgaccacacactgtcactctggagtgccaccccaaattgaccccagagccagcccctcaatatgccaacattcaactcaaatattccaaaccgggcataatcaaaattgttccttttttggttatggctttgtgacagtcagactctacattttcacagaatcaggagaaaaggagagcacaggttacatct

SEQ ID NO: 51846 - DNA, 1340 bp, Homo sapiens
tgcatttccaccctggtacatgaaacaggacagccaggtatttacacatacacattacatgtatttatgcacacacagatacaygcatatttgtgcatacacatataaacacacatattagtatgaaaaacatacacatacacattcatatgtaaacagctagtacatctaagtatagacacttatgtatatggatacacattttatcagttgaaaatgaaagcaaggaaaatctggaattatttaaaggaagagattttgataagtgttgtgtggggttataagaattgaggagttgtaaaggaaaagtctacaatgaataactattataaaatattcttaactaaaaataaatttcgttgtgaaatgcccttaggcaagtgggaaaaattctttgcttaagaaatttttaaaagggttttctaaagcactggggggtggggttgggggtggggggctctgtagagagtgacccagaaagggacagattaggtaatttaatttcttttctaatgtcagcaatcctaacttttaagcacagtgtcatccactttctgctgttttctattcaacttaaaatgacagtccagagctgaacagcatttgttcagtacattttatttgttcttttctgtctttgattccaatccctatgtgttccttgatgccagtgtctgcagtaacaccttcccgtagaaaggctggctatgagttggcttttttaggcattgctcaattcccacatttaatgggcatgaaagccaccttgtggttttgcagcaagtgccctaaggcagttgggaagaatggacacaggaatgaatctgttttcagtgcacctcatctttccactgggcttaaacgattctggtatttaactgtgcatttaatgacatgattagatggtttcggttgataaagccactcacctgattcaacagtcagagagagagtaatgactcttcagcattggcctaatcccagctggaagccaggccagccactgggcctttaatcttgccactggcacaaggggctgggcataagttaggacccacccttgtagatcatggcatctgtagcactcggtatcgccatgcttggtgattaaatgttttgaagattgacttaactttttttttttccaggaaaatgacattattgttttgtagaaatgatacaaaaatttacattatatataaaagcacaaagaagaaacgagaaatttatcccaaatttcacaatacattatttctcagagttatcatttggtagatgttagtccagacgtgagagaggaataataggattttacaaaaatggaattagactacattatt

SEQ ID NO: 51847 - DNA, 1340 bp, Homo sapiens
tgcatttccaccctggtacatgaaacaggacagccaggtatttacacatacacattacatgtatttatgcacacacagatacatgcatatttgtgcatacacatataaacacacatattagtatgaaaaacatacacatacacattcatatgtaaacagctagtacatctaagtatagacacttatgtatatggatacacattttatyagttgaaaatgaaagcaaggaaaatctggaattatttaaaggaagagattttgataagtgttgtgtggggttataagaattgaggagttgtaaaggaaaagtctacaatgaataactattataaaatattcttaactaaaaataaatttcgttgtgaaatgcccttaggcaagtgggaaaaattctttgcttaagaaatttttaaaagggttttctaaagcactggggggtggggttgggggtggggggctctgtagagagtgacccagaaagggacagattaggtaatttaatttcttttctaatgtcagcaatcctaacttttaagcacagtgtcatccactttctgctgttttctattcaacttaaaatgacagtccagagctgaacagcatttgttcagtacattttatttgttcttttctgtctttgattccaatccctatgtgttccttgatgccagtgtctgcagtaacaccttcccgtagaaaggctggctatgagttggcttttttaggcattgctcaattcccacatttaatgggcatgaaagccaccttgtggttttgcagcaagtgccctaaggcagttgggaagaatggacacaggaatgaatctgttttcagtgcacctcatctttccactgggcttaaacgattctggtatttaactgtgcatttaatgacatgattagatggtttcggttgataaagccactcacctgattcaacagtcagagagagagtaatgactcttcagcattggcctaatcccagctggaagccaggccagccactgggcctttaatcttgccactggcacaaggggctgggcataagttaggacccacccttgtagatcatggcatctgtagcactcggtatcgccatgcttggtgattaaatgttttgaagattgacttaactttttttttttccaggaaaatgacattattgttttgtagaaatgatacaaaaatttacattatatataaaagcacaaagaagaaacgagaaatttatcccaaatttcacaatacattatttctcagagttatcatttggtagatgttagtccagacgtgagagaggaataataggattttacaaaaatggaattagactacattatt

SEQ ID NO: 51848 - DNA, 558 bp, Homo sapiens
tgccccacgtgacatacaattatcagctcaaaacagaaaacaaagatggatgctaaggaagcatttaacatacaagactcttgccagaaaaggagcggctatggggttgtgacaggcagaattctaagttggcccccaggatctccacctcttagagcacgattatcctcccccagttacttagtcaaacacaaatccaggtgttgctgtgaagggatttagcacatgtaggtaaggtcccaaatcagctgactttcagatagggagattatcctcagcrgtcgtgacttaaccagactatactcttcctggtgaaaagattccaagcatagagggcctatgggaggggccacatggcaaggaacagcggctccaaagtggctgaaagcagtccctgaccgagggccaccaaaaaaactgagggactctgtcattgaactgcaaggaaaaaaattctgccaatgacctggggggcccagtagtggatctttccctcaccaagactcccgaaaggaatgcagctcggctaaccttgatctcagcctcttaagatcctaa

SEQ ID NO: 51849 - DNA, 2043 bp, Homo sapiens
tataaagtaaaaccacatttctgttatatacagctttttttccactcaataatacattgtaaaattttttccacatcattcatgttatttggactgtccatagaaatagctgattcaatatcctgagtaacataattactccagttagtaaactacatcttaatattgctttgcaaaaacctgtgcaacccatcacttattagtggtttgtagaattatttttctcacattattaatgctgcaatgattgtaactgtagcaaaatctttgtgcatatccgtaattactttcttgaactatttctgggagtacaattgttgagctgatgtgtttgtattaaagctttgatacacaatgcatattgtcttctgcaggtaactaattcctgtgtccacaatatagtttgaaaaatgaggttgagatggttaattgtccattagaattctccgtactttttttgtttgttttggtttggtttgggggtttttgttttgttttatttgtttgggtcttcaggtccaaaggcctagtgatcccttgtacctgaaatggctttattgtccttatatgtcactgccacaatttccctcattactattatatgcattttatgatttgactttgcaattactcccataaaaaggaggagtcaatttctcctccttttaatatgtgctggccctgtaacttgctttaccaacagaataatagagtaatatgatatgcttcctaagtccaggactcaagaggctgtctagcttctctcttgtcctcttagaaatcagatgctatattaaaaaagtccatagtagcctgctggagatagaatgtggatggtattgacataccctggctgacagtgtcagccagttgccagcaatgaaagtcatccaggaccaaccagatgacctgccaaatgacccacaacagcatgaatgagtccagctgacaccgtataaggagcagagatgagccatgccctctgagcacttcctgtgttgccaatcactggtatcctgagcaagtgaatgattgttgttttatatcactaagttttagggtagtaaaacactcagaaataaataaaaatagtaattaatgcagttgatacattttaaaattcatttacagctccatctttttcttatgcctctttccaaacaaatcagttgagataagagtattaatttattttaatggaggtgtttcactgttgctgagaaaaaagaatcctggcttgctgaatactgtcaccaccaattaaatatactgctactgcagagtagcccacttccttgtatcataaattggcaaagtttgacttaagtttatgatagataggactttgcatgagtggcactctatgaaaggcagatttattagtcaaaatgtacctcttaataaatgagagtatatatacaccagtgataaaacatttatcttgtggatagatgaagtatgatgtttgatgcacatacttttaaaagtttagttgagtttatctaaagataattgaagcttgcttttatctgctgactgagtacactttttatttcacatgacctagtgttccttggacttaaatggttttagtgtggctttggatgcattgatattttcacaggatgatttatgatacttaccaagatattcatttgtaaaatcaaaatttaaattagagtcaatttggcagctttccaactcgaaacctactacataggttattaagaatagaaaatcattaaacaaaaatagcatctggtggtccgtactgtatctgtaagattagtagaaaaaattttccctaaaacaaataaacagatttgcaaaacaatctatcaggcaactmtgtttatagaaataaaaatgacttaaatcaatgctcttcagtattatagctccttaaaacaacatagtaatatttacctgcatacattttcttgatcatctctatggagctgtggaaggtaataagccaagggactatgtacgaattaaatggaataaggctcagaaactattaatttaaataaaccttgtatt

SEQ ID NO: 51850 - DNA, 673 bp, Homo sapiens
tttcttctaattttcaaagggcagttccttgtttatgatagttactgtcactttatagatttggtttccaaaactactccaaaggagacagtttatttccacttaggaaccatgtctggaagctatgtacctgtcacccagtgaagagtgatgtctgcgttatgaccatactgtctaaaaataatcacgatagtttatatttatrtggtgctttgtgtgtcaggccctgtgctgaaaaccatgtatgcaacagttctaactgcaattgtgcctttttatcaatgaggaaagaagctgagggaacttagtaacttgcctagcatcatataggttttaaatacagagctgggattaagaaccaaataccatcaaatttcaggatctgtgtttttggttttttttttttttttttgagacggagtctcattctgtcccccaggttggagtgcagtgacgcgatctcggctcactgcaacctccacctcccaggttcaagtgattcttctgcctcagcctcctgagtagctgggattacagacatacctcaccatgcccagttaatttttgtgtttttagtagagacagggtttcaccatgttggccaggctggtgtcaaactcctgacctcaggtgatccacgtgcctcggcctcccaaagtgctgggattacagg

SEQ ID NO: 51851 - DNA, 1092 bp, Homo sapiens
gcacaatgctctggtatcatctgatgtcaaacaagagattcaaatgtcacaaaaggtaatgcttcatactttaataagttagtttatttgttagtatttttattatatataggcaactttgtgatgtaccttttaaacactgctttagatacgaatatttccttcttcatttaaaaaagttaagcacctcaaggaaattggtaaaacaaaacaaaccaaaaaaacttggttactttagttatgaagaaaacaagtatcaatgttaaaagtaaatgaaacttaaaagagattagagagaagaaaataaaaaaactagtgagttctacgagttaaggtaagaaatgtcagtaactaaaacatcattactgagtatgcattattttaaagggacaatatcaatatacattctctgaactagaataccttccagttcttactgaatataggtaaaaaatatatgtatacatactgaaatattacttttatagatttttgtttgtttgttttttagaggcagggtttcactatgttgtctagccttgagtgcagtgggtattcacaggtgcaatcattgctcactgcagcctcgaactcctgggctcaagcagttttcccactttagtctcccaagtagttggcactacaggcatgcaccactgcacttggcaagtatttttaaatgaactgtctaaaaacttttttccaggaaatacacacaagtaattttgaataaattgtcctaccagagaaaaagctttaatttttatttattaatttttttttttgagacaagtctcactctgtcgcccaggctggatcgtgcagtggcacaatcttagctcactgcaacctctgtctcctgggttcaagcaattctcctgcctcagcctcccaagtaactgggattacaggcaccagccaccacacctggctaatttttrtatttttagtagagacagggtttcaccacgctggctaggctggtcttgaactcccgacctcaagtgatctgcccgccttggcctcccaaagtgctgggattacaagtgtgagccaccacgcctggccagaaaaacctttaattttatttaa

SEQ ID NO: 51852 - DNA, 1881 bp, Homo sapiens
tataatatgataatcaggtttataaaatgtcagaattatctatgataatctgtttatacagtaaattcttattaaaatatgaattaggtgaagcttattatttgtttacttgagggcttgttgattctttccaaaataggtgccaataaacactgccagaaaagaatcagatatgtttggactgtcctattaaaatccattcatttgtttacatattattcatccactgttctctttcctaatagctgttatttatcagacactatcctaggtgctagggtgacagagatgaataagcccaagtctctgccaaggagaagctcacagatgtcaaattatgctggaaaacaggggccaagatagtgaagagctgtgtttgcattaatagaactttgaaaggttagggataagtaatacaaacttttgactagaggagtttgactgaatatatttgaaggtggtaaaaggctgatttaaagccatatacataaaaataaagaagtggatttatgagactaggaagaagaaaggagttaataagactgagattatatgtatctatgagaaatatctgccaatattacagtttcttctgagtgtcttacttgaaaaactagataggtagttgttgcatgaaataaggatcatagaaggctagaagtaattataaattcacagaaattatcttttattagaaaaaaacttttgacaaattaaatttagtggaacttatgtgagtagagaacaattaattcataaatcagtagcccctaggatcagcggaggttcagaaagctccacccatagccagtatgtatagtctgaaaacaagcaaagtagagaaatcgcttgactgactacagctaaatgtgtcttatttgggcatgatatgagttggctgtctttgactgtctgaaacatggctacttatgattggctgaaatttgctattaggttttggtttacatactaagttagattgcagcttgctacttataactacaaggtaagagacaatctcagcctaagtttaagttaatttatcagttataagaggaggcaattagtcttgggcatctggagtttatgagacaattctagacaagaaagaaagatttaagcatgtggaggttaaagccacccccccaatacacacacacacgatgagagtctacaaaaaaggtgagtgacaagtacagaaacttagggaataataacatttaagactaacatagtgaaaatatgattttagtgttcaatacagaatttattttagatggtactcaaagtttaatataaggtgcagtactaaggataattagcataattgtcttcatcagtgatgacatagaaaagtcacaatgagtcttaacttattaggctaaacattgtttttcagacttatctatctgtatagaaattctgagttagggactaataattggaagacttttgtgtaatgcaagggaaactatatcaaacatgtttataaagttgagtattctttatattaatttgcaaaacatatttccattgaatacatttgatagcccaggtctcatttcaggcagtaaagatacctcaatgaacaaaacaaacttcatactccccatggatgaaggcacaaataaccaagtacttcaatataatatgtgacataaaacatttatcatatacatgacttacataaaataacgcatcacttgccaggcagtaataaatgctatccaaaaaagtaagataaaaataaaggaaagtasagttagttgaggacaggtgattttaaatgtaataatcatggacaccttctttaatgacaagctgtttaagcaggagagtgactttgatgaaggagttagccctggggacagagtattgtag

SEQ ID NO: 51853 - DNA, 955 bp, Homo sapiens
tagctggaaatgtcacccaagagtataataaaaccagctaactccacagtcattcaagatggctctctgacttcttccaggtaatctcctgctatcagtactgaaacatgcctatgaccgagggttaagctcatgctttcayctccccaacacttaaaactccctctgaaagtgacccctctttatctttacgtctctcttatcatgtaaaaatctatcagtgacaaagaggaacaactgcaaagctgcagaaattaaaaacagaccttttgacttaggtacaaaatgtttgcactttggacataaagggaatttgctgagttactgaatcaagtatttatagcaccacataattgattttctgccataataatttcttctgtaatttagcagctcctccacaaatccccatcaaatctatgacttctcaaaaatgctaacaatgctggctaatacaaaggaaacagtgccacctaagcaaaattaaactagaataataatctattcataaagttctttttagggacacatagttattaaaatctttgcttttgttattcacgagtcatgagttttgcattttccattcttttctcaattatgttattaggctgtatcttatcaaaagtattctaattcctatcttcaggctacaaagtccttgccctaaatgaaaatattagagtccactaaaaaccaacataatcaagtatgccctgtgacttccaaccccaaaagtggaggatgctgacatgcatcatcatcggttttgccatttgccagctggaggacctgggctaagcttggtgagcatagggactgtgtctgttttatttgtcaatgtatatccagtgactggtgaagcagacattcaatttatagttgaattcatgtcctgtctttcattcaacaaatattcgctgtgcacgtactatatgccaggcactaggttagg

SEQ ID NO: 51854 - DNA, 955 bp, Homo sapiens
tagctggaaatgtcacccaagagtataataaaaccagctaactccacagtcattcaagatggctctctgacttcttccaggtaatctcctgctatcagtactgaaacatgcctatgaccgagggttaagctcatgctttcatctccccaacacttaaaactmcctctgaaagtgacccctctttatctttacgtctctcttatcatgtaaaaatctatcagtgacaaagaggaacaactgcaaagctgcagaaattaaaaacagaccttttgacttaggtacaaaatgtttgcactttggacataaagggaatttgctgagttactgaatcaagtatttatagcaccacataattgattttctgccataataatttcttctgtaatttagcagctcctccacaaatccccatcaaatctatgacttctcaaaaatgctaacaatgctggctaatacaaaggaaacagtgccacctaagcaaaattaaactagaataataatctattcataaagttctttttagggacacatagttattaaaatctttgcttttgttattcacgagtcatgagttttgcattttccattcttttctcaattatgttattaggctgtatcttatcaaaagtattctaattcctatcttcaggctacaaagtccttgccctaaatgaaaatattagagtccactaaaaaccaacataatcaagtatgccctgtgacttccaaccccaaaagtggaggatgctgacatgcatcatcatcggttttgccatttgccagctggaggacctgggctaagcttggtgagcatagggactgtgtctgttttatttgtcaatgtatatccagtgactggtgaagcagacattcaatttatagttgaattcatgtcctgtctttcattcaacaaatattcgctgtgcacgtactatatgccaggcactaggttagg

SEQ ID NO: 51855 - DNA, 955 bp, Homo sapiens
tagctggaaatgtcacccaagagtataataaaaccagctaactccacagtcattcaagatggctctctgacttcttccaggtaatctcctgctatcagtactgaaacatgcctatgaccgagggttaagctcatgctttcatctccccaacacttaaaactccctctgaaagtgacccctctttatctttacgtctctcttatcatgtaaaaatctatcagtgacaaagaggaacaactgcaaagctgcagaaattaaaaacagaccttttgacttaggtacaaaatgtttgcactttggacataaagggaatttgctgagttactgaatcaagtatttatagcaccacataattgattttctgccataataatttcttctgtaatttagcagctcctccacaaatccccatcaaatctatgacttctcaaaaatgctaacaatgctggctaatacaaaggaaacagtgccacctaagcaaaattaaactagaataataatctattcataaagttctttttagggacacatagttattaaaatctttgcttttgttattcacgagtcatgagttttgcattttccattcttttctcarttatgttattaggctgtatcttatcaaaagtattctaattcctatcttcaggctacaaagtccttgccctaaatgaaaatattagagtccactaaaaaccaacataatcaagtatgccctgtgacttccaaccccaaaagtggaggatgctgacatgcatcatcatcggttttgccatttgccagctggaggacctgggctaagcttggtgagcatagggactgtgtctgttttatttgtcaatgtatatccagtgactggtgaagcagacattcaatttatagttgaattcatgtcctgtctttcattcaacaaatattcgctgtgcacgtactatatgccaggcactaggttagg

SEQ ID NO: 51856 - DNA, 535 bp, Homo sapiens
aaacccacttggtcatggtggattatctgttggatatgttgttggatttggtttgctagtattttcttgaggatttttgtatctacattcatcagggatattggtctgtagttttctttttttgttatgaccttccctcattttgctattagggtgacacgggctttatggaattatttagggagaattcccaaggcagaagtttartgaagcttgagctgcaacatctcactctgctggggcttttttcaaggatgccaggaggaagcagcagccatagccttgagcttgtgcatgaagccctgccctggtttaggggccaccttctgagacctggggaccaggggcttcttgtggtgcaagtggaataccaacgcaaaccccacttactccaccctgtgcccatgatgaagaccatcagctctcttggttctcaagactttgaatcagcctgaagtacatcactggcttttatggttcatagaaaacatattataggagcttctggcctctataactgtgtgaaccaactccc

SEQ ID NO: 51857 - DNA, 549 bp, Homo sapiens
ccactaaatttgtggaactttgttatggcagccagccaactagtgtgtcatctaattataatactatcactgtgacttaattaatatcttstatcacatatatagtaaaagttttttgagagcagggactgtgtctattttgttcataactgtattctttgtgcctaccatagtgcatgacatatactaggtgctcaactgaaaacggttaattgaatggttaattgaatgaaaatcctcctcctcaacagagtttactcttacgatggttgggagaattttagttgtaaactttctatcagatttttctgcttgcaaattcaaggggttggagaatttcttctgtaaatttgtctttgagatggaaaaaggaaggaaacctcttagttgggtgggatgcatgtgtctggtgataagcgttctttattttcacataggctaaatttactcacttttggccatagcaacagaatgcgtgcaaaagtcgagagagtagtgtgtggaatgtgaggacagcgccatatggggaattgtgtggtacgtggttga

SEQ ID NO: 51858 - DNA, 593 bp, Homo sapiens
cacacacatacacatgagactaaccatgaagtttaatttttctaagtgatagattaagtgtttagtaagagatgtttcaaaatagaaaatctttttaagttagacaccaacactcttaaatattactaggttttctctcttcttatattattattatgcccagtataacaaaataaatttttttctgaaatgttatcctgaaattttgaaaggacagagactagaaagatgcgtatttatttggggaatcatttgacaaatgtaagcatagcaaataaaatgaaatatctcccccatagtaacaaagtgttcattgtatcatcgtagagctagagaataatagtaccaaaatgataagaattattggcattagtgaggaaaagaaagacaacatgcaaacaaaatgaaatcaagttattctatgaattgtcttccaattaacctttaagttgggaactcagaactagccacaggttttttgaaaaggcctgartaagccaaataaaattaagtatatctgtagtttttatgtcgaatctgtcaatcatatgatgtcatttagaagatgtcataataatcactgtgacaagtta

SEQ ID NO: 51859 - DNA, 235 bp, Homo sapiens
tgttacatggctcacagagttgttgggaargctaaagaaacagactaggtggaatatccaggaatgatttccagagccacacaatgagtgggccaccaaggaggctgatgttcctgctattatcaggaaagctgcctattgagtcaggatgctaccaataaagctgctggctccagaaccgtgtcttgcattctgcctttcttccgacttaacattgttccctatacaaaactca

SEQ ID NO: 51860 - DNA, 565 bp, Homo sapiens
tgccctttacactgagcttatatttattcagggcttctgcmtttgccacttccacggcaccagcaccggaaccacacagcctgttggatgggggaaaaagaaaaatgctaagaaaactgtagaactaattatgaataacaaaatatacatatgaaagccattaatttcttacaaattcactatgaccacatcaatttaagtactgcatgtgaaagccacaatacaagcgactaacatatcaaataggagaatggtccaaccagaatggcttcactggccactggagcatctttcaacagatcagtattagttcatttatttgtattcacctttaataatgatatgctatgaaaaaccttagcataccatcagtcattctaaagggaagactgcttttgcatggtgtctggctgtgtaaactactgataaaagaacacagtattcagccatgcttttcagaccagcaaaacaatttaatagaattgaaatatggtgaggatcttaccatcatcaatagcatttttgacagccctcaagccatcccttactgcatctttgatctaag

SEQ ID NO: 51861 - DNA, 565 bp, Homo sapiens
tgccctttacactgagcttatatttattcagggcttctgcawttgccacttccacggcaccagcaccggaaccacacagcctgttggatgggggaaaaagaaaaatgctaagaaaactgtagaactaattatgaataacaaaatatacatatgaaagccattaatttcttacaaattcactatgaccacatcaatttaagtactgcatgtgaaagccacaatacaagcgactaacatatcaaataggagaatggtccaaccagaatggcttcactggccactggagcatctttcaacagatcagtattagttcatttatttgtattcacctttaataatgatatgctatgaaaaaccttagcataccatcagtcattctaaagggaagactgcttttgcatggtgtctggctgtgtaaactactgataaaagaacacagtattcagccatgcttttcagaccagcaaaacaatttaatagaattgaaatatggtgaggatcttaccatcatcaatagcatttttgacagccctcaagccatcccttactgcatctttgatctaag

SEQ ID NO: 51862 - DNA, 557 bp, Homo sapiens
cacttgcatttgttttgtgaaactgtcctagccattgcttaattaggtgaaataattcagggttttttaaatctggaatttagtcgttcctttacaatatttccaaatatacgtgtggccacagagcataacagatatttttcataagctaaattgtatgtataaaacatttgcagtgtttcagacactgttgaacaaaaatgtaattggtaagtatgtatccaaacaggcatggggtttcctgatacattatgtgttttgtttctgccctgtcttatcatttacactcatggatcttcagaattaatctaacatggaagttatagatacctgaaagctgggttggtctacttcaggaacattgctttaagtgatgtattttaaaataacccgcttcatatgtatgatctgttggtgtacacaccatgggtaaggtattgcttgcacmtaatttgctctgcatattatggaccattgtggttcttccagtcacttagatggaaaggaggttaaacctaggtactttttagcaaggatataaagtcaaattcagcata

SEQ ID NO: 51863 - DNA, 513 bp, Homo sapiens
cccttcctgtttctcccctgggacgttgtcatttgsagaaagggttggtggacatggattttcctagcatttccaggagggcagggactgtatctatcctatggggtcttcacctcacacgaagtccggcccgtaataggctctcagttcatctctgtagtgcttcttgactactgagggtggttctgcggattaaatgaggtgttgttgtggagaagcccttggggacagccgttaccatagctgttatctgctgattgacactgctcctctcccctgctcttggcccctcctcctcagctgtcatcagcagtagcagctacagctaccaccaccccagctctgcgggtgttgaccttggggccagcgctgtggcaggcagctctggcagcacccagagcgggcagaccaagaccacagaggcgcgagggggagacctcaaggacacccagggcaagagcaccccagccagcatcccagcaaggaaagccacccgctagacccatggcctca

SEQ ID NO: 51864 - DNA, 557 bp, Homo sapiens
gattaagcatctctaatccaaaagtctgaaatccaaagtgctccaaaacttttggagcattttatttaaaatttgtacaaaattatctttagcctacgcagaaggtatatatgaaacataaatgaagttcatgttttratttgggttccatccccgaagtatctcattatgcacatgcaaacatttcaaaatccaaagtcaggaatgtttctggtcccaagaattttggataaggtatacccaatctgtattgactttggaaaatctgagatctcccaccccctactaaataagcacatgaaagcctgtgtccaaactactatgttgctgtgatttaaattccctctccaggagcccatgtgtccatctttctggttatttaattaaactctcctcctcctccaggaagccttccttgcttagcctctctattccagtcccttactagcattgctgccttaggctgcccttccctgatttacatgagtgtgtatctgtctcttccagcagcctgagattgcctccagagcagcctcatctgagttggcctgcagctt

SEQ ID NO: 51865 - DNA, 618 bp, Homo sapiens
tgaatatttattttatggtgcatttatttgacactcatattcacttcagccacctgagtaaaactggagtaggaaactgggaatgtaccagctgcctggtgcatcttcacaaagtgctaaagccccaaagctaacactagggaaagaaatttagaagctcattgagagcttctcattgtgaaaatcatgccaattttgtgtttttgtctctctctrtttcctttatatcatatcataataacctgtgaaatacatgctctttataattatttatgttttgccactttaagtacatttcaggatcaggaggaattgctatgtgagattagaacaaagaaagtttacattaattttatcactaatgatttatggtttggggctgagcttctaagagtttagaactggagtatgagaatgatagctaaagacagtagttaagtgaatatctgggtgatatttagtcatccttgccacaattacagtaattgtggagtagcaatattagggtcagagggaagacagtgtgggtaaatatgttaaccccttgatattataattgcagacctttaaaattaataggtggcaagcttaatggaaacaacagtctccatttacttt

SEQ ID NO: 51866 - DNA, 586 bp, Homo sapiens
tgtcctactgatgtcctttttttgtggtccaggactcaatccaggatgacacattgcctttagttatcaagcctccttagtctcattaatctgcaacagcctagagcagtgctgtccagttgaactttctgtgatgatggaaaaattttataactgcactgttcgatacagtggctactagccatacatgtggctactgcaacaaagaaactgaatgtttaaattgtaattaattttaattaatgtaaatttaaagttaaatagaggatcttattgttttaacatacaaaacaaatatttcagctgggraaacccagttccaaaatctctctaaagcaaagcataatgaacagtcctttcataagcatgcaaggggagcacttaaacaagcatagtcataattctgcttggcagggcacacagactcttcatttagcccaatccagtctctcttactgcgccacctgccctatcgctccaccaccagtgcccccactgccccaccacgatgaacccctcaccatgccttgaatggtaccagtcaatcacatggccaggcctttactcatggatgggttcctctacc

SEQ ID NO: 51867 - DNA, 483 bp, Homo sapiens
acagaaaattaattgtggccttgcctgtagcctagagtatgttcctttgttattccatctcagagataacatttcttcccttgtagcacctgcttcagtttattacacttgattaggtgaccgctaattgaagttarcttccctccctagtgaagcagccatgtgtctgctttgctttccattttactcctggcacctcccagtgcctggaacttaatatttgcctagttatttacagttacttagtgaaattaattagaacgagacttactcctaccccaatacactcatattcagattaaaagattcatggctaatatctacaattgattttcctaacagtgaaaaaagttatctacattttttttttgacacagagtttcgctcttgtcacccaggttggagtgcagtggtgcaatttcagctcattgcaaactctatctcccaggttcaagcgattcacctgcctcagcctcccgagta

SEQ ID NO: 51868 - DNA, 559 bp, Homo sapiens
cctgggtcccacccagggtactgcacagtccatacgtataacacctcaatggttctgaagtttcaccgtattattgttattgtttttattatcttttgagacagagtcttgctctgtcgtccaggctggagtgcagtggtgcaatctcggctcactgcaacctctgcctcccgggttcaagcaattcctctgcctcagcctcccgagcagctgggactacaggcatgtgccacctygctcagctaatttttgtatttttagtagagatgggctttcaccatgttggccaggctggtctcgaactcctgacctcaggtgatccacctacctcagcatcccaaagtgctgggagtacaggcatgagccactgcgcctggccacggtattcttattccaatgacatattttgtagaacagtgtgtaaaacggagtcactggagcagaccattgcattcttggttccgttactggttctctcaaccattttaagtggttggtgaattaccctgtccacagtcatacctgttctcagcatggagaaaatgaagaattaaaatgt

SEQ ID NO: 51869 - DNA, 559 bp, Homo sapiens
cctgggtcccacccagggtactgcacagtccatacgtataacacctcaatggttctgaagtttcaccgtattattgttattgtttttattatcttttgagacagagtcttgctctgtcgtccaggctggagtgcagtggtgcaatctcggctcactgcaacctctgcctcccgggttcaagcaattcctctgcctcagcctcccgagcagctgggactacaggcatgtgccacctcgctcagctaatttttgtatttttagtagagatgggctttcaccatgttggccaggctggtctcgaactcctgacctyaggtgatccacctacctcagcatcccaaagtgctgggagtacaggcatgagccactgcgcctggccacggtattcttattccaatgacatattttgtagaacagtgtgtaaaacggagtcactggagcagaccattgcattcttggttccgttactggttctctcaaccattttaagtggttggtgaattaccctgtccacagtcatacctgttctcagcatggagaaaatgaagaattaaaatgt

SEQ ID NO: 51870 - DNA, 577 bp, Homo sapiens
ccataacttctggaacttcaaatgtcagtgagtggcttggggaaaggatatcctaggttggatgctgatgctgctagtagtcacaaagtattctcgacctttttttttttttttttttttttttagcttttaggtttaatttacaaatgccaaccttcaggcccatattcaatgggttctcaccagactcactcccagtctccttggtctatgcactctgaaaacagctcattagtttcctccaggtgtctccctccagggattccacttagcaggtggaatccccataaaaatccaactgttgggtgcttggttttgagtgccactagcctgataagcccaagatcccctggtatgatttcrggaggccatgggcaccgccctcttaatgtcatccccaaagctttgactacatcccagggtggctttagactgatgtaacaaaataccatagactgagtggcttataaacagcataaatttattcctcacagttctggaggttgggaagtctaagatcaaggcactggcagatctggtgtctggtgaggacctgcttgctggttcatagatggca

SEQ ID NO: 51871 - DNA, 577 bp, Homo sapiens
ccataacttctggaacttcaaatgtcagtgagtggcttggggaaaggatatcctaggttggatgctgatgctgctagtagtcacaaagtattctcgacctttttttttttttttttttttttttagcttttaggtttaatttacaaatgccaaccttcaggcccatattcaatgggttctcaccagactcactcccagtctccttggtctatgcactctgaaaacagctcattagtttcctccaggtgtctccctccagggattccacttagcaggtggaatccccataaaaatccaactgttgggtgcttggttttgagtgccactagcctgataagcccaagatcccctggtatgatttcgggaggccatgggcacygccctcttaatgtcatccccaaagctttgactacatcccagggtggctttagactgatgtaacaaaataccatagactgagtggcttataaacagcataaatttattcctcacagttctggaggttgggaagtctaagatcaaggcactggcagatctggtgtctggtgaggacctgcttgctggttcatagatggca

SEQ ID NO: 51872 - DNA, 603 bp, Homo sapiens
ttattttttataatcctcctactaatgtgttagtcaccatcactatccctattttacagatgacgaagtggatgctcagagttattaagtcattttgcccatgattacagagatcttatttgattagttgaatctcttataacctaggcagcctaactatagaacatatgtccttaatcactactctatattactgacctcaaattttttatttatttttctaaaatacaaaatcttgtgatttcattattggtaaagaatttttttttgcttsggttttgtcatataatttatatatatgacaatgtgtttggcaattatatatatgtcatataacttacacagttgatactcattatttgtggcagttaagtacttaagtcaccccaaacactgaattagtgaacactgaacccttgctgggggaaatatatgcatatatgtatatgtcacatagacggtccttttagaaaacctcattctagtatattctatttattttatgaaagaggaaataaagttcagaagtgttaagtgacttgcttaaggctgtcgcactaactggtgccagagttggaattttagccctgtccagctggcccc

SEQ ID NO: 51873 - DNA, 352 bp, Homo sapiens
gttgaaatccatctctttgactctgaatccagtctttttcccactataacacacctcactgactagggtatggtaggagtttagagtagtggattttatggactcgtgtgaattatgacattgatgatgtatgaggaatgatataaataccagtgctgctattaaaatataatgaatattttcttatattaagttagtattaatctatatgaagtattaggagttcatagatagcacttaagactgactactaaaatgtagtaggtatttagtcatgtagaatttgtatttargttgataaggtaacagtctttatcttgctgtgttatatatggtaatgtgtatcatctcc

SEQ ID NO: 51874 - DNA, 1089 bp, Homo sapiens
ctgcagttctccactgcagtcttaacattagtgattaatttgatgatacatagttagaattccatgactattacaggttttcaaagcacagaaagtacaaggtttctctaagtgctagttattattgttctttcatgtctgctttaaagatttattcaagcaacttgctgatatttaaactaaaaagttagaatttttgaatattgtatattgaataatttcaggtgactcatctaaaataatatcagcaacaaaccctccatgtcagaagtgtatscttttgtgaaaacaatgtatagcatttcatttttgaattctcactaggtgcaagctacatttcttttatttgtaaacccagcagagtagcttaaaagtaatcacacacacacacacacacacacacacacacacacacacacaccccttcccagatatacaaacacaaagtgtcttattgggaaaggtcaaagttatttacccagaaaattaatataataaaagtaataaatatttaagaatgaaatgtttaaaaagatggcatgactaagtatggaaattattaatcatatatagcatgcagtatttccatataaaatacaagaggagatgtgcttgcatttttatcaaaaaaaagtactttaactgaaactctttttaaggttattttaagttaaaaagtacattcataaataacaacctgaaaaggttggggtggtttggatgtgagaagagtatttataaggaaagatttaagatgggctgctacagtttctttcccttcaatgactagaaagccaaaggacagcaaggtaaaagacaccaacatttgatagaaaacaaagacactgagagaataaatttaagaaggaataattttaactgacagtagacaagggatgcaacaagagtgtggtaaattgataaatgcttccctctccccagaatatcagatcctagtccctggaatgtataaatgttaccatataagtataaaagtttttgcagttataattaaggatctggatattgggagatcatcctggatcataagggtgggccccaaacaggattgcatgtgtccttattaga

SEQ ID NO: 51875 - DNA, 1570 bp, Homo sapiens
tctttagcctctgattttttttaaagtttaaattttgactgatgtgtttcatggaaaaaaatgcacatgccaatgcttatttttcatagtaaaattcattgatttatagctgtccatctgtataaacttcatgtcccggggtttcaaattcatttaaggaaacaagaatacagtctaggaaaggaaggtaaagtattttataatttatgaggtacatactgggaagaaacatgccaagctaaaacaaatgctttcctstgaaaagaaaaagtatcacgtgaattataatggaattatttgttcaatgtttgtttataaatccaattattaaaaacctgaaataaattacaatttaaaatataactatcttacagttaaaaatggtattcactgcagtatctcatctatatccaccagggtagtgcctgtggttggatgactggtgcagtttacaactggagtggtggagtagacgttcacattatcctctatgggactagtacccatgcccagaatagtgcagtgcacaatgtgtacagctgtactcagtggccctagctatggcagacacactcgtaattagtggcgatcctaaattcctgtggcatccaagttgttcattccacaaaaagaaaaaacaagtacaaatatttatggactgccttctgtgcaccattaaaattactacaatgtttaagaaagaattcctacccaaaaggagcacagagagaaagccagacagatgaacagtaaaatagaatgtgatacaagaattcagttagagaaatgtacaaggtacaataggacaaaagaaagggggcatgtaatacaacctgggacttcagaaaaaagttactaaaaaatacgtcacattggctcagcaatgaggatgagcagaagtttgcaaaaaaaaaaaaaaaatgaccaggcatttctagagatggaaacatcctaggtaaagtcataggggcaggagatatcagggtatatggcaggagacataatcagctcagtagtatttaagcatacaacataggacaagagtagagaaacatgaggctagaattaaggcaggtggctgacatacaaatagagtcagaaaatccaaactataagctactgcagtagtccagataagagatgcttaatgcttaaactaggatcgagatggcaagagtgaaaataaggggatagattggataaatattcatcatttattcattcctctgacattcgttgagttttaaggactatgctcaatatgcccctgagtttatcaaccaagtccctgcccacgtggcagatgcagtcatgtaagggagacgcatgggaggcaaacttgaggattaagtgtctgacagaattgaaaagtaggcaagtgaaagccaggccggtcaacttctagatttttgatgggcagctgctagatgtggcccattctctaaatcggtattactgtgggaggagaggatgatgatgagttcaggaacgggtacattgaactcaaaacactcgaaccatgacatttaaagagtaatttcagcattgaattgtgccaaaaatataaaga

SEQ ID NO: 51876 - DNA, 1570 bp, Homo sapiens
tctttagcctctgattttttttaaagtttaaattttgactgatgtgtttcatggaaaaaaatgcacatgccaatgcttatttttcatagtaaaattcattgatttatagctgtccatctgtataaacttcatgtcccggggtttcaaattcatttaaggaaacaagaatacagtctaggaaaggaaggtaaagtattttataatttatgaggtacatactgggaagaaacatgccaagctaaaacaaatgctttcctgtgaaaagaaaaagtatcacgtgaattataatggaattatttgttcaatgtttgtttataaatccaattattaaaaacctgaaataaattacaatttaaaatataactatcttacagttaaaaatggtattcactgcagtatctcatctatatccaccagggtagtgcctgtggttggatgaytggtgcagtttacaactggagtggtggagtagacgttcacattatcctctatgggactagtacccatgcccagaatagtgcagtgcacaatgtgtacagctgtactcagtggccctagctatggcagacacactcgtaattagtggcgatcctaaattcctgtggcatccaagttgttcattccacaaaaagaaaaaacaagtacaaatatttatggactgccttctgtgcaccattaaaattactacaatgtttaagaaagaattcctacccaaaaggagcacagagagaaagccagacagatgaacagtaaaatagaatgtgatacaagaattcagttagagaaatgtacaaggtacaataggacaaaagaaagggggcatgtaatacaacctgggacttcagaaaaaagttactaaaaaatacgtcacattggctcagcaatgaggatgagcagaagtttgcaaaaaaaaaaaaaaaatgaccaggcatttctagagatggaaacatcctaggtaaagtcataggggcaggagatatcagggtatatggcaggagacataatcagctcagtagtatttaagcatacaacataggacaagagtagagaaacatgaggctagaattaaggcaggtggctgacatacaaatagagtcagaaaatccaaactataagctactgcagtagtccagataagagatgcttaatgcttaaactaggatcgagatggcaagagtgaaaataaggggatagattggataaatattcatcatttattcattcctctgacattcgttgagttttaaggactatgctcaatatgcccctgagtttatcaaccaagtccctgcccacgtggcagatgcagtcatgtaagggagacgcatgggaggcaaacttgaggattaagtgtctgacagaattgaaaagtaggcaagtgaaagccaggccggtcaacttctagatttttgatgggcagctgctagatgtggcccattctctaaatcggtattactgtgggaggagaggatgatgatgagttcaggaacgggtacattgaactcaaaacactcgaaccatgacatttaaagagtaatttcagcattgaattgtgccaaaaatataaaga

SEQ ID NO: 51877 - DNA, 608 bp, Homo sapiens
tcactatgttgcttaagctggtctcaaactcctggactcaagtgatsctcttgcctcagcctcccaaagtgttgggattacaagcgtgagccaccatgcccagccttttttttctgggtggctctgggggagtgagggggtgggagacaggacttcactgttgcccaggctggagtgcagtggtgcaatcttggctcactgcaacctctgcctcccatgctcaggagatcctcccacctcagactcctcagtagctgggactacaggcacgcaccaccatgcccagctattaagtaaacaaaaaaaaccaactgacgggtttagggttagcaaaagttaagcaaatgggaacatgaaactaaatcaacttgtgaactttctgaaaaagggattcatttgttgaacactatcccttagaataactaagcaatttaggaaagaaagacaaaaaagtaaaagtgcgggcaaagctgcgttttctttttctatgtgagacttagttcttttacccccggtgaactttgaaatatctaaagtacaacagaagtcaccaactaaagaaggagcaaacaagggtctcataaagggtatattttatcaatcttaag

SEQ ID NO: 51878 - DNA, 1234 bp, Homo sapiens
aatggcatctcttaaacagagaaagaaaaaaactcaagaattccggggattaagtccgctttgttcactattttaaaccttgttactttgtaagttacttaaacaaatgaatatcgtatgtggcagactgcctagttacctaacaactaatcttcccttcttcctcattgacagaccctatttctgggtagtggcaatttgttttaccccagatgatgaattataattggtatatgccagtataattggtataagccctttccccttttccattgtttggtcaggcatctgtgtgaaacttgctttatattattttgaccagtaatagaaagggcctgagagcttctagggtctttccttaatgagtaagaagaacaaggagaaagccctttctcgaatgctctctctctactctatatattactatgatgatacgctcttttaggagctgtcttgctaccatgaaaggaaaaacagaagagcttcagagacctggcaatctaacactgacactgctgagccagagagccaaccctgggattgcctgcctcaagacttatttagtaataaatgttcttgtgttttcgatcactgttagttgtattgttatggccaagcaaatgctcttaaaaaatattaagcatgaagtcaaaatataattctatccagtgaaagataatcttacctggaaattttgccaagtttatcactagtctataacttatctctgcatctgtaaattgaaactacacgtttgtggcactttttctcaattaggctatcagaataggactcataatcttcagattaactccatttaacaagcttgacattttatgttttgcataccaacttgtccaagacacacaacaaactatgaagataggtggcattactagcttcattttaaatgaggaaacaaaataatttaagttatgtgacctaaatagtccatttatttacgtttttaaactaatttctgacaattttgttggcccttaaatactcaaataaatgaaggaactgggatttacaaccagatcatctagcatacagtctttagcatgagatcagaaagagcaggaaaacattggtttaaagttgttggggaagrcataaagaagtaaagctttaaatgtctatagaaggatattacaagattaggaaagaaaagttagtcactctaacatatcacaaaaagtttgggcctactaagaaaatgcttaatttatgc

SEQ ID NO: 51879 - DNA, 1234 bp, Homo sapiens
aatggcatctcttaaacagagaaagaaaaaaactcaagaattccggggattaagtccgctttgttcactattttaaaccttgttactttgtaagttacttaaacaaatgaatatcgtatgtggcagactgcctagttacctaacaactaatcttcccttcttcctcattgacagaccctatttctgggtagtggcaatttgttttaccccagatgatgaattataattggtatatgccagtataattggtataagccctttccccttttccattgtttggtcaggcatctgtgtgaaacttgctttatattattttgaccagtaatagaaagggcctgagagcttctagggtctttccttaatgagtaagaagaacaaggagaaagccctttctcgaatgctctctctctactctatatattactatgatgatacgctcttttaggagctgtcttgctaccatgaaaggaaaaacagaagagcttcagagacctggcaatctaacactgacactgctgagccagagagccaaccctgggattgcctgcctcaagacttatttagtaataaatgttcttgtgttttcgatcactgttagttgtattgttatggccaagcaaatgctcttaaaaaatattaagcatgaagtcaaaatataattctatccagtgaaagataatcttacctggaaattttgccaagtttatcactagtctataacttatctctgcatctgtaaattgaaactacacgtttgtggcactttttctcaattaggctatcagaataggactcataatcttcagattaactccatttaacaagcttgacattttatgttttgcataccaacttgtccaagacacacaacaaactatgaagataggtggcattactagcttcattttaaatgaggaaacaaaataatttaagttatgtgacctaaatagtccatttatttacgtttttaaactaatttctgacaattttgttggcccttaaatactcaaataaatgaaggaactgggatttacaaccagatcatctagcatacagtctttagcatgagatcagaaagagcaggaaaacattggtttaaagttgttggggaaggcataaagaagtaaagctttaaatgtctatagaaggatattacaagattaggaaagaaaagttagtcactctaacatatcacaaaaagtttggkcctactaagaaaatgcttaatttatgc

SEQ ID NO: 51880 - DNA, 451 bp, Homo sapiens
gggtttgagaccagcctgggcaatacagcaagactctgtctgtagaaaatttaaaaattaaaaaaaaaaattagctaggcatggtggtacacacctgtaatcccagctacttgaaaggctgaggcagaaggatcacttgagcccaggagttcgagactgcaatagctataatcacaccaccatactccagcctggtcaacagagcaagactgaccgactgactgactcactcacacacacacacacacacacacacacacactctctctctgtatatatatatacatatatatatacatatatatatacgtatatatatatacatatatatacatatatatatacatatatatatacgtatatatatatacatatatatacrtatatatatatacatatatatatatatatagtattgtataccagctattgtatatcagcttcagcactt

SEQ ID NO: 51881 - DNA, 1898 bp, Homo sapiens
gactgacttctctggaagggtaaaattcagataagcatacttaccacaaagacatgttgggaggagaaagtgttccgatgtattagagcattttccatggtgactagcatggaggaagtactctttaaagtagcagctattagcctgaggccctctgagttaggggctaatcacatgttttacataagaggagactgaggcacaaagggcaggacaggactgcccaatgccactccattgggaagaaccagagctggactttgggcccaaacttgattacatggacactcctcaccacactgcctcctggcccttttgtctttttttttttttttttttggtcctatcttccccacaaactaataaatgtgtttcttatatrgggaataattctactatgagttctgcttattttctggctctagtggccaggaactgacattcccaccatactaggttgatcaggttcatagcttgaaatacgtaagaatatatatgtacacacatacaaaacatacacaaaatatgtccactatatatacatatattacctatatacacatgtaatatacacatatacatatatgcacatatgtatatgtatactgtatactaaattccgtataatttttttttgtctaagaaaactgtaggtagattgggtatggaaaatctgcagtgagattcaggggagacattcagaaacaaagcagaggccaatgatatgagagaagagagaaaacaaattcagtttccgtatgattccaattttgctgcagcattgatgattcagtgttttcatttcttcaaagaaatatttgcagtagctcttatatttaacaagccagcttgtgcttaacattttataaatacgatatacgaatacaaattttaaaaacagcaagaacacacaataatactgaatagtgctgagaaagcatcataatttggaacaatatattagatgtacaagaaaagaatatttctggttatagtttcgatagctatcttagaacttgagaaaatgcatgtaaactaccaagacctcatcaaatataatcatgttgagaagtcagaaaactattagttttcttataaataaaatctaccttttattgcaacctgtcttaaaaactagatagaaaatttctttcatgttaaaatcaatctctgtagtagcccattctaaaatgtattttattaatattggacccatttgaaaaacctcaaaaatggagaatttgtttggagatggagggtgtaggtatcttgatcctctggagtagctctatgagttctcaaagctgggtgtccttatactttgaattccaaaagttccccaggtcctagtagcttgttattatagggataggaaagcccagaaagtacaaaggaatctcaatggggtcactgtataaatgcataatttcatccagagtataatttttcccctataataatatactttgaatcataaatagtgaaaatatagaagtaggatgtcatgtataaactcccagagttttaggttctaagacttaaatcatgttgtaaaagcaagctatgggaagatgtgtttgaattctggctctaccagaatttgaattctggctctaccactatgagctctgtgtttttgcacaaaacacttatcctccatgagctgttgtttccttggctataaaacagggacaataacgcatacctcaaaggtgctatgaggaatgggtaaaagaacatgcatgaaagctcacagcatgggcctagacacacaaatagagttctgtaaatgttggctaaatatggctgaaatgttggttgtaaacgttgcccctacctcaccccaaatccctggagtagtattctagggagtagtgggtttccaatccacgaaactc

SEQ ID NO: 51882 - DNA, 1898 bp, Homo sapiens
gactgacttctctggaagggtaaaattcagataagcatacttaccacaaagacatgttgggaggagaaagtgttccgatgtattagagcattttccatggtgactagcatggaggaagtactctttaaagtagcagctattagcctgaggccctctgagttaggggctaatcacatgttttacataagaggagactgaggcacaaagggcaggacaggactgcccaatgccactccattgggaagaaccagagctggactttgggcccaaacttgattacatggacactcctcaccacactgcctcctggcccttttgtctttttttttttttttttttggtcctatcttccccacaaactaataaatgtgtttcttatatggggaataattctactatgagttctgcttattttctggctctagtggccaggaactgacattcccaccatactaggttgatcaggttcatagcttgaaatacgtaagaatatatatgtacacacatacaaaacatacacaaaatatgtccactatatatacatatattacctatatacacatgtaatatacacatatacatatatgcacatatgtatatgtatactgtatactaaattccgtataatttttttttgtctaagaaaactgtaggtagattgggtatggaaaatctgcagtgagattcaggggagacattcagaaacaaagcagaggccaatgatatgagagaagagagaaaacaaattcagtttccgtatgattccaattttgctgcagcattgatgattcagtgttttcatttcttcaaagaaatatttgcagtagctcttatatttaacaagccagcttgtgcttaacattttataaatacgatatacgaatacaaattttaaaaacagcaagaacacacaataatactgaatagtgctgagaaagcatcataatttggaacaatatattagatgtacaagaaaagaatatttctggttatagtttcgatagctatcttagaacttgagaaaatgcatgtaaactaccaagacctcatcaaatataatcatgttgagaagtcagaaaactattagttttcttataaataaaatctaccttttattgcaacctgtcttaaaaactagatagaaaatttctttcatgttaaaatcaatctctgtagtagcccattctaaaatgtattttattaatattggacccatttgaaaaacctcaaaaatggagaatttgtttggagatggagggtgtaggtatcttgatcctctggagtagctctatgagttctcaaagctgggtgtccttatactttgaattccaaaagttccccaggtcctagtagcttgttattatagggataggaaagcccagaaagtacaaaggaatctcaatggggtcactgtataaatgcataatttcatccagagtataatttttcccctataataatatactttgaatcataaatagtgaaaatatagaagtaggatgtcatgtataaactcccagagttttaggttctaagacttaaatcatgttgtaaaagcaagctatgggaagatgtgtttgaattctggctctaccagwatttgaattctggctctaccactatgagctctgtgtttttgcacaaaacacttatcctccatgagctgttgtttccttggctataaaacagggacaataacgcatacctcaaaggtgctatgaggaatgggtaaaagaacatgcatgaaagctcacagcatgggcctagacacacaaatagagttctgtaaatgttggctaaatatggctgaaatgttggttgtaaacgttgcccctacctcaccccaaatccctggagtagtattctagggagtagtgggtttccaatccacgaaactc

SEQ ID NO: 51883 - DNA, 1898 bp, Homo sapiens
gactgacttctctggaagggtaaaattcagataagcatacttaccacaaagacatgttgggaggagaaagtgttccgatgtattagagcattttccatggtgactagcatggaggaagtactctttaaagtagcagctattagcctgaggccctctgagttaggggctaatcacatgttttacataagaggagactgaggcacaaagggcaggacaggactgcccaatgccactccattgggaagaaccagagctggactttgggcccaaacttgattacatggacactcctcaccacactgcctcctggcccttttgtctttttttttttttttttttggtcctatcttccccacaaactaataaatgtgtttcttatatggggaataattctactatgagttctgcttattttctggctctagtggccaggaactgacattcccaccatactaggttgatcaggttcatagcttgaaatacgtaagaatatatatgtacacacatacaaaacatacacaaaatatgtccactatatatacatatattacctatatacacatgtaatatacacatatacatatatgcacatatgtatatgtatactgtatactaaattccgtataatttttttttgtctaagaaaactgtaggtagattgggtatggaaaatctgcagtgagattcaggggagacattcagaaacaaagcagaggccaatgatatgagagaagagagaaaacaaattcagtttccgtatgattccaattttgctgcagcattgatgattcagtgttttcatttcttcaaagaaatatttgcagtagctcttatatttaacaagccagcttgtgcttaacattttataaatacgatatacgaatacaaattttaaaaacagcaagaacacacaataatactgaatagtgctgagaaagcatcataatttggaacaatatattagatgtacaagaaaagaatatttctggttatagtttcgatagctatcttagaacttgagaaaatgcatgtaaactaccaagacctcatcaaatataatcatgttgagaagtcagaaaactattagttttcttataaataaaatctaccttttattgcaacctgtcttaaaaactagatagaaaatttctttcatgttaaaatcaatctctgtagtagcccattctaaaatgtattttattaatattggacccatttgaaaaacctcaaaaatggagaatttgtttggagatggagggtgtaggtatcttgatcctctggagtagctctatgagttctcaaagctgggtgtccttatactttgaattccaaaagttccccaggtcctagtagcttgttattatagggataggaaagcccagaaagtacaaaggaatctcaatggggtcactgtataaatgcataatttcatccagagtataatttttcccctataataatatactttgaatcataaatagtgaaaatatagaagtaggatgtcatgtataaactcccagagttttaggttctaagacttaaatcatgttgtaaaagcaagctatgggaagatgtgtttgaattctggctctaccagartttgaattctggctctaccactatgagctctgtgtttttgcacaaaacacttatcctccatgagctgttgtttccttggctataaaacagggacaataacgcatacctcaaaggtgctatgaggaatgggtaaaagaacatgcatgaaagctcacagcatgggcctagacacacaaatagagttctgtaaatgttggctaaatatggctgaaatgttggttgtaaacgttgcccctacctcaccccaaatccctggagtagtattctagggagtagtgggtttccaatccacgaaactc

SEQ ID NO: 51884 - DNA, 557 bp, Homo sapiens
tggcacactttcctgcaattattttgcttctctagactataaaacgtaaaagtasatggggaagatttcttgccatttcacttcctgatgctgtcttttttttaaatgagaaatgtttctttccccctattgttttggaataggcatcctacaccaaaaatgggcttgattccatttggtgttgtaaagctcgctttcacctaaaggttgtcagtgccccggaattaggggctggaattccagatggagctggacaaggagatggccatttctgggtcacccagctgcccaatgccctcgggtagccgcagcagtggggagggtaacctagtttgcttaggaaatattgcagatgtcccagtttatccgatgcagtcctagaaaagtattggcactgtcctgtttctagagctcgtgccattcaacctgccaaagccctgctgccccttcagcctgatgaactgaaacacagaggccagcatccctgctcctgctccacttttgggcccgcctggatgtgcccccaagtttatcatttccatctggggtgatcctcg

SEQ ID NO: 51885 - DNA, 557 bp, Homo sapiens
tggcacactttcctgcaattattttgcttctctagactataaaacgtaaaagtacatggggaagatttcttgccatttcacttcctgatgctgtcttttttttaaatgagaaatgtttctttccccctattgttttggaataggcatcctacaccaaaaatgggcttgattccatttggtgttgtaaagctcgctttcacctaaaggttgtcagtgccccggaattaggggctggaattccagatggagctggacaaggagatggccatttctgggtcacccagctgcccaatgccctcgggtagccgcagcagtggggrgggtaacctagtttgcttaggaaatattgcagatgtcccagtttatccgatgcagtcctagaaaagtattggcactgtcctgtttctagagctcgtgccattcaacctgccaaagccctgctgccccttcagcctgatgaactgaaacacagaggccagcatccctgctcctgctccacttttgggcccgcctggatgtgcccccaagtttatcatttccatctggggtgatcctcg

SEQ ID NO: 51886 - DNA, 557 bp, Homo sapiens
tggcacactttcctgcaattattttgcttctctagactataaaacgtaaaagtacatggggaagatttcttgccatttcacttcctgatgctgtcttttttttaaatgagaaatgtttctttccccctattgttttggaataggcatcctacaccaaaaatgggcttgattccatttggtgttgtaaagctcgctttcacctaaaggttgtcagtgccccggaattaggggctggaattccagatggagctggacaaggagatggccatttctgggtcacccagctgcccaatgccctcgggtagccgcagcagtggggagggtaacctagtttgcttaggaaatattgcagatgtcccagtttatccgatgcagtcctagaaaagtattggcactgtcctgtttctagagctcgtgccrttcaacctgccaaagccctgctgccccttcagcctgatgaactgaaacacagaggccagcatccctgctcctgctccacttttgggcccgcctggatgtgcccccaagtttatcatttccatctggggtgatcctcg

SEQ ID NO: 51887 - DNA, 571 bp, Homo sapiens
ccttgatcaaagggtaatacagtcaacattattacttgtaaccaaaagattaaaacttgcttcttctccatggcttttctgttagttttctattctaggaaacctttcattcttttagctttccaattaattattgtttttttgaggcagggagcaaaagagaaagaggattttcacctactctctgaatgtactgcgttgcctgaattagcctcatctatctgtcaaagtgcccagaaaccatgatgataggagctgtggaaatagatatctagcatatgggaacctgcttataatttcttgctcacagcatttatcccacatacagcatttatctttaaaagagcaagactaatgaacccgtatgtattgttttctacttatagcatatcctcatttgaaatacatcccatgaaaaataaaactctgctaatgagtaaggcattgcaacgtattatagtgagtagtgtcataataccttggttyttgcttttgccactgaccttattgagttcttttttttttttttttttttttttttagttagagagaaaacttattgtccgtaaaa

SEQ ID NO: 51888 - DNA, 542 bp, Homo sapiens
ccctgtgctgagaccagatcctgtccaactattttattctccttctaagaaagaacaagatatggaccattatagttccttgctataaggctacattttacgtgatttgttgtgagacatctctgatcaggaagagaagatttgagatagaaggagaccttagaaagcatatgattgaaactttaaattcataactgtccccacacagaattaccttctatccttcctatgggccctgacttctagatgacctatatgtatccatattgattgtatcataggtagcaaccaacccaagacagaattggartttagtctcagtgtgtggaacttgtatgtgttagctggttggggggtggtagttgggacagccatttcctgccttgtaaactgagaagcagggagagaagttctgaagagagagagacagagagagagagagataacaagagagatcatgaggagtgcagtgatgagagaggtggagtgttgtgatgagtttctaattccccttctctgtgtctttgtaaggctgcagaact

SEQ ID NO: 51889 - DNA, 537 bp, Homo sapiens
tattgctcacagccaagcctcatatgattacatttcctttcttgtagaacctgttttcttggaactaacaattaccttatttttcatatgcattgtgtacctattgatgaatttatccctggactctgagacagctaaatatttttttctcagtttgtttggattcactagaaattctgtcygttccatttttttttttctcatagacgtttaacctggagcccacccctgcaacctctctgtctgggcttcatctcccctgacccctttttagccttatgattgatcctggctcttcggcatgggggaggatattccagcatctaactgcgccttttaaaactttcaaccaggtgttccatattcagctgccacctacacccagctttcagagacaccggttttcatgttcttgagccctttggaggtctgcaccataactgacttgctgcttttgctcccacttagatttcacctttctctcatctgcagagtcccaacacatgcccatgtatctctgtttgctcttcaaacccg

SEQ ID NO: 51890 - DNA, 537 bp, Homo sapiens
tattgctcacagccaagcctcatatgattacatttcctttcttgtagaacctgttttcttggaactaacaattaccttatttttcatatgcattgtgtacctattgatgaatttatccctggactctgagacagctaaatatttttttctcagtttgtttggattcactagaaattctgtccgttccatttttttttttctcatagacgtttaacctggagcccacccctgcaacctctctgtctgggcttcatctcccctgacccctttttagccttatgattgatcctggctcttyggcatgggggaggatattccagcatctaactgcgccttttaaaactttcaaccaggtgttccatattcagctgccacctacacccagctttcagagacaccggttttcatgttcttgagccctttggaggtctgcaccataactgacttgctgcttttgctcccacttagatttcacctttctctcatctgcagagtcccaacacatgcccatgtatctctgtttgctcttcaaacccg

SEQ ID NO: 51891 - DNA, 552 bp, Homo sapiens
caaggccatgtgcaccccgagttgtgcacctcaaatgtcccctgacatttacatctaccatcccctagggcttgtacttttccgatgttttccagaccccctgtgaagttaatggggcttctgttcctttgaacttcttttgtcctgcgcactgaacagtgacaggtaagccaggctctctgggcccctggtgcaattataattaaccatgggcctcaaacaaatcctttagctatgcatgattttccatctttgcatgacctttcatgatctgtgacaaatcaacttctgacattgattgtaagggagtagttttccaacaaatgcaaaagattgcctagagagckggggtccgggctgtagactttatcagcagcaccatcttaggggtttgtagcctggatatgctgatggtttttcttatcttcttgagagacagaggaaggaaaggacagttgattgtaatagattagaagattagtggaaaagaaatggtcatttcttataaaacagtatgtgttcctatgtcatgggtaagaatggaataggggg

SEQ ID NO: 51892 - DNA, 552 bp, Homo sapiens
caaggccatgtgcaccccgagttgtgcacctcaaatgtcccctgacatttacatctaccatcccctagggcttgtacttttccgatgttttccagaccccctgtgaagttaatggggcttctgttcctttgaacttcttttgtcctgcgcactgaacagtgacaggtaagccaggctctctgggcccctggtgcaattataattaaccatgggcctcaaacaaatcctttagctatgcatgattttccatctttgcatgacctttcatgatctgtgacaaatcaacttctgacattgattgtaagggagtagttttccaacaaatgcaaaagattgcctagagagctggggtccgggctgtagactttatcagcagcaccatcttaggggtttgtagcctggatatgctgatggtttttcttatcttcttgagagacagaggaaggaaaggacagttgattgtaatagattagaagattagtggaaaagaaatggtcatttcttataaaacagtatgtgttcctrtgtcatgggtaagaatggaataggggg

SEQ ID NO: 51893 - DNA, 2441 bp, Homo sapiens
tttgctgtatgttcttaggtacrtttccagaaactttagattgtcatttttctaattctcagcagtttcactacggaggctgtccacactgctcctcgggctgcccaccagaagtccatctgtcaggcctttttgatcctggtttcccaaactgtcctggagacctcataggacagaaagagagttcccacactgaatcttttctcagaagctccaacataccctaaagtttccactgagccctgttttgtatggtcctcaatagctgttttgatagggaagttgggattggaaagaaaggagattctgttcctgacaccaagtttccagagctctgtccaccttttcccttatatagctccactgtgcagaagaacaaaacactcaacaatttattaatgtgagcaaacttttccaaaaatacttagtccactatattaaaattggcaccatggtaaggaataaaatctgactcattgtcttcagaccctaagtctaattctacaaaaatcctccgtgatgcacatattctgcatgaataattttatggctctttcactttgacctttggctatattaaagcaatcataagatttacagatgagaaacataagaaatatataatgattaaaatttaaaatacataacataacctttcataatcaaattgaatgttttgctaatttgttctcaaaagtatattgattaaatgtgttttataactaagaaatataagaaaatctaattaatatgtgcctgaaatgaagatattcataacaatgaactctagatcatacatgttaatgcatcttagagaattctccaatacatttagtaattgggtctcattcttggcaaacattttaaatgatatttcctataattgtttgtaaaaacattttatttgccatttgaaatattattcattgtctttatgcagataaatttaaaataatttttgtatagtctctttttttcagcatcagtgccttaattattgatgctgagggtgtttttttctttttgtcagaagtgtggattttgtcaaggacctagtgaatactggcactaaacagatgtgcattggtaaacatatgtgactaaatggataaacacttttaaataagattatatctctttctgagctctttgaggatgtgtagagtacctcactgattttggtattttgagggcctgaaccctctgtagcaggcactcaacaaatgtagaaacacatgttaatcaagcactttataatacggttctatttttaaaacttattttatacaacttaattttatcacttataaaaacaaatgcaatattaataaaataatctttggaagtacaaaatgcatatataaaaggaaacataggcccggcgcagtggctcacgcctgtaatcccagcactttgggaggccgaggtgggcggatcatgaggtcatgagatggagagcatcccggctaacacggtgaaaccctgtctctactaaaaacacaaaaaaattagccgggtgtggtggcgggaggctgaggcaggagaatggcatgaacccaagaggtggagcttacagtgagctgagatcatgccactgcactccagcctgggcaacagagcgagactccgtttcaaaaaaaaaaaaggaaagataaattaccgaagattacacaatccaaaaatgagcagtgactgatttagtataaatatatacatttctatttatatatttctttttgtgcttaaatatttttaaatagatatattttatcttatgactgtatcacaaccaatttaactattcctttattgtaagctgtttagagagtttttagtttttctctgctataaatagtgccagagataaacattttccatataactcaatctatatcttgaatatttcttggtgaagggtataagaggtggaattaccatgtcataatgtaatacctccttagagctcttgagcaatattgccaaattgctatggctgttagatatatttaggatcgggtttttttttgttgttgttttttggctctagttggctcagagaaaagcctttgaaccagaggtttgaaatttaataatgtcaagattttaaaaattagtcacctcaaaacaaaatgggcttcttcaagaagtctgagttctattactctcctatcttcaggctttgcaccaaccctggtgggtctgttttccccctgtgccctaccactcccacacaacaccttcagatcccagcttggtgcatggtaacggctattgctgccactgctgtcaaaagcactgctgttcagggagtgtttgctgcgttcagacatgcactaagaactacctcccacgtcttggttcggtttcacataactctattctgtaggagttctttttagctcctcttagaaaagataaagagcttgtccagaattacatag

SEQ ID NO: 51894 - DNA, 1139 bp, Homo sapiens
ttgggaggctgaggcaggggaattgcttgaacccgggaggcggaggttgcggtgagccaagattgcaccattgcactccagcctgggcaacaagagtgaaactccatctcaaaaaaaaaataaacaataaaaaagagagagagaaagaaagagagaaagaaagaagaggaagaaaaagaaagaaagagagagaaaggaaggaaagaagggaaggaaggaaggaaggaactgtaggtcctttgagagtaccactttgacacccaggtcagtcctaaacactggtgcccacagacaagtgctggtcggttcactgttcctggcctgggacaaggtaagtacagcccttgagagtaagtctgagaaacattgacagcaatatgacattgtcatgacagtcaagcacatgatcagtgggcttgtatcttttgtttgtatttcctttctcttttttttttttaacttttattttaggtttgggggtatatgcgaaggttttttacataggtacacacatgtcacagggggttgttttacatattatttcatcatttttctaataattcatatttattgtattttacgaaagtattgatctgcaacaaattggaagtttataaaacctggtccttcacatataatttcgagaaacactaacctagttcatcgtttctgtctgggagaccagtgayttttttagacaaggataggaaagggcaactctgtctcaggccagtcctcattgactttcctgtcattccacagatgctaaaacaaagaaaaagaatcaaagtatataggtgagaaataggaagaggaaaaacttgactcttgctgcagaggaggcagcacttaatggtactttagaggaagtgctcttgtacccattatcttacctgttggggaaggacaggggaggggagggagctcctcttttcagcctggacctaatcagaaagacactccttgccacagggaattgaatagagtccctctcacttgcggtcatcatggcactgggactgggctgaggacataagtggcacgaattctgatcaggggtcaggccacagagcagattgtagcagcgagcaaaaagagagagcagccattcctgctgtgcctcagtgctatggtgaacc

SEQ ID NO: 51895 - DNA, 1139 bp, Homo sapiens
ttgggaggctgaggcaggggaattgcttgaacccgggaggcggaggttgcggtgagccaagattgcaccattgcactccagcctgggcaacaagagtgaaactccatctcaaaaaaaaaataaacaataaaaaagagagagagaaagaaagagagaaagaaagaagaggaagaaaaagaaagaaagagagagaaaggaaggaaagaagggaaggaaggaaggaaggaactgtaggtcctttgagagtaccactttgacacccaggtcagtcctaaacactggtgcccacagacaagtgctggtcggttcactgttcctggcctgggacaaggtaagtacagcccttgagagtaagtctgagaaacattgacagcaatatgacattgtcatgacagtcaagcacatgatcagtgggcttgtatcttttgtttgtatttcctttctcttttttttttttaacttttattttaggtttgggggtatatgcgaaggttttttacataggtacacacatgtcacagggggttgttttacatattatttcatcatttttctaataattcatatttattgtattttacgaaagtattgatctgcaacaaattggaagtttataaaacctggtccttcacatataatttcgagaaacactaacctagttcatcgtttctgtctgggagaccagtgacttttttagacaaggataggaaagggcaacyctgtctcaggccagtcctcattgactttcctgtcattccacagatgctaaaacaaagaaaaagaatcaaagtatataggtgagaaataggaagaggaaaaacttgactcttgctgcagaggaggcagcacttaatggtactttagaggaagtgctcttgtacccattatcttacctgttggggaaggacaggggaggggagggagctcctcttttcagcctggacctaatcagaaagacactccttgccacagggaattgaatagagtccctctcacttgcggtcatcatggcactgggactgggctgaggacataagtggcacgaattctgatcaggggtcaggccacagagcagattgtagcagcgagcaaaaagagagagcagccattcctgctgtgcctcagtgctatggtgaacc

SEQ ID NO: 51896 - DNA, 957 bp, Homo sapiens
atgacacagtgtttgtccttttgtgagtggcttatttcactctgcataatgtgtcagggttcacccatgttatggcatgtgttggaactgtcttcctttttaaatgtgaataatatattccacattttgtttatccattcatccattgatagattgcttccaccttttgcctgtgtactgtgagtagtgttgctgtgaacataggtatacaaatgtctgtttgagtccttgctttcaatttgggtatatacccagaagtgggattactggatcgtatggtatgtctatttttcctttctttgctgcagacatggggcactgccctatctatgccgtaggacactattcagatgcagtgggatgtctagttggtrttccccagggcattcagtgcagcacccctcacctcccccagcagacctggcacatagaagcaaagattttctaaatgaaggatgcttagcaagagagatcatttgtaaacaaataactacagtaagttcagatactttgtaatggtgcacaaaatatgatggtaggtaaagggaataaaaacttctaggggacaaaggaagcacaggcaatattttttcaatgttttctctgaaataacaaattgcagatgcttatgaaatcactccaaaaattgttcctattacttaacaaataagtgctcattcttaaaattctaagcattaccgaactgtgtaaggcagaaagtgaaagcctgcccaaactgttaacagtgtgtaggccgggcgcggtggctcatgcctgtaatcccagcactttgggaggccgaggcgggtggatcatgaggtcaggagatcgagaccatcctggctaacacggtgaaccccgtcgctactaaaaatacaaaaaattagccaggtgtcttggtgggcatctgcagtcccagctactcgggaggctgaggcaggagaatggcgtgaaccc

SEQ ID NO: 51897 - DNA, 957 bp, Homo sapiens
atgacacagtgtttgtccttttgtgagtggcttatttcactctgcataatgtgtcagggttcacccatgttatggcatgtgttggaactgtcttcctttttaaatgtgaataatatattccacattttgtttatccattcatccattgatagattgcttccaccttttgcctgtgtactgtgagtagtgttgctgtgaacataggtatacaaatgtctgtttgagtccttgctttcaatttgggtatatacccagaagtgggattactggatcgtatggtatgtctatttttcctttctttgctgcagacatggggcactgccctatctatgccgtaggacactattcagatgcagtgggatgtctagttggtattcccmagggcattcagtgcagcacccctcacctcccccagcagacctggcacatagaagcaaagattttctaaatgaaggatgcttagcaagagagatcatttgtaaacaaataactacagtaagttcagatactttgtaatggtgcacaaaatatgatggtaggtaaagggaataaaaacttctaggggacaaaggaagcacaggcaatattttttcaatgttttctctgaaataacaaattgcagatgcttatgaaatcactccaaaaattgttcctattacttaacaaataagtgctcattcttaaaattctaagcattaccgaactgtgtaaggcagaaagtgaaagcctgcccaaactgttaacagtgtgtaggccgggcgcggtggctcatgcctgtaatcccagcactttgggaggccgaggcgggtggatcatgaggtcaggagatcgagaccatcctggctaacacggtgaaccccgtcgctactaaaaatacaaaaaattagccaggtgtcttggtgggcatctgcagtcccagctactcgggaggctgaggcaggagaatggcgtgaaccc

SEQ ID NO: 51898 - DNA, 957 bp, Homo sapiens
atgacacagtgtttgtccttttgtgagtggcttatttcactctgcataatgtgtcagggttcacccatgttatggcatgtgttggaactgtcttcctttttaaatgtgaataatatattccacattttgtttatccattcatccattgatagattgcttccaccttttgcctgtgtactgtgagtagtgttgctgtgaacataggtatacaaatgtctgtttgagtccttgctttcaatttgggtatatacccagaagtgggattactggatcgtatggtatgtctatttttcctttctttgctgcagacatggggcactgccctatctatgccgtaggacactattcagatgcagtgggatgtctagttggtattccccagggcattcagtgcagcacccctcacctcccccagcagacctggcacatagaagcaaagattttctaaatgaaggatgcttagcaagagagatcatttgtaaacaaataactacartaagttcagatactttgtaatggtgcacaaaatatgatggtaggtaaagggaataaaaacttctaggggacaaaggaagcacaggcaatattttttcaatgttttctctgaaataacaaattgcagatgcttatgaaatcactccaaaaattgttcctattacttaacaaataagtgctcattcttaaaattctaagcattaccgaactgtgtaaggcagaaagtgaaagcctgcccaaactgttaacagtgtgtaggccgggcgcggtggctcatgcctgtaatcccagcactttgggaggccgaggcgggtggatcatgaggtcaggagatcgagaccatcctggctaacacggtgaaccccgtcgctactaaaaatacaaaaaattagccaggtgtcttggtgggcatctgcagtcccagctactcgggaggctgaggcaggagaatggcgtgaaccc

SEQ ID NO: 51899 - DNA, 957 bp, Homo sapiens
atgacacagtgtttgtccttttgtgagtggcttatttcactctgcataatgtgtcagggttcacccatgttatggcatgtgttggaactgtcttcctttttaaatgtgaataatatattccacattttgtttatccattcatccattgatagattgcttccaccttttgcctgtgtactgtgagtagtgttgctgtgaacataggtatacaaatgtctgtttgagtccttgctttcaatttgggtatatacccagaagtgggattactggatcgtatggtatgtctatttttcctttctttgctgcagacatggggcactgccctatctatgccgtaggacactattcagatgcagtgggatgtctagttggtattccccagggcattcagtgcagcacccctcacctcccccagcagacctggcacatagaagcaaagattttctaaatgaaggatgcttagcaagagagatcatttgtaaacaaataactacagtaagttcagatactttgtaatggtgcacaaaatatgatggtaggtaaagggaataaaaacttctaggggacaaaggaagmacaggcaatattttttcaatgttttctctgaaataacaaattgcagatgcttatgaaatcactccaaaaattgttcctattacttaacaaataagtgctcattcttaaaattctaagcattaccgaactgtgtaaggcagaaagtgaaagcctgcccaaactgttaacagtgtgtaggccgggcgcggtggctcatgcctgtaatcccagcactttgggaggccgaggcgggtggatcatgaggtcaggagatcgagaccatcctggctaacacggtgaaccccgtcgctactaaaaatacaaaaaattagccaggtgtcttggtgggcatctgcagtcccagctactcgggaggctgaggcaggagaatggcgtgaaccc

SEQ ID NO: 51900 - DNA, 574 bp, Homo sapiens
tacgagagggttcataagccatgggagaatacgaatttgaaaaaaaagtcctctgatttttccacaagaaaagtcctttggtgctgggcatggtggcccacgcctgtaatcctagcactttgggaggccgagggggttggatcacctgaggtcargagttcgagaccagcctggccaacatggtaaaaccccgtctctattaaaaacacaaaaattaaccgggtgtggtggtgcatgcctgtaatcaatcccagctacttgggaatttgaggcatgagaattgcttgaacctgggaagtggaggttgcagtgagcagagatcatgtcagtgcattttaacctgggtgacagagtgagactccatgtccaaaaaaaagaaaaaaaaaaaaagtccacttggaaccagtttttaaaaatgtgattcattttcattgtggaggcattttatccacttccactttcattttcaggagttggagattataaccgcctccttggttcctgtggtttgtgggttcagacttggttctctagtggcgggagaggctgcatggaactccccacatcctcccaa

SEQ ID NO: 51901 - DNA, 574 bp, Homo sapiens
tacgagagggttcataagccatgggagaatacgaatttgaaaaaaaagtcctctgatttttccacaagaaaagtcctttggtgctgggcatggtggcccacgcctgtaatcctagcactttgggaggccgagggggttggatcacctgaggtcaggrgttcgagaccagcctggccaacatggtaaaaccccgtctctattaaaaacacaaaaattaaccgggtgtggtggtgcatgcctgtaatcaatcccagctacttgggaatttgaggcatgagaattgcttgaacctgggaagtggaggttgcagtgagcagagatcatgtcagtgcattttaacctgggtgacagagtgagactccatgtccaaaaaaaagaaaaaaaaaaaaagtccacttggaaccagtttttaaaaatgtgattcattttcattgtggaggcattttatccacttccactttcattttcaggagttggagattataaccgcctccttggttcctgtggtttgtgggttcagacttggttctctagtggcgggagaggctgcatggaactccccacatcctcccaa

SEQ ID NO: 51902 - DNA, 349 bp, Homo sapiens
aatatgtataaatgtygatcttaagtaaagtatgctctgccaatacattgaattgaaagtaatgtagaagatatacaagaaaagattaatataatttactgtataaaaatacaaaaaaaaaattatggcaaaaaatagcatttacaaaatcaagacaaatgagtaaaatatttgcaacatatatgacaggcaaactaatttatttgatataaaaagagctctttaaaatcaataagaaaaaatctaataagtattggccaataaccaagatgctcaatcttacacaattaaagaaatgtaaactatgttagtagctacattccatttttcatctataataaaggcaaat

SEQ ID NO: 51903 - DNA, 652 bp, Homo sapiens
attgttcctctcgtacacagatctgacccacaggtggtttggtgatgcatattcagcacacctgtgaggttggggctcccctactggaacacaatcttcaggtgggattgggcatcttatacatggatcttgcccactgttgagattgtgactctgctttgacccaactcacaggaggtgttgactcacatacatgaagccaggacctgagtgggactgtgaaacttacttctgaatatttccaagtgtgtgattaggacataaaagttagcccagctcctgaataatttgactctcctttttaggccatgaccatagatgaaattttgacatacgtggaccatacacctaagcgaaggtgcctgggcctgcctacaaagggcacttttacgtattactaggacmagcacgcaggtaatgtgaattatttgcctgagccctgcttataaaaagtattgtggcttatatctaggtccatcatgtaagtgatgtgactcccttctactgccttgtccctgcacttatgctgcattgtgacgcataactgggtactgcacccaggtgatgtgactctcctttttgggttcttccaacaggaagctttgtaacctaggtgatgtttctccacttttgcctgggccttgaccacagg

SEQ ID NO: 51904 - DNA, 652 bp, Homo sapiens
attgttcctctcgtacacagatctgacccacaggtggtttggtgatgcatattcagcacacctgtgaggttggggctcccctactggaacacaatcttcaggtgggattgggcatcttatacatggatcttgcccactgttgagattgtgactctgctttgacccaactcacaggaggtgttgactcacatacatgaagccaggacctgagtgggactgtgaaacttacttctgaatatttccaagtgtgtgattaggacataaaagttagcccagctcctgaataatttgactctcctttttaggccatgaccatagatgaaattttgacatacgtggaccatacacctaagcgaaggtgcctgggcctgcctacaaagggcacttttacgtattactaggaccagcacgcaggtratgtgaattatttgcctgagccctgcttataaaaagtattgtggcttatatctaggtccatcatgtaagtgatgtgactcccttctactgccttgtccctgcacttatgctgcattgtgacgcataactgggtactgcacccaggtgatgtgactctcctttttgggttcttccaacaggaagctttgtaacctaggtgatgtttctccacttttgcctgggccttgaccacagg

SEQ ID NO: 51905 - DNA, 652 bp, Homo sapiens
attgttcctctcgtacacagatctgacccacaggtggtttggtgatgcatattcagcacacctgtgaggttggggctcccctactggaacacaatcttcaggtgggattgggcatcttatacatggatcttgcccactgttgagattgtgactctgctttgacccaactcacaggaggtgttgactcacatacatgaagccaggacctgagtgggactgtgaaacttacttctgaatatttccaagtgtgtgattaggacataaaagttagcccagctcctgaataatttgactctcctttttaggccatgaccatagatgaaattttgacatacgtggaccatacacctaagcgaaggtgcctgggcctgcctacaaagggcacttttacgtattactaggaccagcacgcaggtaatgtgaattatttgcctgagccctgcttataaaaagtattgtggcttatatctaggtccaycatgtaagtgatgtgactcccttctactgccttgtccctgcacttatgctgcattgtgacgcataactgggtactgcacccaggtgatgtgactctcctttttgggttcttccaacaggaagctttgtaacctaggtgatgtttctccacttttgcctgggccttgaccacagg

SEQ ID NO: 51906 - DNA, 581 bp, Homo sapiens
gtaattctactggaatataatctccacgaagatagataagtggtctattttgtttacagctgcatcctcagggcttagaacagtgcttgatatacaataagatttgaatacatgcatgtggaagaaatgacttccgtcaggactaaggtacttatacaaaagtatttacggcctgcccggtggctcacgcctgtaatcccagcactttgggaggccgaggtgggcagataatctgaggtygggagtttgagccccacctgaccaacatgaagaaaccctgtatctaccaaaaatacaaaattaactgggcgtgatggcgcctgcctgtaatcccagctacttgagaggctgaggcaggagaatcgcttgaaacaaggaggcggaggttggggtgagtcgagattgcgccattgcactccagcctgggcaacaaaagagaaactccatctaaaaaaaaaaaaaaaagtacttacataataaagccttacacaaattttggataactgatacttatcctaaaatacatacttggctcactcttgagaacagactataacaacatccacagtgaaatctgaaaa

SEQ ID NO: 51907 - DNA, 581 bp, Homo sapiens
gtaattctactggaatataatctccacgaagatagataagtggtctattttgtttacagctgcatcctcagggcttagaacagtgcttgatatacaataagatttgaatacatgcatgtggaagaaatgacttccgtcaggactaaggtacttatacaaaagtatttacggcctgcccggtggctcacgcctgtaatcccagcactttgggaggccgaggtgggcagataatctgaggttgggagtttgagccccacctgaccaacatgaagaaaccctgtatctaycaaaaatacaaaattaactgggcgtgatggcgcctgcctgtaatcccagctacttgagaggctgaggcaggagaatcgcttgaaacaaggaggcggaggttggggtgagtcgagattgcgccattgcactccagcctgggcaacaaaagagaaactccatctaaaaaaaaaaaaaaaagtacttacataataaagccttacacaaattttggataactgatacttatcctaaaatacatacttggctcactcttgagaacagactataacaacatccacagtgaaatctgaaaa

SEQ ID NO: 51908 - DNA, 581 bp, Homo sapiens
gtaattctactggaatataatctccacgaagatagataagtggtctattttgtttacagctgcatcctcagggcttagaacagtgcttgatatacaataagatttgaatacatgcatgtggaagaaatgacttccgtcaggactaaggtacttatacaaaagtatttacggcctgcccggtggctcacgcctgtaatcccagcactttgggaggccgaggtgggcagataatctgaggttgggagtttgagccccacctgaccaacatgaagaaaccctgtatctaccaaaaatacaaaattaactgggcgtgatggcgcctgcctgtaatcccagctacttgagaggctgaggcaggagaatcgcttgaaacaaggaggsggaggttggggtgagtcgagattgcgccattgcactccagcctgggcaacaaaagagaaactccatctaaaaaaaaaaaaaaaagtacttacataataaagccttacacaaattttggataactgatacttatcctaaaatacatacttggctcactcttgagaacagactataacaacatccacagtgaaatctgaaaa

SEQ ID NO: 51909 - DNA, 467 bp, Homo sapiens
ctgtactgctgccatctcggctcactgcaacctccctgcctgattctcctgcctcagcctgccgagtgcctgcgattgcaggcacgcgccgccatgcctgattggttttcstatttttttggtggagacggggtttcgctgtgttggcagggctggtctccagctcctaaccgcgagtgacctgccagcctcagcctccggaggtgccgggattgcagacggagtctcgttcactcagtgatcaatggtgcccaggctggagtgcagtgtggcctgatctcggctcgctacaacctccacctcccagctgcctgccttggcctcccaaagtgccgagattgcagcctctgcccggccgccaccctgtctgggaagtgaagagcgtctctgcctggccgcccatcgtctgggatgtgaggagcccctctgcctggctgcccagtctggaaagtgaggagcgtctctgc

SEQ ID NO: 51910 - DNA, 467 bp, Homo sapiens
ctgtactgctgccatctcggctcactgcaacctccctgcctgattctcctgcctcagcctgccgagtgcctgcgattgcaggcacgcgccgccatgcctgattggttttcctatttttttggtggagacggggtttcgctgtgttggcagggctggtctccagctcctaaccgcgagtgacctgccagcctcagcctccggaggtgccgggattgcagacggagtctcgttcactcagtgatcaatggtgcccaggctggagtgcagtgtggcctgatctcggctcgctacaacctccacctcccagctgcctgccttggcctcccaaagtgccgagattgcagcctctgcccggccgccacccygtctgggaagtgaagagcgtctctgcctggccgcccatcgtctgggatgtgaggagcccctctgcctggctgcccagtctggaaagtgaggagcgtctctgc

SEQ ID NO: 51911 - DNA, 625 bp, Homo sapiens
aaatggattaagggcggtgcaagatgtgctttgttaaacagatgcttgaaggcagcatgctggttaagagtcatcaccactccctaatctcaagtacccagggacacaaacactgcggaaggcccgcagggtcctctgcctaggaaaaccagagacctttgttcacttgtttatctgctgaccttccctccactattgtcctatgaccctgccaaatccccctctgcgagaaacacccaagaatgatcaataaaaaaataaaaaataaaaaaaaataaaagcttagttggtgagtcaagaatgaatggaaaagaaaaaatagttacaaaggccaatgttactcatgttgttaagaactgaaaatgtcatccagggcaactcaacatcttcctggcagctagatccctatayagaaggtgattacatcaggatatgtaagtctgatgttgtgagagatttgaatactccacataatacccctttcttttgttatcatccccaggcagccatctattatctgactttccaatggtttgcctagaggaaaaaaaaaacaaaaaacgatgatctctccaggcccaaataaatatctgatctagatgttatagtcttcattgaaaataat

SEQ ID NO: 51912 - DNA, 1220 bp, Homo sapiens
agtaccagaagtaagtggtcaggggcaccctgagcagccaattagaaatcagagtaccttgagctctctagcagcccattttagtgaaataaaaycaagtctgatgactgaacgacctgtggttttcaaaattctccactgtgactcacagtcaagagacatttctacaatccagtcatgatgtgcatatgtaactaaaatacgtttccacatcaacacttacccttaacagatgtaatgcactctgatactattcaattgcttaaaaatgctggcgtcacacaaagctacacgtatgataaaaatgcacagatgtacatctcatacagtgcacgtaaatccggccaaatctgaaggtgtgtggactatactaatgattttttcttggctgtgatgttatacaacaattatacaagatgttagcatggtgggggaaccaagtggaaggtatacaggatctctctgtattgtttcttacaaccgtatttaaatctacagttatctcaaaatcaaaagtttagaaaacaaaaatgcttgttgtgatatagtcacaccacaattaatgggtcccaagccagtatgaaacactgccatagatggaaggcagaaaccattagaatgaccatcagaccgttgcaggtgcccctaaaattctcctcttaattccttacaccaagcaaactttctgaagcaatttcatttcagggaccagagtcctgctgggggacagctgctctactaggctctgtactgtttttgacaactgctctccctgagagcagtcttttgggctgccatgtgagaaagacaaactgtggccaattagtctgcatcagacccacacctgaatactcatcaatgtcctgcaggaccacacactaaggaacacattttgggaaattccacacattattcacaataaaaagataaaccagaaaaccctttaatttctctgtcattgaccagggagcttcaggagcagccacagagtctcagggaccaagctttataaggaagcatgtaagtttgtattaatagctcgctgggttccatagctcatgcctataatcccagcactttgagaggctgaagcaagcaaactgcctgagtccaggagtttgagaccagcctgggcaagatggcgaaacctcatctctactaaaaataaaaaaaattagccaggcatagtggtatgcgcctgtaatcccagctatttggga

SEQ ID NO: 51913 - DNA, 1220 bp, Homo sapiens
agtaccagaagtaagtggtcaggggcaccctgagcagccaattagaaatcagagtaccttgagctctctagcagcccattttagtgaaataaaatcaagtctgatgactgaacgacctgtggttttcaaaattctccactgtgactcacagtcaagagacatttctacaatccagtcatgatgtgcatatgtaactaaaatacgtttccacatcaacacttacccttaacagatgtaatgcactctgatactattcaattgcttaaaaatgctggcgtcacacaaagctacacrtatgataaaaatgcacagatgtacatctcatacagtgcacgtaaatccggccaaatctgaaggtgtgtggactatactaatgattttttcttggctgtgatgttatacaacaattatacaagatgttagcatggtgggggaaccaagtggaaggtatacaggatctctctgtattgtttcttacaaccgtatttaaatctacagttatctcaaaatcaaaagtttagaaaacaaaaatgcttgttgtgatatagtcacaccacaattaatgggtcccaagccagtatgaaacactgccatagatggaaggcagaaaccattagaatgaccatcagaccgttgcaggtgcccctaaaattctcctcttaattccttacaccaagcaaactttctgaagcaatttcatttcagggaccagagtcctgctgggggacagctgctctactaggctctgtactgtttttgacaactgctctccctgagagcagtcttttgggctgccatgtgagaaagacaaactgtggccaattagtctgcatcagacccacacctgaatactcatcaatgtcctgcaggaccacacactaaggaacacattttgggaaattccacacattattcacaataaaaagataaaccagaaaaccctttaatttctctgtcattgaccagggagcttcaggagcagccacagagtctcagggaccaagctttataaggaagcatgtaagtttgtattaatagctcgctgggttccatagctcatgcctataatcccagcactttgagaggctgaagcaagcaaactgcctgagtccaggagtttgagaccagcctgggcaagatggcgaaacctcatctctactaaaaataaaaaaaattagccaggcatagtggtatgcgcctgtaatcccagctatttggga

SEQ ID NO: 51914 - DNA, 559 bp, Homo sapiens
cggcctcccaaagtgctgggattacaggcatgagccaccgcgcacagcctatttcttaaaaatctacaaatagaaaaatayagaaattgtgaagtaatgctcttcttaaatttggctcttattgaaacttttcagaataggtcttcttagctaagggccacagatgagacttcatgggatctggatattgtgtgcaaagttgcattggatttgagtttatggggctgtatctatgcatgtttcttatagagggtttacttatgttcattccaataaagagtggtgaatggtcaggagaacaattcttttgggatttcacctttgatatgtgattttttaggccaaaaaaatgctctcagtaatccaaggcatgtttttagtatataaaatatctcagaggagtcacagattcaaaaagtctgaaatttaacttaacctttttaatgtattagggttctctagagaaacagaacatacacacacacacacacacatatatatacacatccctcaatatataacacatatatatgtattagtatatataatttgttctgtt

SEQ ID NO: 51915 - DNA, 2269 bp, Homo sapiens
tataatcctaccaattatataaacaactcttaacactggaatrtgtcttctgtctcttaaagaacagattgttgggttttcaccaaattgtgctcattctgtatgttcaattttgtctcatgcttttttcacaatattatagcataagcattttccatttgtaaataacattttctttcatgactacataatatgctctgaagtagtcatgccatgcagaagatttttttctaaatttgttcaccacttcaaataatactaaaatgaacatatatccgtgtatataatggttgaacaatgtgtatggtagtatactagaggtagaattgagtttaagaatttgaagatttttggctgggcgcagtggctcacgcctgtaatcccagcactttgggaggctgagatgggtggatcatgaggtcaggagattgagaccatcctggctaacactgtgaaaccccatatctactaaaataatacaaaaaattagccaggtgtggtggcgcatgcctgtaatcccagctactcgggaggctgagacagcagaatcacttgaacccgggaggcggaggttgcagggagccaagatcgcaccactgtactccagcctgggcgacagagcaagacttcgtctcaaaaaaaaagaatttgaagaatttgaagagttttaagtcttttggtatgtagcatcaaatcacatatattttatttatgcataattacataaacatcatttaaaattctggaaatagaaatatagataaaataatatttgccattatttctttgacctagaggcagatacctattgaatatcttggtatagttcttccccatcttttttgaaaataaatacatatgcgcacacaattaccaaattgaaactattgtgtatgagtgtgtaatagtttgattttttattaccatgtctataaataatacttagagaccaaacagattttattaattacaacatattatcccaatcacacagccaaacatactcccatttttccacccctagtatagccacatccacgtgcccatacccaagtaacagagagattacatacaagaccactcctaataagacaactctcaagacacaatcttggttgtagttctcactggctttcttctgagaaactgactcaagagtgaatataggcagttgcaatagcatttttctaactggaaacttctacagagctcaactcagaatgatacgccactgtgccagccaccaggaacagttttgggccctgaaatatgaatctctgcttttcatcagatgtttccaaaagcagagtggttatgacagaaactttggcattagactctcctgggttccagccatgactgtacctcctattgtctgtgcaacttgaattaactttacccctctaagcctcagtctctccatctataaaaatgaatgacagtagctgcttcataggtttgaagtgatgatcagatgagacaatgcatgtaaagtactcagcattgtgtcattgcaggcacttaattttaactgtaattattattttgaggagttctggcagcagctttcgactctcgctctcacaaatatgactttctctttcctcattgatctattaacagaaaatattttttgactgataattcccaaagcagtcattatggcaatgaacacagcagttcaaaatgttatcatatttatcttatcacaaatgttattaatagctcaaagcagttgaaattgtcattaactatttttaataaataagtatatttcggcacttaatattcccaggagctttatataacaatattttcctcaatcttcacaaggctgtgaagtattattattaccattttgcaaatgagcaaactgacatggacactttaagaaatttgctaaaggtcacaccagtagaagttgaacagccaggatttgagtccaagcctgttttaatccaagccccaagccccatccactgggccatggatcagcaaatctttttctgtaaaggaccagatagtaaatattttaggcttttcaggccttatggtctccatcataactactcgactctaccattatagcacaaaagcagctataaatgatacagaaatgaaggacatgactatgtccaataaactttattatgggcactgaaatttgaatgttatattatttatatgtgtcacaatatatgactcttcttttcattttctatccaaccatttaaaaaatgtaaaaatcattcttagttcatgagccata

SEQ ID NO: 51916 - DNA, 2269 bp, Homo sapiens
tataatcctaccaattatataaacaactcttaacactggaatatgtcttctgtctcttaaagaacagattgttgggttttcaccaaattgtgctcattctgtatgttcaattttgtctcatgcttttttcacaatattatagcataagcattttccatttgtaaataacattttctttcatgactacataatatgctctgaagtagtcatgccatgcagaagatttttttctaaatttgttcaccacttcaaataatactaaaatgaacatatatccgtgtatataatggttgaacaatgtgtatggtagtatactagaggtagaattgagtttaagaatttgaagatttttggctgggcgcagtggctcacgcctgtaatcccagcactttgggaggctgagatgggtggatcatgaggtcaggagattgagaccatcctggctaacactgtgaaaccccatatctactaaaataatacaaaaaattagccaggtgtggtggcgcatgcctgtaatcccagctactcgggaggctgagacagcagaatcacttgaacccgggaggcggaggttgcagggagccaagatcgcaccactgtactccagcctgggcgacagagcaagacttcgtctcaaaaaaaaagaatttgaagaatttgaagagttttaagtcttttggtatgtagcatcaaatcacatatattttatttatgcataattacataaacatcatttaaaattctggaaatagaaatatagataaaataatatttgccattatttctttgacctagaggcagatacctattgaatatcttggtatagttcttccccatcttttttgaaaataaatacatatgcgcacacaattaccaaattgaaactattgtgtatgagtgtgtaatagtttgattttttattaccatgtctataaataatacttagagaccaaacagattttattaattacaacatattatcccaatcacacagccaaacatactcccatttttccacccctagtatagccacatccacgtgcccatacccaagtaacagagagattacatacaagaccactcctaataagacaactctcaagacacaatcttggttgtagttctcactggctttcttctgagaaactgactcaagagtgaatataggcagttgcaatagcatttttctaactggaaacttctacagagctcaactcagaatgatacgccactgtgccagccaccaggaacagttttgggccctgaaatatgaatctctgcttttcatcagatgtttccaaaagcagagtggttatgacagaaactttggcattagactctcctgggttccagccatgactgtacctcctattgtctgtgcaacttgaattaactttacccctctaagcctcagtctctccatctataaaaatgaatgacagtagctgcttcataggtttgaagtgatgatcagatgagacaatgcatgtaaagtactcagcattgtgtcattgcaggcacttaattttaactgtaattattattttgaggagttctggcagcagctttcgactctcgctctcacaaatatgactttctctttcctcattgatctattaacagaaaatattttttgactgataattcccaaagcagtcattatggcaatgaacacagcagttcaaaatgttatcatatttatcttatcacaaatgttattaatagctcaaagcagttgaaattgtcattaactatttttaataaataagtatatttcggcacttaatattcccaggagctttatataacaatattttcytcaatcttcacaaggctgtgaagtattattattaccattttgcaaatgagcaaactgacatggacactttaagaaatttgctaaaggtcacaccagtagaagttgaacagccaggatttgagtccaagcctgttttaatccaagccccaagccccatccactgggccatggatcagcaaatctttttctgtaaaggaccagatagtaaatattttaggcttttcaggccttatggtctccatcataactactcgactctaccattatagcacaaaagcagctataaatgatacagaaatgaaggacatgactatgtccaataaactttattatgggcactgaaatttgaatgttatattatttatatgtgtcacaatatatgactcttcttttcattttctatccaaccatttaaaaaatgtaaaaatcattcttagttcatgagccata

SEQ ID NO: 51917 - DNA, 542 bp, Homo sapiens
tacggatgcaaaagaagtcaaacttttctaggcctgccagaagccctattataccagaaacctggccttggccaatatctgtgtttgtctctatcattgatggaggaaagcagacaagaactctgagatcattgagaggtcagcatgtgacagcttgtcataaccttagggacatacctgtttctcttttcttggactttagagcactttgaatttgtatcttacagatatmttctcccttagagttccttgttttttcacatctccaacataagtggttttaaacatggtggaccatgaggttactttccagttctttgatgctacagacgcaaaataatttagtgtggaagaatttgtggtatctctagaaggggtacgtggaatggaagatagaatttttctccccaaaatagaatttgataaattgctgaaccaaagaaacaaaatgacagtcacactcagataccactgggagcatgaaatttgaatcaaggttttctttttagttttttatctccaaaagattaatctgctactgc

SEQ ID NO: 51918 - DNA, 584 bp, Homo sapiens
attttggaaatcctaaatatggggatggcttcagtgatgctgatccttaaaagatatggaaattctctggagaccaataacaaaactataagtttactctttcccatctggacatcaggcatttctattatgttgcctcttctgcaactaagcctggaattagcctttgcactsggaaagtcttattgatactggggatgcatttgagcattattgctaagagataaggagatgtcagtggagtgtccttactgagtattaggattagaggaagaggataatggttatttctgatacttcttacgtgaattagctaagaccttaggttaatgatatcatttcattggtctttttttttccagatataacttaaaaataaaatatgttttgcacatagctatttttaagatcaaatgaggaaatatatctggacacactgaaaattctaaaattcagcccccaaatgaatgacattaagcagttatctcatgttaatttgcattaaaatgtctgcttcagccactaaattgtgagcttcttaagtatagagataatgtcttattcatcaacacatctccaacact

SEQ ID NO: 51919 - DNA, 538 bp, Homo sapiens
taaaattcaggaagtttatgttaacccaagcataaaattcctagagaattctagggcagtgagtagtgacaggttagttaagctgctgtaacaaagacatccaaaccacaatggttcaaactggaattttatttctcttccatgaaacaatttagagatgcatggctagtccataacattatccaggaccsaaagtcattttatgttcttactccacatcctctgaagtgttgacctggccatatagtcaaagttgagtcaccagcatatatctgtgctctagctggcaagaatggggaaagatagaaagcagagtggcaagtacttcttcttacagaagtgacccagaagttgcctacatcatttttgcccacattctgttggcaaaaacttattcacatagccacgttagttgcaaagaagctggaaaacatggtctacaactgtaaagctgtgtgcctagctaaaattcaagggttatcttactaaaaggaaaaggagaatgactgcagtctctgtcacagacagtataccctga

SEQ ID NO: 51920 - DNA, 591 bp, Homo sapiens
tcctttttaagaaagtaatgcgaattaggtactgacccttggaaagggcctatgcaagtgaaggggccctggagctcaagcttcagaaaaggatacatgcaagaagaaaataaaacaggatggccrggcgctgtggctcacacctataatcctagcactttgggaggctgaggcaggaggattgcctcagctcaggagttccagaccagcctgggcaacatggcaaaaccatgtctccactaacaatacaaaaaattagccgggtgtagtggcgcacaccagctactcaagaggctgaagcacaagaatcgcttgaccctgggaggtggaggttgcagtgagcagagatcgcaccactgtactccagcttgagtgacagggcaagaccctgtctcaaaaaaaagaaaagcatatttgttatggccaatgatgtaatcaatcatgaccaggaatcacccacaaaacgcaaaaggacagtgttcagagagcttccaggtaggtgaacaagaagacttccatctgctgggagggtggttcaccccaactccacagagatggaagctcctgtgctgagaccagctcggtcgggga

SEQ ID NO: 51921 - DNA, 550 bp, Homo sapiens
caatgagtagaacagttggaccaaaggagagggttcatgtcggggataccgaaggataaagctggaagggctagttggagggagatcatgtkctctctagcccattgatggatggagctagtggcaactgccaggaaacaatgaaccctgggccctgatcatcagcatgatcaggctctcacttggccatgaggactatgagagctttcctactgtcactgtggggaagcacactatcttataatggtccgttccaggtatttttgtttccagtttatttatccatttatttattcaaacattcattaacacctactgtattccaaacatggtgcaagaccctgatgatttcaaaatgaatagctatgcttctgacccctggagatgcacatgtcagtaaaattgccagcttttagttttttcctgactaaactcttatggagatgacatgaaattttatttggagtacaatctaaatacttcttatgattcttctatgtttggttttgctttagttgcttgttggatttgtcagctaaatatattgttt

SEQ ID NO: 51922 - DNA, 812 bp, Homo sapiens
tgttagagatagggtcttactctattgcccaggctaggatgcagtgacatgattattgctcactacaaccttgaactcctggaatcaagcgatcctcttgcctcagccactggagtatctaggactgcaagagcacaccaccacacccagataatttttcgttgttgtcttctggagagggggtatctatgttgcccaggctggcctcatatgatcctcccacctcagcctcctcctgctaatattataatttaagtatttgccttttgctatgctcaaagttttacttagccttgttgaaagtagggccaagtgttgactgctaatgtgtgaaacaaaagatatgacttctttccatgcttgggatacagaggagcatagaggaacagaagcttagaaaagccattatgtcaagccaactagaaactatcagaggccttggtacagcattttattgcaagaagtggccggagactaccaggacagatctgtggaacatggaagcattcctggaattctcagaaatctcaatagaaagaagctaggtttaaaaaacaaaaacctttgtctatttacacataataagagctcagacaatattagtgggtactaaaaatctcagtgacactgatacctggagaatttagatacattccaatttcaaataaataaatttttctgctataaagtagaataaattaaacaaatatcttgaccctccctccattgccccttgtgtccaatctagaagtaagagaaagaggaaacataggtgctgtggrgttgttggtcatatagattccccaaaaaac

SEQ ID NO: 51923 - DNA, 1777 bp, Homo sapiens
tgtgccatgttggtgcgacagattattaacgaaaagtttcgagtaggmgaataacaatttcagctttgttttacaaaaatacgtcgcttttaaaattatgtgagaattagaattcatgaagaagaagattgtaagtatgatctgagtcacataatcattgctttagcccgttgcttttaaagcaactccaggtaatttcccctgcaacctgcctgatcccactgtttggattccatgtagaagatgcaaagggttgtggtggtaatgtagagtgtgggatggaggaggaggcatggagtgggggctgtgtggcaaattgggcataaataaatgtccattcctaccatgaattaaacatttattttacaattttttttcagtagtatgccagtcatttacaaacatatgttaagattcttacttggctagaaagatgaggccataacactcatgattagtttattggccgagctaaactcagtgatgctaaaatcagaaatggtttaatttttctccaatcattttctctaaatgtttctcttgattcttctttttcctgcctttgtgaacatcttcacatcgcaagcaaattcccatagctttctggtcactttcagatattcaacttagtccagtctaacactcagtcaaacatctagttcaaagattctcttctgcccacaatatgaccaggagctcaggaaaaggaaatattctatgccttttcatacttgaggtacttccactctccttttcctccttctttttcttctggaatgcagtgggagatggagattgcacagaagaaaagggttagaaatattcttacatagtgatatttgaagctcaaaattcttgttctttgggacatttgtggtcttttcaaacaatccaaagaggctccctgaggtgaataatgcactctattgggggaattctgtaacttcttataaatcacctcagctcctatccctagtgatctacccttcagccatttaataaaagggtcaccccaccctaactagcttcttactggctgtcagggtcccagcaggaaaatagaagcctatcttccttggtatgcacttggtccttgggaaattcattcatccttgtcatgacaataaatacgtaataagtaaataagtaaataaacaaacaagcattatgggcttgccccattctttgctctgttgccttgagctgctccctgcaattacctgcattcacaactcccctctcacagagtttgccaggaggaagcaggtgcaactctctgtgttcacatatgcctctcggttccaggagtcaaatatcaattttatccaagacttctcttagcctgcttcatttgggtctcttagtagcactgggacccttgattccacaccttgctaataacccagctggggagtgagatgcttttgtcctctttgtgagatcacccttttatctgtatgactggttctctaggaacatcttcccactggcttcagcaaaagaaagggggaaacaccctcatcctcgcttccatgggaaagggggaagaaatgtcatcacactttcctctaaggtcacaacacaatgatgccatatgttccctccaaagaacccttgtgttttgcttatatatgagaattggggtattggtctctggaccagtctggctgccattcagtaagccctccctatgtggatatatttggcacttctcttcagtactcagcattgcttgtcttttattgttctcagttttagtgcttaatggaaattccaa

SEQ ID NO: 51924 - DNA, 630 bp, Homo sapiens
ggtgggtgccaggtgcctgctggccgcggtgtgcctacagccttcgcgaagctgggctgcctggccgctgccactcctcccgccaccggagctgctctcgctatgttggccaggctggtctcgaactccagaccttagatgaaccacctgcctcggcctcccaaagtgctgggattacaggcatgagccaccatgcctgccctcggagctgctcttatttttcttatattaaagaatatatataactaattctagccatgcagtaagacatttaaatgtgtagttaaatatttatgcataaataacaagggccatcagaaagaaaagcaggwctgaagctggcggcccacgcatccacaaaggcagcaggcagaggaagcacagggccatctttccctgccttgtttcccagtctaattagtcatccagacctaaaaacatatcctcagagggtggagattttacaattaaatatcgttgttcttggtgccctctcccctggttcatcaagtataataccacatacttgacctcctgcccacaggggacctaccacctcctggcccctctcataggatcactgggcctacctgcactgtgtggccaagccctgtctttttcccaagccct

SEQ ID NO: 51925 - DNA, 588 bp, Homo sapiens
tcccttttgcctccaatcctcaaatagtcacgctttaataacaaactcttgaaagaatagagcccctttggtaaaatgtcaggcccacaagtgatagggaggaggcgggcttttttggagaggaactttgtaaatttcacacttaggcagttgcctattttttatctacttttgagccacgctttttctaggagcaagtccttgagaaacctacaatgaaaagtgggagctacctacacagggcgaactctgacgtcatccaggcattcccaatggatcygaagactcgatggaagatagttttctgtctcccctgccaacacccacagaattcctctaactggtctcctggcctcactctgcctcatttcccttcatcctagaaaacaatagcagatcaatgtttctgaggcaatgtttttttagctctaccaatgtccccccgactcaaaaaaccattatctcactacctaactaataaactccaacctctttaccttggtactcaagattccccctacctttggtgtatctcgcagtcctgccaaaccaaacagtgcatgctgtccaaacatacacactgcgtcc

SEQ ID NO: 51926 - DNA, 496 bp, Homo sapiens
aggaaaagaaggaaaggaagaaggtgacaggctgccagggtgatgggagatgttcaccttgaccatgagataatccagtgtcttaggaaacttgctccaaagtccagtggatccaaaaggcggaattgtatggagttcagttatttcacatccctgcttattcctgaccagaaaaactcaatctgggaatcaatttctgccaggctccacagggttcataagaggtgatgctaggtggctgtaggtcagggagctgagagacatccccattgaagagcatcctcactgctgggaaaggagatgaattgaaagttggccctgggtaacctgagatggagaagaytgagctgagtgaccaagcagcacaatgaacctacattcttgtacaacgtggtgtcctgcatgccgtagatgactctgctgcctggaactgggacttcagtgcctttctggtagcatgaatcagcaaagctacaaccacccccatttccacttc

SEQ ID NO: 51927 - DNA, 496 bp, Homo sapiens
aggaaaagaaggaaaggaagaaggtgacaggctgccagggtgatgggagatgttcaccttgaccatgagataatccagtgtcttaggaaacttgctccaaagtccagtggatccaaaaggcggaattgtatggagttcagttatttcacatccctgcttattcctgaccagaaaaactcaatctgggaatcaatttctgccaggctccacagggttcataagaggtgatgctaggtggctgtaggtcagggagctgagagacatccccattgaagagcatcctcactgctgggaaaggagatgaattgaaagttggccctgggtaacctgagatggagaagactgagctgagtgaccaagcagcacaatgaacctacattcttgtacaaygtggtgtcctgcatgccgtagatgactctgctgcctggaactgggacttcagtgcctttctggtagcatgaatcagcaaagctacaaccacccccatttccacttc

SEQ ID NO: 51928 - DNA, 1297 bp, Homo sapiens
acttttccttttcctgatattcataaggctcagaaaattccacaatataccaaaaaagattttgtgagcccagatgctcctgcatgtttctcctatctcctgtttaatcttgatcttgggtgttccaaaatgttctatttagaaacatcatttagaaggttctgatttttgtaattgatttctttttcccaccttttgtttctttacttactggcaaagcaccacataaccattctactgatatatgtcaaataaacaaatttgtatgcttatactgggtatatatcttctgtttgagaaaatatttggtttgcacatyttgggactaatctttggaattatttattccatgattactagtaggggtcatgcatattttatttggagggttcagaactcaagtcacctgccaaagtgttggggaaaacctgccaatgtgatggaagaatttacaatatcccgcaataccttttaaaaaaattccatctatctctgcattattaacttcctagaaaagcctagtcagtgtctccttctgaaacattgctccaagatcatttatctcccactaaatgtctgctgaaaaatttaatgttgttatgcagatatctaccaagggactcccctttgctggccagttttaggatctgacttggaaatctttttcaagttgggctctcaggaattgagagttagaatattgagttagttttgttgtggatattgaactagacaattacctagagccggagttggggttcaggccaatgatagccacatttatggaaaagccaaaactcaagagcctttccaagaaggcaggttagaaacaaggcagccatgcagagataagcagagatgggatgtggctgcagaaacaaagaggtaaagtggctgcctcataacttttggattaactgaaaccccagtatattgccagcaccttatttccttgagattccctaatcttttcgataaacttgccagtttgtatagtttatgggggtgtcagtttcttgcaaccaaatgattcctggctaattctttggaccatattgagaatttgaaaacaagtaaagtttcagatggaaaaaatgtgactcattgaagagacagagtgaagagcaagaaaaacatcgccccctccaactccacccctgcttttggtgtttttttttttcatataaattatagggcccaagccccatactaggaaaatatcaatgtaggaagtttgcttttgatgctctccttctcgactttcatccattgtctacttaatagaggtgctaccttc

SEQ ID NO: 51929 - DNA, 615 bp, Homo sapiens
ttctatctcacgatggtaggaggagggagagcaagtggtgtccatctgggcctccagtgggacaaggggactgacccaagcatcrccaggctgcccgggcatggcctgtgtccagcagagcccccgctggctctcacattgccttgccctgcaccccggacaagctcccacacaccccagaagaatggagctgggcagtccatctgcgggttacagagaaacacaaagtaaaggtagtcacttaaatacaccacttaaaaaaagggcttaggtcatgagcaggcaattcataaaacaaaggaaaaaatgcaaatatatctttctaaaaacatagtgatacaggaaacgcaggttaagtatcaatgagacattatcttttcccatattgcgagtgactaaagatgcaataatggtggctccaatgaggatgccggaaatgaaggactcacacattcaccactggtggaaatgcagatgggaacctttctggagaaacaaactggcgctcagtttccaaattcaagatgtacaaaatatggggtgatatggttcggatgtgtcccccctcaatctcatcttgaattgtagctcccataattcccaggtgctgtggga

SEQ ID NO: 51930 - DNA, 615 bp, Homo sapiens
ttctatctcacgatggtaggaggagggagagcaagtggtgtccatctgggcctccagtgggacaaggggactgacccaagcatcgccaggctgcccgggcatggcctgtgtccagcrgagcccccgctggctctcacattgccttgccctgcaccccggacaagctcccacacaccccagaagaatggagctgggcagtccatctgcgggttacagagaaacacaaagtaaaggtagtcacttaaatacaccacttaaaaaaagggcttaggtcatgagcaggcaattcataaaacaaaggaaaaaatgcaaatatatctttctaaaaacatagtgatacaggaaacgcaggttaagtatcaatgagacattatcttttcccatattgcgagtgactaaagatgcaataatggtggctccaatgaggatgccggaaatgaaggactcacacattcaccactggtggaaatgcagatgggaacctttctggagaaacaaactggcgctcagtttccaaattcaagatgtacaaaatatggggtgatatggttcggatgtgtcccccctcaatctcatcttgaattgtagctcccataattcccaggtgctgtggga

SEQ ID NO: 51931 - DNA, 1517 bp, Homo sapiens
tttttaaattttttctttaagattttagatgcttaccactgagtaccagagggatgtagcctgatgcccttatcaacaaagtcagggatggtggcacacaaggtttgactactgcatacacggtcacagtgctacccccagatagcctgatttccctgccttctctggtggggagaagggctggcagagccattagcatgggcttcagccaatcctggccactttgatgctcctggtgctgacccagggtcctggagkatgggctgaggcggcggggtagagatgttcagggcagtggcccctttccatccacactggaactatttcagtattttaccaccaattcggctattcccttatcggctggctgaacatcggccctgctccaggtctcagtttcccctttgtaaagggaaagccctggattcaggggtgactaggtcatcatggtcttgagattccaggcctgtaggcagggggagagaggttcactaggagtgcagaagaccaaggttggggagaggcagaggagagagtggcctccctttggcccaggtgggagattcacagagacaaccttccttcttctccaaggcaggacttgttaacagtgagcttcaggcagtctggcacttgggactaactaggatgtcaccctccctgcagcctccactccatagacaacatgagaggagtgtgtaagtataactaggaacaggctagtgtcctgatattctctgtgatagaggggacagccctcctcagagacccgggggagcccagaaccatggacagcctgaacacactttactttctcagcagtggcaaccagaaccctagcctactaaagccgaaattaaaaggagaaaaacctaaattcctgcctgtaccaggctgactcacatcaaggccctgctaggattaagctaactttatatacaaggccaagcagagcccagaaggaatggactccaggaacagggatgagaagaacaagttcttcttatcagcttccccctttgagattctttcctaggccagtatgtctttgctctgctctcataactatttttgtaactatttctgtaagtttgtaaggattttgtaagttcctgttttccatctgtgcaacactgagaaggtcacaagacatgtctgagcaagcctaaaatagtaaccatctgctgagggcctgctggacggcccagcagaggtcaccaggcatgtttgagtcatacacctgtcactgtttgattaactgcctttgttctgcttctgtaagcttgctaagcccaccctgtgagtttcacgcagctgcatgcttaaaaaccaggccccatctttgttccaggctcagccttttggatgcgaatctactaggccagtggccactttaataaaatcctcctgtctcatccattggtctctccagtctcttgaatcccgcaacactacaatggctccaagacagcatgtgggatctaagtaataactttttattttttttatttttttta

SEQ ID NO: 51932 - DNA, 522 bp, Homo sapiens
cacttaataatagcaccaattaaatactaacacctggaggtctggaggtggctgagacctattctatctgatgtgatatattttgctgtgaatctgaaaactatatatacatatatcatttgtcttatatttaggatatagaggcctggaaaccgagagatggatttaaaagtacttcctctcaactgtacttcaaatggcccttcagattcatttttctcctgtttaataatgtcasctctgttagtttagagatctacttcccaacagaataatgtttccacccagggacacagtggttgcatttagtggtaagtcaggattgtcatcctagttttttgtactttctgagtctctgagccaatagagaagttactgtactggcttgagtgatcagctgttattattaagaagaatgtgaggtggagagggggcaggagcagtagctcaagcctaaaatcccagcaaaagatcactggaggccaggagttcgagaccagcctagatgacatagagacctca

SEQ ID NO: 51933 - DNA, 921 bp, Homo sapiens
tatctttcttctttccaaaaatgccatcagcattgtcagtctcagaaaacaggtggaaaattgcctcagtgtttctgatatctcttattaaagatagttacgatgcagaactgaaaaatactaaagttttatgaagcatcaccatgaaataataaaactttcctttaataaagggctcatatccaataaagggcttatatctgaatgaatattgtcgttcactatggtcaccttaaatttcagatgcttccatcgttcaaaataytctgctgtttgtttgcaacttttagagccagtttatgcaccaggaagcagtctttgacaaacaccactgtgaaggcattatatcattatgatcagtacaaatgaggaggcaccctttctaagcatgaggaacatttcttttaatgagtctgtgccctctccaaaggaaatatgcattcatcaagtacactttaattcaaaatggtgtgtgttttctagacaaaaagatacatctctcataaaggagaagtactctgaggctgatgggctcatgaggtcacatgttggctaaaagacctcgcaggctatgcccagaacattagttagaccttttcaagatgtgggggaaaaaaagacacataaagtttcaggctgaatcaaaaagactatttttttactcagctcttgttatattttatagttacatccttatcccagacaggatataaggtcctttcaagaacccatgaggctacacatgaccttcccctgctacctctctttactggaatatgaaaccttacttgagcctacagtactctgcatacatagttaccatttgctatttactttacattagggatatataaaaaaaccctaaaaagccagcctataccaagctcagatgggcttactagtgaattttactcaacattt

SEQ ID NO: 51934 - DNA, 636 bp, Homo sapiens
caagaagaaaacaagaacttaacatgtacatacggtgaaatttacatagattgttcagagatggcctcattgagaaaatgactttgtgtaaaatcccaaaggcaatgaagaaaagcatcttgataatgtttcctggaagagcattgcagacataaagaacaagacacaacaacagaggctggtgtagagtgagtgaggaaatatacttggagatgtgaagtcagagatttagatggaaatcaaatcatgcagagccttgtgagaaatgacatggagttktgatttttggccaaatgtaatgaacagccattggagggttttcaataggaaaatgctgtaaaatgattgactattatacaaaatttattccagtttctgtatagaagacaatatttagatatcaagagtgcaggcagatagaacaatagaagttattgcagtattccaggtgaggcagctaccagagttggtaattttgattaggcttatggctgtacactactgagaaattaatagacttgagatatgtttttaaagtagaacctatatgacttgttgatgaattgaatatggaaaataagagagaaggaatcatcaaaataattaccctagagatttccttgaacactttggtga

SEQ ID NO: 51935 - DNA, 559 bp, Homo sapiens
tgccttaaaaaaatcactgtaatccactaaagatgaacttattaaagtcaaatttgattaaatggactgcagtcatgcatctgtctttctctctatttgggaccacggacttatctcatggtttattttccaatcagagaatatacaatggaataaatgtacctaatagttggcagaattattgcatcaaactcctgacctcagaaatggcaggaagggagaaatgaaagccccaaaaaatgctcccccctcaaacagaataataaaaacagttctgtctctagggaggttattgtaggatttaatgagatcatgaaakgctggaaattgcaggattgttcaatatgaccaaatacccatttaacttgactatttggcagtgaaaaaaaaaataacaacaggtagcttgtgaataaattctagtaattattgaaactcttatttggtgacaccatttcaaactgaatttagaaaggaggtatatatattagagcaaattaagcaaactctgggatgaagaatgaagttatcatcaacctattaatattttttccctatc

SEQ ID NO: 51936 - DNA, 683 bp, Homo sapiens
aaacatgttgcagagactatttttgctcactaaatattccctgcttttgtctacttttcccagcctgacttgcagttaattttgagacttgtgagcagagtagacagtgagcagaattagtgtgtgccacttctgggctgaggcttttaagacctagtgtcttcttgtgtctttcttttctactgccatggtgtccttggaggccacatattccagatgatgtcacttccagatggaaggaggcttcccaacccccatcaatctttatgtgtgtgggaaatgaacctgtgttgcattaagcagctgagatttttctttaagaaaccagaactaattaccttaataccaaatgtcaacattacaaaccataaacaaatcaatacaaattggtggttaaaaggaacaggataaaaggatatatactgttttcccttactactcagggtaaggagtaaaatatattaatatagaaaacttytacacaattttattttaaaagttactgttagataaagcatatgtctttcaaattatatgaaacatctacaaagaaaagatcgtttttttgtgtatgcatagaatgtatatggaaaaaaaacacaagaaaatattaacattggttgtctccagatataggaacatgtgaatgtattaaatgtacaagccatgaataagaattacat

SEQ ID NO: 51937 - DNA, 538 bp, Homo sapiens
gaaactcatcctcctgctgagaggaagacgttgcagcctcctcagcctccatggtgttgatggtgacagtgaaatgagttccagatccagggagatggaaccaggttgggaccccaagaccagggtggaagcccttaacatccttaccatgtcttgtgagatatttatttactgcccttcacaaattgagtttaaaatatttgcattttattttccgccaactgttctgctgtcagacagcattttttatcatgggggagagagagcaattagtccctcctgaacatctggtcagtggttagtctgatgagaggagttttgttaagagaatattagtgcttcagttgtcctgatttaacatggattctcttcccttggggagtgaatacaggttttactcaggccttcacaacagtgtggaatccagaagtgttggtattaatgccactgtgrtgttttttatgattttgttttcacactttgtgtttttgttttactcatattttaatatagtttattttatttgtcttaaattttc

SEQ ID NO: 51938 - DNA, 1081 bp, Homo sapiens
tggatcactgggaaaataaaggatgatggaaacttttttatttcccaaagttcagaattcaagattggacagactgcaggaataggggccttaggggtacaggagaggtcggctattgttcaattaaactgcccttggtttacggtgggtgggatgtggatggtggtggtgatggcagttgatgtggacccacaaaggagccaaatatgtttcttgcgaagaatcacagagttgaaggcactgctgcgtggcttcctgggcggagcctgtgccactgggagtctcacaggaaagtaatgtcgtgagtagggctttaggtgtgtaatcaccaaagggttagtgaagtccctgtacaaggagacctgaggtcatgtcactcagtcttagtgaaatcacagcagccaagcagagcttctgaaacttattctatccttagaggaggtctagcagagaccaccgtctgggtctgggagatgtcagaagcactgacatgctgagcagaaggcccagcaagacgtaatccagcaggttttgataaatgacaattttgatattaagttgtcataaaaaacaataaaaggttttgaaataagtaaatgtattatttttacacaatgtggtcattgcctaaaaataaatctgatttccatattctaacagtaatggtatagaaaaatgtatgatttgcatatagtcacttaaaataatgctccaaaaatatttatgaattattcaagagcatgtctgttactgccgtgaggtgatatgattaaagtaatgttcgtatcaaaaggacaaaatatcttttttyctggttaaaaaaatgaatcacatcagaaattattgtctattctaagatgatggatcccattgtgaatgaatttaaaattgtatttccaagcagaaatgtcaaaaaaaaaggaaatcatgaaatatagcaagtaatttgtcacacgtacaaagaatgacaagtctttagagtagttttccattcatgagtgagaacacacatccaacccaaaatctactggtctcactcccataatcactagtgtggagactaaaggtagtgcaatttaaa

SEQ ID NO: 51939 - DNA, 2115 bp, Homo sapiens
gcataatatcacatgttggaaattataaaaatgactttcaaatccctctcttctttccataggaaaataaatacgagcctcagcatgtcgattctgtacagatttgcaagtgtagaccaaggactattagcacaaatgacaagaaatatctaagaaaatctcatgaatgttcattaagaaacatggtcacataggtcttctcatcttttgaataaataaagcatatgaaaaactgatatgtcagccacacgagtcaacaacactctaaccagaaaaactgtatatagccttcgcatgtactgattacacaaaacaaatactaccaaaatttgcatgtgactagtatgtaaacattttatcggtttttcttttccaaatgacataattacattgtattttgaaaccagattaaagtatattacccatgatggtatctttgcaaaaacagttgtcttaaattggattctgagatagagagttgtgtgtaggtctgtagggagtgttcttgggaaatacaggaaggtgggactggggaggggtgggtccagctaactccaatcttgatgccacaaaagcatcaactgatccctagaggagctctggagatgtctcaaattgaggaaaagagacacagccattatatctccatgtcagccaggctttggctcctgaaaggggtcataatcttgcatgattcccagtgaggggtctcaaatgggagacgtcagccatttatgaacattcctagcagctggaggatggatgctgatccctacagaggggatttggtggagcactacattgttctctataatcatacaccattatgaaatatataatctaatttagaggaaattctgtcacttcaaatgcaaattcattgcacatatcaactttttttaatcttcaaagtgcatgtctcatttacttagatttctaccataaaaagatttgtctaaaaatgttaactattaaacactctcacctattagtaataaaacaacttaggaaattaataattaagaaataaaacagatgctaaatggacaaaacagatagcataataacaaaaatgtaaaggagcagacaatttcataaagtgctttcacttaataaaatattatttcatttggtactcaaacaaaatacagaatttatatagtaatttccattttgataatgaagacattgaagcacaagaagataaggcaacttaaccaaggtaagtgacaggaacttgaattaaaccatctattttgatatcagataaccatgggaagtaataattcctttgatacatagtattgaggcagaggcagggccagttgtatcaggagccaaatctctaagtttctaggtagtgtgtttcaacctgttgaatgtgaacacatttttaatgaatgcatattcagcttaaatgtgaaaaccataaaatctaagtctatcaatattttttaaaatgtcttaaatatcaactagataatattaaaatttcacattaaggtaagtttgatttttttcaaaatcaataaatttttcagtcccaaattcttaaagacagttatgtccagttagcagtaagttgattattatcatagacttcaaaatgctaacaactactataagtatctactaggtaacactggctgttataggcattggaaaaacagcgattaaaaaaaggagtaccaatttctcttatagaatttatatcctagtgataaaaatagaaatggagaagctagctcatgtgattatttgagagggtagaaagggctttgaaacaggagtccccaaaccttctgtccattactggcccgtatcctgttaggaaccgggccacacagtaggaggtgagcagtgggcaagagagcattaccatctgagctccacctgctgtcagatcagcagcagcattagattctcataagagcaggaaccctattgtgaactgggcatgcgagggatgtaggttgtgcgcctcttatgagaatctaatgcctgatgatctgaggtagaacagtttcatcccyaaaccacccccctcgccaaaattatcttccatgaaactggttcctgatgccaaaaagtttggggacccctgctttgaaggac

SEQ ID NO: 51940 - DNA, 542 bp, Homo sapiens
aagagtcaagaaggcccatgcataatggatgagatatgcaaagtttttaggccctaaacaatgctttggttgagaattattccaattaagcaaagggagatgacccattcaaaagggcaggatcagatcttacgtaagtgagtaaaaatttaaagtyccccataaaactgggacagagatagtttctactgagccagtgaacattaataacagataatcaataaataattaaatatcatctcaatataatttcttggtacagctgaaactcataatctagcatttttttttttttttttactgttgcagttaaaccaaatgaaatgagtggtaatttgatactcaagaaatagtacctggcctgcggtatttgcagtgtagtgatgaaaaacgtagattttggagtccaggagtcctggttgtgtgacctcgtttaaattgcttgatttctttgtgtcttatttgcaaattgagggaggacctatctaacaaacaagattaggaaacttgagggagataaattaagggaaatacttacctga

SEQ ID NO: 51941 - DNA, 563 bp, Homo sapiens
taatatagaatgctttcttctagtaatgtatctatgaccaaaaagaaagacaattgtttttcatcactggctaacagaaatacakagcagtgctaaaatcaagttaaagaaactgaggatgatttaattttaagctcttccttttaatttcgccaaaacttataagaaattagactattcactcccccattcccctatccaagcatttaccaagcactagcaagaattatgtaatcttcagttaccaatcaacacagacaacctctatgaaggaacttccaaaactctattggtattaagtagtcctaaagttctgaaaagctaaacttttggtggtttttgctgtatgctgagtatgcaatgacagagtgccaaaaagagatcctttgcagaaccccaaagtgaaaataaagcaaaaaaaaaaaaaaaatcttaagcgtaacattcatctctaccagaattctgcagtgtccaaattcaggactgagcccaacacaaatgtttgcaatgagataattttgatgctatatttgattatccatgtgagtattcttaacaaaaaa

SEQ ID NO: 51942 - DNA, 566 bp, Homo sapiens
taaaatataataaggtaaatataactttaaaaatgtttaaattrtgattcctttagtatatcatcaaaatttagttaaaccaacaggttgcagactattataagaaaaactttaaaattatgaaaccatcactagaccttcatgaataaacctattaattcattagtttattattaatcattagtacacttaatacttacatcctcatttagcacatctttctgtttaaggagctcatttattttctgctgtgactgtttgaggtcacagtctaatagagaacatcttttctcagcttctagcaataggttctccactttctgttttaaagttctttcctccaagagcttcttctccatttctagtataataaaaatggacacaatcataaatttacaaataaaagaagcatatcataaatttgtaagtaaaagcacattaaatgacaccatactaataaaaattataataaatgatgctgccttatattctattaattttctttttttcttttcttttttttttttttgagacagagtctcactctgttgcccaggccggagtgc

SEQ ID NO: 51943 - DNA, 547 bp, Homo sapiens
gaggacatttgtttagtgattattctctgaattgataaaaatgaaccaattcagtattaactaccatttttttcaaactattaaaacgctaatgtaagatacatgatgacttccatattttacacatgagtacacaaaactgttacatattatagatggtttcaaatctgaggctaaagcctttggtccttctgttgcatgtcattggctccttggattaagaacatggctcaccaaataattactagctatgtgaccttgtctagttatttaaactttctgwgtcttgtttcctgtgaagggacaattacagtattgttacgttgttgtgaaaatcaagtgcaataaaacatgtaaagtgtttagaaatgctattattagtactacatggggaatgtttcatttttctgcacttttgaagaccattcattaaacactaaatattcataggtttaatttttacctaatacaactttataatagatgataattagatgttgagcattaattatgaaaaagcagaggagccttaattgaatgtgaactg

SEQ ID NO: 51944 - DNA, 569 bp, Homo sapiens
cccaggacgtacccacacctgccggcccatgtagggtggtcccagcctgcgtcagtcaggccacactccggagccaggcttggtgcaaactcccagctgagctcacccgctggctgcggtctgtgatacttccctggtggtctctgacggggctgtatggcctccctctggaacccaggctgaacactcgaggagctggaggcagtcgggcagaatcagcctctggttgccagcatggggtgtcaggcaggggcaatccagcggggagcctggggagagagggcgggggtgwggcactgatctcaggctgtggggaggaattcacacctgcatggctgaggctggtgctgcccccctgatcaccaggagatcagcctctccttccccagcctcaatttgcacccctggcctgtgcggttggcactgtctcccgtggggagcccctgcctggctcaggggagaccctggtgcagagcccacctttggagctgccctgtcctgctgaggcaggagccacccctggcctggccctggcctggccctggcctccggtgaggctgcagtagcca

SEQ ID NO: 51945 - DNA, 569 bp, Homo sapiens
cccaggacgtacccacacctgccggcccatgtagggtggtcccagcctgcgtcagtcaggccacactccggagccaggcttggtgcaaactcccagctgagctcacccgctggctgcggtctgtgatacttccctggtggtctctgacggggctgtatggcctccctctggaacccaggctgaacactcgaggagctggaggcagtcgggcagaatcagcctctggttgccagcatggggtgtcaggcaggggcaatccagcggggagcctggggagagagggcgggggtgaggcactgatctcaggctgtggggaggaattcacacctgcatggctgaggctggtgctgcccccctgatcaccaggagatcagcctctccttccccagcctcaatttgcacccctggcctgtgcggttggcactgtctcccrtggggagcccctgcctggctcaggggagaccctggtgcagagcccacctttggagctgccctgtcctgctgaggcaggagccacccctggcctggccctggcctggccctggcctccggtgaggctgcagtagcca

SEQ ID NO: 51946 - DNA, 524 bp, Homo sapiens
tgggtgactctcattaagttacttaatctgtctgaatatatctctctacctataaagtgggaataataatgcccatctctcagtgtttcatggatgccaatgaataaaggtgaatacattccatgaactcttaaggaatgtggaaacaaaggtctgaaaaatagcaaagctttctccatgccaaatgtgcccacacatttgtattttttgtgtgttttatgccactttattgaggaataattaacatataatgtattgcacgtgaagtttgataaatcttgacatgaatatgyacgtagaacatcaccactataagaataatgaacatatccatcactctcaaatgttttcttgcacttctcctccctccttcccgccacttcttcctctaaacactgacttgcactatttctataaattactttccattttctagaattctatataaatgacatcttatagtgtgtgctcttttttttctaatttctttcacttgtcatattcagccatgctttgacatgtat

SEQ ID NO: 51947 - DNA, 1831 bp, Homo sapiens
ttctgcctcaatgcttcatactaatctagaaggagctttggttaccattatgctactttaatgacccaaaatagtgtgcatgtaagcatcatatcccccatttgaaaataagagaaacgtcaagtattacatgcaatgctgaggaatatatggaaggcaactctcacaagttctcagaaacctgtgattcttacaagaagaaataaacgaaatataaagtactgaacatatttccctttgagacattctccaaagctagcgaaaggcattgcagaaatgtaaagtattccttgatattgtttagcaattccatctgtgggggagggaaaatgcagctaagatcaaccttgggacacccccctaaacaatatcaatgcctgcttttcatcctatattttgtttgagatcaagtcatctgacagtacgctcgaattttcacctgaaatatttactcagtttttaatgaaaataaaaataaaaaacttttctctattaaagagaaaagatcttatatcctcagtaaacaacctgggacaaattaatatatcattgtcacctctggtttttaaaatttgtagttttcctcagcttttccaagctagccatatgtagatattttcactcagcctgaccatattcactaaccatatatgtctactttttggaaaatattccctatataaatgtgaatgaaattataaatttgaatcccacatactcattttttgaactctatttactcactagccaatattcacttaatttggaaacctgtatggtgaatctcctattcatacctttgatgctcatctgggtcaaccaatgaaaaaggagaaaaatgaattatgctttttaaaatcattaataaggtataaatctctaataaaaatgcatgaatcacaaatgtgctgtcacagagaaaaataataagccgaagaaacctcaacgtcctctggttcaatcctttttcttagtagaaggaactgaggctccaagagtttatgagtgtgtttatcttgccatacttttctagcgcatcaggagcaaaattaagctagatggggctcctgcctacctgtccagaactattttctcatagcatcaggttgtgtattatcatgtatgaaaaggtaccaggattattcttgttcaaaataaacactaccagtgatcatcagaatgagtgtgttccctgccaggatcacatcgtttttctgactcacatttcctgacttggagagcacctgccctcactgctggcacctcacaaatctgggatgatttagctgacctgggctggaggtggttggtttccagaactttggctccaagaacccagtgatgggctctgatcttggggcatatttgctctgcttgctgcagccaaaaatgtgcttgtgtccggtcagcattcttgaaaggtttgcctttgagtcacmcttttcctatggaccttttgttcatacactgcacttttaatcattatttaacatttatttaataccttcaatatttcatctcaccacataccactaagatattctacagaacaatgattttacttagatgcttagaaacaacagtaataaacacagtaggaattacaataatttgagtacttattatatattaggcaacttacacaccttttgtcacttaatcttgagaactttcctttaacacacactgtgagacgggtattattaaattgatgctacagatgaagaaactgtttcagagagcttaagtaaattgtctaaggtaaatggaagaagcagggctgtctaacccctaaggttctgtttctgattaccattgtcttgaaattaag

SEQ ID NO: 51948 - DNA, 852 bp, Homo sapiens
tctgatgacacagaacatgggagggggaaaggatgggctctcaacatgaagctggttcctttgtgagttcactaaggcataaaaatctgtacatttctgtgatctattctttaataaaaatctgggggcttgggaacaaatgtgaaggaacttagggccttttatcacagtgtatgtagccttagagccagaccccagttcaaattttgcttttaccatttaatagtgaaaagactttggagaagtgcttattctctgagcctcaattttctcatcagaaataatatctgtcttttttagatttggaaggggaaggacacttatacaatgcttaacacagtgtctggcacagttcgcattcaataaatgttagttctctctttgtttctctgattctgaagagagccagttgtttggaggctggcatttagaaatgcctataatatcctcaacatattccatttttattggttttctctttattttggctttatgccagggcttcttaaattaggatccatggaccaccccctctccaggaattgtatgcaaatatttgcaaccatgttcatttctcagagagaggaatcagagttaatcaattcacaagggattctgtgattcaaacggattaaaaatgtctgcatatgtttctgaaaagttgcaggcaaaccgaatatctttttttaaatcaaattttatttttaatgtactagaagagcctgtgagtaaaagggactctacartgaatctttctataaagcaaatacttgtttcataaactgcatatttaatccaggttttttgcatactacatttgattaaagtagaatatatagtgatattacatgc

SEQ ID NO: 51949 - DNA, 636 bp, Homo sapiens
ttgcaccccactacacccacttatttattttattttatttttttgtatttttagtagagacagggtctcaccatgttgcccaggctagtctcaaactcctcagcttaagcgatccacccacctcggcctcccaaaatgctaggattacaagcatgagccaccatgcccggccttcattcttttcatttattgataggatctgtgcttggcaagtgggtttggcttgggatttggatcagattttggtttttcaggctgagcagtgattcaatggtttcagttccttagagaatcctaagagctgggctctattctgtgctgcctctagccagctctgagcaccttggatatgccactccatgtatgagccttagtcacgcctcctgcaaaaggggaggagggtttcctgggtgcaggaagggagtcaggcaccactagtgacttacaaagtgattttactgtgcaccagacaagatcacatggagtggcatgcccctttcaacttccttttccatccctctgattatcttaacggagaaagtcttggcaggagtatggtgtgtctttaacacctctcaaacacttattatccaaaaacaagagagcaggctttagattttagtaagagygagtgtt

SEQ ID NO: 51950 - DNA, 568 bp, Homo sapiens
atttatagatcatttaccaaattattatatcaaaagcaagatagcagaagtcccccctccacccaatattagatttaaaattgcttatgattggatgcagacagaataaaaaggaaaaaaaaatcaggcccttaccaaattcaatgaaacagtatggtctgacagcagtatttgtcttcatcatgttataagtagtaatgaactccttctgaagctcatccaggaaagagaaggcgagaacatttgggtaattttcagtgcacaacatcatgtagctcactcccagagagctaataaaactayagtgtaaaaaacattggttttaaaatttcaaattaaatcaaggtaattcactgcttcacaagactggttctatacaccataaactgctactacggtggcaatgaagatcttaacatttattatatattctaggaaaaaatttaaaggaaccaaaatacagcactattttaagttgtggtttaaaaacagaagacaaaaaatagaatgtactacagagggacacacaatacggttctaacatttcagttatcacttggggtaaaaa

SEQ ID NO: 51951 - DNA, 568 bp, Homo sapiens
atttatagatcatttaccaaattattatatcaaaagcaagatagcagaagtcccccctccacccaatattagatttaaaattgcttatgattggatgcagacagaataaaaaggaaaaaaaaatcaggcccttaccaaattcaatgaaacagtatggtctgacagcagtatttgtcttcatcatgttataagtagtaatgaactccttctgaagctcatccaggaaagagaaggcgagaacatttgggtaattttcagtgcacaacatcatgtagctcactcccagagagctaataaaactacagtgtaaaaaacattggttttaaaatttcaaattaaatcaaggyaattcactgcttcacaagactggttctatacaccataaactgctactacggtggcaatgaagatcttaacatttattatatattctaggaaaaaatttaaaggaaccaaaatacagcactattttaagttgtggtttaaaaacagaagacaaaaaatagaatgtactacagagggacacacaatacggttctaacatttcagttatcacttggggtaaaaa

SEQ ID NO: 51952 - DNA, 1291 bp, Homo sapiens
gacttgcccggtgtcacagggctagtgagcagcrcagctaactaactagttagcagtcagcccgggccccctcctaagcccaaggctttctcccttattccacacacctgctaagacacctcaacactggagcagcttcttctctcaccccagatgctccctgttcccctcacctgccttttaaagggaaaagcagggtggcctgtgcactcctgaccttcctggtcaccccaaccccaagccctgtccccatcctagccaccaacccttcgtgggcagggaaggaagtagagctggaaaggatgagagatgggtgcctcagcagggcccatttgagggaggcaagctctggctggctacctgctgtttcacagtgacaaggataaagaaggtagcatggccccgtgccacctactcgttcctcggcagacagcaccagaaagcaaagttcccagcaccacttctgcccatccctgggtgtgtctcattcacagacccacagacacggactggacacacttagaaaactgcgagagctgtcaacgcagggctctgtggagctgacacggggctccccatgccctgatgattacaggcaagtttagaagtctaggagcaggagtgaatgaactggagggcaggagctgggttcttggagatctccttttctaacagtggttcgtgacagctgccgcctagagtggcctacatgggccacagcccagagttctgaaccttgggctactccagaaagattgcaccctgactctaatttcaaactcacacccagatattcctgagtccaacttaatctactttggctccataattcacctacttgtccacactattttaaaagctatctaacatttcagtttctatttcctcttacaggaataaattcaacacagcgaggcaactacatggaatagtccatccttctgtcttaaggttaactctttcaagctccaaggtgcttccctgccccagttttaatttgagcacatcgaaattcacaggatattctcattggcacttttattgactctagacatcatgtttccaaacttgagtcctgaagttgaatctccatagtctgtcttcagccactactcctgaccccatttcactcaggcaccctgcgctgcatgttttccaggccgctcagggacagcagcaggcctttcacctccacaggcagttctgggggcccactccataggtggctgcctgcagggaaagccagggcactgtgagcgcgtggtattgtgctccgaggtctttgccacca

SEQ ID NO: 51953 - DNA, 541 bp, Homo sapiens
taaataaaatgtacaattcagtggttttaatatattcagagtgttgtacaaccattaccactatctaatttcaaatatttccacctccccaaaggagtccccatacctagtagccatcaatcccagtttctccctcacttcatcttctggcaaccactcatctacttcctgtcttttyagatgtgcccattacggacatttcacgtaaacggggttatacatgtgtgacctttgtgtctggtttctctcacttagcataatgttttcaaggttcgtccatgttgtagcatgcatcactccttcactttctgttgtggttaaataatattccattgtgtatatatacagtttgttcatccattcatctgttgatggacacttgggttgtttccaccttttggctattatgaataatgctgcatagcaaataattcacttttattaacaaataataccacaaaaaaaccagagaagccccacagtgcagagcattcagagcctctttaattggcagtatggatgcatggggtcttaaagcctg

SEQ ID NO: 51954 - DNA, 1631 bp, Homo sapiens
ttgacaaaaaacccacttttaaaaataataaagctctatccaatgcatcacaaaatattcccagaaagcttcctgtacaccaagtattgtgtaggataaaaagcacagtccttttcccatccagagccattagagaagattaaaaacaagttacattaatacaaaaaaaaatagttaacatcagaagtgatgccacactgttatttggcaaagacatggcataactaagagctgcgagttgaaaaatgaacaacaccwtgggctagagaaccttgggaaagttcaacagaataggtgtgacttgacaaagtcctttctaccatttacaggtagaagagaggcggaacaaaactgaaggcggttatggaagacaggacagcgcctgtgatgcttgggagcaagaagtatgctccccagaaaactgtggagggatttaaccaagccaaagaatctgcaccttcatttggagggtgagaaacgagttaaagaatgtgcaccctcacttgggttctagcggggcgagggtgttacctgatgcttgtgagaatgcagttccctcaatcagcgggccaagaaccaagaataaagtttcatttgccgactagaaatacccgtattattacatgaaacgctacagcagattagcagacaaatgccaaactggccataaaacaacataagcaacacctgctctcaggtttttcaaactgacgccgtcccagcgcccctggtaaagagaatgattaagcttccactctggggccgcagctcatctttcaccaagaaacctcggcgaacctgcgactgacgcgttgccagcctccgcaagaacaactctgcccagcaagtggagctggggatgagggaaaacttcatgataagggtaaagaactcgaacccaggctctgcggacgtccccaagctgtccgggtccctggaccccgcaggaatcaaggggaaccgagagaggacggaggagaacgcgagaggccggatccacccctacagatgaagatccaaagtgagtcaagtcctccgcgacccgccccctgaggagctggctactctagggtatcctggccggcccctctcctcctctgcaccccagccctcggccgcggctccctcgagcgcgcccaggtgcccttctcgaacccctcacccatgatgaaccccctgtcctccctcgccgatcttcagtgattccttggccttcggctgcagctccgaggcggtttcctcgcaagcccagtcagccagcaacttccacgtcggactccaggcgggggcgggagcgagggtcagctgcgactgcgcgccgggaacggtggcctgagcatccgcgtcgtcgctttcgactcacggtccccgctcactggatgtagataccgtggaggccagaagagacgaataattcaaaaacctgaagtctctcctgcttgtgtttttctggacagaaagagcttctgaaatagagaaattggaatttttgttttaaattctgacaccaaaaagtggcgaatctgacaactgaaaatgcgagtcgggcctcgatgagtcgtcccggtcgaacgctggcgcaggctgcggcgttgcagaggacgcgtgtcccggagcgccctgcggggcca

SEQ ID NO: 51955 - DNA, 598 bp, Homo sapiens
tggtctctttcttcatgccattgatcaaaatttgatagtatcctgctccmtaatttatctgttaattttctgtctcctatcactaaggagtaagccaagggagagaaggaaccttgtgtgttttgtccactgttgcacccccaaatttagaggagtgcctgtcacataagagatactcaaaaaatacactgaatgaataaatgtttttatttttactgaaagtttgtatttatgctttgaggagcactttggactgaattgtttgtctcctaaatgtataggttaaatctctagcctccagtgtgatcgtatttgttggtggggcctttaggagatgattagtttagacaagatcataagggtgggcctcatgacgggattagttcctgcataagaagagaaagagacaccagagctctctttctccctgccaggtgaggatataatgaaaaggcagccatctacaagccaaaatgagagccctcaccagaaacctttcatgctggaaccctaatctcaggcttccagcctccaggactgtgagaaaatcaatgtctgttgtttaagccacccagtctataaatattttaatattttg

SEQ ID NO: 51956 - DNA, 598 bp, Homo sapiens
tggtctctttcttcatgccattgatcaaaatttgatagtatcctgctccataatttatctgttaattttctgtctcctatcactaaggagtaagccaagggagagaaggaaccttgtgtgttttgtccactgttgcacccccaaatttagaggagtgcctgtcacataagagatactcaaaaaatacactgaatgaataaatgtttttatttttactgaaagtttgtatttatgctttgaggagcactttggactgaattgtttgtctcctaaatrtataggttaaatctctagcctccagtgtgatcgtatttgttggtggggcctttaggagatgattagtttagacaagatcataagggtgggcctcatgacgggattagttcctgcataagaagagaaagagacaccagagctctctttctccctgccaggtgaggatataatgaaaaggcagccatctacaagccaaaatgagagccctcaccagaaacctttcatgctggaaccctaatctcaggcttccagcctccaggactgtgagaaaatcaatgtctgttgtttaagccacccagtctataaatattttaatattttg

SEQ ID NO: 51957 - DNA, 598 bp, Homo sapiens
tggtctctttcttcatgccattgatcaaaatttgatagtatcctgctccataatttatctgttaattttctgtctcctatcactaaggagtaagccaagggagagaaggaaccttgtgtgttttgtccactgttgcacccccaaatttagaggagtgcctgtcacataagagatactcaaaaaatacactgaatgaataaatgtttttatttttactgaaagtttgtatttatgctttgaggagcactttggactgaattgtttgtctcctaaatgtataggttaaatctctagcctccagtgtgatcgtatttgttggtggggcctttaggagatgattagtttagacaagatcataagggtgggcctcatgacgggattagttcctrcataagaagagaaagagacaccagagctctctttctccctgccaggtgaggatataatgaaaaggcagccatctacaagccaaaatgagagccctcaccagaaacctttcatgctggaaccctaatctcaggcttccagcctccaggactgtgagaaaatcaatgtctgttgtttaagccacccagtctataaatattttaatattttg

SEQ ID NO: 51958 - DNA, 598 bp, Homo sapiens
tggtctctttcttcatgccattgatcaaaatttgatagtatcctgctccataatttatctgttaattttctgtctcctatcactaaggagtaagccaagggagagaaggaaccttgtgtgttttgtccactgttgcacccccaaatttagaggagtgcctgtcacataagagatactcaaaaaatacactgaatgaataaatgtttttatttttactgaaagtttgtatttatgctttgaggagcactttggactgaattgtttgtctcctaaatgtataggttaaatctctagcctccagtgtgatcgtatttgttggtggggcctttaggagatgattagtttagacaagatcataagggtgggcctcatgacgggattagttcctgcataagaagagaaagagacaccagagctctctttctccctgccaggygaggatataatgaaaaggcagccatctacaagccaaaatgagagccctcaccagaaacctttcatgctggaaccctaatctcaggcttccagcctccaggactgtgagaaaatcaatgtctgttgtttaagccacccagtctataaatattttaatattttg

SEQ ID NO: 51959 - DNA, 642 bp, Homo sapiens
gatgaagagaacactctgagtggttttcaattgtctgctacaataaatgattaattttcccattatattacattagagggattaaaaatgattctgccttccttttatacccagttttatgagtcacttgtatgatggcgtgtcagtagtaataaagatggaccagacagtttaaataaactgtgctccagcagaaggctcctgggtgatgtgagattcccttaactctttctcttgattgrgggtttggatggaatcagaggccagggtggcagggctgcaggcagctgggagccagttccaaaggctggctcaaactgggtggggtttgatgaactgcccctcaccagcgtctcctgcaggctcactgtgttagtttcccacagctactgtaacagggaacgacacactgggtgacttagagcaacagaaatgaattatcatgcagcttgggaggccatagtctgagatgaagatgttggcagggccctgctgtctctgaaggcagcagggaaagattggttggaggctctcggctagattctggagttcctgggcttgtggcagcaaaattccagtcttcacatggcattctccctgtgtgtgtatgtctccaaatttccctttttgataacgacatca

SEQ ID NO: 51960 - DNA, 535 bp, Homo sapiens
gatttatgaacctaaaagcttctgattttgaattttagaaatattcatatcgcctatccttttactcacaagttttctaaacatcatgtcaaagtttgtcatctatatgttgaaaagagcacacaaagtaagaaacaaaatgttgacatcattctttttgttttcaaactgacctcaattcataaacccggcctcttttacaaaattattcaacagttgaatctgtgaccagttaattagttgtgaatccactcaatcaaatcatctcaattcactatttcctcttttttttttgagatggagtctcgctccgtcgccaggctggagtgctgcagtggcacgatctcggctcactgcaatctccgcctcctggtttcaagcaattctcctgtctcggcctctcaagtagctgggactacaggcacctgccaccatgcgtggctaatttttgtatttttagtagagatgggrtttgaccatgttggtcaggatggtctcaaactcctgacctcaagcgatccgcccgcctcagcct

SEQ ID NO: 51961 - DNA, 580 bp, Homo sapiens
tacattcagtttctcagtctgtgatcttttaattttgtggggagggaagccagtcctttaaagcgatcttcagcatgatggcagagccaaggagtgtggacaggtggcacggtgtctgactttgttccagcagccacttgggctttctctgggtcttctgtgacctagggatagcaccactattgaaaacatgtctttgtgacattctctatgccaggaactcccaacacattttccttgaaactgatgaaatgaataaaaataaaccaagaggtgtgctgtttgtttctgtttcctcctttctgcagcccttcttgatcatctaatatttttaawtacattgtcgatcaccaaaaggagcataagggctttattgatttgtagtagatgtattaatagtccagccgctattccttgcctgtagctgccgggaagaaaaccattcttaacactctacaagttctcatctccagaatttgcacctgtttctagctgaggactttctctagcagcacgggagcttgtgactgggcatgaagtgggaagaaaagtgagggtaactaagaagaatctccctgga

SEQ ID NO: 51962 - DNA, 580 bp, Homo sapiens
tacattcagtttctcagtctgtgatcttttaattttgtggggagggaagccagtcctttaaagcgatcttcagcatgatggcagagccaaggagtgtggacaggtggcacggtgtctgactttgttccagcagccacttgggctttctctgggtcttctgtgacctagggatagcaccactattgaaaacatgtctttgtgacattctctatgccaggaactcccaacacattttccttgaaactgatgaaatgaataaaaataaaccaagaggtgtgctgtttgtttctgtttcctcctttctgcagcccttcttgatcatctaatatttttaaatacattgtcgatcaccaaaaggagcataagggctttattgatttgtagtagatgtattaatagyccagccgctattccttgcctgtagctgccgggaagaaaaccattcttaacactctacaagttctcatctccagaatttgcacctgtttctagctgaggactttctctagcagcacgggagcttgtgactgggcatgaagtgggaagaaaagtgagggtaactaagaagaatctccctgga

SEQ ID NO: 51963 - DNA, 556 bp, Homo sapiens
aaaaagaaaaatccttagtaagtatatcaagtcggattaagtctggctgcatgtaatagaaaaaaacaacaacataataatgtcggtagcttaaatgatatagatgtttattttccttgtgtttataaggaaaatcaaagactgacagtccggggctgctaaggtcttcctgtgattttctgggacccaggtcccttctatgttgatgctctaccatcaaatggtattgctccatggtctgtgatggctggtcaagctctggaattcgggtctgtattctaatcagcagtaataaagggaaggtgcagagggagaaaaagactgtaccaaacttctgcttacatctcatggagagaattaaatcaaaaggccacacatagctaaaagaatgaagaagycttctatattgctaggtaacatgtgatgtgagcactaaatatggtcaataggtcttaataaagactactttatttaaattactttgtgtgaaagtattgtgtatgtgtgtgtgtatgtaagtaatttgctgaatagctgagagtcatgtatggaaaaa

SEQ ID NO: 51964 - DNA, 550 bp, Homo sapiens
gctggagtgcagtggcgctatctcggctcactgcaagctccgcctcccgggttcacgccattctcctccgycagcctcctgaatagctgggactacaggcgccagccaccacgcccggctaattttttgtatttttagtagagacagggtttcaccgtgttagccaggatggtcttggtctcctgacctcgtgatccgcccgccttggcctcccaaagtgctgggattacaggcgtgagccactgcacctagcccatttaccccactttcttcttctaaaactatatttccaatttagtctttaatatataattttaagggatttttaaaaatttgcttcctctaaataatatacttacagtgcttaattctttgcttaaataatatattgtttaaatatacagtccatccaatttgaacaccactgattggctcagtaggatgtggagattagtgtacaacttccctcccctccaacagtccctgtcatagctttcgacttgtatcaaatatggttctatacttatattttcacattttatgtaaatta

SEQ ID NO: 51965 - DNA, 550 bp, Homo sapiens
gctggagtgcagtggcgctatctcggctcactgcaagctccgcctcccgggttcacgccattctcctccgccagcctcctgartagctgggactacaggcgccagccaccacgcccggctaattttttgtatttttagtagagacagggtttcaccgtgttagccaggatggtcttggtctcctgacctcgtgatccgcccgccttggcctcccaaagtgctgggattacaggcgtgagccactgcacctagcccatttaccccactttcttcttctaaaactatatttccaatttagtctttaatatataattttaagggatttttaaaaatttgcttcctctaaataatatacttacagtgcttaattctttgcttaaataatatattgtttaaatatacagtccatccaatttgaacaccactgattggctcagtaggatgtggagattagtgtacaacttccctcccctccaacagtccctgtcatagctttcgacttgtatcaaatatggttctatacttatattttcacattttatgtaaatta

SEQ ID NO: 51966 - DNA, 550 bp, Homo sapiens
gctggagtgcagtggcgctatctcggctcactgcaagctccgcctcccgggttcacgccattctcctccgccagcctcctgaatagctgggactacaggcgccagccaccacgcccggctaattttttgtatttttagtagagacagggtttcaccgtgttagccaggatggtcttggtctcctgacctcgtgatccgcccgccttggcctcccaaagtgctgggattacaggcgtgagccactgcacctagcccatttaccccactttcttcttctaaaactatatttccaatttagtctttaatatataattttaagggatttttaaaaatttgcttcctctaaataatayacttacagtgcttaattctttgcttaaataatatattgtttaaatatacagtccatccaatttgaacaccactgattggctcagtaggatgtggagattagtgtacaacttccctcccctccaacagtccctgtcatagctttcgacttgtatcaaatatggttctatacttatattttcacattttatgtaaatta

SEQ ID NO: 51967 - DNA, 525 bp, Homo sapiens
gttctgcagggtgactgctctccatgtttctaggtggttctgcatggggcctctcacatgtgctacagtcaaacattagccggggccacagtcatctgaaactcacttacatggctgacaattgatgttggctgttgcctggagaagacatatgtggcgtggtggaatggaatggtgactagattcaagaaagagcttcccaggaggaaggctaccaagagaccgaagtagaggcttcagtttcttaaaaaaaaaaaaaaaaaaaaaaaatcggrcaaggcacgatggctcatgcatgtaatcccagcactttgggaggccaaggcaggcagatcacaaggtcatgagatcgagaccatcctggccaacatagtgaaacccgtctccaataaaaaaaaaaaatacaaaaattagctgggcatggtggtgtgaaccggtagtcccaactactcgggaggctgagacaggagaatctctagaacctgggaggcggaggttgcggtgagctgagattgcaccactgca

SEQ ID NO: 51968 - DNA, 544 bp, Homo sapiens
  misc_feature (1)...(544): n = A,T,C or G
cacgtgctaggacctgggctaagggctgggataaaggtgatgaaaacttcggaacctgagagatggacagcatcattaacatcacctccattttatggatgggggagctgacgctaaggcttgcgccggngggtcttcgtgagtagcgaggtcaggtgccacccggagacgcctgcggggctgggctgcccaggcgctcaagctccccagactcaactgttaactgggactgggctgggggcggggctcggatggagtgttgggaagctttcggtactttcttctcgaaaccctttctgaattactcccaacgctggcggacacctgatgaaggggttaggaaagtttgtggctggaaggaaggacggaagacagcaggagtcctgctgggatcagacagggaaaggcggctccctggagggtcagaggctcaggtcatcgggggaggctggatgcgcgcagccccctgctcccctccccaagtttggcggtgattgcctggggcccggggcgctctgcgccgcacttgggccmggcaggcggc

SEQ ID NO: 51969 - DNA, 562 bp, Homo sapiens
tgaacctgctactactacccaattctaacaactattctcaatacaggagattttcttccaggaatttcatctgttaaattgctgctcacctttgccttgattttataggtmttgttctttatttctttaactagccttagaacccattacatttctcgaagtggttttccaagaggactcttctttttcagtaggtactcatctgaaaataattaatacttttataacttataacttccttaaataatttaaaaataaatgtatgttatatttaaatatttattttagattatatttttaactttttatatatttatatatgctaatttatattataatgtatttttgctttatatttaagttcttttaggcagcatggacccacatcagctttgggtgtgaatatttaatatttataaaacaccttccttgcaacagtaacgtgctaggtgcctgggttacagagtatatcagtcagggttctccagagaaacagaatctcacacacacacacacacacacacacacacacacacacacacacacacacttccagtaaggt

SEQ ID NO: 51970 - DNA, 562 bp, Homo sapiens
tgaacctgctactactacccaattctaacaactattctcaatacaggagattttcttccaggaatttcatctgttaaattgctgctcacctttgccttgattttataggtattgttctttatttctttaactagycttagaacccattacatttctcgaagtggttttccaagaggactcttctttttcagtaggtactcatctgaaaataattaatacttttataacttataacttccttaaataatttaaaaataaatgtatgttatatttaaatatttattttagattatatttttaactttttatatatttatatatgctaatttatattataatgtatttttgctttatatttaagttcttttaggcagcatggacccacatcagctttgggtgtgaatatttaatatttataaaacaccttccttgcaacagtaacgtgctaggtgcctgggttacagagtatatcagtcagggttctccagagaaacagaatctcacacacacacacacacacacacacacacacacacacacacacacacacttccagtaaggt

SEQ ID NO: 51971 - DNA, 564 bp, Homo sapiens
aaccacaagcaagaactataacctttgatcttcacaggcatatgttgagggaaacaaatgactggcatgaggttgtgcagctggtgaatttgaaactcaaccatatgagtaaaaacaatttgagtaagacacaatgaatttagacttcatttattctcattttgaaataatttgcaaaagtgttaggctaaggatttatattttcattacctatgaggaaataaagcaaacaaatttggaccaaaactacaaaaactaaagmattcaaagtatcatcaagtgctttaaaagtcacattttcagtattctcatcatcacacaaacacttaaattgaaatgacaaattattcagtatggctggtcagaagagagatttgactcagagacatttgttactagttgttatctgttattataggaattgccataatgagacaagctcactcatcatggatttctattggtaagaagaaaaataagggatttttgtgagaagacaatgctgtccttttaatgttagcatcaaaaggtccaggatgaaacttaattatttttatcttttca

SEQ ID NO: 51972 - DNA, 563 bp, Homo sapiens
aatggaagaaaaaaaccaatatggtatgcagtactcataattacattttcatttgtgttgctatccttgattactatacatataagaaattatctctcaaggaaataaatgatccttgtattgcttctggagatgaaaatcaatgagtttaccttttgctacaaatatagccactctttttttttcttgtagacattaaacaccaatttgtggagacagttttgcatatacaaaggaatctgagcagcatacctgactcaatattaataaatgaagttgaaataggacctgtgattggtctgtgatgacagaaagcaaatagcttttcctcctgatacaactaaaagattaytttgctaagcatttatttcaaggattggcaaagaatgtgttataacacacgtctgtaggcataatggaagaaatgccttgagcgtcattcaaaggaaggatagagaaaaaatatatatagaatcaatgtattttaacggtaacagtcttttaatgtttattaaaaataaaatattttaattttaaaaaatcaatcttttaattttttatta

SEQ ID NO: 51973 - DNA, 563 bp, Homo sapiens
aatggaagaaaaaaaccaatatggtatgcagtactcataattacattttcatttgtgttgctatccttgattactatacatataagaaattatctctcaaggaaataaatgatccttgtattgcttctggagatgaaaatcaatgagtttaccttttgctacaaatatagccactctttttttttcttgtagacattaaacaccaatttgtggagacagttttgcatatacaaaggaatctgagcagcatacctgactcaatattaataaatgaagttgaaataggacctgtgattggtctgtgatgacagaaagcaaatagcttttcctcctgatacaactaaaagattattttgctaagcatttatttcaaggattggcaaagaatgtgttataacacacgtctgtaggcataatggaagaaatgccttgagcgtcattcaaaggaaggatagagaaaaaatatatatagaatcaatgtattttaayggtaacagtcttttaatgtttattaaaaataaaatattttaattttaaaaaatcaatcttttaattttttatta

SEQ ID NO: 51974 - DNA, 563 bp, Homo sapiens
aatggaagaaaaaaaccaatatggtatgcagtactcataattacattttcatttgtgttgctatccttgattactatacatataagaaattatctctcaaggaaataaatgatccttgtattgcttctggagatgaaaatcaatgagtttaccttttgctacaaatatagccactctttttttttcttgtagacattaaacaccaatttgtggagacagttttgcatatacaaaggaatctgagcagcatacctgactcaatattaataaatgaagttgaaataggacctgtgattggtctgtgatgacagaaagcaaatagcttttcctcctgatacaactaaaagattattttgctaagcatttatttcaaggattggcaaagaatgtgttataacacacgtctgtaggcataatggaagaaatgccttgagcgtcattcaaaggaaggatagagaaaaaatatatatagaatcaatgtattttaacggtaacagtcttttaatgtttattaaaaataaaatrttttaattttaaaaaatcaatcttttaattttttatta

SEQ ID NO: 51975 - DNA, 636 bp, Homo sapiens
agaaatggactcgcttggaccatagtgtagagcagtatttgtcagacttttggtttggtatcaggagccctttgtactcttaaaattattgaggaccccaaataactttttgtggtggattatatctattggcatttaccgttttagaaattaaaaatgatgaaagacttctaaacatttattaacttatttaaaataacaacaatatacccattacatattaatataaatgatgcattttatgaaaataactgcgtttactgaatcaaaacaactaattagaagagtggcattatttttcatttttgagtctctttaatatctggctttctcgtgattgcatgagaattctcatgattgcatctgattttaatctgttgccataaattggtatggttaaagtatatgaaaagatctggccttatgcagatttgtagctggaaaaggaagaatctcataaactcatcctctctmccccagaaaataatgtcttgggagcatctgagagtgcttatgcccttctctggagtacaggaagaactgtaagtcagatctgggtttgtgtcttgagtgatttactcactacttgtgtaatttttgcatgttatttaatccctcttaactaaatgttatcta

SEQ ID NO: 51976 - DNA, 580 bp, Homo sapiens
atttcagcaatgagcagtgtactttcaaagcactgcacctttcaacaaaggtgcagtgtatatttaatactagagtaattttaaaaacatgtttcactataaaaagaaaagcaactaagattattgcatagggactcactttttataaatatgcattcttttgcacaatgttgaccacatcatcaaattgttgtgacattttttaggcagagtttaaagtctattttttcctggaatattcagatcaaatttccttatccttttttgcttaacccaaggtgagaacaggagcagatattaccgtatgtttttaaaagattattttgatttcctttctgggtagagctggttattatctctattgctctctaaagatcagaagatgaaaagaacaagcaaatagagaraacaaaaggcatgtgataagagagtttctatattgcctaagtgatagtttgccatagtacattgtagcgaaaaggttgcacaaaagttataagcaaagtatgaaaaagttaatagaaacagcctatcctttgtagagatagttggtgattaagatgccctggggtggaaaaca

SEQ ID NO: 51977 - DNA, 852 bp, Homo sapiens
tagtcctttgggtatatacccagtaatgggatggctgggtcaaatggtatttctagttctagacccttgaagagtcrccacactgtcttccacaatggttgaaccagtttacagccccatcaacagtgtaaaagtgttcctatttctccacatcctctccagcacctgttgtttcctgactttttaatacttgccattctaactggtgtgagatggtatctcattgtggttttgatttgcatttctctgatggccagtgatgacaagaattttttcatgtgtctgttggttgcataaatgtcttcttttgagaagtgtctgttcatatctttcacccactttttgatggggttgtttgtttttttcttgtaaatttgtttgagttctttgtagattctggatattagccctttgtcagatgagtagtgtgatgaagaataaaaagaagttttgtctgagcggggtgggccttagaaaaatgacctacctgtaagatctatcctcaaaagccatgttcttacagtattctaacacacagtgtccaggggcatgagatttttttcaggccagggttatcgttcaaggaggcccaattcatcacatgattagagtagcattacaagcagcagggctttctagatgtatgatggaggtggaagagtcattgttttaggtaataaaatggcaatttaaaatatgaacattagcatccaggaagatgagagaggggactctttttcccaagggaaaggactggcagatgctggtcagggtttcagggctcccactaagtaaactcacatcctagatgaaaactatttgtaatccttgttcgctgccctgggacacaag

SEQ ID NO: 51978 - DNA, 852 bp, Homo sapiens
tagtcctttgggtatatacccagtaatgggatggctgggtcaaatggtatttctagttctagacccttgaagagtcaccacactgtcttccacaatggttgaaccagtttacagccccatcaacagtgtaaaagtgttcctatttctccacatcctctccagcacctgttgtttcctgactttttaatacttgccattctaactggtgtgagatggtatctcattgtggttttgatttgcatttctctgatggccagtgatgacaagaattttttcatgtgtctgttggttgcataaatgtcttcttttgagaagtgtctgttcatatctttcrcccactttttgatggggttgtttgtttttttcttgtaaatttgtttgagttctttgtagattctggatattagccctttgtcagatgagtagtgtgatgaagaataaaaagaagttttgtctgagcggggtgggccttagaaaaatgacctacctgtaagatctatcctcaaaagccatgttcttacagtattctaacacacagtgtccaggggcatgagatttttttcaggccagggttatcgttcaaggaggcccaattcatcacatgattagagtagcattacaagcagcagggctttctagatgtatgatggaggtggaagagtcattgttttaggtaataaaatggcaatttaaaatatgaacattagcatccaggaagatgagagaggggactctttttcccaagggaaaggactggcagatgctggtcagggtttcagggctcccactaagtaaactcacatcctagatgaaaactatttgtaatccttgttcgctgccctgggacacaag

SEQ ID NO: 51979 - DNA, 1521 bp, Homo sapiens
tgagaaagacagagttaaacaaaggtaaactggttgagtttagtttttgttttgtttttacttcaggccttcccagagcctttaaaatgcctttggtcccaagtctctgacaggagggtgaggtggctccattatctccacacttattggacctgaatgctctttttcataggaaagctatgaacaagaggaacrtggtttggaaatgtttgtcccagccaccatgtccagatgaggaaacagaattccatggaagtggaatgaccagcacttggtcccacagctggatgtggcccagccagggctgaagccagacggtggagtctcagcctggactgttcagacttgggtctttccctccatccttcacccaccacacaccttgatttaacccaggaaaaaactttccagtgggccacagaaatggagcagattctgctcggatagagactgcttctgaggttcatctgtgtcttcagcagaatcccccaggctggtggacgcaggagggagcgaggaggcaggagtccccacggacatggctgcacagcctggggccacagggcttccaagagggagccagtctgcagcagaaaagcccagagggcagttccgcacacacacaagcacagcccccacccccgacactgcagacagggcctcttccggaaggcgctcccccaagctcatgtcccacagcctgggcttgttggaggccatctggcctgcagatgctggtgagcctccatggtgtctgtccccactgtggcagggacaaagtccccaagaggaagagaggacctgactgctcttcagagcttgacacacagcacccccagccagaagctgacctcccacttgtttgaggcagtgttcaaggggctgtccacagcaagagagatgggactgggctccatctccaaagaggcctccctgagccagcacagaggaaggacaaagaaaagattgaaaaaagcagagttggggctctctggtgccattgcgctgcctccattcagctaagatgccctgcctctccttccacctaaagcagcttctgccacttaggagacccccctctccccaaacactgaatggcacgggttggccagcttaggaactccgttgactaagccagaccttcctcctttccgcctgcccctagagtgtgagagggcacagcaagcagctgtcctccctgctggtggtcaccacctccagcactggctctgtttccctttgaacattaattagcaggtgggttctgatttgagagtgaagcattctttgggggtgcccagctgagagcagtggtctggtggagcagcgtgcaggactctctggaaggctcacccgttatagcagagctggaaatgtgatttccaggcctgagtcggatggtgggggagggtcgccctccagcctggtgactggaggtgaattcccggatctcctgggtcttggcttcttcctctgtgaactctgacttgggggttgttgggaggtgatttagtgctgttc

SEQ ID NO: 51980 - DNA, 590 bp, Homo sapiens
tctaagacttcttcagttcagctaccaataacattttaatatgcatggctctgtgcagtttgcaaagtgcttttggaacacataatagacaagcctggtgattcatgtrtttatttcgtgttaggaataggtaacttatattttgtaagataatttgtctaaattcaaagaactgaaaagtagaaaaactggaaaatcaaagccaggtattgtgattctcagttcagtgcctaatccaccctaaattaccttttccacatatttggacacttagaagaaataggaaaatatgcatgagcatattatgatggctcattttatgtgtcaacttgactggatccatagaatggccgaatattaagctaaaaacatttctgactgtgtttgtgagggtatttccaaatgagatttgcatttgagttggtagactggatgaatcagattgcctttcccagtgtggtgtcaatgtacattaattgaggtcctgaatagtacaaaaaaaaaaaaaatactggagaaggggagaatttgctcttcctgcctgacagcttgagctaggacatcagtcttctcctttccttggatgggga

SEQ ID NO: 51981 - DNA, 614 bp, Homo sapiens
ataggattaattcatgagtagacaatttggaaacttttgaaaaatgtaaagaagaaaattcattcccacctcaaccaataccatcaccctgaaaaacagtgctgttagcaagttgatgtcattgttaatagattttatttcatttttgtgatgttgggaaggatgtaagaattatacatattttccaagagctgcttttkgattaaccagttatattgttgttttgttttattttcattaagctgtgctcttgtggctgtagaatataagtgacctgaagtgtttaaataaaacctttaacacaagctatattcattctcaaataaaagaaggtaaagaggcaaaggattccaagtgactgaatccgattccatttttatcttggaaacataaaaataagctacatggtatttttaaatatactcgcactgagaatttaaaattacaacctccagtggaagtaaggtatgtgctctaataagcaagctctacagagctgttcccgtgaaagcactcagaacaagggtcatcaaggatgccacatgcctgaggttgtccctttttgcccatccttttgataaaagtcaccctcccactggcagcagaaatcaaga

SEQ ID NO: 51982 - DNA, 1300 bp, Homo sapiens
cagcctcccttccttgtattcttgtgtgctaattaatgtataaaatgaatgccacatgaactaacatattttaagagtaccagttatataacaaacacagtattattctactttggtaacttgatactggtcattcaatgtctttagtataatgtgcactttttctcttaatattttagcttattcacataaagattaatttaaaaaacattcatgttgtttgctttaaatcctcttgactatttgtgttgagaacagactcatttattgtacattctattgtcgattacctgttctccattatgattttcttttccttgactcacttgcaaactaataagacaataaaatcaggattgatataaaaccagtagcagcatccatttcactttaataatatatttaaatataaagcaaaaaatgaatatctacatactatatgaacttaactctttaaaaacacacaaaatgaaacattgcacatttctgatcttatgtgacttcatgaagacttatgatttctgattaatgactaatcagaataattttgtaatgggagcttggtatcatcttgaagcacctggctctacttttatggatagtcatagaatctctgctgtacatggtttatgaccttaatctcacattttgagagagagtgctggacttaaaatactgtattttgattcttcacatttgtgatgttctcttttgtaatcctaaaatgagcatgatgttccgatatgtgtttccaagttctaactcttcatgttgaacatccaagtaataggcatatattatagacaggtcttgttttgcatmtttctgtggtaactgatatcaatgtgaaatcatacttcttatatgccctcccaaaaaaagacatgtccatgtcctaatccctgaaacttgtgaatagtgtctttttttttttttttggtaaaagggcctttgcaaacttaagcatttccagatcaggagatcatcctggattatccaacagggccctaaatacaatggtaaatgtccttatgagagaggcagaaggaaatttgaaacaaaaagaataaggaaagacacagagaagaggaggaggcaatggatcatggaggcaaagcctggagtaatatggctgcaagaaaaggaatgcagagagccaccaggagctggaggagacaaagaacacatggagactccagatagagtgcagccctgtgaacggctttaatgtgaacatctggcatcaataattatgagaggatgaatttctatggtttaagtcaccaagattgtgataatt

SEQ ID NO: 51983 - DNA, 1300 bp, Homo sapiens
cagcctcccttccttgtattcttgtgtgctaattaatgtataaaatgaatgccacatgaactaacatattttaagagtaccagttatataacaaacacagtattattctactttggtaacttgatactggtcattcaatgtctttagtataatgtgcactttttctcttaatattttagcttattcacataaagattaatttaaaaaacattcatgttgtttgctttaaatcctcttgactatttgtgttgagaacagactcatttattgtacattctattgtcgattacctgttctccattatgattttcttttccttgactcacttgcaaactaataagacaataaaatcaggattgatataaaaccagtagcagcatccatttcactttaataatatatttaaatataaagcaaaaaatgaatatctacatactatatgaacttaactctttaaaaacacacaaaatgaaacattgcacatttctgatcttatgtgacttcatgaagacttatgatttctgattaatgactaatcagaataattttgtaatgggagcttggtatcatcttgaagcacctggctctacttttatggatagtcatagaatctctgctgtacatggtttatgaccttaatctcacattttgagagagagtgctggacttaaaatactgtattttgattcttcacatttgtgatgttctcttttgtaatcctaaaatgagcatgatgttccgatatgtgtttccaagttctaactcttcatgttgaacatccaagtaataggcatatattatagacaggtcttgttttgcatctttctgtggtaactgakatcaatgtgaaatcatacttcttatatgccctcccaaaaaaagacatgtccatgtcctaatccctgaaacttgtgaatagtgtctttttttttttttttggtaaaagggcctttgcaaacttaagcatttccagatcaggagatcatcctggattatccaacagggccctaaatacaatggtaaatgtccttatgagagaggcagaaggaaatttgaaacaaaaagaataaggaaagacacagagaagaggaggaggcaatggatcatggaggcaaagcctggagtaatatggctgcaagaaaaggaatgcagagagccaccaggagctggaggagacaaagaacacatggagactccagatagagtgcagccctgtgaacggctttaatgtgaacatctggcatcaataattatgagaggatgaatttctatggtttaagtcaccaagattgtgataatt

SEQ ID NO: 51984 - DNA, 1300 bp, Homo sapiens
cagcctcccttccttgtattcttgtgtgctaattaatgtataaaatgaatgccacatgaactaacatattttaagagtaccagttatataacaaacacagtattattctactttggtaacttgatactggtcattcaatgtctttagtataatgtgcactttttctcttaatattttagcttattcacataaagattaatttaaaaaacattcatgttgtttgctttaaatcctcttgactatttgtgttgagaacagactcatttattgtacattctattgtcgattacctgttctccattatgattttcttttccttgactcacttgcaaactaataagacaataaaatcaggattgatataaaaccagtagcagcatccatttcactttaataatatatttaaatataaagcaaaaaatgaatatctacatactatatgaacttaactctttaaaaacacacaaaatgaaacattgcacatttctgatcttatgtgacttcatgaagacttatgatttctgattaatgactaatcagaataattttgtaatgggagcttggtatcatcttgaagcacctggctctacttttatggatagtcatagaatctctgctgtacatggtttatgaccttaatctcacattttgagagagagtgctggacttaaaatactgtattttgattcttcacatttgtgatgttctcttttgtaatcctaaaatgagcatgatgttccgatatgtgtttccaagttctaactcttcatgttgaacatccaagtaataggcatatattatagacaggtcttgttttgcatctttctgtggtaactgatatcaatgtgaaatcatacttcttatatgccctcccaaaaaaaracatgtccatgtcctaatccctgaaacttgtgaatagtgtctttttttttttttttggtaaaagggcctttgcaaacttaagcatttccagatcaggagatcatcctggattatccaacagggccctaaatacaatggtaaatgtccttatgagagaggcagaaggaaatttgaaacaaaaagaataaggaaagacacagagaagaggaggaggcaatggatcatggaggcaaagcctggagtaatatggctgcaagaaaaggaatgcagagagccaccaggagctggaggagacaaagaacacatggagactccagatagagtgcagccctgtgaacggctttaatgtgaacatctggcatcaataattatgagaggatgaatttctatggtttaagtcaccaagattgtgataatt

SEQ ID NO: 51985 - DNA, 592 bp, Homo sapiens
taatcatggctcagtgcctggaactcctgggctaaagggatcctcccgccttagcctcctgagtagctaggaccacatgcacacagcatcacacctggctaatttttgtgtattgtattttttatggagacgaggtctctactgttgcccaggctagtcttaaacttctatcctcaagcaatccctctgccttgggctcccaaagcactgggattacagacatgagcctgtatgtgctatagctcatatgtgctactgctcctggacacatttgtgtttttctctactaaaaacatgcctctatggaggtratcctttcttattgggactccccattttccctctcaaagaactgtcaacatttttggtctcaaatcttttatgcctgggtgttctcttttcacttttctttggtaaagtttctcttggccactcctgagggtggaatgcttttctttatcagttgcaggtgtcattactttcccacaatccaccctttatatgcagttcttaggtgctttttgcttctctttttaagggttaaaattcatagcagtatatagaaaattcctatttgcaagcattgttttat

SEQ ID NO: 51986 - DNA, 592 bp, Homo sapiens
taatcatggctcagtgcctggaactcctgggctaaagggatcctcccgccttagcctcctgagtagctaggaccacatgcacacagcatcacacctggctaatttttgtgtattgtattttttatggagacgaggtctctactgttgcccaggctagtcttaaacttctatcctcaagcaatccctctgccttgggctcccaaagcactgggattacagacatgagcctgtatgtgctatagctcatatgtgctactgctcctggacacatttgtgtttttctctactaaaaacatgcctctatggaggtgatyctttcttattgggactccccattttccctctcaaagaactgtcaacatttttggtctcaaatcttttatgcctgggtgttctcttttcacttttctttggtaaagtttctcttggccactcctgagggtggaatgcttttctttatcagttgcaggtgtcattactttcccacaatccaccctttatatgcagttcttaggtgctttttgcttctctttttaagggttaaaattcatagcagtatatagaaaattcctatttgcaagcattgttttat

SEQ ID NO: 51987 - DNA, 500 bp, Homo sapiens
tgattattttcaaatctctagaaaagttcaatgcattaccttaggctataatcccagggcagagtctcatctgttaatagggggctggtctaagggtccttccagctctcagattaatggtttcccatgttgaactgctcccttccacccatccatccttggttttgtttgtttgtttgtttttacaggacaagatcgcactatattgcccaggctggtcttgaactcctggccttaagtgatcctcctgccttggcctcccaaagtgctggagttacagatgtgagcctctgtgctcagcccatccttggctgttcaattgtggaggtaagtagtagatgctaagtttacctccaggtcagaagggacagatgccccagggcagaatcataaccataaccaggcctcccaatgcatgaagacattatgttctgaagcttaaacctggacaaagttctgaccagtagcastgtgttcatgaatatcgggtcaaaaattta

SEQ ID NO: 51988 - DNA, 628 bp, Homo sapiens
gagagacataaaatttatggttaaaggtttacactatttctgtgaaactacagctggattaggagatcaaaaataagctaagtttaacaaactccagaaaaatcattatctcagtgaatggatgttttaatgttcattacctacaaagaagtggtttgcttacagctggtaaaaatttagtcaagttctgagatcaacttctttacaaaacatcggttttaactttgaatgaaagcaaatgcttctgtttagctttattttgtatttaacactatctgccatgtgttgtcatagtccctgtcctcaaagaatttctgaccttaggaaagagacatatcattcaactaagaaatcacatgctttgactcttggcacgtctaattctgatggttctatgggattgggttgtaaggggtttcaagcaggtagcatcttagatcaattaagaacaaagcggccaggcgcgatggctcactcctgtaatcccagcactttggggggccaaagcaggcgtatcacaagatcaggagatggagaccatcctgaccaacatggtgaaaccctgtctctacttaaatacaaaaaatcasccgggcgtggtggccggcactgtagtcccagctacttg

SEQ ID NO: 51989 - DNA, 625 bp, Homo sapiens
ggcagcagccttgtctccaccattccttcaatgctcagtacgtaacacagaagctgactccataacatttagttggccaactgagactaaatgtatgttcctctagatcttaaaaagttacagaaacatagcacratagtcaaaaaaattgtctttagtcaggagttctccatatatgtacaacagtttgaagtcattattaagcaaaatgaaacagaaactgtcacagaattccctaagataaattattttgctttaatcttcaattcatcatgtgaaataatcaagaccatgtgttattgtaaatatttctagcttacaacacaacaacctgatttttactgtttgaaataaccataatataaatcagttaattaaaaattgcataaataatcctttcaaataaaattctgcctaaattttacattactcatatgttcaaatgataatgagctcataggattttccaatacctcagtcaaaacattgtactgattccagctgtgggaatagtacctgaaagttatcttacagatggggaaaaggtacctatgtgacattggcctttgcactactgtacccttttgggtcaggaaaaagctgttcccttaaagtcctaaaatct

SEQ ID NO: 51990 - DNA, 625 bp, Homo sapiens
ggcagcagccttgtctccaccattccttcaatgctcagtacgtaacacagaagctgactccataacatttagttggccaactgagactaaatgtatgttcctctagatcttaaaaagttacagaaacatagcacaatagtcaaaaaaattgtctttagtcaggagttctccatatatgtacaacagtttgaagtcattattaagcaaaatgaaacagaaactgtcacagaattccctaagataaattattttgctttaatcttcaattcatcatgtgaartaatcaagaccatgtgttattgtaaatatttctagcttacaacacaacaacctgatttttactgtttgaaataaccataatataaatcagttaattaaaaattgcataaataatcctttcaaataaaattctgcctaaattttacattactcatatgttcaaatgataatgagctcataggattttccaatacctcagtcaaaacattgtactgattccagctgtgggaatagtacctgaaagttatcttacagatggggaaaaggtacctatgtgacattggcctttgcactactgtacccttttgggtcaggaaaaagctgttcccttaaagtcctaaaatct

SEQ ID NO: 51991 - DNA, 717 bp, Homo sapiens
ttagtagagctggggtttcgccatgttggccaggctggtcttgaactcctgacctcaggtgacccacgcacctaggcctcccaaagtgctgaaattacaggtgtgagctaccgcgcccagccaaatttcgtattttttttatggacacaattcaacccctaatactgacaatccaatctaaaattgtagctgacatctctattcctttatctaattcattttcctccatggtatgtatcactgttttacattctattttagtaattaatttttttgttaatttaataaaatgaggaaagacatttcagtttatttttgctccacrttctattctcagtgcaaaaaaagaaacacaatgtagttgttgtgcattcatgataaatacatgtttaatgaatcaatatgaatgacatctaaaaggatcaatgaaggaatgtatgcctagactatatcaagcttttaaaatatagtatcatacaagtcatatgcagtttttgcattttttctaacactgaaatttatgaaatatatatacataaattcttcttaagcaccagttgatatatcaatgttttttcaccaacaacatgattaatcacataaaatccagaaatttcccccatgatgtgatattttttatttgcaattgagaagacactttcctgaagaaagctcctgcttaagaaataagtgtttattaagtattaaaccacaatc

SEQ ID NO: 51992 - DNA, 544 bp, Homo sapiens
tatttcaaatatccatctmtgtggccattacctcttaccttttcttctcacttcttctagtaacccagttctaactactccttgaccccactgagatatataattagctaatactaccaaactgtcattctcattcattaaatgatttattcatcaacaaatatttagtatgcatttactttgtgtgaggtattttctagtcagtgaagataaaatagtaaacaaaacagatacaaatatataccactcacaagtaagttgaaataattggatgttttatacagtgaaaaaaattaaagtaaaaaataaataaaataaagaaggggaaatagaaaagtcaagaagataagtgaaattttatatatagtgatataagaaggcctcactgaagaaaaaaactgtttaacagctttactgatatataattgccacacaataatcaacacatatttaatatacactattttttgtcatatgaatatacccataaaatcacatgggtatcacactctagataataaggacatttcacatccctaattat

SEQ ID NO: 51993 - DNA, 544 bp, Homo sapiens
tatttcaaatatccatctctgtggccattacctcttaccttttcttctcacttcttctagtaacccagttctaactactccttgaccccactgagatatataattagctaatactaccaaactgtcattctcattcattaaatgatttattcrtcaacaaatatttagtatgcatttactttgtgtgaggtattttctagtcagtgaagataaaatagtaaacaaaacagatacaaatatataccactcacaagtaagttgaaataattggatgttttatacagtgaaaaaaattaaagtaaaaaataaataaaataaagaaggggaaatagaaaagtcaagaagataagtgaaattttatatatagtgatataagaaggcctcactgaagaaaaaaactgtttaacagctttactgatatataattgccacacaataatcaacacatatttaatatacactattttttgtcatatgaatatacccataaaatcacatgggtatcacactctagataataaggacatttcacatccctaattat

SEQ ID NO: 51994 - DNA, 474 bp, Homo sapiens
  misc_feature (1)...(474): n = A,T,C or G
ttttcaaaacaaaggagcataccttagcactcacccaggcattaggatttttggctaatttactttttgtttttgcaatttcaagatacctagacaacacatttgccatctgttgaaatcttagattttatttttgagtcnacataatgactttaaaatattctataaatgtctcaaaagaccccagatcaatatgccaatggttctgagatgacagagtgctgcgatattcctctgtaatgtaaacatgattagctgatgaaggttatgtgatatcaatacactaccggaagataaattaattgatatcatctttsaggatgataagaggcctattggaggtgggatgtaactaatgaagctgcttcttcctctctgtgagccattttttatatattgcattttcacttaatcatatttatactatcattcatttacatgaaacccataggctgtggacaaaccagtttctta

SEQ ID NO: 51995 - DNA, 595 bp, Homo sapiens
ccagaaagggaggcaagatgaattgcttgggaaatggataaaggagctagagacaaaagagggagggtaggagaaagaaatcatcccaagccagtgytattctaattatttttttggtgtcaaaaactaacacctaccaaatgaaatcttatttggaagtcaagataaatgattctgagagacgcggggctgctgtggctaaagtgggattgggggaacctgccttctggcttatgtccttgaacatttatgaaaactctctttggacccccttaaagtgcaactgaaaacaatatactgaaccccttctccaataaaaatcagaagcgcagacatactcaagatcttcctcaaggtgactcagctagctaatgacccaaacagaatgagaacccaattgtccttagttttgtgcattgtgttcaagctgcagacacatcagggggctgaagcaggatgatattttcccctgatctttgaatgtctcagaaaagctgtccaaatcaaatatttccttttctaaacctcatgtctctcattaactgatttaagtaaaaataaataaaaattcattttccagaaatggaatagtgga

SEQ ID NO: 51996 - DNA, 586 bp, Homo sapiens
gggcatttataatttttagaatcagaaaataaaactctaaaaagcaaagctataacattaaaaaaaattmttgaagtagtccacatgaaaacaaatacagagacatattttatccctaaaggtcacggccaccactttaatctaccacatgatctattttgataccggttctgcaggctggcagtggcccactggaagtctctgttgacagcacatgaacattttatcaactgtctagagagcatggacgtgttttttagcacctaccacgaagtccctaacatatcctgtctcactaagcctcacagccacttgttagagtcacattagcattcccattttacaaatgaggaaaccaaggcccagaataactaggcagcctgctcaaggggatgtagctagcgtgtgggagccacattgaagtgatgtctgtcgaaacccaaagtcaaggtctttctttttcactgttccctggtcaaaagtatctttagtcaaaagcaatggagcaagcatttgctttgggagttctcagtgctggtgagcttgcccagtgtcaagaacatgaaggcatttgtaaaaccctcct

SEQ ID NO: 51997 - DNA, 1879 bp, Homo sapiens
tagctactgaataactgtgaatactgaaagatttttaattggaaaatatatagaacagtgccttaggctataagaaaagtggcttaactctcatcaatgcrttaaaaattttttcaaaaatattcctatgtagaaggaaacaaaaactgaaaatgatcaaaaaagaaaaaataaagataataaggttaatttactcagtaaagtgagaatatattctatgatttcaaaacaaaacaattcatttgcatggtttgaaaataaaagtaattctgtttttcctgataaaaattatggaaagaaaatttaatagacactagtaatatatattaatccagtcatttagtttgtggttgcaaacagaggaataactacagggaagaggtcataatttctatacttagaatagatgggaaaaggcactcaaggatccaatacagctgagccaaatgcagctttccaagcttgcagacctttagggtaaagtgtaaataatacctctcaatttgtctgcctgcctggatcaaccaatatccatcatacctatttacacatttctatgatggcttaaatcagacaccctgaatatagaggccactacttttttcacctgcgcttcggcatgagccaggactttgaaaattttgccagtaataatatctggttcagagggaaaagtaagaaacacaattatatgtcattcagataatactgtggtatccgaatggcctcaaacacactaggtaaaaaaacaaccaaatagacagtttgatatcactccagatgtcttattctgattgaagtaggtcattccatcttcggctgaacatgtccacctcagtggacatgccaggcacaatcacacacacagtaataataataacctctatttattctattttatttctttattttttgagacagggtctcgctctgctgcccaggctggagtacggtggtacgatcacggctcactgcagccttgaacttccagactcaagcaattctcaggccttggcctcccaaagtactggggactacaggcgtgagccaccacaccaagccaataacctcaatttattaaacgctttttcatgctgggtattttacacattgcatttctaaacctaacagcaacacagccagtttgtgttattgccagttatagagatgaggaactatgacaactaataaaaatgttcaagtcatgcaactaaccagtagtgtggctaggctggggctcacacccccatatggtgctcttccatttatttcttggaaaagttgccaaacggtaagacttgtgtagcatcaagtccaaattcaaacctttagtcgtaatgagagaaaagcaagttttctagatgacttcaaaacaactacagctttccatatttaaaaagtgccttaaagatgggtctcactggcccagtgatagttgggaagtctgtgtgccactgggggagcttcttcaatgaagagctcatgtgatttccctaagtgctgggcatattcctctctttcagagtggacataaaagttccttgacgaattattaatttcaatcttgattatttattgagtgcttaaaatatgccaggtgctttacatatatgacctcacttaatcctcacaacaaccttgctaaataagaattatcaactccattttcgcatgacagaactgaggcccagagagattcactggcccatccaaggtcatagagtcagaaatcacctgagctgaatttgaacacatttcagtttcattccaaatctctcctcttaacctctggactatacttccaaaccttagaacaaagaggagatttaagagataaaattttttaaaaagtaaaaaagagagagagagatgacagcaa

SEQ ID NO: 51998 - DNA, 1879 bp, Homo sapiens
tagctactgaataactgtgaatactgaaagatttttaattggaaaatatatagaacagtgccttaggctataagaaaagtggcttaactctcatcaatgcattaaaaattttttcaaaaatattcctatgtagaaggaaacaaaaactgaaaatgatcaaaaaagaaaaaataaagataataaggttaatttactcagtaaagtgagaatatattctatgatttcaaaacaaaacaattcatttgcatggtttgaaaataaaagtaattctgtttttcctgataaaaattatggaaagaaaatttaatagacactagtaatatatattaatccagtcatttagtttgtggttgcaaacagaggaataactacagggaagaggtcataatttctatacttagaatagatgggaaaaggcactcaaggatccaatacagctgagccaaatgcagctttccaagcttgcagacctttagggtaaagtgtaaataatacctctcaatttgtctgcctgcctggatcaaccaatatccatcatacctatttacacatttctatgatggcttaaatcagacaccctgaatatagaggccactacttttttcacctgcgcttcggcatgagccaggactttgaaaattttgccagtaataatatctggttcagagggaaaagtaagaaacacaattatatgtcattcagataatactgtggtatccgaatggcctcaaacacactaggtaaaaaaacaaccaaatagacagtttgatatcactccagatgtcttattctgattgaagtaggtcattccatcttcggctgaacatgtccacctcagtggacatgccaggcacaatcacacacacagtaataataataacctctatttattctattttatttctttattttttgagacagggtctcgctctgctgcccaggctggagtacggtggtacgatcacggctcactgcagccttgaacttccagactcaagcaattctcaggccttggcctcccaaagtactggggactacaggcgtgagccaccacaccaagccaataacctcaatttattaaacgctttttcatgctgggtattttacacattgcatttctaaacctaacagcaacacagccagtttgtgttattgccagttatagagatgaggaactatgacaactaataaaaatgttcaagtcatgcaactaaccagtagtgtggctaggctggggctcacacccccatatggtgctcttccatttatttcttggaaaagttgccaaacggtaagacttgtgtagcatcaagtccaaattcaaacctttagtcgtaatgagagaaaagcaagttttctagatgacttcaaaacaactacagctttccatatttaaaaagtgccttaaagatgggtctcactggcccagtgatagttgggaagtctgtgtgccactgggggagcttcttcaatgaagagctcatgtgatttccctaagtgctgggcatattcctctctttcagagtggacataaaagytccttgacgaattattaatttcaatcttgattatttattgagtgcttaaaatatgccaggtgctttacatatatgacctcacttaatcctcacaacaaccttgctaaataagaattatcaactccattttcgcatgacagaactgaggcccagagagattcactggcccatccaaggtcatagagtcagaaatcacctgagctgaatttgaacacatttcagtttcattccaaatctctcctcttaacctctggactatacttccaaaccttagaacaaagaggagatttaagagataaaattttttaaaaagtaaaaaagagagagagagatgacagcaa

SEQ ID NO: 51999 - DNA, 1361 bp, Homo sapiens
  misc_feature (1)...(1361): n = A,T,C or G
tttttatgagcttattcagagggactatgtcatcaaataaggaaaaaattgttcccacaccaataatttcaaaatgatttcatgtctaatgttatccaaatatttntgtcttggtagtagaaagcagtaggcagacgctggcaggactttcaagaggaggaatgaaactgatgaagagtctccagactgaagaatgctggtaggcttattttagtaactaggtggagacctggtaactacccccaagtatttggagaataagggataactgcagttattcatgcctctgttacccacaggcaaaattactataataaacatatacactgtctactgcccaccagacagctctcatcttagtctgaaaagcagcaaaccagccacacggcaccttcctcacggatccctggaaagtgggaaattcgcactcagcgatgcgaatgcaggtgtctccgtcaacatggcatctgtcagtggacagacgaattcccaaaccccacttcctccttgaaggaggtaagctctaggggatagataagttccagagtagattcaggatcccaaaaaccctttgggttcagtctgagtgtctgattcgtcccaagaactgaggaaagtctctgagcttgctgtggagacagtaggggctaggtcggttctggactcagtatcaatgtgtaggggaaacagccagcctggctagcggtctgtgtgcttactcggaggattccattctctagaatatttttcttcgtgggtgtttattgtttgtttttaaacacattgtaatgcaacagtattggggaatataaatatgcttgactaggtataggctcacacagaaatatactgtttggacttctcaagtttagttacacaccttaaaatgcataggcacaatacactcaaatattatgactttgtataaatactgccaaatagtcaagtaaaaataggaaacacgtatcctatacctttgtggttctggatttcctagatgatttatatcataaagacaaatacatgcataggttgggcacagcggctcacacctgtaatcacagcacattaggaggctgaggcaggaggatcacttgaggccaggagttcaagaccagcstgggcaatatagtgagatcccatctctacaaaacaagtttttttgttttgttttgttttttaattagccagtcacggtggcacataccacctgtaggcctagctactcagaaggctggggtggaaggatcacttgagcccaggagttcaaggctgcagtgagctatgactgcaccactgcactccagcctgggtgacagagtgagaccctgtctcataaaaaaaaaaaccaaatatgtgca

SEQ ID NO: 52000 - DNA, 519 bp, Homo sapiens
ccccaatatcaaggaaagtgggttctgaggctcacctgatcctgctgcctaamcccccagtacatacagggccactatgctatgcatatttcagaataccagaaatagcaaaataaaagccacagtttaaaaatctcagatgatgtgttgtaatgaatccttttttaatagtaaaaactggtcaattcacaaggatgcatcatataaatgcaaggcgttataactaatcgaagagaagacactagtgctaaatgaaaaattctatcatttcagaggtttgaagacatctttaaaaaattgatttattaattttaaataggaagacaagttagccagatcttgttttctaatgccattctccaataaatggaaccagggctccttggagaaatggctgattctcagattggagcaggaaatatataagtctggagtaaaatataaaacaaacacaacacacaacgtacacacacacacatgcgcgtgcgcgcgcgcacacacacacacacacacacacac

SEQ ID NO: 52001 - DNA, 519 bp, Homo sapiens
ccccaatatcaaggaaagtgggttctgaggctcacctgatcctgctgcctaaccccccagtacatacagggccactatgctatgcatatttcagaataccagaaatagcaaaataaaagccacagtttaaaaatctcagatgatgtgttgtaatgaatccttttttaatagtaaaaactggtcaattcacaaggatgcatcatataaatgcaaggcgttataactaatcgaagagaagacactagtgctaaatgaaaaattctatcatttcagaggtttgaagacatctttaaaaaattgatttattaattttaaataggaagacaagttagccagatcttgttttctaatgccattctccaataaatggaaccagggctccttggagaaatggctgattctcagattggagcaggaaatatataagtctggagtaaaatataaaacaaacacaacacacaacgtacacacacacacatgcgcgtgcgcgcgcrcacacacacacacacacacacacac

SEQ ID NO: 52002 - DNA, 554 bp, Homo sapiens
atatgcatagatttccatattgtggacaattcctataaacggaattgcacaataggtgagctgctatgactgacataacacgtagcacaatattttcaagattcatccacattgtaggcttacccacagagggaaaccattttttggggggttttagtaacaccggtgttttctccttcctttcgtccttctttcctcccttccttccttccttccttccgtcctamcttccttctttcctttttccttccttcctcctatttctctcttactccttctgccctctctctttcatatgccttaggtgcatcccacattctgcgttttttgggggaaatcctcgacaggtgcaggaaaattgtgttattgtaactatttaccgctatctctctttcacggctctccatcacttgtgaacatctattggtttatcccaagtcactaagcatatttttattaggtacacctgtttttccttatacagctgtttctggagtgtagggtcgcatactcataaacccagtgtaactcagaaacgaatctaatattccaat

SEQ ID NO: 52003 - DNA, 1409 bp, Homo sapiens
tagcatacgctaacagtttaagtcagaggatatggaataacaatgaatttagaagtcagctcagactatgaaaaaggggttattatggactcaaagatacccacaaaataccatcccttgagctatggaagaaaacaattcagtttaataaataaatcacacagggggatttgcaatagtacacaagtctatctagcaagccttgaagaaggacagcacacaagcgagattcactaatcaataatggcattcaattattcccacagcattcaaataaggcaattttatgctttataattaacccaaggattgaactatgcattgggaggaataaatgtagctatttgtactttattggttattcatattttcagtaaataaattgaattaaacttcagcaggctttcatcctgcattaaggcaaaacataaagtatctgacaaagcaaagagataaaattaggcctagagtttgttaagaaataacagaatttgcattttaacaagatttccaggggatttgtatacactttgaagtttgagaagtactgctttcagggctgatgaagcaacaaaataggggtacttgcatccctggaccaccctgtagatcagagcctcccaccaagaagtaaaacacatgtggggctaagcttctaaatgttgcactaataggactctaatctggagacttttattataaatattattccttaacttcccttttaaagcaaacattgggccacaggatgtgtggggagatctcacgcaatggaagtacaacattagtgttcacttatcatttttaccctacaaatatttggccagcacaggtattgattcatcacttcaataaatatttatagatacctactctgtgtatacataagtattacaagtatctctgacacagcctgggtatagaatgaaaactgttaaggtaaactgatgggaaagatgactttatttcaattaactagcagtttctgaaatcaagtttgaaaatatctaagttatccaaattgttatataattgattctgaaaggagtaataagaccatacccccaaaattctacatatttttgttatgccaagactgtttccttgcagtcactattatattttacagggcattaaaatataaattatttaattatttgagaatattttgcactgaaagataataaacttagttgcaagttttttatgagagacaatttctaaataagctgaagtctttgtaaaaccataaacaaagtaactaggctctaccatttatgtgaattagaaaataatagtattcattgtattttataatatatatgtcagatgtatttttacattagtactcaggaaattccaaacaatgaaygcattcaatgaatctaaagtaccacctcttgctgaga

SEQ ID NO: 52004 - DNA, 759 bp, Homo sapiens
taggttgattttataacttggctcctgtgaatagtgcttcagtgaacatgggagtgcagatgtctctttaacatactgatttaaaagcttttggggccaggcatggtggctcacacctgtaatcccacaactttgggaggctgaggtaggcagatcacttgaggtcaggagttcaagaccagactggccaacatggcaaaaccccgtctctaccaaaaaattcaaaaattagccgggcgtggtggcaggtgcctgtagtcccagctacttgggaggctgaggcaggagaatcgcttgaacccaggaggtggaggttgtagtgagccgagatcatgccattgcactccagcctgggtagcagagcgagactccatctcaaacacaaacaaacaaaaagcttttgggtaaatactcagaagtgggrttgctggatcatataacaattctatttttagttttaagagaaacctccatacagttttccatgacagttgtactaatttacatccccacaaacagtgtacaggtgttcctttattgttactgttatcattattaaatatatatgtaagtgcatagaaaaagggctatagaaagactgcagattttccaatagattctgaattaacaaaaacaggtgatacctatgcatttatcgtaagttcccattttatttaaccaaggatacaaaatgtaagggaggcaagcatgacctcatgttgctcatcttgtcacgtcttttgttctggggccttgaat

SEQ ID NO: 52005 - DNA, 556 bp, Homo sapiens
caaggagaactaaaaaccactgctcaatgaaataaaaggatacaaacaaatggaagaacattccatgttcatgggtaggaagaatcaatattgtgaaaatggccatactgcccaaggtaatttatagattcaatgccatcaccatcaagctaccaatgactttcttcactttataaaattctctgttaaaataactgctgtaataccagtctcctgactggatgctgactaatctataaatttttattgagagtggtccaggaaatggtttctcaaagattgggcttgggtattggcttcatgatgtctcagagcttaagcacaatcccagctccttgccaatgggaaatgkgatgccattagttatgatgatgcagaatgatgagtgatcacctgtagttaatttcaaggaagtgccttctcaagtagaggtcttgaggactatagggtttctgtgattagtcttattatagaaatgttgatgataaaaatagtgtcatgaaatcagttttaagctggtaaatatataacaactaattacttttttaaaaaatga

SEQ ID NO: 52006 - DNA, 602 bp, Homo sapiens
tattaattataatatagaaatacaagtgatgaatacacttttttgcttctcctttagtcaggtgctttataagatattcattcattcatcctatgggcatatattgagtatctactaaggtggtgccattatcaacacagaagtgacccttgctctcaaaatcagactaatgatggggagaaaaattaaacaataatcatccttaattaattcccattgtggtcaaagatgtaaaggatgagttcaagagataagggaagactttgctgaagaagtaatactaaaactgcaaactataggatacygggtgaagtggtgatgaagaacagaagaacattctaggtaacaaatacagcacatggtgcattggaagccaggtattatttccagtttacagggaaacaaaaaacaacagaaaaacttgaagatttaagtagaacacctaagtaagtccataacatgcaaatgggaaagccagaatttaaacgtggatctacttgacatcaaaattcttttttaaaacttctctgcaataatatatttgctttgatctgaaaaagaaagattcctgaatatctcttttcagttcttttcactcaatt

SEQ ID NO: 52007 - DNA, 1115 bp, Homo sapiens
tcaggtgccacggagtaataaacacatgaacctgagagaaaggaaaatggaaatctggctccagacccttggggtgcaggcactaaagccaacgtcaagtgtgacttacctcatgtgcactggagggcatccttgaagttagttaataagtgatgagaaagtattcacttactctctgcctgccccggcagctctgagaaggaagtaactctttctgcttcctttaccatggcaccctgaatctctagctccatgctccccaaataccacctgacacagagcaggactcaacaaacatgtgttgattggttgactggacycgtttttatgctaaccccaacccaccctataaatgcatatatctcgaaaaataagattgcagagggcatatttaaattcagttagacgtactttgagttcgaaggcaagtgtaaaaagacattaaacattatacttgcatgtgtgtaaattaaagttattaatgtcgctaataagattgcagatggggcaaattcctagaaacatcatcataattctgtaggcaggagatgttttagtggctccattttacagatgaggagaccaaggactgaataagagaatgaatttaccccaaatcacagagctaacgatggcagagccagaatttgaatccagtggactggtgtatgcaaccttctctttgtgttaggtttaggggttctctggagagggtgatggagctgacatcttgtcctcctcttacctctgccattgactttggggtgacttgaggctagctgtgagcctctgtttcctcatccataaaaaagagccatcagcaggtgctgcacccaggtcttcccacacaggacctcatcaaactcatcaggcatgaggcccattgggcctaacatcactttcaggaagcacgagcccaggctgagcccaggctgctggcaaggcagaagatgggtgagcttccagcagtcatggaccgcgaggctctaccccaggtctgaggaaagataactggcgagacacccaccacaccccagtgaggacattttactctataaacctgggaatgactttctgcttcttataaccaggcaggcagtgtggtgaaatgtaca

SEQ ID NO: 52008 - DNA, 635 bp, Homo sapiens
tgcaaggccacatctgtgccccctatcatatcattgccaaggtttccttattgcctctgccctgcctgctgtttcccccattcagttcaccacctcctgtccctggaggcaataatgtaattaaggcagtatgtgaagacagcacgcagaaactgtgatgtggatagctctccttggagatctgctggcagactgacttccaggaaaaagagccaaagtacttgggaaatgcagacccaaggactgatcacttttgggaggtaggtttatttttctgcagatgacacttgtctagagggaactggcagttttctgactagagatggccctgtagtgagcttagcagctccatggacttagtacctgggtgaccaccgtcagcagagaagcatgtttggaagacagagaaccaatgagggatgtttcacactcttgaggagtttgcmgtcaaaaagcaaagcaggataagcaaaaaatgcatgtcctcaaaccccagataacaaacacaaaacatcatagatagaaccagagctgaggtagatacacatggattcaccatatgcaggtacatgtagattaggatggatgtcaggacgtccagagtggctgaaatgactgctccatactgtcattcc

SEQ ID NO: 52009 - DNA, 529 bp, Homo sapiens
actcatttcagtaaccatgccttcaatggagctttccagctcttccctttaagatatggagtctctcctgaccctggactggctgtgagacttgctttggtaggtaaaagtgatagtacgctacttcagagtctaggactcaagaaaccatgcatgtgtctattttctctcctggaatactgccactttcttgagaacaagccaggctagcttgctagaagagcagatgccaagtggaaaagagayagctcatcccagctgaggccatactagatcaacaagaatccaaccagtctgcagctgactgccaagcaagagtgagcacatcaaaaattcccaggagatgcttagacttacagaaactaatacatcatggtgtttaaatcaccaaattttagggtggtttgttaactattatgtgcactatagataacatttaatctttccttatacaagtgaaggagtaagtgactgttagtctcaaagagattcatcaacttaatcctaattctcagaggttttcctttca

SEQ ID NO: 52010 - DNA, 491 bp, Homo sapiens
aggcctctgtttccagtcaacagaagggggaagacagagtggagaaagcccatccactcctaagcctcagcccaggggtattgcacgtgacttccattcatactccactggcgagagccagctctatggtggccatacttgacatggaagagtggggagatgtagtgtctggtcgagtggccacctcccaacaacaagcccaccatacggaaggggagcccacatttgtctctgcaacaactaacaaatcctcctgacctagtggcttcacatgacacttattggttcacactctctgagtcaacaatgtgggctggaaccagcagtggtttttctgctagtctcatctggggtcacttatgcagctccagttagcggacagcccggctgggcctgcatggcctaggacggcctcatacacatgttcatccctgagcatgctatcagccagggtgtctcrgttctccagcagcgcattcacacggcagcag

SEQ ID NO: 52011 - DNA, 1872 bp, Homo sapiens
cacttttattgaataaatgccgttgacaaatggaagttaggtaagccttctaattcccattttgtttcacctatgtatatattaagaccactgtatattaaaagtctaatacaaaaatctactatgttaaatgataatataataatctattccatcaatataagtaccatatttattgaatacctactgtttgccagtcaaggctatgccaatgaagcagagaattaaaaagataaaccgctgccttgtgcagtggtgtgcggactgtcgaggagacggacagaagcagtggttaccgtgctggcgtgagccagaagtttcctgccctcttgtcacttctggggtctagaaaagtagcacaaaaatgcattatgcaaatgcaatatttggtgaaactcactaggtgacattatactaagaaataaaaccaaagctcatcttggtttcagttaggcctcagccccgctgaagtctcgccggtatttttctgccctggatacagtggagacaggcttcagccacctcacaagcttgctggacaacgggcttttcttcctctgtcttcttcaggactgtgagtgcctgacgggcaggagctgcacccgtcaccttgctgtcctcgctgttaccacagggccacatcagtgaacacaggctctactgaggcggcagcctccccgtagcttgtattcttgcaaagaagttgaaaaccaaatcaatgcagtcacaagacacagatacatatggatgcaaatttgctgaactcaggaacgaccaccagattggcagggctaattcaccctcagtgttttgtattttttccctaattattctaaaatgatcctgttgctttattcccacagaacaagcactggcagacgaggaacactatccccagcaggcctcggctgccggcaacgcacccctgccctcagaaagacagccttgctctgaatttattttcataattacatgaacgttatctaaaaaaaacaaaggacgtgggaaagaataaagcttaaaataaactttaagctgtgggaatgcagggggccaggctggagaacagagaaagccagagtgagctcagtgtctctgtgctgatctacttggccagcaagaaggctgcatacaacagagatctgtgtccaccagccagaagttcaggactcagacacacaatatgctgactttattctagagctaattcattccaaagtatgagaaacatagagaaaagccagcaactgttagccacacaggtagtaacgtttctttcttaaagactagagttatatttcttctattgtggtacaacctcattgtttttacggccatattatcattttattcaggaatgttgaaatgctctgaaatatcacttagtcattaaaatgttgattactacaactaaatgacaacatagaaaagtgcttatgatatatcatttagagaaaatttaggatacacgaccttacaagcactatgacaggagctgagtaaaagtagactacgtcaagaggccggaaaggaagacagaagggaaaaggccccgcgcgtctccgtgtcaacaggccggaaaggcagacagaagggaaaaggccccgcgcgtctccacgtcaacaggccggaaaggcagacagaagggaaaaggccccgcgcgtctccacgtcaacaggccggaaaggcagacagaagggaaaaggccccgcgcgtctccacgtcaacaggccggaaaggcagacagaagggaaaaggccccgcgcgtctccacgtcaacaggccggaaaggcagacagaagggaaaasgccccgcgcgtctccacgtcaacaggccggaaaggcagacagaagggaaaaggccccgcgcgt

SEQ ID NO: 52012 - DNA, 1872 bp, Homo sapiens
cacttttattgaataaatgccgttgacaaatggaagttaggtaagccttctaattcccattttgtttcacctatgtatatattaagaccactgtatattaaaagtctaatacaaaaatctactatgttaaatgataatataataatctattccatcaatataagtaccatatttattgaatacctactgtttgccagtcaaggctatgccaatgaagcagagaattaaaaagataaaccgctgccttgtgcagtggtgtgcggactgtcgaggagacggacagaagcagtggttaccgtgctggcgtgagccagaagtttcctgccctcttgtcacttctggggtctagaaaagtagcacaaaaatgcattatgcaaatgcaatatttggtgaaactcactaggtgacattatactaagaaataaaaccaaagctcatcttggtttcagttaggcctcagccccgctgaagtctcgccggtatttttctgccctggatacagtggagacaggcttcagccacctcacaagcttgctggacaacgggcttttcttcctctgtcttcttcaggactgtgagtgcctgacgggcaggagctgcacccgtcaccttgctgtcctcgctgttaccacagggccacatcagtgaacacaggctctactgaggcggcagcctccccgtagcttgtattcttgcaaagaagttgaaaaccaaatcaatgcagtcacaagacacagatacatatggatgcaaatttgctgaactcaggaacgaccaccagattggcagggctaattcaccctcagtgttttgtattttttccctaattattctaaaatgatcctgttgctttattcccacagaacaagcactggcagacgaggaacactatccccagcaggcctcggctgccggcaacgcacccctgccctcagaaagacagccttgctctgaatttattttcataattacatgaacgttatctaaaaaaaacaaaggacgtgggaaagaataaagcttaaaataaactttaagctgtgggaatgcagggggccaggctggagaacagagaaagccagagtgagctcagtgtctctgtgctgatctacttggccagcaagaaggctgcatacaacagagatctgtgtccaccagccagaagttcaggactcagacacacaatatgctgactttattctagagctaattcattccaaagtatgagaaacatagagaaaagccagcaactgttagccacacaggtagtaacgtttctttcttaaagactagagttatatttcttctattgtggtacaacctcattgtttttacggccatattatcattttattcaggaatgttgaaatgctctgaaatatcacttagtcattaaaatgttgattactacaactaaatgacaacatagaaaagtgcttatgatatatcatttagagaaaatttaggatacacgaccttacaagcactatgacaggagctgagtaaaagtagactacgtcaagaggccggaaaggaagacagaagggaaaaggccccgcgcgtctccgtgtcaacaggccggaaaggcagacagaagggaaaaggccccgcgcgtctccacgtcaacaggccggaaaggcagacagaagggaaaaggccccgcgcgtctccacgtcaacaggccggaaaggcagacagaagggaaaaggccccgcgcgtctccacgtcaacaggccggaaaggcagacagaagggaaaaggccccgcgcgtctccacgtcaacaggccggaaaggcagacagaagggaaaaggcyccgcgcgtctccacgtcaacaggccggaaaggcagacagaagggaaaaggccccgcgcgt

SEQ ID NO: 52013 - DNA, 567 bp, Homo sapiens
cgtgatcttgctaaagtcatcctttctcaacagaaacctctcaggggccaatttaataaattcattctcaattaccagtaaaactctggggtggaagatgcatttatacatcatcaagttattattaaatttaaatcattgagtgacatgaacaggctgagaatatttttcaagactaatggatctccctgtcaccagagacactcctgaaaaggcagctctcctgaagtgttagggtccatcctataaatttacataaatagaggttgtttcctttggtctttaaaagactcctgtgctacatcaattatataacccrttagggaattaaatagtaccctgttggggaatgagtctactctgctctctagcattttagtgtactgatttatttatcattttaacccaaataaatagtactccttaacttttctgagtcatgggctctttttttactagaatctcatggaaattacagtgtttttttcttcagaaaaatgcacatacataattttgcaatgaagttcacattgtcaatggactctctcaagtatatccatgagcttc

SEQ ID NO: 52014 - DNA, 546 bp, Homo sapiens
cttcttaaagagctgcagttgcacatcccttcgytttttagactgataaacttgactaatttatacttagtaattttgtctctggttcgtcttctgtagacaaatggcaaagttctgatgccagaaataggaggcattttctgacttactatggaaaacataaaaactgcatagtatgccagctctcactttcccagctaaaggaaagaggcagatagctaaatgtctgagaagagaggctggactaaggggatatagaaaaaggaaaatttttcaaaagcattataactacattcacacatacgttttggtcaccaaacatatcttaaacagattccctgataaagtctaatcagaattggtctatcttactaacagttgttaactattatagttttttaagagtcacatcatgaagctagggggtgagagagacattttaaacacacaaccgtaagtgcatatagttgttcaaacacttaaactaaatttgtatttgaagtcttgaaaatcacactatttgcttctaaaggcaaccttgaccca

SEQ ID NO: 52015 - DNA, 546 bp, Homo sapiens
cttcttaaagagctgcagttgcacatcccttcgttttttagactgataaacttgactaatttatacttagtaattttgtctctggttcgtcttctgtagacaaatggcaaagttctgatgccagaaataggaggcattttctgacttactatggaaaacataaaaactgcatagtatgccagctctcactttcccagctaaaggaaagaggcagatagctaaatgtctgagaagagaggctggactaaggggatatagaaaaaggaaaatttttcaaaagcattataactacattcacacatacgttttggtcaccaaacatatcttaaacagattccctgataaagtctaatcagaattggtctatcttactaacagttgttaactattatagttttttaagagtcacatcatgaagctagggkgtgagagagacattttaaacacacaaccgtaagtgcatatagttgttcaaacacttaaactaaatttgtatttgaagtcttgaaaatcacactatttgcttctaaaggcaaccttgaccca

SEQ ID NO: 52016 - DNA, 546 bp, Homo sapiens
cttcttaaagagctgcagttgcacatcccttcgttttttagactgataaacttgactaatttatacttagtaattttgtctctggttcgtcttctgtagacaaatggcaaagttctgatgccagaaataggaggcattttctgacttactatggaaaacataaaaactgcatagtatgccagctctcactttcccagctaaaggaaagaggcagatagctaaatgtctgagaagagaggctggactaaggggatatagaaaaaggaaaatttttcaaaagcattataactacattcacacatacgttttggtcaccaaacatatcttaaacagattccctgataaagtctaatcagaattggtctatcttactaacagttgttaactattatagttttttaagagtcacatcatgaagctagggggwgagagagacattttaaacacacaaccgtaagtgcatatagttgttcaaacacttaaactaaatttgtatttgaagtcttgaaaatcacactatttgcttctaaaggcaaccttgaccca

SEQ ID NO: 52017 - DNA, 648 bp, Homo sapiens
gcgctgtggctcacacctgtaataacagcactttgggaggctgaggcgggcagatcacttgaggtcaggagttcaaaaccagcctggccaacatggtgaaaccctgtctctactaaaaatacaaaaaaatagccatgcgtggtggtgtgcgcctgtaatcccagctacttgggaggctgaggcaggagaattgcttgagcctggaagrtggaggttgcagtgagccgagatcacaccactgcactccagcctgggtgacagaatgagactgtctcaaaagaaaagctgttttcttctaccaccagcttgcccttgaattatttcctgggcaaagccaagaccctcttgggctgagccccactttgggacttgccagtactgcattttgtttttcataatctatttattatgcatttaagtctttcaggccacgtacagtgactcacatctataatgtcagcactttaggaggccaaggcgggaggagtgcttcagcccaggggttcaagactggcctgggcaacatagcagccacgtatacagaaagtaaaaaaaaaaaaaaaatagccaagcttggtggcatacacctgtagtcatagctactcggaggctggaggcaggaggatggcttgagggggaattgaggtg

SEQ ID NO: 52018 - DNA, 648 bp, Homo sapiens
gcgctgtggctcacacctgtaataacagcactttgggaggctgaggcgggcagatcacttgaggtcaggagttcaaaaccagcctggccaacatggtgaaaccctgtctctactaaaaatacaaaaaaatagccatgcgtggtggtgtgcgcctgtaatcccagctacttgggaggctgaggcaggagaattgcttgagcctggaagatggaggttgcagtgagccgagatcacaccactgcactccagcctgggtgacagaatgagactgtctcaaaagaaaagctgttttcttctaccaccagcttgcccttgaattatttcctgggcaaagccaagaccctcttgggctgagccccactttgggacttgccagtactgcattttgtttttcataatctattyattatgcatttaagtctttcaggccacgtacagtgactcacatctataatgtcagcactttaggaggccaaggcgggaggagtgcttcagcccaggggttcaagactggcctgggcaacatagcagccacgtatacagaaagtaaaaaaaaaaaaaaaatagccaagcttggtggcatacacctgtagtcatagctactcggaggctggaggcaggaggatggcttgagggggaattgaggtg

SEQ ID NO: 52019 - DNA, 615 bp, Homo sapiens
tacagttttcagcctacagggcccaaaggaaatgagaaaaatcatggcaagtttgggaaactgctgtggtgattttatgtggctgtaatggaagggatgttgacaagactgaagggctgggctttcacaggtgctggaatgccttcttgtaggggaagaggggttcttgaagggttttaagaagggaaatgacatgattagatttctgtcttaaaaagaccaatgcggcaacaatttggaagttagatggyaggtggggacatcagttaggaggctaaggtagtgagtggcccaggcaagaaataatgggggtctgtacaggacagtgggattgaagaagtgggagcaaattggagcttttggaaagagatctgatgggacttcaggaccagctgggtatgggggtgaggggaaagtgagggtctctagctccagtggccagaaggaagagcagatttgtaggcaagctggcaagtttaattgtgattatgctgtctatgaggttcctgtagaagggacaggcagagatgttcactaggcatttagatctataggcctggtgctgtggaggaagacctgggatagacgtggggatttggagttatcatggtttgg

SEQ ID NO: 52020 - DNA, 1248 bp, Homo sapiens
ctccaagtaactacaaaacatatttctaaaacattcacaattttttttctctcttgagacttattctatctgaatctaacaaatttgacgtggtaatttgttttccttttattagtggaacccagtgagctcttttatttgtagccgtattgtagttatctttgagatcttcatttctgccttaaacatcaagctgggctatctaatgaatctacagctgtgctgggagttatgagtattccatgtaggttcgaatatttcagatgtacgaaacatgctgtcaagaaaacaagcaatggcaagagaatctggcttgttttcacaatagcattgctgtattcaattgtaatctaaattgactgctgctttgaaagaaaatacccctaaagttcatcttactttactgtctagatttgagattaaaaaaagaaattactaacagcttagccaagtccatagtaattactctgatgaggtatttaatactttcaaacccaaatatgcctaaaactaaagagttttgctaaataaggaattgtttattcaactcagtgctagtagcataaaaatcagagaagtcttactgtgaactgtagtgttctcgtacatactcttactctcaccattatggtaattacttaacttccaggtatttctgggaaaaaacctagtcccatgagcatgtcttggtaaaattctgaaacaggcaaaatgtgccctttcccccagtcttagccctctagtttatcaaaacctgcctctccagtccttgtttcctctcccagaggtcttagttttcacacttggataaaaccaagacttttgctgtttagggcaggacttagggaagatatagggactttcacggttgtcttaaaattgcaatagagatatatttctactccaatatgcctgtttatttgtattattttaaagaacatttctgctatatcgatttcarttcccaatgaagaaaggtcagttttctccttttagccaaagacagtaaatgtttagcacactgtgagttgattttactggaagtactagttcaaactgtgttactttgatgagtcactgttttaattacccatttgtggtgagaggttggttcattatggatttcttcagttttgacagctttttgttgctcagagtcattgtcagctttgcctcaagtgaaagtttatacacaggtttgtttttgtaccagctgtcatattttaattttatctttcctgcaacaag

SEQ ID NO: 52021 - DNA, 1578 bp, Homo sapiens
ataatctgaattctaccagagtagaaagagcctccctcatcctagtaaaattaccagaaattctgacctcagagatcatctggctcctggtctatgggccatagacccatacatgagcggctactcccagagtccctggagcctgaacactcaatacatgttgaagggagggtggcagcaaggaaacaaatctcctttaaagggacagcctaatcattttactgttatacaaaattcctctcaacggcttcccgctgcctttacagccctgtcccagctgtctctggccccttctcccgaccctcactctccctctgacgttcttttgattcccctcactccctcctgcctcaggccctcatgtacactgttccctgtttggagggcttcccgacctgtccgagcacagccgcatccccaaagacaccccgtcatccttcccatctcagctccaagtaccttccggatccccttgctcctcagccccggccacttctgctggtaacactcactagttcggctgttttattctctgtatcccagcatctagtacattcctggctcaaagctgacagctgacaatatttattaacaaattccctaattggctgattggacctcaaatcacaatcacctgtatggggtggggaattgtcgattactagggaacactgggtaagagagaacaagataagcatcaagcagtgaactcagccccagtttggggctaggacattccttctgtagtaaatatcatattaaaactcaagtagaccctacagttaggcacaaaacctcatatggttcactagttcggctgttttattctctgtatcccaacatctagtactattcctggcccaaagctgacagctgacaataattattaacaaattccctaattggctgattggacctcaaatcacaatcacctgtatggggtgggggaattgtcgattactagggaacactgggtaagagagaacaagataagcatcaagcagtgaactcagccccaatttggggctaggacattccttctgtagtaaatgtcatattaaaactcaagtagaccctacagttaggcacaaaacctcatatggcatgaagaaatatgaattccctgcaactacgcagttttccctggtatgttcgaatgtgggtggcccaggactctggcatgcttccacactaggaagggaagggggcttgcggcaatgaagacccatagataaaaggaaggtgggatctgggaagtcacattaccatgagggtttgaaaggagtcccggcgcaggcctgcaggtctgtcagctgttaaccccactccagctggaaaagacaggacccgggctcctgcatgcctggggaggaggggttagccatcttgttccagagtcagctctggagggggctgcttccctgtggggctgccaaaggtttaggtcacagctcttgcatggcctcttgagtgtggctgatctgtcctaaggcagctacctgcctgttcactcaggggaacactcgcaaacctcttcaatggtaccctgactgyagcgctcaccttcttaatgaactc

SEQ ID NO: 52022 - DNA, 584 bp, Homo sapiens
cagggctctgtgtccaaagaacatgaggaaccaagcgtgaggaatgcaggagtgatgccaggagtgaggagccgagcaggtcaggcaggccctgccgagaatgtggcctcagccatcaaaggtgcagtgagctgaatccaggtgatgcctgactcaggctttggtgtgtccactcgactcactggcctcttccccagcaactggtgaaaatgtcctcaggaaaagcaccacaggctgctcagggtggggtgggaagcatcagaatcatctggcacaagggttgccgacacttgcacctcgtacagcccttgtgctcaaccttcaggaatcacagagaagactctctgagaaggccagtctctgtgcgactgtttctagggtagttcagagtccggagagggggaaaagggccctggggatctcttgaggacagcctggcctgaggacttgctgccacaggctacagctagcatcaccagctgtcacacagaggcctttgggtctaggcctgtcatgaagaaattttggcagggyctctgcttagatccccacacttttaatgtcctaaggaatcttaacagggc

SEQ ID NO: 52023 - DNA, 734 bp, Homo sapiens
tttttctttcccagagtatttgaaagaggcatggtatttacactgtattggtttttctctgagcacatcacttttgtatagtaccttattatatatgcagctaaaatgaatgagctcacacttttatccttctgcctggaaaccatcttgcccaagtccaagattcattaggtacattttctatcttccaaattacagcaacaatttaccaagtgttcaccactacatcacccaggtcaccatttttccagcctcctataacagtgtcctcaattgttatggcctggacctaaagccaataccatgagtatttggtagcactctgctggttttggttagcttgggtgtgtcctcatagtgaagacagagggacaagagagcaagtgaacacgtgagatctgtcaaggcccaggttagaaatggcacattctcacttctgcttcattttggtagccagagmaagttacattgccaagtcaaaactaaaggggtaagaaaacacactctggtcctttagtgggattggtgagcatggaagaggatatttctaaacagcaatctaatttactacattctctatgtatttcagtatatatttccttaaaaactgactaatgagataatcaataattatttggtattatctaatacccagacaataaccaagtttccctgattatctcaaaaaatttttgacagttggtttgttcaaatgggatcttaccaaaggtcta

SEQ ID NO: 52024 - DNA, 625 bp, Homo sapiens
acatattagttacaaatgaaaatcactaagaagagtgtttggcacttattacctgggcaaagactggaggaagggagaggcagaagtttgcatccccttcactatttttctttttttgccttggcagctttactcttcttttgctttgaacaaatacaaacaaaaccttaaccaactaaaagcataagcaaaaaagatctaagttcttagaggaaaaaaaagtgatggggtaatatctcctttccttaaagaattagtctttccttttcctaattcactgctaagtagctctgtatcatctctgtccatcccttcattcagcaaaactgatccgagtacctatgttgtgctgggaactgttccaagtgccagagccatagagaggacaaaagagaagatatccttagyctgatagaatttatactagcaaggaaaaaaaacactcagttctggctccaaatcctagaggttagacatgcaatttaaaatttctcattagctaaattctattctatcaaagccacttagtggtagtgtccagttgatatcatgaatcttaatgcatttcaagtttttatcttgaaattggttatggctcattgtgcctgagcaatgctgaagaatt

SEQ ID NO: 52025 - DNA, 625 bp, Homo sapiens
acatattagttacaaatgaaaatcactaagaagagtgtttggcacttattacctgggcaaagactggaggaagggagaggcagaagtttgcatccccttcactatttttctttttttgccttggcagctttactcttcttttgctttgaacaaatacaaacaaaaccttaaccaactaaaagcataagcaaaaaagatctaagttcttagaggaaaaaaaagtgatggggtaatatctcctttccttaaagaattagtctttccttttcctaattcactgctaagtagctctgtatcatctctgtccatcccttcattcagcaaaactgatccgagtacctatgttgtgctgggaactgttccaagtgccagagccatagagaggacaaaagagaagatatccttagcctgatagaatttatactagcaagraaaaaaaacactcagttctggctccaaatcctagaggttagacatgcaatttaaaatttctcattagctaaattctattctatcaaagccacttagtggtagtgtccagttgatatcatgaatcttaatgcatttcaagtttttatcttgaaattggttatggctcattgtgcctgagcaatgctgaagaatt

SEQ ID NO: 52026 - DNA, 549 bp, Homo sapiens
gtagtcccagctactccagaggctgaggcaggagaagggcgtgaacccgggaggcggagcttgcagtgagccaagatcctgccactgcactccagcctgggcgacacagcgggattccgtctcaaaaaaaaagaaaattccatttgagaggtgatgtcattgatgagtcacagatcacagataaaataggattgggaacatttatcatatttgtttatttttcttggtttcagattttgtattctatgcaaaataaatttcaatttgcatattaattactatgtaccatgtaaagtaccaatgtaggcattatgatgtaaaaacacatttatttaaaacrcaagtaattcatgtccaatagaaaaatattggaaagcacagataaacaaaaatttaaaaagataaaattaagaacccaattttggagctttcctccctattcttcctgccaagtacagctaaaacccttgaacattatgtataaaaaacagaacacgcgctttgaaaggtagaaagaggaaagtagaccatctaaaaatcttaagacca

SEQ ID NO: 52027 - DNA, 509 bp, Homo sapiens
caaaattagtcgggtgtggtggcgtgcacctgtaatcccagctactcaggagactgaggcaggagaattgcttgaacccaggaggcagaggttgcagtaagctgagacaccgcagcctgggggacaragtgagactccatcccaaaaaataaaaatagaagtatgcttcattttagttagtttataatcaacattgagaaatccaagaaaggtgagaaatgtaaactagagctggagatttaaaattggcacctgtaaaaatacattattttttgaagtaaaaaaagtttgtaaacatttcccttgtttacaaatctgaaattatattaattttggtaaaattctagattttttccaaataagtcaaaacctcaaaagaatggaaattttaggtaaaatttaggtaaaaatggaaagaaagtaagagtcataattttcaggctgttataagaaatgtcttttactgtatcatatggtattttatagtatataaaaatataggaattgac

SEQ ID NO: 52028 - DNA, 2321 bp, Homo sapiens
ttttctagagcagctttacgttcacagaaaaattaaacaaaaggtacaaaaacttcccgtatgtcctctaccctcacacatacatagccttccctattatcaacatcccccaccagagtggtacttttgttacaactgatgaacttacattgatccatcataatcacccaaagtccatagtttcattagggttcactcctggtgttgtacattctacgggtttggacaaatgtataacaacgtgtatctatcattacattatcattcattacattacattctatcatattgagtagtttgaaactatcatactgagtagtttcaaatgccctaaccattctctgcattctgcctattctttctcctttttcctaatagtgaacaacaatttccttgaagccccatagagatatgtattaaattaatgttttaaaaagtctataggatatgtattatatataaaggaacgttttgccatttcaaattatttcagttgattagaacaatatatagaaatgtcttcttacaagttttatgtatctgtggctttaaactggaaacatttacaaaggcagacatcgttattaatttataatatacatgataacattatagaccagaaagatactttaattgtaacccatagtctagagtttccctgaagaaataggcccagactatgcaaaggggctattcacagtgagggaaaggtgccaagataccctgtgtacccattaggctctggtggggctgacctcatccatatgtacctgaaatttattacataggtggaaagttgattatacattattatgaggtcatggcttctttgaaaatctgacaacagttgtagaccttcccccaagcaaaatgcacataatgcatgtacacacatagtgtatataatttcaggagttttgtgttctccctttgaaggtcagctatgaagcccagaagttttgtatcagagtaagtccctttgtatactaaacaaaagaattcatatttcctctagaatatgtgttgaaatgaacatacaaaacatacctaagagaacacacacatttatgtattaacttgggaagtcacttgtgtaagaatttaaataattttattcatgagagaatttcctatattaaaatgagttagaaaaggagaaaaaaatctttacttacgaggtggctgggatgtttacctttaccttcacgggtcaagggcaaatggaaggtggtgaagccaaccaagtactcctgctatcctaaagagtttcagcctatgagagtaaaagacctgcagaacgttgataagaacatgcagagatttgggagttgggactttagaacaggagaaagagtttagtaaagcatctgtaatccatgtggaaggtattgagagggaaacaaaagggaaggagaatttgtaagatgtttacaatacatagaggaggcactaaatgtaaattttatataacaactttacataaatctgtcaatttttagtaaagctaaaaatgcaaatgttctacaagtcagtatattcactcctgtagaattcacgtacacatacacaaaaacgttcatagcagcattgtcagcagtagcaaaatattggaaataccatagatatctgttgatgtgaggtcttagtgttttgtgttaatataacagaatatcacagcctgggtaatttacaagtaatagaagtttatttggctcacaattctgaaggctagcaagtccaagattaaggatctgcatctgatgaagaatttcttgctgcattgtaagacggtggaagacattgcatggtgacacarcatgtgagagagagaagagagagagaaagagaaagagagagagcgccaaactcattcttttataaggaaccactcccatggtaactaacccattcccataacagcaataatccattcatgagggcatctgttcatcacctctgaaagattctacttctcaacactgttgcattagggattaagtttctaatatatgaactttggaagacacattcaaaccatagcctatgagaatagataaataattgtgaaatggtcataaaaaggaacactatacagtagtgaaaattagtgagccagagctacatattttaacatgactgaatccaaaaacatagtgttgaataaaatgaagcaacttaatgtggtactatatgcattcacacaaacacatacacacacatatatgtgtatatatatattttaaactttatatgtatataaagtttatatacatataaagtatatataaaaatataaatatataatatttatatatattata

SEQ ID NO: 52029 - DNA, 546 bp, Homo sapiens
ttccaaatggaataataagtatagagatagaatatgtagttcaagacttcccatctctatgaggcacccagatatttgaaggaagaaattactttcattctcaagccaccgatcactacaggatggccagctggtgcagagccctggtgcagggccctgctaaagagaagtatagagatgccacaatactcttggttttcagcaaatgagcctaacaggtcgtttctagtgagaaaaaaataaattgagtattttaagaagtgttataggccaggcgccgtggctcacgcctgtaatcccagcactttgggaggctgaggcgggtgcatcacttgaggtcaggtgttcaagaccagcctgaccaacatggtgaaaccccatctctrctaaaaatacaaaaattagccagtcatggtggcacacacctgtaatcccagctactcgggaggctgaggcaggagcatcacttgaacccgggaggtggaggctgcagtgagattgcaccactgcactctagcctgggcgacagagcaagattccatctca

SEQ ID NO: 52030 - DNA, 543 bp, Homo sapiens
ttttttaaagatcaaatgaacacagttctggagcctagacgagtagctgtctaaccttactctgcgtaatagggctaaaatttcaactctatttctctgctgatgctctatgggatttggagcccccaaagcctgattttattcctaattaacagtaatgaacagatgacatacttttcctttgaacacctctgtcgggaaaatgtccaatcagcaagagctacaagcaatagacaaattccctttctctgacytcatttacatgcttaagtacacagagactccccctgcctttagtttggggtgcggggggaaagaagtaggtcaagacattgaggctttatgcattacctttagaatgtggtgaaggctgaaagtcatggctccaaccagagtttccagagcaatgtgggttactttcatattcatcacacataaggccaataccctcctagcagtattagtttagttctacatttaggcacaactcacaaaacagcaaagatgcctataattgtacccattaagagacttataatagaa

SEQ ID NO: 52031 - DNA, 543 bp, Homo sapiens
ttttttaaagatcaaatgaacacagttctggagcctagacgagtagctgtctaaccttactctgcgtaatagggctaaaatttcaactctatttctctgctgatgctctatgggatttggagcccccaaagcctgattttattcctaattaacagtaatgaacagatgacatacttttcctttgaacacctctgtcgggaaaatgtccaatcagcaagagctacaagcaatagacaaattccctttctctgacttcatttacatgcttaagtacacagagactccccctgcctttagtttggggtgcggggggaaagaagtaggtcaagacattgaggctttatgcattacctttagaatgtggtgaaggctgaaagtcatggctccaaccagagtttccagagcaatgtgggttactttcatattcatcacacataaggccaataccctcctagcagtattagtttagttctacatttaggcacaactcacaaarcagcaaagatgcctataattgtacccattaagagacttataatagaa

SEQ ID NO: 52032 - DNA, 543 bp, Homo sapiens
ttttttaaagatcaaatgaacacagttctggagcctagacgagtagctgtctaaccttactctgcgtaatagggctaaaatttcaactctatttctctgctgatgctctatgggatttggagcccccaaagcctgattttattcctaattaacagtaatgaacagatgacatacttttcctttgaacacctctgtcgggaaaatgtccaatcagcaagagctacaagcaatagacaaattccctttctctgacttcatttacatgcttaagtacacagagactccccctgcctttagtttggggtgcggggggaaagaagtaggtcaagacattgaggctttatgcattacctttagaatgtggtgaaggctgaaagtcatggctccaaccagagtttccagagcaatgtgggttactttcatattcatcacacataaggccaataccctcctagcagtattagtttagttctacatttaggcacaactcacaaaacagcaaagatrcctataattgtacccattaagagacttataatagaa

SEQ ID NO: 52033 - DNA, 611 bp, Homo sapiens
taattcttcaaacttatagtatatttagttttatttctcattactatatgtttttaataccataatgtctccatagttgatgtctatattttggtaccaattagaagtgggctctttgaaaaatttattttattttctaaaaaatttcacttaaggrcatgattttggctggagtgatcccaatttccatttcatcaattatataaggagttatatgtagaaacttgaggtaattagtatagtattttcaatttattccagtgatattttagtacccttaaaagattgatgcttacaaaattatcttttaaatttcctgtgtgtgtgtgtgtgtgtgtgtgtgtgtgttcatgtacgtggttaggtaccattgtaaaagtacttgaaggctatacttttattcatttctcagctgactgtgatgcaaattgactattcttttttttttttttttttacaaagggtatggaaggaaagtgtactttgtaaatctcctataaagttatgtttcctttgtcctgataccaggcagcaacatagcttgttgtagaaattttgggtcaaatgtttgtttacgcacaacactaaaatctcatttatttgacatattt

SEQ ID NO: 52034 - DNA, 611 bp, Homo sapiens
taattcttcaaacttatagtatatttagttttatttctcattactatatgtttttaataccataatgtctccatagttgatgtctatattttggtaccaattagaagtgggctctttgaaaaatttattttattttctaaaaaatttcacttaaggacatgattttggctggagtgatcccaatytccatttcatcaattatataaggagttatatgtagaaacttgaggtaattagtatagtattttcaatttattccagtgatattttagtacccttaaaagattgatgcttacaaaattatcttttaaatttcctgtgtgtgtgtgtgtgtgtgtgtgtgtgtgttcatgtacgtggttaggtaccattgtaaaagtacttgaaggctatacttttattcatttctcagctgactgtgatgcaaattgactattcttttttttttttttttttacaaagggtatggaaggaaagtgtactttgtaaatctcctataaagttatgtttcctttgtcctgataccaggcagcaacatagcttgttgtagaaattttgggtcaaatgtttgtttacgcacaacactaaaatctcatttatttgacatattt

SEQ ID NO: 52035 - DNA, 555 bp, Homo sapiens
cagtggagaacagcatcttttatgtgtctgaaaatttctctcattttgctcatgtttacaaggagagatttcggctggttttgtgtcgattgtgtcggttaaaatgaatcctgtcagtgaggcttcctgtctgatttttacagatccaaatgaagggataaagaaaaagttttaatttactctagatcctcttaactatttatgagattcagcaagtatatggtggggactaaaaagtgarctaatcctataatttcctctaggccaagtcatttctttgccattttgttgagcctctcaggggtcctcctacataattctctattcctgactattgttgtagagtttttatctttgtggcctctgggatcagaagtgccaccacatccacagggatccttgacagtgacacagtcccgctcaacttctctacttgactttctgacttggtaggagaggttctgttaagttctttcacatttttcccagaacacaatgctatctcatcatataaaaggagtttctacccacttttccgtttaagtgagtttatgc

SEQ ID NO: 52036 - DNA, 555 bp, Homo sapiens
cagtggagaacagcatcttttatgtgtctgaaaatttctctcattttgctcatgtttacaaggagagatttcggctggttttgtgtcgattgtgtcggttaaaatgaatcctgtcagtgaggcttcctgtctgatttttacagatccaaatgaagggataaagaaaaagttttaatttactctagatcctcttaactatttatgagattcagcaagtatatggtggggactaaaaagtgaactaatcctataatttcctctaggccaagtcatttctttgccattttgttgagcctctcaggggtcctcctacataattctctattcctgactattgttgtagagtttttatctttgtggcctctgggatcagaagtgccaccacatccacagggatccttgacagtgacacagtcccgctcaacttctctacttgactttctgacttggtaggagaggttctgttaagttctttcrcatttttcccagaacacaatgctatctcatcatataaaaggagtttctacccacttttccgtttaagtgagtttatgc

SEQ ID NO: 52037 - DNA, 549 bp, Homo sapiens
tttccagtaatatctgtggttggggtgtgggttggaggtgtagggagacaaaaaatagataagttaagcctcaaagggatctttcagagaaacactcattttattggcttagttaatatatattttaaagaggccaaatttgattcagtgtttttcttgaagatctcagcataacaataagagaaagcagcagatcattgaatgttttattattttcccttattttctaaggctattttattagttagagttattcagaaaaacagaatttatgagagagaaagaaaggtatttaaggaatyggctaagtccaacaaccatagagcaatgttgtcctgactccatagtcaagacacagctcaacataaaatttcttaaaacatcatatacactttcaatttgttccaatcatggggcattttctattgcatccctcatgggtttttctatttctaaattttaaattctctgaagagtaaaatttttgattcagaaacatatattatttttgtttttgttgtttttgccttctcaccacttttgatgtaa

SEQ ID NO: 52038 - DNA, 549 bp, Homo sapiens
tttccagtaatatctgtggttggggtgtgggttggaggtgtagggagacaaaaaatagataagttaagcctcaaagggatctttcagagaaacactcattttattggcttagttaatatatattttaaagaggccaaatttgattcagtgtttttcttgaagatctcagcataacaataagagaaagcagcagatcattgaatgttttattattttcccttattttctaaggctattttattagttagagttattcagaaaaacagaatttatgagagagaaagaaaggtatttaaggaattggctaagtccaacaaccatagagcaatgttgtcctgactccatagtcaagacacagctcaacataaaatttcttaaaacatcatatacactttcaatttgttccaatcatggggcattttctattgcatccctcatgggtttttctatttctaaaytttaaattctctgaagagtaaaatttttgattcagaaacatatattatttttgtttttgttgtttttgccttctcaccacttttgatgtaa

SEQ ID NO: 52039 - DNA, 388 bp, Homo sapiens
cattttaagtttcttgacctaaaaacctgtggaccacacatagaccacagtgaattctgcaaaagaaaaattagtaggtaggacacattggcatataaacaactgactccctttggcagctgcctaaattcaccatgttccttcataatccactgaaccattatgacctaaaattagaagacaattattgagctcttacagtgtaaaacataaattaaaatttccaaagaaacatacgttaagccatacrttaattttaaaaatgtatttatctaggatgactatagctaacagtaaagcagtgattattacaaatagttaaaagaatatccccagaaagaaatgataaatgtatgaggtgatgggttactaaccacccttattggat

SEQ ID NO: 52040 - DNA, 388 bp, Homo sapiens
cattttaagtttcttgacctaaaaacctgtggaccacacatagaccacagtgaattctgcaaaagaaaaattagtaggtaggacacattggcatataaacaactgactccctttggcagctgcctaaattcaccatgttccttcataatccactgaaccattatgacctaaaattagaagacaattattgagctcttacagtgtaaaacataaattaaaatttccaaagaaacatacgttaagccatacattaattttaaaaatgtatttatctaggatgactatagctaacagtaaagcagtgattattacaaatagttaaaagaatrtccccagaaagaaatgataaatgtatgaggtgatgggttactaaccacccttattggat

SEQ ID NO: 52041 - DNA, 388 bp, Homo sapiens
cattttaagtttcttgacctaaaaacctgtggaccacacatagaccacagtgaattctgcaaaagaaaaattagtaggtaggacacattggcatataaacaactgactccctttggcagctgcctaaattcaccatgttccttcataatccactgaaccattatgacctaaaattagaagacaattattgagctcttacagtgtaaaacataaattaaaatttccaaagaaacatacgttaagccatacattaattttaaaaatgtatttatctaggatgactatagctaacagtaaagcagtgattattacaaatagttaaaagaatatccccagaaagaaatgataaatgtatgasgtgatgggttactaaccacccttattggat

SEQ ID NO: 52042 - DNA, 548 bp, Homo sapiens
aatctgccttacttctgttacccaagtttaacgcctagaaggaaacaggcatggcagatggcaatgcagggccctggtgatgtttggttgccactgagactgactgtgcaaattcaaagtcagagagagacacactcctgccaatcttcagcttagttgatcctcacatattaactgtctttctctttccctggaacaaaagtacaacaaaatattttaataataattaaaaaatctaagtaaatgaatgttgaacataatgtttgtaatacttactgacttagttatgccttacctgttgttgttgacgtttgagaagaaaatcattcttgttagtccagactatttataagtgatcttttattttccaaaataaasaaatgatccgccttctcgtgattatattcaaaatgccttattctctggattaggagcttttcattgcaaaatagggggtctaatagtgaaaacaggtcaattaaattgtagtgaaattatactcccagacatattttcacagcttctgattattttaagtaaagaagctt

SEQ ID NO: 52043 - DNA, 511 bp, Homo sapiens
ccaccacacctggctaacttttaaatttgttttgtagagaaarggcctcactatgttgcccaggctgatctcaaattcccgggctcaagtgatcctcccacctgggcctcccaaaatgctgagataatgagtgtgagccaccatgcctgaccaatcttgtctatttcttatcagcagttttacttaaaagaaatattgaccatttctgaagttattaaaaaatatatgttatctattccgaagagaaatttcaaagaggagtatcaaaaatatttttactggtcaggcatggtggcacacgtctgtaatccctactcagctactcagctactcaggaggctgaggcacgagaatcgcttgaatctgggaggtggaggtttcagtgagccgagatcacacctctgcactccagcctgggtgactgagcaagactccatctcaaaaagcaaaacaaaacatactttttattattgcagcatcattagaatacaggcaaagcctccaaagggta

SEQ ID NO: 52044 - DNA, 511 bp, Homo sapiens
ccaccacacctggctaacttttaaatttgttttgtagagaaaaggcctcactatgttgcccaggctgatctcaaattcccgggctcaagtgatcctcccacctgggcctcccaaaatgctgagataatgagtgtgagccaccatgcctgaccaatcttgtctatttcttatcagcagttttacttaaaagaaatattgaccatttctgaagttattaaaaaatatatgttatctattccgaagagaaatttcaaagaggagtatcaaaaatatttttactggtcaggcatggtggcacacgtctgtaatccctactcagctactcagctactcaggaggctgaggcacgagaatcgcttgaatctgggaggtggaggttkcagtgagccgagatcacacctctgcactccagcctgggtgactgagcaagactccatctcaaaaagcaaaacaaaacatactttttattattgcagcatcattagaatacaggcaaagcctccaaagggta

SEQ ID NO: 52045 - DNA, 1065 bp, Homo sapiens
ttgagctgctcctgtaggctggacaccactgcattgttgccaggcactcggtaaaagcctgtggactccagccctcgtgcctccacaatgtgacagcrtgcagccacgattaaggggacatgctggggacacaggggaggggtgttaggggggacaggggccagaggagctggggaggccaagaaggggacaatgcaaggcccagagctgctgccaggaacccttggggggaacaaaaggcccttgctgcctccagtctgggagctacaaatgacaccaaagcctcgccatggtctgagaaggagccgggctcagcctcagccctgctgctccctccctgggaggcccagggcaggcctcccctctctgggctgttttcccagctgtgtttgtacaatgaggtggagagcttgttccatgtcccttgctgctctgaccctctgtgccttggtctccccctgccgggcctgctctggcgtgtggcagagacccacctggttctccgtggctggctggcagtcctccagcctgaccccaaatgcccttgggacagccttcttatttttcttgatgatgttgatgccccagggggttttgggggctgcagcactgtcatctgaagtgggggagacagagccagagtgagctggagtatccaggagggtcgcacacattcactgccacattcacacatttggatgtatggggattccatcagagaagaaaccagatgcccagggctgatgggacattgtatggcaagagagaaggcctgaaggggaggatgcttaccccaaaggagaggcccagagcaatgcaaggacttctgtgtggctcgtgggccaaaactacaaggcggaagccatagaactttgtttctttagaaacagggtctctgtcactcaggctgtagtgcagtggtatgatcatagctcaatgcatcctcaaattcctgggctcaagcaatcttccctccccagcctcccgagtggctgggactataagctcataccaccacacctggctaattaaaaaaaatttttctgccaggcacagtggcttatg

SEQ ID NO: 52046 - DNA, 574 bp, Homo sapiens
tcaggctgttggttcctcccttcaatatcaacctgagaaatgaaaaacccagtggttctcattacttcacatgcatgggaattacttggaaggcttgttaagctaagttggctgggtctcaccctccatcagcaggagaatatcaggaaagtgcgaaagtgttgttggggtgaagagtgaggaaaataggggttgaccaagcaactattttgggtatttactctccgcccaggaattccttgttctgagaatttaaagcaaaaccctggtcagagaaagtacctaataagagtgggggcaattttgagtgaccagcaataattctgtagggtttaactgtctttaccacctggggttcatcatctaccatctctttaaacccagtgagtaaaacacagtctacaygacatcagttcttccccaaagggaaatatccccaaaggaacttgagcctacatgccagaataaccactcaaggagtacaaccactcaaggagtacaaccactcaaaagaaaggcaactaaataaaaaatgtcgaccatctaaagccaaatgattagcttaagcagatca

SEQ ID NO: 52047 - DNA, 584 bp, Homo sapiens
taagcatcgaggataggcagggcacatggaacaattcaccccgatgtgcagagacacaaagtcagatgaatgtccaaagggccagaagtgggcttcctgcccttcaaggatcacctcctccaggaagcctgtacaggttgctatgaggagcagatgagcatgtgctgaacattctgaatacaatatggattgtcaggctgagcccttgctcattgtttattggggggggggaaatctctgttttgattgtccttgagttgagaagggactcttaagttggaagctttctggacctttgttgtgtgggaaaagtagaaggcagttggcacaggtgcctctgtggcatcacctggccccgtggtaaatcctatcttattcaatgaggaaacaagggaagagaagtggtgtctccttagccacttctctgagcttgatgggaatatatggcttaagaactcatarccgtggcctccatgacaatcccttggctcccaggctctgtgactccccagtccatcctggctctcttcagaggtaatgtctgtcaaatttcaatgtcattgttcttattataattaggaata

SEQ ID NO: 52048 - DNA, 1933 bp, Homo sapiens
tttctgaaccagtgatatacactgtgtagaaaggcacataatggcataaaaggtcagtgtttgaaaattattaaaaggataacataatgccccaagaccaataataaattcttacatatagaactcttatggtactgtttatacacattgttttattactccagatactctatgggacagaggatattattctcctttttatcaagagaaaactgagcttaaaaaagttaagtaactttctcaaagtgttttaaaatgtaaatgatagagctgggatgtgaacccaggttgtagtcatttcaaagtccgtgacctctatgctgcatagcattagtagtgtctaaatttaggtgactatttgggggaggaggtcatgaattttttttaatgttaataatcttcattcatttaataattttggatgatcgccctctataacagagacttctacatttcatgtaaatataccagggtaaaactttgcaatttttaaaatcacagcattaactatacaatggggtcactcaatgaaaatcgtttatgaatatgaccgaagatttcattataaaaacacccaccaccagtagcccaaaaacattacaacaaggctcttgtgtggaaaaaaaagtatttctctttaagaaagacttttcttctttttttttaatcactggcacaaaaattttctcagaaaacactaaggaatatcaaccaatcaaagacacaaaggtttatcaaggaaggtttatggaaagcaaatgttctccaaatatgcaaatccaaaaaggaaggacaaggctgggtgaaccctgtctgcagatagcacagagtaactgagtaatcacagagtaattgtgactgtttcaagaactgtgtttcagatcatgttaacttgaggaacaataaataaatcttgctaattcagtgaaactgctggttttatgaagaacctattgtgggccaatattttataattcaatattagtgatacactgggcaaattttctcattaatgacactgcatcatcaaactgcataaatgctccactgaccctaactatttgctactgacctccacagtttgctggaagtagcagttgtgtatgtattccaaatttaaaaagcaaatttctatttcaaaggacagatctgtgactgcctttaaacaatacagactcatttaatatctaatttattcagaactgaaataatgtcacacaaaaagctctacttttctttttcagtaacagtatggaagctgtgatttctgagcaataatagaagaatacttcagcctctcagccattacagtaagcagagaatgcaagagaatgcatgagttcttttgtggaaattggcagataatggcagcttttctgaaatctcccacttttttaaattggcaatccgataaaacctttaaatttggggagtgggaggaggaaatgtttcaataaccacatattaaaaataacttgctaaagaaaggccttgaggctctcggatatactaagaacaaacaatcaaatgtatcctgtacctgggaagacaaaagcctcacaatcacgatgttaaaaggcaagaaccttgggctccagaggttaaagggtagcatcctgatgccataattaggcaactggatgcatagcaagaagagttctggaggggcaattagaattgtcaccagatccatcctggatacatcactaagtgtctctaagccttagttttctgtctttggaacacttggtttggctcagtgctctattaggcctagcctagaattcaagattctaaactctcagcaggaattttacctacaaagaaatataaaactagactccacatttttgagtcctaattcagagacaatgttgataatttttatatcattgtatgtcayaaatctgtagatgtcaaaaattcttacaaa

SEQ ID NO: 52049 - DNA, 544 bp, Homo sapiens
agttattaggagttacggcttcagcatatcaatttgggggagagacactcaacccataacaccttcactaataatagtagcaaattattcataactaatagtaacatgaggaagaatctaacagatgtggggcagagagagggatggcgaggaggaactagtgcagatatccctaacctttttggcaccagggacccattttgtggaagacaatttttccatgaattgggaggtggggggcagagggtttcaggatgaaactgttccaactcagataatcaggcattagattctcacaaggggcatgcaacctagatccctcacatgtgcagctcacattagggttcatgctcctgtaagtatctaacgcctccactgatctgacaggaggtggagctcagkggggaatgcttctcgcctgctgctcacctcctgctgtgtggctgggttcctaacaggccatgaaccaagtaccggtctatggcctggggactggggacccctgaactagtgggacaagttttaggagaaaacggggctccat

SEQ ID NO: 52050 - DNA, 527 bp, Homo sapiens
tgctggttatctgagctttgtattttcctcagaatctaagtatgagaagagttctgaccaccttcattttcaccctactctcttcagaaaggacagtaaatgaaaaaggaagaaaaagggaaaaaagcaggcaaacagaaacaaaaaaaagaagaaaggtgttattctcttgatgtagaaagtagaagaaaaaatgaaaacagcctcagagaccctctgttattactgcatttaattccaaagagagattggtatttgctttgaaaacatacttattttacttacaggtattaatgatgcagaagtcatagcatcaaaatatattaaaattattggattctgtataaatattaaccaaattatactgctatgacaaccaaaaatatagcattgcctaatgtatcttaatattattgcttatataatgctgaagtattcatctggttttatactacaacrtataacagcattttagataagtgcacagctatcctttagtgtcaattattagatattatatttgattg

SEQ ID NO: 52051 - DNA, 564 bp, Homo sapiens
tggcgggcgcctgtaatcccagctactcaggaggctgaggcaggagaatcgcttgaacctgggaggcagaggttgcagtcagccgagatcgcaccactgcactccagcctgggtgacagagcaaaactgtctcccaaaaaaaagcatgcttagtaatgtgttgaactatacagttaagtgttacatatacattcatacacatatatgtattcctgtatgtgcacatgtgtatatgaacatgttcctctttaacagtgagaaatcttaaatcatttcgtttccttgacctagtatttcaattctacttctcctcccaaatttcttactcagttaaaatatgcttgtgtgtgaaaataatsagttaccacatgatgaaagcacaccacacacatgctaccacatacagaaatttaaaaaattatttcctgtaaccataagatgctaagtaacaatacttatctttaaaacaaagttttattaaaattatcattaatacacaattaataaacagataaatacatataaataaattagtactttggcaagtatgtaacaaatgggaaa

SEQ ID NO: 52052 - DNA, 586 bp, Homo sapiens
tgctaatttttctatttttctttagttttatcaactcttcctatgtactcttcyttgaaaaagatcttttttggtcaggcctggtgactcacacctgtaatcccagcatttggggaggccaaggcaagtagatcacttgagcccaagagttcaggaccagcctggtccacattatgaaacctggtttctaccaaaaatacgaaaaaattagccaggagtggtggcacatgcctgtagtcccagctacttagggggctgaggtgggaggattacctgagctcaggaggttgaggctgcaataacctgtgatcacatcactgcactccagcctagtggaccaaagtgagaccctgtctgaaaaaaaaaaaaaaagaaaacgatcttcttaaattcaaaagtaatattcactcatgaagaaaaattaatacagataagcaaaaaaagaaaaagaaaattaaaatcacctacaatttctctattaagaaataacatggcttaatatgtttatatacatccttcctgacattgtcccatggcataaaactatcatcataattattatgatttacaaaaatttagctatttt

SEQ ID NO: 52053 - DNA, 1219 bp, Homo sapiens
tccttcaggccttggggtaaatgtcacctctgtcttagtgtgagctccccaacaatgaggccctgagacacagatttgatgcaaatggttcatttggaaggtgattccagaagtactggtgagcgagtgagagggggtaagaaagggacagaagggagccagtacaaggtatgtcaacgagcagaagacagctgtgggtgcgcagggctccggtggctggaatattcatcctctaactcctgtccatcatttgctgagggctactgccagggatgttaaacccccacaattctgatttgcctcacactggccaggcacgcccctgaagccagaggaagcccacaggctgaatcacagggacatgcagtcggaagccaccaacagtgaacgctgaagggtggggactgcatgccaataactgtgctacgtgacgggagaggtcttccctggccaccaaatgtaagcagcacccctccacgcctggtgttctccatcgctgcatcctgttcttgcccttcagagtattcaccagactttgtaccattacccatgcgtacacagacatatttgtttactcacctgttaactcacttcctccactaggttgcaagctcgaagagggcagaggtgacatctctgtttactgcatgtacccagcacagtgcctggcaccaatctgcatccactaaacatttgtgcctggatgaacacagcctgcatgggcttcatcttcattatttgttcttatgtctgtctccaccactaagtgtgacctttcagagcccagsatccagatccaacctgcctatgggtccagacctagctcaagaccttaaagactggccgggtgaggtggctcacgcctgtaatcccagcactttgggagcctgaggagggtggatcacttgacgtcaagagttcgtgaccagcctgggcaacatggtgaaaccccatctctactaaaaatacaaaaattagccaggcgtggtggcaggtacctgtaatcccagctactggggaggctgaggaaggagaatcatttaaatccgggaggtggagtttgcagtgaactgagattgtgccactgcactccagcctgggcaacagagcaagactacatctcaaaaaaacaaaaaaaaaataaaaaaacaaaaaacacacacacaaacagaaagaaatgtgcttcatgttactcccacctgaaaagttttcccagcta

SEQ ID NO: 52054 - DNA, 1219 bp, Homo sapiens
tccttcaggccttggggtaaatgtcacctctgtcttagtgtgagctccccaacaatgaggccctgagacacagatttgatgcaaatggttcatttggaaggtgattccagaagtactggtgagcgagtgagagggggtaagaaagggacagaagggagccagtacaaggtatgtcaacgagcagaagacagctgtgggtgcgcagggctccggtggctggaatattcatcctctaactcctgtccatcatttgctgagggctactgccagggatgttaaacccccacaattctgatttgcctcacactggccaggcacgcccctgaagccagaggaagcccacaggctgaatcacagggacatgcagtcggaagccaccaacagtgaacgctgaagggtggggactgcatgccaataactgtgctacgtgacgggagaggtcttccctggccaccaaatgtaagcagcacccctccacgcctggtgttctccatcgctgcatcctgttcttgcccttcagagtattcaccagactttgtaccattacccatgcgtacacagacatatttgtttactcacctgttaactcacttcctccactaggttgcaagctcgaagagggcagaggtgacatctctgtttactgcatgtacccagcacagtgcctggcaccaatctgcatccactaaacatttgtgcctggatgaacacagcctgcatgggcttcatcttcattatttgttcttatgtctgtctccaccactaagtgtgacctttcagagcccaggatccagatccaacctgcctatgggtccagacctagctcaagaccttaaagactggccgggtgaggtggctcacgcctgtaatcccagcactttgggagcctgaggagggtggatcacttgacgtcaagagttcgtgaccagcctgggcaacatggtgaaaccccatctctactaaaaatacaaaaattagccaggcgtggtggcaggtacctgtaatcccagctactggggaggctgaggaaggagaatcatttaaatccgggaggtggagtttgcagtgaactgagattgtgccactgcactccagcctgggcracagagcaagactacatctcaaaaaaacaaaaaaaaaataaaaaaacaaaaaacacacacacaaacagaaagaaatgtgcttcatgttactcccacctgaaaagttttcccagcta

SEQ ID NO: 52055 - DNA, 587 bp, Homo sapiens
tcaagggtgcaccttttgggctgtgttccattgatcagagaggctgctgcaaaatgcctctccaccctaggaagctggtgamtgaacattgctaccaacaacaaaaacaagaaagcaaatgttttccttagatgctctccactttccttcttacgctactcatctccctgcaagaacactgtgcccagaaccctagctgcaagggactctgggaaatgcagcttataggtttctagcctcaaaggtagagggatgcacacttgaaggagataggagtgaatgttctgtgacaatccatcatgcctaacacatatctaaaatatatttcatccgagatttggctagagtatttatttttaaaattggtagagattgactttggaaaggtaagaggatatgttgtaaaaattttttaaaggagctagttgctaaccagttaccttttcaaacagatggatgttatcgttttgcagctgaaattgctggaaaaagcatcaagcaaatgaataactaaaaattaccaagcgcctgcctctgcatacggtactaattgaatgaaaataatgtttcttaggtttgatttcata

SEQ ID NO: 52056 - DNA, 1077 bp, Homo sapiens
gtggcattttcttatgtcgatgtaatgtgaacaactcctggtcaccagcccccttgaccactgatgcctcttcatgggtcggtgagtgagggagacacagccatttattcctggcatcttgaattaaacttgaaattactgcccactagaaataaggcctggggcatagagtcttattattaaaatcttttgtggaaagtcacagggctccaatcaccccaaaaacattgtgtctatgggaaaatgcaccttgagttccatcttacaaatggatttgtaacagtttaggtttcatgtaagctgttcacagtatcctagtgatacatgtttatggtaaaaaatcttggagggtaaagaacaaacactgcccataattttttactgtatacacttttttttcttataaaaatgttactctattgcacatagtgttttgaatcatgccaatttttatttggcaattatataaaggcagaactttaaatatcayccccaacattctgtgcctacgcctcagagcctatgcttaaaaagagcaatcatattcatgactacgtatttaatgcaacattagaaaactaatgcagtcataacccacaagcgttttccatgccaatgacctttttgccatctggtttagtgactgcagagtatcccattacatggttgtctcacaccttggcaagcatcccttaaggatggacactaaatcatcatggggtttaatactctcatccacagaagggactcccaagccagtcctcacatatcttgctctcattactagggcagagtgttctaagaattttcctcttatgggccaccaccagagcagaccagactcactgtttccatgcctgctggctcttgctgccaccatgccctgatttcaaataaccactccatccatgagctaactgaccttagaaagatatacttttaaaatgcatatcctcccaattttcaattaaggccaaaaggagtagtagagaccaaatatatcctctttcatgaaacaaacaaaaaatggcaaaaatatgtgaatctacgaaaagatactagaactcttaagtgaat

SEQ ID NO: 52057 - DNA, 1077 bp, Homo sapiens
gtggcattttcttatgtcgatgtaatgtgaacaactcctggtcaccagcccccttgaccactgatgcctcttcatgggtcggtgagtgagggagacacagccatttattcctggcatcttgaattaaacttgaaattactgcccactagaaataaggcctggggcatagagtcttattattaaaatcttttgtggaaagtcacagggctccaatcaccccaaaaacattgtgtctatgggaaaatgcaccttgagttccatcttacaaatggatttgtaacagtttaggtttcatgtaagctgttcacagtatcctagtgatacatgtttatggtaaaaaatcttggagggtaaagaacaaacactgcccataattttttactgtatacacttttttttcttataaaaatgttactctattgcacatagtgttttgaatcatgccaatttttatttggcaattatataaaggcagaactttaaatatcatccccaacattctgtgcctaygcctcagagcctatgcttaaaaagagcaatcatattcatgactacgtatttaatgcaacattagaaaactaatgcagtcataacccacaagcgttttccatgccaatgacctttttgccatctggtttagtgactgcagagtatcccattacatggttgtctcacaccttggcaagcatcccttaaggatggacactaaatcatcatggggtttaatactctcatccacagaagggactcccaagccagtcctcacatatcttgctctcattactagggcagagtgttctaagaattttcctcttatgggccaccaccagagcagaccagactcactgtttccatgcctgctggctcttgctgccaccatgccctgatttcaaataaccactccatccatgagctaactgaccttagaaagatatacttttaaaatgcatatcctcccaattttcaattaaggccaaaaggagtagtagagaccaaatatatcctctttcatgaaacaaacaaaaaatggcaaaaatatgtgaatctacgaaaagatactagaactcttaagtgaat

SEQ ID NO: 52058 - DNA, 1077 bp, Homo sapiens
gtggcattttcttatgtcgatgtaatgtgaacaactcctggtcaccagcccccttgaccactgatgcctcttcatgggtcggtgagtgagggagacacagccatttattcctggcatcttgaattaaacttgaaattactgcccactagaaataaggcctggggcatagagtcttattattaaaatcttttgtggaaagtcacagggctccaatcaccccaaaaacattgtgtctatgggaaaatgcaccttgagttccatcttacaaatggatttgtaacagtttaggtttcatgtaagctgttcacagtatcctagtgatacatgtttatggtaaaaaatcttggagggtaaagaacaaacactgcccataattttttactgtatacacttttttttcttataaaaatgttactctattgcacatagtgttttgaatcatgccaatttttatttggcaattatataaaggcagaactttaaatatcatccccaacattctgtgcctacgcctcagagcctatgcttaaaaagagcaatcatattcatgactacgtatttaatgcaacattagaaaactaatgcagtcataacccacaagcgttttccatgccaatgacctttttgccatctggtttagtgactgcagagtatcccattacatggttgtctcacaccttggcaagcatcccttaaggatggacactaaatcatcatggggtttaatactctcatccacagaagggactcccaagccagtcctcacatatcttgctctcattactagggcagagkgttctaagaattttcctcttatgggccaccaccagagcagaccagactcactgtttccatgcctgctggctcttgctgccaccatgccctgatttcaaataaccactccatccatgagctaactgaccttagaaagatatacttttaaaatgcatatcctcccaattttcaattaaggccaaaaggagtagtagagaccaaatatatcctctttcatgaaacaaacaaaaaatggcaaaaatatgtgaatctacgaaaagatactagaactcttaagtgaat

SEQ ID NO: 52059 - DNA, 527 bp, Homo sapiens
tagatagttcccgggaagcttgcgggcatctcccttaagaagcagccagcgggtgctgaaaaattatgcagaacattatgtgagaggggtaaccagaattatatgtaaaaataacagatacaacaaatataccacatcttcttgcttgakgaaaactgtaagatcatcacctgatacattttaggaaatgaatagtcaatccaatggcattttgcttttctgcttatcttgtcaggattctacattcctaacacatcaccatttctcaacctctgcccagatctgttactataaggaaaaataatacattattagaaactgtacgttccaccagccctatggtcagcttcaatgccaaccaactactgtgatgaggatttgtccttcccatgcttagaatactttgcatttcaagtatatttcaagtatacttaggaatgataaaaattatttaattgctgtgtgcaggtgggctcaggatatcttccaccagagaaggagaatgcagctgagatattgaaagaaca

SEQ ID NO: 52060 - DNA, 622 bp, Homo sapiens
gataaatttggaactcaaattacctgactgcctgactcaattgcaaggctaatctctcaggattatctgccacctaaggtatgtatttccgatatacaaatccatatatattttcatatacatatatgtatgtatctgtgtgtgcatatatatgtatatatatcttatactacctcatttttattatgaacagctacatctaagtttttttaaaggaagaaaagaagggaacatttttatattttctatgaactttttactgattcacctataaattctttgataatttagtattaatctgaatatagctgtttttattttagagctgaggcagaaattctgcatcagatggtgaaggaactagaaagaatttctaaatacatatgaagacaattacattyggacaaactggtgagattttgcattttattttcaaactaacagcaagggtgcagaggtgcgtgtcagtcatggttattgatctttctgtctctaattttttttctttttttgagacagagtctcactctgttgcccaggctggagtgcagtggcgcaatttcagctcactgcaacctccgcctcctgggttcaatcaattctcctgtcacagcctccagag

SEQ ID NO: 52061 - DNA, 573 bp, Homo sapiens
cgttggccaggctggtctcgaactcctgacctcaggtgatccacccaccttggycttaaagtgctgagattacaggcatgggccactgcactcggccttactattattattttttcactattattgtaattgacccatttcacaggtgaataatttgatgcccagagaggctaagtaacttttccaagctggtatagctgggtttttttccagtctggctctcctgtctgtccccactgccacagaattaattcctcacttcccacccatacttttttttttaaccttttcagtagtcttctttccatctgtctcttcccacacgtctccaccctccatggtgtgatcttggctcactgcaacctccacctcttgggtttaagtgattctcctgcctcagccttctgagtagctgggattatagacgtccaccagcatgcctggctaattttttttatttttattttttagtagagacagagttttgccatgttggccaggctggtcttgaactgctgacctcaggtgatccatcagcctcggcctcccaaagtactgggattacaggcatga

SEQ ID NO: 52062 - DNA, 513 bp, Homo sapiens
acgttgaaacaaatttgcactttcagaacaagggtgattgcaggactgactgtagagcattaagagatcactgtcctttatctgtactttcaaaatcccaaaagttctttgtaagtttagcacaaattcatttgttagcaaagcttaatgtgaatactgatgttttcctaaaatattgcacttcgattattaaagtgctgtcacagaccccatgagggtctgaatatacctgtatagagttgtaaaaattctgatttccaaaacacatctggccctaagggaagagggaatggtaggtctatgttgttgagcgtctgrtttgtgtcaggcatcacgatgggtgttgcagatgcagagacacacaaggcacagtccctgggagacccagggaacttgaagtctagaaggggctaccacactctttgtgctgttgtagtagatgtctgtactatgcacaagcagagaacagaagaaggagtcattctttctagccaaagtgttcaaggcaggctt

SEQ ID NO: 52063 - DNA, 554 bp, Homo sapiens
tttacaaacaatttgtgcagttaacacaatcatcacagggtcctgaggcaacatacatcctgagcttacaaagatgacaggattaagagattaaagtaaagacaagcataggaaattataagagtattgattggggaagtgataaatgtccatgaaatcttcacaatttatgttcagagactgcagtaaagacaggcataagaaattataaaagtattaatttggagaactaacaaatgtccatgaaatcttcacaatttatgttcttctacatggcttcagcaggtccctctgttcggggtccctgacttcccrcaacaaatatcttctttcctccacgcttcccccagaaaaagagaaaaccgtttcttctttcctcttgtcactggacaagctgccatgctcaccttacctcatgcctcctggaagtaaagtctcagtcctcagccttgtcatagcatggccctggggagcacagcctatctgacatgtggccagctcctctgtcataatggaaatgtgctgggattatgggtcccagcaaaactctgaca

SEQ ID NO: 52064 - DNA, 554 bp, Homo sapiens
tttacaaacaatttgtgcagttaacacaatcatcacagggtcctgaggcaacatacatcctgagcttacaaagatgacaggattaagagattaaagtaaagacaagcataggaaattataagagtattgattggggaagtgataaatgtccatgaaatcttcacaatttatgttcagagactgcagtaaagacaggcataagaaattataaaagtattaatttggagaactaacaaatgtccatgaaatcttcacaatttatgttcttctacatggcttcagcaggtccctctgttcggggtccctgacttcccgcaacaaatatcttctttcctccaygcttcccccagaaaaagagaaaaccgtttcttctttcctcttgtcactggacaagctgccatgctcaccttacctcatgcctcctggaagtaaagtctcagtcctcagccttgtcatagcatggccctggggagcacagcctatctgacatgtggccagctcctctgtcataatggaaatgtgctgggattatgggtcccagcaaaactctgaca

SEQ ID NO: 52065 - DNA, 554 bp, Homo sapiens
tttacaaacaatttgtgcagttaacacaatcatcacagggtcctgaggcaacatacatcctgagcttacaaagatgacaggattaagagattaaagtaaagacaagcataggaaattataagagtattgattggggaagtgataaatgtccatgaaatcttcacaatttatgttcagagactgcagtaaagacaggcataagaaattataaaagtattaatttggagaactaacaaatgtccatgaaatcttcacaatttatgttcttctacatggcttcagcaggtccctctgttcggggtccctgacttcccgcaacaaatatcttctttcctccacgcttcccccagaaaaagagaaaaccgtttcttctttcctcttgtcactggacaagctgccatgctcaccttacctcatgcctcctggaagtaaagtctcagtcctcagccttgtcatagcatggccctggggagcacagcctatctgacatgtggccagctcctctgtcataatggaaatgtgctgggattatgggycccagcaaaactctgaca

SEQ ID NO: 52066 - DNA, 1229 bp, Homo sapiens
tgtgtgtgtttccaacaaaagaaagatttttctaagtacatgagaacaaatgtctttggaagaaataatcttgagcagtgtttctcaaaatatctgtgataaggcattttttttcccaattctttacagtctaatattttggtaatgtatgaaatcacatgctcagagatcatcaaaaggtcaaattgcattggaagtttccacatgatcattctcaatttctgtccatgttctgtcgcactacagcaacagtctactgactacattttcagaggcactgacgtagtgtgagtctcacattcacaatgataactatgtgattgggaattaaactctttttaaatttctgccatagtttcggaaatttgttgttgttttcaaattttgttttatttttgttttgcccaatacatttatatttttctttagaaatgcagattttaatatgaacaaatatacatgagtccaaagatttgtattttttaatctctttcatagctgatgtgatataagcaagtattgtattttgtggttcctatatgtacttagaatgtctgctgactttgttatttatttttcagaaatattttattagaagggagctatacgtcatttgctctaattcccaatgtggaattatgtcacagttcttggaattagctctaatttacagtttatctctaaagaagcgagtttaagaatgtttatgccatcattgttgctccaacaatgccctcaaattgtcccttgtgctatttgatttgtttcaatagtgcaggttaaatcttacagctgtgctaaggctggttagcatgatgttcygggacctctgggtaactggcctttgttccgttcagcagctctgggttcaggaaagcactcagaccagactgtgttaatctggagaggtggagagtgataagggagggccgcatttgtggctacatgttctgtattgtttggccctccatagtcatatactaagtttataaggctgaatttataaagtacttcctggttcagatgaggatgaggaacccacattcattcttggggtctgatgcgagtctcactcattcagactctgtcatctgaatctatgtaatcctcgagtgaggatttgggaaaatgggaagcctgtgccgccttgtcggccagaggaggttactgatctcccaaggttgttgatctcctggctgtggggactcactagactgacttgtgcccgc

SEQ ID NO: 52067 - DNA, 1229 bp, Homo sapiens
tgtgtgtgtttccaacaaaagaaagatttttctaagtacatgagaacaaatgtctttggaagaaataatcttgagcagtgtttctcaaaatatctgtgataaggcattttttttcccaattctttacagtctaatattttggtaatgtatgaaatcacatgctcagagatcatcaaaaggtcaaattgcattggaagtttccacatgatcattctcaatttctgtccatgttctgtcgcactacagcaacagtctactgactacattttcagaggcactgacgtagtgtgagtctcacattcacaatgataactatgtgattgggaattaaactctttttaaatttctgccatagtttcggaaatttgttgttgttttcaaattttgttttatttttgttttgcccaatacatttatatttttctttagaaatgcagattttaatatgaacaaatatacatgagtccaaagatttgtattttttaatctctttcatagctgatgtgatataagcaagtattgtattttgtggttcctatatgtacttagaatgtctgctgactttgttatttatttttcagaaatattttattagaagggagctatacgtcatttgctctaattcccaatgtggaattatgtcacagttcttggaattagctctaatttacagtttatctctaaagaagcgagtttaagaatgtttatgccatcattgttgctccaacaatgccctcaaattgtcccttgtgctatttgatttgtttcaatagtgcaggttaaatcttacagctgtgctaaggctggttagcatgatgttccgggacctctgggtaactggcctttgttccgttcagcagctctgggttcaggaaagcactcagaccagactgtgttaatctggagaggtggaragtgataagggagggccgcatttgtggctacatgttctgtattgtttggccctccatagtcatatactaagtttataaggctgaatttataaagtacttcctggttcagatgaggatgaggaacccacattcattcttggggtctgatgcgagtctcactcattcagactctgtcatctgaatctatgtaatcctcgagtgaggatttgggaaaatgggaagcctgtgccgccttgtcggccagaggaggttactgatctcccaaggttgttgatctcctggctgtggggactcactagactgacttgtgcccgc

SEQ ID NO: 52068 - DNA, 1229 bp, Homo sapiens
tgtgtgtgtttccaacaaaagaaagatttttctaagtacatgagaacaaatgtctttggaagaaataatcttgagcagtgtttctcaaaatatctgtgataaggcattttttttcccaattctttacagtctaatattttggtaatgtatgaaatcacatgctcagagatcatcaaaaggtcaaattgcattggaagtttccacatgatcattctcaatttctgtccatgttctgtcgcactacagcaacagtctactgactacattttcagaggcactgacgtagtgtgagtctcacattcacaatgataactatgtgattgggaattaaactctttttaaatttctgccatagtttcggaaatttgttgttgttttcaaattttgttttatttttgttttgcccaatacatttatatttttctttagaaatgcagattttaatatgaacaaatatacatgagtccaaagatttgtattttttaatctctttcatagctgatgtgatataagcaagtattgtattttgtggttcctatatgtacttagaatgtctgctgactttgttatttatttttcagaaatattttattagaagggagctatacgtcatttgctctaattcccaatgtggaattatgtcacagttcttggaattagctctaatttacagtttatctctaaagaagcgagtttaagaatgtttatgccatcattgttgctccaacaatgccctcaaattgtcccttgtgctatttgatttgtttcaatagtgcaggttaaatcttacagctgtgctaaggctggttagcatgatgttccgggacctctgggtaactggcctttgttccgttcagcagctctgggttcaggaaagcactcagaccagactgtgttaatctggagaggtggagagtgataagggagggccgcatttgtggctacatgttctgtattgtttggccctccatagtcatatactaagtttataaggctgaatttataaagtwcttcctggttcagatgaggatgaggaacccacattcattcttggggtctgatgcgagtctcactcattcagactctgtcatctgaatctatgtaatcctcgagtgaggatttgggaaaatgggaagcctgtgccgccttgtcggccagaggaggttactgatctcccaaggttgttgatctcctggctgtggggactcactagactgacttgtgcccgc

SEQ ID NO: 52069 - DNA, 1229 bp, Homo sapiens
tgtgtgtgtttccaacaaaagaaagatttttctaagtacatgagaacaaatgtctttggaagaaataatcttgagcagtgtttctcaaaatatctgtgataaggcattttttttcccaattctttacagtctaatattttggtaatgtatgaaatcacatgctcagagatcatcaaaaggtcaaattgcattggaagtttccacatgatcattctcaatttctgtccatgttctgtcgcactacagcaacagtctactgactacattttcagaggcactgacgtagtgtgagtctcacattcacaatgataactatgtgattgggaattaaactctttttaaatttctgccatagtttcggaaatttgttgttgttttcaaattttgttttatttttgttttgcccaatacatttatatttttctttagaaatgcagattttaatatgaacaaatatacatgagtccaaagatttgtattttttaatctctttcatagctgatgtgatataagcaagtattgtattttgtggttcctatatgtacttagaatgtctgctgactttgttatttatttttcagaaatattttattagaagggagctatacgtcatttgctctaattcccaatgtggaattatgtcacagttcttggaattagctctaatttacagtttatctctaaagaagcgagtttaagaatgtttatgccatcattgttgctccaacaatgccctcaaattgtcccttgtgctatttgatttgtttcaatagtgcaggttaaatcttacagctgtgctaaggctggttagcatgatgttccgggacctctgggtaactggcctttgttccgttcagcagctctgggttcaggaaagcactcagaccagactgtgttaatctggagaggtggagagtgataagggagggccgcatttgtggctacatgttctgtattgtttggccctccatagtcatatactaagtttataaggctgaatttataaagtacttcctggttcagatgaggatgaggaacccacattcattcttggggtctgatgcgagtctcactcattcagactytgtcatctgaatctatgtaatcctcgagtgaggatttgggaaaatgggaagcctgtgccgccttgtcggccagaggaggttactgatctcccaaggttgttgatctcctggctgtggggactcactagactgacttgtgcccgc

SEQ ID NO: 52070 - DNA, 2951 bp, Homo sapiens
tggctggcagtggaaaattacagaagcacttctgccgtcacctggccatggtgttttttgacatagatgaaaagagcccagggatctgtctaaagaactggtagaaatgctctctttttaagaccaagcaaattcattcacacatgctatttttttgaaatgtattttcatgttattaaaattctcataatcattactaaaagcagttaagtgtttcttgtcctctagtcagatttagtagtcaattaaaaatatatgaccttacaaaacagaactatctctccttaaaaaacaacaacaacaacaaaatatatatatatatatatatatatatatagagagagagagagagagagagagagagagagagagagagagagagagagaggagagcaatggccattttgcatacagcaaatacaaatttcaacaaaccagattagagaacctatatcccatcttttgagtctggtgaatttttgcccaaaatattaaatgaggctgagaattatgatttttttttctactagagtatactataattctgtctggttcccactgaagtttacatgcctagttaatccaaagtaagcatgaccctagtgaaaaacatttttaaaaaagaatagaaagaaaaaatgcccacagcaaattgggctatttggacaaataactacctatttgacgagataagatcctaaacctacagattcaaagtagttacaaacaaagctcccacacaaatatattctgtagttaatatactctactgatgcccacacggggttcaattttctatacagtattgccatataagatgggttttgaaaattcacagagwtggtttttcaaacatcccctgctttgtcaagtttaatttataggagtaaaccccaagcatggaccagaattaaacaacatttatttggcactaaattcagcaatacatacaaaggcaaacagcatgcacatacatttccacaaggggtaggagcacctgctctccacctacaatatagactacttgaaaagcaggtcgaggatacagaatgtgatttacagctgactacatcaatttaatgcatttgtttccttgggaggaaagagagttgagtgcagttaaaataatagtttttcagtgttcttcaaactaaaacactaaaggtccttttagcaatgcctatctgactttcaaaagtaatcaaggcatcatcaacaaatattattgaaaagctaccatgagctcattgtggtgggaaaattatattctgtccaaataagaagcttctggaaaaaaattgtttaatctttatatgattcaaattctcagaattgtttaggtggattaaaaaacagaagaacctgctaggtggttaatttaaaaactaaacaaacacatacatcagcaaacagattcgctaatgactttgtccttatataattcccttaattttggaagttctccgttccctctctagaaaggaagtagttgtcagagattaatgttttccaaaaacttgcttggtaaaacattaatgcattcttcgatatgctaataaatattttgtaaaaataagtacatgaatataagagatgtatggagttttagctaaagaagagaaacattgagaaaatgaagctgaatctttttcattacaattagacatctaaaaaccttaagtatactaatatacattttaactcttttagaaatatttagtttctcatattagtcccatgaacgatatgagtacaatcatactgatgagtttttaagagtcccttccagcttttataaagcataaacttataaaatctcaggccagtggtttggctttataggaaattgcttatcctgctttttgaaagtaatctaagtttgttccacgtcaaggtgaatgcaaggaaaatggaatgactaattgataaactggaagaattaattcactctgagaaaatgcaacataattctgtagtatgctttgtttcctcaattaaatataaattagatttatttttaaataacctgtatcacttttgagcattctacctgtgatgtatcatttctcagcttaattaaactataatgtgtaaagaatacgtacactttggtgatttaacacttggtattgtaattctttcgacagctacaaaaataagactgatgaatgagtcaacataaactaattttgatgttaagcaaaatacaaactaccattaatcaccacattatgctaatcatgataatgatacttgatattttatattgaactttgacttatgtgttaggtgctatgttaaaagttttagacatattacaatttcaatcttttcacataccctaagagataaacagaatttttataatgaaaaaaacaaggtttataaatgttaagatactttaccaaagtcatatacctaatgagttatgttatagggacttgatatctgctgagccatttcttaattaagaatgttgtacttcaaacacacataataatctgacacattttaataacacacattctgactatgatgctttgtggcaatgaggcataagtggaaaaagttttcctctgaatagatataaattggaataatgtttttaaagtcaaatttcacgaatttttaaaccttctgaaagcattatcttctataactggtgcattcacaaattctcttacattcacatgaatggagtaagatgtgaataaaacttgtcaacacttttcttctctatctccttgtggcctacagccactttgggctttgggttttaggtgttctgggtttcagaagctgaaagcaataaagtcttattgcagaagaaataagaagtttctcctatagatatctactataacaaggcaggtcctaggaatgatggcgacagtgaggattgactaatctgttcccgtcagttctcagaccctgtcattaagcagctacag

SEQ ID NO: 52071 - DNA, 2951 bp, Homo sapiens
tggctggcagtggaaaattacagaagcacttctgccgtcacctggccatggtgttttttgacatagatgaaaagagcccagggatctgtctaaagaactggtagaaatgctctctttttaagaccaagcaaattcattcacacatgctatttttttgaaatgtattttcatgttattaaaattctcataatcattactaaaagcagttaagtgtttcttgtcctctagtcagatttagtagtcaattaaaaatatatgaccttacaaaacagaactatctctccttaaaaaacaacaacaacaacaaaatatatatatatatatatatatatatatagagagagagagagagagagagagagagagagagagagagagagagagagaggagagcaatggccattttgcatacagcaaatacaaatttcaacaaaccagattagagaacctatatcccatcttttgagtctggtgaatttttgcccaaaatattaaatgaggctgagaattatgatttttttttctactagagtatactataattctgtctggttcccactgaagtttacatgcctagttaatccaaagtaagcatgaccctagtgaaaaacatttttaaaaaagaatagaaagaaaaaatgcccacagcaaattgggctatttggacaaataactacctatttgacgagataagatcctaaacctacagattcaaagtagttacaaacaaagctcccacacaaatatattctgtagttaatatactctactgatgcccacacggggttcaattttctatacagtattgccatataagatgggttttgaaaattcacagagttggtttttcaaacatcccctgctttgtcaagtttaatttataggagtaaaccccaagcatggaccagaattaaacaacatttatttggcactaaattcagcaatacatacaaaggcaaacagcatgcacatacatttccacaaggggtaggagcacctgctctccacctacaatatagactacttgaaaagcaggtcgaggatacagaatgtgatttacagctgactacatcaatttaatgcatttgtttccttgggaggaaagagagttgagtgcagttaaaataatagtttttcagtgttcttcaaactaaaacactaaaggtccttttagcaatgcctatctgactttcaaaagtaatcaaggcatcatcaacaaatattattgaaaagctaccatgagctcattgtggtgggaaaattatattctgtccaaataagaagcttctggaaaaaaattgtttaatctttatatgattcaaattctcagaattgtttaggtggattaaaaaacagaagaacctgctaggtggttaatttaaaaactaaacaaacacatacatcagcaaacagattcgctaatgactttgtccttatataattcccttaattttggaagttctccgttccctctctagaaaggaagtagttgtcagagattaatgttttccaaaaacttgcttggtaaaacattaatgcattcttcgatatgctaataaatattttgtaaaaataagtacatgaatataagagatgtatggagttttagctaaagaagagaaacattgagaaaatgaagctgaatctttttcattacaattagacatctaaaaaccttaagtatactaatatacattttaactcttttagaaatatttagtttctcatattagtcccatgaacgatatgagtacaatcatactgatgagtttttaagagtcccttccagcttttataaagcataaacttataaaatctcaggccagtggtttggctttataggaaattgcttatcctgctttttgaaagtaatctaagtttgttccacgtcaaggtgaatgcaaggaaaatggaatgactaattgataaactggaagaattaattcactctgagaaaatgcaacataattctgtagtatgctttgtttcctcaattaaatataaattagatttatttttaaataacctgtatcacttttgagcattctacctgtgatgtatcatttctcagcttaattaaactataatgtgtaaagaatacgtacactttggtgatttaacacttggtattgtaattctttcgacagctacaaaaataagactgatgaatgagtcaacataaactaattttgatgttaagcaaaatacaaactaccattaatcaccacattatgctaatcatgataatgatacttgatattttatattgaactttgacttatgtgttaggtgctatgttaaaagttttagacatattacaatttcaatcttttcacataccctaagagataaacagaatttttataatgaaaaaaacaaggtttataaatgttaagatactttaccaaagtcatatacctaatgagttatgttatagggacttgatatctgctgagccatttcttaattaagaatgttgtacttcaaacacacataataatctgacacattttaataacacacattctgactatgatgctttgtggcaatgaggcataagtggaaaaagttttcctctgaatagatataaattggaataatgtttttaaagtcaaatttcacgaatttttaaaccttctgaaagcattatcttctataactggtgcattcacaaattctcttacattcacatgaatggagtaagatgtgaataaaacttgtcaacacttttcttctctatctccttgtggcctacagccactttgggctttgggttttaggtgttctgggtttcagaagctgaaagcaataaagtcttattgcagaagaaataagaagtttctcctatagatatctactataacaaggcaggtcctaggaatgatggcgacagtgaggattgactaatctgttcccgtcagttctcagaccctgtcattragcagctacag

SEQ ID NO: 52072 - DNA, 567 bp, Homo sapiens
agccccatgaaatagagtaagaaagattaggatgtggtgggttggtgcatccaacagccctttaactttggttagttaaaacaaatacattcagtcagaactgtctcttatttaatcaaggaggaatgtgttcagtatctaaaataaatagtatacayggctggtctaactttccttgaatcaaaatgacagtgtaagcctaaaataaaaaggacaatatgaaacatgacacatgcacagaaaactggaaaatacagaaaattttaaaccaactgtggttgggaaagatacatactaaagaaagataattgtccatgtgtggttaataattatttttttcatgtagatataatttggacttactggagaatattcaaacatttcacataaatataaaaaccacctctgttattatttcagttatttctatatcttttaatgattctatctaatgtatggacaaaactatctatttattcattcattcatttacttaacaattattcattgagtatctactatgcaataagcactgttctgctcaatgtaaaatgaagacatctagtg

SEQ ID NO: 52073 - DNA, 638 bp, Homo sapiens
aaggccaacaatgatctcatattagaagaggtgtcttaatatcacttcacagattactgcctgaaaatagaggcgggggaaaaaaaagaaaaggaagggggcactgaataacagctgtcacaaactcataacactgaagaggtgttttgtattgttaacttaagatgctgctgatctctctcccctacccatcatacacacacacacccttaccacctctccacaagtatcctccattcaggttatttatatccatatgtagtgaatttttttcccaaaaagtttttttattttaatttttttccctttaaaatctaaaaataaagcaagaaatcacyatagttagaatactaagcagtaacttttgacaaaggacagtaatgcatccctagcactaccaactaagatttgaactgctcttctaattccttttgaattaattatggatttaagaatttcagcttgaagaatttgaagatatattcattaaatgtttttggttttaaatattaacacagaggcaaataaaacatcggtatttgaaaaaataatttctattttatctttaaccattttaattctcaacaagatttctcttactagatatacaatgcagattgtgaaaaagtgcttcacag

SEQ ID NO: 52074 - DNA, 545 bp, Homo sapiens
tggctcttgtaatcagcactgtaggagtcacaagatgaatgtgtactaagttctgagagaaagaagatgagtatatyccacagaattcactaattgttttcagggcctcagaactaaggacatgagctctgggcatgtgattatttgctttcaatgaccataatgctaatgagaaaaaaataagtttggggtttctagtcacttgtttatcaatatacacaaagtagtaaaccaattataatttttcataaagcccaaagcaaaatgtccttagcattgaaagaagtgattttgcatcatttaaaaagtaagtctgttttgttataaataaattttctggcttatataagctttttatattctcttatatttattattcaatactttattcagttcaatcattcaattaacagacttttttttgatactgagctaaataacacagctaacagaatatagaaacatttctcacagttaagacatttgtattctaatagaccagacaagcataaatgaatatagataccaaaaaaatcatacttgta

SEQ ID NO: 52075 - DNA, 1307 bp, Homo sapiens
acacagtgttggaagttctggccagggcaatcaggcaggagaaagaaataaagggtattcaattaggaaaagaggaagtcaaattgtccctgtttgcagatgacatgattgtgtatctggaaaacctcattgtctcagcccaaaatctccttaagctgataagcaacttcagcaaagtctcaggatacaaaaccaatgtgcaaaaatcacaagcattcctatacaccaataacagacaaacagagagccaaatcatgagtgaactcccattcgcaattgcttcaaagagaataaaatacctaggaatccaccttacaagggatgtgaaggacctcttcaaggagaactacaaaccactgttcaacgaaatmaaagaggatacaaacaaatggaagaacattccatgctcatggataggaagaatcaatatcgtgaaaatggccatactgcccaaggtaatttatagattcaatgccacccccatcaatctaccaatgactttcttcacagaattggaaaaaactaccataatcccaatttaacagcgaagacactctggccaagtggtaggagtgacgctgagttcaggtcacctttataggaatgcacccttggctcttgagatctggatcagctccagtaccttagctttttccttaatcctccctctacaacatcccatgtctttcacaagtctgattttggtcagttccaataatcttaaaagtgctgccatctttcataaacctcaaaacaacctttccttcccttattttctgagccttcagggataatgttgcttcaaataaaaagaactatgtcacaataatctcttatgctttgtttgtcaaagagttcaaacatatgctatgttgtcaacccacaattatcacttccagttctctactatataatcaggaggtgaggggatataagtagaggctctattctcacctcacttatgtaccaaccgcagggtataaaaactgatttatagttgtaggtggaacacaaatatattcatatatgcatatatactagctttcataatatattgtataatacagctctatgtataaaataacatattatacagtttttaaaaaaatatttgtatgtgtatcattattatcattaaagatgaagcttccttatctatgaaatggagataatagtaactacttcgtgaagccattataaggactaaatgaattaatatacgttaaacaggacagtctctagtacaatacacaataaatattagctgttattataattattattttatatattataaaaagagtcct

SEQ ID NO: 52076 - DNA, 1307 bp, Homo sapiens
acacagtgttggaagttctggccagggcaatcaggcaggagaaagaaataaagggtattcaattaggaaaagaggaagtcaaattgtccctgtttgcagatgacatgattgtgtatctggaaaacctcattgtctcagcccaaaatctccttaagctgataagcaacttcagcaaagtctcaggatacaaaaccaatgtgcaaaaatcacaagcattcctatacaccaataacagacaaacagagagccaaatcatgagtgaactcccattcgcaattgcttcaaagagaataaaatacctaggaatccaccttacaagggatgtgaaggacctcttcaaggagaactacaaaccactgttcaacgaaatcaaagaggatacaaacaaatggaagaacattccatgctcatggataggaagaatcaatatcgtgaaaatggccatactgcccaaggtaatttatagattcaatgccacccccatcaakctaccaatgactttcttcacagaattggaaaaaactaccataatcccaatttaacagcgaagacactctggccaagtggtaggagtgacgctgagttcaggtcacctttataggaatgcacccttggctcttgagatctggatcagctccagtaccttagctttttccttaatcctccctctacaacatcccatgtctttcacaagtctgattttggtcagttccaataatcttaaaagtgctgccatctttcataaacctcaaaacaacctttccttcccttattttctgagccttcagggataatgttgcttcaaataaaaagaactatgtcacaataatctcttatgctttgtttgtcaaagagttcaaacatatgctatgttgtcaacccacaattatcacttccagttctctactatataatcaggaggtgaggggatataagtagaggctctattctcacctcacttatgtaccaaccgcagggtataaaaactgatttatagttgtaggtggaacacaaatatattcatatatgcatatatactagctttcataatatattgtataatacagctctatgtataaaataacatattatacagtttttaaaaaaatatttgtatgtgtatcattattatcattaaagatgaagcttccttatctatgaaatggagataatagtaactacttcgtgaagccattataaggactaaatgaattaatatacgttaaacaggacagtctctagtacaatacacaataaatattagctgttattataattattattttatatattataaaaagagtcct

SEQ ID NO: 52077 - DNA, 554 bp, Homo sapiens
tctattctacatataatctgggacaaaaatgccatttgttattattattattattatattgccattattaaatgacagataaaaagatctgattttacatctacatacaaaaatcttttgaattcttcatatttcttctttgtaagtagcatgggaatctttgaatgtgttgataattttcttaaaataggatgattattatggtaataaaggaatacaccatcgaagattataygaattcgtctgaatctctaatagcgtaatagggtcattagtctcacaattacatgatctcattcacctacttaatataatattttactgacacatattattttattttttatgcttttaagagacagggccttattctgtcacccaggctggagtacagtggcacgattacaccttactgtaaccttgaactcctgggcttaagagatccttctgcctcagcctcctcagcctcctaggtagctaggactacaaacttacactattatgccaggctaatttttcttttttctttttttttttttgtagagacagggtct

SEQ ID NO: 52078 - DNA, 554 bp, Homo sapiens
tctattctacatataatctgggacaaaaatgccatttgttattattattattattatattgccattattaaatgacagataaaaagatctgattttacatctacatacaaaaatcttttgaattcttcatatttcttctttgtaagtagcatgggaatctttgaatgtgttgataattttcttaaaataggatgattattatggtaataaaggaatacaccatcgaagattatatgaattcgtctgaatctctaatagcgtaatagggtcattagtctcacaattacatgatmtcattcacctacttaatataatattttactgacacatattattttattttttatgcttttaagagacagggccttattctgtcacccaggctggagtacagtggcacgattacaccttactgtaaccttgaactcctgggcttaagagatccttctgcctcagcctcctcagcctcctaggtagctaggactacaaacttacactattatgccaggctaatttttcttttttctttttttttttttgtagagacagggtct

SEQ ID NO: 52079 - DNA, 633 bp, Homo sapiens
caatagacctaagttcaggcaagctgatttattgtcagtcctgccgggctacctcctgacaaaagcagaggaggcagccccgcttacaggctatagcaaggttttatagggtgtagaactgggtcaaggtgaaggaaaaagaaaagagttgtagggtcctttgtgccaggtgtctgaccgcttcctggggatgtttttcttgccagttctgttgtgtaagrtagacgtcttgactgcatccgggaactggtcagacagttacaggcgggtttggggtaggaggttttacttttggcctttggggcttaggtctatgggagggggaaacagtacacttgggtgaaccctaacaataataataaatcacattcctacattgctaagctcactgatgttgacaccttcctatatttactgtcataactttttttatacatatgtaaatctttcctagctgaatcctagagtaaataatttcttcaaggagtcatggtttcctttagtggtaaatgttagagaaaaaaatcttggctttatatgtactcattggtactaagccatcttagtttgcagagctagaaaagatagattttgaaaatatgagtttaaaatgatgtttaaatttaatactac

SEQ ID NO: 52080 - DNA, 537 bp, Homo sapiens
tctctctccatgctcctgcactagctgactcattgtaattgttgctatagcctgataacatcttgctcaagtgacgctaaattttgccagatcaatggwcagttcccttcaggcattatgcagcagctgtcttcgctaatttgatagtatgtgatgaaagtggaacttagaagtgtgtttagttcaatttcacaaagtttgaagtagttttgggttcaatacaagctgcctgattaaatgatgctgaattgttgttcgttcatttcttagccagggctgctataacaaaattaccatagactgagtggcttaaacaacacaacagaaatttatttctcatagttctggaggctggaacatccaagaccaagatgttggctgatttggttcctggcaaggccactcttcctgatttgtggatggatgactttttgccttatcctctcatggagaaaagagagagaagaagtgagctctttcatgtctcttctcatgaaagcactaatctcatcatgagggccccatcttcatgaccta

SEQ ID NO: 52081 - DNA, 537 bp, Homo sapiens
tctctctccatgctcctgcactagctgactcattgtaattgttgctatagcctgataacatcttgctcaagtgacgctaaattttgccagatcaatggacagttcccttcaggcattatgcagcagctgtcttcgctaatttgatagtatgtgatgaaagtggaacttagaagtgtgtttagttcaatttcacaaagtttgaagtagttttgggttcaatacaagctgcctgattaaatgatgctgaattgttgttcgttcatttcttagccagggctgctataacaaaattaccatagactgagtggcttaaacaacacaacagaaatttatttctcatagttctggaggctggaacatccaagaccaagatgttggctgatttggttcctggcaaggccactcttcctgatttgtggatggatgactttttgccttatcctctcatggaraaaagagagagaagaagtgagctctttcatgtctcttctcatgaaagcactaatctcatcatgagggccccatcttcatgaccta

SEQ ID NO: 52082 - DNA, 658 bp, Homo sapiens
gttaaattgttgtacaatgtaatcacattaatttgtatgccaatagtagtatataaaagtttgaattgccctacatctaaactcacacaaaaataaatgcagtctaaaaatttataatgtgatgtatatgaaattatattttgggctgggcacagtggttcgtgcctgtaatcccaacactttgggaggccaaggtgggcggatcaacagaggtgaggagttcaagaccagcctggmcaacgtggggaaaccctgtctctactaaaaatacaaaaattagctgggcctggtggtgcgtgcctgtaatcccagctacttgagaggctgaggcaggagaatagcttgaatccaggaggtggatgttgcaatgagctgggatcatgccactgcactccagcctgagtgacagagtgagactccctctcaaaaaaaaaaaaaaaaaaaaaattgtattttgttgttttatagttttaatttgaattaataataagctttggtaccatttcatatattttaacttttttattatttaaaaagtctgcttatgtattttcctattttaatttttatgtctttttctaaatccttaacagaaattaattgtatcatgaattttaatagattgttatgtacttgcaaatgttgccatgctgtttat

SEQ ID NO: 52083 - DNA, 658 bp, Homo sapiens
gttaaattgttgtacaatgtaatcacattaatttgtatgccaatagtagtatataaaagtttgaattgccctacatctaaactcacacaaaaataaatgcagtctaaaaatttataatgtgatgtatatgaaattatattttgggctgggcacagtggttcgtgcctgtaatcccaacactttgggaggccaaggtgggcggatcaacagaggtgaggagttcaagaccagcctggacaacrtggggaaaccctgtctctactaaaaatacaaaaattagctgggcctggtggtgcgtgcctgtaatcccagctacttgagaggctgaggcaggagaatagcttgaatccaggaggtggatgttgcaatgagctgggatcatgccactgcactccagcctgagtgacagagtgagactccctctcaaaaaaaaaaaaaaaaaaaaaattgtattttgttgttttatagttttaatttgaattaataataagctttggtaccatttcatatattttaacttttttattatttaaaaagtctgcttatgtattttcctattttaatttttatgtctttttctaaatccttaacagaaattaattgtatcatgaattttaatagattgttatgtacttgcaaatgttgccatgctgtttat

SEQ ID NO: 52084 - DNA, 658 bp, Homo sapiens
gttaaattgttgtacaatgtaatcacattaatttgtatgccaatagtagtatataaaagtttgaattgccctacatctaaactcacacaaaaataaatgcagtctaaaaatttataatgtgatgtatatgaaattatattttgggctgggcacagtggttcgtgcctgtaatcccaacactttgggaggccaaggtgggcggatcaacagaggtgaggagttcaagaccagcctggacaacgtggggaaaccctgtctctactaaaaatacaaaaattagctgggcstggtggtgcgtgcctgtaatcccagctacttgagaggctgaggcaggagaatagcttgaatccaggaggtggatgttgcaatgagctgggatcatgccactgcactccagcctgagtgacagagtgagactccctctcaaaaaaaaaaaaaaaaaaaaaattgtattttgttgttttatagttttaatttgaattaataataagctttggtaccatttcatatattttaacttttttattatttaaaaagtctgcttatgtattttcctattttaatttttatgtctttttctaaatccttaacagaaattaattgtatcatgaattttaatagattgttatgtacttgcaaatgttgccatgctgtttat

SEQ ID NO: 52085 - DNA, 658 bp, Homo sapiens
gttaaattgttgtacaatgtaatcacattaatttgtatgccaatagtagtatataaaagtttgaattgccctacatctaaactcacacaaaaataaatgcagtctaaaaatttataatgtgatgtatatgaaattatattttgggctgggcacagtggttcgtgcctgtaatcccaacactttgggaggccaaggtgggcggatcaacagaggtgaggagttcaagaccagcctggacaacgtggggaaaccctgtctctactaaaaatacaaaaattagctgggcctggtggtgcgtgcctgtaatcccagctacttgagaggctgaggcaggagaatagcttgaatccaggaggtggatgttgcaatgagctgggatcatgccactgcactccagcctgagtgacagagtgagactccctctcaaaaaaaaaaaaaaaaaaaaaattgtattttgttgttttatagttttaatttgaattaataataagctttggtaccatttcatatattttaacttttttattatttaaaaagtctgcttakgtattttcctattttaatttttatgtctttttctaaatccttaacagaaattaattgtatcatgaattttaatagattgttatgtacttgcaaatgttgccatgctgtttat

SEQ ID NO: 52086 - DNA, 666 bp, Homo sapiens
atcctaagtgacctaatagaagaacagaaagccacataccacatcttctcacttatagatggtagctaaacattgaatacacatgttaagatgggaacaatagacattggggaccactagattggggaggaaaggtaggggttgtgggctgaagaactacctgttgggtactgtgttactgcctgggtggtaggatcactgggastccaagcctcagcatcacacaattactcatgtaacagtctttcattaacctataataaaagttgaaattaattaaaaaaacaaaacaactacactgtttcattgctctagatttctttttgtctccatttaattatggagagacttgcagagacagaaatgactgtcatgtgttcttatacacataaagccctagaaacaggagccacagcacatcatgcactggggccatatggggaagtaccagagtcagtgaaggcaaaaggagcaagactaaagcatgagccagagcctttaatatggttttccttggaaggaatgagtgagacagtgtaagcagctgagcaggtttaagactgggtagtgtgagtactttttgtgtaatttagtccctagtgttccagcacctgattctggggtgacgaaagcagagggataatgtcccagaccacaggagccata

SEQ ID NO: 52087 - DNA, 666 bp, Homo sapiens
atcctaagtgacctaatagaagaacagaaagccacataccacatcttctcacttatagatggtagctaaacattgaatacacatgttaagatgggaacaatagacattggggaccactagattggggaggaaaggtaggggttgtgggctgaagaactacctgttgggtactgtgttactgcctgggtggtaggatcactgggactccaagcctcagcatcacacaattactcatgtaacagtctttcattaacctataataaaagttgaaattaattaaaaaaacaaaacaactacactgtttcattgctctagatttctttttgtctccatttaattatggagagacttgcagagacagaaatgactgtcaygtgttcttatacacataaagccctagaaacaggagccacagcacatcatgcactggggccatatggggaagtaccagagtcagtgaaggcaaaaggagcaagactaaagcatgagccagagcctttaatatggttttccttggaaggaatgagtgagacagtgtaagcagctgagcaggtttaagactgggtagtgtgagtactttttgtgtaatttagtccctagtgttccagcacctgattctggggtgacgaaagcagagggataatgtcccagaccacaggagccata

SEQ ID NO: 52088 - DNA, 666 bp, Homo sapiens
atcctaagtgacctaatagaagaacagaaagccacataccacatcttctcacttatagatggtagctaaacattgaatacacatgttaagatgggaacaatagacattggggaccactagattggggaggaaaggtaggggttgtgggctgaagaactacctgttgggtactgtgttactgcctgggtggtaggatcactgggactccaagcctcagcatcacacaattactcatgtaacagtctttcattaacctataataaaagttgaaattaattaaaaaaacaaaacaactacactgtttcattgctctagatttctttttgtctccatttaattatggagagacttgcagagacagaaatgactgtcatgtgttcttatacacataaagccctagaaacagragccacagcacatcatgcactggggccatatggggaagtaccagagtcagtgaaggcaaaaggagcaagactaaagcatgagccagagcctttaatatggttttccttggaaggaatgagtgagacagtgtaagcagctgagcaggtttaagactgggtagtgtgagtactttttgtgtaatttagtccctagtgttccagcacctgattctggggtgacgaaagcagagggataatgtcccagaccacaggagccata

SEQ ID NO: 52089 - DNA, 666 bp, Homo sapiens
atcctaagtgacctaatagaagaacagaaagccacataccacatcttctcacttatagatggtagctaaacattgaatacacatgttaagatgggaacaatagacattggggaccactagattggggaggaaaggtaggggttgtgggctgaagaactacctgttgggtactgtgttactgcctgggtggtaggatcactgggactccaagcctcagcatcacacaattactcatgtaacagtctttcattaacctataataaaagttgaaattaattaaaaaaacaaaacaactacactgtttcattgctctagatttctttttgtctccatttaattatggagagacttgcagagacagaaatgactgtcatgtgttcttatacacataaagccctagaaacaggagccacagcacatcatgcactggggccatatggggaagtaccagagtcagtgaaggcaaaaggagcaagactaaagcatgagccagagcmtttaatatggttttccttggaaggaatgagtgagacagtgtaagcagctgagcaggtttaagactgggtagtgtgagtactttttgtgtaatttagtccctagtgttccagcacctgattctggggtgacgaaagcagagggataatgtcccagaccacaggagccata

SEQ ID NO: 52090 - DNA, 1403 bp, Homo sapiens
tgagagaaatttaagatgaactaaatgaaatctgtaacattcctaaaaagatgcattattataaagatagcaattccccccacatggacctacagtttcaatacaaccctatgcaaatttcaaaagatatttttgtgcaaattgacaagacttttaaaatgcatgtagaaatgcaaagtgcttaaaaatacaaaggcaatctacaaactggagaactacattattggttagctaataaagtagagttcttaagagagtgtcatgttaatgcatttctcagtcctttctcacactgctataaagaaatacctgagtctaggtaaaaaataaataggtttaattggctcacagttctgcaggctgtacaagaagcatagtggcttctgcttctgggaagtccccaggaagctttcaatcatggcaaaaggcaaagagagaatggggcatctcacatggggggagcaggagcaagagagagtgaggtgggatgtgctgcacagttttaaataaccagatctcatgagaactcaaacactatcacaagaacagcaccaaggggatagttctaaactattcataaaaactccacctgcatgatcaaagcacctcctaccaggccccacctccaacattgaggactacagtttgacatgagttttggtggggacacagatccaaaccatatcagtgcataacaaataaaccaagggaataaaatagtccagaggccaattcacatgtatggcatgatgacctgatttgcatcaaagatgcaaattcaatgcggtgggggaataaagggtgttctaaataaatggtgctagatcaactgggcacacatacagaaaaaagaatttatgctcagaatggagaaaaaaatatcctacacaatttccaaaaatcagttgtccatagattatagatcataactaaggagtctgaggtaagcacccacgatcggttacagattagtgtgaatgggtagaagctatatggcaaagaatttaaaaatgaggaaatgcgttgatagggaagagagcacacaaggtctacattttacaagagtttgaattttgaagsgaattacagagtaactgttggaaactaagcatatttgaggcagcatgcgaagaaccaagacgggggtagaggttggaggtaaagaggaggagactgatttgatggagaacaggtaaaggtctctgaggaagcaaaactgcaagagagaatgaaaggagattgttgattctaaattactctcatatgcaaaaagagcagcattcctgttaattttatgcaaatgatgtcctttgtggtatgtaacattattaatttgttataggtggtttgaaccttttgtcatgcaatggctagatgaaaacgaagatgtgtcaatggaattc

SEQ ID NO: 52091 - DNA, 527 bp, Homo sapiens
gctaggactgattaacgggccattcagacaaattggttgctgattgtttgaccctcccctggggccactgtttaccagtttgtgagcttcccactgatcacttctccctccagctttactacccagcaggtcttgtttctcgtctcaggcagtgaatcctaactccaagctgggaataaactcccagtgagttcccctgctgatgcagcatcctttggagatgaggaaattacccatctcaacacagaacagagctgtttttttcccccagttgtactttattttttaagttgcagggtacatgtgccggaagtgcagatttgttaattaggtaggtctgggtccagaccattcattaggttttagactctacattttaagcatgaggagaactccattttgtttgatttctcatgctctctattatgacagcattccttttcaatgccctgtcagagtaacaacatctgaacaactcaragtcctccagaacactgctgacacagtattgccctgtgctggcactg

SEQ ID NO: 52092 - DNA, 1761 bp, Homo sapiens
tgcatccataaacacaacaacgtagccagcactctgaccagtgtacccaagcagtcccctgtgctagcttccagttaccaccttctaaggtaaacatgctcctgatttttaacaccatcaataatgatacgacttgcctgcttttgagtttcacagaaatagaagcctaaagaaaaatactaagataataatactataactcattgttttgttttcaggagtgaatgaggtaacatagtatacttggaagagtgcctggcaagtattggatgttgaaatattggttctcttctatgacctctttcttcttcctggtcacagcatgtagcaggtggcttaataaagcaagttctgtctatatgacctccatgaaaagtgaacagccctgctcactgctcactgaccagctgatcttccacacacccgagtctctgagatggagctaaaacaactgtatgcctggttgaaatgtctacttcccattcagatatttagaccttggttagacacccactaaatgaggcatgtctgtgcaaaagcattccaaactgagcagatgcaaagaaatattatcctttagaacccatttgatcccttttttaaacccaagaaaacataaatgcaacaatagatcaatttgactgtaaatattatctaagtatgtcctttaaaagccaaaggaatgtcagatacaatttattttccaccagtgcaagctgagacattaagtggcaattctacttccattagctaaatctggcaaatatgcaactgtttaaaggcattgtcgatagccattcacaattaagtatttgtactgatgccttattaaattacccttttcaagtaggcataataaactaggagttcactgtgcagattttcatggggaaagtcagatcagtatggaatttatttagagagaatttagtgcactgagtaatgaagtaaatgtcaaatgttttgaccaaataaatcttatcttccttaaaacttttttttgaggtcaagagacacagcaaaataaaaatcccagtgattataatggtcataatttataactttattgaaacaactttaaaactttgattgttttttaaataatgaaatctgttttctttttaactgacagcattgccctacacaggggatttctactcttcctttacaaagctggtttcttccaaacattaagatctcttacagggactgaatgataaatggatgaatgaggaggatgatgaagggggaaggtgatggaagaattaggacaaggaggctatgcaggagattggtaagcaatgagctaagaaggctttgagacctattgagagattctaaactcctggatgggcctatctgcattttgtctgcaaagcaatggtaactagaaaattgggctgggcgtggtggctcacgcgtgtaatctcagcaccttgggaggctgaggggggtggatcmcctgaggtcaggaatttgagactagcctgaccaacatggtgaaaccccgtctgtactaaaaatacaaaaattagatgggcgtggtgatgggcacctgtaatcccagctactcaagatgctgaggcaggagaatggcttgagcccaggaggcgaaaattgcagtgagccgagatcacgccattcccctccagcatgggtgacaagagctaaactccatcttacaaaacaacaacaacaacaacaacaacaacaacaaaataaaaataaaaacaaactagaaaattctttatttagtaatgc

SEQ ID NO: 52093 - DNA, 625 bp, Homo sapiens
acaattcaaactaattgctctcaaggcttcttttttctctaatgagttttgatcttctgttccctatttcatgctctcctcctcttagcttttttatttatttgtttatagaatatcctttagtaatttcctttgaaaaggtaaatttttgagacacttttcatgtcttgaaataactttattttactttcttccatgactggtagttcaattggcactaaaatytatctttacagcactccccatctataatattttgtttttcatttttctctgacagagaccaaagtaattttaattcctgatccttttttatgtgatattttaatttcttctttcagggaagaaaaagatttctaggatcttcttcttatccttgacattctaaaatttcataaagctcatagtctccgcccaaaggctcctagagctgataaacaactttgacaaagttttaggatacaaaatcaatgtacaaaaatcagtagcatttctatacaccaataatgtccaagctgaaagctaaatcaagaatgcaagcacaatagccacaaggaaaatacaatacctaggaatacaactaactagagaggtgaaaggcctgtacaccaagaagtgcaaaaca

SEQ ID NO: 52094 - DNA, 625 bp, Homo sapiens
acaattcaaactaattgctctcaaggcttcttttttctctaatgagttttgatcttctgttccctatttcatgctctcctcctcttagcttttttatttatttgtttatagaatatcctttagtaatttcctttgaaaaggtaaatttttgagacacttttcatgtcttgaaataactttattttactttcttccatgactggtagttcaattggcactaaaatttatctttacagcactccccatctataatattttgtttttcatttttctctgacagagaccaaagtaattttaattcctgatccttttttatgtgatattttaatttcttctttcagggaagaaaaaratttctaggatcttcttcttatccttgacattctaaaatttcataaagctcatagtctccgcccaaaggctcctagagctgataaacaactttgacaaagttttaggatacaaaatcaatgtacaaaaatcagtagcatttctatacaccaataatgtccaagctgaaagctaaatcaagaatgcaagcacaatagccacaaggaaaatacaatacctaggaatacaactaactagagaggtgaaaggcctgtacaccaagaagtgcaaaaca

SEQ ID NO: 52095 - DNA, 538 bp, Homo sapiens
ttgtgaaaaggaagaagactcaacattcataattgtctgacccacacgcagtctaaaactattttctccaagctatagaaaactttcaggtatgtaaagctgctccagtttcctgaaacagatgggatattataaccaacttgttaaataagctggactcatgggggtaccagtaaaaaccaaccttatttttcccccttttccttcaaaatcactcaccagtctgattgttccccactcttaggacaatatgtcctgcaagtcccatagcttttttagtcactcttctatgatagaaagatgcttcctttacttttgtactaaaaagcccaatctgctccactctaatcatcacaaaatgcttccattcattaacttaacaaatatttayggaacacctatttacctgtcagtattctaggttctggtgttgcagtagtaaataaatcagacataaaaccttactttcatggagttcaaagtctggtggggaaacggcaaatctgacaagtaagcaaaatagatagaatattagtga

SEQ ID NO: 52096 - DNA, 538 bp, Homo sapiens
ttgtgaaaaggaagaagactcaacattcataattgtctgacccacacgcagtctaaaactattttctccaagctatagaaaactttcaggtatgtaaagctgctccagtttcctgaaacagatgggatattataaccaacttgttaaataagctggactcatgggggtaccagtaaaaaccaaccttatttttcccccttttccttcaaaatcactcaccagtctgattgttccccactcttaggacaatatgtcctgcaagtcccatagcttttttagtcactcttctatgatagaaagatgcttcctttacttttgtactaaaaagcccaatctgctccactctaatcatcacaaaatgcttccattcattaacttaacaaatatttacggaacacctatttacctgtcagtattctaggttctggtgttgcagtagtaaataaatcagacataaaaccttactttcatggagttcaaagtctggtggggaaayggcaaatctgacaagtaagcaaaatagatagaatattagtga

SEQ ID NO: 52097 - DNA, 645 bp, Homo sapiens
ttcctctcttaatggtatctattgaaaattgaactatattaataaaattcagtgtatcagattttatgatttgcacatcttttttctgtttgaaaaatctttgcttatatcaaagacataaagatattctcctatgctttctcctaaaataatttctttatatttcacatttagatctgcaacccatctgtaatagcttttttttttttaatggtttgaggtagggaaccaagattttttttttttaattcaacaaggatattcagttcatccagtaccatattggaaaggccacacttatgccactgctctgtaatattccctttgtcataagtcaattgacagagagccatgtaagtgtggttctctgcactctattctgtttcagagtccttttgtatctccttatgccaatatcattgtcataattgctgtaactatataatgagccttgatatcgtgtagtgcgcttaattatttttgacatttatatatatattttctttttgttattttatttttaaattgacatataactatatgtattgaaggagtacagtgtgatattttggtacatrtattcattctctaatatcaaatcagctaaggagaggagggggaagagggaatgggaagaggatagtc

SEQ ID NO: 52098 - DNA, 445 bp, Homo sapiens
cctatttccatgtttcatggatcagggwaaaagaaaagccagttttaaaaaaaagacaaacttttaatcttccatatctgaattaggctctgactttgctgaatttgcaaagataaaagattttaatttcagatgaatagggctcttagtaccaaaaagcaacatgttatgctgtattttcgaaatgtttggctactcgcatacaaaagtgtaatttatgaaatctcttccacttagcacagcagaaataagttcctcaggtaaaattaaaagcacacttaaatcacttcctaaactgatgaattagaactgctgactgaccctatatctgattcatgtttgatcaggcactctgaagtgaaggccatgaatccgcttattaatttttccactaatatggaactgcctttcaaagctaatgtcagaagtaaacgttttataacat

SEQ ID NO: 52099 - DNA, 1867 bp, Homo sapiens
ttttttttttttttgagacagggtctccctttgtcacccaggctggagtgcagtggcacaatctcggctcattgcaatgtctgcctcgcgggttcaggcgattctcctgcctcaacctcctgagtaactgggattacaggcgtgtgccaccaggcccagctaatttttgtatttttagtaaagacagagtttcaccatatttgtcaggctggtttggaactcccgaccttgggtgatctgcctgccttggcctcccaaagtgctaggattacaggcttgagccacgtgcccaggctgtcactgatctattaattctattaatgtcaacactaccatttatgttttaagggagtcatatttatattctctataattctatttttgtgatattctttaattatgtactgttgatattgggtgttggtttttgtttgtctgtttttttacttaaacaacagaaatatatatatatatataatttttttttttttttcgagaaaaggtctggctctatcacccaggctggagtacagtcgtgtgatctcagctcactgcagtcttcacctcccaggctcaagctatcttcccacctcagtctctcaagtagctgggaccacaggtggatgacaccatgtctaatttttgtgtttttggtagagatggagttttgccatgttgcccaggctggtctcgaacttgtgagctcaagcgatctgcccgccttggcctcccaaagtgctagattacgggcatgagccaccatgcccagcgtagaactgtattttctctttgtcctggagactagaggttcaagatcaaagtgttagtagggttggttccttctaaggcctctcttcttggcctgcagatggctgtcttctttctgtgtcttcccatggtcttctatctgtagaaatagtgttttttaatggaatacatttttttctcattaagtttctatcatataaagtacttgtgacattatgctcttaaacatgtccccatttaaaattttttttgagaaattgctatattctttgcgtctgtatttggtaatactgtttattcattaaggtataatttctggttctgaataagattaataccatttacgaattttagatgaaatttatactgatcctggagtctaatacatgctaaaataactaaagcattagaaattttagcacgcaggccccaaaggtattttcattctaagccagctagtgtgatgataggtaactaaaaatgggttggtatgaaatttttttttaattctatattctgttctttcttcctccttaatcctttctttaaaaaaaataactatagatagcagtcacaatgaaggcaacataaatcagactgccttctcttcattttcattttcatctccaactgagctactttttctgagccaggcagctactgatgcagatagacaggtgggacgcagagggtttcagccaagaggcctgtggtgatgctttccttcttctgagacaaactcaagcctagaaacaatggaagggagcccttacgaaagatttgaggagcaggtcactgagaggaaaaagacgacagcccaagaatcctatattcattcaacttattcaccagtcacgctaagaaaaggctatttgcagatgggcaaaaagtgagtgaacatttgcatctgtacaacctattgaagaaaaaggcttgagsaataaatataagcaaagtaaaactataaaatacagattacttttaaaagtttgatcaatgtaacagtatatccccatagttggagttcgtccctgtatttcataaataaaatttagcaagttatatctgcataggcaaatatttttagaatcaaatttca

SEQ ID NO: 52100 - DNA, 645 bp, Homo sapiens
tactggcttgaagcaagcaagacttctgaatgttttttgttcagaagaacttggcttgagataatttttggctgtacttgaagttgagtaactgggacatgaaagtarggctgctcgaaagagagccaaagaacccagcctgctgcctgaggcaatgtgtgtccgtcagagtcctactcaagaattcatgtcatcagaagtaagtggtttgttcttaatgaaaaagacgttactcccaaagacatgtcaaatagtgtctgaagaaatgaatcagggtataaaacctgggcggtctttagagttgattttgcacatagtacaaaagaagcatttgtgaggtggcacggtatctgtgaagggaattctttctgcagacttggggccactttggcataggcaaggagatcattcagcagtgctaggatttgtgtggccatattatcttttgccaggaaatacttaccccatagtctaatactgtgtgctcctgaattaggacaggcagttaccaattgccatattctacggtattaaatggacttcttttgaggaatatatgttctggagatgtactgtagcagctcgccactgagcatgctccccaaggagataatatggttagaaaactgagcttggacctgtgag

SEQ ID NO: 52101 - DNA, 646 bp, Homo sapiens
ttttcttttcctccctggccttacttcccagatagcccataagccgtatctattatgtcagtgcaagttgttatattctgtatctatctatgtatctgtctatctgcctattaagacacacacataattatataattctgcatctttattttgttcaatattatgtttttaagatttatctcaaccctacacagttgatatggtttagctgtgtccccacccaaatcttatcttgaattgtagctcccataattcccacatgttgtaagagggacccagtgggaggtaactgaatcgcgggagtagtttcccccatactattctcttggtagtgaataagtctcatgagatctgatggttttataaggggtttccctttttgcttggctcttattgtttcttgcctgccgccatgaraaacatgactttactcctcctttgccttctgccatgattgtgaggccttcacagccatgtggaactgtgagcccattaaacctctttcctttataaattattcagtctcgagtatgtctttattagcagcatgtgaataaacagtattccattatattaatacaccagtactgtttatgctagcaatacccacaatttgaaaaatgttcatgctatacataatgttcca

SEQ ID NO: 52102 - DNA, 518 bp, Homo sapiens
  misc_feature (1)...(518): n = A,T,C or G
tttgagatggagtcttgctctgtccccaggctggagtgcagtggtgcaatctcggctcactgtmacctccacctccctggttcaagcgattctcctgtctcagcctcccaagtattgngtgattacaggtgggtgccaccacacctggctaattttttgtatgtttagtagagacagggtttcaccgtgttagccaggatgatctcgatctcctgacctcgtgatccaccctcctcagcctcccaaagtgctgggattacaggcgtgagccaccgcacctggcccaaacttttcttttttaaatgtctgaataaatgcatattttttggagcccatggggctacaacaacatggagacaggaatctagatcattaggagatacaataaaaatattttatttttcactgtcactcactttgtgaaaataattgcggggtttaaatttgattctatcagtctctccgggtgagagatgttctgtctatgaagggcgcccgctactacttgtttttgaaag

SEQ ID NO: 52103 - DNA, 518 bp, Homo sapiens
ggcggtgcaccttcctgcctggtgcagaaaggaccaggaaatgcccataaaagtcctctgcatgggtgggtctcagtccgataacccgcaaggtctggcgatccctgggagtttggcggggttatttggactctggagccagattgcctgggtaactggtttggaatacggctgtgccactttctagccgtgtgaccctttctagctctctttctaggcctgtttcctcatctataaaatggagcgtttttaggattaaatatgataatcaatggaaagtgtttagactagaaagtgcctaggccgggctccctgtctcatgcctgtaatcccagcactctgggaggcagaggcgggcgaatcacttgagcccaggatttccaaactagacgggggctaggcacggtggctcacgcctgtaatcccagcactttgggaggcggaggtggacggatcagctgacgtcaggagttccagaccagcctggccaacatggtgaaamcccatctttactaaaa

SEQ ID NO: 52104 - DNA, 561 bp, Homo sapiens
aaacccagtctctactaacaatacaaaagttatctgggcatggtggcaggtgcctgtaatcccagctactggggaggctgaggcaggagaatcgcttgaaccccagaggtggaggttgcagtgaaccgagatcgtaccactgcactccagcctggtcacagagcaagactctgtctcaaaataaataaataaaattttaatttaaaaaaaacagagatgggttttcactatgtcgcccaggctggtcttgaactcctggactcaagcaatccacccacctcttggtgtgagccaccgcacccagcccagctgccctttctttttaaaaggagtgtacttggtggccgtgtcaggcaggtggcactgtggcactgggaaacggcttcccggagcactccagcagccatttagtcattacagttgtgtttccttttctactgggatcccacattgtttctggtagaggtgaagagggcrgcatatgccacagcctccgactggtagaatcctctgataacaaggcatgtgtagttttttcgagcatgtaaagcatcagtacca

SEQ ID NO: 52105 - DNA, 519 bp, Homo sapiens
aacagaacttaatagatgatgtttgacatatatatgtcaaatttataactacatgacaatgactaggtatatgtttcataaatgttgattctgaaggaacagcatgtcacttgttgagactggaacagaagagctaggtggaggtgtttttgtgtaggtgtagcatagaataaaattgtagtaaatttgcaaaagatgatcccctcatagactcttcactgataatatagctacctatcttgaaawtatactgcagaaagtataggcttggacatttggaagtaaagcaaatcttttcctgcttgaaatctgacctatccaatgaggtttctatgtttgaccaaccattggcttctcttccctaaggcaactcaaaactggggttagagtctatggaaactaatttgtttgctctgtagagggctgagtcacaggtggaatcagcaaaagcagctgcctatttatacatagattttcagagacttcaacttaggacaagtcaagtttgcctccagtcag

SEQ ID NO: 52106 - DNA, 587 bp, Homo sapiens
tgggtttatttgcaggttctctattctgttccattgatcaatgtgtctgtttttatgccagtaccatgctgttttgattactataactttgtaataggtttggaagtcaggtagtgtgatgccttcagcgtcatgtttgctygaggtttgctttggatattcagggtcttctgtggttccacacaaagtttagaattattttttctatttctgtggaaattaaactggaattttgatagagagtacattgaatctgtatatcattttgagtagtatggacattttaacaatattaattcttccaacctatgaacacaggatatctttccatttacttgtattgtcttcatgatactgttttaaagaggaagtaagtgtactgataagttttgagtctgtatgtatcctgtaagcaaaacagaggaattatgtgtctaaaataattttggtaagtagtattttatggagcacaaaatatcttaacatctcagtaaactgcaaagcagtgcagaccaacaattagagcattcaggattccctgagatgccagttacaagtgaaacctgttttctttttatcaggcccaa

SEQ ID NO: 52107 - DNA, 587 bp, Homo sapiens
tgggtttatttgcaggttctctattctgttccattgatcaatgtgtctgtttttatgccagtaccatgctgttttgattactataactttgtaataggtttggaagtcaggtagtgtgatgccttcagcgtcatgtttgcttgaggtttgctttggatattcagggtcttctgtggttccacacaaagtttagaattattttttctatttctgtggaaattaaactggaattttgatagagagtacattgaatctgtatatcattttgagtagtatggacattttaacaatattaattcttccaacctatgaacacaggatatctttccatttacttgtattgtcttcatgatactgttttaaagaggaagtaagtgtactgataagttttgagtctgtatgtatcctgtaagcaaaacagaggaattatgtgtctaaaataattttggtaagtagtattttatggagcacaaaatatcttaacatctcagtaaactgcaaagcagtgcagaccaacaattrgagcattcaggattccctgagatgccagttacaagtgaaacctgttttctttttatcaggcccaa

SEQ ID NO: 52108 - DNA, 1508 bp, Homo sapiens
actccaaaaacaccttattgtttattgataaggcaatttctagtgccatttgtgccatatttctgtagtcctattttgccatatgacatgattgaaatcaacacctcttagaaatagttttgctgcctcataattgattaccatcatgataacctgtagtcagtgtgaaatagagataaaaattaatgtacttagttaaatgcatatgaaggtctaatcttgttccagagttactcttactggattatttttagatttttattaacattactggtctctaactttactcagtctggataagaaaaagaataccatgcaattgttaactatttgatgtttactagattaactattaatatattgttgtggtccatakttaagagttactttgttactagagatttcattatagtggtgtttaatatagttttgggtatttttaactaaaaatcattgttatccttcaactgtagattctactatgaaatgaggaaaaatcagcaatagaattaattgggttcaaagtatataaataatgatgtgggaaagggaagtcagagggtatctctggaagaactgatttatctgaaggtaatactgagtgaaagaacctaagattgtagacaaagcatgctttatgcaattttgctggtacatagtagtagtagaggctctataaatgtgttgggtgtttttgtttttaagagacagtgtctcgctatattgcccaggctggatttgaactcctgggcttaagtgatcctccagcctcagcctcccaaatagctgagactgtaggtacatgccactgcacctggcttctataaattttgataaataattgttgtggcaccaaatatgccttttattcagctagttatgtgagaattatttttaatttactacacttgacaaattaccttggatagttaaaaagttaattctattctgtgaaattaagctttgtaaaaatagtataattgacctaatattcaaggccagcttaaatttgtttaacttttaagtcttttaaaggactctttagcccacaaattggagtgttagctagattacagtgttttcctttatcttccttcccctagtgcttctgctatgcccagacgttcaaggtcactcaagggatttgtgcataatggggcaaaaggttggttaatatggtcctatgctctcagtctctaggtaacaggagaattcgagtggacgttgctgatcaagcacaggataaaggtaaggaaactggtagagatttctgtttggtaatggtcccaggatgacaccaagccatcctttcccagaaaatttgaataggggtagtggtgggcctgcctgaatctacagtaacagttttcaatcagttttgccccacaggggacttctggcaatgtttgaagacattgtagttgtcacaattggagggagtgctgctgacataagtagaatccaggggttaattctatagggaataggacagtccccatcaacaaaga

SEQ ID NO: 52109 - DNA, 1903 bp, Homo sapiens
taattttttcttatatcctagcacctggcacagaggcttatcacatgttaatgaaacaaaatacagatgaataaataaatataatgaaatcccttttaatttttctgtgggaaaaataatctcagtttatttggtcttttattgtggagtcatttcyttttaatatttactagtctttgtggctttccttcaattttttgatgtttcttaagaaggcaaggccaaaactaggcacaacattcatggctggtcaggaacttatcagaactgtttttatgatatcaatgttacataaatagtataacaagtcatttcagaaccacactctaagtttccacccatacaaatgatgctgacacacttacctcaagaaccaaccacagcttgtctccatttactttatccttcttaaagtatatcccatagaatctgaccacattagggtggtcagaaagtgcttttaagatgttatattctgcttcaatctcttcgtcaatatcctagtttcaaaaagtcataagaatagaactgtgagaaaaccatgagtaatgtcaaagaaacagattatagaataccaaatacagaatttcattatgtcaaggtcataatagtttttactgtgcttagtattatgtattgtaatttctcattacataatttaaggggagagattgtgattttcatgctaatcaagtgaatctcaagttatattaatttcatcaaattttaaaatggataaataaaatgttatttttatttgcaattataagtaaacatctatggagagctactccagatgattttgcttttttgtattattaactttgttacaagggcaaagcccattgacctgaaataataaattttaggactggaaatctggttcattttgtttctttggaaaataggatatttagaagctatccaaaaatcagtcatacaaacaataaattcccacttttccaaaaaactcaaatagagttaagttataaaagattgcacaaaacctttagtgatctaaaggtccattcaccaaaagaagaacaggttgctatcttatcaatcagaatgaaagacagccacttagacatatttctagaaaatcgcatatatatgaaacaattcatacagcaataaataagagaaagccttattaatactgcttttacagtgacatttaatgcctatgttgttttattatagaatcatggaatcatagaggtagaaatttaaatctgagctctaattttaaaggcataaagttaagccctgagaagttgaagtcagagctggttactgtaaaatccagatatagactccgagcctgctaccttctcatcttactcattcaactcctctcttgaaaagaaaatgactgattaaaaatatgtaagagtaagactcctttaatttaaaataagcaaatctttgcaagatgtttggatgcatttaaatttatttaagattataatctcttggttataaatcttttttatttgacttgtgacatgatgaagagtaaataaataattcttagaaaaatgtatatgtactgtgacaagaatgaaagcaaaaggataaattaagcttaatagtcatgaaatcaatatttcattaaattatactaaataggggggacttataaggcttgtaggtataccatatgtgagtaaattatgaaagaatagtcgttacatggattataagccatttgttctccattaagaaggaagagaaagagatacactatggggccagacaatgggattgggctgaatttctttctcttgctgccacacacctgaatccctaatgcaaaggctacaggaaagagaggtatagtcactttggtagaacttaacttgtacctctgttccttcagtttaaatgcttagaagtttcc

SEQ ID NO: 52110 - DNA, 1903 bp, Homo sapiens
taattttttcttatatcctagcacctggcacagaggcttatcacatgttaatgaaacaaaatacagatgaataaataaatataatgaaatcccttttaatttttctgtgggaaaaataatctcagtttatttggtcttttattgtggagtcatttctttttaatatttactagtctttgtggctttccttcaattttttgatgtttmttaagaaggcaaggccaaaactaggcacaacattcatggctggtcaggaacttatcagaactgtttttatgatatcaatgttacataaatagtataacaagtcatttcagaaccacactctaagtttccacccatacaaatgatgctgacacacttacctcaagaaccaaccacagcttgtctccatttactttatccttcttaaagtatatcccatagaatctgaccacattagggtggtcagaaagtgcttttaagatgttatattctgcttcaatctcttcgtcaatatcctagtttcaaaaagtcataagaatagaactgtgagaaaaccatgagtaatgtcaaagaaacagattatagaataccaaatacagaatttcattatgtcaaggtcataatagtttttactgtgcttagtattatgtattgtaatttctcattacataatttaaggggagagattgtgattttcatgctaatcaagtgaatctcaagttatattaatttcatcaaattttaaaatggataaataaaatgttatttttatttgcaattataagtaaacatctatggagagctactccagatgattttgcttttttgtattattaactttgttacaagggcaaagcccattgacctgaaataataaattttaggactggaaatctggttcattttgtttctttggaaaataggatatttagaagctatccaaaaatcagtcatacaaacaataaattcccacttttccaaaaaactcaaatagagttaagttataaaagattgcacaaaacctttagtgatctaaaggtccattcaccaaaagaagaacaggttgctatcttatcaatcagaatgaaagacagccacttagacatatttctagaaaatcgcatatatatgaaacaattcatacagcaataaataagagaaagccttattaatactgcttttacagtgacatttaatgcctatgttgttttattatagaatcatggaatcatagaggtagaaatttaaatctgagctctaattttaaaggcataaagttaagccctgagaagttgaagtcagagctggttactgtaaaatccagatatagactccgagcctgctaccttctcatcttactcattcaactcctctcttgaaaagaaaatgactgattaaaaatatgtaagagtaagactcctttaatttaaaataagcaaatctttgcaagatgtttggatgcatttaaatttatttaagattataatctcttggttataaatcttttttatttgacttgtgacatgatgaagagtaaataaataattcttagaaaaatgtatatgtactgtgacaagaatgaaagcaaaaggataaattaagcttaatagtcatgaaatcaatatttcattaaattatactaaataggggggacttataaggcttgtaggtataccatatgtgagtaaattatgaaagaatagtcgttacatggattataagccatttgttctccattaagaaggaagagaaagagatacactatggggccagacaatgggattgggctgaatttctttctcttgctgccacacacctgaatccctaatgcaaaggctacaggaaagagaggtatagtcactttggtagaacttaacttgtacctctgttccttcagtttaaatgcttagaagtttcc

SEQ ID NO: 52111 - DNA, 1903 bp, Homo sapiens
taattttttcttatatcctagcacctggcacagaggcttatcacatgttaatgaaacaaaatacagatgaataaataaatataatgaaatcccttttaatttttctgtgggaaaaataatctcagtttatttggtcttttattgtggagtcatttctttttaatatttactagtctttgtggctttccttcaattttttgatgtttcttaagawggcaaggccaaaactaggcacaacattcatggctggtcaggaacttatcagaactgtttttatgatatcaatgttacataaatagtataacaagtcatttcagaaccacactctaagtttccacccatacaaatgatgctgacacacttacctcaagaaccaaccacagcttgtctccatttactttatccttcttaaagtatatcccatagaatctgaccacattagggtggtcagaaagtgcttttaagatgttatattctgcttcaatctcttcgtcaatatcctagtttcaaaaagtcataagaatagaactgtgagaaaaccatgagtaatgtcaaagaaacagattatagaataccaaatacagaatttcattatgtcaaggtcataatagtttttactgtgcttagtattatgtattgtaatttctcattacataatttaaggggagagattgtgattttcatgctaatcaagtgaatctcaagttatattaatttcatcaaattttaaaatggataaataaaatgttatttttatttgcaattataagtaaacatctatggagagctactccagatgattttgcttttttgtattattaactttgttacaagggcaaagcccattgacctgaaataataaattttaggactggaaatctggttcattttgtttctttggaaaataggatatttagaagctatccaaaaatcagtcatacaaacaataaattcccacttttccaaaaaactcaaatagagttaagttataaaagattgcacaaaacctttagtgatctaaaggtccattcaccaaaagaagaacaggttgctatcttatcaatcagaatgaaagacagccacttagacatatttctagaaaatcgcatatatatgaaacaattcatacagcaataaataagagaaagccttattaatactgcttttacagtgacatttaatgcctatgttgttttattatagaatcatggaatcatagaggtagaaatttaaatctgagctctaattttaaaggcataaagttaagccctgagaagttgaagtcagagctggttactgtaaaatccagatatagactccgagcctgctaccttctcatcttactcattcaactcctctcttgaaaagaaaatgactgattaaaaatatgtaagagtaagactcctttaatttaaaataagcaaatctttgcaagatgtttggatgcatttaaatttatttaagattataatctcttggttataaatcttttttatttgacttgtgacatgatgaagagtaaataaataattcttagaaaaatgtatatgtactgtgacaagaatgaaagcaaaaggataaattaagcttaatagtcatgaaatcaatatttcattaaattatactaaataggggggacttataaggcttgtaggtataccatatgtgagtaaattatgaaagaatagtcgttacatggattataagccatttgttctccattaagaaggaagagaaagagatacactatggggccagacaatgggattgggctgaatttctttctcttgctgccacacacctgaatccctaatgcaaaggctacaggaaagagaggtatagtcactttggtagaacttaacttgtacctctgttccttcagtttaaatgcttagaagtttcc

SEQ ID NO: 52112 - DNA, 1564 bp, Homo sapiens
tggtaaatccttatcaaggacataagtaaaaacaagataagatgtgataagggtaggaatctgaaaatatatatatacctatccccaattaacattaatctaaaacaagacaaagagattagattaagaagtttgctgacatctacagaaccacattcacacacaattaatttatcattgatgagaaactctatcagcctgcagatcaggacagaatagcaaagacccgtgagaaaattcattcaagtgttcagctcctctacaccaggataatatgctgtgcctcactgcccccgtgccccacattaaatcttatctcactgttgttaaaaycttttagaatgatacttctagaagtaaggagagggtggttgatgggcaagggggaagaaaaggctgagatcagacacctggggtagcaccaccttttttttttaggtctctcctggctcttccactcccgaaagggtcacaaatctggtaaggagaggttatattaagccactaggtcaacacatctgatagaagatactaaaaccagtcaattattttttaacagcaacatggaattcttcctactcatcattttgaattaggagtgacatcaagatggttggccagaagctcctagtgctctccctctgatatggtttggctctgtgtccccacccaaatctcatgtcaaattgtaatccccacgtgtcaggggagggggcctggtgagaggtgattaaatcatgggggcggatttccccctcactgttcttgtgataatgactgagttctcatgagacctgatggtttaacagtggcatttccccctttgctgcctctttctctctctcctgctttgttgtgcttgcttgcccttcaccttctgcccacgattgtaagtttttttgaggccttcccagccatgtggagctgtgagtcaattacacttcttttctttataaattacccagtctcaggtagttctttatagcagtgtgagaatgggctaatacaccttcaagcctccccctacctgcaaatgagtaaacaagtacatttaaaccaaaataactaaaggagcacactggagaacagcaaaaaagcagccagaagaaatcctgtagagcacggaaacccagaaaggccacatagagaaggaaaagaaacaccttacctttaccacctcatgccccaagtggggatcagctcacaagcaggaaggaaggacagctccctgcaaggaaaaggtaagcaagataccccagcaacctctctcactactgtggacacttgcagtcattgcgactggagacccctgcagtctgcacaggctctgagcctggctgagggagctcccttccaccagagctgaggcagcactctgctctcagagcgcgcaggcctcctgaacactgaagtagttgctgccaccacacatctcaggtgaggtggcaccttgcaccctgagcctccaagcctctggcacacctaagcaggagcatcacagatgatcaaatatgtggaaattaaacaaggtactcctgaacaaccaattggtcaaagaagaaag

SEQ ID NO: 52113 - DNA, 1564 bp, Homo sapiens
tggtaaatccttatcaaggacataagtaaaaacaagataagatgtgataagggtaggaatctgaaaatatatatatacctatccccaattaacattaatctaaaacaagacaaagagattagattaagaagtttgctgacatctacagaaccacattcacacacaattaatttatcattgatgagaaactctatcagcctgcagatcaggacagaatagcaaagacccgtgagaaaattcattcaagtgttcagctcctctacaccaggataatatgctgtgcctcactgcccccgtgccccacattaaatcttatctcactgttgttaaaaccttttagaatgatacttctagaagtaaggagagggtggttgatgggcaagggggaagaaaaggctgagatcagacacctggggtagcaccaccttttttttttaggtctctcctggctcttccactcccgaragggtcacaaatctggtaaggagaggttatattaagccactaggtcaacacatctgatagaagatactaaaaccagtcaattattttttaacagcaacatggaattcttcctactcatcattttgaattaggagtgacatcaagatggttggccagaagctcctagtgctctccctctgatatggtttggctctgtgtccccacccaaatctcatgtcaaattgtaatccccacgtgtcaggggagggggcctggtgagaggtgattaaatcatgggggcggatttccccctcactgttcttgtgataatgactgagttctcatgagacctgatggtttaacagtggcatttccccctttgctgcctctttctctctctcctgctttgttgtgcttgcttgcccttcaccttctgcccacgattgtaagtttttttgaggccttcccagccatgtggagctgtgagtcaattacacttcttttctttataaattacccagtctcaggtagttctttatagcagtgtgagaatgggctaatacaccttcaagcctccccctacctgcaaatgagtaaacaagtacatttaaaccaaaataactaaaggagcacactggagaacagcaaaaaagcagccagaagaaatcctgtagagcacggaaacccagaaaggccacatagagaaggaaaagaaacaccttacctttaccacctcatgccccaagtggggatcagctcacaagcaggaaggaaggacagctccctgcaaggaaaaggtaagcaagataccccagcaacctctctcactactgtggacacttgcagtcattgcgactggagacccctgcagtctgcacaggctctgagcctggctgagggagctcccttccaccagagctgaggcagcactctgctctcagagcgcgcaggcctcctgaacactgaagtagttgctgccaccacacatctcaggtgaggtggcaccttgcaccctgagcctccaagcctctggcacacctaagcaggagcatcacagatgatcaaatatgtggaaattaaacaaggtactcctgaacaaccaattggtcaaagaagaaag

SEQ ID NO: 52114 - DNA, 592 bp, Homo sapiens
atgtgtctgagcagtaaatttacatttgtgcttttaagtaaaaatcatattaatttatagataatattcaaacrtttaaaagtacttaaggcttaccatatgtatacgtttaaaatactagacttataaattatttaagtatctagtaatgtttgatttgttaaatcagaacttaaaagggaaatataaataatgtattaaaaattttatttaaacaagcttttgaatggagccacacattaatccaaggtcccctttaaaggtaaccactaaaatgttccaaacttcctactttctaccttaatgttataatgtttttaaattttgtaatatacatactgaattttaatttttggaaccaaagaaatatttgaataaacttctgtgcacacacaagtcaccctccagaacattaaaaaaactcacattgacactttctatagcaggtaagtttactcatgtttatattgatgttttcaaatgacagtttattagagagtggctgtccctccctagagtctcagctgttcagtattcaaagagagggtttaactattacccaattatttatcagagaaaaatcactctctac

SEQ ID NO: 52115 - DNA, 555 bp, Homo sapiens
gaggcgggcagatcacctgaggtcaggagttcaagaccagcctggccaacatggtgaaatcccgtctctactaaaaatacaaaaattagccaggaatggtggtgggtgcctgtaatcccagctacttgggaggttgaggcagaagaattgcttgaacctgggaggcagaggttgcagtgagccaagattgtwccactgcactccagccagggtgacaagagtgagactgcatctcaaaacaacaaacacaacaacaaagcatttactccctatttgctaccctgtctgatgaaattgtgttttgcttatttgtctgtagacaagaagctcaaggagagcagaggtcttgtctatttcatgtgcttcatctccagcttttagattaagacttgctacaaagcaaaacagaattcaataaatgttttgcatgaaataattaattttaccaggaagtagagatacagagaggttctgtaaactttccaaggtcataaatgcttatctgtcaaaacccactcacgggatctcagtcacagcccacagattttttaccac

SEQ ID NO: 52116 - DNA, 1314 bp, Homo sapiens
tactcactccacatgaatgctttgcagtcacccctaacatctgtgttgcaagtttagtccttgctgtactctcttcttccagcgagttatgtgtgtattctaaagtatgtgtctaaattctcctaagtgagacatgcctgggagtattttcgaaagccagttgttttccggcattctagatgaatgttctaacctccgcgggctggagcaatcaccttcgctgacaagtctttgatatcaatggagaggaattactcaagtcatgggacctctttcctctgggcactgagttggtttggaaggaaagttccagatgaagaatattgtttggttataattaattcctctaattatttgtatgtagtactgagtttgaatttgcaaagtgcctgccacaatcctggaaaacttttctgtcagtggagtcttcttcagtggcccgtggcagaaaacacagcccaaacaagcaaaacaaagcagaatttactgttttacataagtcaaagttcagaaataaaggtgactgtgggtgctgtgagaaacaccctgcaggacccagtcctcaatctcacacaagctcttccattgctgcagatggtggctgtcccaccccaggacccagtcctcaatctcacacaagctcttccattgctgcagatggtggctgtcccaccagacccctcacccatcctcttgacatcaccatcagtgagaaagaaagaatttctctacccttcaatttaaaaaactgacttaggaggctgagatgggaggatcgcttgagtccagagggttgaggctgcagtgagctctgattgcgccactgcactccagcctgggtgacagagcgggaccctgtctcaagacaagaaagaaaaagaaatggtgcctgtccttgtaccaaagggttagggcatgctgwtgagctgagatgtaacatttccagctgagtgctgaagtaagtaagtctcacagacccgtgtacagtgcagtgacccatccctcactggacaccttttcagagggattctgagggatgattgtagccgatcttcctactgggacggatgattacagccaatcttcctactttcctgtgaaaatgccgtcgagtgagagctgtacaggctcaaacaaaggtttgtttctagacaacacctggatttgatttcttttgtgcagacctcagggacgtgcttctgggaaagctgctgaagttcataaccaagactctcagaagagttccccgtctttctctctgccattctctagccatgcagcaacatcaagttccgacagcagattatcgaggta

SEQ ID NO: 52117 - DNA, 631 bp, Homo sapiens
ggacaaatacrtgtttactgactgtatagcaaaatttgtcctaatataacacaaatattagtgtattatgaaagcatagaagatcccaaacactctggctgaatttttttgaaaatgattactatttcaccaggcagaaaataagaggaaaggcatgttgagaaaagaaagcatgaagaaactcacactgatggaaagtaaattatatattgacagttcgatgtgtagtcatgaaacgtaaaagtcattgaatacaattattatggaagagactgatgggacagcatcaaaagacagcttgagagaagatgatgaaggtccttaaaaatatgataaaaatttggaatatatatatggtggtaaggctgaataatggacccctcaaagatgtctgtgaatttataaatctatgaatatgtcaccttatgttgtaaaaaggacttgcataagtgattaaattaaagagtctgcaatgggaagattatcctatattgaccagagggtcccaatataaacataagaatccttctgaaagaggagcagaaggatcagtctttggtaggaaatgtgactacagcaacaagtggcaccagtgataccaggaagaagccaagagccaagtgatgtgttc

SEQ ID NO: 52118 - DNA, 631 bp, Homo sapiens
ggacaaatacatgtttactgactgtatagcaaaatttgtcctaatataacacaaatattagtgtattatgaaagcatagaagatcccaaacaytctggctgaatttttttgaaaatgattactatttcaccaggcagaaaataagaggaaaggcatgttgagaaaagaaagcatgaagaaactcacactgatggaaagtaaattatatattgacagttcgatgtgtagtcatgaaacgtaaaagtcattgaatacaattattatggaagagactgatgggacagcatcaaaagacagcttgagagaagatgatgaaggtccttaaaaatatgataaaaatttggaatatatatatggtggtaaggctgaataatggacccctcaaagatgtctgtgaatttataaatctatgaatatgtcaccttatgttgtaaaaaggacttgcataagtgattaaattaaagagtctgcaatgggaagattatcctatattgaccagagggtcccaatataaacataagaatccttctgaaagaggagcagaaggatcagtctttggtaggaaatgtgactacagcaacaagtggcaccagtgataccaggaagaagccaagagccaagtgatgtgttc

SEQ ID NO: 52119 - DNA, 628 bp, Homo sapiens
agtaacttacccaagtcacagagcaactgaactttagtgttaataggctattgctgataggaatgaaaaaaataatggctcaaacaagagtgccactatgtacagaaacacagtcttacttacttaaggaaaggataggaatatccaaatgctctaaggatttgggtctgcataatgtctcccttgctaatacaaatacacaaamatatgtaagtttggggaaaatatcagtctccagaaacagaggagtccccaaggactgccaagcaatcgtaaaggcagtatttatcccttatgccggagaagttgtgcagacagtgagtgtctagggagtgacatagtgaaaagcttcctcaggttccattatgttacacacttgctaatccacacttaaaagtcatcttcaattgtgaactcatgatgcaccggggacatatacaataccacatagaattttgcatttcacacatttatttttctggaaatgaaagatattaaagaacaatcaagaaagaggaaatctatatggtttatcctctagaacaaggttgtgtcaagagtaaagacttaataaaacagtaaatacattttagtatcctaacttccaaagaagcacatagcaaatcat

SEQ ID NO: 52120 - DNA, 1835 bp, Homo sapiens
ttttactatcatgtgaaggttaaaaaataaaaattgaaataattgtgaagtagtgacttgatgtctctttaccattttaataatttagatttcaattgagtatagctctaatgaaaagatgaatttgyattgtgtaatttttctgaaatattgtataatacagtcaatttaccttgataatgagaatttaaccatattccataataagcttcctttgaattaacaatttgttatattacaaaacttctttagctctcaaaatttacttgataaattttggacagctgtgtttcaatataggaaaacattattttatcaaatagatgtatatgtgtggattgaaaaagagtgttaatagattctgtacaaatgaatccatttatgttattatgttctgattataaactaatatacactcatagaaatgcagaaaatatgtacaaatgatggtctggttaagttcagtgatgtttgctataacaaatttgaaatatatctttgaggctttctttttttgcttgactgattagatatgcctcatcccctaaatcatatatgccatagacaataatggattaatatatggtattttacaggttttttcctaaccctcctctctatagaccatttggatattgcatttttccttgcttcttcatgtttttaggacagaaataacaagtgaataaaaatactcgctcgatagagtgagtaagtggggctggatgcagtggctcatgcttgtattcccagcactttgggaattggaggcaggtggatcacctgaggtcaagagtttgagaccagcctggccaacatggcaaaaacccatttctactaaaaatacaaaagattagctgggcatggtggcaggcacgtgtaattccagctacttagaaggctgagacaggagaatcacttgaacccgggaggtggaggttgcagtgagcctagatcgtgccattgcactccaagctgaacaacaagagtgaaactccatctcagaaaaaaaaaaagagtaagtgggtaaaaagctacatcattctttagttgttacacatgtaggagaagggcatttcatgaagagatagatcagaggggggaaaaaaagtcatcaagagaaaaagattataaaactaggacctagagaaaggtcttcaggggtaagaaggaggctcccaggggtctcagggtgctggaaaagagaagagaatgcagaggtttattaggaatttctacagattataccttagaaccatctgacacatagagaaaagtgagagttaaggtgtatatttcatttatgttgttgctttcttaaaaatgaatatttttagacctaagcatccagaactagtggatttataactactatgtagctaaattgccagaatatattcgtcttattttgaagcctcttttctgttccattgagctgtgtgtttctacttccaaaaatgaaaataaaacaccatttcatgtacttcctctttattggacattttgatatttgtcagagcaagtatgctttcattattattcaaagcattcagactttttttttttgctgtgaagtctataattgcattaacatcccttcctctcccaaatgacatcttatataacattgaattaaacatgtagtttaatttggagaaagctgaaactttacagtattgaaacatttcattcagatatactttagttttataattttcttgaaatatgattgtatttttttcattggagttacttgtcaatattttgttgtttctgttcctattgtgattggtatcttatttcttattcatatttttaattggatattgttggca

SEQ ID NO: 52121 - DNA, 1835 bp, Homo sapiens
ttttactatcatgtgaaggttaaaaaataaaaattgaaataattgtgaagtagtgacttgatgtctctttaccattttaataatttagatttcaattgagtatagctctaatgaaaagatgaatttgtattgtgtaatttttctgaaatattgtataatacagtcaatttaccttgataatgagaatttaaccatattccataataagcttcctttgaattaacaatttgttatattacaaaacttctttagctctcaaaatttacttgataaattttggacagctgtgtttcaatataggaaaacattattttatcaaatagatgtatatgtgtggattgaaaaagagtgttaatagattctgtacaaatgaatccatttatgttaktatgttctgattataaactaatatacactcatagaaatgcagaaaatatgtacaaatgatggtctggttaagttcagtgatgtttgctataacaaatttgaaatatatctttgaggctttctttttttgcttgactgattagatatgcctcatcccctaaatcatatatgccatagacaataatggattaatatatggtattttacaggttttttcctaaccctcctctctatagaccatttggatattgcatttttccttgcttcttcatgtttttaggacagaaataacaagtgaataaaaatactcgctcgatagagtgagtaagtggggctggatgcagtggctcatgcttgtattcccagcactttgggaattggaggcaggtggatcacctgaggtcaagagtttgagaccagcctggccaacatggcaaaaacccatttctactaaaaatacaaaagattagctgggcatggtggcaggcacgtgtaattccagctacttagaaggctgagacaggagaatcacttgaacccgggaggtggaggttgcagtgagcctagatcgtgccattgcactccaagctgaacaacaagagtgaaactccatctcagaaaaaaaaaaagagtaagtgggtaaaaagctacatcattctttagttgttacacatgtaggagaagggcatttcatgaagagatagatcagaggggggaaaaaaagtcatcaagagaaaaagattataaaactaggacctagagaaaggtcttcaggggtaagaaggaggctcccaggggtctcagggtgctggaaaagagaagagaatgcagaggtttattaggaatttctacagattataccttagaaccatctgacacatagagaaaagtgagagttaaggtgtatatttcatttatgttgttgctttcttaaaaatgaatatttttagacctaagcatccagaactagtggatttataactactatgtagctaaattgccagaatatattcgtcttattttgaagcctcttttctgttccattgagctgtgtgtttctacttccaaaaatgaaaataaaacaccatttcatgtacttcctctttattggacattttgatatttgtcagagcaagtatgctttcattattattcaaagcattcagactttttttttttgctgtgaagtctataattgcattaacatcccttcctctcccaaatgacatcttatataacattgaattaaacatgtagtttaatttggagaaagctgaaactttacagtattgaaacatttcattcagatatactttagttttataattttcttgaaatatgattgtatttttttcattggagttacttgtcaatattttgttgtttctgttcctattgtgattggtatcttatttcttattcatatttttaattggatattgttggca

SEQ ID NO: 52122 - DNA, 580 bp, Homo sapiens
cattctatttaataaactaaaacatagaattactttcacctcaagaagggagattggcttacatttatagaacatataattggtgagtgccttagggagaaagacaaacatagcacatggcctgcaggttgctggaatggtttctcagtgccagactgcttgagcatcagaatgaagcagtcctttgtggatattcctcctctaaacaagtgaaggaaaactatctcttagctctgggctcccagttgtgacactatggagtggaagaggaggagaaaggctcttcttggattctgacttcaacccaacttttccatccccctctgctttycccgttagttagtctgactgcatccaaagtaactatgattcacgtgacttgtttaggctcttttctatggctctgtcatactttgtgctaatttgggtgactatgcttctcaatgcacttaaatattaatagaaatagaaaataagttagaagatgtctaaacatgtgtatttgagattgagttcattcactttagagaattgagaatattatttgacaggtttgactaagagtggccagggtaataaa

SEQ ID NO: 52123 - DNA, 2284 bp, Homo sapiens
gctacagagcttgactaacctacccagaggcagaatgatatggtggttaaaagtgtgctctgggccgagattttgccactgcacttcagcctgggtgacagagtgagactccatctcaaaaaaaaaaaaaaaaaaaaaaaaatctgctctggctggacgcgggggctcacaactgtaatatcagcactttgggaggctgaggcaggaagatcgcttgaagtcaggagtttggaatcagaccctatctctagaaaaatgttttttaaaaattagctgggttggtggtgaatgcctctagtcccagctactcgggargctgaggcgggaagactgctggagcttgggagttcaagcctgcactgagctatgatcaggccactgcactccaatttgagggacagagagagaccccatctctctgaacaacaaaaatgtgtgctctggtgccacacggcctggttagatcctttgtccaccacttagatgcatgttatataaatgttctcctcagtttcctcgtctgtaacttggggatggttatgctgccccaagaagtggttatggggactaaatgcatgtgggcatattggttagtattcaaccagcttgatttttcctggagagggagaaagagcatgcagtgaggtggcatggtcaggtgcattgggacaaggattatttcctctggcttctgcctcctgggaggtataaggagggatctgaaatctgtctgcagaccccagagttggggactgcagagggaaattgagatcagggactgtagtctggcagaaatgagtgctgcatggggcattgggttccttccatcagaggcatggggtgtgttgcagacagtcatgaaatgtggctgaatcttgcaagggaccctcggtcctatggttgctgcttgagacaaagacccctgtcagtggaacctggtgacattcacccttctgtgtcaggctgcagacagcaggagatggcagcagattacacccaacaggaaaagggccattgccaccccacaggttgccatagaaggagatgacatctctccctctcctcctccagcagtgtcagctggggaagtggtgggtggatgtgcacaaaagagtagaccacagagcatgctccttctcctccggtctgctggggccccaagagagtctgcagcccttggccaaggaccggctgacacaggagaacaaaagaccttaggctgggataacatggtggtgcagttcatcctctggagctccctgtgagatcagactggagccagtctccagctgagaccacatctcacttagctcctttcctgccatatcctgttttccttactcctatctcctgagacttcttcctgaatgaattacatgcactcaatccctgcctcagtctctgcttttagggaacttgacctaagacagaaatcttagtactaaatactttgcaaggcctcagaagctctgctatccacaagcaggtgagatattaccttccctaccacctggcagtcatagtctatgatgcgattcagctttatggaagtgcttctctaaagaacttcccccaatttaagacgatcttaatttgcttacttgtttactgtccatttagctgctctaaaatgtgagctccaaatcaggggccgtgtctggttggttactcatttcctgagacctggaatgggcctagctcagagcaggtgctcactattgatggaatgcatgttgaaagaatgcatgaatctcatgtctttttgtgggtgaaaaactcatcctattctcaccctgattaactttctttctttctttattttttttttttttcaaaatggagccatgatctgtcacccaggctggagtgcaatggtgtgatctcagctagctgaaacctctgccttctggattaaaccaattctcctgcctcagcctcctgggtagctgggattacaggtgtataccacaacgcccggctaattttttgtatttttaatagagacagtgtttcaccatgttggccaggctggtctcgaactcctgacctcgtgatctgccctctttggcctcccaaagtcctgggattacaggcatgagccaccatacccagccactcttgattaacttaatggaaatatttacagagattctttctcttctgggttctaacgtcttatctgtaacctctgcaggtaatacattttccttcctgatgatagcatttctatggttgctttcacttgcaaatcctctaatgcttatttattccatttctgattggc

SEQ ID NO: 52124 - DNA, 2284 bp, Homo sapiens
gctacagagcttgactaacctacccagaggcagaatgatatggtggttaaaagtgtgctctgggccgagattttgccactgcacttcagcctgggtgacagagtgagactccatctcaaaaaaaaaaaaaaaaaaaaaaaaatctgctctggctggacgcgggggctcacaactgtaatatcagcactttgggaggctgaggcaggaagatcgcttgaagtcaggagtttggaatcagaccctatctctagaaaaatgttttttaaaaattagctgggttggtggtgaatgcctctagtcccagctactcgggaggctgaggcgggaagactgctggagcttgggagttcaagcctgcactgagctatgatcaggccactgcactccaatttgagggacagagagagaccccatctctctgaacaacaaaaatgtgtgctctggtgccacacggcctggttagatcctttgtccaccacttagatgcatgttatataaatgttctcctcagtttcctcgtctgtaacttggggatggttatgctgccccaagaagtggttatggggactaaatgcatgtgggcatattggttagtattcaaccagcttgatttttcctggagagggagaaagagcatgcagtgaggtggcatggtcaggtgcattgggacaaggattatttcctctggcttctgcctcctgggaggtataaggagggatctgaaatctgtctgcagaccccagagttggggactgcagagggaaattgagatcagggactgtagtctggcagaaatgagtgctgcatggggcattgggttccttccatcagaggcatggggtgtgttgcagacagtcatgaaatgtggctgaatcttgcaagggaccctcggtcctatggttgctgcttgagacaaagacccctgtcagtggaacctggtgacattcacccttctgtgtcaggctgcagacagcaggagatggcagcagattacacccaacaggaaaagggccattgccaccccacaggttgccatagaaggagatgacatctctccctctcctcctccagcagtgtcagctggggaagtggtgggtggatgtgcacaaaagagtagaccacagagcatgctccttctcctccggtctgctggggccccaagagagtctgcagcccttggccaaggaccggctgacacaggagaacaaaagaccttaggctgggataacatggtggtgcagttcatcctctggagctccctgtgagatcagactggagccagtctccagctgagaccacatctcacttagctcctttcctgccatatcctgttttccttactcctatctcctgagacttcttcctgaatgaattacatgcactcaatccctgcctcagtctctgcttttagggaacttgacctaagacagaaatcttagtactaaatactttgcaaggcctcagaagctctgctatccacaagcaggtgagatattaccttccctaccacctggcagtcatagtctatgatgcgattcagctttatggaagtgcttctctaaagaacttcccccaatttaagacgatcttaatttgcttacttgtttactgtccatttagctgctctaaaatgtgagctccaaatcaggggccgtgtctggttggttactcatttcctgagacctggaatgggcctagctcagagcaggtgctcactattgatggaatgcatgttgaaagaatgcatgaatctcatgtctttttgtgggtgaaaaactcatcctattctcaccctgattaactttctttctttctttmttttttttttttttcaaaatggagccatgatctgtcacccaggctggagtgcaatggtgtgatctcagctagctgaaacctctgccttctggattaaaccaattctcctgcctcagcctcctgggtagctgggattacaggtgtataccacaacgcccggctaattttttgtatttttaatagagacagtgtttcaccatgttggccaggctggtctcgaactcctgacctcgtgatctgccctctttggcctcccaaagtcctgggattacaggcatgagccaccatacccagccactcttgattaacttaatggaaatatttacagagattctttctcttctgggttctaacgtcttatctgtaacctctgcaggtaatacattttccttcctgatgatagcatttctatggttgctttcacttgcaaatcctctaatgcttatttattccatttctgattggc

SEQ ID NO: 52125 - DNA, 2284 bp, Homo sapiens
gctacagagcttgactaacctacccagaggcagaatgatatggtggttaaaagtgtgctctgggccgagattttgccactgcacttcagcctgggtgacagagtgagactccatctcaaaaaaaaaaaaaaaaaaaaaaaaatctgctctggctggacgcgggggctcacaactgtaatatcagcactttgggaggctgaggcaggaagatcgcttgaagtcaggagtttggaatcagaccctatctctagaaaaatgttttttaaaaattagctgggttggtggtgaatgcctctagtcccagctactcgggaggctgaggcgggaagactgctggagcttgggagttcaagcctgcactgagctatgatcaggccactgcactccaatttgagggacagagagagaccccatctctctgaacaacaaaaatgtgtgctctggtgccacacggcctggttagatcctttgtccaccacttagatgcatgttatataaatgttctcctcagtttcctcgtctgtaacttggggatggttatgctgccccaagaagtggttatggggactaaatgcatgtgggcatattggttagtattcaaccagcttgatttttcctggagagggagaaagagcatgcagtgaggtggcatggtcaggtgcattgggacaaggattatttcctctggcttctgcctcctgggaggtataaggagggatctgaaatctgtctgcagaccccagagttggggactgcagagggaaattgagatcagggactgtagtctggcagaaatgagtgctgcatggggcattgggttccttccatcagaggcatggggtgtgttgcagacagtcatgaaatgtggctgaatcttgcaagggaccctcggtcctatggttgctgcttgagacaaagacccctgtcagtggaacctggtgacattcacccttctgtgtcaggctgcagacagcaggagatggcagcagattacacccaacaggaaaagggccattgccaccccacaggttgccatagaaggagatgacatctctccctctcctcctccagcagtgtcagctggggaagtggtgggtggatgtgcacaaaagagtagaccacagagcatgctccttctcctccggtctgctggggccccaagagagtctgcagcccttggccaaggaccggctgacacaggagaacaaaagaccttaggctgggataacatggtggtgcagttcatcctctggagctccctgtgagatcagactggagccagtctccagctgagaccacatctcacttagctcctttcctgccatatcctgttttccttactcctatctcctgagacttcttcctgaatgaattacatgcactcaatccctgcctcagtctctgcttttagggaacttgacctaagacagaaatcttagtactaaatactttgcaaggcctcagaagctctgctatccacaagcaggtgagatattaccttccctaccacctggcagtcatagtctatgatgcgattcagctttatggaagtgcttctctaaagaacttcccccaatttaagacgatcttaatttgcttacttgtttactgtccatttagctgctctaaaatgtgagctccaaatcaggggccgtgtctggttggttactcatttcctgagacctggaatgggcctagctcagagcaggtgctcactattgatggaatgcatgttgaaagaatgcatgaatctcatgtctttttgtgggtgaaaaactcatcctattctcaccctgattaactttctttctttctttatttyttttttttttcaaaatggagccatgatctgtcacccaggctggagtgcaatggtgtgatctcagctagctgaaacctctgccttctggattaaaccaattctcctgcctcagcctcctgggtagctgggattacaggtgtataccacaacgcccggctaattttttgtatttttaatagagacagtgtttcaccatgttggccaggctggtctcgaactcctgacctcgtgatctgccctctttggcctcccaaagtcctgggattacaggcatgagccaccatacccagccactcttgattaacttaatggaaatatttacagagattctttctcttctgggttctaacgtcttatctgtaacctctgcaggtaatacattttccttcctgatgatagcatttctatggttgctttcacttgcaaatcctctaatgcttatttattccatttctgattggc

SEQ ID NO: 52126 - DNA, 2284 bp, Homo sapiens
gctacagagcttgactaacctacccagaggcagaatgatatggtggttaaaagtgtgctctgggccgagattttgccactgcacttcagcctgggtgacagagtgagactccatctcaaaaaaaaaaaaaaaaaaaaaaaaatctgctctggctggacgcgggggctcacaactgtaatatcagcactttgggaggctgaggcaggaagatcgcttgaagtcaggagtttggaatcagaccctatctctagaaaaatgttttttaaaaattagctgggttggtggtgaatgcctctagtcccagctactcgggaggctgaggcgggaagactgctggagcttgggagttcaagcctgcactgagctatgatcaggccactgcactccaatttgagggacagagagagaccccatctctctgaacaacaaaaatgtgtgctctggtgccacacggcctggttagatcctttgtccaccacttagatgcatgttatataaatgttctcctcagtttcctcgtctgtaacttggggatggttatgctgccccaagaagtggttatggggactaaatgcatgtgggcatattggttagtattcaaccagcttgatttttcctggagagggagaaagagcatgcagtgaggtggcatggtcaggtgcattgggacaaggattatttcctctggcttctgcctcctgggaggtataaggagggatctgaaatctgtctgcagaccccagagttggggactgcagagggaaattgagatcagggactgtagtctggcagaaatgagtgctgcatggggcattgggttccttccatcagaggcatggggtgtgttgcagacagtcatgaaatgtggctgaatcttgcaagggaccctcggtcctatggttgctgcttgagacaaagacccctgtcagtggaacctggtgacattcacccttctgtgtcaggctgcagacagcaggagatggcagcagattacacccaacaggaaaagggccattgccaccccacaggttgccatagaaggagatgacatctctccctctcctcctccagcagtgtcagctggggaagtggtgggtggatgtgcacaaaagagtagaccacagagcatgctccttctcctccggtctgctggggccccaagagagtctgcagcccttggccaaggaccggctgacacaggagaacaaaagaccttaggctgggataacatggtggtgcagttcatcctctggagctccctgtgagatcagactggagccagtctccagctgagaccacatctcacttagctcctttcctgccatatcctgttttccttactcctatctcctgagacttcttcctgaatgaattacatgcactcaatccctgcctcagtctctgcttttagggaacttgacctaagacagaaatcttagtactaaatactttgcaaggcctcagaagctctgctatccacaagcaggtgagatattaccttccctaccacctggcagtcatagtctatgatgcgattcagctttatggaagtgcttctctaaagaacttcccccaatttaagacgatcttaatttgcttacttgtttactgtccatttagctgctctaaaatgtgagctccaaatcaggggccgtgtctggttggttactcatttcctgagacctggaatgggcctagctcagagcaggtgctcactattgatggaatgcatgttgaaagaatgcatgaatctcatgtctttttgtgggtgaaaaactcatcctattctcaccctgattaactttctttctttctttattttttttttttttcaaaatggagccaygatctgtcacccaggctggagtgcaatggtgtgatctcagctagctgaaacctctgccttctggattaaaccaattctcctgcctcagcctcctgggtagctgggattacaggtgtataccacaacgcccggctaattttttgtatttttaatagagacagtgtttcaccatgttggccaggctggtctcgaactcctgacctcgtgatctgccctctttggcctcccaaagtcctgggattacaggcatgagccaccatacccagccactcttgattaacttaatggaaatatttacagagattctttctcttctgggttctaacgtcttatctgtaacctctgcaggtaatacattttccttcctgatgatagcatttctatggttgctttcacttgcaaatcctctaatgcttatttattccatttctgattggc

SEQ ID NO: 52127 - DNA, 2196 bp, Homo sapiens
tgactatggtcaccctgatgtgaaatagatctaaaaactttttcctcctgtctacctgaaactttgtaacttacaaatatcatttgaagaaaaaaaacccaaataccaaaatatttgaaattgccatcactaatgattactgttttaaatatttggagtgtagtttagaatactacagttttatctacatgaactctagaaaattttgtctctgtgcacttgaagccatccagattaagccattcccattcaagattcatgagacacagtacaatatatgagactttgaacttttttttttaacttcgtgagcaactatgcttggataaacaagccatttgaggaaacaataygcatctttcacaactactaagcctacaaataggcataagtggagtaagctccagctgcagtagggactttgttgtctggttctagtcagccccaattgtcttgctctaaaaatgataaaagatgcgaaatttgcatgctactcaaaaggactggttttaaaattgccattcaactatcgggtgttattgtttttcacagatgactactttttatctatttattttttttttgagatggagtttcgctcttgttgcccaggctggagtgcaatggcacgatctcagctcacagcaacctctgcctcccgggttcaagagaatctcctgcctcagcctcctgagtagctgggattacagacatgcaccaccacacctggctaattttttgtatttttagtagagacagtgtttgtccatgttggtcaggctggtctcgaaatcccaatgtcaggtgacccacccaccttggcctcccaaagtgctgggattacaggcatgagccatcgcgcctggcctgactacttttttgaggaagaccctattctgcacaacagaggacatgtttgaagagggagtttacagataaaccttaggaataagaaaaacagggcacagataatccagtctgctgtgtctttgttattgtaatcatcggttggttagctggttctcatgcctgtgggtgctaagaagggtgagatcaaagaaaatccacatgggactggtgctccttcatccagtgcttcattcaatacttatcaatcatgcaccaaacactgctgagcatcaaaagtccatctaggcactgggttgtcattgtgaaagggacaggcagggtgtctactcttacggacattacagtaaaggagacataggagagctcactaaagtataaattgctacacactgaaaacaggccatggagaaatggtaggtaagagaacataagggtggaaactgaccttgcctgagtacaggcaatgcttccatgaacactatgtttaggaaatgaaataagagttttctgcttccaacttcaaaaaacaaaagcaaaaatgctgattgccatgtgggtgttttttgcaaagtttcacccagtattcatgtattattcatttataaaaacactgcttactacatgagcagtgcctactcaacacttttggcagtgtgaatgcgacagacgtccacttccaacacgcttactgattagctggacagaaagatttattactctgtacacagcaggatgtgctgagaactgatagaggagcaaagaaagccagaaacagcacaagagacatgtgaggacactcccagtgacaaagctactttgtgcggtgcatagattctgttgccattctttcttttaagtaaccttatttctggctttgttatgtgtatacatttatttcatttttctcacttctatctcatttaattacagagtgttgtatatgtacacatttttgtgacacatcttaaaacttttcacaaagagaagcacaattaaataaatattaaaagaaaattagaaaaataaaaataaaagaggctgggtggagtggctcacgcctataatcccagcactttgggaggccgaggtgggtggatcaccagaggtcaggagtttgagaccagcctggccaatgtggtgaaaccccacctctatttaaaatacaaaaatcagttcagtgtggtggtgggcgcctgtaattccagctacttgggaggctgaggcaggagaattgcttgaacctgggaggcagaggttgcagtgagctgagatcgtgccattgcactccagcctggggacaggagcgaaactctgtctcaaatttaa

SEQ ID NO: 52128 - DNA, 2196 bp, Homo sapiens
tgactatggtcaccctgatgtgaaatagatctaaaaactttttcctcctgtctacctgaaactttgtaacttacaaatatcatttgaagaaaaaaaacccaaataccaaaatatttgaaattgccatcactaatgattactgttttaaatatttggagtgtagtttagaatactacagttttatctacatgaactctagaaaattttgtctctgtgcacttgaagccatccagattaagccattcccattcaagattcatgagacacagtacaatatatgagactttgaacttttttttttaacttcgtgagcaactatgcttggataaacaagccatttgaggaaacaatatgcatctttcacaactactaagcctacraataggcataagtggagtaagctccagctgcagtagggactttgttgtctggttctagtcagccccaattgtcttgctctaaaaatgataaaagatgcgaaatttgcatgctactcaaaaggactggttttaaaattgccattcaactatcgggtgttattgtttttcacagatgactactttttatctatttattttttttttgagatggagtttcgctcttgttgcccaggctggagtgcaatggcacgatctcagctcacagcaacctctgcctcccgggttcaagagaatctcctgcctcagcctcctgagtagctgggattacagacatgcaccaccacacctggctaattttttgtatttttagtagagacagtgtttgtccatgttggtcaggctggtctcgaaatcccaatgtcaggtgacccacccaccttggcctcccaaagtgctgggattacaggcatgagccatcgcgcctggcctgactacttttttgaggaagaccctattctgcacaacagaggacatgtttgaagagggagtttacagataaaccttaggaataagaaaaacagggcacagataatccagtctgctgtgtctttgttattgtaatcatcggttggttagctggttctcatgcctgtgggtgctaagaagggtgagatcaaagaaaatccacatgggactggtgctccttcatccagtgcttcattcaatacttatcaatcatgcaccaaacactgctgagcatcaaaagtccatctaggcactgggttgtcattgtgaaagggacaggcagggtgtctactcttacggacattacagtaaaggagacataggagagctcactaaagtataaattgctacacactgaaaacaggccatggagaaatggtaggtaagagaacataagggtggaaactgaccttgcctgagtacaggcaatgcttccatgaacactatgtttaggaaatgaaataagagttttctgcttccaacttcaaaaaacaaaagcaaaaatgctgattgccatgtgggtgttttttgcaaagtttcacccagtattcatgtattattcatttataaaaacactgcttactacatgagcagtgcctactcaacacttttggcagtgtgaatgcgacagacgtccacttccaacacgcttactgattagctggacagaaagatttattactctgtacacagcaggatgtgctgagaactgatagaggagcaaagaaagccagaaacagcacaagagacatgtgaggacactcccagtgacaaagctactttgtgcggtgcatagattctgttgccattctttcttttaagtaaccttatttctggctttgttatgtgtatacatttatttcatttttctcacttctatctcatttaattacagagtgttgtatatgtacacatttttgtgacacatcttaaaacttttcacaaagagaagcacaattaaataaatattaaaagaaaattagaaaaataaaaataaaagaggctgggtggagtggctcacgcctataatcccagcactttgggaggccgaggtgggtggatcaccagaggtcaggagtttgagaccagcctggccaatgtggtgaaaccccacctctatttaaaatacaaaaatcagttcagtgtggtggtgggcgcctgtaattccagctacttgggaggctgaggcaggagaattgcttgaacctgggaggcagaggttgcagtgagctgagatcgtgccattgcactccagcctggggacaggagcgaaactctgtctcaaatttaa

SEQ ID NO: 52129 - DNA, 2196 bp, Homo sapiens
tgactatggtcaccctgatgtgaaatagatctaaaaactttttcctcctgtctacctgaaactttgtaacttacaaatatcatttgaagaaaaaaaacccaaataccaaaatatttgaaattgccatcactaatgattactgttttaaatatttggagtgtagtttagaatactacagttttatctacatgaactctagaaaattttgtctctgtgcacttgaagccatccagattaagccattcccattcaagattcatgagacacagtacaatatatgagactttgaacttttttttttaacttcgtgagcaactatgcttggataaacaagccatttgaggaaacaatatgcatctttcacaactactaagcctacaaataggcataagtggagtaagctccagctgcagtagggactttgttgtctggttctagtcagccccaattgtcttgctctaaaaatgataaaagatgcgaaatttgcatgctactcaaaaggactggttttaaaattgccattcaactatcgggtgttattgtttttcacagatgactactttttatctatttattttttttttgagatggagtttcgctcttgttgcccaggctggagtgcaatggcacgatctcagctcacagcaacctctgcctcccgggttcaagagaatctcctgcctcagcctcctgagtagctgggattacagacatgcaccaccacacctggctaattttttgtatttttagtagagacagtgtttgtccatgttggtcaggctggtctcgaaatcccaatgtcaggtgacccacccaccttggcctcccaaagtgctgggattacaggcatgagccatcgcgcctggcctgactacttttttgaggaagaccctattctgcacaacagaggacatgtttgaagagggagtttacagataaaccttaggaataagaaaaacagggcacagataatccagtctgctgtgtctttgttattgtaatcatcggttggttagctggttctcatgcctgtgggtgctaagaagggtgagatcaaagaaaatccacatgggactggtgctccttcatccagtgcttcattcaatacttatcaatcatgcaccaaacactgctgagcatcaaaagtccatctaggcactgggttgtcattgtgaaagggacaggcagggtgtctactcttacggacattacagtaaaggagacataggagagctcactaaagtataaattgctacacactgaaaacaggccatggagaaatggtaggtaagagaacataagggtggaaactgaccttgcctgagtacaggcaatgcttccatgaacactatgtttaggaaatgaaataagagttttctgcttccaacttcaaaaaacaaaagcaaaaatgctgattgccatgtgggtgttttttgcaaagtttcacccagtattcatgtattattcatttataaaaacactgcttactacatgagcagtgcctactcaacacttttggcagtgtgaatgcgacagacgtccacttccaacacgcttactgattagctggacagaaagatttattactctgtacacagcaggatgtgctgagaactgatagaggagcaaagaaagccagaaacagcacaagagacatgtgaggacactcccagtgacaaagctactttgtgcggtgcatagattctgttgccattctttcttttaagtaaccttatttctggctttgttatgtgtatacatttatttcatttttctcacttctatctcatttaattacagagtgttgtatatgtacacatttttgtgacacatcttaaaacttttcacaaagagaagcacaattaaataaatattaaaagaaaattagaaaaataaaaataaaagaggctgggtggagtggctcacgcctataatcccagcactttgggaggycgaggtgggtggatcaccagaggtcaggagtttgagaccagcctggccaatgtggtgaaaccccacctctatttaaaatacaaaaatcagttcagtgtggtggtgggcgcctgtaattccagctacttgggaggctgaggcaggagaattgcttgaacctgggaggcagaggttgcagtgagctgagatcgtgccattgcactccagcctggggacaggagcgaaactctgtctcaaatttaa

SEQ ID NO: 52130 - DNA, 502 bp, Homo sapiens
ttcaacagagaaacatgcagggaaggagaaaaggtaaatgaacaaatagcaagatggtagacgtacacctaaagccactgaaagtaacagcaaatgtaaatggtctaaagattccaaataaaaggcagaytgttagactgcataaaaatgcaaatcccaaccatatgccgtctctaaaaaatacactttaagacacaggtaagttaaaagcaataggacaaaaagagccaaaaccacacaaatactaaatataagaaagctgaagtgctatggtgatatcaaagtgacttcagagatggataaatgacatgaaagaccattaccatgactagaacaagatgaaagagaaaatcctaatagttctatgtctaaagtaatattggtaattaaagtcaattgtaattggtaagaatgctgctaattacagtaaattggtaattaaaagccttcccacaattaacaacagcaacaaaccccaggcccaagtggcttcgctggtaag

SEQ ID NO: 52131 - DNA, 587 bp, Homo sapiens
tgccaagacaggtccaggcaagctgcgagggactgagtttgtcccgtttgttgaagtttccctttctttgcacatttcatccctccttagcaccttgtccccattttcaggcaagcctgttatatgccccgaccaaggctgtctcaggttggaaatatacaccctactcactttcctgatgttgccgtttggttgcagtgactcgagagccagctccagaatgtccctataatagaagcttagggacagacatctgcatggaagtatgggaagactgtggctaagggacttttcttgaggctcagtttgcaaagcagaygtgctctttttacctagggggtaatgtttaggctgtcactgtctgaagacaagtgggtgggattcataaccaactttcttctcttctataaaacagtcatggcagctgaaatggtagttccacccaacccatgggagagggccggtgcaccagccgagagaggaaggagtaagccacaggctgagtgcctgtctgtctgagagcacaggactgtgccccagctgctttctgggacactgggggacagaacaatctgtgtcacaccagg

SEQ ID NO: 52132 - DNA, 557 bp, Homo sapiens
ggatggtctcgatctcctgacctcgtgatccrcctgtctcggcctcccaaagtgctgggattacaggcgtggccaccgctcccatgacaggccttttaagtgcctatgcctggaactggcacagtgatgcttctactgcattctgtcatttaaagcgagtcacagacccagcctagattgaaagagtagggcactgcacaaaggcatgaatgctgggaggggcagctcattagtgaaggccactaatgcaacagattaccactaacagcacagcagcgcaggtcttcatagagtagttatctgaaaatgaatcatctttaaatgttggtgtgggggcaggacttctgagatgataaagagaggatctacaaaagctctccccaaaaggcaatgataaaattggacaattgtcaatagcaaccattttgggaccatacacattaactaaaaaaaaaaaaaaaaagaaatgagaaggattcagtcaagaaaaattactgaaattcagtaataacagtgggagtctatgttacttttgtctgggactgcttttgttctct

SEQ ID NO: 52133 - DNA, 557 bp, Homo sapiens
ggatggtctcgatctcctgacctcgtgatccaccygtctcggcctcccaaagtgctgggattacaggcgtggccaccgctcccatgacaggccttttaagtgcctatgcctggaactggcacagtgatgcttctactgcattctgtcatttaaagcgagtcacagacccagcctagattgaaagagtagggcactgcacaaaggcatgaatgctgggaggggcagctcattagtgaaggccactaatgcaacagattaccactaacagcacagcagcgcaggtcttcatagagtagttatctgaaaatgaatcatctttaaatgttggtgtgggggcaggacttctgagatgataaagagaggatctacaaaagctctccccaaaaggcaatgataaaattggacaattgtcaatagcaaccattttgggaccatacacattaactaaaaaaaaaaaaaaaaagaaatgagaaggattcagtcaagaaaaattactgaaattcagtaataacagtgggagtctatgttacttttgtctgggactgcttttgttctct

SEQ ID NO: 52134 - DNA, 557 bp, Homo sapiens
ggatggtctcgatctcctgacctcgtgatccacctgyctcggcctcccaaagtgctgggattacaggcgtggccaccgctcccatgacaggccttttaagtgcctatgcctggaactggcacagtgatgcttctactgcattctgtcatttaaagcgagtcacagacccagcctagattgaaagagtagggcactgcacaaaggcatgaatgctgggaggggcagctcattagtgaaggccactaatgcaacagattaccactaacagcacagcagcgcaggtcttcatagagtagttatctgaaaatgaatcatctttaaatgttggtgtgggggcaggacttctgagatgataaagagaggatctacaaaagctctccccaaaaggcaatgataaaattggacaattgtcaatagcaaccattttgggaccatacacattaactaaaaaaaaaaaaaaaaagaaatgagaaggattcagtcaagaaaaattactgaaattcagtaataacagtgggagtctatgttacttttgtctgggactgcttttgttctct

SEQ ID NO: 52135 - DNA, 543 bp, Homo sapiens
cttatttatttatttggaacctctcaatcagaggtccccccagagtggtctcaaacccctgagcttaagcaatcctccctcctcagcctcccgagtacctgggattacaggtgcatgccaccatgcctacctccctcaagtcttatcctcagcgaatgggatgataaaatccaatttctgatcttcttaggaaggaaccaggccatggagactcctacccaggttctgacaggtcctccccgattgtgtctttcyggatgtctcttcagtttcaattgtgggaaagagatgtccagcggaatgtttaaggatgaatacatgcagatacatcaaaaggactttatgaatgctagagagctccttacagccaactcacaccgcgtagagttcttccatcatgtgtcttcttagctgtgactcacagagctttccttgcgcagggcttctaggcatggtggcccacatgatgtacacaaccatttttcaaatcactgtgaaccttggaccagaagattggaagcctcagacctgggactatggctg

SEQ ID NO: 52136 - DNA, 542 bp, Homo sapiens
taaaataaacacacacacacatgcacacactggacggcacccctttccaatgccgctgcagacatttgagtcctgctacaagtctaagaccacagaagccactgatcatcagaaccagcacttgtatggcagatgctaggctgggcaccaggcacatggacccataccctggaacattctgtgggacatgggaaattagtgtcaacaggtagcatgacaactagaaaagtggacttcacatatggcaacaattcagagaggaagggagaggagagaagggagtcgagggaacctcyccaagggaaaacttgtttatgatatgctttccttgggggttgtggggaaatggctttcctagaaaatgatgatactggagagaagtcagggccagctcacaagggacccagcccaagctaagcagtttcaccctcattctgcagattaaaaggagtcagcgaaagctttcaggcccagcagtgaactgatcagattcgcgttccagggaaatggctgtgctgaggacagacggagggacctggcag

SEQ ID NO: 52137 - DNA, 552 bp, Homo sapiens
acacatccagagaataacaaaaatgattaaatggctaggaaactggtgtatgatattgggctacaagaaaaggccaaaagacctgagattatttcatctggaaaagagaagtctgaggagtaatttaatagtattcaggcacacaaggagttcctaaaaggaaggcagttgcctgaaagcttccaaaccttccatctcctctgaggattaaataagaggaaatgagactaaactgtagcaggacagagtcttgtctgacataaggaaaaatttctcaacagtaaggccagcacgcagatccaatttccctgcagtacgtgataacatctgctggaaaaattctatcagaaggactcccgatttcccactggcatcctggcacttacaaggttaaaaatggagcagcaaagscagacaggaacatgtcatgtcaccaaaacaagctgagttcactcaaccccagaagccaaggttgctgtttcacagatcacagacccccaaactaggatctgtttctaggagatggaggggaggaaaaagaggagggaagga

SEQ ID NO: 52138 - DNA, 430 bp, Homo sapiens
cctttccccatcctctatccctcccaacccaccatgtatgcacatgtgcaaacatacacatgtgggccacggcctcattgttctatgtctctactcatgctgcccctcagcctgaaatgccctttcctcttcatctaccttcaaattatccttttaataacctgctctaccacrggctactcttgggagcaggctgtcccctgcttcgtgctccccagtacatgtctattatggcacttaagctgcactgtcgtcatttaatgcttccctgagtctccaacaaaactgtgagctccctgatggcaaggctggtctgtacatttcttgaaaccacagatcaaagaaaaactacaaagagtctgaagtcaggcataccacatttgaatcttggttttgtcaaggatcttatctgcgaaatgataatggtata

SEQ ID NO: 52139 - DNA, 430 bp, Homo sapiens
cctttccccatcctctatccctcccaacccaccatgtatgcacatgtgcaaacatacacatgtgggccacggcctcattgttctatgtctctactcatgctgcccctcagcctgaaatgccctttcctcttcatctaccttcaaattatccttttaataacctgctctaccacgggctactcttgggagcaggctgtcccctgcttcgtgctccccagtacatgtctattatggcacttaagctgcactgtcrtcatttaatgcttccctgagtctccaacaaaactgtgagctccctgatggcaaggctggtctgtacatttcttgaaaccacagatcaaagaaaaactacaaagagtctgaagtcaggcataccacatttgaatcttggttttgtcaaggatcttatctgcgaaatgataatggtata

SEQ ID NO: 52140 - DNA, 603 bp, Homo sapiens
gcacttagcctagaccttttgtgtcttcaagtttccaagttctaagaacagcatggagccctgctatgttagagagggaacacatctgagagatgagaatgagtatatctggaagatcacagatgtaacaggaggcttagcctaaggaaagcaccaactggataatgagagttaccaagaaaaggtaatgacagcatctcaaaaacaacactaaagctattatgttcaataacttgtataaatgctttataagtgtatcccaaagcctacaaacaacatctagctaataacattcaagatttgtacgttccttatgtaagttaaagtggacacattgggtgttccaatgcagaagaatacagagaaatgccacrggctgaatatttgggcaaagactaacattctcttgctgacaaacatgtctttgtattttgacataaacttcttatgtgcagattggttctgtggaaattacaaactttttgaagtcaggggaagggatgaaagtaaaattaaaaattaatcttttctaaggaacgttgtaaatctaatagacattaaataactgcttgaaattctaatcagataaaaacatctagacca

SEQ ID NO: 52141 - DNA, 632 bp, Homo sapiens
agttaccttgcatgaacctttattttagcaatatccttattaagcttatatatatatatatataaaattgtcttttcagcaagatagatatatacctatatttatatcttcatatatatttatcaaatatatatatatatattttttttatttatatacatttcttgaaggtacttcttgtcctcctgaaccaaaagttcattactctctatcttgttcagccacacacagattcaaattatataatggataaaaattattcacatgtttttcaatgatcaaatcctcaaaatattgaggaaatgatttagcatttartttggaaagccactgtgactccatgtttgtaaatgccatagttacctcaaatctatctttgtgttgcattctttctagctttccccttaagactttaaaaaattgttatttactctcttcttaaaaattatttttaattaatattacattggtaaatcactgtcatctgatatataagcttttatcacccaatgtaacactatcacactgaactagaatatttttcattctctcattgaaccatcagtgtttgaatttagtcaaagcctggaaaatgaatcctgagggaataaatacttcgcatagattacctt

SEQ ID NO: 52142 - DNA, 632 bp, Homo sapiens
agttaccttgcatgaacctttattttagcaatatccttattaagcttatatatatatatatataaaattgtcttttcagcaagatagatatatacctatatttatatcttcatatatatttatcaaatatatatatatatattttttttatttatatacatttcttgaaggtacttcttgtcctcctgaaccaaaagttcattactctctatcttgttcagccacacacagattcaaattatataatggataaaaattattcacatgtttttcaatgatcaaatcctcaaaatattgaggaaatgatttagcatttaatttggaaagccactgtgactccatgtttgtaaatgccatagttacctcaaatctatctttgtgttgcattctttctagctttccccttaagactttaaaaaattgttatttactctcttcttaaaaattatttttaattaatattacattggtaaatcactgtcatctgatatataagcttttatcacccaatgtaacactatcacactgaactagaatatttttcattctctcattgaaccatcagtgtttsaatttagtcaaagcctggaaaatgaatcctgagggaataaatacttcgcatagattacctt

SEQ ID NO: 52143 - DNA, 605 bp, Homo sapiens
ttgactgacttaccttgtccaataactttaaatatgaaatatttagcagataatgaatgagatgtacaaacataaatgttatattgccaaatatccacatattagactacttttacacataaccacaaccaacacaattagggagagtttcctcttattttcctcttgattagttttatatttttttttctttttcagatatctgattaatttcaaattactttttatcagggagcacaattgttggacaacatcttgtggacatcagaggtctgttcattttaactcctcatcttttacaaaaaggttagtaaaaacatttccccattgggaacctagtgggagattttttcagatcagtaattttacctaccgttcatggagctagaaaataattcaatgtgcttcaagtagtcttacaaacagaactaggtactcttctattagyagaaactaacgatttatggcattagcctttgtgttgtatgtcaagttgatgtttttatagcctgtacatggcttctgtctgtacagtcatgcatccctcaagaaacggatacattctgagaaatgtactgttaggcgattttgtcattctgcaaata

SEQ ID NO: 52144 - DNA, 1882 bp, Homo sapiens
tttgtgagagagagacagagaaagagagagagaataaatagattttcttgttatgaatagaaatcaattttgatcagaaaattctttaaaccaaaattttctcaagcatcagttgggcaaggcaatcttctttcagccccatgcgtccttgtacatacttgctgggtatgccaaaaatgcaagaccttgacctgtcttcttaacctgaagcatttcttaggattgcatttgtccttcaggcttgctttgtgcttactcaaaaagcagtagatttcccaagctcccatttgtcagttgtgatgatgcaaacccactgcatgcttggtatcctcctggcctgttgtgcctcccttgtggaacctggtgggtaggggaatcagtgcagacttgatgctcatgctgcttgctgtgctacttgcttgtctctgacccaggagacttgtttcttctgccagtatccatgaaacattgacaagtttactaggggaaaatcccagacccaatagtgtctcagaaatgaaattggaaaatgtacatagtaaaaagggcactaatgagaggggcatagaagagaattttgtgttaagaatgtctttctttttaaattttttgagacatgatcttgctctgccccccaggctggagtgcagtagtgcaatcacggctcgctgcaaccttgatttcctgggctcaagggatcctcctgcctcagccttccaagtacctaggactacaggtgcatgtcactgtgcccagctaattttttgtattttctgtagagaagggatttcaccatgctgatcttgaactcctgagctcaaaagatccgccagccacagcttcccgaagtggagggattacatgcctgcaccaccatgcccagccaagaatatcattcttgacaatctaagatgcaaccacaatatagctaatattttttttcaatccaccgttttcttttggtataaaaatcttcagtggaaccaaaattagttacaaaatactttcaatgtaattagatataacaaatcaaatcttttgtactgaggtattgttacatgctagccttattcaaagaaaatattttataactactttgacagcaatttagaagaaaaatcacatctggaaagccttttaaatgaattaaataacagcatattttgagctatccaacatcaagatgatattttataatttgattgttctgagcagtattgatttgaaggttgaactgtctccttactgaatatagtatggaataataaaacacctgtaatataattttaccaatccaatttttcttttatgaacagttttggagacagcaagcttaggttgaaagcactggattgcaggtactcagcatggaacctaaagtatctccaagaactgcaataaatatattaatatttggagatagaagattctgattcctctgtggcctcttaaattaggtgcaaaatgatattctcatgtttgaacttttaaagaaatgctgtcagagctatttaacatctgttaaactatcttttagtttaaaacaaaaatgactgtatattgatttctgtcccaaagattatgctaccagaaacacatgctattttataaacagggaaagaaaataggcattaaaaaaaaagaaagcgtgggccatatatttgaaaatattacattagtaacaaaaatgagaagaatctttcagtccattaattttacattttgcatctcttagtatttgcgatgtttatggctcagaactcttatttcatcatgaggaagggcctaatggggatcattgcacacaataataatgagttcctggcttaatttttcttacacattttctgtttatccctcrttctttttactctgtggttta

SEQ ID NO: 52145 - DNA, 535 bp, Homo sapiens
tgaatggtaatttattagtcacagacacaatccagaggaagaggacactgcccccctacacagggccacttgggaacagagtgaacaagcaagggctgtgggaggcaggttttgtaatatcaggagagtgtgatgttctgtgcttcacacaggaaggggtgattgatttgaataatgctgtggtctggcagggaactgaaacyactactcagggataagcaggaattgcacctggttcctttgataaggaaggtcgttaaacctggagaccttatctgtgggagcggagtggggagtggggaactttgtggctaagctatttgaggcctcccgattttgccagaagtcaaggcagcacaaattttggaccttaagtttagggctcacatgacactcttcttgttcttccatcctctcagaggtgatctaagtttgtggcagtgctttcaaatcttcctggcagttgggaagacacagccacttcccttatctctgctgtgggtgagctggcctcttctggttagcctgctgttca

SEQ ID NO: 52146 - DNA, 535 bp, Homo sapiens
tgaatggtaatttattagtcacagacacaatccagaggaagaggacactgcccccctacacagggccacttgggaacagagtgaacaagcaagggctgtgggaggcaggttttgtaatatcaggagagtgtgatgttctgtgcttcacacaggaaggggtgattgatttgaataatgctgtggtctggcagggaactgaaactrctactcagggataagcaggaattgcacctggttcctttgataaggaaggtcgttaaacctggagaccttatctgtgggagcggagtggggagtggggaactttgtggctaagctatttgaggcctcccgattttgccagaagtcaaggcagcacaaattttggaccttaagtttagggctcacatgacactcttcttgttcttccatcctctcagaggtgatctaagtttgtggcagtgctttcaaatcttcctggcagttgggaagacacagccacttcccttatctctgctgtgggtgagctggcctcttctggttagcctgctgttca

SEQ ID NO: 52147 - DNA, 535 bp, Homo sapiens
tgaatggtaatttattagtcacagacacaatccagaggaagaggacactgcccccctacacagggccacttgggaacagagtgaacaagcaagggctgtgggaggcaggttttgtaatatcaggagagtgtgatgttctgtgcttcacacaggaaggggtgattgatttgaataatgctgtggtctggcagggaactgaaactactactcagggataagcaggaattgcacctggttcctttgataaggaaggtcgttaaacctggagaccttatctgtgggagcrgagtggggagtggggaactttgtggctaagctatttgaggcctcccgattttgccagaagtcaaggcagcacaaattttggaccttaagtttagggctcacatgacactcttcttgttcttccatcctctcagaggtgatctaagtttgtggcagtgctttcaaatcttcctggcagttgggaagacacagccacttcccttatctctgctgtgggtgagctggcctcttctggttagcctgctgttca

SEQ ID NO: 52148 - DNA, 413 bp, Homo sapiens
tattgaactcaactcaaagaaagaaactgagaaccaatgaaagaggaatttcaaagacactcaaacaaataacgaagcttagaattaaatagaaaatgggaaaggtctttcctaccacttaatccacatccctgcttccatgccaaactaaagtcatcacatgcccccttccatttgcctttmattgttcccattaatagattagaaaattgaggcagagactaagaagagagaattgtccagtaaaactaacatagaaatgcaatttcgtggtggcttatggtcatgattacacagagacatttactgaagaggaataaatgaggaggcatttcatatctaataacccaactttcatctctagtcacttcaagtatttagtatgtgtgaaggagaaggacactagaaaacat

SEQ ID NO: 52149 - DNA, 690 bp, Homo sapiens
ttttatctatgaatgtccgaagtcctttagaaacagaatatttaaatctcaaatgaccatttctgggttccatactcatgtggagggagaggttattttctcaagatctattcaagaattggaacaatcgtatccattttctgatgtgaattacataatatgtttctatagctctagtttgctaggacatctaggactgggcaggcctaatatgaatgatttcctagatgaccaatttcttgaagtgagcgatcacgtacactattatttctcaacaaggtgctgctgacattttgaaccatagaattcattttgtatcattgcagaatgttgccagataattaataagcatctttagctcctaccsacaaaagccaagcaatgctttccctaccttattccccaaggtactatttccatacatttcctaccacctctgggtaggtgtgctgtggttcttggttagtgccactggataggttaagcagtccttcaaggaaggggaaggtcttgaggggtgtccacagtttctaaaagagatattattgatgggaacagagctagatatttgcctgagatatcagaaagattttgaaggaggttgtgagatgaaaaggaatggaaacaaatcttattgtcagatattacatgtctgatttattggtcagacttagtgatgcatccttgcca

SEQ ID NO: 52150 - DNA, 541 bp, Homo sapiens
gacataaaagtaacactacaatcttttaaaaaagccacagcacatgtaacattaaacattaatwaaaaaaaaaaaattaagtcccaagagacagttaaggatagtaagtgctacagaagagaggaatggaccaaactaggacaaaatgagtagataggacatcacagagctatgccttgggttgggctgggaagagtaggatccagaaaggaaacagagtaacaaagctgcaagaaaaaaaacactgtccagaacaagtttaggggaggcggcagagtcaagtccagctggggttaagggtgggcatgggctttattagagacccgtgacctggagtgcacagcccagctcttactagctgtgagatcttgggcatgtgacatctctcagtggcagtttcctcatctgtaagcccagaatgataaaatacctattctcagggtcataattaaatgacatttaagtattagcagagtgtcccatgtatagtaaagattcaataaaaaagagaggggaaggttatttcacttaatcctcaaaa

SEQ ID NO: 52151 - DNA, 579 bp, Homo sapiens
agataggaataaaatactagaaaataatagcatgttaagccagaggcaggttatcagaactgaggtgtttttaggttccttgcaatgttctgaatgagtgtggaaatattgataatttggggctttaagctagataggcatgttaaaattttaagggtaacaaggagaggaaaaaaacagtaaagaactttcaaatcagaagaaaattaggggaaagaagcataaaaagaragaaaaaattaaaaacaccaagtaaaaggtaaaaataaaactaaatacatcagcaaccacaatgaatataaatggatttttcaccaattaaaaaacagagatgtttagataagactttaaaaaaatctagccaaatgcttatatgcaacacacttaaaagaacacagaaaggtaacaagtacagaaaactatatatcaggaaaataccaaatgaaggaaagttggttttatgatatcagaaaaatacttcaagtccaaaagcattattagacttgaaaaggatcactatatagtggcaattttttaaagtttacttcaaaaatgtaacaattataaactacttcaata

SEQ ID NO: 52152 - DNA, 544 bp, Homo sapiens
gggtccatcctagaaaacccaacccactccagataatcgcgccagcctcacacctgagaagctgcttctacgacctgctgaggacataatgataaacacacacaagaggctactgtgtcccaggcacttgtcttaactcatttaacttttctaacaaccctaaacctagggttctcattttccagatgagaaaactgaggcatgtaaggttaagtaacttgcctgagggtcrccgattagcatcagagccggcatttcaaatagacaggccagctctagaggccagggtgtttggacagcctccaaattgtcaccctagccttcagggcaaggctgcacacacggcctctagtctcctacccctcttcctggcaggaggctggctctgacaggaggttgtttgtgccacaatttaaggaccaagctattctgggaagcccagaacagtctttcctttattattcatctcaattaaccattgtgttggtctggacttgggggtgcaggcattcccatctccctttcaaaaaagtttctaaaaaat

SEQ ID NO: 52153 - DNA, 543 bp, Homo sapiens
ttttttttaagaataaaaaatcttatatgtytcttattatcttgaagataattgcttgtttaatgtaataatagtaacaatgtatttggtgattatagcacatggataaatgaaatgactgacaacaatatcacaagggatgtataaaggaattcgatacattctaagtgtaatgtgtatcctcagacatcagctagtatcaaatcacataaaacaatcaattaaaaccagaaagaacagaaatagatggaagggagagaaacaaaggaaatgcaaaatttagaaagattataaacatggtaggtattaattataatatataattagtcaacttaaatattacttgtctaagtacaccaatgaagacatcgtcaaaatgaatgaaaagaataaaaccaattatatgttgaatacaaaaaaaatgtatcttagagagaggtagaggtagagcaagatacctgaatggaagggttctccaatcatcctccccacaggaacaccaatttaacagctatctacacaaaaacgcaccttcataggaat

SEQ ID NO: 52154 - DNA, 543 bp, Homo sapiens
ttttttttaagaataaaaaatcttatatgtctcttattatcttgaagataattgcttgtttaatgtaataatagtaacaatgtatttggtgattatagcacatggataaatgaaatgactgacaacaatatcacaagggatgtataaaggaattcgatacattctaagtgtaatgtgtatcctcagacatcagctartatcaaatcacataaaacaatcaattaaaaccagaaagaacagaaatagatggaagggagagaaacaaaggaaatgcaaaatttagaaagattataaacatggtaggtattaattataatatataattagtcaacttaaatattacttgtctaagtacaccaatgaagacatcgtcaaaatgaatgaaaagaataaaaccaattatatgttgaatacaaaaaaaatgtatcttagagagaggtagaggtagagcaagatacctgaatggaagggttctccaatcatcctccccacaggaacaccaatttaacagctatctacacaaaaacgcaccttcataggaat

SEQ ID NO: 52155 - DNA, 572 bp, Homo sapiens
tatcttttgttttgtgaaatatcttttgttttgtgaaatatcttttgttttgtgaaatatcttttgttttgtgaaatatcttttcaaatattttgtctacttaaaaaagtttatatgtatatatacaaatgcacacatatatacacatatgcacatgcacatgtatacatatatatctgtatgcatatatatttattcaaagtgtgtgtatgtatgcatatgtgtttgtgtgtgtatatattatacactactgaactcatctaaaatttattatgagtatgattccaaaatatctcaataccatttgtaaaataattcttctccattttctcatgctttctttgtcacataatacatatctttatataaaggcttgtttatttcttatataatttcaactttaattttagattcaggggtacatgtgcgggtttgtcacatcctagaagacaacctaagaaatacccttctccatattggtcttggcaaaraatttttgactaagtcgccaaaagcaactgcagcaaaaacaaaaactgacgtgtgtgaagtaattaaacgaaagagcttct

SEQ ID NO: 52156 - DNA, 573 bp, Homo sapiens
aacatattttcaatgtgtatagaatttccaggttcggtttgtttcttttagttgtcttaaaagatgttactccattgtctcctgggttacataatatttgattatcatttttgtgtgtgtgtgtgtgtgtgacagtctcactctgtcacccaggctggagtgcagtggcgtgatctctcctcactgcaacctccctctcctgggttcaagcaattctcatgcctcagtgagtagctgggactacaggcatgcaccaccacgcccggctgatttttgtatttttagtagagatggagtttcaccacattggccaggctggtcttgaacccaacctcaagtgctctgcccacctcccaaagtgctgggattacaggcgtgagccaccatgcccggccartatttgattatcattctatcgtttttatctttgttctttaaaataagtcttggtttctctgactgcttttaagatttcacttaatcactggttttttagcattttgattataaacagccttggtatagttttcttcatggttgttgggcttggggtttgctgaacagcattttgcc

SEQ ID NO: 52157 - DNA, 569 bp, Homo sapiens
tgactccactatttttgataacttttttgctttctcctataacaagatgtttcaggctcatcttgtacagtttctctcctagacttcaagtcagctattgctttggatagtcctggttccttttaatggagaatctaaagattgaaaggaccttgaagttggtcattgtttatagttttgtgttttcttcttttaaaaatatgtcagtattacttattttttaaattttggaacatattatacaaatgaaaggttatagatacccagtttaaagaataatgataaaacaaataccagtacacccaccaccaagcttaacaaataaaaccagtactttgaagaacctgtacccaattgtaaccatctcccagccacctgaaggaaaccgttatcctgaattttctgtgaatcttttctttttctttttctttttcttttttttttttttttgagatagagtctcactctgttgcccaggctggagtgcaatggcacgatcttggctcaccacaacttctgcctcccaggttcaagcagttytcctgcctcagcctcccaagtagctggga

SEQ ID NO: 52158 - DNA, 537 bp, Homo sapiens
tttttggttatatgtctgttgcaaaatcccttctctcggtttatgacttgttttttcaccatctttaggtatcctttgaagaaaattgagttttaatgtagttaaattttaccagttttgtctttatggtttgagccttttatatcatgtttaagaaatcttctataccataaaattggtatatattctcattattttcttttcaaaggttttaaagtttacttttcattttgaagtctgtaattcatctgaaacttaatttttgtgtatggtttaagataattataaatattatgtattcagcatggttattaaatagttactgtgctcttatttcatttaaaatcaagcttgcaagtagaagtctcaggcaacagattaaaccagcagtgactataaagctacaccttaatcaaaatggagatcacaacaccaaagttctgcagacagacccagccaccctgctccatttggttcawcaactggaacaagcattggaagagatgaagacaaatcactgtaggagagttgttcgca

SEQ ID NO: 52159 - DNA, 1805 bp, Homo sapiens
ggaaggattacacgtggctgagagcggaggatgtgtgccctgctctaggaggagaacagctcggccaaacctcaaagccccactagggacctcctggtaggacgtgagcacatgagcacaagtccatgagctgatgcctgctaacagtgcggcagggaagggagggggaagacatcaatttccttacaaaattaaaacyggacatgctcttcttcccttgttaggacaattccagagcagttacagaggcttgtttgtgagaaagcagaggacttcgggagccagctcttctgcaccagtaacacagtgaataaacacgtgctgggcttggggaaaagggtggagctcaactaatgccagatgcacaaacagaacaaagaaggaggctatgaactggccagcaaaatcttctatgagaatggccccaagataatgaaatttaagatcccaaagaaacgaagaaaggaaactagtaaaagtagggaaaatgaatttccagaaaactgacttaaacaagctgtgaaggactgtagcaagggtgcagaattacaggcttagaaaacagagacattgaatagaatgggaactgctgatgggcatagtctttagcatgtcctgctccagaggggagtgagaagaaaagagacttaaatggagtgtttggacactggactgaatctgtagaacccgtgtctctagatacgaccattatgtttggaaataatctatcaacatggcttggcactagaatttttttaatgaccctctaagcttccttgcacttttagtatttgctacttcatagtaccatgctattccatgtcttccttatggaacttttccccagtgtttcctaaaaatatttcatatacgagttgtcaaaaagactcagaatggaagtattgggggcaagatagcaagggagatggcaaagaatgtgatacggatggaaaataagggactaaatcaatgagcaaacttttatttttctcctggtattgcggcatactgttgcatgtcctgtggcttttaaatctggttaagagattttccactcctctaggaatttcacagacatttcactaaataaatatgatttgggaattaaactagtactcctaagctattaaaaaatgggcttcgcctcttccaaaactttctcttcagagatggaactaagcttttgtcaaaaggtaatggaaagaaattgctagaaaattcatacttgaggtaccagtaaagccatttggtatctagttactgaatctaaaagagctaacgcaaagacattaaagttctgtgagtactattccaaaggaaaacatgagctggttaatgtttggcttattctgttgttaaggagccaccgtcaccaatatccactggaatgaccaggtaagaacagacttatcacatatcagatagatagtttttcttttatgttttagctatgtgcctctactttcttttgccagtacaaatttttgagagacttttagcaacctctgatggacctgatgggctttttcttcataagctttctatgtccccaaagtgattttccttcagattcatttagaggaaagtagaaccgtcctgaattcatgctgcagcagactgggtggttactcctcaggcaatctgaaatgaccagagtacagcctttcagtattccagccatatctacagtaattatttgccagcatatctaaaagaaggcaggcatttcctgttgcacacaaatgggacattcttatctaaattactgtttaaacaggtatttaagaaaagactatcacagtcag

SEQ ID NO: 52160 - DNA, 586 bp, Homo sapiens
taaacttgtttttaccttatttagattatatggtagagataattttatgccctcctttcttaacattatcataagcatttttcttaattgtttagttatgcattgtgtttattacaaaaccagcatggaatgctgatgtgaacagtagaataaaatcagactgtgtaccacacctgactccgccattaagtatttgtcttttttttttttttttttgagatggagtctcactctgtcgcccaggctggagtgcagtggcgcgatctcggctcactgcaacctctgcctcctgggttcaagcggttctcctgcctcagcctttcaagtagctgggactatagtcgtccgccactatgcccggctaatttttttatttttagtggagacggggtttcaccatattggccaggctggtctcgaactcctgaccttgtgatccacccgcctcacactcccaaagtgctgggattacaggcgtgagccaccatgcccagcctttgtcttatttttaacaggaaaacttctctgggcctttccccatctggtagaagagaggatcartttaacttaaattatctccaaaatc

SEQ ID NO: 52161 - DNA, 2353 bp, Homo sapiens
gactgcttcctccctctggatgcattcttaggtgtactagagactataaatcctttgtgcactattttttccatcttcaaattcctctgggtagtccttaatacatactatttcatcacccactcactccttaatccctcacaattggcttccgtctcctcgcaaattaaactgacctttcaaagctcatgtgataatacatgctaggtgcttaataaataattgttgaatgaatgttaaacacatgaatacatggctctaatcaccaaatcaatgatctgtaatcagtttccatccttgacacatggtcagtcaggctcacggctctgtccttgtcttctttaatgtagaatcctggtttttctcctcttttagaggtttctctatgacccctttgctgaccactcttgaatatgttagtctgcacaatgtgtaagggttctggtggcagacaaagttggcattcaaatcaggccattgataatttattgctgtatgacttaggacaaattatcccttgtcactaagcctcatttctttatctatagaaaagaaataattatagcattgtttcaaaggttgatgtgctacttaaatgccacagcaaagacaatacatgttcattaaatgttcatattagtggttcaatggacgtaagcttcctatgggcagtcaccacgccatttttcccaccatcatgattctgtcttcaaaacctgcacaggatttgtcacaaggtgcttgaaaaaatactagcagcgaatgaatgagcaaatgcatcattctacttctcttaatgaataatctttcccacgaccttggctttagctctcttcactctttcccttgctaacctaacttattctctaatgacctgttgaccttattcattcttcaactctctccttcgcatagatgactgctaaatccaaactaaaatcgacttggccccttgtgatctacagatccagatgtgttgtcttttagacacttcccaaaataacttttccagagacatcactttgagactttaaactccctgcacttaaaaaagaatgattatctccccttaatccatattgttcactcatatatattcacttcttgtatattttatgtattttattatacatttatatttggaatggcctctaaagagttctacctgcctatttgtttattagccttaagatattcccacttgcaacatgttcttcttactaatgtgtaagccttcatgtattagcaacctccacattgacaaccaaaaataatgataatattaattttttaaagtccatactccttttggggcctgtaaattgacccttattttactagaaaactttttttttctgagacagggtctcactctgtcacccaggctggagtgcagcggcacaatcatggctcgctgcagtctcaacctcccaggtccaagcaatcctcctgcctcagcctcgtgagtagctgggaccactggtgcatgccaccatggctggctaattaaaactttttttgtaggaatggggtctttgtatgttgcccaggctggtctcaaagtcctggcctcaagtgattctccctgcctcagcctcccaaggtgttaggatttcaggtaacagccactgcgcctagcagaaaacctttatttatgtaaaaaatatttctttattaagcaagtcacatgtaggtaagtttctattgtgaaaaatcatagcttaagcaacacagatgtgtcaatgtcaaggcaacatctccacttcattactgcagcttgccccattctcactgctctttgacaaatttatttggttccgtattatcagtttgggataaagcttttccagatcttttgcattcattctcgarcatttgcatatctggtttttacttaatgtaaagggggccaagctgtatttattaatgggaagctatatttttccctttgttagtatatcctggaggtgtgctcatttagatcttcctcatcctaaagaattactgcatcatattctccagtgcggatacaccacaatatagacagacctctattaatgaatgcttaaacactaccttgctatgtttatttcccatccctctcatatgtgtgatcttttaaccaaataaaaaagcccatttcagacttttctatcttgacctctttgtgcatgcctttcttttccgattcctttcagtgaaacgtctgcttatcctccaaaactcagctcaaatgttaactccatgttctgtccatcatgctatgctaaaattgatgtcttacacctcttactcttcttcttcaatcattcaaggacaggctctaatgtttttatactcccacagagctaaa

SEQ ID NO: 52162 - DNA, 594 bp, Homo sapiens
gtggcaattaaaaacaagatattctgaagagaagacaaagtttgtagaatatggaagtgtaaaaaaaatagtgcttagcagagcatggtaagaagtgggatggaaaaggagagaagagggactggtgggaattctgatgaagcttttgatctttacccatagattttttattttagcctatagacaatggagaggcactggagcagtggctcttgattgacaggggatggacctcgaaaaaatacatgcatctttttcctgggaaaatataccatatgcagacatatgatatagattcctttgatccccagcacacaaattatatccaagttcccttaactcctgtgtaagatacytgaaatacaggttaaagcaggactacaacaagatcatatttttgtcttagaaatgccatgatggaggatgaattagaaaggaaatagactggattatagttgttcttatctcactgttctttttaaaattaatctctaaacctattatagtctcctccttatactatattttcctggagaactgtgataacagtctctctagtttgtttttgttttttccataccacttcttactcaa

SEQ ID NO: 52163 - DNA, 657 bp, Homo sapiens
tacgaacttattcaaaacagtaatgatattctattttagccagctaatactcaactacgatttgcaatttagagagttgtgcttgtatagattgtccctttctgaagtgagtgaattgtaactttaaataagggctgttaacacatcaaaatagtttttaatcagcctcaaaaattccccttatttccaagtatcttatttttactatttcattgatgtttcaagtggaatcaaatattccaactgttttccactggaagaagatgaatttcagrtacaattcagtagcaaagaacacccatgttttcaaaataatggagaaatttttttctcatatgaagttatgattaaatttgtgaattgcacaagcttggaattctgctgcaggatgcctacattctgtattgctttattttggtcatatattacaaatggaatatttcccagctcatttatatacagttcctggttgctgaaattttactggcaagctttgtgaactaattttacttctcaaagatactaggaataaagtgaaaatagggtcttttctctcataggtctaaaagatacttctttcctttaaccattacattctggaggtgtaattaatccaaccctgctgtagataggatctcattataaagattctaggta

SEQ ID NO: 52164 - DNA, 611 bp, Homo sapiens
tgccttaaagtattgtaggccttcagtgctgtgcctcctgtgcccctgcacagcacgcgtagcccttgccctgtgagccaggccggccacactcaccaatgatcttgcggtcgtaccagccgccrtggtccatccactggcgcaacagctcgatgggtggctgtgcaccgtaggtctccagggccggcatgttcaggtcatcgatgaagaagataaagttgcgccccagaggtggtccaaacacacccttccgcctgaggggaggggctgtgtgagcccagcacccacaggcaccaggtcctctgagaatccaggggcgaacgggtggcagctttgcctctgggaagcccttgctaaattttagcctcctccaaattgctagatgccttgacccaccctcatccttgttctgagtgtcctgggacagctgggacaggctgacctgagtctgagctccctcaaagtgagtctcgcctcccaggcagatggacaacaggcttctcacagacagacccagggccctgtccaagggcacagccagggcgagcacccactcgctgactggctttgtaggaatttttgatacagggaaggctctggagcagtctgtg

SEQ ID NO: 52165 - DNA, 528 bp, Homo sapiens
tgtgatagatgtgatacatgatatcatgtgatacatgatatacaacatgggcatgttaacaatcatgtttttaaaaggtggtggggagagtaatttttttttwaaaaaatggatatcattagacagaaatcataaaatatctatagaacaaaaaaaagtataattacctcagtatttactacctttttattgatgaaaaaaaacccaaatgggtcttgcatcattttttttttatgatgatattgatacacaatggctgggctcctggctaaactccatccccaagcctggaaccttggctctaagtgaaagcagctgaccccatttttcctcccaaatgactgttttttgtcccgtcctgccccctatcctgtgcccataaaaaccagacaaactggcagagaaaaaagaagaaaagagcaacacaagtggctgattcaagtggttggggatgcaagctgctgagcattgggaatacaggctgctgaacactggggatacatgaggctgagcattggagactagcaa

SEQ ID NO: 52166 - DNA, 535 bp, Homo sapiens
aacaggaagagaggataataataattaccttcagatggtgggtctaggacaatgtctctaagaaagtaagtagcatttgtgctgagtcaatgaagggycagctatttgaaaagccaaggggagggcacagcgggaaaaggatcaaggcagtacccctggaggatggttaggaagcgggagaaaagccaggaaaggaggacagaaggaaagaaggagccagacactgcaggtgcataagatgtttagcttctattccacacgcaaggagaagccacggggagtgctgagcaggagagtggcactcactgactcaggcttttacaatgacttgactgctgtgtgtagcctgttttctaaggtggcctgagaggaggcagagaggacaggacagtgagagaaactgccaacctggatgagaaatgacatttgcttggatttgggtgaagcgcagtagaggcaggagaggtaggaagattctagctacgtgtttgaggaagaacagatgggacttctttataagtgaatggatgagggg

SEQ ID NO: 52167 - DNA, 535 bp, Homo sapiens
aacaggaagagaggataataataattaccttcagatggtgggtctaggacaatgtctctaagaaagtaagtagcatttgtgctgagtcaatgaagggccagctatttgaaaagccaaggggagggcacagcgggaaaaggatcaaggcagtacccctggaggatggttaggaagcgggagaaaagccaggaaaggaggacagaaggaaagaaggagccagacactgcaggtgcataagatgtttagcttctattccacacgcaaggagaagccacggggagtgctgagcaggagagtggcactcactgactcaggcttttacaatgacttgactgctgtgtgtagyctgttttctaaggtggcctgagaggaggcagagaggacaggacagtgagagaaactgccaacctggatgagaaatgacatttgcttggatttgggtgaagcgcagtagaggcaggagaggtaggaagattctagctacgtgtttgaggaagaacagatgggacttctttataagtgaatggatgagggg

SEQ ID NO: 52168 - DNA, 1720 bp, Homo sapiens
ggatttcagttcatttccaactacaccacaccccgagccaatcacttaagccaagtactttcacacatcaatttgagtgttaccacctctaggaagtcggtcctcattagccccaggtagagacagttgctctcatttgtgcccaagccatccacaaagctctgtcagggcatctctgacacttcattgcacataattactgttgagtttayttccctcctctggagaagccaagggagaataagaatcttgtcttactggttttctcacccatagcatctaggatgatgtttaactgacgttgaattcacagacatactctatatcatctaagaaaacccctgacggtaaagtgggatgtatgtcatttgtttgttttatgcagagaaaaattcagagaggttattttcagaggtctgattttgtatctacccaagaataaatcccaatgatgctcattcagtagtttagggatttccaggaataggaaaacatcccacatgttctgtcataaaatgcctcgctcatttctccaaaccttcccatcttgaatattctttccatttttctgattttttttgagacaaagttttcactcttgtccccgaggctggagtgcaatggcgcgatctcagctcactgcaacctccacctcccaggttcaatcaattctcctgcctcagcctcccaagtagctgggatttacaggcacctgccactatgaccagctaattttttgtatttttagtagagacggggtttcaccatgttggccaggctggtctggaactcctgacctcaggtgatccacctgcctcggcctcccaaagtgctgggattacaggcttgagccaccatgcccggccatttttctgattattaaagctattatttggtaacagaaacagagacaaggaaagactacataacttgactccaccatatactcttagaacatacaggggccaggatttccttggacagtccacagcatgggcttgcacactttcataatcgagccttcatcttgttttggtgcagaccgagtatcaggcctgagaaagaagaaccgcttaaagaggaattgttagtctcctcatttacgggaggaaatccatctcaaagggggatcaggtaacttcccaagtaatggctagtaactagtaaaactagggttctgaacccagatgacctgactccacaggtagaggtcttcatggttgatccactgcctctttaaattcccctttcaaagtccaagagcaccttctttcttataattagactttacagaggaagggaaatccgcagttgtgccaaggctaacaccagctaccatttattgagcacggactatgttccaggaagtgttctgagtattttaagcatgttaccacatttcttccccactttcagcctgtaaagtagatgttgctctaagcataaaagattcttccttaattctcacaaccaacattgttatgaaaatcatggaggttttaactcagaagtataactcttttatgaaaatgtgcacagaataagcaatacagtagagaaagactcacaactgtaacattccggataagaaagagaattctggactttcatttttttttttgagacaaggtcttgctctattgcccaaactggaatgcagtgtcatgatcatagttcactgagcattgacctccctggcttgagcaatcctcccacctca

SEQ ID NO: 52169 - DNA, 2252 bp, Homo sapiens
  misc_feature (1)...(2252): n = A,T,C or G
aaccggggggggttaaactgctcaaagttctagacaccagtggcaggatgggtaccaatggtgctgtgacacagggtccactctatcgtggtagcaggacagagctgaggaggcaatggcaagacggggatggcagtggcattaaaacccacaatggccatgagtagttttctcaaggatgaatcaggtggaatagggtaactgattttaacaggggcagcataatgaagtatgttctgtggtgaaaaataaaacaaagaatcacagaacaaaaggagggagggaagaaagagatgacctaggcaggaatgggacaaggaattggactcttatcacaacaccctgcaagacttctggaaacagtcaaccgcagggatttctaacaggtnnnnnnnnnnnnnnnnnnnnnnnnnnnnnnnnnnnnnnnnnnnnnnnnnnnnnnnnnnnnnnnnnnnnnnnnnnnnnnnnnnnnnnnnnnnnnnnnnnnntcttgcttttttgacatactaattataaggttacctttattacagggatgtttatagtaagaggctctctacaattgaaaagcaaattagtatatctgtttttaatggaagggtacatcactcacaacctgtcagtttctagtatcaatcacctgcttccaaagagtggcagaaagcaaccaagtgcttagcaaaggcaacacataaagccagcacctaagaatctggggtatctagcaccatcctagagtccttgagaaaataaccacttgttcttaagaggttagataaaattctacctgtcctaaagaaagctgacacgacaaaagccccaaacacactgaacagataaacaaaaatgctcataacttactttaatcatgtgagtcggcttacccttgaaatccttaaagaatttatacaatttaactcaatacaaatttagttctctatctctgtttttaaaatacaagttccttcactgtaatgagttctgaacagattatgttttctgtatacaaaaaagagtcaatattggagtcagagctcataaggagagaagcctgcgtgctatgctaacactcccatttggaggctagtctctttgcaattgcccaacaccacctgcatacacttctctaagtctttcacttactacactagtttgattggcccagtacagttggtttttaaatgtttatgactgagagaaaaaatgtggacgttttgaaggagagcaaaatggaaagtgatcacgcagagtagaacccctggtggccgacagtactgtttaatttcatacctgtattgttaatcaaatattggctgtagcttaaatttcagtaaatcactcagtcctatgttacatgtaaatcctcaggataaaaatatctcacatagtgaaagataatggaaattagatgaaatcgacttgtttctgattctactgctgataacactgacgtcattttgatcacattgatgcagtgtgatcatctgcagaggcctcagtgcaaggcagctcccttccccgtgtccaagtcccctgaccctctctcttccctccatttcctcagaatgtaccctttaattcacaaacaaaaacgcagctattcgcattcttccctggcctactctgccctacctcaaacttgcctgtgccttaaatcctaaaacgttccttcctctctccagactcagtgggaaagcggtccctatttttcctggaactccgggcttgtctcttggaacttcacaacaattgcccctttctcctatattttcaccctctcccccatccctagatttaggacattgctcacgtcttgttcatcttacatacccacaccctcgctcagccctacatcatctcccagctactgtatcatccacttagcagccaacctataaactcctctcactttgcctcccattctcttgcctgagccactgatgacctctttattgccaaacccaggagacaggtttgaggatgagctgatgtgaaatctctgtgccatctgactgcaatgactatcgtttcctttatgaaactttctcctcctttggcttccgcaaaactcctctcttcctattttcttcctatgtctcctgccaytccttctcagtgtcttcttgtgatcctttgcctacatcttagatgtctccatcttcatccctcttctctcttcatgcaattattccatctatgcaatttcatatactcccatgactaaaataccacctatatacactgataatgtc

SEQ ID NO: 52170 - DNA, 1732 bp, Homo sapiens
tgtctgtgatcagattaggaagtcatattactaaaagtttttgccgttcagggaggagttggtctcacttttttgtgttcagatagtggagaactgtgctcccgttctagggccctccctcctttctctttattaacttctccccacgggagaaagaatggcaaattggaaagctcggggcttgacattaatatgagtgaagtcactgtatttccacatggctttcgttcttttttttttttttttttgcgggggaaacaaggggtggaggcctgcagaaaggtgccagctatcctctactttttgcctgctgtcttcaggcaataaggagattagggaggtgttmccctggcaggcctaatctggtctatacttcttctagtccagcctttgcctggacaggtaaatcagttcaggtttgctctgtgaacctggccaccttcaggtctggaagaagaacataggaagccctgctgacgtcaggcttaagctgtattctccagcacatttaccagaagcctctggggttgtgtgtgaccatgcctcgaataaagcccatgttctgatccccatctgtctgtcagatgttatttgtggatgttatttgtggttatgcccagttggttagaacctagaaagtgataaaagtgagccatgcagccgggcacggtggctcatgcctgtaatcccagcactttgggaggatgaggtggatggatcacctgaggtcaggagttcaagaccagtctggccaacatggtgaaacactgtctctactaaaaaatacaaaaattagctgggcatgatggcatgcgactgtaatcctagctaccgggaaggctgaggcaggagaatcccctgaacccaggaggtggaggttgcagggagccgagactgcgccactgcactcaagcctgggcaacaagagctaaactctgtataaaaacaaaaaataacaaaaaaactagcgagccctacagctgcaggctgaggttctagttttggcaataagctaaagtgtaaataattttacatttaaaactatggaacaaatagaggtgggacatgggctgcccctgcccacctctccagccagttccccgactcttcgtcttctttctgctgcatgtggtctgaccatcttagttctcaagtttgccaaactttttttcagccatgtgtcctttgcctatgctgttttctctgctaactttctcttttttttctctctcttacttgctgcttttatggtcaagttctaactcttcaagcgtacacttaaatagtaccttctctgaccccgtaggctaggttgattgcttcagtgtactaaggcaaaaataccctgagtatctgtgctcattaacctctgtgtttcccttttgtaagatttatcacaattgtaatcaaatatttatgctatgatatatttgttgcctttctagattttctaacagtcttctttgcattgttacataaagtgtttagtgcagagctgggcactcatatttggtgcctgagggagatttgttgagtgaataaaatagcagtgtccagcagcgacatagactgctgagatatggcatgtcagagtctgaaaggcttctgtccagttggcaagtggaattcattggatgttttacaaagaatagttttagtaaggtggtggggacggaagtgagtttgcaaagtatcttataaaaagctagacttaattactcatttacgcaac

SEQ ID NO: 52171 - DNA, 1732 bp, Homo sapiens
tgtctgtgatcagattaggaagtcatattactaaaagtttttgccgttcagggaggagttggtctcacttttttgtgttcagatagtggagaactgtgctcccgttctagggccctccctcctttctctttattaacttctccccacgggagaaagaatggcaaattggaaagctcggggcttgacattaatatgagtgaagtcactgtatttccacatggctttcgttcttttttttttttttttttgcgggggaaacaaggggtggaggcctgcagaaaggtgccagctatcctctactttttgcctgctgtcttcaggcaataaggagattagggaggtgttcccctggcrggcctaatctggtctatacttcttctagtccagcctttgcctggacaggtaaatcagttcaggtttgctctgtgaacctggccaccttcaggtctggaagaagaacataggaagccctgctgacgtcaggcttaagctgtattctccagcacatttaccagaagcctctggggttgtgtgtgaccatgcctcgaataaagcccatgttctgatccccatctgtctgtcagatgttatttgtggatgttatttgtggttatgcccagttggttagaacctagaaagtgataaaagtgagccatgcagccgggcacggtggctcatgcctgtaatcccagcactttgggaggatgaggtggatggatcacctgaggtcaggagttcaagaccagtctggccaacatggtgaaacactgtctctactaaaaaatacaaaaattagctgggcatgatggcatgcgactgtaatcctagctaccgggaaggctgaggcaggagaatcccctgaacccaggaggtggaggttgcagggagccgagactgcgccactgcactcaagcctgggcaacaagagctaaactctgtataaaaacaaaaaataacaaaaaaactagcgagccctacagctgcaggctgaggttctagttttggcaataagctaaagtgtaaataattttacatttaaaactatggaacaaatagaggtgggacatgggctgcccctgcccacctctccagccagttccccgactcttcgtcttctttctgctgcatgtggtctgaccatcttagttctcaagtttgccaaactttttttcagccatgtgtcctttgcctatgctgttttctctgctaactttctcttttttttctctctcttacttgctgcttttatggtcaagttctaactcttcaagcgtacacttaaatagtaccttctctgaccccgtaggctaggttgattgcttcagtgtactaaggcaaaaataccctgagtatctgtgctcattaacctctgtgtttcccttttgtaagatttatcacaattgtaatcaaatatttatgctatgatatatttgttgcctttctagattttctaacagtcttctttgcattgttacataaagtgtttagtgcagagctgggcactcatatttggtgcctgagggagatttgttgagtgaataaaatagcagtgtccagcagcgacatagactgctgagatatggcatgtcagagtctgaaaggcttctgtccagttggcaagtggaattcattggatgttttacaaagaatagttttagtaaggtggtggggacggaagtgagtttgcaaagtatcttataaaaagctagacttaattactcatttacgcaac

SEQ ID NO: 52172 - DNA, 591 bp, Homo sapiens
gcaaaagaagatattcctttgagatagatgtattagtccattctcaccgtgctataaagatatcacctgagactgggtaatttataaagagaggaggtttaattgactcagtaccgcacggctggggaggcctcaggaaacttacaatcatggtggaaggkgaaggggaagcaggcatcttcttcacaaggcagcaggagaagagagagcacaggggaagctgccactgttaaaccatcagatctcatgagaactccctcactatcacgagaacagcatgagggaaacctcccccgtgatccaatcacctcccaccaggtccctccttcgacacatgggaattatattccagatgagatttgggtggagatacagagccaaacaatatcaatggggaagaaagggatatggatgtttaggaacttgccaattctccagtgttctctctttaaaaaaaaaaagtcttaagccgctgtgacaagatattagcatctgttaaatgtctcatatattttttctatataaaaattttacataattcaaatttgtaaaaatattctatggcagttaaaggacaattttttaaagact

SEQ ID NO: 52173 - DNA, 1654 bp, Homo sapiens
caaaaatttgtacacgtaggcatcaaaagacctaaccaggagtgtttataatagttttttttttaaatagcaaaaacttgagaataagtagtattcatcaacagcaaaatgaaaaaataaattgtagtatatttccctaataatgtactgtacagcaatgagaataaacaaactactgctacataccactatatagatgaattwtatattcttaacgtggtgttaaagaatttagacacaaaataattgatatggttttatttaaccaattccagatgtacatgaaagtaaactattattttagaaatctgctggggagaagcggcaatgtgactgcatgtactctggtaaataaatagaactgacaagtgtgcttgtgcagttctccataggtatgcaataattcaacacaagctttttaaaaataattatgggatgccaataatactatgactagagtgaaatttatagcttaaataatctattacacaaagaaaaagacaaaaatcagtaaaataggtattcatttcaaaaagtagaaaaatgactatagtcactttgtcattgccattaaattctatgtctatgtgattattatgcattgcatgcttgtattggggagtctgatgcacctcatagatatacacacttatgtacctacaaaaataaaaaataaaataaaatgtagaaaaatgataacaaattaaacttcaaaagcagagtgtgataaattagaaagggatgagcaaaaattaaagaaaaagataaagaacatatgagagatcaatgaatctaaaattgatcctttaataagaccaataaaattgacaagctgctggtgatactgataagaataaaagagcaggctgggcagggtggctcacccctgtaatcccagcactttgggaggctgaggcgggcggatcatgaagtcaagagattgagaccatcctgaacaacatggtgaaaccctgtctctactaataatacaacaattagtcgggcgtggtggcagatgcctatagtcccaattactcgggaggctgaggcaggagaatcgcttgaacccaggaggcagatgttgcagtgagcagagattgcaccactgcactccagcctcgtgacagagtgagactctgtctcaaaaacaaacaaacaaaaatgaaagaacaaaacacacaacaataccaggaatgagagtataatttccatttgaacagactttcaaaatacaaatttttatgctaataaatttatataaaatggagaaagccctaaaaaaatacatcttacaaattttgacacaaaaagaaatagaaaatctcaatcatcttagaattactgaagacattgaatccataatttaaaaactatcctggacagaagataccttcatctataaaatatataatatatttaagaataaataacagtttgaacttttttttccacagaagatagaaaaagaagaatgacactgaagctcagtttataaaggcaatataatgttgacatgaaagcctacaggacagttaagagagagaagacatagaatcccaaactgtaaaaaagtgtaaggaactgaattatgcaatatattaaaaagataatgtatcataattaagttgaacttactttataagtgcaaacttat

SEQ ID NO: 52174 - DNA, 533 bp, Homo sapiens
gcagattctttgccaaaccttctagataaaagctcagctgccaacaccttgatttcagctatatgataatctgagtataggacccagttgcacgtctttcatgactgtaagctaatgaatgggtgttctttaaaaccattaagttcattgtaatttcttaagcagaaatagaaaactaatatagaagtatactttgtaaagttctttcattatccactaaataagattatttaaaggtaacttaatactatttgtgattaagttaagtgtgcatattggaaaccctacagcaatcacaccagaaaaagagctatacagccagcaatccaagttgacataaaatggaayattacataccctcaacgaatcccgaaaatgtctggagtcatctcagaagggagtaggcgctttgcatgacctgttttaggaccaaaaaaagtgcctggtatatagcgggctgtctctagacctttaggaaatggatgagtgaatgaatgcataaatgaaaagtcaactccatattctaagcaata

SEQ ID NO: 52175 - DNA, 568 bp, Homo sapiens
acaggctttgtgtgagcaataaagtttttaatcacctgggtgcaggtgggctgagtccaaaaagagagtcagcgaagggagataagggtggggccgttttataggatttgggtaggtaaaggaaaattacagtcaaagggggtttgttctctggcaggcaggagtggggtcgcaaggtgctcagtgggggtgctttttgagccaggatgagccaggaaaaggactttcacaaggtaatgtcatcagttaaggcaaggacyggccatttacacttcttttgtggtggaatgtcatcagttaaggtggggcagggcatattcacttcttttgtgattcttcagttacttcaggccatctgggcgtatatgtgcaggtcacaggggatgcgatggcttggcttgggctcagaggcctgacagtgcaccctatccatgacctacttgccagtgatgggaagcacatgggttagagccagcttaggttcttaattcattatacacttttctgccacttcattcaacaactgtttgctcatcttcagctacccttatcaaattgtcatggcaat

SEQ ID NO: 52176 - DNA, 568 bp, Homo sapiens
acaggctttgtgtgagcaataaagtttttaatcacctgggtgcaggtgggctgagtccaaaaagagagtcagcgaagggagataagggtggggccgttttataggatttgggtaggtaaaggaaaattacagtcaaagggggtttgttctctggcaggcaggagtggggtcgcaaggtgctcagtgggggtgctttttgagccaggatgagccaggaaaaggactttcacaaggtaatgtcatcagttaaggcaaggaccggccatttacacttcttttgtggtggaatgtcatcagttaaggtggggcagggcatattcacttcttttgtgattcttcagttacttcaggccatctgggcgtatatgtgcaggtcacaggggatgcgatggcttggcttgggctcagaggcctgacagtgcaccctatccatgacctacttgccagtgatgggaagcacatgggttagagccagcttaggttcttaattcattatacacttttctgccacttcattcaacaactgtttgctcatcttcagctacccttaycaaattgtcatggcaat

SEQ ID NO: 52177 - DNA, 513 bp, Homo sapiens
ctttgttccggcttctctctgctcccaggcctcactatgtgggggcttgattactagttggggttgaggtgaggcagcaacccttacctcccccattccccaatcctgtctcctccctgtacctgcttaggcctcctttagggatgcctttaggagcagaatgtctaggatccttagcctgagctccctggtgaaacactagagcctcttgcatcaagtctttatacccacagagacccccactatcaccactgtgctgttatttcttccttcaggggtttagtgagaaaagaagctacgarggagaacagtaagagggggcccttttagaatccctccttgttggccaggtgcggtggctcacaccagtaatcccagcactttgggaggccaaggcaggaggatcacctgaggtcaggagttcgagaccagcctggccaacatttcgaaaccccgtctctactaaaaatacaaaaattagctgggtggtggtggcacacacctgtgatccca

SEQ ID NO: 52178 - DNA, 599 bp, Homo sapiens
tgtgcagaaggagttacggtacagctaaggctaacctgcatctatgctccagcttccaggactcctccctatgccagagacattataataacagagaaaacaacaacaacaacaacttacaaataaaggatgtaaaatgaattataatacaaggcaaggccacatgtagtctagctaagcccatcttgagggaaggtccagggacaaatttggaaaaaattataggataggcaacagataaaggtatgaagtcataaaggaaagaatttgagcaacatattaaagagtaatactggtaactgccctgggtktgcttgcctaccagacacccaatcttgcaagactgacattaaaagtcttgcctccactgttctttttgtctacaactccattctttgagtttggatgggtgaatgtgtttcttgcaatcgctttctaaagaaggcataaatgaatattactgccattctccagcctctgtccctatgatctacctctggcctacatgccttgttctggccaaacagaaaagatgattgaactccagggaataaaaaagcatggtggacttctgttccaagatggctgaacaggaacag

SEQ ID NO: 52179 - DNA, 1488 bp, Homo sapiens
tggtaaacatttgcttattaaataaacgtttgcctgaagttgaaaggggatgctatatagagctcccctaattgctctgttagctcatttgacctccagaggccctgggatccaaagagctgcacccccacctcaggaagcctggagaaagccaggcagcagcaggacagtgagattttgttcaacaaatctgtattcatagccagatactataatgggagttggaaaatacaaagatgtgaggggctctcagcttgtctgtaatgaagtgatcagggcagggcaagagtgtcagattcagtcatgtaggagcagccctgtgcagaaagaaccccacggccagggagggaggctcaagggaacatatggctgtcaccatatgggagtcgagagggctgagaagaaagacctccggggagagtatctgaggcttcctaaatgctcatacctcaatttatagcagagtgctgtcacctgaattccactcacactgctctgctgggtctcctcactaaagcaagcacacccactgagaactacggcacgcttgggccatctggcccctctcccacaccctgcaacacacacacatacacacacacacacacgcacacacatgcatgcacacacaggcacacactcaccaactgaggtctgtgaacaatacaacctcagtcagttgcactgtttcatttgtacatattaccgtaaccaacaaatgactgcaaaaaaactgttgttcaatgaatactctggaaatgcatgatggaggtagactgctaaaaaaaatgctgccaaatcaggtgtgaaagacattatctgtaaaaaggaggaaggaaaattgttaaaaagaaatctaccagatttccaggtgtccttaagtccttccaactgtaatacggctgtggttaacagaaaaacaaagatgtggaataaggcagatccatattaaaagaaatagcctgggacttctgtcaaataactggtgagtaaatgtgcatttctgtgtatgtaattaaaataaaatgtttaaggaatatatggatcatttttttttgagattctgtttactggccaactactataagaattaaccaaaaacctagtgattccccaattcctcttctacataaatttaacaacctcccactgtcagccaacatcactcccattaccagttaaactcccttccaactggaaaatcattgctctgttactggtctttatcaaagatgatttccaaaccatacaatctcatttactgtgatgtagatttagctttacttgttaaaaaggattttatactaagatttaaaccttaaccattgccaaatcttccttcagtttgcccagtaagatttcatacaacctagaaaagaatttagagcctgaataaatatatgaagtgctctarcaaagcactttcttagtgtttgtcatcaattatattccagttgcaaaattttagatattgaagatcatttcaaa

SEQ ID NO: 52180 - DNA, 546 bp, Homo sapiens
attttgcacgattgatattaatttatgtcattttcttaagaagttgttcagttatcctgaaatgtagaaataattggaaacagttctaatgtagatcaactaattataaaagactaatcatgaaagacttgtgttttcaaaattatgattcaaagacaggtagttcagtacactaagactgttgaaacacattttataactgtgccatatacagccatatttatatttccccttcatatattttgtataacataaaaagtgtaagcatcaagcaggaagggaaattttaagatattagttcaaaataatgtagtaactttgttgggctctaagacatattttcattccaaataaaagagtttttcttcccctgaaaaaacagaaatacaatcaacaaatactatctgactaatttgatatcagtgattctcagaagtacataagacaacatttcattgcagcaaaagtgaaattataaaaaaattagaaattacytgagtcattttttaattcatgatatttatgctaaaatatcgagtaggttga

SEQ ID NO: 52181 - DNA, 607 bp, Homo sapiens
gaaactattttttttctattgcaagtctaagatatttcaacgtagtcttgtttataggtctataaagatcttcagcttccaagttggaataaaaatactcaaatgaaacattagctcttaggttcaaggagagaaaaaagtkcacaatgaaacgacagcctgagagaaaatatttgcaatacatatgaccaagcaaaaagtgaacatcactagtatcaaagagctcctgcaaagtattatgaccaagacaaagaaatcaaaagaaaaatagcctgacaacatgaagagtgaatttccagaaaaagaacaaaattgttaaaagaagctcaaactcactaataaataaatatataaataaggagataaataagaccagctcatctaacaggatggcatattccttttagaaagtgattttgcgttaaaatttgcataattctttgacttagcaatgccactctggaatctaccccatttacctaaggatggtcacttgtataattctttaaaatgctaaaaactgaaaataatctgttaagttgtgtattttaattaagaaaaaaatcaaggcttaggttaatatttgtggcctggttctactgtttat

SEQ ID NO: 52182 - DNA, 1270 bp, Homo sapiens
tgcatctccaaatagaaaatgatatttttggttttgtgcattttagatttgtaattcaagtacattaagtgagtaatcacgtatagattgatttaaaagcatttaaccagatgatttgaaggtaaaaattattttaaaaggagagtaatatgctatttttccagagtgaactgataaaaaataattttatgcaaattgtatgctcctgagatgtgtgtgatacagggttttataagtgatatcatattttagaagcattaggatgtgctgataaaactttgagtaaactttttttgaaaagtgaagagatgcctgatagtttatgtctttgtggcataatgagatggttaataatatgggttaagagatcagactgcatggttttgaatcatctttacaacttatatgtgatagtgaacaaacttcttaacctctcagaacttccaacagattagaataataggctgggctcggtggctaacgcctgtaatcccagcactttgggaggctgaggctggcagatcaccaggtcaggagatcgaggccatcctggctaatacagtgaaaccccatctctactaaaaatacaaaaagaaattagccaggcatggtggtgggcgactgttgtcccagctacttgggaggctgaggcaggagaatggcgtgaacccgggaggcggagcttgcagtgagccgaggttgcgcccctgcaccccagcctgggcgacagagcgagactccatctcaaaaacaaaaacaaacaacaaaaactaaccaaacaaacaaacaaaaaagatttgaataataatgatatctacttcacagctgtcatggggatagaatgagaaaatacatgtaaagcacataaactattccttacacatatttagtactcagtaaatgttagctattattaatgctttttatataaaacaaggcaccactgggaataatcatggtatacaatccatcccaccaattatttatgaacaactgttatacattcttttgtgaaaacgttattgtgtacgatatatttgacatatttacttcttacgatamcaatgaagtttcagaaaatccacagtgtgttatcaaatgtgattgtcttcaagagctatggggtatgatctcaatcattagagtggaaaaagttcactttgagatcacatggaataccccatgaaattctctgataaatacccacctcttaaacaatacctacaccttcacatatatagcgaaaggtactgtttgtctcatcgtatgc

SEQ ID NO: 52183 - DNA, 1270 bp, Homo sapiens
tgcatctccaaatagaaaatgatatttttggttttgtgcattttagatttgtaattcaagtacattaagtgagtaatcacgtatagattgatttaaaagcatttaaccagatgatttgaaggtaaaaattattttaaaaggagagtaatatgctatttttccagagtgaactgataaaaaataattttatgcaaattgtatgctcctgagatgtgtgtgatacagggttttataagtgatatcatattttagaagcattaggatgtgctgataaaactttgagtaaactttttttgaaaagtgaagagatgcctgatagtttatgtctttgtggcataatgagatggttaataatatgggttaagagatcagactgcatggttttgaatcatctttacaacttatatgtgatagtgaacaaacttcttaacctctcagaacttccaacagattagaataataggctgggctcggtggctaacgcctgtaatcccagcactttgggaggctgaggctggcagatcaccaggtcaggagatcgaggccatcctggctaatacagtgaaaccccatctctactaaaaatacaaaaagaaattagccaggcatggtggtgggcgactgttgtcccagctacttgggaggctgaggcaggagaatggcgtgaacccgggaggcggagcttgcagtgagccgaggttgcgcccctgcaccccagcctgggcgacagagcgagactccatctcaaaaacaaaaacaaacaacaaaaactaaccaaacaaacaaacaaaaaagatttgaataataatgatatctacttcacagctgtcatggggatagaatgagaaaatacatgtaaagcacataaactattccttacacatatttagtactcagtaaatgttagctattattaatgctttttatataaaacaaggcaccactgggaataatcatggtatacaatccatcccaccaattatttatgaacaactgttatacattcttttgtgaaaacgttattgtgtacgatatatttgacatatttacttcttacgataacaatgaagtttcagaaaatccacagtgtgttatcaaatgtgattgtcttcaagagctatggggtatgatctsaatcattagagtggaaaaagttcactttgagatcacatggaataccccatgaaattctctgataaatacccacctcttaaacaatacctacaccttcacatatatagcgaaaggtactgtttgtctcatcgtatgc

SEQ ID NO: 52184 - DNA, 576 bp, Homo sapiens
tcagtcgacataagaaattatactatgaattttggctggccacagtggctcacacctgtaatcccagcactttgggaggccaaggcaggcagatcacttgaggccaggagttcgagaccagcctggccaacaaagtgaaaccccgtctgtactaaaattgcaaaaaattagcagggtatggtagtgcgcgcctgtaatccgagctacttggaaggctgaggcatgagaatcacttgaacccaggagttggaggttmcatgagctgagatcacacactgtactccagtctgggcaacagtaagactctgtctcaaaaaaagaaacaaagaaattatactttaggaattgatagtagtatgggtaattttcaagagattctcatgtcaatcagagccatgattaacaataatgtctctagatactaaagcattttaaaaacaacttataaagaatgttttttaggaaaaaaatcaacatccatacccactaatttagcacaacagtttacagttttgtatatttctgtctagtccctatccacatgaaaatacacattttgacaatagtaaccaacaa

SEQ ID NO: 52185 - DNA, 521 bp, Homo sapiens
tcccctgctgccccctctaccctgtacacaaagcaagacagatatcttaaatgtttcctttaaggaacaaacatgttgatatgaactttagctctttgaaatgagattatatagggttaccagagaaactcatctcttgcatcttgcagaagtaatgtgtatttttattatggaaaagtaaatattaattatttccayattttatagccctaaatcagacctactaaatagattattttgcaaaatatcctttcttctgattctttgaggcatgcatcaaaatcagaagaaaatctgaaagtaagcaaattctgttttgactttttttctcttttgttcccccacaggaatctgaggatgggaaactgtctggtgtcctcacatatcaacaagagaaaactccaaacttgacaagatgagttaacacatgagatgtctcaagcaagaaagggttgagggttgacgcaataaggataatagaacacttattttgttaattctcacataaactataacagcag

SEQ ID NO: 52186 - DNA, 1500 bp, Homo sapiens
tgttatctccattaaagacagggaaattgagactcagaaaagggagtgagcttctaagatctcacagttggtaagtgacagaactggaattcaaacccaaagcaacttccctgcaaatgtggtgttcttgataaacatcctagctagggaatagagcctactctttctgttcagaactgccaagggttacaagaaaatagtcttttgattttagaccttctcagaccccaagatgtgacggcgttctgtatgtgagaaagcttttaattttttctcttaaattttggaagcatttccccatagaagtaacaataaagtttggatttaaaagtcaattaatgcattgagacaagaaactctaacatacagctggagagtgggaaagcttgccaggcgaggcattcagcttggaagtaattgtgtattttacttggctttggctttctggaatgagatctttgaaaaagggccttttaattttacatcacttcaaaccagtggcrtggactaggtctttgtgtcggctgtggggtgggggggtggggggcattgatctcaatagagaatggagaattgatgagccataaattctcccaatcagtactccgtgttggctttcctttctcggagctccagatgagggcttccctcccttgtctactcactcacaacaggctgcagccagcagggccctagagaggttctggaggcacacgagccacacctgggaggcagcaccacctcttcctactgggaaaacatcttacccttcctgttgtctcagacactgcccttctgtcctgcagcaggcaagttctgcaatgagaatttttaccagatcccctgctctcctagggcaacatcacacagcagatctatgaagccatggtgggcattctggctcctcttaaactgtgcacagactctggacccccaaaagtttgggagtatgtgtaaacttgtatggttgtcaaaactgactcccagtaactctgttttgcagttttcatctcttccgccatattttcttccctgcctttcaggtgtcccacatccttgtacttggctttcttatttgcttgtgtattatacttatacatgctcttttccttaccaaaatatattctgcagaaaattcttcattcaagttgaaatagatcaaatttaatccaagtatgtcaaataagttctgtaattgggactgtgcttaacctgttggccttggctttaatataatacactttaggacagtttgaactgggcaccaagagagtcattctcttaaccctctcacctcagggcctttgcacttgttgtccccactgcctagaactatttttcttttttcttttctttttttgagatggagtctcacgttgtggtccaggctggagtgcagcgttgcaatcttggctcactgcaacctctgcctcctgtgttcaagcgattctcctgcctcagcctcccaagtagctgggattacaggttcccgccaccatg

SEQ ID NO: 52187 - DNA, 1956 bp, Homo sapiens
atttttgagatagagcctcgctgtgtcacccaggctggagtgcagttgtgcaatctcgactcactgcaacctccacctcccaggttcaccccattctcctgcgtagctgggattacaggcgaccgtcaccgcgccmggctaattttttgtatttttagtagagacggggtttcaccgtgttagccaggatggtctcaatctcctgaacttgtgatccacctgcctcggcctcccaaagtgccgggattacaggcaattgtaactagttctgtatgacaggaaacttcacagataaagctgcattactccctgcagcaagtgcacgccctcctgctgactcactgaaaagtgaggctctgctaactgcctcttctcttgactttgtgaagcgcacagcctgtcggacggcagggtctccaagcacgtttattaaatgtaggactgaagaaatcaaatacaaaagagcctttctttggggcacaattaacgtcaaagaaggaaactatgtcaagagacataattaaaagacaactcaaagggaacaatactgctttaattgatacaatttaaaggaaaaattatgagtgatgtgatggaacacggtgtggaaagacttaggtaaacacaattgtatggtctttttttttttttttttttttttttacttttttctataagttattggagtacaggtggtatttggatacatgagtaagttctttagcggtgatttgtgagatcctggtgcacccatcacctaagcagtatacactgcaccatatttgttgtcttttatccttcaccccccttccactcttcccctgaagtccccaaaatccgctgttatcattcttttgcctttgtgtcctcatagcttagctcccacatatcagtgagtacatacgatgtttggttttcaacgcctgagttacttcacttagaataattgcatgttctttactgaagaaaactatggagatacccattcttggagtctcttgtacatgcagcgtaactatcactgttttccatctggaggactcctgacatttcagcatgcattatgcaaatagcaagtccttggaaggaactacaagtacgggcgtttttgactgtgggaaaattcatggttactacaggatagttgaaccttgaagaacctctgggtgtgggtacaaaggtggggaaaggtgagcagggcccctactctttatgggaaaaccactgggaacggcgggatgttttagaacaattgtgaattttagcctgaaaataaaaacagtctccaccttcattcccaacttgaaaggattttcaaagtagccaactgctgggagtggggacattagtggttggccaaggggtatgtatccccagtctaagtgagaatgtcgcctgcagcagaaatgaaaattcaggaattcagaagggtgggggcttcttacttcttgtcacatcgttcttttaaattctccagattctcaataggcagaaacccttgtatattttcatttgatacagaaaagccataagcaaaaagtaaggcatcattggggcataaaaaacaaattaacaaggggggaaactattttcactacgaatttgagtggaaaaccaaagagagacgacaaatctaaatggcataaacaacatagaagcagagacgagcagagtgaattgtgaggaagtttggcaaaaaaaaatcttcacaaacgtgtaagatgtgaagatttccctgaccatagaagtgggaagaatattttatgccgccaggaataggtcaacacttaaaataccgcgttaaagctgaaattcaggattatctcagaactgcttccggacgcatattacagtgtgacaagaatagcattgggctgtggtcggatacaatgctagttcagcttttcccctaatagttaagttcccatctatgccaatggttgataagatgaggca

SEQ ID NO: 52188 - DNA, 1956 bp, Homo sapiens
atttttgagatagagcctcgctgtgtcacccaggctggagtgcagttgtgcaatctcgactcactgcaacctccacctcccaggttcaccccattctcctgcgtagctgggattacaggcgaccgtcaccgcgccaggctaattttttgtatttttagtagagacggggtttcaccgtgttagccagsatggtctcaatctcctgaacttgtgatccacctgcctcggcctcccaaagtgccgggattacaggcaattgtaactagttctgtatgacaggaaacttcacagataaagctgcattactccctgcagcaagtgcacgccctcctgctgactcactgaaaagtgaggctctgctaactgcctcttctcttgactttgtgaagcgcacagcctgtcggacggcagggtctccaagcacgtttattaaatgtaggactgaagaaatcaaatacaaaagagcctttctttggggcacaattaacgtcaaagaaggaaactatgtcaagagacataattaaaagacaactcaaagggaacaatactgctttaattgatacaatttaaaggaaaaattatgagtgatgtgatggaacacggtgtggaaagacttaggtaaacacaattgtatggtctttttttttttttttttttttttttacttttttctataagttattggagtacaggtggtatttggatacatgagtaagttctttagcggtgatttgtgagatcctggtgcacccatcacctaagcagtatacactgcaccatatttgttgtcttttatccttcaccccccttccactcttcccctgaagtccccaaaatccgctgttatcattcttttgcctttgtgtcctcatagcttagctcccacatatcagtgagtacatacgatgtttggttttcaacgcctgagttacttcacttagaataattgcatgttctttactgaagaaaactatggagatacccattcttggagtctcttgtacatgcagcgtaactatcactgttttccatctggaggactcctgacatttcagcatgcattatgcaaatagcaagtccttggaaggaactacaagtacgggcgtttttgactgtgggaaaattcatggttactacaggatagttgaaccttgaagaacctctgggtgtgggtacaaaggtggggaaaggtgagcagggcccctactctttatgggaaaaccactgggaacggcgggatgttttagaacaattgtgaattttagcctgaaaataaaaacagtctccaccttcattcccaacttgaaaggattttcaaagtagccaactgctgggagtggggacattagtggttggccaaggggtatgtatccccagtctaagtgagaatgtcgcctgcagcagaaatgaaaattcaggaattcagaagggtgggggcttcttacttcttgtcacatcgttcttttaaattctccagattctcaataggcagaaacccttgtatattttcatttgatacagaaaagccataagcaaaaagtaaggcatcattggggcataaaaaacaaattaacaaggggggaaactattttcactacgaatttgagtggaaaaccaaagagagacgacaaatctaaatggcataaacaacatagaagcagagacgagcagagtgaattgtgaggaagtttggcaaaaaaaaatcttcacaaacgtgtaagatgtgaagatttccctgaccatagaagtgggaagaatattttatgccgccaggaataggtcaacacttaaaataccgcgttaaagctgaaattcaggattatctcagaactgcttccggacgcatattacagtgtgacaagaatagcattgggctgtggtcggatacaatgctagttcagcttttcccctaatagttaagttcccatctatgccaatggttgataagatgaggca

SEQ ID NO: 52189 - DNA, 1956 bp, Homo sapiens
atttttgagatagagcctcgctgtgtcacccaggctggagtgcagttgtgcaatctcgactcactgcaacctccacctcccaggttcaccccattctcctgcgtagctgggattacaggcgaccgtcaccgcgccaggctaattttttgtatttttagtagagacggggtttcaccgtgttagccaggatggtctcaatctcctgaacttgtgatccacctgcctcggcctcccaaagtgccgggattacaggcaattgtaactagttctgtatgacaggaaacttcacagataaagctgcattactccctgcagcaagtgcacgccctcctgctgactcactgaaaagtgaggctctgctaactgcctcttctcttgactttgtgaagcgcacagcctgtcggacggcagggtctccaagcacgtttattaaatgtaggactgaasaaatcaaatacaaaagagcctttctttggggcacaattaacgtcaaagaaggaaactatgtcaagagacataattaaaagacaactcaaagggaacaatactgctttaattgatacaatttaaaggaaaaattatgagtgatgtgatggaacacggtgtggaaagacttaggtaaacacaattgtatggtctttttttttttttttttttttttttacttttttctataagttattggagtacaggtggtatttggatacatgagtaagttctttagcggtgatttgtgagatcctggtgcacccatcacctaagcagtatacactgcaccatatttgttgtcttttatccttcaccccccttccactcttcccctgaagtccccaaaatccgctgttatcattcttttgcctttgtgtcctcatagcttagctcccacatatcagtgagtacatacgatgtttggttttcaacgcctgagttacttcacttagaataattgcatgttctttactgaagaaaactatggagatacccattcttggagtctcttgtacatgcagcgtaactatcactgttttccatctggaggactcctgacatttcagcatgcattatgcaaatagcaagtccttggaaggaactacaagtacgggcgtttttgactgtgggaaaattcatggttactacaggatagttgaaccttgaagaacctctgggtgtgggtacaaaggtggggaaaggtgagcagggcccctactctttatgggaaaaccactgggaacggcgggatgttttagaacaattgtgaattttagcctgaaaataaaaacagtctccaccttcattcccaacttgaaaggattttcaaagtagccaactgctgggagtggggacattagtggttggccaaggggtatgtatccccagtctaagtgagaatgtcgcctgcagcagaaatgaaaattcaggaattcagaagggtgggggcttcttacttcttgtcacatcgttcttttaaattctccagattctcaataggcagaaacccttgtatattttcatttgatacagaaaagccataagcaaaaagtaaggcatcattggggcataaaaaacaaattaacaaggggggaaactattttcactacgaatttgagtggaaaaccaaagagagacgacaaatctaaatggcataaacaacatagaagcagagacgagcagagtgaattgtgaggaagtttggcaaaaaaaaatcttcacaaacgtgtaagatgtgaagatttccctgaccatagaagtgggaagaatattttatgccgccaggaataggtcaacacttaaaataccgcgttaaagctgaaattcaggattatctcagaactgcttccggacgcatattacagtgtgacaagaatagcattgggctgtggtcggatacaatgctagttcagcttttcccctaatagttaagttcccatctatgccaatggttgataagatgaggca

SEQ ID NO: 52190 - DNA, 535 bp, Homo sapiens
gaatttatagacaatacaaagtaaagtgatgtatagaaatcagaagtgaggtacagaaacagctggattggttacagyttggcacttgccttatttgaacactcagctgtatgcgactagttgaagtatggctgctggaattggccaagactcagcgattgttacaggtgcatattcctaagttaggttttagtcttgtgtacctattgaattaggttgcagttcattcacaaggactgaaatatagaagtatggcgtttttctcaggccatatttaatttgatttaacaggactttgggtatgtcattgtattttactaatatattttacaaacaccccatgttatcttaatctatttaagttcacactttttaatcaaattttactttaaatgtatctaacctcctaaatttctgcctttgtgaaccaataatactttttccaaattcttattatagcacatatcagactatatagctatagacactttggcatcattgttttcccatacaaaacacaatacatttaatgaat

SEQ ID NO: 52191 - DNA, 1682 bp, Homo sapiens
agaaactcaagccttggaattacaaggtacgtgcaaaggaattttttgtgatacgcctgcctttcccaaaggactcatctgttttttttttcttttttctttttttttttttagacagagtcttgctctttcgcccaggctggagtgcagtggcgtgatctcagttcactgcaacytccgcctccctggttcaagcgattctcctgcttcagcctcccgagtggctgggatcataggtgctgcccaccacgcccagctaatttttgtatttttagtagagacagggtttcaccatgttggccaggctggtctcaaactcctgacctcaggtgatccacccatctcggcctcccaaagtgctgggattgcaggcatgagccaccgcacccagcctgtcctcttacatgcaaggcagtgtgtgtgtgtgcatgtgtgtgtgtgcatgcatgcgcacgtgtgtgtgtgaagccacctgctttagtttctcaagaaatcttgccacaaattttgtctaagtctccacactgcttcccttagaaatatcctaaaaatatatttctgtggcttgacagcaagttgagaaacatgacagccaaggacactgaattaatgtaagtcataaaagtttaaccgccatgagattcgctctcgagaccataaaactgtagtcaatgaaaaatagcaattgactacaagcaagggggtaaatcaattattttttgcattttgctccaatcttgggtgcagagtggcatcatgttacctttgttgcaaaactgtgagtttgcaaataaacatgatttagactttaaaagaaaatagagtggggcaaaagttggctgcatgcaaaagaaggtccttgctaagattttcagccgctagatttatgacagttctgaaaggctggaaagttgaaccatatttaaacactgactctgccactcgccacaggggccaggtcctgacctcatctagaatagtgatatttctgtaattttagttatctctactccaaaagagcacaatgtctcaataatgaagatttagcctgtccattattatacctaacatgggatataaggtgtgtaaggtacaaaataaacacagtttataatattattattttgaaaaacgttttatttattataaatatattgtataaagcaattaaggattacactggtttctaattacctatgtatcattatttgtataaaatatctgcttacttgaaaatggaaaaacacaaaaatacaaggagaggttaaaataggtgaagcataaggaattttttaggatggtgaaactattctataatgttgggtctattacatgatgcatttgtcaaaacccatagaacattaccacagaaagagttaaccttaatctatgcaaattaaaaaattatttaggaagctagaggatcccaggatggaatgaagactaggacaaaagacggactgcattacaaacataggatacaccctcactagaggaggtggggagagaaggtgctgattaggtgaagtcacttggggaacgaatgccgactctaggaccagtgggaaaatgcactgagtgcccatcagcattgtactttttttttttttttttttttttgagaccgagtctcgctctgtcacccaggctgggagtgcagtggcacaatctcggctcactgc

SEQ ID NO: 52192 - DNA, 1682 bp, Homo sapiens
agaaactcaagccttggaattacaaggtacgtgcaaaggaattttttgtgatacgcctgcctttcccaaaggactcatctgttttttttttcttttttctttttttttttttagacagagtcttgctctttcgcccaggctggagtgcagtggcgtgatctcagttcactgcaacctccgcctccctggttcaagcgattctcctgcttcagcctcccgagtggctgggatcataggtgctgcccaccacgcccagctaatttttgtatttttagtagagacagggtttcaccatgttggccaggctggtctcaaactcctgacctcaggtgatccacccatctcggcctcccaaagtgctgggattgcaggcatgagccaccgcacccagcctgtcctcttacatgcaaggcagtgtgtgtgtgtgcatgtgtgtgtgtgcatgcatgcgcacgtgtgtgtgtgaagccacctgctttagtttctcaagaaatcttgccacaaattttgtctaagtctccacactgcttcccttagaaatatcctaaaaatatatttctgtggcttgacagcaagttgagaaacatgacagccaaggacactgaattaatgtaagtcataaaagtttaaccgccatgagattcgctctcgagaccataaaactgtagtcaatgaaaaatagcaattgactacaagcaagggggtaaatcaattattttttgcattttgctccaatcttgggtgcagagtggcatcatgttacctttgttgcaaaactgtgagtttgcaaataaacatgatttagactttaaaagaaaatagagtggggcaaaagttggctgcatgcaaaagaaggtccttgctaagattttcagccgctagatttatgacagttctgaaaggctggaaagttgaaccatatttaaacactgactctgccactcgccacaggggccaggtcctgacctcatctagaatagtgatatttctgtaattttagttatctctactccaaaagagcacaatgtctcaataatgaagatttagcctgtccattattatacctaacatgggatataaggtgtgtaaggtacaaaataaacacagtttataatattattattttgaaaaacgttttatttattataaatatattgtataaagcaattaaggattacactggtttctaattacctatgtatcattatttgtataaaatatctgcttacttgaaaatggaaaaacacaaaaatacaaggagaggttaaaataggtgaagcataaggaattttttaggatggtgaaactattctataatgttgggtctattacatgatgcatttgtcaaaacccatagaacattaccacagaaagagttaaccttaatctatgcaaattaaaaaattatttaggaagctagaggatcccaggatggaatgaagactaggacaaaagacggactgcattacaaacataggatacaccctcactagaggagrtggggagagaaggtgctgattaggtgaagtcacttggggaacgaatgccgactctaggaccagtgggaaaatgcactgagtgcccatcagcattgtactttttttttttttttttttttttgagaccgagtctcgctctgtcacccaggctgggagtgcagtggcacaatctcggctcactgc

SEQ ID NO: 52193 - DNA, 560 bp, Homo sapiens
acagcaatgtataatacctgcgctcacatgagactgctcactgcttcatttacaaggggctgaatctttctgggccaggagtgtccaggcaaccttttctcagccaggggcctgaggccctgagtaactgagaggtcacatggtggatgaggatcagggccatgagtagggacagacccttttgtcctgtgttgcagccccctctccagtgggcaggaaggtggggagagatggtcaccggctcccactgggtcctggcccagagtcttggtggcaggcagagatggcacttctgtgggaatgtctctggtgactttgggggagggggctctgggaggtatgagctgccccctgaagacctgggagggccacaacccagctacctcagggagcaggggctgagacctggcctgccttgctctttcgcctccccctcccactmctcccagcagagttcagggatttctaattctctgggaacctggagcttgtagcacaaaagtgctcacatgtgcttgaggcaagtgatttccttttcctcctcttcttcctcgactgca

SEQ ID NO: 52194 - DNA, 570 bp, Homo sapiens
ggaattagctcagtctagacatatctgtgatcttagcttgagcaatcttaagactgttaccttccttttcctaacattaaacatattattttctttcttatataaacttttgtccctagatacttagatgtatttttagctttttaaatactcatttattgaattggttaggatgttttaataatgaaaggggagaaagatagaaagcagagaaagagacagagaacaaaaccaagcagaattttccaataatttccaaattgtgtattgaaacctattacttttaggtgttttttgaatcttttaattctttaactaaaaatcaagtgttttaaagttttttgaaggaaaaaatagagaaaagggagagagagagactcagacagagaaaaccatgacaragaatcagagataataaattttaaaacatcattcaagccagggattatgtcatctccataacatctttctaaattggtaaagccccaataattttaatccagttttggtaagatttattttacttgtgattaaatagtctggattattattcacagtcaatgggggatt

SEQ ID NO: 52195 - DNA, 582 bp, Homo sapiens
tcccaaagtgctgggattacagatatgagccacagtgcccagcaacagtagtttcaatacataaggttttgtttttttctctgggtgggctatccagggatgctcagagcttccatgaaccccagggtcctctgctccttgcggtgtcctggcctgccaaccctagattgtagtcctggtcctcatagccctaaatgacagctggaactccagctgacatgcctgctggaggtcagcaggaagaaggaagtgtcaaaaggggtgtgcctcctcccctttagggtacttcacagagttactcttgctagagttgggtcacatggcaccaastcgctgctgggcatggtggtaaatgtagtcactgagctggtggcaatggcacaggtaagaatcagtgtttgtcatgaaagaagacgggagtggacatggggtggtaatgaacagcctccaccacagctgaactggacagaaggctccatctttacagattgctttctttaaagtgcaagagggctgcctcccctctgaggccctgggctcagcacctctgcctgtgtgtcacatgtatctcatgaagctcca

SEQ ID NO: 52196 - DNA, 582 bp, Homo sapiens
tcccaaagtgctgggattacagatatgagccacagtgcccagcaacagtagtttcaatacataaggttttgtttttttctctgggtgggctatccagggatgctcagagcttccatgaaccccagggtcctctgctccttgcggtgtcctggcctgccaaccctagattgtagtcctggtcctcatagccctaaatgacagctggaactccagctgacatgcctgctggaggtcagcaggaagaaggaagtgtcaaaaggggtgtgcctcctcccctttagggtacttcacagagttactcttgctagagttgggtcacatggcaccaagtcgctgctgggcatggtggtaaatgtagtcactgagctggtggcaatggcacaggtaagaatcagtgtttgtcatgaaagaagacgggagtggacatggggtggtaatgaacagcctccaccacagctgaactggacagaaggctccatctttacagattgctttctttaaagtgcaagagggctgcctcccctctgaggccctgggcycagcacctctgcctgtgtgtcacatgtatctcatgaagctcca

SEQ ID NO: 52197 - DNA, 580 bp, Homo sapiens
tgctgtgtcctcatatgttggggagcagacagagaagaagcaatctgtctggtgtctttttataatggctctaacctacccatgaaggcttcactcttatgacttgattaccactcaaagtccccacttcctaataccatcactttgggggttaggatttcagcatatacattttgggtggatgcaaattttagtccacagcaataattatttccaatcagatgatgcctgattggtttactgttttttctttttttcttttcttttctctttttttttttttttkttgttcttgttgtttttgagacaaagtcttgcccttgtcctccaggctggagcgcgatggcacgatctcaactcacagcaacctccacctcttgggttcaagcgattctcctgccttggccgcccgagtagccaccacacctggctaattttttgtatttttagtagagacggggtttcaccatgttggcctggctggactcgaactcctgccctcaggtgatccgcctgccttggcttcccaaagtgctgggattacacatgtgaggcaccacatgccctggtttacttttta

SEQ ID NO: 52198 - DNA, 427 bp, Homo sapiens
tccgcatgctgtttttcttagtttaagcctctaatagctgttgcatattttcttatataaagtctgtgcaagcttctttgggcaatagttatattaatccagtttagtaacactggggatcacataagaaatgaatcagttacttaacaacttctggttgattaaaaaaaattctttcaaaagayagcaagtatgagaaaggataaaagcattccttggtggtaacatcactaatcatcaaggatatacaaatcaaaaccacagtgcaatatcatttcacacctgtttaaaatggctattatcaaaaagatgaggcaatttttggcaagagtgtggagaaaaggagacctttgtacatggttggtgggaatgtaaattagtataatcaatatggaaaacagaacagaggctcctcaaagctaaaaat

SEQ ID NO: 52199 - DNA, 603 bp, Homo sapiens
tgctacctccatttttaaaatgagaacaattaagcccagatgttaacttcccagcggacctcagcttagaaagtacagaacaaggatttgaacctaggcagtttggctccagagcctgtgccatcacaacactgcccggaaacagattagtacagtacatgyccctgcgggagagcccagaggagaacctgcactattcctggaaattgatcagcagaggcttctgggaggatcgaggcatgatttgagtcttgacagaagttcagaacacagagacgtcacggcattctaccctgcactgaaactgttctaaaaagactggcatgcttcggagagaaaaaaaaaaatgtagcatagagtctcctgtgacctgcctgggagctgtgccatgcaatggaaccaaatttccttcagggagttttacattttactcaatattctgaagtttagctatcacacaattaagtatcaaccaggttcctgtcatcagtgggtactgttggaagaggacagggaattggatttaacaacactgtttgttcttctaatgcaacatcgtagaaatatgtaacagaactgtaatggagatgaatcacaagaagg

SEQ ID NO: 52200 - DNA, 603 bp, Homo sapiens
tgctacctccatttttaaaatgagaacaattaagcccagatgttaacttcccagcggacctcagcttagaaagtacagaacaaggatttgaacctaggcagtttggctccagagcctgtgccatcacaacactgcccggaaacagattagtacagtacatgcccctgcgggagagcccagaggagaacctgcactattcctggaaattgatcagcagaggcttctgggaggatcgaggcatgatttgagtcttgacagaagttcagaacacagagacgtcacggcattctaccctgcactgaaactgttctaaaaagactggcatgcttcggagagaaaaaaaaaaatgtagcatagagtctcctgtgacctgcctgggagctgtgccatgcaatggaaccaaatttccttcagggagttttacattttactcaatattctgaagtttagctatcacacaattaagtatcaaccaggttcctgtcatcagtgggtactgttrgaagaggacagggaattggatttaacaacactgtttgttcttctaatgcaacatcgtagaaatatgtaacagaactgtaatggagatgaatcacaagaagg

SEQ ID NO: 52201 - DNA, 552 bp, Homo sapiens
tatatactcccccatcaatgtaaccaatacaaattgttgttttattgattactcaggactttaaatataagtgggtacagtgatgtttctagggtctattgagaaatagcaaggtatttgccccatcattaaatagccacagatagctattttcaactttttgtagttkttctgtctcctccacttgatatttcatgctgttgccagtgagtttacctgtagcaactcttgtttccatttccaattttgttgaatcctggagaaaccaaaccaagccttagatggttgtatgtaacacaggagtaaataggtccagaataagagtgtaggggcttatcgctctctccggtccatgcctccaagatgacaaagaaaagaaggaacaacgttcgtgccaaaaagggccgcggccacgtgcagcctattcgctgcactaactgtgcccgatgcgtgcccaaggacaacgccattaagaaattcgtcattcgaaacatagtggaggctgcagcagtcagggacatttctgaagcgagcgtcttcgatgcctatgtg

SEQ ID NO: 52202 - DNA, 552 bp, Homo sapiens
tatatactcccccatcaatgtaaccaatacaaattgttgttttattgattactcaggactttaaatataagtgggtacagtgatgtttctagggtctattgagaaatagcaaggtatttgccccatcattaaatagccacagatagctattttcaactttttgtagtttttctgtctcctccacttgatatttcatgctgttgccagtgagtttacctgtagcaactcttgtttccatttccaattttgttgaatcctggagaaaccaaaccaagccttagatggttgtatgtaacacaggagtaaataggtccagaataagagtgtaggggcttatcgctctctccggtccatgcctccaagatgacaaagaaaagaaggaacaacgttcgtgccaaaaagggccgcggccacgtgcagcctattcgctgcactaactgtgcccgatgcgtgcccaaggacaacgccattaagaaattcgtcattcgaaacatagtggaggctgcagcagtcagggacatttctgaagcgagcgtcttcratgcctatgtg

SEQ ID NO: 52203 - DNA, 723 bp, Homo sapiens
aattacaattcaagatgagatttgggtgggaacacagtcaaaacatgtcagcctccaatttagactttggacacccaaagcttcatgagtttctttgattgataacactttagctttccatgtgttgtcacaagttgttgctgggagatctaaacaggtcattgaaactctaccaacagaagacacctagaagcttgagtctggttttacttggaccttgtcccacagacctcttccttttgctgattgtaatctgtattctttcactcttaaaaatgtaagcatgaggccaggcgcggtggctcacgcctgtaatcccagcactttgggaggccgaggcgggcggatcacgaggtcaggagatcgagaccatcccrgctaaaacggtgaaaccccgtctctactaaaaatacaaaaaattagccgggcgtagtggcgggcacctgtagtcccagctacttgggaggctgaggcaggagaatggcgtgaacccgggaggcagagcttgcagtgagccgagatcccgccactgcactccagcctgggcgacagagcgagactccgtctcaaaaaaaaaaaaaaaaaaaaaaaaaaaaaatgtaagcatgagtataacaactttcctgagtgcctctagtgaatcactgagcctgaaggtgatcttggagacccttgaaatacctgtttatcttctgtcttatggcattccatcctcttcttaag

SEQ ID NO: 52204 - DNA, 723 bp, Homo sapiens
aattacaattcaagatgagatttgggtgggaacacagtcaaaacatgtcagcctccaatttagactttggacacccaaagcttcatgagtttctttgattgataacactttagctttccatgtgttgtcacaagttgttgctgggagatctaaacaggtcattgaaactctaccaacagaagacacctagaagcttgagtctggttttacttggaccttgtcccacagacctcttccttttgctgattgtaatctgtattctttcactcttaaaaatgtaagcatgaggccaggcgcggtggctcacgcctgtaatcccagcactttgggaggccgaggcgggcggatcacgaggtcaggagatcgagaccatcccggctaaaacggtgaaaccccgtctctactaaaaatacaaaaaattagccgggcgtagtggcgggcacctgtagtcccagctacttgggaggctgaggcaggagaatggcgtgaacccgggaggcrgagcttgcagtgagccgagatcccgccactgcactccagcctgggcgacagagcgagactccgtctcaaaaaaaaaaaaaaaaaaaaaaaaaaaaaatgtaagcatgagtataacaactttcctgagtgcctctagtgaatcactgagcctgaaggtgatcttggagacccttgaaatacctgtttatcttctgtcttatggcattccatcctcttcttaag

SEQ ID NO: 52205 - DNA, 576 bp, Homo sapiens
ataagtcaggcacagaataacgattactgcctgatgtcacttatacgtggaacctgaaaragctgaactcatagaagcaaaaaatgaaatggtggttaccaggagctgggtgaggggcaatggagagatgttggtcaaagagtacaaagtttgttagacaggatgtatatgttctagagatctattatacagcatgatgattatagttaatattaattcattatatacttgaaagttgctaagagaatacatcttaaagattctcaggccctcaaacaataagtatgtgtgacaatatatacgttaattagcttgatttgataattttacaatatatacatattgaaacatcaaattgtacactagaaatgcattcaatcttatttgtcaattatactttaataaagctggaaggggtacaaagaatataatcaaatcccaaaaggaaatcagagcagggattgatagtcaaatctgtcaatcagcaaatactcattgaaatgctactacatgctatttacagtacatataattgataagtgtgtctaatatcaacattcatacatatcagagcat

SEQ ID NO: 52206 - DNA, 604 bp, Homo sapiens
gcacgatcaacattatggtgcttttaccatccaatagcaacaaaggaggataagattaaggctcaaaccaagatcaacagaagatcacatctaatgctagccaaacacagctggcattatgatcttggttctcaccatccagtcatgtctagaattgctaattaaaaataacattcctaaactataaaaggattcatgatataattaaaccatttaataatatcttcttwgtatattcttacctactaaacacgcttttaaataatcatctttaagtgaatttcataaagctatataatggaaaagatgagtcatgacttcataattcgtaatattattgggagagtagcaaattttcagtgtctcacttaaagtacgttgaaaatatcacaagaatttctgcaggctgttgctccttcctaaggctgcaagtccaaatgaaaactctgtgtcagacacatttaggggttttataaagctgtacactatgcagactctgggcatagaattcccagcataggctcggcttcttccttctcttttcagttgtgtcataaatcactcattgtcatcagttgagtattcctatgcacagagtggttcc

SEQ ID NO: 52207 - DNA, 604 bp, Homo sapiens
gcacgatcaacattatggtgcttttaccatccaatagcaacaaaggaggataagattaaggctcaaaccaagatcaacagaagatcacatctaatgctagccaaacacagctggcattatgatcttggttctcaccatccagtcatgtctagaattgctaattaaaaataacattcctaaactataaaaggattcatgatataattaaaccatttaataatatcttcttagtatattcttacctactaaacacgcttttaaataatcatctttaagtgaatttcataaagctatataatggaaaagatgagtcatgacttcawaattcgtaatattattgggagagtagcaaattttcagtgtctcacttaaagtacgttgaaaatatcacaagaatttctgcaggctgttgctccttcctaaggctgcaagtccaaatgaaaactctgtgtcagacacatttaggggttttataaagctgtacactatgcagactctgggcatagaattcccagcataggctcggcttcttccttctcttttcagttgtgtcataaatcactcattgtcatcagttgagtattcctatgcacagagtggttcc

SEQ ID NO: 52208 - DNA, 604 bp, Homo sapiens
gcacgatcaacattatggtgcttttaccatccaatagcaacaaaggaggataagattaaggctcaaaccaagatcaacagaagatcacatctaatgctagccaaacacagctggcattatgatcttggttctcaccatccagtcatgtctagaattgctaattaaaaataacattcctaaactataaaaggattcatgatataattaaaccatttaataatatcttcttagtatattcttacctactaaacacgcttttaaataatcatctttaagtgaatttcataaagctatataatggaaaagatgagtcatgacttcataattcgtaatattattgggagagtagcaaattttcagtgtctcacttaaagtacgttgaaaatatcacaagaatttctgcaggctgttgctccttcctaaggctgcaagtccaaatgaaaactctgtgtcagacacatttaggggttttataaagytgtacactatgcagactctgggcatagaattcccagcataggctcggcttcttccttctcttttcagttgtgtcataaatcactcattgtcatcagttgagtattcctatgcacagagtggttcc

SEQ ID NO: 52209 - DNA, 2781 bp, Homo sapiens
tgcactgccgagactccacatagctctgtgtgtcagacccaaggctctagttgcatgggctcaccaggggctctcctgatctgagggttgcaaagatctgtaggagaaacgggtttcctggggtcacacattcagctattgcttctcttggctggcggtggggattcccttgcctccatctagctccggggtgggccgttaccctaccctgcttttcttctttctccatgggttgagttgtttacctatcagtcccaatatgagtacctggatatttcagatgaaggtgctgtattcattcacccctttttttcctctctgtgagtgctatggacagcagctgcttgtaattagccatcttgcccacctccctccccccatactcctgttttttaatgggacttttgaaacaaaatatattactttagaaatagccaattttccccctaaattaaattgttggtcttagctttaagtcaactataattcttgtataatttttcacataaaattggtcttttatccataaaccagtaacaggatttttcttagtgtcagtaaacattctttttttcccccaagttttaaatgatgtaatgactatttcttctgaagcttttagttaatattctatacaagaagcatcttatttactttaatttaaatgtttagtttgtctcttccttcttctttgggttctctggttaatctaactggcatctttgatgccaaaacacttttaactccggatttgattgtttggctcattttgtttattaacttttcatcctctctagtaaaccaagtgtaaatttgccatttctcaaattctttcacatttttctagacaatggatggtttgtaattatggcacctgtgcttgtattttaacaaatgctgcagatctctcaggctgtttatatgagaacatatttctgagatttagattaactcttatttttctcctcttcccctctaagtgactacagtttttttgttgttgttgttcttcagaagcttataagaaagctgtcttttgttaatttactcatcactgtgttcactcattgcatattacatgataaccaccatgctaggcattagcacaaaaagtaagacaaagactttaaaccatagaagttcaaatcttgataggacataggatcttaaacatataatggcaacacagtgtgctaaatgttgtgatagagacatatagggaggtagaacaaaggggttaacaaaggttttacagcagagaaggtacttgcctgtgaaatacaagtttgtcaggcctaggaagaaaaatcttttccaggcaatttgacttatttgcatttactaagcattagcctttttttcatgtagcacactacaaacttttaaaataatactctatcgatctaactttcttttttcctattttttatactgtctctggttcatttctctggtcacctctcttcttagagttaaacaaataatcaggaactttatatattttgttgtatttcttcactccatttcatatgccctaactcagaatataataaaatgcctgttataacccaagatagttatgaaaagatgtttgactttgttagaacaacaaatcaattatagtttggtcatatttttggacagtgtgatggaaagagagaacattttgaaaattttatctatctttccaaaataaatatttccagaaatcttaattatccttttgaaagtctatgctgacatgcacttttattttatttttatcacagtcatttctttatagctgcattgtctgtgaagctgagtctacttaactgacttgtgcacacaccatactgaaagagatgccagcatacaagaactaaagagcctgtctttgaatgttcatgacaaaacaaaagtagcaagaaagcaacatcggcagaacatacaaaagtagcaaaaaataattgccaatcattctgtaaccttaaaaaaaatttactcattgaaaataaaatgaaaattcatccttaaagttggcataaaaaacagtgctaaaatttagttccccattggaatgaatgctttctcracagggtaacaaatgaaaattggatcagggacacattttcagtgaaaaagacgcactgccagatggcttcttggcaaaggaaaaggaagagttgattaaaccgtcatgtgacgacttcaaattcagctaagtacagcttagcaactttttgttgagaaggagaaaggaggatattcaggttctaggcatgattgtaacattattaaggtttgagatcactttgcagcttcaccggttttctatcattggtttcgataaggaaaatataaaattagtcccacccaagaacaaaatactttgctgaataaaacttgaatttcctcagaactaattctttgaaatcatcgtgcaaacacactcctcatgaagtacattttacttttcaagacaaacatattgtacatgttcatttatagacactactatttcaagatgaattagaatcttgcacccttattgtctcagagagcaatgggaagtattataaaacttgtactaaaatgcaaacatattccctaaaggatttgcttcccttgtctttctttcatctctctcatatcttctggtaggacatcactagattgctttcaaacctgcactggcttcatctgttggtgttgtcaattacacagtttccaactcttctgccttgggagacccagtgacaatattccacatctttggattcaatgcttgatctaggagtg

SEQ ID NO: 52210 - DNA, 542 bp, Homo sapiens
tgcctctctaaagatgaagccaaaatacggagggactgctgagaaatgggcctgagatcaccggctgcaacacgcttgaatcctgttctaactctgccttcwcatgtgtgatggttcattttctctgtcaacttggctaaagtaaggtaaccagttgtttggtcaaaactagtttagatgttgctgtaaagatagtttttataagtgattaacgtttaaaatcagttgattttaagtaaagctaattaccctctataatgtgggtaggtctcattcaattagttgaaagccgaagagccaggcctgaggttttccagagaagaaagaactctgattctaaactacaacatcgtaggtcggcctgacttggcagtccccataattgtgtgaacaagttccttaaaataaaataaacctctctctttttttatatacatgtacatatatgtatgtgtgtgtatacaatgtccacctccaaacaaaaactggctttaaaaatgtatatacacacacccgtgtatgtatatatatatcacacatac

SEQ ID NO: 52211 - DNA, 537 bp, Homo sapiens
ccagcgaactagattgtgctttatcataacaaccttgtaaagtactgtacttctcctttgctttgcttggttttacatgtgggttctgtttttacataaaaccaaatgtggaactttatttcaagaattcttttgtcactagccctggtgtaatgttcttttctttcttagtaagatttcaaatcacgtttttgtttgttgtttgttttgtttgtttgtttgtttgtctttttgagacgaagtctcgctgtgtcacccaggctggagtgcagttgygtgatctgggctcatagcaatctctgcctcctggtttcaagcgattctcctgcctcagcctccacagtagctgggattacaggtgcgcgccaccacgccctgctagtttttgtgtttttagtagagacggagtttcactatgttggccaggctggtctcgaactcctgacctcgtgatccgcccacctaggcctcccaaagtcctgggattacaggcatgagccaccacgcccagccttcaaattactttttagagcaata

SEQ ID NO: 52212 - DNA, 625 bp, Homo sapiens
gaagggaaacttcatctgtatttctagcccctcccatcgcttgcatgaccacctgagctccatgtcctgtcagatcagcagcagcattagattctcacaggagcacaaactctgttgtgaagtgtgcatgcgagggatctaggttgtgtactccttatgagaatctaatgcctgatattctgttactgtctcccatcaccccagatggacagtctagttgcaggaaaacaagctcagagatcccactgagtctacgttatagtgagttgtagaatcatttcattatatattactatgtagtaataatagaaataaagtgcacaatatatgtaatgcacttgaatcatcctgaaattattccctcattcccagtctgtggaaaaattgtcttccacacattcactctgttttttggtagaggcagggtcttaatatattgcccagtctgatctcaaactcctggcctcaagtaatatacctctctcagcctcccaaagtgmtgagattacaggcataagccaccaccctcaaccaagactttcttaaaccaaataaaaattaagtgagattacttgagcccaggtggtcaaggctgcagtgagcctgattgcaccactgcactcca

SEQ ID NO: 52213 - DNA, 625 bp, Homo sapiens
gaagggaaacttcatctgtatttctagcccctcccatcgcttgcatgaccacctgagctccatgtcctgtcagatcagcagcagcattagattctcacaggagcacaaactctgttgtgaagtgtgcatgcgagggatctaggttgtgtactccttatgagaatctaatgcctgatattctgttactgtctcccatcaccccagatggacagtctagttgcaggaaaacaagctcagagatcccactgagtctacgttatagtgagttgtagaatcatttcattatatattactatgtagtaataatagaaataaagtgcacaatatatgtaatgcacttgaatcatcctgaaattattccctcattcccagtctgtggaaaaattgtcttccacacattcactctgttttttggtagaggcagggtcttaatatattgcccagtctgatctcaaactcctggcctcaagtaatatacctctctcagcctcccaaagtgctgagattacaggcataagccaccaccctcaaccaagactttcttaaaccaaataaaaattaagtgagattwcttgagcccaggtggtcaaggctgcagtgagcctgattgcaccactgcactcca

SEQ ID NO: 52214 - DNA, 562 bp, Homo sapiens
tactgcytgctcatctgtgcacccccagccctaggcaaggggactggccattgcaggatctgagtgcaggacagattgtgcaaagaggagggggatgagcagcagggaagctacttggggggctgatgctctagtggagtctgagagaggcaaaatgggaggaaaaggagaggagaagacaggtatgcagtgacatgtcaaaagaagcattccttatctgtgcatatgaactggttttgctaccatttcctcaatcagtgaggtttgtgctctatctactggtcatatgtgttattgcacccaacacatccaagaaaagtttttcatcaacaacttcacacatctgcaaaatcatacatgcagaatgctttggggacttaggtctgagccacagtttgttgagaaggagtcaggtgaataagtgggattctttcccaagatcaatgccacagtaagggagagaggatcagcgcgtggaggaaggagcagtccctggaagctgcagtcatcctgggaaagagctgccctacacagggcagggatggaaaagagaagacattct

SEQ ID NO: 52215 - DNA, 2213 bp, Homo sapiens
cctgcaggcattaatgctcagatttgagatggcatccttatttgctaagtgcaaagatggttacaaaagagcttttctcactttgaggataaaagctaaagtattctttaattttggttaccgcctggctcatctcagcaccataatagttatttggctcaaaaccaaaaagtagcaatacagtacttacatgtctrtggatcaaaattagatgaaaaattgctgtttctcatctccaaagctatttgctgcacattttataaccctcaagatgccttttgtaatatgtgataacagagccaactgcagcatctgcctggaaagagattactttaattatggactcaatgtcctattttctgcaagtgatccccagagacaggcttcctgccgaaggagaggtgcaaggatgcacattaaagcctacacatcaaccacgaagaggtggataaagtgagacaaggacaaccataaacctccttcattttcctagtctgtaatgtgatagaagagtctatagtgataggtttttaattattgtagcatctgttgttatggacttttgatggtaagggcaagatgagcttgtgaaacagcaaaaccttctacagagaaaacattatatttaaaaagttcggtattgtttaaattactcttgatatgactttttttaacaaataagtaaaacactaaaaaataaaagaataaaacatttgtaaaggttcgataaacatgctttaaagtttttctctcaaaattaaacgtgtgtgtctgtgtgcatgtgtgtgtgtatgtgtgtgtgtgctattatcagttacttgctataatattattagaaagtgaagctaagtggttttcttgtcaaccccagttctggataacacatcaagtgcctcattattaagaattcatttgccattcagtataatagagctgttcataatgaacttcatttagaatcaaggtggatgtcttgtgcatttccatggaaattctttataatttaacactgatttaacgttatgaatggacacttaaagcaaattgttaccttgttcttattaattacagaatcagactccttgattaatagttttttttttttaagaatgagtgtttttcttttctttttaaaagcatagcacatactcacataggatatttgggatttcatctaatttctcaaaaagtataaacatattttgcatttttagaagatggaggattattgaaaagtaaccatgggaattaattttaaacttcaaaagaggaatttaagggatttggcatggaatgaatttgtgtgtgggacggaaagatggaacagaaaaatgtaccttacaatcatattaggtgaaaacatcaagtcttttaagtatcataccaactatggcgttgatgattttctggtgttaaaatgaagtgctattactacttttataattttataaataaatccaaataaatttatcttagggaattctaaatggtactatttaaccctaagacattaaatgaaatatctgacatttttcagacttccttatttataataaatgccatgctggataaattttttaaagatacattgaaatggatagttttatagagattttattattgtatattttgtaaatgaacaattaaatctatattatccatatatcaccagaacttataaataggagcaagggtttagtgttcatttctgtttaaagatcttggatattaagaattaaagcaatatttctggacttagggaaaatagaaacttattaaaagaaaccgagagcatgaataactgctctaaggcatcagtgaaaggatttctgatttttattctgatcagtgatttttaattctgattgatcagtgaaaataattcctgatttttaaatgttatattttgtttctcaaatatttcattatttgaaatattttttgaaatattttattatttgaaaagcaaaatatttcattctatggatctcagatttgttctgcaatcagatatctcatacaaatatatagtaagggaagatttctaaatggctcatttggagcatgaggagatgacctctccaaagatcaaagggaatcagagacttctcttgaagagcatttattctgtaacttcaattccatattccactttggtaactctcaatcgagcttttatttaaacagttaagttgtttaatccaagggttgta

SEQ ID NO: 52216 - DNA, 638 bp, Homo sapiens
gagagagggagagggagagggaaagagaatctcttgggagaactaaatgcatagacacagaagcagactcaggtgggcgcagtrcctcacgcctgtaatcccagcactgggaggccaaggctggtggatcacttgagatcaggagtccgagacaagcctggccaacatggtgaaacccacttgctactaaaaatacaaaaatattagccaagtggtagtagcatgtgcctgtaagcccagctatttgggaggctgaggaaggagaatcgccgaacccagggggcagaggttgcagtaagcccagaacacgccactgcactccagcctgggcaatagagagacactccgtttcaaaagaaaaaaaaaattcaccggatgtggtggcacatgcctgtggtcccagctactcgggaggctgaggcaggataattacttgaatgccagaggtggagtttgcagtgagccaagatcatgcctctgctctccagcctgggtgatagagcgagactccatctcaaaaataaataaatatataaatacaggggacagagacaacagcattccaagatgaatcagagaaaggatctgctgcccaattacaagaaagcaaagacaacagctgtttgtgtgtgtgtgtg

SEQ ID NO: 52217 - DNA, 282 bp, Homo sapiens
tgactctaggaaaataggaatacctcattcgtttattaagtagttaggcccaaatttagtagtagcrgtttgtgtagtgtctgactgatatttctgtgttcccctaaaaatttaaaaacactataacactcctgtgggttcacggtatcatgattgggaaccacggtcctagcagcattaagagtgtgtgtgtattgtaggggagaaaaaatagttttactctacttattttaggttcagtgctcgagacccctgtatcaaacgaaagactaacaagcaaaa

SEQ ID NO: 52218 - DNA, 630 bp, Homo sapiens
tcttaacacaatttttaagactctctttcttttttaatatattaaaaatatttgtaaggaagacataacataaaagttaccacctaaccattgttaaatgtactgttcttagtgttcagtgtattcacgttgttgtgcaacagatctctataactttttcatcttgcaaaactgagaccctgtacccactgaacaacgactctgtatgtcctccctccagcccgtgcaaccaccattccatttcctaaacttccttgaactgactcctcctctcctgtttgattttctctaactcatttcaaaacctgccttccgccttacctccatacacaatgtctttctagttcccatcatagatcccagttcagatcttcactcacatccttctcattgcctggggtgctctcccatgaccycttgtgtgattattttcttccttttttttaatttaattttttaaaattatactttaagttctaggctatatgtgcacaatgtgcaggtttgttacatatgtataactcacctttcagatacagacttaaaaggcgttcctagagtgggagatttacacccaatatgtgctctcacatgacaccttgttatttcccaccatcacaaaaattaact

SEQ ID NO: 52219 - DNA, 529 bp, Homo sapiens
cccagctgaccccatgaatagaaagggcacattgcctaactctctgaaacacccagagccatgagccaccccgcctggcccagtggcagctgtgtgtctgctgagccctcctgaaggacgtgtatttcccttgaccacagaaggcaagcctgtttccaggcatccttggtgcccagttgctggaggctgccccagttcctgacagagctgagccagcctcggttctgccataggcatgtgctggccacgtctgggtgggtgaggaaggcggccctttgcttccttactcagaaaccacttgcttcccctcccgacccccaggtccacatgcctgggaagctgtgctgaagctgtcctggcttcactcccctctaagcctttgactytgggaaaggctcatcattccaaatggacataacctgcttctggttccaccttgaagctagaaatcgaggcttcaattggctgttgtagcacctgcaaccaggagtctccctgtcctagatccctccctccaaggggcaggagg

SEQ ID NO: 52220 - DNA, 2934 bp, Homo sapiens
  misc_feature (1)...(2934): n = A,T,C or G
atttttagagtcgttttaactattagttttaaaattctggtttccaaatgctgatttctgatatggagaaagataattgatgttgtggttgattttgtatcctgcaaccttgctgaacttacttactagttttaggagttatttttatggatcccttgagattttctatgtaggtaatcatgttgtctatgaataaggacagttttatttcttcttttccaatctgtatgccttctatatctttttcttgcattagtttactgactttaatttccagtgtgatcctgaataagaatggtaggagtgaacatccttgcgttgtccctaattttaaggggtaaaatattgacttttttcccattaaatgtgaggtgagcttgyaggtttttttttaatagatagactgtatcagcttgaggaatttttccttctagttaactgagaatcattgtgtttttaagaatcacatatggatatgaagtcgaatattttttctgcattcattcatatggtcacatgctttttcttccttcaactgtactttgacccatgtttgggtggatacagatggagagaagggaaaatgaagagtggcaagaaggagacaaagaattcagcagaagtagtgaattgcagcaagaagtagctagaagaaatgtaagctttcccctccactaaagaattctgatgtattggaaagatcttagacttcttgctatataagggatgaagctcaatgtttttattgaagttctaaaagacaaggttgactttagcagtctggaggacttagggacacctgagacagatgacttctaggggaaatatgtccctctactcttggttcggccttttgtgtgcaaattaatcaatgcatttgatgaagcttccaagtcatcacccaggccaatgcccagcatatgacaggtactttatatacacctgtcagatgagtgactgagtgaaatgtcatcaactagacagtatgacattgtgattaaaagtatgagttaggagctgaatacctgagttgaactgtggctcttcctctgtagaggctacacttcagcaagttattgaagctctttatagcctgggcaacatggagaatccccatctttacaaaaaatacccaaaattagccagatgtggtggtgtgtgcctgtggtcccagctaccagggaagctgaggtgggaggatcacttgagcccaggaggttgaagttgcagtgagtcgtgattgcaccactgcactccagcctgggtaacagagcgagaccctttgcagggcttagtaaagtgcctggcccataatgactacaacgtaagtctgactgttcttattattattcacgttcattttcaggattgaacactctgccattactttttcattacatttccatcattttcttccttccttcctttctatcgctctcttttaaagtaaagcttaaaatagtttctcctatggccatagaattggaaacaactgtagtggcaatctaattcaagcttcgtgctttctgtgtgaggaaagggaggctcagagaagccaagtggtcccctcatctggggcatctggggtttcggtcacctgcagcaccattgcaaagctgagcttgagcttgttctcctctagccacaaatcagttgcagttcaggaccctcaaaacaacccaaatatttaatatctgcattgttggaagttacagtgcaggtgcccattcaggaccaggagacttgtagcttgaaacatggcagtcactgcatcagtgtgctggaaagtggacaggcagatacagtgcaagggcagagtcagcaacaaacactgtccacacctcctcctccaggagaggnctgttctgagacctggagaaaggcttcatttcctggctagtccctgataggtcacacattcccggagctgcctttgtcgccctcatctttcctggcccctgaagccatttagttgcttctccagcaaagggctgaggcagcagccttgcaaatctccatgacccaccttgtcttgcccagaatgcatttggtgcacgtgtccataaatattttaggccgtgctgcttagttattaatggagtgaaatgaaagataattctttagcctctccccttctctacaggttgaaaacgagagccagagtttgaagggctggagtgacaggtgtttagggacttgggatgctgggggtgaagctgcagatgaattttctctgtcccgtccttattgtgaaaagagggccctggtcccttgattccaaagaaccagagttaccctcttttcccctgatccctggaaggtggggtacagatgttgtcctgtgacgcctgtccccacttcgtgcacggagcggactgcccagcatgcacagatggaatgggaacaactgcaatgaccaccttcggaagagtgagcctgggaggccccctggagccccaacttggggcggaggctggtgacctgtcagccactctcagacagtcccaccctatggcctgaaagggtggtggccaggtaggtggttgactttcctccctgccccctcttccttattcagtgttaaagagctagcatttgagggtggcctcgggtgacaaattccccactgttaaaaccccctgtgggttggcagcagccaggaagaaccggctttttgtctgggagtagaggcaagggcgatggcttatctcactgttccttttcatttgggacataatacatcccacaaagctcaggtcccgcactgaaaaaatcaattacattcacagcatttttagtgctctgagtctccgagcaaaggaaataggtgagannnnnnnnnnnnnnnnnnnnnnnnnnnnnnnnnnnnnnnnnnnnnnnnnnnnnnnnnnnnnnnnnnnnnnnnnnnnnnnnnnnnnnnnnnnnnnnnnnnnt

SEQ ID NO: 52221 - DNA, 2934 bp, Homo sapiens
  misc_feature (1)...(2934): n = A,T,C or G
atttttagagtcgttttaactattagttttaaaattctggtttccaaatgctgatttctgatatggagaaagataattgatgttgtggttgattttgtatcctgcaaccttgctgaacttacttactagttttaggagttatttttatggatcccttgagattttctatgtaggtaatcatgttgtctatgaataaggacagttttatttcttcttttccaatctgtatgccttctatatctttttcttgcattagtttactgactttaatttccagtgtgatcctgaataagaatggtaggagtgaacatccttgcgttgtccctaattttaaggggtaaaatattgacttttttcccattaaatgtgaggtgagcttgtaggkttttttttaatagatagactgtatcagcttgaggaatttttccttctagttaactgagaatcattgtgtttttaagaatcacatatggatatgaagtcgaatattttttctgcattcattcatatggtcacatgctttttcttccttcaactgtactttgacccatgtttgggtggatacagatggagagaagggaaaatgaagagtggcaagaaggagacaaagaattcagcagaagtagtgaattgcagcaagaagtagctagaagaaatgtaagctttcccctccactaaagaattctgatgtattggaaagatcttagacttcttgctatataagggatgaagctcaatgtttttattgaagttctaaaagacaaggttgactttagcagtctggaggacttagggacacctgagacagatgacttctaggggaaatatgtccctctactcttggttcggccttttgtgtgcaaattaatcaatgcatttgatgaagcttccaagtcatcacccaggccaatgcccagcatatgacaggtactttatatacacctgtcagatgagtgactgagtgaaatgtcatcaactagacagtatgacattgtgattaaaagtatgagttaggagctgaatacctgagttgaactgtggctcttcctctgtagaggctacacttcagcaagttattgaagctctttatagcctgggcaacatggagaatccccatctttacaaaaaatacccaaaattagccagatgtggtggtgtgtgcctgtggtcccagctaccagggaagctgaggtgggaggatcacttgagcccaggaggttgaagttgcagtgagtcgtgattgcaccactgcactccagcctgggtaacagagcgagaccctttgcagggcttagtaaagtgcctggcccataatgactacaacgtaagtctgactgttcttattattattcacgttcattttcaggattgaacactctgccattactttttcattacatttccatcattttcttccttccttcctttctatcgctctcttttaaagtaaagcttaaaatagtttctcctatggccatagaattggaaacaactgtagtggcaatctaattcaagcttcgtgctttctgtgtgaggaaagggaggctcagagaagccaagtggtcccctcatctggggcatctggggtttcggtcacctgcagcaccattgcaaagctgagcttgagcttgttctcctctagccacaaatcagttgcagttcaggaccctcaaaacaacccaaatatttaatatctgcattgttggaagttacagtgcaggtgcccattcaggaccaggagacttgtagcttgaaacatggcagtcactgcatcagtgtgctggaaagtggacaggcagatacagtgcaagggcagagtcagcaacaaacactgtccacacctcctcctccaggagaggnctgttctgagacctggagaaaggcttcatttcctggctagtccctgataggtcacacattcccggagctgcctttgtcgccctcatctttcctggcccctgaagccatttagttgcttctccagcaaagggctgaggcagcagccttgcaaatctccatgacccaccttgtcttgcccagaatgcatttggtgcacgtgtccataaatattttaggccgtgctgcttagttattaatggagtgaaatgaaagataattctttagcctctccccttctctacaggttgaaaacgagagccagagtttgaagggctggagtgacaggtgtttagggacttgggatgctgggggtgaagctgcagatgaattttctctgtcccgtccttattgtgaaaagagggccctggtcccttgattccaaagaaccagagttaccctcttttcccctgatccctggaaggtggggtacagatgttgtcctgtgacgcctgtccccacttcgtgcacggagcggactgcccagcatgcacagatggaatgggaacaactgcaatgaccaccttcggaagagtgagcctgggaggccccctggagccccaacttggggcggaggctggtgacctgtcagccactctcagacagtcccaccctatggcctgaaagggtggtggccaggtaggtggttgactttcctccctgccccctcttccttattcagtgttaaagagctagcatttgagggtggcctcgggtgacaaattccccactgttaaaaccccctgtgggttggcagcagccaggaagaaccggctttttgtctgggagtagaggcaagggcgatggcttatctcactgttccttttcatttgggacataatacatcccacaaagctcaggtcccgcactgaaaaaatcaattacattcacagcatttttagtgctctgagtctccgagcaaaggaaataggtgagannnnnnnnnnnnnnnnnnnnnnnnnnnnnnnnnnnnnnnnnnnnnnnnnnnnnnnnnnnnnnnnnnnnnnnnnnnnnnnnnnnnnnnnnnnnnnnnnnnnt

SEQ ID NO: 52222 - DNA, 628 bp, Homo sapiens
ttagtttggcagctgcttgcagccaataagggttgattctgtgggctgagcctaggtcttggcacagtggcccgtgtgggctgcaggctgcagagttgggaggaccccacagacatygctggtgcctcctcggccagcatctctatcttcccctggaaagtggaccagacatacgcttggggaaaatgttcgcaagagggaaaggatgtcactaagggaaatagctcttccacgcctgaccttcccctccctagccccagtcacatcctggaccccaacattacccagaatgctctttcttaaaagttttaaaacaggccgggtgcagtggctcatgcctgtaatcccagcactttgggaggacaaggtgggtgaatcacttgaggtcaggggttcaagaccagcccggccaacatgatgaaaccctgtctctactaaaaaatacacaaaaattagccaggtgtggtgatgcgcacctgtaatcccagctactcgggaggctgaggcaggagaatcacttgaacctaggaggtggaggttgctgtgagccaagatcatgccactgcactccagcctgggtgacagagtgagactctttcaaaaaaaaaataaaaatttaaaatgcacc

SEQ ID NO: 52223 - DNA, 628 bp, Homo sapiens
ttagtttggcagctgcttgcagccaataagggttgattctgtgggctgagcctaggtcttggcacagtggcccgtgtgggctgcaggctgcagagttgggaggaccccacagacattgctggtgcctcctcggccagcatctctatcttcccctggaaagtggaccagacatacgcttggggaaaatgttcgcaagagggaaaggatgtcactaagggaaatagctcttccacgcctgaccttcccctccctagccccagtcacatcctggaccccaacattacccagaatgctctttcttaaaagttttaaaacaggccgggtgcagtggctcatgcctgtaatcccagcactttgggaggacaaggtgggtgaatsacttgaggtcaggggttcaagaccagcccggccaacatgatgaaaccctgtctctactaaaaaatacacaaaaattagccaggtgtggtgatgcgcacctgtaatcccagctactcgggaggctgaggcaggagaatcacttgaacctaggaggtggaggttgctgtgagccaagatcatgccactgcactccagcctgggtgacagagtgagactctttcaaaaaaaaaataaaaatttaaaatgcacc

SEQ ID NO: 52224 - DNA, 769 bp, Homo sapiens
  misc_feature (1)...(769): n = A,T,C or G
tatcacctgtctctagtgcttgtcataaggatcaaatcaaatataagcataaatcctcaagcacattgccwagcatagtatagatgcttgataaatactatatattattcgagaaataatattcatactattaattaatattaatattcatatcaataaaatagtcatattaatataaatatttatattcatattgttaataggaatgttatattaataattgaataattgaatattcgtattaataattgaataattgaatattcatattaataattgaataattgaatattcatattaataattgaataattgaatattcatattaataattgaataattgaatattcatattaataattgaataattgaatattcatattaataattgaataattgaatattcgtattaataattgaataattgaatattcatattaataattgaataattgaatattcatattaataattgaataattgaatattcatattaataatgtaaataagaatatatcattattgaataatacatattattaaagaaataatatatagcatttatcaagcatctataatacagattgttggataaatatgaatacataaaaatgtttaagttctgtatataccaaaacattaataagaataaaagacaaacaggaaaannnnnnnnnnnnnnnnnnnnnnnnnnnnnnnnnnnnnnnnnnnnnnnnnnnnnnnnnnnnnnnnnnnnnnnnnnnnnnnnnnnnnnnnnnnnnnnnnnnnt

SEQ ID NO: 52225 - DNA, 769 bp, Homo sapiens
  misc_feature (1)...(769): n = A,T,C or G
tatcacctgtctctagtgcttgtcataaggatcaaatcaaatataagcataaatcctcaagcacattgccaagcatagtatagatgcttgataaatactatatattattcgagaaataatattcatactattaattaatattaatattcatatcaataaaatagtcatattaatataaatatttatattcatattgttaataggaatgttatattaataattgaataattgaatattcgtattaataattgaataattgaatattcrtattaataattgaataattgaatattcatattaataattgaataattgaatattcatattaataattgaataattgaatattcatattaataattgaataattgaatattcatattaataattgaataattgaatattcgtattaataattgaataattgaatattcatattaataattgaataattgaatattcatattaataattgaataattgaatattcatattaataatgtaaataagaatatatcattattgaataatacatattattaaagaaataatatatagcatttatcaagcatctataatacagattgttggataaatatgaatacataaaaatgtttaagttctgtatataccaaaacattaataagaataaaagacaaacaggaaaannnnnnnnnnnnnnnnnnnnnnnnnnnnnnnnnnnnnnnnnnnnnnnnnnnnnnnnnnnnnnnnnnnnnnnnnnnnnnnnnnnnnnnnnnnnnnnnnnnnt

SEQ ID NO: 52226 - DNA, 769 bp, Homo sapiens
  misc_feature (1)...(769): n = A,T,C or G
tatcacctgtctctagtgcttgtcataaggatcaaatcaaatataagcataaatcctcaagcacattgccaagcatagtatagatgcttgataaatactatatattattcgagaaataatattcatactattaattaatattaatattcatatcaataaaatagtcatattaatataaatatttatattcatattgttaataggaatgttatattaataattgaataattgaatattcgtattaataattgaataattgaatattcatattaataattgaataattgaatattcatattaataatygaataattgaatattcatattaataattgaataattgaatattcatattaataattgaataattgaatattcatattaataattgaataattgaatattcgtattaataattgaataattgaatattcatattaataattgaataattgaatattcatattaataattgaataattgaatattcatattaataatgtaaataagaatatatcattattgaataatacatattattaaagaaataatatatagcatttatcaagcatctataatacagattgttggataaatatgaatacataaaaatgtttaagttctgtatataccaaaacattaataagaataaaagacaaacaggaaaannnnnnnnnnnnnnnnnnnnnnnnnnnnnnnnnnnnnnnnnnnnnnnnnnnnnnnnnnnnnnnnnnnnnnnnnnnnnnnnnnnnnnnnnnnnnnnnnnnnt

SEQ ID NO: 52227 - DNA, 620 bp, Homo sapiens
atttctgatcatataagtcagcatcataaatttaaatgctaagtagaatatacaactcaaagttctatatgcatttaccttatgctaggccatgcacttttagtttatttgcacaacaataaattgggaactttgttttcccatttccaggtaatagactagagctcagaaaggtttagtaaaatttctaagtttgcacagttagtcgaagccagatcttattgggttttactgactcttaaggtcttactggctcttaaccaccactcacttcactgatgaaagtgccagaaagccatcatggttaccaaatcatgcgatgaaaaatcaaatgacaacgcaataaatttccgtgatgtagatgaaacacagactgcggcaaaaccatctgttagattttgttagttaaataaaccccaaaatgaatctsgcaggaatatttgcacctatcctaaccaagtgtacacttatatacatttatattttttaatgcaaatttgcatgtacaggctatgttcatgctcagaacaagtctacttttggagagattattcttattatgctatgattatcatcaatgaaaagtcgaatcatcatttaatgcatcatttgctatgtaa

SEQ ID NO: 52228 - DNA, 1113 bp, Homo sapiens
ttttttttttcttgagacagagtctcgctctgtcgcccaggctggagtgccgtggcgggatctcggctcactgcaagctccgcctcctgggttcacgccattctcctgcttcagcctcccaagtagctgggactacaggcgcccgccaacacgcctggctaatttttttgtatttttagtagagacggcgtttcaccgggttagccaggatggtctcgatctcctgacctcgtgattcgcacatttcggcctcccaaagtgctgggattacaggcgttagcctcccacgctggcctcatctttcaatttttaacacatctgaggaatatgaataattccaagtgaagtagacattcataaaatgcttttgttcttccatcatttaaatccaaacttttccatgctgtcttattatgttggtgcaaaagtaattgcggtttgtgccataactttcaaggtcaaaaaccgcaattacttttgcagcaacctaatagtttgcttacaggaatctaacagtcgttattctcttggtcaaattgaaagctgaaaaataatctttaaaatatagatctctatgtttatttcaagtcttcttggcattttctaaattaaataatttcataaaactagaccaaagctgtatgagctaagatatwtatcacagtatcaaaataattaacatttactgagaaaagtcagacactgtgatgcactgttttatatgcataatctttatttactatcacaaccaccctatgaagtagcttgtataataatcccaatttttacagatgagaaaattgcactttagagagagtacgtaacttgactaaagtcacatagctaataagtggcagagcagccaggactttttttcttttgtttgtttgtttgagacagggtcttgctctgtggcccagactggagtgcagtggcacaatctctgctcactgcaacctctgcctcctaggttcaagcgattctcctgcctcagcctccagagtaactgggattacagacacatgccaccatgcccagctaatttttttttttttttttttttttttagtagagacaggatttcaccatgttggtcaggctggtttcaaaccc

SEQ ID NO: 52229 - DNA, 582 bp, Homo sapiens
taatgccttgaccactttaagttaggcatggccatatgacttcatttggctaaggaaatgttagtggaagatgggtggtacttttagctgaaagcatttagttcttggtcttgcctctctgccttgctttttctctgccccaaggttgaagtaaggagtcaatatgatgcccaaccaacttaagatggaaatgtaacatgcaggaaaaacaaataattgtgraattaagccactgagacatcagggctatttgttacagcagaacaacctaccctgtactgcagcaataggaaaaacaccaagagcagaatctgtcaattaacactcagtaaatattaacactcagtaaacaccttcgatgaagatggggcctatagcatttgattaacttgctttggaatctagtgatttgaattctgctgttttgtagttgtgtaaccttaaatacatcatatcatatctctatgcctctgttttctcatctgtagtataggattagtaatagcccagcactccatagcttaatgtgatttttaatatgaacaagaatataaagtatgagcaatgagtattttgtgtttt

SEQ ID NO: 52230 - DNA, 564 bp, Homo sapiens
ttacattgcttactatgctacagcaatacagttcttagtaaacaaagtaacttcaaccctcaggttattgcacttgccatcaaattcctagaatatccttttccccaggtctttattttgttaactccatcttatccttcacatctcaacttcaatgtcaactatcagatatgcttccttaacagccaaacttacattaccytccctctatcatattgccttgcttagttacttcacaatttccagaatctaaaattatttttatttatttatgtttttacttatttgttacatgttcccacctctagaatacaagctccatggagtgaggtgttatttttctctttttcaaaaagaataaaatccccaggcatataacagccacgtgataagtatttgctaaatgaatgactgaattttaaaactattatattaagtgttctgagataatccctccaaatttctcccaggcaatgctagacttttacaaaaaggaagaaaataaatggcttgtacgcagctatagtatttttacaacaaagtggattattaattaattggcca

SEQ ID NO: 52231 - DNA, 517 bp, Homo sapiens
taatgacagctaacattactgaactaggcactgttcagagcacctaatgtaaatgaactcagtacatgtgccgagaactgtattgagtatgcaacatgaataaaacagtccaaacctcaaaacaaacctatgaggcaaatactattattatcctgattctattgaaaagtgaggaacagaaacgtttagtaaatcactcaagatgtcacaatggctttttcytttaaagcaatgaatagttttagtgcgcgtgatcccagagagaggagaaatatcagtggcttgagatcacaggggaacaaatttcaaatcgatacagtgaagaaactttgggagtaaaagcttttctacttaggggactttgtccttactttccatcttcttgaaacttccttttcctgtaatgtctgtggaaagcactgcatgattcttgcttctccatggggattttccagattttgccaatattattttcatatcacccacacccattctctctttgcactattgaactatt

SEQ ID NO: 52232 - DNA, 545 bp, Homo sapiens
tcagaccatagcaaaagggagaagttttaaatgcacacttcattatgtcatttccaggtttaaaacccttcaaatgttgtctatggtttttcaagatgaagtccaaacccacaaggaggctgcatgctcaccaagccttctgcaactgaacgagcgcctgaataatctactcggctctggacaacctcttcaaactcatctcttcccatctcatctctcaatcttctttctctctctctctctcwcacgcgcgcgcacacacacacacacacacacacactttatttatttatttatttttgagacagggtcttgctcagttgcccaggctggagtgcagtggtgtaatcatggctcactgtagccttgacctcgtgagctcaagtgatgctccagccttggcctcctgagtagctaggactacagccacacaccaccatgcccagctttagagatatatatatatacatagtatttttttgtagagacagggtttcaccatgttgcccaggccagtcttgaactcctgggctcaggtgatcctc

SEQ ID NO: 52233 - DNA, 545 bp, Homo sapiens
tcagaccatagcaaaagggagaagttttaaatgcacacttcattatgtcatttccaggtttaaaacccttcaaatgttgtctatggtttttcaagatgaagtccaaacccacaaggaggctgcatgctcaccaagccttctgcaactgaacgagcgcctgaataatctactcggctctggacaacctcttcaaactcatctcttcccatctcatctctcaatcttctttctctctctctctctcacacrcgcgcgcacacacacacacacacacacacactttatttatttatttatttttgagacagggtcttgctcagttgcccaggctggagtgcagtggtgtaatcatggctcactgtagccttgacctcgtgagctcaagtgatgctccagccttggcctcctgagtagctaggactacagccacacaccaccatgcccagctttagagatatatatatatacatagtatttttttgtagagacagggtttcaccatgttgcccaggccagtcttgaactcctgggctcaggtgatcctc

SEQ ID NO: 52234 - DNA, 545 bp, Homo sapiens
tcagaccatagcaaaagggagaagttttaaatgcacacttcattatgtcatttccaggtttaaaacccttcaaatgttgtctatggtttttcaagatgaagtccaaacccacaaggaggctgcatgctcaccaagccttctgcaactgaacgagcgcctgaataatctactcggctctggacaacctcttcaaactcatctcttcccatctcatctctcaatcttctttctctctctctctctcacacgcrcgcgcacacacacacacacacacacacactttatttatttatttatttttgagacagggtcttgctcagttgcccaggctggagtgcagtggtgtaatcatggctcactgtagccttgacctcgtgagctcaagtgatgctccagccttggcctcctgagtagctaggactacagccacacaccaccatgcccagctttagagatatatatatatacatagtatttttttgtagagacagggtttcaccatgttgcccaggccagtcttgaactcctgggctcaggtgatcctc

SEQ ID NO: 52235 - DNA, 545 bp, Homo sapiens
tcagaccatagcaaaagggagaagttttaaatgcacacttcattatgtcatttccaggtttaaaacccttcaaatgttgtctatggtttttcaagatgaagtccaaacccacaaggaggctgcatgctcaccaagccttctgcaactgaacgagcgcctgaataatctactcggctctggacaacctcttcaaactcatctcttcccatctcatctctcaatcttctttctctctctctctctcacacgcgcgcgcrcacacacacacacacacacacactttatttatttatttatttttgagacagggtcttgctcagttgcccaggctggagtgcagtggtgtaatcatggctcactgtagccttgacctcgtgagctcaagtgatgctccagccttggcctcctgagtagctaggactacagccacacaccaccatgcccagctttagagatatatatatatacatagtatttttttgtagagacagggtttcaccatgttgcccaggccagtcttgaactcctgggctcaggtgatcctc

SEQ ID NO: 52236 - DNA, 545 bp, Homo sapiens
tcagaccatagcaaaagggagaagttttaaatgcacacttcattatgtcatttccaggtttaaaacccttcaaatgttgtctatggtttttcaagatgaagtccaaacccacaaggaggctgcatgctcaccaagccttctgcaactgaacgagcgcctgaataatctactcggctctggacaacctcttcaaactcatctcttcccatctcatctctcaatcttctttctctctctctctctcacacgcgcgcgcacacacacacacacacacacacamtttatttatttatttatttttgagacagggtcttgctcagttgcccaggctggagtgcagtggtgtaatcatggctcactgtagccttgacctcgtgagctcaagtgatgctccagccttggcctcctgagtagctaggactacagccacacaccaccatgcccagctttagagatatatatatatacatagtatttttttgtagagacagggtttcaccatgttgcccaggccagtcttgaactcctgggctcaggtgatcctc

SEQ ID NO: 52237 - DNA, 555 bp, Homo sapiens
tgatcagtgatgtcaacatttttttcaaattatttgaaacatagtgttttctgaagacacatcttccttgtctataagaagtttggaaatgagaaaaagaaacagcatgacattaagagaaaaaaagygggtataaattaatctaggagaaactattcatttatactttcccatgtattaaccatattgatgatgaaaaatggatcatcactatagaactcctttttgaagaaaatggtaaagaggagaacaagacatctgactagacccagccaagatactcttcttccatggagaggaaacaaaatattgagtaaactatcacacttcaaagagatctcttgagagaaaacactgaaagtcaatacgggcaacacaggtaccatgggtgaagaaggaggacattggaaggcctgttcaaagttgcaggatgtgaggactggtccccagaaaccaaaccagacctaagcaagggagcataactgtgtacacattgaaatacgaaagacatgagagcacctatgtaaaagcctacctgccagcccttattcttac

SEQ ID NO: 52238 - DNA, 645 bp, Homo sapiens
gggcggatcacctgaagtcaggagtttgagaccatcctggccaacatggcaaaaccctgtctctactaaaaatagaaaaaatagccaggtatggtggcgggtacctgtaatcccagctacttgggaggctgaggcaggagaatcacttgaccccaggaggtggaggttgtagtgagccaagttcacrccattgtactccagcctgggctataagagcgaaactccgtttcaaaaaaaaaaaaaagaaagaaagaaaaatactgatttagtaaatgacttgatttccaaaaaggtcattagcaataagttgttttgtttctgaccagtctggccaacatggcaaaaccccgtctctaccaaaaattagccaggcgtggtggcggccacctgtaatcctagctactgtggaggcagaggcaggagaatcgcttgaacctgggaggtggaggttgcaatgagccaagatcatgccattgtactccagcctgggcaacaagtgaaacttcgtctcaaaagaaagaaagaaagaaaaatactgatttggtaaatgattcgatttcccaaaaggtccttagcaataagttagttttgtttctacttgttatcatacctttgacttatctagaacttgttatacacagaaaa

SEQ ID NO: 52239 - DNA, 2883 bp, Homo sapiens
tacttgggaggctgaggcaggaggatcacttgagcccagaagttggaggctgcagggagctatgattgtgctactgcactccagcctgggtgatggagtgaatccccaaccttaaaagagtaataaataaataaataaataagtaaataataaayaaacatttctgaatttcacatgcaagaaagtgagctgaatgtggtgtcagagaggaaaggcagacaggaagggcagctggcctagaggcgttacagtgatggagggttgtcagcagatgagccatggtgatttgtgccccatgtcacacaaatgcagtgttggagaaccaggaggccaaagagctttcctggcagaggttgtgggactggccccatctctgggttccctggcagccggtgcttcgtgattaccttgcttgtcaatgtgggacctgtgtagtgtcgtctgccccaagttcttctcagtgcccctcaaagtcctcatcctactgatcttggcattcactttttctcatgatcccctgctccctgctgtaataacacggtactttcatttcctttttttttttttgagacggagtctcactctgtcacctaggctggagtgcagtggcgcagtctcggctcactgcaacctccacctcccaggttcaaataattctctgcctcagccttccgagtagctgggactacaggcgcacgccaccatgcccggctaatttttgtatttttagtagagatggggtttcaccattatgcccaggctggtctcgaactcctgaccttgtgctctgcctgccttggcctcccaaagttctgggattacaggcatgagccaccgtgcccggccggtagtttcattgcttattatgatagtagaagtcattttctaattcagaacacaggaacaaaactcatattctagaagagatgtgtcactctgataatcctggttgactccctcaaaagcagcggagtgtgtcattaacatgctgcagttgacaatgggtcatcagagatataggcaatgcacccatataggcatggatctcacatatgtgaagatgaaatagctgtgtttagtatttctcttacctggatttagtggtagttttttgtttccagtgtattttggggctttgtttggatgtctttttattcttttttaatttagtagatttcagatagaaagacctaggagatccatccataggaatgagatgtctcaacaaactatctagaaatattctaacatggacttgagatgaaaagaatctatggaaatgcctagacttcaatcggcatgcaaacatttattgagcgtctactaggtgctgcactctgccaggcctggggtaatcagaggtctctgagttgtggagacattaagtgactaagcacacagaaatgggcagtagcaaatcgggtaaatgatcagaaggaaaagtactgagtgctatgagaaagaacgggggggattgcgtggtgggtggtgggggtggtgtcggtggtcttagttgacctgtctagggaattgcatggaagcatggcttgaaagtggaagaagatagccaggcacagtccaggcagagagcaggactcataggggcctcaaggtctggaaagaaatgggtttgttgagttccaggacctggggaaggcctgtagctgagcagaacagtgcaggctgagagtggtgaggttggaaaagcaggaagaagctcaatcttacagagcctcatgggacaccatgagtcttgggaactttatctcaactttaatgagaaatcattgaagggagaaccacatgatcccacatgggttcagaacagacttggttagggacagagcctaagaggagactgacttggtccaattgcattgggaagccctgtatttaagggctttgctttcttttatttaaaggtttgttgccaccctctgacagtgaacctctaagggtctctggaggatgactgcttgggcaaagacagccagaattgaggtctgagcagggcctgtgagcctcacttgctgtgaaagtgtggtcttggctagtgtctccagcagccccaagtttgagtcttgttccaccccgcatcattctgtgtcctcttaaaaaatatccttccctctactggagcagctctgaataccagtcagggaccagctgaattttaagcctaggctgtttcttctgcctgagttgaggaccctagagggcacttgggggtcacccatcagagcagaatttctcacctagacattgatatctggtgggtagaggccagggatgcttctaaacatcctacaacacacaggataccccccccaccccaccttaagaaattacctagcccaaaatgttgacaaacatgcaataataattgcactattgcaattgtgcagtcataattgcactgttgacaaatatgcgataataattgcactattgcaattgacattttgggctaggtaatgtcttattgtggggtagagggtatcctgtgtgttgtaggatgtttagcagcatttctggcctctacccaccagataacagccatgcctcaccccccagccaagttttaacaaccaaaatatcttcagacatggacaaatatcccccaggagagaggacaaagtcatccttgcttgggaaccatggatttagaacatgacttcccaagagggtaatacgccccccacctcaaggagatagaacattagttttggggggccaaaatcttagatgttatagtggtttgtagttgaccaaaggagccacagtgtataagcagatgtacagcagatccatggtattgaaatttcatgggaaggaaggcaattagggaaggaaaaaaaaaaaaagtctaaaggctcctgggca

SEQ ID NO: 52240 - DNA, 2883 bp, Homo sapiens
tacttgggaggctgaggcaggaggatcacttgagcccagaagttggaggctgcagggagctatgattgtgctactgcactccagcctgggtgatggagtgaatccccaaccttaaaagagtaataaataaataaataaataagtaaataataaacaaacatttctgaatttcacatgcaagaaagtgagctgaatgtggtgtcagagaggaaaggcagacaggaagggcagctggcctagaggcgttacagtgatggagggttgtcagcagatgagccatggtgatttgtgccccatgtcacacaaatgcagtgttggagaaccaggaggccaaagagctttcctggcagaggttgtgggactggccccatctctgggttccctggcagccggtgcttcgtgattaccttgcttgtcaatgtgggacctgtgtagtgtcgtctgccccaagttcttctcagtgcccctcaaagtcctcatcctactgatcttggcattcactttttctcatgatcccctgctccctgctgtaataacacggtactttcatttcctttttttttttttgagacggagtctcactctgtcacctaggctggagtgcagtggcgcagtctcggctcactgcaacctccacctcccaggttcaaataattctctgcctcagccttccgagtagctgggactacaggcgcacgccaccatgcccggctaatttttgtatttttagtagagatggggtttcaccattatgcccaggctggtctcgaactcctgaccttgtgctctgcctgccttggcctcccaaagttctgggattacaggcatgagccaccgtgcccggccggtagtttcattgcttattatgatagtagaagtcattttctaattcagaacacaggaacaaaactcatattctagaagagatgtgtcactctgataatcctggttgactccctcaaaagcagcggagtgtgtcattaacatgctgcagttgacaatgggtcatcagagatataggcaatgcacccatataggcatggatctcacatatgtgaagatgaaatagctgtgtttagtatttctcttacctggatttagtggtagttttttgtttccagtgtattttggggctttgtttggatgtctttttattcttttttaatttagtagatttcagatagaaagacctaggagatccatccataggaatgagatgtctcaacaaactatctagaaatattctaacatggacttgagatgaaaagaatctatggaaatgcctagacttcaatcggcatgcaaacatttattgagcgtctactaggtgctgcactctgccaggcctggggtaatcagaggtctctgagttgtggagacattaagtgactaagcacacagaaatgggcagtagcaaatcgggtaaatgatcagaaggaaaagtactgagtgctatgagaaagaacgggggggattgcgtggtgggtggtgggggtggtgtcggtggtcttagttgacctgtctagggaattgcatggaagcatggcttgaaagtggaagaagatagccaggcacagtccaggcagagagcaggactcataggggcctcaaggtctggaaagaaatgggtttgttgagttccaggacctggggaaggcctgtagctgagcagaacagtgcaggctgagagtggtgaggttggaaargcaggaagaagctcaatcttacagagcctcatgggacaccatgagtcttgggaactttatctcaactttaatgagaaatcattgaagggagaaccacatgatcccacatgggttcagaacagacttggttagggacagagcctaagaggagactgacttggtccaattgcattgggaagccctgtatttaagggctttgctttcttttatttaaaggtttgttgccaccctctgacagtgaacctctaagggtctctggaggatgactgcttgggcaaagacagccagaattgaggtctgagcagggcctgtgagcctcacttgctgtgaaagtgtggtcttggctagtgtctccagcagccccaagtttgagtcttgttccaccccgcatcattctgtgtcctcttaaaaaatatccttccctctactggagcagctctgaataccagtcagggaccagctgaattttaagcctaggctgtttcttctgcctgagttgaggaccctagagggcacttgggggtcacccatcagagcagaatttctcacctagacattgatatctggtgggtagaggccagggatgcttctaaacatcctacaacacacaggataccccccccaccccaccttaagaaattacctagcccaaaatgttgacaaacatgcaataataattgcactattgcaattgtgcagtcataattgcactgttgacaaatatgcgataataattgcactattgcaattgacattttgggctaggtaatgtcttattgtggggtagagggtatcctgtgtgttgtaggatgtttagcagcatttctggcctctacccaccagataacagccatgcctcaccccccagccaagttttaacaaccaaaatatcttcagacatggacaaatatcccccaggagagaggacaaagtcatccttgcttgggaaccatggatttagaacatgacttcccaagagggtaatacgccccccacctcaaggagatagaacattagttttggggggccaaaatcttagatgttatagtggtttgtagttgaccaaaggagccacagtgtataagcagatgtacagcagatccatggtattgaaatttcatgggaaggaaggcaattagggaaggaaaaaaaaaaaaagtctaaaggctcctgggca

SEQ ID NO: 52241 - DNA, 2883 bp, Homo sapiens
tacttgggaggctgaggcaggaggatcacttgagcccagaagttggaggctgcagggagctatgattgtgctactgcactccagcctgggtgatggagtgaatccccaaccttaaaagagtaataaataaataaataaataagtaaataataaacaaacatttctgaatttcacatgcaagaaagtgagctgaatgtggtgtcagagaggaaaggcagacaggaagggcagctggcctagaggcgttacagtgatggagggttgtcagcagatgagccatggtgatttgtgccccatgtcacacaaatgcagtgttggagaaccaggaggccaaagagctttcctggcagaggttgtgggactggccccatctctgggttccctggcagccggtgcttcgtgattaccttgcttgtcaatgtgggacctgtgtagtgtcgtctgccccaagttcttctcagtgcccctcaaagtcctcatcctactgatcttggcattcactttttctcatgatcccctgctccctgctgtaataacacggtactttcatttcctttttttttttttgagacggagtctcactctgtcacctaggctggagtgcagtggcgcagtctcggctcactgcaacctccacctcccaggttcaaataattctctgcctcagccttccgagtagctgggactacaggcgcacgccaccatgcccggctaatttttgtatttttagtagagatggggtttcaccattatgcccaggctggtctcgaactcctgaccttgtgctctgcctgccttggcctcccaaagttctgggattacaggcatgagccaccgtgcccggccggtagtttcattgcttattatgatagtagaagtcattttctaattcagaacacaggaacaaaactcatattctagaagagatgtgtcactctgataatcctggttgactccctcaaaagcagcggagtgtgtcattaacatgctgcagttgacaatgggtcatcagagatataggcaatgcacccatataggcatggatctcacatatgtgaagatgaaatagctgtgtttagtatttctcttacctggatttagtggtagttttttgtttccagtgtattttggggctttgtttggatgtctttttattcttttttaatttagtagatttcagatagaaagacctaggagatccatccataggaatgagatgtctcaacaaactatctagaaatattctaacatggacttgagatgaaaagaatctatggaaatgcctagacttcaatcggcatgcaaacatttattgagcgtctactaggtgctgcactctgccaggcctggggtaatcagaggtctctgagttgtggagacattaagtgactaagcacacagaaatgggcagtagcaaatcgggtaaatgatcagaaggaaaagtactgagtgctatgagaaagaacgggggggattgcgtggtgggtggtgggggtggtgtcggtggtcttagttgacctgtctagggaattgcatggaagcatggcttgaaagtggaagaagatagccaggcacagtccaggcagagagcaggactcataggggcctcaaggtctggaaagaaatgggtttgttgagttccaggacctggggaaggcctgtagctgagcagaacagtgcaggctgagagtggtgaggttggaaaagcaggaagaagctcaatcttacagagcctcatgggacaccatgagtcttgggaactttatctcaactttaatgagaaatcattgaagggagaaccacatgatcccacatgggttcagaacagacttggttagggacagagcctaagaggagactgacttggtccaattgcattgggaagccctgtatttaagggctttgctttcttttatttaaaggtttgttgccaccctctgacagtgaacctctaagggtctctggaggatgactgcttgggcaaagacagccagaattgaggtctgagcagggcctgtgagcctcacttgctgtgaaagtgtggtcttrgctagtgtctccagcagccccaagtttgagtcttgttccaccccgcatcattctgtgtcctcttaaaaaatatccttccctctactggagcagctctgaataccagtcagggaccagctgaattttaagcctaggctgtttcttctgcctgagttgaggaccctagagggcacttgggggtcacccatcagagcagaatttctcacctagacattgatatctggtgggtagaggccagggatgcttctaaacatcctacaacacacaggataccccccccaccccaccttaagaaattacctagcccaaaatgttgacaaacatgcaataataattgcactattgcaattgtgcagtcataattgcactgttgacaaatatgcgataataattgcactattgcaattgacattttgggctaggtaatgtcttattgtggggtagagggtatcctgtgtgttgtaggatgtttagcagcatttctggcctctacccaccagataacagccatgcctcaccccccagccaagttttaacaaccaaaatatcttcagacatggacaaatatcccccaggagagaggacaaagtcatccttgcttgggaaccatggatttagaacatgacttcccaagagggtaatacgccccccacctcaaggagatagaacattagttttggggggccaaaatcttagatgttatagtggtttgtagttgaccaaaggagccacagtgtataagcagatgtacagcagatccatggtattgaaatttcatgggaaggaaggcaattagggaaggaaaaaaaaaaaaagtctaaaggctcctgggca

SEQ ID NO: 52242 - DNA, 549 bp, Homo sapiens
tggatgaatgaataaatgatggaggaatcgatggatagatggctgaatgaatggatggatgaacagatgatggaaggatggataggtgtagatggataagtgagtaggtaggtaggtagatggatgtactagataataattcataatggtaaatacatttttactgtgagtcacagcccaaaaatgtttaatgtaaattgcactgcatatagttatggttagtccctgaggacgagggtgatgtcttctttctctcctattctctcactgaacttaaaagcaagcttggctcacaggaggctctcagtaaacactgagaggcattatattaactgagtttctggagatgatgaggaaatcrttggaaaactggagcctgagagggcagcgtggactccttctcttggaactgaagcctgtgggtcccagcaagctctgtccctggaccatgccaggattcagtgaaatatggttttgcttggtgcattgcctcagaaggagccaatgaaggtgagggaaggtgccaggtatgacttcctgttagggtct

SEQ ID NO: 52243 - DNA, 1578 bp, Homo sapiens
gggaacttactatgtgccagacactatgaaaacagaagtgaataagataaagttctacccactcagagacttctttcatgcatacggggagatagaaggggctggtgggggtggggatgagggaagagcactggaggtcaaggatatgatacactgtcattacattctaggcactacgtgccgaatatttaatgtatattatctcaaaacctcaaaacaaccatatggagttgaatattatcatatttctgcagataaggaaagtcagattcagcagattgaagaatttgccccaaatcacaaaactggtaattgacagagtagggattcaaaccacagctgcttgtgtccaggtagcctattcttgatcctatcaccagactgtcccatataggatatatgttccaatacactcagacttaccacctcctctgtcccttcccatacacaccccmcaacccctcctatcttgagacacaaccaggctgacccacacaggtatgaactaaacagtgcaaacatgttcaattgttttattcatataacccaaagttgtttctgtggattttctaatggcagacaacttaaaacaagaacttttgagatttctcagtccagcagtgattctcctcgcaaccaattctgacttgttatcaagtcacttaccaggttaaattttagtgagctgaatgttctgtcttccttcatccttctccccagggcagtttctgagtcctaaggaagcctttgggagcactgtggccttggtagaagtaatgtatatattactacggctatatggctctagtccctgtctcgtgctatatggctagctgctgatataacgcccctgttgcgtcttgtgtgcaagtaggtcgacgatgttgaccttggatcacggagcagtaagctcttgacaacaggctcttctttgccttctggtgctgccagtcctctggattcagttccacactccatctggaccatggctggaagtgcatgcagcattctttcagtgaagaccttctcacaccaataggtgacttcctgggaggcgttccagctcctactcttagacaacttctgtgtccccatactggatccctaggaaaaactggattccagatccatgggaaaagttgaggagagggtgttgtctctggtttactttttttcataaataccatctcccattttgctaagctggcatggagctgggcttttctctccatcttgctgttgttctagatcgtacctgggactttcctctttaggatcctgagacttaaggaagattttatagggtggagacaggtgcataggtggagttcagagagtgcaatcattacactacttctcatttccttttttcctttctctaaaatctcctctcctctagcttggaggtcatttactaattctgggggttgggaacagaaatacaaacctttcatttcctcaaatctatttctggtctcttctatcttacatccacctcaaacttagaatcaaagaggaagtcaactttgttatcagctgtgaactattcctacatcaacagaactttcagccaaatga

SEQ ID NO: 52244 - DNA, 1578 bp, Homo sapiens
gggaacttactatgtgccagacactatgaaaacagaagtgaataagataaagttctacccactcagagacttctttcatgcatacggggagatagaaggggctggtgggggtggggatgagggaagagcactggaggtcaaggatatgatacactgtcattacattctaggcactacgtgccgaatatttaatgtatattatctcaaaacctcaaaacaaccatatggagttgaatattatcatatttctgcagataaggaaagtcagattcagcagattgaagaatttgccccaaatcacaaaactggtaattgacagagtagggattcaaaccacagctgcttgtgtccaggtagcctattcttgatcctatcaccagactgtcccatataggatatatgttccaatacactcagacttaccacctcctctgtcccttcccatacacaccccccaacccctcctatcttgagacacaaccaggctgacccacacaggtatgaactaaacagtgcaaacatgttcaattgttttattcatataacccaaagttgtttctgtggattttctaatggcagacaacttaaaacaagaacttttgagatttctcagtccagcagtgattctcctcgcaaccaattctgacttgttatcaagtcacttaccaggttaaattttagtgagctgaatgttctgtcttccttcatccttctccccagggcagtttctgagtcctaaggaagcctttgggagcactgtggccttggtagaagtaatgtatatattactacggctatatggctctagtccctgtctcgtgctatatggctagctgctgatataacgcccctgttgcgtcttgtgtgcaagtaggtcgacgatgttgaccttggatcacggagcagtaagctcttgacaacaggctcttctttgccttctggtgctgccagtcctctggattcagttccacactccatctggaccatggctggaagtgcatgcagcattctttcagtgaagaccttctcacaccaataggtgacttcctgggaggcgttccagctcctactcttagacaacttctgtgtccccatactggatccctaggaaaaactggattccagatccatgggaaaagttgaggagagggtgttgtctctggtttactttttttcataaataccatctcccattttgctaagctggcatggagctgggcttttctctccatcttgctgttgttctagatcgtacctgggactttcctctttaggatcctgagacytaaggaagattttatagggtggagacaggtgcataggtggagttcagagagtgcaatcattacactacttctcatttccttttttcctttctctaaaatctcctctcctctagcttggaggtcatttactaattctgggggttgggaacagaaatacaaacctttcatttcctcaaatctatttctggtctcttctatcttacatccacctcaaacttagaatcaaagaggaagtcaactttgttatcagctgtgaactattcctacatcaacagaactttcagccaaatga

SEQ ID NO: 52245 - DNA, 564 bp, Homo sapiens
gttttttgtgttagcatgcaatcaaactagttagattcaggttataattcccaaatcactgccttctgtgagttgtggttccaatatcagcttagcttttgtaagctgctttgcaagcccacttccaacgtgtatcacctagggacaagcctgggacctgggcagtgktgtaaccataatttaattatctaagcatttctatggttctttgtttcagttgcacagtgcagcccaaggattagcctaagtcttcatacataaatttaaaatattcagttatctcttctctatagtttactcacactctctggtttccaggggctcttttcctagaccctggctacagactcattatgtggtccacacttcttatgtctgaatcatcctctggacaaagtagtgagtaaaaaagagaataaaaataatggtattcccttgacactcttcagaacatgtatatttcttttccaaattcatctggtgagagagaattttctctcagaattttaagcacctatgcaactgctgctgtcaccctgccaacacaggaatgcaccttcataa

SEQ ID NO: 52246 - DNA, 564 bp, Homo sapiens
gttttttgtgttagcatgcaatcaaactagttagattcaggttataattcccaaatcactgccttctgtgagttgtggttccaatatcagcttagcttttgtaagctgctttgcaagcccacttccaacgtgtatcacctagggacaagcctgggacctgggcagtggtgtaaccataatttaattatctaagcatttctatggttctttgtttcagttgcacagtgcagcccaaggattagcctaagtcttcatacataaatttaaaatattcagttatctcttctctatagtttactcacactctctggtttccaggggctcttttcctagaccctggctacagactcattatgtggtccacacttcttatgtctgaatcatcctctggacaaagtagtgagtaaaaaagagaataaaaataatggtattcccttgacactcttcagaacatgtatatttcttttccaaattcatctggtgagagagaattttctctcagamttttaagcacctatgcaactgctgctgtcaccctgccaacacaggaatgcaccttcataa

SEQ ID NO: 52247 - DNA, 503 bp, Homo sapiens
ttttgagaccgagtctcactctgttgcccaggctggagtgcaacagcaaaatctcggctcactgcaacctccacctcctgggttcgagcaattctcctgcctcagcctcccaagtagctgggactgtaggcgcgagcccccatgcccggccaatttttgtatttttggtaggagagatgggktctcaccatgttgcccaggctggtctcaaactcctgacctcaagtgattcacctggcttggcctcctaaagtgctgggattacaggcatgagccaccacacccagcctgttttttatcttttaaaaatattttaattttactacttaaaaaatacagattatacacattctaaagtcaaacaatataaaaaatatatacaatgaaagtctccccccgactctatcccctagttccccttcctgaaggcaatccttgcttcttgtgaggccttccagagttggtcttcgcctagcaaccaatacatataataggatggtttc

SEQ ID NO: 52248 - DNA, 503 bp, Homo sapiens
ttttgagaccgagtctcactctgttgcccaggctggagtgcaacagcaaaatctcggctcactgcaacctccacctcctgggttcgagcaattctcctgcctcagcctcccaagtagctgggactgtaggcgcgagcccccatgcccggccaatttttgtatttttggtaggagagatgggttytcaccatgttgcccaggctggtctcaaactcctgacctcaagtgattcacctggcttggcctcctaaagtgctgggattacaggcatgagccaccacacccagcctgttttttatcttttaaaaatattttaattttactacttaaaaaatacagattatacacattctaaagtcaaacaatataaaaaatatatacaatgaaagtctccccccgactctatcccctagttccccttcctgaaggcaatccttgcttcttgtgaggccttccagagttggtcttcgcctagcaaccaatacatataataggatggtttc

SEQ ID NO: 52249 - DNA, 547 bp, Homo sapiens
caaatttttgtggtgaattgattacaggaacaagtcacactctgtaagtgaattactgggtgttgtctgatgaattaatgaagtttaagaagttctttcaaagatccgtggcttcgtgtgttcatttcagttctaccagcaatatttctgagagcagaacaagtcttgcgtcttctccctacttctcttctctggcagtttcttggatctacataattgataatctcttaagaagaaaatattttatccttttggaaattcgtttttgaaagttggagtttgtgaacctctaaaactgcatcatggtttttctctccccttcacccccctcccccagcccccaagaaagccccagttttagcctttgcttggcttccttggaatttcacttatgaatacgcacacacaccatcttttgagactgaaaaaaaaaaaaaaaacctctsaaataataaaagaacatcctggagctctgacaggtctggattctagggcattgattccctgatgttaggatgaggaactccctgccatgtgactggatatg

SEQ ID NO: 52250 - DNA, 574 bp, Homo sapiens
aggtttctccttttgtttagctttcattagctcttgtttgctggcatgtaagatgtgactttcaccttctaccatgattgtgaggccttcctagccatgtggaaccctgagtccaytgaacctctttttctttataaaaaaatcattttctttatagaaaaataaaggcataccccaatctcaggtatgactttatcagcagtgtgaaaatggacaaatacaaaaggctagaagtgcaaaattaaggcgtcaacaaggctggttcctttgactacagtgaaggagaatatttctatgcctctcttctaatgtctggtagttataggccttgcttggcttgtagatggccatcttgtccctgtcttcacttcgtcttccttctgtacatgtcagcctctgtgtcattaggattaaccctaatgacctcatctcaaattgatcatttgtaaagactttgtacttcaacttctttcaggaggacacaattcaaatcataacaatattttgcagaggatatgatagtattttatataacattggtttcctggggttacaggtgagagaaagaatgtac

SEQ ID NO: 52251 - DNA, 574 bp, Homo sapiens
aggtttctccttttgtttagctttcattagctcttgtttgctggcatgtaagatgtgactttcaccttctaccatgattgtgaggccttcctagccatgtggaaccctgagtccatygaacctctttttctttataaaaaaatcattttctttatagaaaaataaaggcataccccaatctcaggtatgactttatcagcagtgtgaaaatggacaaatacaaaaggctagaagtgcaaaattaaggcgtcaacaaggctggttcctttgactacagtgaaggagaatatttctatgcctctcttctaatgtctggtagttataggccttgcttggcttgtagatggccatcttgtccctgtcttcacttcgtcttccttctgtacatgtcagcctctgtgtcattaggattaaccctaatgacctcatctcaaattgatcatttgtaaagactttgtacttcaacttctttcaggaggacacaattcaaatcataacaatattttgcagaggatatgatagtattttatataacattggtttcctggggttacaggtgagagaaagaatgtac

SEQ ID NO: 52252 - DNA, 574 bp, Homo sapiens
aggtttctccttttgtttagctttcattagctcttgtttgctggcatgtaagatgtgactttcaccttctaccatgattgtgaggccttcctagccatgtggaaccctgagtccattgaacctctttttctttataaaaaaatcattttctttatagaaaaataaaggcataccccaatctcaggtatgactttatcagcagtgtgaaaatggacaaatacaaaaggctagaagtgcaaaattaaggcgtcaacaaggctggttcctttgactacagtgaaggagaatatttctatgcctctcttctaatgtctggtagttataggccttgcttggcttgtagatggccatcttgtccctgtcttcacttcgtcttccttctgtrcatgtcagcctctgtgtcattaggattaaccctaatgacctcatctcaaattgatcatttgtaaagactttgtacttcaacttctttcaggaggacacaattcaaatcataacaatattttgcagaggatatgatagtattttatataacattggtttcctggggttacaggtgagagaaagaatgtac

SEQ ID NO: 52253 - DNA, 462 bp, Homo sapiens
  misc_feature (1)...(462): n = A,T,C or G
tnnnnnnnnnnnnnnnnnnnnnnnnnnnnnnnnnnnnnnnnnnnnnnnnnnnnnnnnnnnnnnnnnnnnnnnnnnnnnnnnnnnnnnnnnnnnnnnnnnnntgtctgcctctataaagcgttcaacagtgccagcaaccatttttatagtaaatatttgtgcttcaaaaataaaattaatattataattgtaaactcattgtctagtattaactttagggtttaagcattttcttattgagactaattaaaagtaggaatcagagagacacagagagcagagcagcttgattttkatgagtgatgatgtagaaaaacttagcatctctctaacaagagagagattaaagtctcagtgaagccacatctttaagacaccacggtaaaaacacagttttgaaagaaagcattttattacactaacttaatattttctctttttaacaagggatcggataaaggg

SEQ ID NO: 52254 - DNA, 629 bp, Homo sapiens
tttatgggacaatttacttaaaattgaattttttagatttcttgactaattcaacacatttgcatttgctctccttctcttacatatacaactttatacttggtttaaagcaggtcatcacagaggcatggatattatttattattgaatttgattctcacaacaaccctatgatgtaggaaggatagatattttaaatcttcattttgtagatgagggaaactcagtaatactagatccttcaacccatgatgtacatttaaggtaaagggatttgcttgcattcattctttgcattttgttcccttcctgctacaatggtgtctaggtaattactaagggcctccacatttaacattcagtgatctgaatgaattcactgtmcactatgctataattcatctggtgggaaactgaatgccaaaagactgttagctttagtaagtggttaccgagttgcttggttgtctaggcagtttggtggtgggagattctgtttcaacgtctgtctggggaggcaaacaaacaaagctttaaaccctgttgacacgtgtgccctgggtgactcaagattctgacaggaagatagtctctggcgtcccgttaccttacgactggagcaatgttcc

SEQ ID NO: 52255 - DNA, 521 bp, Homo sapiens
aatgaccatattctttacctttccttttaatgcctgtttttatattgaacaaccattatttgtggctgagattcttccactttgcaggaatttctcttctctaaagcagaagtcatatattgcgggatctggctagcagcccgcaatgcaacggggctctctctttgtttccaggtggatcggcaggttgagaaataatagacacacacaagatagtgaaaactgggtccaggtgggtcaccgccttctggtcccatggtgccaacaatgcactggatataccagcatttattattaagtttagtgagggcaggggtaggttagtgagggatttagkgtcatttgattatgaggtgagatggtcacatggggatgaagtaattctttaacataacatttgtatgcagaagtacagtacatttgtatgtagaagtacagtacacagagataagaatttacaatatagtgtgtgcttcagtaatttctaacagagccttaaaacagaaacacaatctttccat

SEQ ID NO: 52256 - DNA, 521 bp, Homo sapiens
aatgaccatattctttacctttccttttaatgcctgtttttatattgaacaaccattatttgtggctgagattcttccactttgcaggaatttctcttctctaaagcagaagtcatatattgcgggatctggctagcagcccgcaatgcaacggggctctctctttgtttccaggtggatcggcaggttgagaaataatagacacacacaagatagtgaaaactgggtccaggtgggtcaccgccttctggtcccatggtgccaacaatgcactggatataccagcatttattattaagtttagtgagggcaggggtaggttagtgagggatttagggtcatttgattatgaggtgagatggtcacatggggatgaagtaattctttaacataacatttgtatgcagaagtacagtacatttgtatgtagaagtacagtacacagagataagaatttacaatatagtgtgtgcwtcagtaatttctaacagagccttaaaacagaaacacaatctttccat

SEQ ID NO: 52257 - DNA, 641 bp, Homo sapiens
taagtcctaatttttaggaaagcattctttcatagaaatcttctcactattcaaagaaatagaaaaaaatagggtttaaagaatgagactaggtaaaatgacagcctgctgtcttttgagaacagagactgaattataaagagtgaattataaaggcatctgcaactattatttgtcattttattcctttacaggtttctagcagaaagagactgtggttaaaatgtctgtgtgtgtccatgtgtgtgtatgcgtgtaccacttgtcaacaccacacgtatacacacagagagacaggaagagccaggaggttagcagaattctggaataacaaaacctccttgaaaaatggratcaattatccaaatctgattctaacatatttacgtatttcaacaaagatcactattttatttacttcatcatgttataaaacaataagctattcctaagcatgaccaaagctcctgctatgtctatgcactcaaatattaccaatccatagcaagaaggagctgagaaatgttaactggattactcctttccttatccaatgcctaagctgatgagctgattaaagaagtcattaaagagaaacctcactggtcatatatgacccatgctttgaacttaccaatgca

SEQ ID NO: 52258 - DNA, 536 bp, Homo sapiens
aagtgaaaatacgtcagagaaaaaaacacaactaagtcccattatatataattaagtcaattctgctcagttaaactttagtaaaatcacagcatagcactactttcctagaaaaacgaagaggaaaaagaagtattcaataacacttagcaatcttcctcagaaaaggaaacatatacactttaattgggatgagagagaagacaaaagattttgttgtatcagttactgctttaagggaaattattagcatatccaaaaaaaggaattcattacagttaacaaaatgagttagaaatcawattgttttaagacatgtcataggagaatgaagatatgcgatagtcctgatgcaactaactgagatgaacaatgaaatagatgttgatcccaaagtgtctgaataatttagctcatttcaattccgcatttattaagaaaaattaaaggtgaagacaagtactaaaagaaaggcaacaaattaaaaatcaatagaaatcttaccaaattatataatatttcacaaaaagaatgcc

SEQ ID NO: 52259 - DNA, 609 bp, Homo sapiens
ctgagaatacaggtgtgtaccaccatgcctgactaattttttaaattttttgtagagaggaggtctggctatgttgctcygggcggtctccaactcctgacctcaagtgatccacccgcctcccaaagtgttggaattacaggtgtgggccaccacgcctggcccctttccatattttttcatattactttcagtgaatgtttcaaaatcagggggaaaaaaaaccaaacaagttttcattcatttgatttacttccattcactaggtgagtatttcctgagatcttactatgtgataagtaacaaagcagtaaccacgatagcccccttctctgtccactgactaaaggaggaaacaaacattaattaaatgcacttaagcacacaaatcagtctaaagcaagagaaggaaggggtaaactgacgaaggatgggagcagggtgctggagagtgggtggccaaggaagatggcatggaaggggtggtgtttaagccctgaaggatgagaagttggccatggaaaggggtgtgagtgggtgagggggatggaggaaaaacaggtgcaaggatgccacagtgttcaggaatctggagttgacctccatggc

SEQ ID NO: 52260 - DNA, 599 bp, Homo sapiens
ttcataaatcgaggccgtggtcattgctttcctagagctggaatggggcattgaaaattgtccttactggtggctcacacctgtaatcccagcactttgggaggccgaggcgggtggatcacttgaggtcaggagttcgagaccagcctggccaacatggcggaaccctgcctctactaaaaatacaaaaaattagctgtgtgtggtagtgcgcacctttggtcccagttacttgggaagctgaggcacaagaatcacttgaaccrggaggtggaggttgcagtgagcggagatcgcaccactgcactccagcctgggtgacagagtgagactctgtctcaaaaaattaaaaaaaaattatccttactgaatgaaccctgtggaggttgttcagccctggttgtatgtccttgttgcggttagctaaaaatgtaaataggagtcattgagacctatacgtgccccagtcctaactactctccttctttaccatacccacagcttcttgcagaccagctcagccctgtgagcaggcagtggttggtcccagcttcattcaccaggcacgccttgaccttcagcagctgcatttagcctgg

SEQ ID NO: 52261 - DNA, 604 bp, Homo sapiens
gaactgggtgaaaacaagctgsgtggggctggactgggcaagtccatctatacctcccttaatagcaggtgtaagtaaggcatttgaagatccgccaaaaacacaacaaaaaaagagctgccggattgacattatgtctgtgacaatgcagtagaaaatgaacactagaggtgagttcaaagatgagcttagaatctatatctctataaatagcaatcagttttagattcaatcaaggtgattaaattaaagaagatgattaaaaaaacggtgatcattcaccagtttccattaagtaatcaatgcttaaataaggaacacctgaactaatattcttttgagataattatactttgtatgatctaggaaaacagtgtgaagatatccagaaaggcagtgcatgttacgacagcaaggaaccttttgtttttttgagactgggtctcgctttgtcacccaggctggagtgcagtggcacgaacccggctcactgcaacctccgccccctgggttcaaacgattgccctgcctcagcctccgaagtagctgggactacaggcacgcaccaccacacccagctaatttttttttttttttttttttt

SEQ ID NO: 52262 - DNA, 604 bp, Homo sapiens
gaactgggtgaaaacaagctgggtggggctggactgggcaagtccatctatacctcccttaatagcaggtgtaagtaaggcatttgaagatccgccaaaaacacaacaaaaaaagagctgccggattgacattatgtctgtgacaatgcagtagaaaatgaacactagaggtgagttcaaagatgagcttagaatctatatctctataaatagcaatcagttttagattcaatcaaggtgattaaattaaaraagatgattaaaaaaacggtgatcattcaccagtttccattaagtaatcaatgcttaaataaggaacacctgaactaatattcttttgagataattatactttgtatgatctaggaaaacagtgtgaagatatccagaaaggcagtgcatgttacgacagcaaggaaccttttgtttttttgagactgggtctcgctttgtcacccaggctggagtgcagtggcacgaacccggctcactgcaacctccgccccctgggttcaaacgattgccctgcctcagcctccgaagtagctgggactacaggcacgcaccaccacacccagctaatttttttttttttttttttttt

SEQ ID NO: 52263 - DNA, 432 bp, Homo sapiens
atcactttatggacattttattcatgtctgttagaactgaatactgatgttagagtacatatgtaaatcataaatggaattaaatgrtagtatgtaattgagaggtgggaaggaataagaagagccacttactagcagtgcattttaaaaagtcctatctatgcatgcatcacaccagcttaattagggtgacagcaaagttgaagttcatgtgaatataagtgaggtgaaaccttgtcctaagtctggccttcttgatatgggggaggagggaaggttggagaaatcagaaaaagcgtctttcaaattgcacattgctttattgttggcattttctgaattacctttctgtcatgactgagtttttcaaataattattttttctcttggagaagtgtgactgtatttcttattttcatggggtcctgcacc

SEQ ID NO: 52264 - DNA, 449 bp, Homo sapiens
  misc_feature (1)...(449): n = A,T,C or G
tgaactaggcactaggaacgcattgaaacaaagcttgtgcccatgtggaactttcattctaatgtgggagatggaccataaataatcmaatatatctcaagtagtaataagtgctatgaagaaaatgaagcagagtaaagaattagagaatgatgaaagcagcacagttttaataattgaatggtcatgggaggcttttctgaggatgtaatatttgagccaaaggcctgaatgaagtgtgggagcaatctaaatggctatctggaggagagtatgccatgtggagagaaaagctgatgagatgggagcttcaagaagcanagcgaagatacagtntggaagggagggagggagagagagaanacantgagaaatgagatcagagaggtgatcaggcaccaaagtatggtaggggctctggatttaaagatatagaaagcctttggagg

SEQ ID NO: 52265 - DNA, 649 bp, Homo sapiens
aggctcttgaaaaaatttgaggacctagagcagaggtttaccctgagtggtggcgattagggtagagaatgagaatccagtgtgtagttccaaagaatatctgtctcgatatattttcccaaaagtcaccagaagtgatccaagctaaagcctgagattatttttccctcttttcccactttgcatttgcagtcaagtagtaggatcttgctttttatttgcaggcattctgccattttagttaccattcgcagaaagctttaatggcataatagwgtgcagcactactgtagataataaatttaattggcatggcctcaaattagcaaaactgctaatttaatcagtcattgaaattgaaacaattctgttgactatgaatctttcactgctatggtaactgtaaagcacaaagataaaattttaaattgtagtagcattattggcagaaatgagcacaacattcttgtgagtgcttttaaagcctatttcccttggacattttagaagtgaaatttccacatttaaacaggccaaggtcagcttcttgaataatgtagactccaggccatctttcgcatgggcttggtaatgccctcacactgtgcatgtgataaacaagcttaaggtgactgcaccccctgagtaa

SEQ ID NO: 52266 - DNA, 625 bp, Homo sapiens
agtggaaaaccctattctaccattttgctgatgttcagcccaaaacagaatcttaaaaattatatgcgtctttgcttaaaataaagttttttctattacaccaccttgttttttcaatgggctttctctgtatttctcttaacccattccatatatctagttcctttattatccctttcttttttctacattacttttaatttctctctcattccttcacaggaagaaaataaacttcttctggatttctcctgcaagccagtttaatcattgtattctttaagagatttctaccaagacaatgctcttcaaatttcaacttctctcccaagtggctaaaaaagtatttcggcaaaccaagattatcctgccctgagaggaattctggtagcaggtgttataacatcatctgagytctttgataaattaatcaaaaccataacaagtaataatcgtaagcagtcattttaaaatgaatttacctctttttagggacagatgttatcatctcttcttccggactataactgttagtgtcttgtttccatagcactactgattagtactcctcatttttgacaaatggaaaatctaacaaaaataattagaacatataacgttttgg

SEQ ID NO: 52267 - DNA, 625 bp, Homo sapiens
agggagaaagatggctttggggactgaacattactaaagtggactaaaaattaaatgacaatgattagtgaaagaaaatattttttctaactcccagggaaacaaagatttctttggaaaatttgagtcgcaggtgagaacagggaaaatattcattaattcatttgtcacatatttggtgtgctctggttatgtgctaggcagtgtaataagcactgagaatactatggtgagcaatataggcatggagcttcatggaacttatcatctagaaacaggcagcaattactatatgtctacactagatctctaaaacaaattgtcccatcaattacttggtggaaagagtatcgcatcatagtatgagtagtagaaaaaggcaatattttctgtaattartgacataaggaacactgtgggaaaaaatgaacttgcacatgtgtcacatccataatattggaaggggctttaaatttgcctgtaataatttattcattttataaataagatttgttaaaaatgatttaaaggattaagaaaagtctgtaaaatattacttttatctgtaaataaactgtcaaattgatgaccatgtatatttatatttagttgaatggattcctca

SEQ ID NO: 52268 - DNA, 423 bp, Homo sapiens
ttcattttttttttttctggattaagtatttctttgagaacttgatgaaagctatgaacttcttttatcctcaagtttgtgtgtgtgtaattggggggatcataaayagccacagaaaatgttgcatacaagtttagggagttctcatatttttagaagctcatgaatcccaagaatctactctgcataacttctcttttaaaacaatatattaatttctttctacctataattagctgcacatcagatgctgtgctaagtgccctacttatattagctcatttaatcctccccacagcatttccatgtaggcattacatttcaaacatgggtgacatggagttagacttgcccagggtcacagagctagtgtgtggtataaccaagatttgagcttaggtctccgtattatggttatccaaa

SEQ ID NO: 52269 - DNA, 1989 bp, Homo sapiens
gtcaccttgagagcctgttgcctgctgacttgatgggttctttgttctgtcttggagtagagaacacctcatgggttgaaaagtaaaacatttcactctcattagaatagtcgcctggaaacaagctcccttcctggaggctggggtttctggtcaaatcaaaaagctgccctggagaatcctgctgtaaatgaggccagagaggccaagtggtcccacccactcaagccaccaagtctatcctcaacttgcctcaactcaatctaggattggatggatctgggaaggagacctgttttgggcaaagtcagcttgcaagttggcatccagaagtgtcctcgttaatgatccttcctgggatcatgtcacttctcatgtctaccctcattattaggtggggaagctgaagcccagagagcaggcaccatggcctcatgtcatccggtacattaacagcaacccagggatgcctgctttatttcttcctgccctgaagcttcctctcctcctgaattcctagagagtctgcattctccaggtcctttaaatcctttgggtcttggcttttgctgattcctttgtctagaatgcctttcctagcctggcaaactcctatacatccttcacaactcagttcagtgctccctccttagctccccctttctctgtgcctcctgttctcccagcatgtgttgcgctgtgtgtaacagtggttcctaacatggccaagtgtctgggggaccacatgcccttcagtgcctggcctggccttcattgtggaggagctgagtcccctccctaggacagaggctctgccctgtgattatctgttctctctgttccaaggctgtgtgaggttgcccggaccctgtcttcctgagtagtttcccatgaagtcacaacattggtgggactttaaagactgtcacgtctaccccctaatctggtgcttgaagtttttctgcaagaaagcctgaatttgaaacctagctttgccacccctcagcctgtgattgtgtacaagtatagcttgacttctataagcctcggttttcttacctatgaaattggggtaataggactgttgtgaggctttgatgagaaactagacaatggcacacagtaagtatatcagaatggtcctggccgttctggacagtttgcatttgcgaaagagaaaagggaaagtctaaaatggatagtggctgttcagtcacgaatgtccccaaagaaacagaaaaggctgttggaagtcccagctctgccatgggctggctctgtgaccttggatgcgtcgcttggctgtgctgagcctcagtttcctgcactgtgaaatgggatagtgcctagcagtcagagtctgcagtagacagtgtttagtaggggctcaacagatgccaatgtcctttcttctcttgagcccgaggtttagctccacagatcttggcttgcattgggatgcttttcttcctcccctgttttggaaaagcaaacccagggggcttgggcttaacaaggagaggcttcctggaagccagtgtccttccagttctctggccttgcaattaggtcagagcctcgtcccccaccagccactgtgcagaggggagactgagtccccagatggaaataacttgcctggggaaggacaagagggactggagatagatggagttggagactcatcccagctctgctgctcactagccatgcagccttggacaagacacttcactcccaagtctgtttttgcatctgtaaaatgggagctgtgatgctcaccccagaagtttctgtagggggtggaggggctgtgctctgwacctgcagagtgctctgcagaggggcactgttgccctagtcagggctgctgggctgaagctgagtctctgactcccattccagtactcctgcctgcagccaggcctctgagtacagacagggcactttcacaggtgtgttcctcccggttagattccccatcaggaa

SEQ ID NO: 52270 - DNA, 588 bp, Homo sapiens
atgctctgatatcatgatattcttttttctttctttttttttttttgatatggagtctcgctgtgtcacccaggctggagtgagggggcacaatctcagctcattgcagcctccacctctcaggttcaagcgattctcctatctcaggctcccgagtagctgggactacaggcatgcaccaccacacctggctaattttttgcatttttagtagagatggggtttcaccacgttggccaggctggtctccaactcctgagttcaagtgatctgcccacctcagcctcccaaggtgctgggattacaggtgtgagccactgcacccggcctatcatagtattcttaataagttttgaataacaggccctaaaaattatgtggtctgtcttagttctggcacatcaaataactatgccaggagcttggtagagtgtcatcttcatctttttcatttccatcttaccttggagaattgggaagtaaaattttgctgtgcagaagtcaagcaaaagaagccaagagaaggtggaaggtagtagctacttatgtgaagaaraagcagtcagtacagatgtgagcagttaaaaa

SEQ ID NO: 52271 - DNA, 1981 bp, Homo sapiens
tgggcggtgctccgtgtcacatattctagtatgtagttttatacccagccattscccttaccctttcgatttttgttagagcgggacggtgccctgcatgctgtgtgctgtctgagtatgacatttctagtagtaaggaaggttaggatggctctttcctttgccttcattaaagttctcttgcccagatgtgagatctttaaaaggtcagtgtttttgaataaggaatgaaatcatattctaagataaaagttcagagagttatacaataaaataataaattagtaaatggcacttccctgagaggcgatggtcactggtcactgttgttgcatcccattcctcttgccttcagggaatatcccctcaggtatgagaatgctcagggctcaaagacagagaagagctgtacgtcacactgttggggctggcagcaaaatgctgagcaaccttgggctctacaacatgtcctccatggaggtcaggctctaggcctgttctgttgactgctggagtctcaacattcagaacacgggtccaacatggcatgtgtattgacagagaagcttcaggtaatttttatgtccttgaatgaatgggcacatgttacatgacagagcagggactagatggagccaatatattagatccccttctctccacacctcattttctatatagtgcagccagtatgagaatataaaatggaaaggaagaaggcatatcattttgtatgtgctctatgatctttaaatgttattaaatgttggtaatgaaatgctgtggtataactaattatatcctagcacctctttcccatatacttgcattctctaattatgttcaaagcaatggttgcccgaaggctaagggtactcggtcctttcctcccccatgaggactatgttttagcttgtaatttcacctgcaggagctcacaaaccagctgcatttgagtgcaattatactttattcatagtgactaataacagaaaagagacatcgtgggggtttgggctggagatttataatctcatataaaaaatacgaattcttgcttatttatgggttgagcaccttgggcccccgctgtttcatctgatggctgcctgatttttatccgcaaaatcattcattagtatctacactagaatgtaaacacagaatgtaagataaatttgttgtgcagtacttggatagttagaacacatttccccagatagaaacattaaaactagaggttattcactcccatattcacacaacctttatgcacctgaggaggttccgaatgtccctgaccatctcttatttcttatgggaaagtgtttgggtaccagcttggaatgccaggagtgtaattctccagggcagcgactgccgcccgtgccattgggtccctagccctttttcatgctctgctttctgatgagcttacacacacaggcatggtgtactgtgggtgcttagtattgctgtaggacttcttgtgtcctgagttcaccactaccctttaattctaaacatttataaactattgaagttagattcaaaactttcttttccctaagcttttactttctgcttattctgcttataaattagtaaatgttggccgggcgtggtggcacacatctgtaatcccagcactttgggaggccgaggcatgtggatcacttgagcccaggagttcaagactagcctgggcaacatggcgaaaccctgtctctacaaaaaatacaaaaatcagctgggtgtggtggtgcacgcctataatcccagctactcgggaggctgaggcatgagaatcgcttgaacctggaaggcagaggttgcagtgagccaagatcataccactgcactccagcctgggcaacagagtgagactctgttaccaaaaacaaaaaatctagtaaatgttaacagtcactgttcagaggccataacagtgtttgagtctcaacctttacaattttttcat

SEQ ID NO: 52272 - DNA, 601 bp, Homo sapiens
tctcgtttctggctctttgtacattagagaggccagcccactgtgagatgatggggtgcttgagttttcccttatctcctgccccactctcctaggtatgggatgtctcaacagagacctgtgtcccccttccctggttycgaggaggtggggtgaccaacctgctctggtccccagacggcagcaaaatcctggctaccactccttcagctgtctttcggtgagtgggacaaggatggagggagggcaaggacctagagaaaggcacttagctcctggaagctctgtcaagggaggtaggtccaacttttagaacttagaggtcctgagctgtaatttgcttttctctggctcagagtctgggaggcccagatgtggacttgtgagaggtggcctactctatcagggcgctgtcaggtaagaggggactctgattcacagacactggggaggagatgattccaatgggcccctgatgctcccaaacctggccacctctactttccctcctgcattctactatagacataccttctcctgccttttgctccctgaccccagactggctgctggagcccagatggcagccgactgctgttca

SEQ ID NO: 52273 - DNA, 616 bp, Homo sapiens
gttaatgtttttatttcaattcctgctagtgcatatccctgatgtggaaaatcaaccaacaagaaaaaattattatgctgactgtttcttcctgttttgcagttttactatgcccaaacagaaatcctgatgggaaaggaaaatgccttgctatatctgtaatttatcaacatgaaaacattacggttttaatcataaaattcaagaggtcagtgttatctccacamctgtgctctgaagattctctaataggaagaaatgcatctcctaagcataaaactgtaattactaaagttgatgggggcagaagatatgcaaatatatgaaacattccataaggatatgcatataatctgtagaaatcgggagagtgattatagggcatgggcagagagggaggagtaaagaggtaggtggcaaccccaaaatgtctgcataagagagaattagggcagcaaataggttggaagggtgaggctggaggactggtctgggaaccgcaattgaatagcaggacatgccttcacttagattgaatttaatttgaggcagttttggagaggccttagggagactatgggagggctaaaccttgtaaatccctttttgatgccag

SEQ ID NO: 52274 - DNA, 579 bp, Homo sapiens
gatcaactgaactttgaatgaggagtaaaaaaaaatggtttaggtaatgggagttaaagaataagacagttcaggtaactaagttctacagttttaaacaggtttgtttttgaagcaaagaagagtagtaactgatcaatatccactctcgagatctcttctattmttttatattaactccatgagagaaaattcgatgctgtctttttcacctctgtgttcatgactgtgaataaggcaacacctagaacagtgtcttccacatggaagtactcaataataatatattgaatgaataagtggatgaatagttcaatgtttctatcaatttctgcacaaaattcatatttggtaggaatgatattttaaacccctcatgtggggactattaagagggcaatattacaaggggtgttcttaaaatttctggaaacatttctagttatcataatgaatagaagacactaatgatatttaatgtgtggggagacaaaagatgcctggaacaatcttgtataatacagaattggcccgcatgccaggacttctgaatatcacaccaaatatgcatgcaggcaa

SEQ ID NO: 52275 - DNA, 643 bp, Homo sapiens
tgctttcaccatgtgatgtacctgcttctgcttcaccttttgcttgagtaaaaactctctgaggcctctacaggagctaagcagatgccagtgccatgcttgtacagcctgcagaacccgtgagctgattaaacctcttttctttacaaatcactcagccttgggtatttctttacggcaaggcaaaaatggcctaacaaagagatgttgctttmtaatcctgtactcttggaccaaatccagcatatgtttctagctgagattatcagcttttgttcagagataacatgcttttccttccatagctttatgttgttgctgggaaacagctgctcagaatgattctatccgtctgcgaccccccacccttgcatctgagatgatttgactaattctcaccaataaaatgtgaacaggagagacaattattactttcaggacaaggagctacagatgtggcatgccttgctcactctttgtctccatctccagatgaaggtggaggttttcaaggcaaagaggaggatggagccacaagattcactcactacatagaaagctacacattgaccaggaacactcatgtattagagttcttcagaaaaaccgagccaatagggcacacgtgcacacacacacacac

SEQ ID NO: 52276 - DNA, 1855 bp, Homo sapiens
ccaaccatattgggtcacttccttcttaagtttccatttctctggctctcttctttccccttcgtattttagaaacctttgtagttacattgggcacatctgaataatccaggataacctcactattttaagatcagctgatttacaattttaattctgtcttcaaatatatttcccctttgccatggaatgtaacagatttacaagttacgaagactaagacatggacattattggaaggcctattattctgcctattacactcagaataattgtcatcatttttgcaataaatttcttaaaggccagaacaattcatatgtgaattatatattcagagtttggcaatatccttgtgagctatcctcaaacatcatccaaccttcctcatacattatccaaccttcctcatacattttaactgtttatttattgctagtggtgaggaattgggataggagaaatgtcttaggcttgaattacaaagctctaatcaaggttacttatatttttctgatgtgaaaacattttagcataagttatgttagcaataaatcaagaggaaaaacagaatatttgtactaggaatctgatttattcacttctttcctacacttttgcatgctgaggaccggaagaggatataaagggggaaggagagactcaaacaccacctcgctttgtttctccaggttgtacaaaggtgaagatgtcctgactatgatagatctcattctgggcagttagaacatcaataggtgagtacagggcaggtaacctgataatattgagaagaaggtaggttatgatgttgttccctcatgaggtgactggcttgaggtttttgttgttgttgttgttgttcttgttgttgtttgagacagagtctcgctctgttgccaggctagagtgcagtggcacaatctctgctcactgcaaactctgcctccctggttcaagcaattctcctgcctcagcctcctgagtagctgggactataggcaggtgccaccatgcccagctaatttttgtgtttttagtagagatggtgtttcaccatgttggccaggatggtctcgatctcttgacctcgtgatctgccctcctctgcctcccaaagtgctgggattacaagcgcaagccactgcgcctggcctggcttgaggttttaaccttagttttgcaaattagaaaactaattgaatgaattggactgttggtaccatccacttgactttccatcaccagggatgggtctaactgccccaatccattttcacaaaggtttagaaaatattttctaatttccattacaaatcacatgtctctgggaactaccttatattaacataattagctaaaatatttagtaaaattatttatatatataaaatgtctatatactaaattttatgttgcatgtttttgtaccaaaaataataactttttactttataatgtttatattttaaaacactgacataggtattatttttacagaatccatgaaaaaatacattagcattatgttctatatatagtgaaggaggaaaaataaagacaaaaaaatacagtctagaaaatattatccagatgcatagatgatataaagtacactatgtcaaagaggaaggtatatatacacacagcaagatttaacattgtcatttgacaatgacagttgaagaaatatatttgggcctcagttttatggytgcagtatttaaacagtaacaccattagtgtcatcttaaaatagaagtcgataaacaaactttttaccagttcacaaaaaaagaaactcattattttttcttgttgaatagaaagtttattttatacatgaaaaagtttg

SEQ ID NO: 52277 - DNA, 1200 bp, Homo sapiens
ttttctgagacagggtctcacactgtggtcagtgcagtggtgcgatctcggctcactgcaactcygcctcctgggttcaagcaattcttccaccctcagcctcctgaataactgggattacaggcacttgccaccatgcctggctaattttttgtatttttaataaagatggggtttcaccatgttggccaggctggtctcgaactgctgatctcaagtgatctgccctcctcaacctcccaaagtgctgggattataggtgtgagccaccatacccaggcttggtgggtttcttttcagtggcagagttaatttttatttttgaaggcaatttgaaaatatcgatcattaacaggttgctttaacccattcataatttttctcataatttatgttttatcttctttctgatattttgctattttcttatctgcttatttgctctgtaaagtatgttttatttacttttaaaatgtacttttattactttattaaggtaatcttgaaatataatcttatttaaaatttactattggttgcctttgaattatttttaaaaaaattccttaacatttctcaagtcttcacattaaaatcccctatataccatatctttgttaatataaacctagatttaagatatgtattattcctattacttttgtatgtaagatttttctttcatggatatttttggacatttactttttgttcttaacaaattttacaataattatttgatataattaaaatgtataccttcttttacggctcattgctaaccattcaaagcacaatagttccattcttatgttgtttgtcttaaattatctctcagtcagaaagagtatgtctttaagtaatttttttcaagaagggttccagggaaatgtattttctaagagctttcagatttgaaaatagttttctgttatttttgcccatgaaagacaacttgtctgggcataacatcatgggtagaactgtttcctcaaaattctgtagatgttctgtctttatagaatttactaaggtaagagaaacatctgaatttttttgattttcattgatttgagaatgaacttctctcccacctccccagtcccctgccccttgctcacatgctatgggttactttttatttatctctgaccttcaagagttctcatagctatttctagatatatcttaatagtttca

SEQ ID NO: 52278 - DNA, 2211 bp, Homo sapiens
attagtaactacgtcgtgggcctattgtggggactgagttaacatctgtaaagtgcttagaacagtgtctaatatatagttaattctcaatacacgtaagtcgttttcattataattatgttcctctatgtagtagaaagggggtcttgtcttcaccatatcggtagtgaggactccctcagctctaagtcatttctggcaggtgagagggtgggacagctctagcagaatatgggtttaaaggggaaagcaactartaggagatgcagtggggtaacgggaaaagaacagttttaaggaagaggtggagctcaaaatctgagtgacccaaaggacagcttttgacttcaagaagtccttcttgtttgttggcttgcttccagcttacgttctttacatctgctggctcagcgcattgggcagctttcttcttttttctcagcgacaatcttttatcctatctgaccaggatttctctgctccccgatcactgagaaagcatgtattctcccagcttttcttcagtacttctgtccctaaaacaaggactcttttcagagctctcttaaaaagttttctaaagactttcactgttactaacaaggagtaaaaaggcaagcatatattttttatcatttcatcccagagggaaaaaagttgtaaagttgttaatgctaagtctttaatcttacaaaagattacataagataacctttcactttctaagaagctcccctttcccaggaacaggatgggggtcctgagaggacaagcagagagaagacaggcttggcaggcactatgtcagcccttttggctcctctcacccctgctggcctcaccgtctcagagccacaggctgaaaggggaaacatgatagtcatcgggtagtggagtatggctgagcacagcaggctgaggaaaagggaagggaatcccaatagcaactacccttcctgtttgcagaccatgcccatgctgaggtaagcaaaacttggaatcctggggtggatctctgctatggttgcaatttcaggtgcttccctctttttatttgccttcccaattcactgaagattaggcgatggcagcggactggtagttcatgtattgtcttacaccctctatgtatgctgctttgaactctcagtatttaactgccctttccacattttctgggccagatccgcatgtagattcaaggaaggagactcctgctattaaaactcacgtgaaagtataacataagcgtaggtgagactaagagacagggtacttatatacaaactgtttacatagtatggtgattcagaaaacaaatttgaacaaaactgcctgagttagaattgtagcctgatcacttgctagctgtgtgaccttggacaagttacctaccctctagatacctcagtttcatctgtattatgaggctaataatagtactgacctctcaggactgttaagactaaatgagttgatatttgtgaatctcttagaacagtgtctgatacagagtagatgctatagaagtatttattaaataagtattcatgaaaattgagaccaaataaatacccttcatgtaaatgaaattttaaattaagaactgacatcattcaaatttgaaaacttggtcctttataatgtataatttattctaataaataaatactactgcatttactctctagctttagaacatgtgattaaagatatcatgttccattgagtgattccatagacaagtgctgtatttccctcttggagattcagagcacacattagcatattacaggctcgctcggcattttctaaaaagttttttttctggccgggtgcagtggctcacgcctgtaatcccagcactttgggaggccaaggtgggcagatcacttgaggccaggagttcaatccagcctggccaacgtggcaaaaccccgtctctactaaaaataaaaaaatttgctgggtgcggtggcgcacaccggtaatcccagctactcaggagcctgaggcacaagaattacttgaacctgggagcgggaggttgcagtgagccaagattgcaccactctgcactccagccgggcaacagagtgagaccctatctccaagaaataaaaaagttgattatcatttccttttgcacagcataactattaagaaaatagtgtttcatggaatattgtttaggaaacactactgtataca

SEQ ID NO: 52279 - DNA, 2211 bp, Homo sapiens
attagtaactacgtcgtgggcctattgtggggactgagttaacatctgtaaagtgcttagaacagtgtctaatatatagttaattctcaatacacgtaagtcgttttcattataattatgttcctctatgtagtagaaagggggtcttgtcttcaccatatcggtagtgaggactccctcagctctaagtcatttctggcaggtgagagggtgggacagctctagcagaatatgggtttaaaggggaaagcaactaataggagatgcagtggggtaacgggaaaagaacagttttaaggaagaggtggagctcaraatctgagtgacccaaaggacagcttttgacttcaagaagtccttcttgtttgttggcttgcttccagcttacgttctttacatctgctggctcagcgcattgggcagctttcttcttttttctcagcgacaatcttttatcctatctgaccaggatttctctgctccccgatcactgagaaagcatgtattctcccagcttttcttcagtacttctgtccctaaaacaaggactcttttcagagctctcttaaaaagttttctaaagactttcactgttactaacaaggagtaaaaaggcaagcatatattttttatcatttcatcccagagggaaaaaagttgtaaagttgttaatgctaagtctttaatcttacaaaagattacataagataacctttcactttctaagaagctcccctttcccaggaacaggatgggggtcctgagaggacaagcagagagaagacaggcttggcaggcactatgtcagcccttttggctcctctcacccctgctggcctcaccgtctcagagccacaggctgaaaggggaaacatgatagtcatcgggtagtggagtatggctgagcacagcaggctgaggaaaagggaagggaatcccaatagcaactacccttcctgtttgcagaccatgcccatgctgaggtaagcaaaacttggaatcctggggtggatctctgctatggttgcaatttcaggtgcttccctctttttatttgccttcccaattcactgaagattaggcgatggcagcggactggtagttcatgtattgtcttacaccctctatgtatgctgctttgaactctcagtatttaactgccctttccacattttctgggccagatccgcatgtagattcaaggaaggagactcctgctattaaaactcacgtgaaagtataacataagcgtaggtgagactaagagacagggtacttatatacaaactgtttacatagtatggtgattcagaaaacaaatttgaacaaaactgcctgagttagaattgtagcctgatcacttgctagctgtgtgaccttggacaagttacctaccctctagatacctcagtttcatctgtattatgaggctaataatagtactgacctctcaggactgttaagactaaatgagttgatatttgtgaatctcttagaacagtgtctgatacagagtagatgctatagaagtatttattaaataagtattcatgaaaattgagaccaaataaatacccttcatgtaaatgaaattttaaattaagaactgacatcattcaaatttgaaaacttggtcctttataatgtataatttattctaataaataaatactactgcatttactctctagctttagaacatgtgattaaagatatcatgttccattgagtgattccatagacaagtgctgtatttccctcttggagattcagagcacacattagcatattacaggctcgctcggcattttctaaaaagttttttttctggccgggtgcagtggctcacgcctgtaatcccagcactttgggaggccaaggtgggcagatcacttgaggccaggagttcaatccagcctggccaacgtggcaaaaccccgtctctactaaaaataaaaaaatttgctgggtgcggtggcgcacaccggtaatcccagctactcaggagcctgaggcacaagaattacttgaacctgggagcgggaggttgcagtgagccaagattgcaccactctgcactccagccgggcaacagagtgagaccctatctccaagaaataaaaaagttgattatcatttccttttgcacagcataactattaagaaaatagtgtttcatggaatattgtttaggaaacactactgtataca

SEQ ID NO: 52280 - DNA, 2211 bp, Homo sapiens
attagtaactacgtcgtgggcctattgtggggactgagttaacatctgtaaagtgcttagaacagtgtctaatatatagttaattctcaatacacgtaagtcgttttcattataattatgttcctctatgtagtagaaagggggtcttgtcttcaccatatcggtagtgaggactccctcagctctaagtcatttctggcaggtgagagggtgggacagctctagcagaatatgggtttaaaggggaaagcaactaataggagatgcagtggggtaacgggaaaagaacagttttaaggaagaggtggagctcaaaatctgagtgacccaaaggacagcttttgacttcaagaagtccttcttgtttgttggcttgcttccagcttacgttctttacatctgctggctcagcgcattgggcagctttcttcttttttctcagcgacaatcttttatcctatctgaccaggatttctctgctccccgatcactgagaaagcatgtattctcccagcttttcttcagtacttctgtccctaaaacaaggactcttttcagagctctcttaaaaagttttctraagactttcactgttactaacaaggagtaaaaaggcaagcatatattttttatcatttcatcccagagggaaaaaagttgtaaagttgttaatgctaagtctttaatcttacaaaagattacataagataacctttcactttctaagaagctcccctttcccaggaacaggatgggggtcctgagaggacaagcagagagaagacaggcttggcaggcactatgtcagcccttttggctcctctcacccctgctggcctcaccgtctcagagccacaggctgaaaggggaaacatgatagtcatcgggtagtggagtatggctgagcacagcaggctgaggaaaagggaagggaatcccaatagcaactacccttcctgtttgcagaccatgcccatgctgaggtaagcaaaacttggaatcctggggtggatctctgctatggttgcaatttcaggtgcttccctctttttatttgccttcccaattcactgaagattaggcgatggcagcggactggtagttcatgtattgtcttacaccctctatgtatgctgctttgaactctcagtatttaactgccctttccacattttctgggccagatccgcatgtagattcaaggaaggagactcctgctattaaaactcacgtgaaagtataacataagcgtaggtgagactaagagacagggtacttatatacaaactgtttacatagtatggtgattcagaaaacaaatttgaacaaaactgcctgagttagaattgtagcctgatcacttgctagctgtgtgaccttggacaagttacctaccctctagatacctcagtttcatctgtattatgaggctaataatagtactgacctctcaggactgttaagactaaatgagttgatatttgtgaatctcttagaacagtgtctgatacagagtagatgctatagaagtatttattaaataagtattcatgaaaattgagaccaaataaatacccttcatgtaaatgaaattttaaattaagaactgacatcattcaaatttgaaaacttggtcctttataatgtataatttattctaataaataaatactactgcatttactctctagctttagaacatgtgattaaagatatcatgttccattgagtgattccatagacaagtgctgtatttccctcttggagattcagagcacacattagcatattacaggctcgctcggcattttctaaaaagttttttttctggccgggtgcagtggctcacgcctgtaatcccagcactttgggaggccaaggtgggcagatcacttgaggccaggagttcaatccagcctggccaacgtggcaaaaccccgtctctactaaaaataaaaaaatttgctgggtgcggtggcgcacaccggtaatcccagctactcaggagcctgaggcacaagaattacttgaacctgggagcgggaggttgcagtgagccaagattgcaccactctgcactccagccgggcaacagagtgagaccctatctccaagaaataaaaaagttgattatcatttccttttgcacagcataactattaagaaaatagtgtttcatggaatattgtttaggaaacactactgtataca

SEQ ID NO: 52281 - DNA, 596 bp, Homo sapiens
aaggagagcagcagggtaaccaaacactctgaatcatgagctgaagagaggtgaccagggctaaagaaacctacagagattagccaaagaagaacttcaaaccacagctgctaatacattggctgttggaaagtacctgcaataaacatatcatactttatggaacactgtaatatgaaatgacacttttagggcagakgtataggaacctgggaaggcagataagagcccttgctcttttccatttcccaggtttatgctggcgtgcccacacatcttaatagatcacaaatgtttgctcctatcgaggtctcattattttcttcttcaaaataataccttccatcaatcacccaggaataacaaagtaatgacttaattgaatgcaaagagtctactcataccacctaaatcagctagtttatacatattgctgaaaaataggaatatttgtttgaaacccacaaagtgaaccagaaaattccgatcatctctcctgcatggtctgcctttgtgtgtactttcaaagtgaattatcaaactagtaatttgtcagtatggaacttaaattattaatatgtgaatatagtaggcta

SEQ ID NO: 52282 - DNA, 589 bp, Homo sapiens
ctctttacacatttgaaaaagtcaggaaagttcaatgacctacagggtgggtaatgttacacaggctttctgagagagaacactcagaatttccagagtaaatttgataggttttaagtgactttagcagtaatgattacatgctggcatttgtattttttagtactgggtagcttagtcttctatagttccttggttaattagcagcttcaaatattagactcaaatagctggaaaagctggcygggcccgatggcatgtgcctgtaatcccaacactttggggggccgaggtgggaggatcacctgaggtcaggagtttgagactagcctggacaacgtagtaaaaccccatctctactaaaaatgcaaaaattagccaggtgtggtggcaggtgcctgtaatcccatctacttgggaggctgaggcaggagaattgcttgaacctgcaaggcagaggttgcagtgagccaagattgcatcattgcactccagcttgggtgaaaaaaaacaaaactctgtttcaaaaaaaaagccagttaaatggttcatttgaagataaacattcttaaacacttattagatttca

SEQ ID NO: 52283 - DNA, 589 bp, Homo sapiens
ctctttacacatttgaaaaagtcaggaaagttcaatgacctacagggtgggtaatgttacacaggctttctgagagagaacactcagaatttccagagtaaatttgataggttttaagtgactttagcagtaatgattacatgctggcatttgtattttttagtactgggtagcttagtcttctatagttccttggttaattagcagcttcaaatattagactcaaatagctggaaaagctggctgggcccgatggcatgtgcctgtaatcccaacactttggggggccgaggtgggaggatcacctgaggtcaggagtttgagactagcctggacaacrtagtaaaaccccatctctactaaaaatgcaaaaattagccaggtgtggtggcaggtgcctgtaatcccatctacttgggaggctgaggcaggagaattgcttgaacctgcaaggcagaggttgcagtgagccaagattgcatcattgcactccagcttgggtgaaaaaaaacaaaactctgtttcaaaaaaaaagccagttaaatggttcatttgaagataaacattcttaaacacttattagatttca

SEQ ID NO: 52284 - DNA, 557 bp, Homo sapiens
tcatgccacattcagatatgctttgtcccacatggaggtttcctgatgaatttcttcagtggggacctcctccacactctgaagaaagcacatcataaggtgtcagarctccgaaataaaaggcaacaacatttttatacaaaattatttctagcaaccattatgattagtattgcctcaggtgttaacttgtgaataaccgatgtaattgattagaatgttagctaaaagctgtgcaggatggattctcaattagggtaacccatacagcacagattctcaatcagtgtgctgtagattctcaacctagatttgaagcttaacttctagcacatacataatatcccactgtgtggtattgacatatttaaagtaaattagacataatatcaagatttttaatcttgtgagcattatgcaaaacaggaaattaaacataaatcttaatacaatattgaaaaactaagctgtcaagttgtgatcttttttaaaacagctattccagtgatttccaagttacaaacttgagggataaaaatgtaaccaatataaagata

SEQ ID NO: 52285 - DNA, 205 bp, Homo sapiens
caaattccagaaaccactcctcagataatttaactagtaagcaaaatggagaactttttgattttgaagcccagtttaacagaatttaaactatattaatayaaaacttaattttctttattccaaaggctatattatactaaatctttctggaagctaaccacaggactaatgtgatgaaattgaaagaatggggaacaaacta

SEQ ID NO: 52286 - DNA, 552 bp, Homo sapiens
acatctataattattgaaaaatatatttctggaaagagttgcaaagttgcatttttttgcctttcccattgcttctagcccaggatactgtcgctccagaactgcatttgaggcaagcttggttccaccatggaagggagagtcaggtggtgaaattccacctagtctgtggycctaaatgagggggtgggggattttgggggagaacagaaattactgtgccagcaaagggagattagaaaacatctgtaggtgtgaatgcagatgtcgagggaaaaatgatttggttccccattagaagggtaactggctaaaatgcaaactcgaactatactgagatgctgtttctcaactatgggattggtaaacatgaaaaagtttgacaacacattctatggtaaggctggagtaagtgtcactttgtgcattgctagtgggagtacaacatgacacagctctgtagagggaaatttggcactatttagagtactcgaggatttaccctttgaaccagcagtaccatttcaggaagacaatcccaaagatactggc

SEQ ID NO: 52287 - DNA, 552 bp, Homo sapiens
acatctataattattgaaaaatatatttctggaaagagttgcaaagttgcatttttttgcctttcccattgcttctagcccaggatactgtcgctccagaactgcatttgaggcaagcttggttccaccatggaagggagagtcaggtggtgaaattccacctagtctgtggtcctaaatgagggggtgggggattttgggggagaacagaaattactgtgccagcaaagggagattagaaaacatctgtaggtgtgaatgcagatgtcgagggaaaaatgatttggttccccattagaagggtaactggctaaaatgcaaactcgaactatactgagatgctgtttctcaactatgggattggtaaacatgaaaaagtttgacaacacattctatggtaaggctggagtaagtgtcactttgtgcattgctagtgggagtacaacaygacacagctctgtagagggaaatttggcactatttagagtactcgaggatttaccctttgaaccagcagtaccatttcaggaagacaatcccaaagatactggc

SEQ ID NO: 52288 - DNA, 632 bp, Homo sapiens
tattatgttgattacaaaccgaagtgagttacagtaaatgatgcaaagaaattttgacaaataggtatatgcacttgaaagtggtactactctgctctcaaggtgttgctgttaagatatgaaccaacgctgaaaactccatatccacagatagctggyttcttcgataaaattcaattcaaatcaaagagtaattaaagcacttaaatttgcatgagcactgttccaagattaactaaagggctgaggggagctggaggtggggagctcaattaagaacctattcaacatatttcaagagagagggacaatctgaatttaggatatggatgtggaaatagaaaggggaatgtgagagacattatcaagagagaataaatacaacgtgaagagacaacctgggagaagggagaaaaatattgccaggcttaaaatacatgacaatgaaaaggccattaaccaatagggctaactgcaaaggtggtgctttggtggcaaaaaattttctttggaaatactgatttgaggtacttgcacatgaaaacttaacctcagctgggcgcagtggctcacgcctgtaatcctagcactttgggaggcaaaggttggtagattgcctcagctcaggagtt

SEQ ID NO: 52289 - DNA, 632 bp, Homo sapiens
tattatgttgattacaaaccgaagtgagttacagtaaatgatgcaaagaaattttgacaaataggtatatgcacttgaaagtggtactactctgctctcaaggtgttgctgttaagatatgaaccaacgctgaaaactccatatccacagatagctggcttcttcgataaaattcaattcaaatcaaagagtaattaaagcacttaaatttgcatgagcactgttccaagattaactaaagggctgaggggagctggaggtggggagctcaattaagaacctattcaacatatttcaagagagagggacaatctgaatttaggatatggatgtggaaatagaaaggggaatgtgagagacattatcaagasagaataaatacaacgtgaagagacaacctgggagaagggagaaaaatattgccaggcttaaaatacatgacaatgaaaaggccattaaccaatagggctaactgcaaaggtggtgctttggtggcaaaaaattttctttggaaatactgatttgaggtacttgcacatgaaaacttaacctcagctgggcgcagtggctcacgcctgtaatcctagcactttgggaggcaaaggttggtagattgcctcagctcaggagtt

SEQ ID NO: 52290 - DNA, 534 bp, Homo sapiens
gaactcctgacctcaagtgatccacccgcctcggcctcccaaaaggatttattttttgaaaccagttccacagctctcagcttggtccacttatctgtcctccccaagcttcagctgtcacttgtwaacatgtataataatagtacttcacgccgggcacggtggcttgcacctgtaatcccagcactgtgggaagctgaggtgggtggatcacctaggtcgggagttcgagaccagcctggctaacatggtgaaaccctatctctactaaaaatacaaaaattagccaggtgtggtggagcgcgcctgtaattccagctactaacgagagaggctaaggcaggagaatcgcttgaacctggaaagcaggggttgccgtgagccaagatcatgccactgcactccagcctgggtgacagagacacactccatctcaaaaacacaaacaaacaaacaaaaaacatgtataataacagtacttcagccataggcattgtactcgaagatgctgagaaagaacagtggcgggcaagg

SEQ ID NO: 52291 - DNA, 534 bp, Homo sapiens
gaactcctgacctcaagtgatccacccgcctcggcctcccaaaaggatttattttttgaaaccagttccacagctctcagcttggtccacttatctgtcctccccaagcttcagctgtcacttgttaacatgtataataatagtacttcasgccgggcacggtggcttgcacctgtaatcccagcactgtgggaagctgaggtgggtggatcacctaggtcgggagttcgagaccagcctggctaacatggtgaaaccctatctctactaaaaatacaaaaattagccaggtgtggtggagcgcgcctgtaattccagctactaacgagagaggctaaggcaggagaatcgcttgaacctggaaagcaggggttgccgtgagccaagatcatgccactgcactccagcctgggtgacagagacacactccatctcaaaaacacaaacaaacaaacaaaaaacatgtataataacagtacttcagccataggcattgtactcgaagatgctgagaaagaacagtggcgggcaagg

SEQ ID NO: 52292 - DNA, 630 bp, Homo sapiens
agagagcaagattcttgtctcgggggggaaaaagtgtactttgaaaagaaaatcaaaagttggtcgagtttagcattctgccttctcagaaccttagagttgtggggttggaggccaaggccttcctctgaagactctgaggcagcctcagctgcccacccagtgaattcactcattttatctaagactccatctgaagagggggctgcctccatgcacaaagtgagtctaggaaccactgcactggataatttaaaactcaaactgttttggtagatcacccgtggccaacgcaccctgggatgaattccatcaaacctgcagagctatcaggggacacaccagatacacagcctgcacatggcctatagaatcaggtgtccaaagtgagaaaggaagcgtggaaggaggaaaccagcaggcgtgcagaggagcagctgctttcatccccagcagcgacacttccagcccgcgggcctgayggggacacctgcccacgaaccccctgcaggggacacgagttctccttcctctccgagtccatctttaagatggtaacagagctctgaatcgtcaccattttatcatcagatgatttcatgtcaacatggacctagaaatactgtctca

SEQ ID NO: 52293 - DNA, 538 bp, Homo sapiens
aaaataagaatggaaaagtaaaatgagagaatagcactaactacttcttaaagatcttgtgaaaatcaaacaagtacttcatagaatccagagaccagtaagcactcaggtcataatctagaccattctaaagacttacatctgctcaagatataatcactcgacatggtcccattaggtcccctgtacaggacgacatttgtgatttcatcttcaaagcaatgtatttcacagaaactggtgaaaggtcaaattcttccatctctgacacagcactgacatggttgtgtatgagccagtggcagctgatatggagtcatgtgacaaaggtcgaaacgtcctccaggaaatatgtccttaggcaccgttttgtgctacaagaagcctcccactaaaatgttgagacagtatccctaagtgggtgctaaaacgtgtgcacacggatgtagagagtggaatgagagayaacaaagactcggaagggtgaggggatggatgagaaattacttaacgggtacaatacacgttactcgggtga

SEQ ID NO: 52294 - DNA, 460 bp, Homo sapiens
ctgtagccctgaaaggtctcgatccacctgctctctggacggaactgtggcttgaagagccattcctgaggactttggggcctttctctttctagacacccattttcttaattagaaagggaaaagactgtggccttgggagagttaagaatagtaagacaaggagctgggcartccagtagtcaactagctacatgtagctatttaaattagttacaatgaaataaaattagaaaactgtagagctgcagtcgcaccagcctcattcatagccatgtgtgactggtggctgccgtcttgggtggtgccttcattgtcccagaaagttctgttggagcaagcccagctggaggaacccagcttccctggcacgcctgagggtgacatggtgccctcactgccttctgtctgtcctcactttctcctgccctgtccctccgccctcaggtgagaagccctt

SEQ ID NO: 52295 - DNA, 530 bp, Homo sapiens
gggatcaatatgtgcagataggaagtaatttggtggtgtgacctttggccatttgtaagtgccttgtccctggaaaacaatgtttaaattggaattgggtttgttttccagccaattaaatccttctggatttcagaggaatttgaaacaaaatatggaacaaatatctattatgaaggaggcacagctgttagatgagttggttgttsgtattggtggtcgtgtgtgcattttatttttttttgtgggagagtagaattttcacttctgcggggagcatctgatcaaatggcccatataacttttacctgtctgctaatctgagtctcaatccacttcttgggctgtgacagctgatttaggacaaaacattccttttcttccaaaagtatacaatcttgggcttctactgttttctgaagctatttttgttctagttgaatgttggggggagaaacctggctatttgtttattattataccaaaaaagaaagtctccagcttctgaagcttggggcactcactgttag

SEQ ID NO: 52296 - DNA, 1403 bp, Homo sapiens
aacaatctggttccagaaactgtacttttaacctcatgatagcttcctgagsaatttatgatctgagtatatatagtaagtacctcccctttcagggtaaggcagtaggtaatggtgaacagggaagcaaaaggtgactcaggttgagtaaacaacaccaagcatatctgactcaaggaatgcttcagaggccaggggtgcatgcctgtaatcccagcaccttggaaggctgacacaggaggatcactggagcccaagttcaagaccagcctgcacaacatgacaaaaccctctctttacagaaaataccaaaattaggtgggctttgtggcgcatgcctgtagttccagctacttgggaggctgagagttgggagaatcacttgagcctgggaggtcgaggctgcagtgagctgtgatcgtgccactgcactccatcctaggcaatagagtgagactctgtctcaaaaaaaaaaaaaaaaagaaaaagaaaaagaagaaaaaaaggaatgcttcagtctgctccaaagaaaagaatggagtaatgtgaagtattaaatgtagcaagatgccactgcagtagctcacacctgtaatcccagcactttgggaggctgagatgggaggatcacttgagcccaggagttcaagaccagcctgggcaacatagtgagaccccatctcttaaaaaaataataaaaagtaaataaaaataaatgtagcaagaaattagaaatctttatgaacagatggcaatccagtttaatgttatgtgcatggccacaacccttattccactacatcctcctttcacatatatattatgaaggttaatgaatacaatcattgtgataacatttcttttctccctttctccctcctctggtagagtactcacataaaggctgcattcacaattgaggttagaacttgtctaggcatgtctagtgagcaatgggaggagtctgctaggaaagtactttcagaatactggaaaccttagggagaaaactcctcctgaaggtagaaaattgcagaaattataataaagcctcagctgctataggagaaggatagctttagtacttttggtagggaagcagtgtagcagcaaattttaagagatatatgagaggtatttaagtggatcatgcctgtaggtcatttagtagtagtatgcaatcaataaatattcattattacttgtgtgacagtgcttaccccacactgtcctttatagaaacatatttgcagagacctggggagaaaatgcaaacatgccagagggcttcataagaccatacataccctttaatgactccattaagtgttatcaacaaatgttagtaataataaatatagttattatcattattgttcttattacagcctcattttatgtta

SEQ ID NO: 52297 - DNA, 557 bp, Homo sapiens
tcagagaggggcttttctatgaagacattaatctggggcctcccctggggttaatctaagcattttgcagtatccttagggatgtagggagatactggttgggcctggattgtcccatttgcctggggagggtgggatgctgggtgggctctccttgcctgcttactttcgtcctcctttcccctgcccaggggtgtggggtacggatacagaggagcggctggtggagcatctcctggatccttcccgctacaacaagcttatccgcccagccaccaatggctctgagctggtgacagtacagcttatggtgtcactggcccagctcatcagtgtggtgagtagrggtcccaggctctctgcccagctactgaaatcagccccgccaaaatgtgttaatgcttgtgtgcttcctcccctggtgtttccaaggcttggggaggtgtgagagggaccctgggtggtggcagtgaccccacaggcttaggggccttctcggcagcctctcttcctccctgcagcatgagcgggagcagatcatgaccaccaatgtctgg

SEQ ID NO: 52298 - DNA, 2015 bp, Homo sapiens
  misc_feature (1)...(2015): n = A,T,C or G
gctgatgaatttgcattctgaatgcacccttacattttttctggattaaatggtcacacaggtaaaaatctttaggttatagtatttctgagctgagccatgggatgctttgagaactgatgtgtagcattaagtaaaacagaggcaggggccacccctggatattccagaagacagcttcctaacccaaatgaggaaacatctggcttatgaagcacatgtttaaggggacagtgaattagcacatgtgaattwtagactgtcctgaaaaatccagtacagcacacagacttcctccatggaatccccacaaagaagcagctggggacagttcataccaagctttaagtatcttctctgtctggggccatgtgctcgggaccaagaacgtagaggcaatcactgtgcagaagcaggtaagagggatgaaatgagaacaggcctggagctgggcaaatttaaatcccaattcttcactttactagctgggtgaccttcagcaggtgaattcagctttccgggactctttcttctgcagaatggagacaatgattgtgtctctctcaaagcactactgaaagaattgatctctgacaaacagtatgtggaagcttttaataatttttgttatgatttataattcctgcttttgaagacctcacaagctgccaatctctaagagaatccttattacacctgaaatttcaatttatccaaggcttcttgttttctgccacttacttatagccaagattggtcaaggacagccataaagatcctttagcctcatccaggaacatacaagacttaagttgctaatacctaatatagacgtatttctatatgaacctttagcacttaaccctgctagtagccaccatacctgaggcatgtgttgagtcggaacactggggacaggggacctggggacccaaatcagtcagagtatgaattctgccatgtatcttttgagacactctcattggacttgtcctcattcttcagtgggaatccaatttttctcccttcatagctatgtttgaagagcaagtgaaaacaattttgtataccataaagtgtgtattcactagacaatattatgaacacctattatgtaccaagtatcatgttaagtatcagaagaaccaagaataataagacagatgaaataaagtaaaatagagaaaagaaaatatacagaatactctataaaatatggaataaaataaaatgtgaactgagactagagaatgaagaagaataagtttcaaagacagattagcagaagggatactaaattatagtataaccnggaaagccttctcagaagaggagatatttaagcttgctaagaatacaggaaagcgctggagcaagagtgatcctagcagaaggaacacacagggaagatgagattgagctcattctcagatgaccctgaaagtcaacaagcctagagtcacaggatgtgactggagagacagaaggagcctcatctcacagaaggaccttctagtattatgattgccatgaagnncttaagaatcttcctgtccaagttattttctttttctttttttccttccttctttccttcattcattgttcttttgtttgtttggtttgttttcagacagagtttcactccctcaccaaggctggagtgcagtggaatgatctttgctcactgcaacctctgcctcccaagttgaagcagttctcatgcctcagcttcccaaatagctggaattacaggcattcaacaccatgcccagctaatttttatacttttagtagagacagggttttgctatgttggccaggctggtctcgaactcctggcctcaagtggtccacccgccttggcctccccaagtgctgggattacaggcgtgagccacttcgccagccccaagttattttcacgcattatttttcgtatacactgggctcaggttcaccaaaaccactattgccttgggtcctacattccaaagcttgattttattttaatc

SEQ ID NO: 52299 - DNA, 2015 bp, Homo sapiens
  misc_feature (1)...(2015): n = A,T,C or G
gctgatgaatttgcattctgaatgcacccttacattttttctggattaaatggtcacacaggtaaaaatctttaggttatagtatttctgagctgagccatgggatgctttgagaactgatgtgtagcattaagtaaaacagaggcaggggccacccctggatattccagaagacagcttcctaacccaaatgaggaaacatctggcttatgaagcacatgtttaaggggacagtgaattagcacatgtgaattatagactgtcctgaaaaatccagtacagmacacagacttcctccatggaatccccacaaagaagcagctggggacagttcataccaagctttaagtatcttctctgtctggggccatgtgctcgggaccaagaacgtagaggcaatcactgtgcagaagcaggtaagagggatgaaatgagaacaggcctggagctgggcaaatttaaatcccaattcttcactttactagctgggtgaccttcagcaggtgaattcagctttccgggactctttcttctgcagaatggagacaatgattgtgtctctctcaaagcactactgaaagaattgatctctgacaaacagtatgtggaagcttttaataatttttgttatgatttataattcctgcttttgaagacctcacaagctgccaatctctaagagaatccttattacacctgaaatttcaatttatccaaggcttcttgttttctgccacttacttatagccaagattggtcaaggacagccataaagatcctttagcctcatccaggaacatacaagacttaagttgctaatacctaatatagacgtatttctatatgaacctttagcacttaaccctgctagtagccaccatacctgaggcatgtgttgagtcggaacactggggacaggggacctggggacccaaatcagtcagagtatgaattctgccatgtatcttttgagacactctcattggacttgtcctcattcttcagtgggaatccaatttttctcccttcatagctatgtttgaagagcaagtgaaaacaattttgtataccataaagtgtgtattcactagacaatattatgaacacctattatgtaccaagtatcatgttaagtatcagaagaaccaagaataataagacagatgaaataaagtaaaatagagaaaagaaaatatacagaatactctataaaatatggaataaaataaaatgtgaactgagactagagaatgaagaagaataagtttcaaagacagattagcagaagggatactaaattatagtataaccnggaaagccttctcagaagaggagatatttaagcttgctaagaatacaggaaagcgctggagcaagagtgatcctagcagaaggaacacacagggaagatgagattgagctcattctcagatgaccctgaaagtcaacaagcctagagtcacaggatgtgactggagagacagaaggagcctcatctcacagaaggaccttctagtattatgattgccatgaagnncttaagaatcttcctgtccaagttattttctttttctttttttccttccttctttccttcattcattgttcttttgtttgtttggtttgttttcagacagagtttcactccctcaccaaggctggagtgcagtggaatgatctttgctcactgcaacctctgcctcccaagttgaagcagttctcatgcctcagcttcccaaatagctggaattacaggcattcaacaccatgcccagctaatttttatacttttagtagagacagggttttgctatgttggccaggctggtctcgaactcctggcctcaagtggtccacccgccttggcctccccaagtgctgggattacaggcgtgagccacttcgccagccccaagttattttcacgcattatttttcgtatacactgggctcaggttcaccaaaaccactattgccttgggtcctacattccaaagcttgattttattttaatc

SEQ ID NO: 52300 - DNA, 526 bp, Homo sapiens
caaatgcacttctagtacttcctatgtacagggcaggcactgttctaagtgtcttacagatattaacacatcagttccacctaacaaccctgtgggatatgtattagattttaaaaaatgcaaattttttacttttgtagggaagaaacaaaacatcaayttttatatggtttttcatattattattattgacattttacaaatgagaaaactgaggcacagaaccttagataacttggtagatcacacaactattaagcggtggaattaaaatatgagctaattaggaagtagttatggaacgacaaggccatttaagatcttttttttaccttacccaaaccatattgagcatattaaaatatacccacatgtctcattacatataattcatttaatgtaaccatataagaaataagttgaaaacactggaaagcaattgggggactaattcggcagctgaatcgttattgccaagtctttatgtttcaaaatgttaagtaaatatcaactttaaagccagctt

SEQ ID NO: 52301 - DNA, 551 bp, Homo sapiens
ttacctgtatctggttggatgaaagccgattttgaatcttgttgatttaaacagtgccaggtacccatgttgtctggcttttgctcacttactgagttagccttgttggcttttttccaaaccttaactccttttctaagatactgtttaatcttgctaactttgtacattttagctttaactgagagggttatatcctgtttatcagggtaattatatattctaataagggatatgcctattccctgataagcagatttattaaaaacttcaatctacctaacrggtcattttgataaggctatattattaacgtgcaatattcatattcatgtcttttttctttttctttttcttttttctgagattgagttttgctctgttgcccaggctggagtgcaatggcacgatctcggctccttgcaacttccacctcccgaattcaagtgattgtcctgcctcagcctcctgagtagctgggattacaagtgtgcaccaccacgcccaactaatttttgtatttttagtagatgagatttcaccatgttggc

SEQ ID NO: 52302 - DNA, 527 bp, Homo sapiens
tttcttgctgtacttgtctctgtagcaagtgctggctgtgcattagctttcttgtccccttcacccctttggtagtggagcctggagagaatttacttgggaactcaagtgtgccagcaaaggagacacaattgatgagggtactaagcacactgtttgggtgatgatgtttttcaaaacaatatcattagatcttcacatacagagctgggagataacatagtccctatgacagatgttagactaggaccccaaatgacctcgtatggtgtgccagtgtcttcttcatttgctccaaggacacagcatgaatagaataggctttgccatcagcaagggccctctcctagtttttccctagcatttcagatgcttggcacctgtaaccggattttccctgcactgagagtcagtgtgtcttgatgaaatgagcactggtttggagtcagaagacctgggctggtatcatgcccctgcascttagttgacatgtgtttggatgagtcacttctctgaacatatcttta

SEQ ID NO: 52303 - DNA, 397 bp, Homo sapiens
cctgggcgcagtggctcatgcctgtaatcccagcactctaggaggctgaggcaggtggatcacctgaggtcaggagttcaagactagcctggccaatattgtaaaacaccatctctactaaaaatacaaaaattagccaggcatggtggcacatgcctgtagttccagctactcaacaggctaaggcaggagaatcactagaacccaggagacggaggttgccgtgagccaagatcatgccactgcactccagcctgagcatcagagtgagactctgattttttttaaaaaaaaaragagagagagagagaatagagggctactgctgattagcccagtgaagaggtctgttctccactgcttcaactgccctatagtctggctgcctactagtact

SEQ ID NO: 52304 - DNA, 636 bp, Homo sapiens
tgctctgaaagtttttcttgcagatgagaaaaccggtccttgttcattctattgaccaaaccccaatgtgcccatgggaaaagcttgccaggatgaaatgtgtaggccactgctggaaagcagcaatgtaactggcttatgtagagataaaatttgtaactctgcactcatgctgattcttactgatgctgtagaatcsgtctccaccatcctcataattgaggttcctgttagtctttgttcttttcaacctgtcctccacacatcctccagaccagcttttctgaaataaaaaccctgttttcgttttatttcactgtgcttaaaaaccttcaatgacttctcattgccgacgtgaatgaaagtataattaagcttataatcagattataatttagtttattgatatttattactattagcgtaaaattagtttctaaatactgacaaattaggaggttttacttcaatatatatagatatgtgtcttttcttattaaattgaggtggtctgaagatatggggccccttttcctacctagatgagagctacctagcaactgtcttcttttaggcccatgaagttttctcaaatttgaggttgtcagttgccacgtactgggctgtttgttcaat

SEQ ID NO: 52305 - DNA, 525 bp, Homo sapiens
taagtaaatcttaaagtgaacaaaattttgataattagtttaacctaaagaaacctaactcattgactagactggtacgattttgttcacaaatgttggcacrttttctggcattatccctctgtctatgaagtatctgtgcatttcaattttgggtcaaaagataatttgtttgtgaagtagattgatactaaattgcccaatgtgtcagatcatcatggattccattgagataaagtcaaaatataattttgtaaattttgtgtgccatgaattatgctgaagctacatacacagaaaaatataaaagaagcaaacaataaatatctatataaaggaaagagctagactctagagtaagaagaaactggattatttaaatctcagttattcagtttatttgctgtttaagaatgttaaacaatttacataaactttttcaacctgtttactaaaccacaaaataggtttactaatgcctgccttgcatttgtaggatttaccataatatatttaattctctta

SEQ ID NO: 52306 - DNA, 525 bp, Homo sapiens
taagtaaatcttaaagtgaacaaaattttgataattagtttaacctaaagaaacctaactcattgactagactggtacgattttgttcacaaatgttggcacattttctggcattatccctctgtctatgaagtatctgtgcatttcaattttgggtcaaaagataatttgtttgtgaagtagattgatactaaattgcccaatgtgtcagatcatcatggattccattgagataaagtcmaaatataattttgtaaattttgtgtgccatgaattatgctgaagctacatacacagaaaaatataaaagaagcaaacaataaatatctatataaaggaaagagctagactctagagtaagaagaaactggattatttaaatctcagttattcagtttatttgctgtttaagaatgttaaacaatttacataaactttttcaacctgtttactaaaccacaaaataggtttactaatgcctgccttgcatttgtaggatttaccataatatatttaattctctta

SEQ ID NO: 52307 - DNA, 610 bp, Homo sapiens
ccggtcagaggcaaaagactttagatccttaggtaatacattgcctaaaaatatgtttttatgtgtggtagaggaatgatttgtgtgtatatatatatatacacacacacacacacacacacacacacatgcatatatatatacacacatgcatatatatatatacacacacttaattagctttttaagatttaaaacattaaaagcacatggttttttaaaaaatcaagagygtacagctgtatcaagatatctcatgtatcccgtaaatatatacatctactatatatccacaaaaatttaaaaaaaaaaagtgcacaggtatataaagtgaaaaacgtctccaccctccttcctacattcctcattccctttcacagcccctccactcaccagccccatttccatccctcaaagggaactagattttgtgttttgtttcagaaatgttctggacttataaaaatataatctctcttccattccctcactttaaaaactcaaatgggatactagaaaatactgttctgcaatttggactttttctttttcttttttttttttttttttgagacagggtctcactctgtcacccaggctggagtgcaat

SEQ ID NO: 52308 - DNA, 610 bp, Homo sapiens
ccggtcagaggcaaaagactttagatccttaggtaatacattgcctaaaaatatgtttttatgtgtggtagaggaatgatttgtgtgtatatatatatatacacacacacacacacacacacacacacatgcatatatatatacacacatgcatatatatatatacacacacttaattagctttttaagatttaaaacattaaaagcacatggttttttaaaaaatcaagagcgtacagctgtatcaagatatctcatgtatcccgtaaatatatacatctactatatatccacaaaaatttwaaaaaaaaaagtgcacaggtatataaagtgaaaaacgtctccaccctccttcctacattcctcattccctttcacagcccctccactcaccagccccatttccatccctcaaagggaactagattttgtgttttgtttcagaaatgttctggacttataaaaatataatctctcttccattccctcactttaaaaactcaaatgggatactagaaaatactgttctgcaatttggactttttctttttcttttttttttttttttttgagacagggtctcactctgtcacccaggctggagtgcaat

SEQ ID NO: 52309 - DNA, 610 bp, Homo sapiens
ccggtcagaggcaaaagactttagatccttaggtaatacattgcctaaaaatatgtttttatgtgtggtagaggaatgatttgtgtgtatatatatatatacacacacacacacacacacacacacacatgcatatatatatacacacatgcatatatatatatacacacacttaattagctttttaagatttaaaacattaaaagcacatggttttttaaaaaatcaagagcgtacagctgtatcaagatatctcatgtatcccgtaaatatatacatctactatatatccacaaaaatttawaaaaaaaaagtgcacaggtatataaagtgaaaaacgtctccaccctccttcctacattcctcattccctttcacagcccctccactcaccagccccatttccatccctcaaagggaactagattttgtgttttgtttcagaaatgttctggacttataaaaatataatctctcttccattccctcactttaaaaactcaaatgggatactagaaaatactgttctgcaatttggactttttctttttcttttttttttttttttttgagacagggtctcactctgtcacccaggctggagtgcaat

SEQ ID NO: 52310 - DNA, 597 bp, Homo sapiens
gctaaccattttaacatttatcgaagcttttgtgatcactgttctctagctgagtgttctagccattagccattagctttwaaaaacagctgaaagcagcctccctgtgtacagaaaataccgtgttcctcactagagacccctggcaatctgaaccactactagaggattctaacaagacattctttaccagtggacagaaaagcaaatagagaatattgttcaatgaacaatgcaactactaatcataacagtgctgtatcttaacctgtagtcatgaacctaacccagctgcttgaggcaagcagacccctctttctttttaactgtggaacaatctatagcatgggaaatgggttaagatttggaaaagaagttaggtgagtaactagcagcagaaagccaagcaccgtaagactctacctattccatctgcattcctgccttttctcaaaaagatctcaaagcagaaagaagcaatcagaacaaagccagtcagctctggtagcttgctcttacctctattctagctacatgtcacctcctgtgagaccctctgcccctccagacagtttaagaaacttctcagaagactag

SEQ ID NO: 52311 - DNA, 597 bp, Homo sapiens
gctaaccattttaacatttatcgaagcttttgtgatcactgttctctagctgagtgttctagccattagccattagctttaaaaaacagctgaaagcagcctccctgtgtacagaaaataccgtgttcctcactagrgacccctggcaatctgaaccactactagaggattctaacaagacattctttaccagtggacagaaaagcaaatagagaatattgttcaatgaacaatgcaactactaatcataacagtgctgtatcttaacctgtagtcatgaacctaacccagctgcttgaggcaagcagacccctctttctttttaactgtggaacaatctatagcatgggaaatgggttaagatttggaaaagaagttaggtgagtaactagcagcagaaagccaagcaccgtaagactctacctattccatctgcattcctgccttttctcaaaaagatctcaaagcagaaagaagcaatcagaacaaagccagtcagctctggtagcttgctcttacctctattctagctacatgtcacctcctgtgagaccctctgcccctccagacagtttaagaaacttctcagaagactag

SEQ ID NO: 52312 - DNA, 595 bp, Homo sapiens
tggtgcatctttatacctcaggtcttcatatggatttctcttctttgcttacagcttgttttggatasaagaaattggagcaacctgaaatattaatttccagagaaaaatattaaaagtccaaatactatctggggtggtatctagccgcttatactggctgagacataacttgatgcattttcctcaacaacatgaccctctcaattcacttaggggctgtagctgaaaatgatgttcctagatctgttttgacctacaagataaattctcaggaaaaaggaaatggagatagttatgtgcttgctggaatcacagatgagagatgtcaggacacccgcacagaatccctctttaggtctgtgtgtaccagcccccttccaacaggagcataggcttagcagggttgtcagggttggactgcacctcccaggacttccccttcaacctctggaaacttgattatgttcacacattaggacatacagaaatcagtgtactctgtgctcaaggtccagggattacctgaaagtttatatgatccagactcaaagagggaatcactgagtggcaggaaacgtgctgggtatcttac

SEQ ID NO: 52313 - DNA, 595 bp, Homo sapiens
tggtgcatctttatacctcaggtcttcatatggatttctcttctttgcttacagcttgttttggatacaagaaattggagcaacctgaaatattaatttccagagaaaaatattaaaagtccaaatactatctggggtggtatctagccgcttatactggctgagacataacttgatgcattttcctcaacaacatgaccctctcaattcacttaggggctgtagctgaaaatgatgttcctagatctgttttgacctacaagataaattctcaggaaaaaggaaatggagatagttatgtgcttgctggaatcacagatgagagatgtcaggacacccgcacagaatccctctttaggtctgtgtgtaccagccsccttccaacaggagcataggcttagcagggttgtcagggttggactgcacctcccaggacttccccttcaacctctggaaacttgattatgttcacacattaggacatacagaaatcagtgtactctgtgctcaaggtccagggattacctgaaagtttatatgatccagactcaaagagggaatcactgagtggcaggaaacgtgctgggtatcttac

SEQ ID NO: 52314 - DNA, 561 bp, Homo sapiens
ttctatggaatttcattttagttgagggagggaaaaggaagccaccatcaactctgcccaatactttatccctatctccacagagtaatgagttttaatgtgcagaagggtgggtgtcaaaatcatagcccaaggacactggtgggtgcctcctatgactggaaatgtgccacctctggaataagagcagcaacagttgtgaagttacattctcaagtcccggtttgaccctgcctgtttaagacagaagctgaatgaaaatarcagagaatggctcccttcctcacctcaccaccatactaccttgagcaaaagcaacagtagaatgcagtgaagagagcttcaaaagacagactgtctctggggagcagaacaaagggatggctcaaagccaagaacaagggatgattagagaaatctaaagtctctaatgtcctatgaagaacaaactccaatccagacaacttagtagcaacaacaaacttctaacccagtctaactcctaactagattaacacaaactcccacactaaaggtctggcagaaagaaagatgcaggca

SEQ ID NO: 52315 - DNA, 561 bp, Homo sapiens
ttctatggaatttcattttagttgagggagggaaaaggaagccaccatcaactctgcccaatactttatccctatctccacagagtaatgagttttaatgtgcagaagggtgggtgtcaaaatcatagcccaaggacactggtgggtgcctcctatgactggaaatgtgccacctctggaataagagcagcaacagttgtgaagttacattctcaagtcccggtttgaccctgcctgtttaagacagaagctgaatgaaaatagcagagaatggctcccttcctcacctcaccaccatactaccttgagcaaaagcaacagtagaatgcagtgaagagagcttcaaaagacagactgtctctggggagcagaacaaagggatggctcaaagccaagaacaagggatgattagagaaatctaaagtctctaatgtcctatgaagaacaaactccaatccagacaacttartagcaacaacaaacttctaacccagtctaactcctaactagattaacacaaactcccacactaaaggtctggcagaaagaaagatgcaggca

SEQ ID NO: 52316 - DNA, 561 bp, Homo sapiens
ttctatggaatttcattttagttgagggagggaaaaggaagccaccatcaactctgcccaatactttatccctatctccacagagtaatgagttttaatgtgcagaagggtgggtgtcaaaatcatagcccaaggacactggtgggtgcctcctatgactggaaatgtgccacctctggaataagagcagcaacagttgtgaagttacattctcaagtcccggtttgaccctgcctgtttaagacagaagctgaatgaaaatagcagagaatggctcccttcctcacctcaccaccatactaccttgagcaaaagcaacagtagaatgcagtgaagagagcttcaaaagacagactgtctctggggagcagaacaaagggatggctcaaagccaagaacaagggatgattagagaaatctaaagtctctaatgtcctatgaagaacaaactccaatccagacaacttagtagcaacaacaaacttctaacccagtctaactcctaactagattaacacaaactcccacactaaaggtctggcagaaagaaagatgyaggca

SEQ ID NO: 52317 - DNA, 553 bp, Homo sapiens
gtgtggaaaggctttccccagcataaatttgtatcagtagactcagattttcttctggtcttttcatttatactttaattgatttgtaatttgttttggcctaagattggaggtttgaatataactttattttcaggaaattgaatttatttactttcacattattttcttcactaatttgaagtacttatattgtcacttattggatttttaaattcttatatatggaatctgtcccttctattgataaattgtgtagttttgcaggaatatcgcaatattataacttcacaatacatcttaatatctcaataaggaaagtttctgtttattagtcttcrttgtcacaaatttccaggtgaaattgagtcatttaatgtagttccaaagaaaaattcttattcagattttgattgggattgcattaagtttatagattattttggagaaaacggatgtatctataatatagatacttcctgtccagaaacatggatattactatattttttcaactcttcttttatgtcctttagtaaaacctgtagttctc

SEQ ID NO: 52318 - DNA, 563 bp, Homo sapiens
aaaaggatctacagcccaccgaacagtcagaaacccctaacctagaggtactggtgtccttaaccagctagccaatccagtcagttcttcatccgggagccaaaagaccccaggcctgggtatcccaattccacttaggctggcagccttttgccagactaagaaatcaaaaaggtttgcagcaccaaagtgagccagtggtgttttctctcactcatcccagcactccaaccttagcctcagatctcacagctctaaagagaggaaagatcacgccgagaaaccaaagccaagagctcgaaaacgtctggcagttctgggaaggactagtccagacccccctctcggccctggacagaagatgaggcatccacagagaccacaccttcagtccccctgactactgtgcccccaggactgcaactggctgcggggtcctaggagatggttaaccaggaatctcggccagacgcggtggctcacgcctgtaatcccagcactttgggaggccgaggcaggtggatcacgaggtcaggagatcgagaycatcctggctaacacgg

SEQ ID NO: 52319 - DNA, 1530 bp, Homo sapiens
tctgctatttttatcccatgtttaatcatgttcagtcattacaatgcctttttagtgcagcaccttctctgaaacagtttcttattctatgtgtttccaaaagggaatatgaatatatgctctcatgtaaacgaaagaaaaaatattgtttattttaaatttaacaaaacaaaaaacaatcttactctgaaaattttacactggagctacttcaatgctctatgttttctgcattttgtacatccatggaaagatgtcaggtatgctataggtaaatagataatttaatgtttggctgtttaatttctttactttgtacttggggagaccagtatgagaataagactgcgaaagcctttcatcataatttgcaaaaagaaaaaaggaataaggatacatttacttgaacctcaacccttctaaataaaatctattgtttctactgagcatcaaccttttagtttgctagggatagtaacagttattgaaatgctaaaaatattttttctctgtgtggaaaacattgcatgtgatatattttttagatgttctactagttacttgatctgacctggactaaagtgagtatatatgctgtatactaaatctgtgtaccacttttctgatttacttttttagagcaatacccttaattttactgcagttagtatagaatactattattttccttaacatcaaaacaagccagtaactggccaaataagtaactggcatttgtattgcctaacatgcagaggaatactggcatgcatatatatatatatatatatatatatatatttttttttttttttttttttttttttgagacggagtcgcgctctgttgcccaggctggagtgcagtggcgcaatctcggctcactgcaaactccgcctcccaggtctacgccattctcctgcctcagcctcccgagtagctggaactacaggcacccgccaccacgcccggctaattttttttttttttttttttttttttagtagagacggggtttcaccgtgttagccaggacggtctcgatctcctgacctcgtgatccgcccgcctcggcctcccaaagggctgggactacaggagtgagccactgcgcmccgccactggcctatatttttgtgggctcttctgtggcatcccaggattgggggtccacaggcatggaaagaactagtgaatagtcaaaaaaaatgaaagagttaattttaggtatgcctcatttccctaactgcaattttaaagggtaggtggggaaccctgaaaaatccagaggctcaaagctttagaaattaaagaaaaggcaggctatggagatagagaaatagtggacagcatcagtgtaaagtcattctttgcaaaagtcagaaccaggagctatgaactgaattatattccctcaaaattcatacattgagcccctaacccccaatatgacagtatttagaaataggggctttgtagaagaaattaaagttaaatgaggtcaaagggtatggctctgatcccatagaa

SEQ ID NO: 52320 - DNA, 1530 bp, Homo sapiens
tctgctatttttatcccatgtttaatcatgttcagtcattacaatgcctttttagtgcagcaccttctctgaaacagtttcttattctatgtgtttccaaaagggaatatgaatatatgctctcatgtaaacgaaagaaaaaatattgtttattttaaatttaacaaaacaaaaaacaatcttactctgaaaattttacactggagctacttcaatgctctatgttttctgcattttgtacatccatggaaagatgtcaggtatgctataggtaaatagataatttaatgtttggctgtttaatttctttactttgtacttggggagaccagtatgagaataagactgcgaaagcctttcatcataatttgcaaaaagaaaaaaggaataaggatacatttacttgaacctcaacccttctaaataaaatctattgtttctactgagcatcaaccttttagtttgctagggatagtaacagttattgaaatgctaaaaatattttttctctgtgtggaaaacattgcatgtgatatattttttagatgttctactagttacttgatctgacctggactaaagtgagtatatatgctgtatactaaatctgtgtaccacttttctgatttacttttttagagcaatacccttaattttactgcagttagtatagaatactattattttccttaacatcaaaacaagccagtaactggccaaataagtaactggcatttgtattgcctaacatgcagaggaatactggcatgcatatatatatatatatatatatatatatatttttttttttttttttttttttttttgagacggagtcgcgctctgttgcccaggctggagtgcagtggcgcaatctcggctcactgcaaactccgcctcccaggtctacgccattctcctgcctcagcctcccgagtagctggaactacaggcacccgccaccacgcccggctaattttttttttttttttttttttttttagtagagacggggtttcaccgtgttagccaggacggtctcgatctcctgacctcgtgatccgcccgcctcggcctcccaaagggctgggactacaggagtgagccactgcgcacsgccactggcctatatttttgtgggctcttctgtggcatcccaggattgggggtccacaggcatggaaagaactagtgaatagtcaaaaaaaatgaaagagttaattttaggtatgcctcatttccctaactgcaattttaaagggtaggtggggaaccctgaaaaatccagaggctcaaagctttagaaattaaagaaaaggcaggctatggagatagagaaatagtggacagcatcagtgtaaagtcattctttgcaaaagtcagaaccaggagctatgaactgaattatattccctcaaaattcatacattgagcccctaacccccaatatgacagtatttagaaataggggctttgtagaagaaattaaagttaaatgaggtcaaagggtatggctctgatcccatagaa

SEQ ID NO: 52321 - DNA, 551 bp, Homo sapiens
tttgttccatgctcctagatttgaatatttcaaactgagtacttcagttccagcctgctcaggttsagactatttgattggcaacctgggggtcgatggcaactgaaaaacagctaatcattttgtgactgataaatctgacccagagtgaacaataggtttgagctattctgtttcacatagtcatctaactctccaggaattcctttaaaatttccggtgagctcttgtttgcctcaactgaaatcacagccttaggcactggtgatgttggtagcagatttatattatttcagtaatgcctttgttgtcagtgaaccggttcagattctttacttcactgccgaaaagaatttgagagcaagtccaaagggaaagtaaataaagaagttcattgcaaagcaaagtacgctctgatagcaggctgcacaagaataagagcgtcggttggcattgaggaaactccctttattggagcctaacatgattattcataaaagggtgggagtgggcattgttgtttagcatgttgtaggtggtctcctgaatgc

SEQ ID NO: 52322 - DNA, 551 bp, Homo sapiens
tttgttccatgctcctagatttgaatatttcaaactgagtacttcagttccagcctgctcaggttcagactatttgattggcaacctgggggtcgatggcaactgaaaaacagctaatcattttgtgactgataaatctgacccagagtgaacaataggtttgagctattctgtttcacatagtcatctaactctccaggaattcctttaaaatttccrgtgagctcttgtttgcctcaactgaaatcacagccttaggcactggtgatgttggtagcagatttatattatttcagtaatgcctttgttgtcagtgaaccggttcagattctttacttcactgccgaaaagaatttgagagcaagtccaaagggaaagtaaataaagaagttcattgcaaagcaaagtacgctctgatagcaggctgcacaagaataagagcgtcggttggcattgaggaaactccctttattggagcctaacatgattattcataaaagggtgggagtgggcattgttgtttagcatgttgtaggtggtctcctgaatgc

SEQ ID NO: 52323 - DNA, 558 bp, Homo sapiens
tcattttgatctgtagattgcggctttctttgttttggcctattttttgtctaccagcaatggcttgctaccatagccaaggttaaaattttgacttcttacccataaccagccttgcaaatgacctctgggacaaaatgaacttttacttttcagttcactacatcatctgtgggtcgcagctgagatctgagtctgtccactctgttattgagcattcatgctgcagcaacattatgtagtggttaagtctccctgtcaaagatttttgaccgagtccatcaagtagagcagttggaggttatgagaaataaactgctttttaagtaggttgaarcttttttttctttttcctttgagacgcagtctcgctctgtcgcccaggctggagtgcaatggcgcgatctcggctcactgcaggctctgcctccagggttcacaccattctcctgcctcagcctcccaagtagctgggactacgggcgcctgccaccatgcccggctaattttcttttgtatttttagtagagacggggtttcactgtgttagacaggctg

SEQ ID NO: 52324 - DNA, 558 bp, Homo sapiens
tcattttgatctgtagattgcggctttctttgttttggcctattttttgtctaccagcaatggcttgctaccatagccaaggttaaaattttgacttcttacccataaccagccttgcaaatgacctctgggacaaaatgaacttttacttttcagttcactacatcatctgtgggtcgcagctgagatctgagtctgtccactctgttattgagcattcatgctgcagcaacattatgtagtggttaagtctccctgtcaaagatttttgaccgagtccatcaagtagagcagttggaggttatgagaaataaactgctttttaagtaggttgaagcttttttttctttttcctttgagacgcagtctcgctctgtcgcccaggctggagtgcaatggcgcgatctcggctcactgcaggctctgcctccagggttcacrccattctcctgcctcagcctcccaagtagctgggactacgggcgcctgccaccatgcccggctaattttcttttgtatttttagtagagacggggtttcactgtgttagacaggctg

SEQ ID NO: 52325 - DNA, 558 bp, Homo sapiens
tcattttgatctgtagattgcggctttctttgttttggcctattttttgtctaccagcaatggcttgctaccatagccaaggttaaaattttgacttcttacccataaccagccttgcaaatgacctctgggacaaaatgaacttttacttttcagttcactacatcatctgtgggtcgcagctgagatctgagtctgtccactctgttattgagcattcatgctgcagcaacattatgtagtggttaagtctccctgtcaaagatttttgaccgagtccatcaagtagagcagttggaggttatgagaaataaactgctttttaagtaggttgaagcttttttttctttttcctttgagacgcagtctcgctctgtcgcccaggctggagtgcaatggcgcgatctcggctcactgcaggctctgcctccagggttcacaccattctcctgcctcagcctcccaagtagctgggactacgggcgcctgccaccatgcccggctaattttcttttgtakttttagtagagacggggtttcactgtgttagacaggctg

SEQ ID NO: 52326 - DNA, 525 bp, Homo sapiens
gactcaaatattatgagcagtgctgcatgatgtttcaagatggtattgagaccttggtaaaagactggaacaaaacaccacacaatcttcccttgatktagaaggcccctgcatttctggaagacccagtgcacgttgtgtatctgtataagcacagggaattctggggtcagatcaatggaaacaagttttttaccgaaatgaatgtctgggggcacaggtgtatgttaccgggacgagggcagttctttgttatattggactgcctatggcatcacaggatggacccgtggaccccacctgctaagtgccaaaggccaccaaaatgcctttccaaatttccaaaatgccccctccactggcaatagtcctactattgagaactacgtctagatgtttgctactccaagtgtgttacctggaccaacaaggcaggcatcccctgggggatcaccaatttataagaaacacagaccacaaagatatatatacctactaagtgcccacaatttttttgaaaaaacc

SEQ ID NO: 52327 - DNA, 525 bp, Homo sapiens
gactcaaatattatgagcagtgctgcatgatgtttcaagatggtattgagaccttggtaaaagactggaacaaaacaccacacaatcttcccttgatttagaaggcccctgcatttctggaagacccagtgcacgttgtgtatctgtataagcacagggaattctggggtcagatcaatggaaacaagttttttaccgaaatgaatgtctgggggcacaggtgtatgttaccgggacgagggcagttctttsttatattggactgcctatggcatcacaggatggacccgtggaccccacctgctaagtgccaaaggccaccaaaatgcctttccaaatttccaaaatgccccctccactggcaatagtcctactattgagaactacgtctagatgtttgctactccaagtgtgttacctggaccaacaaggcaggcatcccctgggggatcaccaatttataagaaacacagaccacaaagatatatatacctactaagtgcccacaatttttttgaaaaaacc

SEQ ID NO: 52328 - DNA, 560 bp, Homo sapiens
tggatatgttgtcaaacggaggggtgcaggagaggcggggccaggcctccaggtgacccctctggcttcctgggcctgcagaggcgccgaaacgtgcaggcgccggcgtccatgaggcgtggggcgcgccgggcgagtccctgcttgcaggaggcgcccgagaggccgtcgcgtaccctggcaagaggagctggttagcacctcccgaccccragaaggcccagggggcgcccggcgggggggcggggaccgggcgaggcccgcctcccattggccgcatagcgccgcccagcgcgggccgccgttataaagcagccgccggcgccgggtgcctcacagcacgctgccacgccgacgcagacccctctctgcacgccagcccgcccgcacccaccatggccacagttcagcagctggaaggaagatggcgcctggtggacagcaaaggctttgatgaatacatgaaggagctaggtgaggcacccggcctggcagcgcctgcaacgtggcgtgttgtgcggtcgtctgtccctaggtccccgtcagcgtgccagattctg

SEQ ID NO: 52329 - DNA, 2503 bp, Homo sapiens
gctgtattcatcttgaagaatcctcagtttaacgtttgtattaaaactttaaatttgcaaaatgctactacattttatcatttgagcctcatgacattcctctgaagtaggaatgctattttttttccctagtgccttttttttttttttttttttaaaatagagatggggtctcagtatgttgcccaggctggtctttaaactccttgcctcaagtgattctcccacctccacctcccaaagtgctgggattataggtgtgagcccctggcctgtattttcattttgcaattttatacatgtggaagtggagctcagtctccataactaacttgcttgaggtcacaggttatgaaattatccagatggatttgaacactggtgttaaaactgtaaagcctgttgtttattaattttctgtttgaaaagggcagactttattttttcatgtttcacggtttttcagtttgtaatgtaattacaaaatggctagtttttttgtatttttggtagagacagggtttcaccatattgcccaggctggttttgaactcctgagctcaagcagtccgcctgccacggcctcccaaggtactgggattacaggcgtgagccaccatgcctgacttgcgttttcacatattttaaattaaagctgtttggcttgtggttgtaaaaatagaatcatcactaatattgacgaatcctgcaattagtgggaagttggtttaggacaaggaaaatgaactccagtagaatacccagcacctactcgtatttcttgtgaaggactctttgccttaaaatgcaagaggacttaattagattcttgggccccacgaaagacgtgctaagtctctgggatggggcttcaggaatctgccttttttttaatttttatttttggagataaggtttcacactgtcacccaggctgtagtgcagtgggacgataacatctcagcctcctgaactcaggtgatcctccctcctcatcttccaagtagctgagactactgccatgcaccaccatacccagcttattttttgtagaggtgccatgttgcccaggctggtcacgaactcctgggctcaagcagtcactcctcctgccttggcttcccgaagcamtgggttataggtgtgagccatcacacccggcaaggaatctgcatttttaatgggtactacttataattgttacctcattgacttggtatttaaatattcagctctcacaatggtgtcctactgagggacagtgactccgaccctgagtaaaggaagaaggtaaggtattggtagcaactctaatagcagcattaataagtgtagtgatttgtattaattacagagtggtaatgatctgtgtatatccaagatatccacaccaggccttaaaaaacaatgttttgcacatcattaaacaaatattcattaaacaaattcattattcattaaacaaatattcattattcattaaattattaaattattcatttttcattaaatatttcatgaatactagctcaacagatcattctaggtgctttggaggatgaaaagatgaataggaatacagatcttgccctgaaagaactttgtttataaatgttgtaaaaacaggcatttaaataactgtagtgtaagataaaagttagtacatagtaattgtcatttcagagataacatattctgaagtccattaagggaaagatcacatccagagaaatactagaagaggtggagggtgtgcatggctttctgtttgtttaggaaaacaagtaaataactctccaaagtctcagggtaattctttgtgttggactttttcttttttcttaagccttctcaaacctatcaggtttaagattctagttagtgatatttcctacttgcgatagctgagaaaatttgaggtgcaagacttgaccaaccttctcttgagtgtgttcgaggatgggagacttgaatgcatgtgtcaaaagatgtccatggagaagcaggtaataaagatgcaagaaaaacgagttgctagatctccaaacagggagagagggctgagatctagttttggttggtaaaggaatatagtacttctctagcattaaagaaaggataaactacatggacatctagaggaaacttcaagtgaagaagtgatccatgttggatttttgtctttgtttgtttaattaaataataatactgttaagtttttacatagtgcttcctacatgttttcagtgctttatataggttaactggtttaattctcacaactcttgttgtgaagtatgtattgttcttatcctcattttgaaaatgattgcgtgcaaaggccaagtagtttttccaaaatcacccaggtagtgcttttaaccactacacaatgctgacagttcaatcagcatctctggaggtgtgaggcctgagcatcagtttgggttgctttttgtttttgttttttgggtcttttttttttttttttttttttttattg

SEQ ID NO: 52330 - DNA, 594 bp, Homo sapiens
tgggagatttgtcctttcacaggactgtaagggacaggttgggcatgggctccccctggaggagggagcctgggagaatttttccaccatgagactgttgtaggacaggaggaggtagaaccctctgggcaccttggacccccttcccctgtcccccatggtctcagaggccatgagtgtcatgggaccaagaccagcacctttttcctcagtgagatgcacatggtagacaccgtgacatggcacaagatgcgaggtaggtagccctgcccctctcacctgcccaacccccctgccccactcctcgtctcctaactgcccccaccctgtgcctttcctctcctgcttttctccctcacctgcccaccccactggacgtgcagacctcacattactcttgggtccrtgtctctttccaccgtgcattttcccgaagtctgtctgtctcgtgtcatgtatgtgcctgactctctggagtaagggcatctatctgtcctgggcttccttgcccacctgcctatctgtcccatgcccacctatccatccttgtgcccgcttttcctaccacatctcacctggtgcacctcctccttg

SEQ ID NO: 52331 - DNA, 496 bp, Homo sapiens
ccgtgtttgtggaacagcctactccgtttctgccccgyttcctgcagcggctgctactcctggactatccccccgacagggtcacccttttcctgcacaacaacgtgagactcccctgttggagcctctcctgagggaccctttccctgccctgatcagaactctcgtgcccccacccccatctccttcctgcacccccatccctcaggtgccgcctccctgccctctgagcccatccccctatgtcttcccctcccaggaggtcttccatgaaccccacatcgctgactcctggccgcagctccaggaccacttctcagctgtgaagctcgtggggccggaggaggctctgagcccaggcgaggccagggacatggccatgtgagcgggtgcttgcggggaggagagggtgggatgaggctgtagggtcaggggtgctgccacctgctgcctggcccttgcctcacctgtcacccatccagcccctcctgggcct

SEQ ID NO: 52332 - DNA, 496 bp, Homo sapiens
ccgtgtttgtggaacagcctactccgtttctgccccgcttcctgcagcggctgctactcctggactatccccccgacagggtcacccttttyctgcacaacaacgtgagactcccctgttggagcctctcctgagggaccctttccctgccctgatcagaactctcgtgcccccacccccatctccttcctgcacccccatccctcaggtgccgcctccctgccctctgagcccatccccctatgtcttcccctcccaggaggtcttccatgaaccccacatcgctgactcctggccgcagctccaggaccacttctcagctgtgaagctcgtggggccggaggaggctctgagcccaggcgaggccagggacatggccatgtgagcgggtgcttgcggggaggagagggtgggatgaggctgtagggtcaggggtgctgccacctgctgcctggcccttgcctcacctgtcacccatccagcccctcctgggcct

SEQ ID NO: 52333 - DNA, 512 bp, Homo sapiens
actacggaggctgaggtgggagaatcacttgaacttgggaggttgaggctgcagtgagccatgtttccaccactgcactccagcctggaaacagagggagaccctttctcaagaaaataaaaaacaagggccggccgcggtggctgacgcctgtaatcccagcactttggaaggcagaggcaggtggattactcgaggtcaggagttcgagaccagcctggccaacatggtgaaaccccatctctaccaaaaatacaaaaatcagcygggcatggtggctggcacctctaatcccagctatttgggaggctaaggtgggagaattgcttgaacctgggaggtggaggttgcagtgagccaagatcacaccactgcattccagcctgggtgacagagcaagactccgtctcaaaaaccaaaaacaagaaacaaaaaagaagtgccacagcttggggtaggaactgaccgcattttgggaggtggggtggttgggaccagcagtgcttgacaag

SEQ ID NO: 52334 - DNA, 512 bp, Homo sapiens
actacggaggctgaggtgggagaatcacttgaacttgggaggttgaggctgcagtgagccatgtttccaccactgcactccagcctggaaacagagggagaccctttctcaagaaaataaaaaacaagggccggccgcggtggctgacgcctgtaatcccagcactttggaaggcagaggcaggtggattactcgaggtcaggagttcgagaccagcctggccaacatggtgaaaccccatctctaccaaaaatacaaaaatcagccgggcatggtggctggcacctctaatcccagctatttgggaggctaaggtgggagaattgcttgaacctgggaggtggaggttgcagtgagccaagatcacaccactgcaytccagcctgggtgacagagcaagactccgtctcaaaaaccaaaaacaagaaacaaaaaagaagtgccacagcttggggtaggaactgaccgcattttgggaggtggggtggttgggaccagcagtgcttgacaag

SEQ ID NO: 52335 - DNA, 512 bp, Homo sapiens
actacggaggctgaggtgggagaatcacttgaacttgggaggttgaggctgcagtgagccatgtttccaccactgcactccagcctggaaacagagggagaccctttctcaagaaaataaaaaacaagggccggccgcggtggctgacgcctgtaatcccagcactttggaaggcagaggcaggtggattactcgaggtcaggagttcgagaccagcctggccaacatggtgaaaccccatctctaccaaaaatacaaaaatcagccgggcatggtggctggcacctctaatcccagctatttgggaggctaaggtgggagaattgcttgaacctgggaggtggaggttgcagtgagccaagatcacaccactgcattccagcctgggtgacagagcaagactccgtctcaaaaaccaaaaacaagaaacaaaaaagaagtgccacagcttggggtaggaactgaccgcattttgggaggtggggtggttgkgaccagcagtgcttgacaag

SEQ ID NO: 52336 - DNA, 1810 bp, Homo sapiens
ttggctaattctgacatttggctaataacatcctcacagtatgtcccaagtatcttctgcccttccyaccacggtgagcagtcatgacagtgagggtggcataggtgggatgtgtggctggcagaagccagtgggcaagagttgtccacagaatagtccatgagctttttagagcccggccattcccccagtgaatttgtgctttctcccctcagacgagctccgagacagtgacagtgtctgcgacagcggcgtggagacatccttccgcaaactcagctttaccgagtctctgaccagtggtgcctcactgctaactctcaacaaaatgccccatgattatgggcaggaaggacctctagaaggcaaaatttagcctgctgacaatttcccacaccgtgtaaaccaaagccctaaaattccactgcgttgtccacaagacagaagctgaagtgcatccaaaggtgctcagagagccggcccgcctgaatcattctcgatttaactcgagaccttttcaacttggcttcctttcttggttcataaatgaattttagtttggttcacttacagatagtatctagcaatcacaacactggctgagcggatgcatctggggatgaggttgcttactaagctttgccagctgctgctggatcacagctgctttctgttgtcattgctgttgtccctctgctacgttcctattgtcattaaaggtatcacggtcgccacctggcattccttctgaccacagcatcattttgcattcaaattaagggttaagaaaagagatattttaaaatgagagtcacttgatgtgccattttaaaaaaaaaggcatattgctttttctaatgtggttatttctctgatttgcaaaaaaaaaaaaaaaaaaaatacttgtcaatatttaaacatggttacaatcattgctgaaaatggtattttcccccttttctgcattttgctattgtaaatatgttttttagatcaaatactttaaaggaaaaaatgttggatttataaatgctattttttattttacttttataataaaaggaaaagcaaattgatgacctcaccttgtttgatctgtgcaaatacttttctaagatgcttccttataatcatgggatcattccgtatagcctggttatcacattcacattgcctattagagtcaattttttaatctagaaatgaacaaataattatcaaaaggaaagtgttttaacctaagatgaaagctttggatttgcctaatccttacccagctcatcttatttagattgtgccacctcactttcctccatctcatgcaatgctacacctcttcaatgtcttctccacacctctgtgataaagtattaagatttccatataccagagggccctggactaggagccttccagcatgaagctttgctgaacaacaggtgctggagaggatgtggagaaacaggaacacttttacactgttggtgggactgtaaactagttcaaccattgtggaagtcagtgtggcgattcctcagggatctagaactggaaataccatttgacccagccatcccattactgggtatatacccaaaggactataaatcatgctgctataaagacacatgcacacgtatgtttattgcggcattattcacaatagcaaagacttggaaccaacccaaatgtccaacaatgatagactggattaagaaaatgtggcacatatacaccatggaatgctatgcagccataaaaaatgatgagttcatgtcctttgtagggacatggatgaaattggaaatca

SEQ ID NO: 52337 - DNA, 620 bp, Homo sapiens
aggagtgggcgaggcagtgcggtccaaccaaacttgttgtgagggggggtgaatggctctaggaagtgggagtgtgcccaaagcagcaatcacgagaattgtgattcactagggttttcgtggggagtgcacttgtgaaactaaacctcatcagaaatgacctctgtctgcggggcgcagtggcgctcgcctacgtaktcccagttactggggacactgaggtgggaggatcccttgagcgggaggtcgaggctgcagtgagctgtgatcacgccgctgcactccagcctgagcaacacagcgagaccgcgtgtccaaaagaaatttagaaaaaaatgtcctctgccttttgccacacgccttaagatgattgctctgccagcctggccagcagaagtggctttgtaggcactcagacagcgtacacacgtatgcttaactctgggacttattttgagagtattttcaaaagtaaaacggcaagttaacatttatccatggaagtgatcgaatatagcagccctctggagcgcacgttcccaatcacggttgtctgttttcagtgtgaaatatgagttggcgaggaagatcgacctattattggcctagaccaaggcgct

SEQ ID NO: 52338 - DNA, 623 bp, Homo sapiens
tttctcagcggcctttaggaggtgattaaatccttttatggttagaaaagcaaaaacggaattatcctgagattaacgtgagatggaaataatttctcccagataaaatgttttgaaaggaagcatttatgtaacggaggtcatggattattccagggatgcactgttaaaagttcctagaatctgactgacaacaatgcccattaattgctgtccgcccactcccttattctcagtgcgggggacagtatattttctgtgattcacaaacaatgttatatttggtgctttgttcttcacsgggttcatttatggaatattacctttaggaccttcggacctaaatataactttatttgaacaaagtgaagtttctctttaccccaataggtaatgggtgtcgtgactgtaagattttccatagtcctcaaatccatccagctaatcaatccttcagaaactgacattgtaattgtaactgaaatcctacccacgtggtagacttcagatttctcagctgacgcacactgctgttggtactctagggctgaatataagcattatacatgtcctgtggtttatccttagattgtcatttaggagaaaggtctaaagctgggctg

SEQ ID NO: 52339 - DNA, 623 bp, Homo sapiens
tttctcagcggcctttaggaggtgattaaatccttttatggttagaaaagcaaaaacggaattatcctgagattaacgtgagatggaaataatttctcccagataaaatgttttgaaaggaagcatttatgtaacggaggtcatggattattccagggatgcactgttaaaagttcctagaatctgactgacaacaatgcccattaattgctgtccgcccactcccttattctcagtgcgggggacagtatattttctgtgattcacaaacaatgttatatttggtgctttgttcttcacggggttcatttatggaatattacctttaggaccttcggacctaaatataactttatttgaacaaagtgaagtttctctttaccccaataggtaatgggtgtcgtgactgtaagattktccatagtcctcaaatccatccagctaatcaatccttcagaaactgacattgtaattgtaactgaaatcctacccacgtggtagacttcagatttctcagctgacgcacactgctgttggtactctagggctgaatataagcattatacatgtcctgtggtttatccttagattgtcatttaggagaaaggtctaaagctgggctg

SEQ ID NO: 52340 - DNA, 623 bp, Homo sapiens
tttctcagcggcctttaggaggtgattaaatccttttatggttagaaaagcaaaaacggaattatcctgagattaacgtgagatggaaataatttctcccagataaaatgttttgaaaggaagcatttatgtaacggaggtcatggattattccagggatgcactgttaaaagttcctagaatctgactgacaacaatgcccattaattgctgtccgcccactcccttattctcagtgcgggggacagtatattttctgtgattcacaaacaatgttatatttggtgctttgttcttcacggggttcatttatggaatattacctttaggaccttcggacctaaatataactttatttgaacaaagtgaagtttctctttaccccaataggtaatgggtgtcgtgactgtaagattttycatagtcctcaaatccatccagctaatcaatccttcagaaactgacattgtaattgtaactgaaatcctacccacgtggtagacttcagatttctcagctgacgcacactgctgttggtactctagggctgaatataagcattatacatgtcctgtggtttatccttagattgtcatttaggagaaaggtctaaagctgggctg

SEQ ID NO: 52341 - DNA, 623 bp, Homo sapiens
tttctcagcggcctttaggaggtgattaaatccttttatggttagaaaagcaaaaacggaattatcctgagattaacgtgagatggaaataatttctcccagataaaatgttttgaaaggaagcatttatgtaacggaggtcatggattattccagggatgcactgttaaaagttcctagaatctgactgacaacaatgcccattaattgctgtccgcccactcccttattctcagtgcgggggacagtatattttctgtgattcacaaacaatgttatatttggtgctttgttcttcacggggttcatttatggaatattacctttaggaccttcggacctaaatataactttatttgaacaaagtgaagtttctctttaccccaataggtaatgggtgtcgtgactgtaagattttccatagtcctcaaatccatccarctaatcaatccttcagaaactgacattgtaattgtaactgaaatcctacccacgtggtagacttcagatttctcagctgacgcacactgctgttggtactctagggctgaatataagcattatacatgtcctgtggtttatccttagattgtcatttaggagaaaggtctaaagctgggctg

SEQ ID NO: 52342 - DNA, 1624 bp, Homo sapiens
cattgtcttgggtattcaccaatagcacttttaatttggctctcctttggggattctcctggccttctgttgatgtgaatagttaggaatgaccctaatttctttcccacttcagctaggcctgaggaaacttccatttgcattccttcccctttggtgatgcctgagtggttagctggctgtggataatcaatcctgctggttaatgarctgagcaaagaggttaaggtcacagttttgatccctgggggctgatttaccctctccacttgggtgcactgtccttctttctctacacccaccgtgtatgtttcctcccacctcaaggcctttgacaagttttttactctgccagaagttgtcttgcttcagctcctaattattgatattcagtgtcatttccccagccaagccttattcgctccctagacctagtcaggtgcttcagtttataacccatggtgccttgtatttctctagcatggcatttattagtgtttataattatcctttcatttttattattatttgattaatgtgacctattgttagcatagaaagctaacaggaaacaaatattgagtgagtatttaaatcttatctctgtattcttcagccacatgaccttgggcatgttacttaatttctctggggccagtcttctcatctgtgaaataggtatgatgatatttgaacttactgcccagtaagtccttgtgtcatgtagggtagtgttcagctgcaagtagtaggaaaccggactgattgttctttaaacacatggagtttatttaactcctataccaacataggcagtccaacacagctctagtggcttgatgatgccatatagagctcagattcattttcattctttctctgctttctatagcaagtacatttaatcctcatgtttacaaggtgactgctgctactccaggcatagtatctgtattccagtcagaaagaaggagaaagagggaaagtgagcatcaattgactactgttaatatctcattggccagaactagttcacatggccactcctaacagcaaaggagttcaaaagtttttttttgttttgatttttgtttttttgcttttacaacctgtagagtagaggcaagtcatagagaaatggtaagccaactaaagacgactgtatgccctaactgaacttcaatatctaagatggaaggaaccatgctccttttgttcaccatcgtaggttcaccttgaacaatgtctgtctcactgtaggcacccaagaagcctatcgttaaatgttaatgaatgaaaaaatgaactcctgtagagaccatctcccaattaggttttaagaggtactagacaaggatagatgaatcagtgccatcttaacatcacaggtaggaagaatttaaaatagacaccaccatcagacaccaccatcaccatcaggggccccactagcctttacattgcctttgcattaattacaaaagggcacccaccccttccttaagacacattactgccatctactggaaaattttcttaatataattgtaagtctacggtatctaagatgtgaatggtgcccccttagatgcagagaggtcattcaccaaaaaatctacacagc

SEQ ID NO: 52343 - DNA, 649 bp, Homo sapiens
gcaaagttgtgtttttttcagtcttttgtgatattcttattatcagtcacatatgcatgagaaccttctcttcatggccttccctggatctatttgtcaagattttttttttaacacaagcaactccattttgattctgacaactttcacagtgtccacctaagagagaattttcttttcctttcacttcagatactatcacacttattcaatccttaaagtattcaaaggcaatcagcaacatttgaatccttttctattcctaatgaaagtaaaaatgtcttcccaatttcctgagtgggaattgaggccaaatagaagatagttttccacaggaaaggtcttccaatagaccagaagtggggaaaagtatacgtaayagacttaatacttgcctgcctccccaacatctattccctttattcttgctaaattcccccaaattcattcagatatacacaccttcccctagggcagagtttctcaatgttggcactattgacattctgagccagctaattctttgttggcgggtggagggatggaccgtcctgtgcaccataacattgctacatgtttagcatcttccctggcctccacccactagataccagtagcacacctccctccctccagttgttccacgggg

SEQ ID NO: 52344 - DNA, 294 bp, Homo sapiens
tctgcctcaatgaatctgatcttgatttggggaaatcttttaatcttgggtactgaagttcaagaatgaagggagcaagaaagaggaggaaaatacagtgaaaaaagagaaaggctcaggaaaaataaagrcagacacagtaagagaaagccagagacactgagatgttagaggctacatccgtgtccatcacagagcaacacaaagcagagaagccacattctgagacaaagtctttgtgaaactttgtggacttagtgtatctttgtggcctagtggcctcatattctgaag

SEQ ID NO: 52345 - DNA, 617 bp, Homo sapiens
caggcttataggcagaagcgatttgccttgtctcagatgaaactttggacatggacttttgagttaatgctggaataagttaagacttccagtctgttgggaaggcatgattggttttgaaatgtgagaaggacatgatacttgggaggggccagaggagaaataatatggcttggccctctgtccccacccaaatctcatctcaaattgtaatcccctcatgtcaagagaggggcctgggtggaggtgactggatcatgggagcagatttccacatgctattctcatgatagtgagtgagttccaagagatctgatggtttaaaagtgtgtggcacttccctccttgtgctctctctctcctggtgccatgtcaagaagaaccttgtttcccctttgccttccaccatgattttctgagtttcctgagtcctcccattcatgcttcctgtaaagcctgaagaactatgaatcaattaaatctcttttcttcataaattactcagtctcaagtcattctttatatcattgtgaaaactgactactacggttagcaatcttaaagaatacttgtgattttgaraatcaggcacatatttttttaataatcggactgct

SEQ ID NO: 52346 - DNA, 996 bp, Homo sapiens
tacataattcatgtgtaggaacataatccttttagcctagaagtaaaaaatgatatagtcttgccctatagcactgatcatggccatatataatttataataaccaaaataatgacaatattttggtacagcatgctctattaatttgaatgctcacgagttaacacataattcaatgtgatatgtattaggttatagaaaaccatgaggtaaaaatcataggctgcattgaactttctacttccccaactttgcctcattatagggagggatgcagccctagagttcaagaattccataaagaccaacckgaaattctggtgcctggcatcttgtcacaccttcttccaatacacaaacatcaaggagtgtagaagttgaacatggtctgttgtcactgcctcaaagaatccacttctagcttgttcacactagggtgtgaacatttaaagagggtagggaagaaccacctgggtggattttcactggggatcttataataaactctcaaaatcccagattgagacaagggaagggatgctcagtcgtatgtaattaggaaaaagagagggattttgaacccacccctgcatcatctaagtcaaatagagccagtgtaactgttgggaccgttgcaggtagggtgtgctaggtaccaagccgcagttaggtaaccaatgacttttacaagcttattttcatctcagtacaccacatgcttcatgtgccacgtgcatgtatgtaagttacacatctaagattatattattgggttacactaccatgaattatctaaggaaaacagaatgatcatcattgtgtgtgcaaagacgacttctgaaattaataccaacaagagatttcttctttgcatattttcaagcagaaagtggactaaattatatcattggagcatgacgtctcaaaaaatatttattgccaaataattctttactgctaaaaattatttattgcatgaaatagaaaagatctgag

SEQ ID NO: 52347 - DNA, 589 bp, Homo sapiens
aaaagggggcagatacagcaccagggcagacaatcgccccaacgggtggctcccccagatcccaggactctaggccccgtagacgcaagattcccctgctgccacgcaggcgaggggagcctttgatgctgccacctcccttagagctggggtaccgggtcacggctgaagacctgcacctggaaaaagagacggcattccagcgcatcaacagtgcactgcacgttgaggacaaggccatcccggactgcagaccctcacggccttcccacactttgtcctcacttgcaacaggggcttcgggtgggcctcccgtttctaaagcacccactatggaygcacagcaggacagacccaagtcccaagactgcctgggcctagtggcccccctagcatctgctgcagaggtccccgctacagctcccgtgtctgggaagaagcacagaccaccaggacccctgttctcctcctcagatccccttcctgccaactcttcccactcccgggactcagcccaggtcacctcgatgattcctgcccccttcacagctgcaagcagggatgccggcatgagaagaacaaggtcggc

SEQ ID NO: 52348 - DNA, 505 bp, Homo sapiens
gcgttcttctgagtgtttattatatacatatattagctcctttaatcctcctaatgatcacctggagaagatactattattatgcctatattattaccttcattttatcaatgaaartactgagacacaaagggcttaacgaacttgcttaaattcacagagctgggctttgaaccaaggcaaactctagcatttatgcatttaaccactaccctttgctgtctcttgtgatactatcaatgctaagtgcctcaaaccaaaatattcagtaaattataatagctactgttggggctcagaaaacaacaccccaaaatgaagacctcagaagtggcttcagaagcatcctcagggccaggcaaggtggctcacgcctgtaatcccagcactttgggaggccgaggcaggtggatcacatgagctcaggaattcaagaccagcctggccaacatggagaaatcctaaaaatataaaaattagctgggcatagtggcacacacctgta

SEQ ID NO: 52349 - DNA, 505 bp, Homo sapiens
gcgttcttctgagtgtttattatatacatatattagctcctttaatcctcctaatgatcacctggagaagatactattattatgcctatattattaccttcattttatcaatgaaagtactgagacacaaagggcttaacgaacttgcttaaattcacagagctgggctttgaaccaaggcaaactctagcatttatgcatttaaccactaccctttgctgtctcttgtgatactatcaatgctaagtgcctcaaaccaaaatattcagtaaattataatagctactgttggggctcagaaaacaacaccccaaaatgaagacctcagaagtggcttcagaagcatcctcagggccaggcaaggtggctcacgcctgtaatcccagcactttgggaggccgaggcaggtggatcacatgagctcaggaattcaagaccagcctggccaacatggagaaatcctaaaaatataaaaattagctgggcatrgtggcacacacctgta

SEQ ID NO: 52350 - DNA, 543 bp, Homo sapiens
gtgtggtggcatgtgcctgtggttctaactacttgggaggctgggatgggaggattgcttgagcctgggaggtcgaggttgcagtcagccatgtttgcacctgtgcactccagcctgagcaacaaaactagactgtctcaaaaaaaaaaaaaaaaagaattcatgttactgcatgcatttttgtgtggtataaaatcatcgtagtaagctaagtcaaattatatagttaaccagatatacatactatctaagctagccaaaggtgtaatactcttttggtataattttcatttgctttataacatgtatcatattgctttatccattgtagccctgtaatctttcaaatgcaacaaaagctttttctattccataaaaccatctcaaactaaatcagagatgaccccgacaagacagcaacactttagcagtattaataatattaataatatgtttcatycatcctaagcagtattaataatctgtttcatcacatcctaagcatctcattctaaaccaagaaataggccgggtgcagtggct

SEQ ID NO: 52351 - DNA, 532 bp, Homo sapiens
catttttcaaaccatgccatggtttgcactgttcactagctgtttgagggaagaggtcgggtctgtttatttctttgccaccagggcttcacgcacacctaacctttagtgggtacttagtagatatttattgaatgtttggatgggtgaatgcattttggcacaaaaccttcacttctggactggaagatagattggatggagcagagacgggaggcagtgagaccaagtggagcrtcatacctggaagagaaacattgagcctgtgaattacagctatagcagtagaaattcaaggggggaaatagattctggagacctgggcaagtagaactgacgggacccagagatcagcggataaaatggatgctgtgaagggctaagggaagtggaaaggttgaagacaggcacctgaagcccacctaatcatatcactagatgttttgcagggtgtgcggtgggcaaaagtaggggtacgggatgggagtggaaaccgttctgtgtaggtccgtttgagaatcagcttaactga

SEQ ID NO: 52352 - DNA, 532 bp, Homo sapiens
catttttcaaaccatgccatggtttgcactgttcactagctgtttgagggaagaggtcgggtctgtttatttctttgccaccagggcttcacgcacacctaacctttagtgggtacttagtagatatttattgaatgtttggatgggtgaatgcattttggcacaaaaccttcacttctggactggaagatagattggatggagcagagacgggaggcagtgagaccaagtggagcatcatacctggaagagaaacattgagcctgtgaattacagctatagcagtagaaattcaaggggggaaatagattctggagacctgggcaagtagwactgacgggacccagagatcagcggataaaatggatgctgtgaagggctaagggaagtggaaaggttgaagacaggcacctgaagcccacctaatcatatcactagatgttttgcagggtgtgcggtgggcaaaagtaggggtacgggatgggagtggaaaccgttctgtgtaggtccgtttgagaatcagcttaactga

SEQ ID NO: 52353 - DNA, 532 bp, Homo sapiens
catttttcaaaccatgccatggtttgcactgttcactagctgtttgagggaagaggtcgggtctgtttatttctttgccaccagggcttcacgcacacctaacctttagtgggtacttagtagatatttattgaatgtttggatgggtgaatgcattttggcacaaaaccttcacttctggactggaagatagattggatggagcagagacgggaggcagtgagaccaagtggagcatcatacctggaagagaaacattgagcctgtgaattacagctatagcagtagaaattcaaggggggaaatagattctggagacctgggcaagtagaactgacgggacccagagatcagcggataaaatggatgctgtgaagggctaagggaagtggaaaggttgaagacaggcacctgaagcccrcctaatcatatcactagatgttttgcagggtgtgcggtgggcaaaagtaggggtacgggatgggagtggaaaccgttctgtgtaggtccgtttgagaatcagcttaactga

SEQ ID NO: 52354 - DNA, 1861 bp, Homo sapiens
aataagcatatgagaagggttcaacctctctgatgattaaaaacatactttgaaagaagataagagtttcttttccctgtggaaatagctcagattaaacaacgaggtgacacaatgctggctggaagtggagagactcacagctgctgtgtctctctctggattgtgaatttgtcagtttcttggtgcagcacttactcttctaggccattcctgctgggagccgcagaggtacagctgaacctggagcgcacaggtttcacggcagcatcatttctaacgctgcaaagtttaaatgacgaaaatgtcccctaataagagagtgagtggttaagtaaatgtgtatgcgacttctaaacatatccactcactggatatgtaatggagatttctaataagacagggaaatgttacaatgctataatttttattgaaaaacagaacccaagatacaaagggagtcagatgacctccattcaaatagaggcactgccaatctccagttctgagactcctgggtcagagacagggactttattagttgcagtaaaataatagctgcagtttaagcatggtgttcacatgagttccttgtgtcttccaagtcctagggtcggtgtggagtgggcgaggtcaagggcccatcatggatggtggatgcctgcacacacaatgggctgcattacacaggagaacactgagtttggggaatttaccgattttccggtaaacttgtccagagggagatggtacctcctcctttgaggttgctttttgcaaacacgaccctgagacacgggtacagagtgaccagggctttgcatttgtggcatactcagcaagaatgtgcaggaatgcccgtgcccatgatgggttcttctcccagcacctgggtgtggctcacctggactgcaagaatctcaggcctatgatcttccagtgggcctctggaagctggatgtgctgagaactagagaagggggccgagagtcagcctgggttttggggtctgaagcatgcttagaagcatcctggtccatctcctgcattttgcagatagggaaactgaggcccagaaagggacttgcccagagccagacagtgaatgaggagggggtcaggactggtgctcccctgtgtggtcctgaaggcacatcactgtcaccaccagcacagcagctgacagtgattacattacagagttttctctgtggggcttatgtgatgagagtcagcatctccttcaattctcacgaccgtgcaaagtgcaaagtcctaatccttgccccacgtgacagatgaggaaacaaggtaccaagaagtcaaatgctcaatgccacagagccagagagtagcgagcttggattggaacccaggtggtctggcctcagaccctgtcccaggctgtcaggacctctagcttgtcctgggggataggggtccatggtggtgcctacttccctgacacccagtgcctgrctttccaagtcaccagccacagggacaagaggatgtggagaggccatggaggacaggcctgggatgaggactagagtgagtgcctaaaaagggggcgccttggctgggcgccacggctcacgcctgtaatcctagcactttgggaggctgaggcaggcggatcacaaggtcaggagttcgagaccagtttgaccaacacagtgaaaccccgtctctactaaaaatacaaaaaattagctgggtttgatggtgtgtgcctgtaatcccagctacccccgagcctgaggcaggacaattgcgtgaacccggcagacagaggttgcagtgagccaagatcgtggcattgcactccagcctgggtgacagtgtgagacttgcctca

SEQ ID NO: 52355 - DNA, 605 bp, Homo sapiens
tgggctgctttgcagacggccaaaatgaacagaaacgcctgagtgcaacagaaagcaatcccacaccccctcggagacaggcctaagctctgcttaccctgagggctctccagccctcacaccctcctcctctcacactcactcgtccccagcccagccttgctacctgtgtccctgcttgggggggtctgtctccctaggagatgctgcccccatgaaggcagcsctggcctcgacctcattcacccaggagtatttatttatttatttatttaattttttgagacggagtcttgctctgacgctgaggctggagtgcagtggcgtgatctcagctcactgcaagctccacctcccgggttcacgccattctcctgcctcagccccccaagtagctgggactacaggcacctgtcatcatgcctggctaattttttgtatttttggtagagatggggtttcaccatgttagccaggatggtctcaatctcctgaccttatgatccacccgcctcggcctcccaaagtgctgggattacaggtgtgagccacctcacctggcccaggagtacttattgatcttccctctgtatttgaccctctgc

SEQ ID NO: 52356 - DNA, 605 bp, Homo sapiens
tgggctgctttgcagacggccaaaatgaacagaaacgcctgagtgcaacagaaagcaatcccacaccccctcggagacaggcctaagctctgcttaccctgagggctctccagccctcacaccctcctcctctcacactcactcgtccccagcccagccttgctacctgtgtccctgcttgggggggtctgtctccctaggagatgctgcccccatgaaggcagcgctggcctcgacctcattcacccaggagtatttatttatttatttatttaattttttgagacggagtcttgctctgaygctgaggctggagtgcagtggcgtgatctcagctcactgcaagctccacctcccgggttcacgccattctcctgcctcagccccccaagtagctgggactacaggcacctgtcatcatgcctggctaattttttgtatttttggtagagatggggtttcaccatgttagccaggatggtctcaatctcctgaccttatgatccacccgcctcggcctcccaaagtgctgggattacaggtgtgagccacctcacctggcccaggagtacttattgatcttccctctgtatttgaccctctgc

SEQ ID NO: 52357 - DNA, 605 bp, Homo sapiens
tgggctgctttgcagacggccaaaatgaacagaaacgcctgagtgcaacagaaagcaatcccacaccccctcggagacaggcctaagctctgcttaccctgagggctctccagccctcacaccctcctcctctcacactcactcgtccccagcccagccttgctacctgtgtccctgcttgggggggtctgtctccctaggagatgctgcccccatgaaggcagcgctggcctcgacctcattcacccaggagtatttatttatttatttatttaattttttgagacggagtcttgctctgacgctgaggctggagtgcagtggcrtgatctcagctcactgcaagctccacctcccgggttcacgccattctcctgcctcagccccccaagtagctgggactacaggcacctgtcatcatgcctggctaattttttgtatttttggtagagatggggtttcaccatgttagccaggatggtctcaatctcctgaccttatgatccacccgcctcggcctcccaaagtgctgggattacaggtgtgagccacctcacctggcccaggagtacttattgatcttccctctgtatttgaccctctgc

SEQ ID NO: 52358 - DNA, 605 bp, Homo sapiens
tgggctgctttgcagacggccaaaatgaacagaaacgcctgagtgcaacagaaagcaatcccacaccccctcggagacaggcctaagctctgcttaccctgagggctctccagccctcacaccctcctcctctcacactcactcgtccccagcccagccttgctacctgtgtccctgcttgggggggtctgtctccctaggagatgctgcccccatgaaggcagcgctggcctcgacctcattcacccaggagtatttatttatttatttatttaattttttgagacggagtcttgctctgacgctgaggctggagtgcagtggcgygatctcagctcactgcaagctccacctcccgggttcacgccattctcctgcctcagccccccaagtagctgggactacaggcacctgtcatcatgcctggctaattttttgtatttttggtagagatggggtttcaccatgttagccaggatggtctcaatctcctgaccttatgatccacccgcctcggcctcccaaagtgctgggattacaggtgtgagccacctcacctggcccaggagtacttattgatcttccctctgtatttgaccctctgc

SEQ ID NO: 52359 - DNA, 605 bp, Homo sapiens
tgggctgctttgcagacggccaaaatgaacagaaacgcctgagtgcaacagaaagcaatcccacaccccctcggagacaggcctaagctctgcttaccctgagggctctccagccctcacaccctcctcctctcacactcactcgtccccagcccagccttgctacctgtgtccctgcttgggggggtctgtctccctaggagatgctgcccccatgaaggcagcgctggcctcgacctcattcacccaggagtatttatttatttatttatttaattttttgagacggagtcttgctctgacgctgaggctggagtgcagtggcgtgatctcagctcactgcaagctccacctcccgggttcacgccattctcctgcctcagccccccragtagctgggactacaggcacctgtcatcatgcctggctaattttttgtatttttggtagagatggggtttcaccatgttagccaggatggtctcaatctcctgaccttatgatccacccgcctcggcctcccaaagtgctgggattacaggtgtgagccacctcacctggcccaggagtacttattgatcttccctctgtatttgaccctctgc

SEQ ID NO: 52360 - DNA, 1482 bp, Homo sapiens
tcatttctactttacagatggcactcctatctctaaacttgggtttgtgcatgagtgcacaaatacatgcttatacatcttcctaagggattaacaaaaagatgtcctacatggcaaaaaaaaaaaaaaaaaaaagatatcctttcttcatttctgactttttaaaatcaaggcatattttgaggctggtgctcatcagagtacaggtaatgagctcttgcttgtaattttgtgagtgtatattttctcagggaattgacagatagcatagggttctatttgtttggaaatcataattatttctggcaatttggtaattatttctcctgtagctagttacttgttgccttctcaagcaaaattgtgtttgccaagagctggctgkggcagtgcagtatttggtggctaaggctctgggcatggctcatggggatgctggccctgctaaggacaggctcccagctccatgatttctccagcccccacccctgagcttgtccatatctgaggagagtgagctgctaagtagaatgcttctctttgttttagttgtttcttccattgtgaaatccaggattctcccactcctatgtttattcaatcataaaaccattgggagttagagctcattgagcctttgagatcatcttattcaccctctcattttatgaatggaaaatctgtggtgcacagtgaatggttatgccaaggtcatccagcagtcgggaagggctaggctagaacacaggtctctttactctctggccagtgctcctttatcctccatgtgatgatttaactctttttagttaagcaacttgtatagattttccagtatggattaagcatagtcctaggtgctgcaagctcaagaaagccaaaaaagagggaatggtagatgtcaaatgagacaacattagaagagaacattacacagtgcctggcccagaggagatattccatgggtccctgcttttctcccctttgctcttccccaccccctatagatacatacagaggggaaaaatctcagatatttgaggtagtcaaattcttgcaagtgtcagaaggggagctgatagacaactccagttactcctttagaagcacattttctagttcctaataaaacctctcaggctaggcccacacctggaagaactcccctggtattctataaagacatcagctcctgggctgcccctctattccagagtgttgatgaatgtgtggctcgcccacactgcctgattcataagcacattagtgctgactcaccgacaactgagagaaaaaaaaaaaaaaaaaaatctcctcaggttttgagttgagatgaagacacttacaagatgcaaaattcagctctactgatggaatgataactgaaacacaccatgagctagtcatctggggaaaatattgtcaagggtatttggtctcaaacccaagctcttgtacccattttctgaattcataatagaa

SEQ ID NO: 52361 - DNA, 1482 bp, Homo sapiens
tcatttctactttacagatggcactcctatctctaaacttgggtttgtgcatgagtgcacaaatacatgcttatacatcttcctaagggattaacaaaaagatgtcctacatggcaaaaaaaaaaaaaaaaaaaagatatcctttcttcatttctgactttttaaaatcaaggcatattttgaggctggtgctcatcagagtacaggtaatgagctcttgcttgtaattttgtgagtgtatattttctcagggaattgacagatagcatagggttctatttgtttggaaatcataattatttctggcaatttggtaattatttctcctgtagctagttacttgttgccttctcaagcaaaattgtgtttgccaagagctggctgtggcagtgcagtatttggtggctaaggctctgggcatggctcatggggatgctggccctgctaaggacaggctcccagctccatgatttctccagcccccacccctgagcttgtccatatctgaggagagtgagctgctaagtagaatgcttctctttgttttagttgtttcttccattgtgaaatccaggattctcccactcctatgtttattcaatcataaaaccattgggagttagagctcattgagcctttgagatcatcttattcaccctctcattttatgaatggaaaatctgtggtgcacagtgaatggttatgccaaggtcatccagcagtcgggaagggctaggctagaacacaggtctctttactctctggccagtgctcctttatcctccatgtgatgatttaactctttttagttaagcaacttgtatagattttccagtatggattaagcatagtcctaggtgctgcaagctcaagaaagccaaaaaagagggaatggtagatgtcaaatgagacaacattagaagagaacattacacagtgcctggcccagaggagatattccatgggtccctgcttttctcccctttgctcttccccaccccctatagatacatacagaggggaaaaatctcagatatttgaggtagtcaaattcttgcaagtgtcagaaggggagctgatagacaactccagttactcctttagaagcacattttctagttcctaataaaacctctcaggctaggcccacacctggaagaactcccctggtattctataaagacatcagctcctgggctgcccctctattccagagtgttgatgaatgtgtggctcgcccacactgcctgattcataagcacattagtgctgactcaccgacaactgagagaaaaaaaaaaaaaaaaaaatctcctcaggttttgagttgagatgaagacactyacaagatgcaaaattcagctctactgatggaatgataactgaaacacaccatgagctagtcatctggggaaaatattgtcaagggtatttggtctcaaacccaagctcttgtacccattttctgaattcataatagaa

SEQ ID NO: 52362 - DNA, 1360 bp, Homo sapiens
ggcatcagagcaccagaagtctgcccagcggagaatttccaggagactgctgggcaacagacaacaagccagaggtcctaatttcagggttcatgttcatgaggtcaaagaactctgtggactgtaggaagccaagagaatgaattcacacatttccgggatgatgtaaatttatcggcttaaaacagttttttctattactcccataaataaacataacagccattgaacgtgctgttgcttactagtattatagaaacattagagataaggctcagtttgatttaagcagaaaagtgaacctggtctccatgcttcttaaagtcttttgcaccttcttgccacaaccctgaagttgaatcatgattaaattcttccttgagatcctgccagtaaaccagacacctgctcagatgcaagtgttgtttctaccttctctaggaaccttctgcctcagttagcagccctgcccctgtgccccgccccgcatcactccccatttccagcctttcctttcctcctggttctttcctctttgtttcccaacagactgagcatcacggtcccgatgctcaggcaatgctatccagattctctccttccttccgctcgtggccgatctcagatgctgccaatttctcacctttggttccttcccccctcaccctcatgctctctggctttcatcctctgtattagaactgccaaatatcacacctgtaatcccagcactttgggaggccaaggtgggttgatcacgaggtcaaaagatcaagaccatcctggccaacatggtgaaaccccgtctctactaaaactacaaaaattagctgggcrtggtggcgtgcgcctgtagtcccacctgctcaggaggctgaggcaggagaatcacttgaacctgggaggcagaggttgcagtaagcccagatcgtgccactgcactccagcctgggtgacagagcgagattctgtctcaaaacaaaacagaacaaaacaaaacaaaaaagaactgccagataaagatcactcttcatggttcagagtttcatcagcctgattccctggaaatggggtcacctcatgacttctggaggcctgaggcacttttgtctttggggacctttcttctgttaaaaaaaatgaaaattatattttataactatttgatataaagataagtatgatcaagtctaaattgtattcatttttaaaaattattattttaaaatacattaaaacgtgtgtgtgtgtgtgtgtgcgcgcgcgtgtgtgtgtgtgtgtgtgcttttggacagggtcttgctctgtcgcccagattgagatcatagctcactgcagcctcgacttcttgggctcaggc

SEQ ID NO: 52363 - DNA, 485 bp, Homo sapiens
taagtttttggttttggactatgattatttttcattaaaaaatgctatatgtgtttaacacgtaactggtttgtgtcattttttaaatgaataaatatcttaaagtgtcttaacttttaattctaatatggtagatatgagaattaaagctgatattaataaatataatccacattaataaaagccttttggggtccctcaataacttctaaaagtagaaaggggtctggaattcaaaatgcctgaaaccctggggccagatcatctgttccattmctccttacatgatgatttcaagaagcttgatgtgtcacataaaaactgacaggagtcacctgttcggtgataaatcacttggcagggcaaggccagttgctaagctgggactttcacagacacttgaagagtgtgactgtggttagtcagcagtatctttcttatctgaaaaaaacagatccttcattgcagtatccgtacctgaaacc

SEQ ID NO: 52364 - DNA, 485 bp, Homo sapiens
taagtttttggttttggactatgattatttttcattaaaaaatgctatatgtgtttaacacgtaactggtttgtgtcattttttaaatgaataaatatcttaaagtgtcttaacttttaattctaatatggtagatatgagaattaaagctgatattaataaatataatccacattaataaaagccttttggggtccctcaataacttctaaaagtagaaaggggtctggaattcaaaatgcctgaaaccctggggccagatcatctgttccattactccttacatgatgatttcaagaagcttgatgtgtcrcataaaaactgacaggagtcacctgttcggtgataaatcacttggcagggcaaggccagttgctaagctgggactttcacagacacttgaagagtgtgactgtggttagtcagcagtatctttcttatctgaaaaaaacagatccttcattgcagtatccgtacctgaaacc

SEQ ID NO: 52365 - DNA, 399 bp, Homo sapiens
tgactgaaagattctgaaaggagttcaaaattatatttcttaaagggggcttggggggtgttggctacasaatgtcccacatctgcgcttccaatactggtccttggctacaaattggcagctgttgccaaaacatccatgcaccatccgtccagtgagttccagccagccagaacgacaacagcattaaaaacacaaaactctaagtgaggaaatggaaactaacggatgcatctgtgtgtctgactgaagagaggaggaaaccaattcacagtctacatttttgataccctctatcaattcaattacaaatcataaataaagcccagaaacacagtcaataaatacttaccatgccttccaaggttctttttcccaataaaaaattcacttactgac

SEQ ID NO: 52366 - DNA, 1365 bp, Homo sapiens
cttttctctgcctttgtgatccgaaagtcgtgctgcggtttatatactcctaggcgagggtcgcgtgctaatgatccctttcttttcaatatgcacccgcggtgggacttacagaacctttattttcaacacgtaagcagtcacgcttcctcgagcctaaggctttgtgctattcttaaatgctttcctcctccgacgctgcggctccctcctgagcccgtagctgcagcgcgttggtgaggagcgccggccctgggtgccgcccgccaccctggagggaccggtccgggggaaagtgctcgggagaagccaggggccccggctgcggtcgctggcccggggctctgcgcactccccagtgcccggaaaccgcaggctggcccagcttgcgggccgggtccgcccacgtggrtgtgggaagcgcaggggacgcgggccgcccggccaaggtgcccttgccaggaaccggcgcagacacaggccctgggcggcgcgggaacccggccagtcccaccgcgcgctgcgccgcaggggccccactgcaggtcgccccaagaccgcgcgacgctcggcagggcgcccacagtcctgtgggtcagagaaatgtcacctccacgtccccgctggccgggagccgctggagcctagcaaccgcctgccagccccggcccagccccagccgttttacggcagcgggccccgcccccgtgcgccaccgagggcgggaaggaggcgtgcggcacgagccagccagtccgcgccaccatctctggccctgcgccctgtcattggccgagagccgggcggcgcggcgcggccgtaaggcgtggccgggtgtcgtgaggcgggccttcgggctggctcgccgtcggctgccggggggttggccggggtgtcattggctctgggaagcggcagcagaggcagggaccactcggggtctggtgtcggcacagccatggcgggcgcgttggtgcggaaagcggcggactatgtccgaagcaaggatttccgggactacctcatgaggtgacgagcgccgcaggccgaaccccgcaacccggaggggctcccgggaggctgcgacccgtgcagtccgcgacgagggcggccgcgaggacgcggtggccccgggcagcgggtgggccggggcccaggcgagagggtgcgcttgtcaggggggccccacccggatccctcccggaccgccacaccccgaagcggacggcgtagagagccggtgacagtgggcgcctttcagggcgggggtgacagtgggcgcccctcagggcgggggtgacagtgggtgtcctctcccggcagggtgacagtgggcgctcctcagggcgggggtgacagtgggtg

SEQ ID NO: 52367 - DNA, 1365 bp, Homo sapiens
cttttctctgcctttgtgatccgaaagtcgtgctgcggtttatatactcctaggcgagggtcgcgtgctaatgatccctttcttttcaatatgcacccgcggtgggacttacagaacctttattttcaacacgtaagcagtcacgcttcctcgagcctaaggctttgtgctattcttaaatgctttcctcctccgacgctgcggctccctcctgagcccgtagctgcagcgcgttggtgaggagcgccggccctgggtgccgcccgccaccctggagggaccggtccgggggaaagtgctcgggagaagccaggggccccggctgcggtcgctggcccggggctctgcgcactccccagtgcccggaaaccgcaggctggcccagcttgcgggccgggtccgcccacgtgggtgtgggaagcgcaggggacgcgggccgcccggccaaggtgcccttgccaggaaccggcgcagacacaggccctgggcggcgcgggaacccggccagtcccaccgcgcgctgcgccgcaggggccccactgcaggtcgccccaagaccgcgcgacgctcggcagggcgcccacagtcctgtgggtcagagaaatgtcacctccacgtccccgctggccgggagccgctggagcctagcaaccgcctgccagccccggcccagccccagccgttttacggcagcgggccccgcccccgtgcgccaccgagggcgggaaggaggcgtgcggcacgagccagccagtccgcgccaccatctctggccctgcgccctgtcattggccgagagccgggcggcgcggcgcggccgtaaggcgtggccgggtgtcgtgaggcgggccttcgggctggctcgccgtcggctgccggggggttggcckgggtgtcattggctctgggaagcggcagcagaggcagggaccactcggggtctggtgtcggcacagccatggcgggcgcgttggtgcggaaagcggcggactatgtccgaagcaaggatttccgggactacctcatgaggtgacgagcgccgcaggccgaaccccgcaacccggaggggctcccgggaggctgcgacccgtgcagtccgcgacgagggcggccgcgaggacgcggtggccccgggcagcgggtgggccggggcccaggcgagagggtgcgcttgtcaggggggccccacccggatccctcccggaccgccacaccccgaagcggacggcgtagagagccggtgacagtgggcgcctttcagggcgggggtgacagtgggcgcccctcagggcgggggtgacagtgggtgtcctctcccggcagggtgacagtgggcgctcctcagggcgggggtgacagtgggtg

SEQ ID NO: 52368 - DNA, 1365 bp, Homo sapiens
cttttctctgcctttgtgatccgaaagtcgtgctgcggtttatatactcctaggcgagggtcgcgtgctaatgatccctttcttttcaatatgcacccgcggtgggacttacagaacctttattttcaacacgtaagcagtcacgcttcctcgagcctaaggctttgtgctattcttaaatgctttcctcctccgacgctgcggctccctcctgagcccgtagctgcagcgcgttggtgaggagcgccggccctgggtgccgcccgccaccctggagggaccggtccgggggaaagtgctcgggagaagccaggggccccggctgcggtcgctggcccggggctctgcgcactccccagtgcccggaaaccgcaggctggcccagcttgcgggccgggtccgcccacgtgggtgtgggaagcgcaggggacgcgggccgcccggccaaggtgcccttgccaggaaccggcgcagacacaggccctgggcggcgcgggaacccggccagtcccaccgcgcgctgcgccgcaggggccccactgcaggtcgccccaagaccgcgcgacgctcggcagggcgcccacagtcctgtgggtcagagaaatgtcacctccacgtccccgctggccgggagccgctggagcctagcaaccgcctgccagccccggcccagccccagccgttttacggcagcgggccccgcccccgtgcgccaccgagggcgggaaggaggcgtgcggcacgagccagccagtccgcgccaccatctctggccctgcgccctgtcattggccgagagccgggcggcgcggcgcggccgtaaggcgtggccgggtgtcgtgaggcgggccttcgggctggctcgccgtcggctgccggggggttggccggggtgtcattggctctgggaagcggcagcagaggcagggaccactcggggtctggtgtcggcacagccatggcgggcgcgttggtgcggaaagcggcggactatgtccgaagcaaggatttccgggactacctcatgaggtgacgagcgccgcaggccgaaccccgcaacccggaggggctcccgggaggctgcgacccgtgcagtccgcgacgagggcggccgcgaggacgcggtggccccgggcagcgggtgggccggggcccaggcgagagggtgcgcttgtcaggggggccccacccggatccctcccggaccgccacaccccgaagcggacggcgtagagagccggtgacagtgggcgcctttcagggcgggggtgacagtgggcgcccctcagggcgggggtgacagtgggtgtcctctcccggcagggtgacagtgggcrctcctcagggcgggggtgacagtgggtg

SEQ ID NO: 52369 - DNA, 634 bp, Homo sapiens
ttaagaggagaggaagatagattcagaagctccgcagtatggattattgcagttccaggagagaatgaaaggaatggcagagaagtagggctggaatttttcagaattggaacaagacgtgaaccctctgattgagagcgctstcagagtactgagcagaataaataaagataaatgcagacccagcctcatcagagtcaaattgcagagccttggggataaagctacaccgcttccaaactgcctggaaggaaagatagattacctgtgaagaagtagcactgactgacagcagactcgtcaccattgctaataggcggcagggaagttgtcagagtgcttggggaagacaaacatgaagctagaattttgtgtcctaccaaattattaaagtgtgaggggtttcagacatgtaaataccgagagagtttgcctcctgtggactttcactgccaaaaaaaactgttgaatgatacttatctgagagagcagaagtgaaaaagaaggaaaggtgttgggactaggaaaggcctaagattttacctcacttgcaggttaacaaggtaccgctgcactttcatagatgcaggcagaaaggcaagagactcctgcctcaaagaccaaggactttgtt

SEQ ID NO: 52370 - DNA, 560 bp, Homo sapiens
taaacactcacttactttgcatcttcctctctcaaagctcagtgactaactcactacacaaagctataatgagtgttaaacataaaggtccctggattttcctgtactccttacagtagtctgtcattcttratccatttaaaataattaacaagggaaccagcctagccgaaacttaaactttatagaatataatgttattaaataaacttagacccagatgataccttaaaatcatctcctcctgataacttatagcaataaaagagagatcagggattctaaataacctacggaatgttacacagtttcatagacatatatgtcagggttagaaactgaacatacctaatttagtgcattttcgtctgttgtttataatatgacttatgtctttatttaaaaataataaatgactttttcttgatagttaagaataagaaggatatttggaaaaataatatgggttgattattttacagactcaaacattagaatatagtttctaatgttaacttgtacttacgtttctttagtgattaactccaatagttgcatat

SEQ ID NO: 52371 - DNA, 560 bp, Homo sapiens
taaacactcacttactttgcatcttcctctctcaaagctcagtgactaactcactacacaaagctataatgagtgttaaacataaaggtccctggattttcctgtactccttacagtagtctgtcattcttaatccattyaaaataattaacaagggaaccagcctagccgaaacttaaactttatagaatataatgttattaaataaacttagacccagatgataccttaaaatcatctcctcctgataacttatagcaataaaagagagatcagggattctaaataacctacggaatgttacacagtttcatagacatatatgtcagggttagaaactgaacatacctaatttagtgcattttcgtctgttgtttataatatgacttatgtctttatttaaaaataataaatgactttttcttgatagttaagaataagaaggatatttggaaaaataatatgggttgattattttacagactcaaacattagaatatagtttctaatgttaacttgtacttacgtttctttagtgattaactccaatagttgcatat

SEQ ID NO: 52372 - DNA, 560 bp, Homo sapiens
taaacactcacttactttgcatcttcctctctcaaagctcagtgactaactcactacacaaagctataatgagtgttaaacataaaggtccctggattttcctgtactccttacagtagtctgtcattcttaatccatttaaaataatwaacaagggaaccagcctagccgaaacttaaactttatagaatataatgttattaaataaacttagacccagatgataccttaaaatcatctcctcctgataacttatagcaataaaagagagatcagggattctaaataacctacggaatgttacacagtttcatagacatatatgtcagggttagaaactgaacatacctaatttagtgcattttcgtctgttgtttataatatgacttatgtctttatttaaaaataataaatgactttttcttgatagttaagaataagaaggatatttggaaaaataatatgggttgattattttacagactcaaacattagaatatagtttctaatgttaacttgtacttacgtttctttagtgattaactccaatagttgcatat

SEQ ID NO: 52373 - DNA, 603 bp, Homo sapiens
gaccgcctacagccatgcaaccaccgtcacagtcaagatacagaacatttccattaccttgaaaattcccccatgcccttttacttagaaggatgtttgctgtttcctgtaacagtgttgaagaatccatccttatctgagatcaagtaatagagaggagagagagctgggtgtagaggtgcccagggcaccctctctctactcgagccagtaaaaaacaaacctgcaatattcatctttatatacactcacagatgtaaatacagagagatacagaygagcaagccacaaagccaattacataccaaagttatgccattaacctatacaaagatttcataggttgtagttccttccagttcctcttccagcccctgctcctggcaaccactgatttgcattaaagataattcaacctatctcaatttaatttctgtccctatggttttgtccttttccagaatgtcacatacatgtaatcatacaaggattaaccttttgtgtctggcttctttcacttgagagtcatccgtgttgctgcatgcgtccatctttgttcctgtttattgctgagtaatatactaggcacaccacaatttgttt

SEQ ID NO: 52374 - DNA, 607 bp, Homo sapiens
aatggtccctcagaaacttcagaacaygggggcctgtgcagacagcccctcaccactgactctgcaccccccacgcacatcctccttggtggcacatgcccagtctccttatctgatgacacatttgcaggagcaaaggtcgcaattgcttaattaaagcatcaccacgtgcgagctaagtggcgagcaggcagccagctccagccaatcagacagctacagaacccactaatagcgggcttggacgtctgtacagggagcactgcctgctctgtggttcctctgaagaccacaattcatgatcttggcacgctcggttggcgacaacataatttaatataatgaaagacaaatgcagtttaaaacatgaaaatgctcacaaactacggtttgggtatcactttacattaagaagatttcatttcattcaataggaaacttcagaatacacagttgatcctatctaaagaccaccctgcaggtccaggcagaggccccgtcacaggcctccctgggcgctctgggcttgggctcagaggcccatatggggtcctggcaggtggcctcaggcaaaaccactcacccctttagctctgactctctttct

SEQ ID NO: 52375 - DNA, 539 bp, Homo sapiens
agaaacctttcctatgcaatcttaaaagtatttgaaacacacacttcacagtaggtaacatcctaacaagaaagcatgtttttctgtgaggcacaggctgcaccagcacagtattttctggaggacggagagaggatgctgcctttttaatggcaatcagtaatccagtaagtataattcactgagtgatgggtcacttaagtatcaggattttaaaaatctaattagaattacagcaccacagcaataaaggggagccactgtttttcaaaaattccagaatatgacttctaagaaacaattgaatacgtacataaggctgctcagttattaaaacaataagacttttacattttgttacccgacaaaaatataaacagtgtctagtgacagccctcagagggggacgagggcacagggtccagctgggatgagaaatgagaagaactgagggggaggatgggaaggtggtcgggaggggtcctggagcgrtggcaggtgatcagagactctgcagtaaacagtcatgaaacagcaat

SEQ ID NO: 52376 - DNA, 863 bp, Homo sapiens
ttgagcagagggaaaaatagcaacagaaatatttatatgatgatttgtcggtttacatacagtgtgattttacaactatcatcttatttaaccatcccagtgacctttcgaggctgacttattctcattttaaagaagaggaagctgaggctcagagaggttgtgggacatgctcaaggtcacacggtggaaagtagtccagctggaatctaccaggtctgcctgtgtgctttgcataatgcaaaactgaatttcgtgagtgctccagtgttgggttcttgaggtgaaattcaggaatatcatttccctctccagaccccttccttctgaagctccagtgtgataggacagcagagtgctggggccctcactttagtctctgggaagaacaaccccatggtgttggccacagctagcttgagggcccaaagaggttaagctaggagcagctgtaaactgatgcactaggaaatccacagcaggctcaaacaaatgtctttggaggctccttaacatcttttaaatgcaatatgtcagtatttctagtaattgtccttaaagccacacattttgtgattttggctttttggctagctgccaaggccatggcaattatggtcaccaacctgagatctggccagtagctgcccttagaaagttgcacaggcctctgcaagcagtatcagcagagataaataagcttagcaaaaagtgtgtgtgtgtgtgtgtgtgtgtgtgtgtgtgtgtgtktaaaatctccactgtaggactcttttgagcaggaacaagagctgcttatgtctcaccagctgtataagaggaatcccgtgactacttgaagtaactagcacattttgattcct

SEQ ID NO: 52377 - DNA, 610 bp, Homo sapiens
tctattgatgccaacttagatcagggcacctaaatttcaggtcattactatatccttttatttattttattttattttatttttatttttattttttattttttattgagacagggtctctctctatcacccagactggaatgcagtggcacaatcacagctcactgcagcctcgacctcctgggctcaaacaatcctctcgcctcagcctcctyagtagctgggactacagggatgtgccaccataagaggctaatttttaaattttttgtagagacagggtactccctacgttgcccaggcttatggtatgctttttagaaatgtatttttaagttatttttgagtggttgatacatgtacatagtatagaattcaacatatacaataacaaatgcataacaggtaagtctccctcacactcctacaccgtacacacctggttcccttctacaaaacagctacaagtatcaaccctttggatatacttgtagagatattcggttcacatgcaagcatgtatgtatttttctcacaaatgatgacacgcagttcagtgccttgcttttacatctttcagtacctgttggagaaaatcctaaatcagtgt

SEQ ID NO: 52378 - DNA, 565 bp, Homo sapiens
tttcaaaggaagatggggtctgctgacatggtctggactgtacaacttgccctcatttgtcagtaatcactactctctgacastgagctctaactgttatctgtgaatccttctgtgctcctttgccagcatctgcattttgcctttaacttccattgtgatctacatccaacactaacgatctgtcctctgacttgttccatggtttcagcttcagaaaaagaccactgatcacctgatttcctgcatcttccagatcaacagcctgattcaactggtccttctttgaacgacatctttctatgtctgctcatgtagcctgataaactccttaatggacactgaattaaactctgaagttggacactagtctagctatatggttgcaagagcatgcctttattctaaaggaagtgaaaagttaaaaaatacattgaggccaagtatggcagctcacatctgtaatcccagcactttgggaggcagacaggtgatttgtttgagctcaagagtttgagaccagctgggcaacatggtgaaaccatgcctctaaaaacaatacaaa

SEQ ID NO: 52379 - DNA, 565 bp, Homo sapiens
tttcaaaggaagatggggtctgctgacatggtctggactgtacaacttgccctcatttgtcagtaatcactactctctgacagtgagctctaactgttatctgtgaatccttctgtgctcctttgccagcatctgcattttgcctttaacttccattgtgatctacatccaacactaaygatctgtcctctgacttgttccatggtttcagcttcagaaaaagaccactgatcacctgatttcctgcatcttccagatcaacagcctgattcaactggtccttctttgaacgacatctttctatgtctgctcatgtagcctgataaactccttaatggacactgaattaaactctgaagttggacactagtctagctatatggttgcaagagcatgcctttattctaaaggaagtgaaaagttaaaaaatacattgaggccaagtatggcagctcacatctgtaatcccagcactttgggaggcagacaggtgatttgtttgagctcaagagtttgagaccagctgggcaacatggtgaaaccatgcctctaaaaacaatacaaa

SEQ ID NO: 52380 - DNA, 565 bp, Homo sapiens
tttcaaaggaagatggggtctgctgacatggtctggactgtacaacttgccctcatttgtcagtaatcactactctctgacagtgagctctaactgttatctgtgaatccttctgtgctcctttgccagcatctgcattttgcctttaacttccattgtgatctacatccaacactaacgatctgtcctctgacttgttccatggtttcagcttcagaaaaagaccactgatcacctgatttcctgcatcttccagatcaacagcctgattcaactggtccttctttgaacgacatctttctatgtctgctcatgtagcctgataaactccttaatggacactgaattaaactctsaagttggacactagtctagctatatggttgcaagagcatgcctttattctaaaggaagtgaaaagttaaaaaatacattgaggccaagtatggcagctcacatctgtaatcccagcactttgggaggcagacaggtgatttgtttgagctcaagagtttgagaccagctgggcaacatggtgaaaccatgcctctaaaaacaatacaaa

SEQ ID NO: 52381 - DNA, 540 bp, Homo sapiens
attggcttgcctttttcacttggcttactccagccaaaataatgtccatgaaattagaagtttaatgtgcaaaccatatatttatatatttttctaatttgcatttaaagaaatgcataaacattagacatttcaaagtatgtttgcctacctaaaattgtcctgtgaatgaggctcgaaaaagccttttaaaggcaagatttctaagccaagggtcaaaygtttgtttagaaaggaataaggaaaagaaaggtggcttgctcatcatgtctttctatgccctctccggaatattgactctagctcaatagttaccaacctcacctaccacctgctccccacatccaggctcctgattggttggggtaaaaagggcacctgctggggaagtcagcccattccatgcttaggcatacactgccctctgcaggtgagcagcaggattacataaccagagatgggttcgctggtctgtgtcagattctaatttgcattctatcctcacctcttccactctctagaccccagtgaaagcaatga

SEQ ID NO: 52382 - DNA, 540 bp, Homo sapiens
atggtctttaaatgccacctgagttttaaatgggagaggatgtgggttttagtttgttttcaaccctgcttatttatttctagataatagaaaagtgaactgtggctagctgtaaaaatgtatagaaaatcaaatcaacataacacattatcacagtggagaaaggtgtagtatatgtaagggtaaggaacttataactgaaatattttaaattcaaggatatgtgaaagtgatgcaggatttttctcagccccttagccagactcacagtaggggtgccctgtctacttggcttgctgcgttcaaccccttgcaggagggagcacatgagccagtgagtgcaggatcctgctagcccctcagggtgccaacacaggaacaagccccaygcagggcctacgccacagaccaggtgtgagcaagagagtgcgggacctggccagccactctgaacgtggacacaggagcaaactctgtgcagggcccacggccagaccaggcatgtcaccccaaggggaatgcagcagcacccaagtgatg

SEQ ID NO: 52383 - DNA, 572 bp, Homo sapiens
acataaataaataaataaataaataaataggtgacacctcagttctaagaaaacttcaccattttttcttaaaatcctaatgattatttcaacctctccttasagatcctataaaattagaaacccaaactctcttgtacctgactcgctctcctgaataagccctctcttgagtgtgttcctttgctttgcaatagacacttcttgccttttgcttcattctgcctacttcctaaactctttcttgcagcggtgacaagaatgtggacactggttggtgattgagtctctgggcacctggagacgacctaagcactatggcaatagtcagtctaaaaatcacacaggatatcacaattcactctctggttttcttgggggaaaaatccagtaactttggccccatatccccaaggggcatcactcagcacaaactgagaagcagcagtcctaccgctgggttgtaagtatgcggctttattccggggttctctattccattccattggtctatgtctcgaccttcatactggcaccacgcagttttgcttactattgccttactgtataaa

SEQ ID NO: 52384 - DNA, 1408 bp, Homo sapiens
cagaaacctagattgcttggctctctcagctggtagggctattttctctaactcaagatttgttctaaccctaaaatggagcaaggccaacttcgctcagactctctaatcccacaataaattaaaataaagtgcttgtgtgtcgctggctataaagccaaataatacaagattctgggagacctgcagacagygctaaggtgggtagtgactatttactagtaagttgaaggacacagcacatctaagtagagatggtcctaccttttaataaaaagaaatgtacttggccatgataatcatttgccttttggtcttcctgcaagaactgaaaatacaatgtgtgatctgtaaagaaatgaagattagcttctccttctagagtttcataatcttatgataattatagggcatgaagtggtacgtcaccagccctcccttttctcaaaattctgagtaccaactatgtgccaggcaatgtagcaagtactaagacgacagtgatgaaagctagcccactctagagaagctcatcattttatgattaacgctaagaaataaacaactacagctgggtgcggtcattcatgactgtaatcccagcactttgggaggccgaggcgggcagatcacaaggttaggagatcgagaccacccgggctaacatggtaaaaccccgtcactactaaaaaatacaaaaaattagctgggcgtggtggcgggcacctgtagtcccagctattcaggaggctgaggcaggagaatggcgtgaacccaggaggtggagcttacagtgagccgagatcgcaccactgcactccagtctgggtgtcagagcaggactctatctcaaaaaaaaaaaaaaaagaaaagaaaaagaaaaaagaaataaacaattacaatagagtacacaattaactggcatgcatggaaaatactcagcgcatatgtgaaggacccctaattcagctggggtaggaaagaggagggcctgagtaggagtggctacacactggaagttaagaggtcagaactgagacagaagaaaaacattttcctccaagactctgggagagatgcagggctggatgtattacactggcaggtgaatggctatgcgctagcagcttcatgttttcagtggtaaagttggtggacagaaaccagaatttggggttctatgggcacacttagtttttgaagcctagaactgggccacattcttggagtcagggataaatggaatacagatggttcctgatttatgatggcttgacttattttttgtctttacgatggtgcaaatgcaatatgcactcagtagaaaccgtacatcaagtacccatgcaaccattctttcactttcagtacaatattcaatatattatgtgatacagtcaacactttt

SEQ ID NO: 52385 - DNA, 1408 bp, Homo sapiens
cagaaacctagattgcttggctctctcagctggtagggctattttctctaactcaagatttgttctaaccctaaaatggagcaaggccaacttcgctcagactctctaatcccacaataaattaaaataaagtgcttgtgtgtcgctggctataaagccaaataatacaagattctgggagacctgcagacagtgctaaggtgggtagtgactatttactagtaagttgaaggacacagcacatctaagtagagatggtcctaccttttaataaaaagaaatgtacttggccatgataatcatttgccttttggtcttcctgcaagaactgaaaatacaatgtgtgatctgtaaagaaatgaagattagcttctccttctagagtttcataatcttatgataattatagggcatgaagtggtacgtcaccagccctcccttttctcaaaattctgagtaccaactatgtgccaggcaatgtagcaagtactaagacgacagtgatgaaagctagcccactctagagaagctcatcattttatgattaacgctaagaaataaacaactacagctgggtgcggtcattcatgactgtaatcccagcactttgggaggccgaggcgggcagatcacaaggttaggagatcgagaccacccgggctaacatggtaaaaccccgtcactactaaaaaatacaaaaaattagctgggcgtggtggcgggcacctgtagtcccagctattcaggaggctgaggcaggagaatggcgtgaacccaggaggtggagcttacagtgagccgagatcgcaccactgcactccagtctgggtgtcagagcaggactctatctcaaaaaaaaaaaaaaaagaaaagaaaaagaaaaaagaaataaacaattacaatagagtacacaattaactggcatgcatggaaaatactcagcgcatatgtgaaggacccctaattcagctggggtaggaaagaggagggcctgagtaggagtggctacacactggaagttaagaggtcagaactgagacagaagaaaaacattttcctccaagactctgggagagatgcagggctggatgtattacactggcaggtgaatggctatgcgctagcagcttcatgttttcagtggtaaagttggtggacagaaaccagaatttggggttctatgggcacacttagtttttgaagcctagaactgggccacattcttggagtcagggataaatggaatacagatggttcctgatttatgatggcttgacttattttttgtctttacgatggtgcaaatgcaatatgcactcagtagaaacygtacatcaagtacccatgcaaccattctttcactttcagtacaatattcaatatattatgtgatacagtcaacactttt

SEQ ID NO: 52386 - DNA, 1770 bp, Homo sapiens
tgtttatgattttgttgtatgtttatcagcattgtctatcagatactgcaggctccacgccttgrgacatttcttctatttaactcaaagtaggagactggcattaaacagaaggatcgtggatgctgatacaatgccagtgatctccatagtaacaatgcccttgtccaaacaagtaatataatgaacagcattccctatttcctgtgtactcttttatttatttatttatttatttatttatttgaaatggagtctcactctgtctcccaggctggagtgcagtggcaccatctcggctcactgcaagctccgcctcccaggttcacgccattctcctgcctcaacctcctgagtagctgggactacaggtgcccgccaccacggccggctaattttttttatttgtatttttagtagagatggggtttcaccacgttggccaggatggtctcaatctcctgacctcatgatccacccgcctcggcctcccaaagtgctgggattacaggcgtgagccaccgcacccggctttcctatgtagtcttgatggtgatacagaaagcatttctttcccttgtaggaaatgggtataaaaacaattttacctttaacttagagcgtaatgaaaatttttttttaaacttttattttaggttcaatggtacatgtgcaggtttgttacacagataaatttgtgtcactaaggttcgttgtacagattatttcatcacccaagtagtaagcccagtactcaatagttattttttctgctcctctctctcccgcaaacctctaccctcaagtaggccccttctttgttgtttccttctttgtgtctatgagttctcaatatttagcctaatgaaaaatttaaaaactgtattaaacataaggcaaaggtatcacttgatttggcatgatggaaaataaattttggatcatgttttgaacgtttgggcctcatattgatagtgatttagggagaaggggcacaacagcacatggttctcacaatgtgggctgtatatcagcaagaatacatccgaaaatctcatcatcatttctcagaggcagcaaataaacatcataaatttactctatgagtcctctatatcataatgaagttacccttcttctgaattagtgggtttatctagtatttgaaggattttcaaccaatagtttcatggagaagagctgctttcttatttccctcaagtcttgagatgatcaaattactgatcaagaacattattgacagtgaagttagagaaagtgaggcttataatccactgattaaatgaatctgacttgatttatctgtgtaatgagaaaagaaaagggaaagaaataaccctgggaatacttgaacaatgtaagaacaataagatcatgtttttttctctttttaccaagtgcgggacaatagacatatgtgagagatggagacctgcctaagaatttaatttggaaaaggttgagaagagtcatacttgcaaagcctctgacaattccattttggttaagggtagagatcttggtaggtggctttttttttttttttaggaaaatatctagaacatggtgtttccatgagacaggaagaaagggagttaagttgttttgcaaaataaatagatatattcccattttaagatggcagtttattctcactgtaaccttgaaaccttgaaatacatgataaaagactttgggtatcagtcaaatagagacagagatgaaaatgaaacaaagtgaaggtgccca

SEQ ID NO: 52387 - DNA, 1770 bp, Homo sapiens
tgtttatgattttgttgtatgtttatcagcattgtctatcagatactgcaggctccacgccttgggacatttcttctatttaactcaaagtaggagactggcattaaacagaaggatcgtggatgctgatacaatgccagtgatctccatagtaacaatgcccttgtccaaacaagtaatataatgaacagcattccctatttcctgtgtactcttttatttatttatttatttatttatttatttgaaatggagtctcactctgtctcccaggckggagtgcagtggcaccatctcggctcactgcaagctccgcctcccaggttcacgccattctcctgcctcaacctcctgagtagctgggactacaggtgcccgccaccacggccggctaattttttttatttgtatttttagtagagatggggtttcaccacgttggccaggatggtctcaatctcctgacctcatgatccacccgcctcggcctcccaaagtgctgggattacaggcgtgagccaccgcacccggctttcctatgtagtcttgatggtgatacagaaagcatttctttcccttgtaggaaatgggtataaaaacaattttacctttaacttagagcgtaatgaaaatttttttttaaacttttattttaggttcaatggtacatgtgcaggtttgttacacagataaatttgtgtcactaaggttcgttgtacagattatttcatcacccaagtagtaagcccagtactcaatagttattttttctgctcctctctctcccgcaaacctctaccctcaagtaggccccttctttgttgtttccttctttgtgtctatgagttctcaatatttagcctaatgaaaaatttaaaaactgtattaaacataaggcaaaggtatcacttgatttggcatgatggaaaataaattttggatcatgttttgaacgtttgggcctcatattgatagtgatttagggagaaggggcacaacagcacatggttctcacaatgtgggctgtatatcagcaagaatacatccgaaaatctcatcatcatttctcagaggcagcaaataaacatcataaatttactctatgagtcctctatatcataatgaagttacccttcttctgaattagtgggtttatctagtatttgaaggattttcaaccaatagtttcatggagaagagctgctttcttatttccctcaagtcttgagatgatcaaattactgatcaagaacattattgacagtgaagttagagaaagtgaggcttataatccactgattaaatgaatctgacttgatttatctgtgtaatgagaaaagaaaagggaaagaaataaccctgggaatacttgaacaatgtaagaacaataagatcatgtttttttctctttttaccaagtgcgggacaatagacatatgtgagagatggagacctgcctaagaatttaatttggaaaaggttgagaagagtcatacttgcaaagcctctgacaattccattttggttaagggtagagatcttggtaggtggctttttttttttttttaggaaaatatctagaacatggtgtttccatgagacaggaagaaagggagttaagttgttttgcaaaataaatagatatattcccattttaagatggcagtttattctcactgtaaccttgaaaccttgaaatacatgataaaagactttgggtatcagtcaaatagagacagagatgaaaatgaaacaaagtgaaggtgccca

SEQ ID NO: 52388 - DNA, 1770 bp, Homo sapiens
tgtttatgattttgttgtatgtttatcagcattgtctatcagatactgcaggctccacgccttgggacatttcttctatttaactcaaagtaggagactggcattaaacagaaggatcgtggatgctgatacaatgccagtgatctccatagtaacaatgcccttgtccaaacaagtaatataatgaacagcattccctatttcctgtgtactcttttatttatttatttatttatttatttatttgaaatggagtctcactctgtctcccaggctggagtgcagtggcaccatctcggctcactgcaagctccgcctcccaggttcacgccattctcctgcctcaacctcctgagtagctgggactacaggtgcccgccaccacggccggctaattttttttatttgtatttttagtagagatggggtttcaccacgttggccaggatggtctcaatctcctgacctcatgatccacccgcctcggcctcccaaagtgctgggattacaggcgtgagccaccgcacccggctttcctatgtagtcttgatggtgatacagaaagcatttctttcccttgtaggaaatgggtataaaaacaattttacctttaacttagagcgtaatgaaaatttttttttaaacttttattttaggttcaatggtacatgtgcaggtttgttacacagataaatttgtgtcactaaggttcgttgtacagattatttcatcacccaagtagtaagcccagtactcaatagttattttttctgctcctctctctcccgcaaacctctaccctcaagtaggccccttctttgttgtttccttctttgtgtctatgagttctcaatatttagcctaatgaaaaatttaaaaactgtattaaacataaggcaaaggtatcacttgatttggcatgatggaaaataaattttggatcatgttttgaacgtttgggcctcatattgatagtgatttagggagaaggggcacaacagcacatggttctcacaatgtgggctgtatatcagcaagaatacatccgaaaatctcatcatcatttctcagaggcagcaaataaacatcataaatttactctatgagtcctctatatcataatgaagttacccttcttctgaattagtgggtttatctagtatttgaaggattttcaaccaatagtttcatggagaagagctgctttcttatttccctcaagtcttgagatgatcaaattactgatcaagaacattattgacagtgaagttagagaaagtgaggcttataatccactgattaaatgaatctgacttgatttatctgtgtaatgagaaaagaaaagggaaagaaataaccctgggaatacttgaacaatgtaagaacaataagatcatgtttttttctctttttaccaagtgcgggacaatagacatatgtgagagatggagacctgcctaagaatttaatttggaaaaggttgagaagagtcatacttgcaaagcctctgacaattccattttggttaagggtagagatcttggtaggtggctttttttttttttttaggaaaatatctagarcatggtgtttccatgagacaggaagaaagggagttaagttgttttgcaaaataaatagatatattcccattttaagatggcagtttattctcactgtaaccttgaaaccttgaaatacatgataaaagactttgggtatcagtcaaatagagacagagatgaaaatgaaacaaagtgaaggtgccca

SEQ ID NO: 52389 - DNA, 1770 bp, Homo sapiens
tgtttatgattttgttgtatgtttatcagcattgtctatcagatactgcaggctccacgccttgggacatttcttctatttaactcaaagtaggagactggcattaaacagaaggatcgtggatgctgatacaatgccagtgatctccatagtaacaatgcccttgtccaaacaagtaatataatgaacagcattccctatttcctgtgtactcttttatttatttatttatttatttatttatttgaaatggagtctcactctgtctcccaggctggagtgcagtggcaccatctcggctcactgcaagctccgcctcccaggttcacgccattctcctgcctcaacctcctgagtagctgggactacaggtgcccgccaccacggccggctaattttttttatttgtatttttagtagagatggggtttcaccacgttggccaggatggtctcaatctcctgacctcatgatccacccgcctcggcctcccaaagtgctgggattacaggcgtgagccaccgcacccggctttcctatgtagtcttgatggtgatacagaaagcatttctttcccttgtaggaaatgggtataaaaacaattttacctttaacttagagcgtaatgaaaatttttttttaaacttttattttaggttcaatggtacatgtgcaggtttgttacacagataaatttgtgtcactaaggttcgttgtacagattatttcatcacccaagtagtaagcccagtactcaatagttattttttctgctcctctctctcccgcaaacctctaccctcaagtaggccccttctttgttgtttccttctttgtgtctatgagttctcaatatttagcctaatgaaaaatttaaaaactgtattaaacataaggcaaaggtatcacttgatttggcatgatggaaaataaattttggatcatgttttgaacgtttgggcctcatattgatagtgatttagggagaaggggcacaacagcacatggttctcacaatgtgggctgtatatcagcaagaatacatccgaaaatctcatcatcatttctcagaggcagcaaataaacatcataaatttactctatgagtcctctatatcataatgaagttacccttcttctgaattagtgggtttatctagtatttgaaggattttcaaccaatagtttcatggagaagagctgctttcttatttccctcaagtcttgagatgatcaaattactgatcaagaacattattgacagtgaagttagagaaagtgaggcttataatccactgattaaatgaatctgacttgatttatctgtgtaatgagaaaagaaaagggaaagaaataaccctgggaatacttgaacaatgtaagaacaataagatcatgtttttttctctttttaccaagtgcgggacaatagacatatgtgagagatggagacctgcctaagaatttaatttggaaaaggttgagaagagtcatacttgcaaagcctctgacaattccattttggttaagggtagagatcttggtaggtggctttttttttttttttaggaaaatatctagaacatggtgtttccatgagacaggaagaaagggagttaagttgttttgcaaaataaatagatatattcccattttaagatggcagtttaytctcactgtaaccttgaaaccttgaaatacatgataaaagactttgggtatcagtcaaatagagacagagatgaaaatgaaacaaagtgaaggtgccca

SEQ ID NO: 52390 - DNA, 634 bp, Homo sapiens
cacacttgttccaatcccaatgatctgtaggcagcctttattatgtgaaagacagaaacttctagaaaactggacatgtgttattcagattttctttgcacagcttcacatgcacagcttacatgagtaagaaaaacaaaaatacacaagactctctttctaaagaaaaatgtaaaataacacgatatgagcttccccttttagggagggagctggctttgattgattaattgctttrctatctggaattgtcttgctaagaataacaagtttcaaatcagattgaatttctacttcatgctcgtctttctaactccttaaacttctcgacatccaaggaggagaacagtaacaaccagacaaccaaacagtccgtttggccttggactttgtctttctctaagagagaattcacattaggacccctttgcttggtagtttcaggtttttgaaacattgttagataattatttaagtcataaacagtgacagtatgattataaatcttatcagcagtactaatcatgcttttttctatagaagcattttcttcagagccacaaaaagctcgttttacagtatccgcttctggaggagagtgatagttttactgatctccattcttactgtacag

SEQ ID NO: 52391 - DNA, 634 bp, Homo sapiens
cacacttgttccaatcccaatgatctgtaggcagcctttattatgtgaaagacagaaacttctagaaaactggacatgtgttattcagattttctttgcacagcttcacatgcacagcttacatgagtaagaaaaacaaaaatacacaagactctctttctaaagaaaaatgtaaaataacacgatatgagcttccccttttagggagggagctggctttgattgattaattgctttgctatctggaattgtcttgctaagaataacaagtttcaaatcagattgaatttctacttcatgctcgtctttctaactccttaaacttctcgacatccaaggaggagaacagtaacaaccagacaaycaaacagtccgtttggccttggactttgtctttctctaagagagaattcacattaggacccctttgcttggtagtttcaggtttttgaaacattgttagataattatttaagtcataaacagtgacagtatgattataaatcttatcagcagtactaatcatgcttttttctatagaagcattttcttcagagccacaaaaagctcgttttacagtatccgcttctggaggagagtgatagttttactgatctccattcttactgtacag

SEQ ID NO: 52392 - DNA, 634 bp, Homo sapiens
cacacttgttccaatcccaatgatctgtaggcagcctttattatgtgaaagacagaaacttctagaaaactggacatgtgttattcagattttctttgcacagcttcacatgcacagcttacatgagtaagaaaaacaaaaatacacaagactctctttctaaagaaaaatgtaaaataacacgatatgagcttccccttttagggagggagctggctttgattgattaattgctttgctatctggaattgtcttgctaagaataacaagtttcaaatcagattgaatttctacttcatgctcgtctttctaactccttaaacttctcgacatccaaggaggagaacagtaacaaccagacaaccaaacagtccgtttggccttggactttgtctttctctaagagagaattcacattaggacccctttgcttggtagtttcaggtttttgaaacattgttagataattatttaagtcataaacagtgacagtatgattataaatcttatcagcagtactaatcatgcttttttctatagaagcattttcttcagagccacaaaaagctcgttttacagtatcygcttctggaggagagtgatagttttactgatctccattcttactgtacag

SEQ ID NO: 52393 - DNA, 581 bp, Homo sapiens
gatatggtttgggtctttgtccttgcccaaatctcatgtagaattataattcccaatgttggaggtggggcctggtgggaggtgactggatcatgggagcagagttctcatgaatggtttatcaccattcccctagtactgctctcatgatagagttctcacaagatctggttgtttaaaagtgtgtaccacctcccccctctctctctttctgctccagctatatgagatgcttgctccccctttgccttctgccatgattgtaagtttcctcatgyctctccagaagccaaggaaatggccagcatcatgcttcctgtacagcctgtggaactgtgggtgaattaaatctattttctttgtaaattacccaatctcaggtatttctttatagtaatgcaagaatggactattggggtacttctagtaccaatgaaaaattggtaccaatggaaaattggtaccagaagtggggttttgatataaagatacctgaaaatgtggaagcagctttggaactgggtaatgggcagaggttggaacagtttcgagggctcagaagaagatagaaagatgaggga

SEQ ID NO: 52394 - DNA, 624 bp, Homo sapiens
taagataaacagcataaacaatggctttctttcctcagaattagaatccagcacataataagtaggataatacaatatactggaccacagactaccgtaacgggccattggaatagaaaggacagtgtatggcattaagcatattaaggtaaatattcaggtgtgcccaaatcttagaagaagaggaagggcaaatctggaaatttaagaaaacattatcagcaaggtttcaagcactgagaagaaaaatcagtgrtcaacatgggaatctctaagggagctctttcttcatcatagttggccagtggaacaaccttttatctttcgtgtcatatacatgtgtattccttcaggtcttaaaggacatttcggataagctcagtcattttgggtataaatgactctcttcatgattcagaagcttttggtaagatgtttttatgtaactcaatagttcatttttttagtgcccatctgctaagagaaactcacttattttcagttgtagctaaattccaagaggcttacacagcgctaagatgtgccagaaggagaacccactgatcctcaatgtcgtctttctatgcaggcctctgctgagacatccaccactctacgttgttg

SEQ ID NO: 52395 - DNA, 408 bp, Homo sapiens
ttgccctgcgtcccttctctttggggctcctttcccctctcatacataaaatcgctttcaaattaaaatcgctgttttctggactgaggtgactgtatgaggatgggcagcgccgtttcgggcttggggggggtatccggttgggagctccggacgcgatccctggacgccgccgccgaggttccrtggggcccaagaggtgcacgcagggtgggggacacaaggcaagctttgtcggggagggggggagagggtgtgccaggctgggggcggggccggccggaggaggaagggggggcggtggattctcaaaggcgccttgttcgctcgtgccctctccgcgccagcgggcggcggcgcctcggctcgctgcggccttccctccgggcgcgctgcgggctccgggca

SEQ ID NO: 52396 - DNA, 580 bp, Homo sapiens
gccagttagaagaatcttcctaattctcactcattctttcattcaagtgattttttttgtattttkttgttgttgttgttgttttgttttttgtttcttttgagcacctcagataatataggcattgaggatgtagtaataaaaacacaaacatggtcttcattttcacagagcttacagtctagtgggatataaagataacacatgattaaatatgtaattgcaacttgtgagaagttaattcatcaattcgacagatatttattgagtgccaacaatgtcccaggcactgttctaaatactgtatatacagtaacaaagctacagacctttcctgacttcatagatcttctacacagcaatcaagaaacaagataaaaaggtaacacatattacaggttactggtaaatgctaaggagaaaaaacataaaacaggaaatagggataataaaacatcatggggagaaaggggtttttacattttgaatgaggtggtcaaggaatgcctcccacgtaaatgacttttgaaagagaaccttgaaggagtgaaggagcaaggcatgaggatatctgggaaaa

SEQ ID NO: 52397 - DNA, 580 bp, Homo sapiens
gccagttagaagaatcttcctaattctcactcattctttcattcaagtgattttttttgtattttgttgttgttgttgttgttttgytttttgtttcttttgagcacctcagataatataggcattgaggatgtagtaataaaaacacaaacatggtcttcattttcacagagcttacagtctagtgggatataaagataacacatgattaaatatgtaattgcaacttgtgagaagttaattcatcaattcgacagatatttattgagtgccaacaatgtcccaggcactgttctaaatactgtatatacagtaacaaagctacagacctttcctgacttcatagatcttctacacagcaatcaagaaacaagataaaaaggtaacacatattacaggttactggtaaatgctaaggagaaaaaacataaaacaggaaatagggataataaaacatcatggggagaaaggggtttttacattttgaatgaggtggtcaaggaatgcctcccacgtaaatgacttttgaaagagaaccttgaaggagtgaaggagcaaggcatgaggatatctgggaaaa

SEQ ID NO: 52398 - DNA, 596 bp, Homo sapiens
gatcccagactagcttgggaagttttctttggaccatgtactccttatcagtaccgcctcatgggccctggaaaatgggatggagccagaaatgccatcctgacccagtgggacagaacattgaaacctttaaaaactcgaattgtccctgattcctccaagcctgcctccatgtcacattatttaaaagcctggggggcacctgtcctacttgcctctcttctacttatctgtaaatcttcacttttcttgaaattggtgagagataaactacaggacagaatgtccccttacctagtaagtctttggcgaggatgaacctgattgttacaagggttacacmaagtcatgctaattctatctccaagtatcttgtgcatccctcctctgctctccatcataactgctattagccaaattcaggcccagtcatctcctatctgaattattgtattatcttcttctttgttttcagtaccctctttcttgccaccctttccaatgcatcttctaccctgctacctcagtgattattctaaaataaatatatatgatatggtttagctgtgtccccacccaaatctcatcttgaattg

SEQ ID NO: 52399 - DNA, 526 bp, Homo sapiens
gacacataatagaaaattaataaatattgctgaatgatctttatgactatctatatatatttgaagtaaaatcccatgaactatttccttctttatagtctattcagacttaatactttggttaacaaataaacaaattaaacttgtgcataggacaaaaggctagaaggaaattatcaaaatattaataactttctttgggaaatataaatatgtttatttctctctgttctattttggtttaactttctttttctacctttctataactaaaaaagtgtgttaacttttgtaatgaaaaaaatcttcagcaaactttattaaaaaatgtaaaatctttttgggggaactctattttctgaagaaataacaactactgacttcctataatgtttgggtggggtgcagccatgggtgggctttcgtgcacatatgtacacatctacatatgtartacctgtacattcctccaatggagatgttaactccttcttttaaagttcagtgtagccaaataagaaagaca

SEQ ID NO: 52400 - DNA, 632 bp, Homo sapiens
cccccagcagggcacgtacatacattgggaaagaagaaaccccttagtaccatgttggtcaaaggcaagagagagaattctatttccatctggaatgtcattcttgtttacttcttccaacagtgaaatacttccaggccttcgaaaggccatcctttggacacatgtaaaaagctgtcttgttggcccgttattcccactgacccgtctgagtgatcacccaggagcgcggcggcagcaagcagagctcaccggatttgggacaaggattttaaaggcagctacaaagctgagctctatttgctgatgatagtctctgttcagctgtttaaaatgactgtctgactcaccatggtaatttttcacaaattaaaaacacattttgggttgtgcaacagtgttctcatctttccaggcaggcagattattttaatgctgttatacagggaattgggactctcggattttcttttttaacctttttatgccwttcagtaggggaagtttccttgaaagttagagagctgcaaatctctaagtatcaatgtaaagaagccgatgacccaattcggaaggtggttcaagtgttctgtttgtttacaaaggcacagaccacgaccatggacacaccc

SEQ ID NO: 52401 - DNA, 601 bp, Homo sapiens
agtgcaatggcacgatcttggctcactgcaacctccgcctctggggttcaaacaattctcctgcctcagcctcctgagtagctgagattacaggcacccaccatcacamccagctaatttttgtatttttggtagagacagggtttcatcatgttggccaggctggtctcgaactcctggccttgtgatccgccatctgcagcctcccaaagtgctgggattagaggcctgagctaccgcagccggtcttctattagtttttgaggaaagcagaaaaaaagaaatggaaacccagggaaagtcacgtgacaaaacatcttcgcagcgcagtgagcacacacctggcctgtcctccacacacaggtcagcggttttatagaagcggctgaagcaggtgtagtagcccacgcctatattctcgacactacaggaggctgagtgggaaggattgcttgagccgaggagttcaagaccagcctgggcaacaaagcgagagcccagctcaacaaaaaaatagccaggcatggtggcacgtgcctgtggttccagccacatgggaggctgaggtggatcacttgagcccaggaagtcgaggctgcag

SEQ ID NO: 52402 - DNA, 601 bp, Homo sapiens
agtgcaatggcacgatcttggctcactgcaacctccgcctctggggttcaaacaattctcctgcctcagcctcctgagtagctgagattacaggcacccaccatcacacccagctaatttttgtatttttggtagagacagggtttcatcatgttggccaggctggtctcgaactcctggccttgtgatccgccatctgcagcctcccaaagtgctgggattagaggcctgagctaccgcagccggtcttctattagtttttgaggaaagcagaaaaaaagaaatggaaacccagggaaagtcacgtgacaaaacatcttcgcagcgcagtgagcacacacctggcctgtcctccacacacaggtcagcggttttatagaagcggctgaagcaggtgtagtagcccacgcctatattctcgacactacrggaggctgagtgggaaggattgcttgagccgaggagttcaagaccagcctgggcaacaaagcgagagcccagctcaacaaaaaaatagccaggcatggtggcacgtgcctgtggttccagccacatgggaggctgaggtggatcacttgagcccaggaagtcgaggctgcag

SEQ ID NO: 52403 - DNA, 575 bp, Homo sapiens
ctttttaggactctaaagtaatttacagttttcaaaattcaaaacaggaccaaaaagaaaacaaaagaacagatgaagagagaaatgatggaccagatcttactgaactgaattaaaacctgaaatttaagattgaaaggacacatagagtctcagactagattgatgaaaaaagacacacacatatcctgataaaatctcttactgataaaagaaaaaagcataggaggttgacggggaggatcacttgggtccaggagttcaggaccagcctgggcaacatagcgagatcctgtctctaaaaattaaaattaaaaaaatcagtcagatgggcatagtggtgcatggctatagtcccagctactcaggaggctgaggaggaaggattttttaagctcagcagttcgagtccgtggtgtgctatggttgcaccattgcactccagactgggcaacaccaatctgtctcttaaaaaaaaaatgctttgggaggccaaggcaagaggatggcttgaggccaggaattygagaccagcctgggaagcataacaagaccctacccctacaaaaaaaaaa

SEQ ID NO: 52404 - DNA, 1601 bp, Homo sapiens
tccaggaaaaaattgtatttattttttcctcatttagaaagataagtggtatttggtgggtaatctaaagaaaaacaaacaaacaaaaaaacaaccagaactgtgccttttttttgaaaatgatccctggaagccaaagcagccaggattttgaggagcccaggttagggtccttactctagccccaagctgcttgtgccctctgctggatggaatcagacttctagttttcatctgaagtggtcacccacccaccccatccatccatccatttgtccattttacaacagtgtttgtggaaggcactgttaggggtgagggttgggggcaatacagatgggcagaccctgtgtcattgctcagggagttcacagtgtattcatccactataatagggtatgttccatagaatttgtctttctgttgttaaaatcacgtcagtcctttttagggccatacctagcgtctgctttctgatctacaagtagagtggagctctgaatgttaaatgacagggataaagaccaaaggacatctgccgtaattcctcagtcaaaattaaggtctgcaaggttggagggtccagatgctcacccctactggaggaacagctcagaataaatgaggtgtctccttagcagcaggggctgtaaatgctggcaagagaaaagtatgggttataagagctggcactgtgacaggatttttttcccctgttttttagtttagttgtctcccaccccttgtagtaccagtagcaatatattcccatcgtctgctttgcctctgccacctgcagaagggtctggcaagtgggggaggagcctgcagctgttgcctggaaaaggagctggctcctagcaacagtatcagcaggccctacaactgagagcaccaagtttgtcctttgaggtcttacccttcctttcatacagttcagcaaatatcttttgagggcttacttagtactaggcactatgtcaagcctgagaaagatagatgaatcaaataagtaccttgccttcaaaaagctcaccactctgggtacattaacaagtgaacagacatagtacatggtcctaagtgctatgtaggagagactgggtgctctgggaaaaccagacaggcacgtactggtgcaggggttagggaaggtttcccagaagagggacgaagttaatgatgagtaggaattagctaggtcaggtaggcagagaaggatgttccagccaaagggaacagaacgagcaatggccagtgggacatgagagcatggccagtttacctgggtagtatgacagggccaaagagtaggacataaggagatgagcaggaaagggtgaggctctagggctaggcagagtactcttctctcatgtgcttttatacacataattatccttgagagaaacatggatagtactgattcccacacacaggttcattgtttcatctccagagactcagcatttttgatcacggacctaattgtgtgctgacactcataagtgscttcagggccacattgtggccccacattgatgcagaagaagctgagttggttcactctaaaactcaatcagattattttagggatatta

SEQ ID NO: 52405 - DNA, 567 bp, Homo sapiens
aaggtgtggagagaaaggtggctatgtaattctcctttggatatttctggatctgtttctcaatcagattggttccgttcacactgcctgctgtcatgaaagtttatgcctcgcatgcaatgccagcataaatttctcagcacaaaacagctctgcttgttaaggaagatgttctgaattatcaaatatatattttttaattagccaccctttsttatgctttcagaatatatattaaagtgatctggggtatttcatgttaatgtaagaaaaacaatccaaactccctttgtttcttgacttagcttattatatcttcagtacttgcaaactgtgtgatacatgatcagtcacagcacactgctatttactgagcatccatggccactggctgacgtggcattgaatataacattgtattgttgctctaagccttttagccttcgtgctaaatgactcaacccatcacaagaaatttataatggacatataactcacctagttagtctgcatgagattgatttgttgtgaagttattggctataatgtctttgagaggataggcct

SEQ ID NO: 52406 - DNA, 643 bp, Homo sapiens
atgatgaaggaccagagattgtttggaattccccttttccaatccccaattccttatgttgatttggataaaatatggatatgccacccaggattcaagactggaggtgctgctggtacatttgcagatatctgccctaccctcacatacttctcttcagaattggatagagaagaggttttcctactcaagrcgttccttttcaatctgtaagcatgtcaaaaggtccccgacattgactattcaataagtcattagtcaatggtttcatgcatactaccctagttactacccccccttattctcttttttctcttcatacgttatattatttgtttttatgtcttgcacattctaggaaatcagtaactcttccttaactaaccaatgtttttaagttatgaaggttagcaaatttttcctactcatcaaaccatagaaccatatctcacatgtagtagatgtactcagtaagtgaatataaaactaaacatcattataaaatgggttttcttcttgacaaataatccattcttaggagatagtatgcaaaacactgactaggagaaatttgctattttgttttagttttgatttgaaaaatcacaccatgtgtgatatatgaaaatttatctataagaaa

SEQ ID NO: 52407 - DNA, 1907 bp, Homo sapiens
ctggagtgcagtggtatgatcccggcttactgcaacctttgcatctcaggttcaagcgattctcacacctcagcctcccaagtagctgggattactggtgcgcgccaccatgcccagctaatttttgtatttttattagagatagggtttcaccatgttggccaggctggtctcgaacccctgacctcaggtgattcacctgcctcagcctcccaaagtgctgggattacaggcgtgagccactgtgcccagaacagtcagccttttttccccaagttcactctcaaagcattgtggcagctgcgtggttgatggggaagggagggaggtgctggagagtggaggccggrgacccactaggagattaggatactgttttgttttttagatggggtgtcgctgtgttgcccaggctggagtgcagtggcgtgacatagctcgttgcagcctcaagctcctcagctaaaaaaatcctcctgcctcagtctccagagtagcttggactacaggaatgcacctctgtgtctggctaatttttattcttttgtagagatgtggggggggtctcactatattgctcaggctggtctagaactcctggcctcaagtgaccctcccacctccctgagatcctgatggcataagccaccacacctggccaggggctggagtgttaacaccggtgaaaaatgatgacaacctgtattaggatgggtcgtagggagggaagaagaggagagatttgagaacaagtcaggcagtggctggagtgaaggacattggaaataggtggtaataacacccttgccacttcctgagcgctcactgtgggccaggtgctttctacctataagacatgcatatctactcgctgagttctcatgactgccagaatggagcaagagatggcaggcagtcctgatttaactggaatctgaagaatccatacatgccctgaagttaaaaaccactggctaacttgattacctctgtaagaaaacaataaataaataaaacccagtgtcaaaaaccacatgataggctggccgcattggttcatgcctgtaatcctaatactttggggggccaagtcgggcagatcacttgaggccaggagctcgacaccagtctggccaacatggtgaaaccccatctctactaaaaatacaaaattagcctggtgttgtggcgcacacctgtaatcccagctacttgggaggctgaggcaggagaatcacttgaacctgggtggtagaggttgcggtgagctgaaattgggccattgcactctagcctgggcaaaaagagtgaaactccgtctcaaaaaacaaaacaaaacaaaactatgtgatacatatttgttgctggcaaattagaaaatatagaaaaacaagaagaaaggccaggagccattggtttttaactgcagggcatgtatggattctgcagattgtagttaaatcaggcctgcctgccatctcttgctccatactgacagttatgagaactcagcgagtagatatgcatgtcttttaggtagaaagcacctggcccacagtgagcactcaggaagtggtaggggtgttattaccacctatttccaacgtccttcactccagcctcccgagtagctgggactacaggtgtgtaacaccatgcccagccaatttttgttttgttttagtagagtcagggtttcagcatattggtcaggctgatgtcaaattcctggcctcaagtgatctgcccacctcagcctcccaaagggtgggattacaggcatgtgagccacctcgaatgccagatttaagagttgggagtcctaatggggaaccacaaaggatttcagctcaggggtgatggaaccctatagacctttagcaagctcatcctggccaggtggagga

SEQ ID NO: 52408 - DNA, 598 bp, Homo sapiens
tttttttatgtttaacgtgagaacattatcaaatacatctctcctcaatgaatctaagtaactgactaaacgaggaaaatgtgcayatggagtaaataaaattaaatttcaattctacttcaaaggttagaaatttttattaatggcaaccttaatatattcctaacatggtagttcaagtgtgccaggtatatataattgagagcatatacatcattttgccaccacagttaccacttagcaaggcactttagtaaaatgcagcagattcctcatttggaagcttagcctccgaaaagaacaattattaactgaatgaacaatagtaaggccctttagtaaaatgtagcagattcctgttttggaagcttagagagcctcagaaaaggaacaattattaactgaattaacaaaatgggagataggccttcaaaaacaaacatgcaaaaaagacaatccttcagttgtcctcccaaactattcacaaaatggtgctccctcatgataaaccaatactcggaacagcgttcacttacctcaaggtaaacatggctagatttcagctgcttaagagtgaagagttaagagttacccatag

SEQ ID NO: 52409 - DNA, 602 bp, Homo sapiens
cctttccatggaggggatttttttagggtcctgattttacagcggtctcagttccattactttgctaactgggacctaaggccacatgtcctatcccaaagttggcattaaaatcccagtccctaaccattggggccatgcacccacctcctgggggggagatgtcatggttcaaacactttccattctggctttgagttttcttttcatttattttcactctagagattttcctgtctttcgagtgaacctatatattttaaatattaattattttaattcccacactcttgtgggttttcrgtggtagacagggacctctgtcacggatcagtctaccaatgttgctaaaagtctaatttacaaaaattgtttttgtagtgagactattaaccctttataatatatattaccaatactttttgccaggttttaattttttttttggctttatacatggtgttcattgtcatgaagaggttttaaatttttatgtagctatgtttctctacttttccatgcattgtctctggtattatgtttagaagacatcttctttcctaagagttaaaaaaaaaagcatttagtcttgttttcttcta

SEQ ID NO: 52410 - DNA, 602 bp, Homo sapiens
cctttccatggaggggatttttttagggtcctgattttacagcggtctcagttccattactttgctaactgggacctaaggccacatgtcctatcccaaagttggcattaaaatcccagtccctaaccattggggccatgcacccacctcctgggggggagatgtcatggttcaaacactttccattctggctttgagttttcttttcatttattttcactctagagattttcctgtctttcgagtgaacctatatattttaaatattaattattttaattcccacactcttgtgggttttcggtggtagacagggrcctctgtcacggatcagtctaccaatgttgctaaaagtctaatttacaaaaattgtttttgtagtgagactattaaccctttataatatatattaccaatactttttgccaggttttaattttttttttggctttatacatggtgttcattgtcatgaagaggttttaaatttttatgtagctatgtttctctacttttccatgcattgtctctggtattatgtttagaagacatcttctttcctaagagttaaaaaaaaaagcatttagtcttgttttcttcta

SEQ ID NO: 52411 - DNA, 558 bp, Homo sapiens
agacatttatttatcctttcaatgaatatttattaagcagttacttacgataggacctaatctaggccctggggatattgctgtgtataaagatacaggaatctctgcccaaggccggatgttgggtgggagaagacagaaaataaacragagaaataatatttaaagtagcttggttgggaatagataccaagaagaaaatatgtcagggaaaggggctaaggaattccagaggtagagagggtaggggctttttaaatggggtagccagaaaaggtctacctcagaggtaatgttggaatataactgaaaggtaaggggaaagtcacggatagcggtgttcttgttcagggccttgtggaccactgtgaaggccagctttactggagtgaccggggaagccagcagagagtctgagccaaaggaggacctaatttgacttcatgatctcgcttaggttttaacaggaacactatgatggagcatagaatatagatgagtatacaagtgactgaatacttgcaaatgtgacaagagctaggaaggagagttcagggt

SEQ ID NO: 52412 - DNA, 558 bp, Homo sapiens
agacatttatttatcctttcaatgaatatttattaagcagttacttacgataggacctaatctaggccctggggatattgctgtgtataaagatacaggaatctctgcccaaggccggatgttgggtgggagaagacagaaaataaacaagagaaataatatttaaagtagcttggttgggaatagataccaagaagaaaatatgtcagggaaaggggctaaggaattccagaggtagagagggtaggggctttttaaatggggtagccagaaaaggtctacctcagaggtaatgttggaatataactgaaaggtaaggggaaagtcacggatagcggtgttcttgttcagggccttgtggaccactgtgaaggccagctttactggagtgaccggggaagccagcagagagtctgagccaaaggaggacctaatttgacttcatgatctygcttaggttttaacaggaacactatgatggagcatagaatatagatgagtatacaagtgactgaatacttgcaaatgtgacaagagctaggaaggagagttcagggt

SEQ ID NO: 52413 - DNA, 1202 bp, Homo sapiens
caccctttgaaaataacatcctgtgattctgtgaagaaacaaattcccaaagagaaggcagttctgttgcagtgggggcagactggatacaccattctgtaccaccagggcaggaattcaggggaactctcacaggaggtgagggaagaggcaggacacaaggactacagaactagtcctgtggatcagggtcttctacagggatgaagtctaattgttggctggctggggctcaactagggaagcatgcacttccaagcccacttatatggttgctggcaggattcagttgcttgcaggtcacttccagttcgttggtcagtgggtccttccagagrgcagctcataacctatagattgctttatcagagtgagcaagcaagaagctccagagagactgaatagaaggtagaagtcacagtcttttgtttttagacggagtctcactcactctgtcacccaggctagagtgtagtggtgcaatctcggttcactgcaacctccaccttccaggttcaagcgattctcctgcctcagcctcccgagtagctgggattacaggcatgtgccaccatgcctggctacttttggtatttttagtagagatggggtttcaccatgttaaccaggctggtctcgaactcctgacctcaggtgatccacctgcctcggcgtcccaaagtgctgggattacaggtgtaagccaccaagcccagtcagtcttttttttattaatacataattgttatacatatttatggggggcatttgatattttgatacatgcacacaatgtataataatcaaatcagaataactggcatatccatcacccaaggcagttatcatttctttgtgttgggaacattccaaagtttttcttctagctattttgaaatatacaataagttattgtagtcatagtcttttgtaacctaatctcagaagtgacgtcccaacattttccatgacatcactactcattagaatcaagtcactaggttcagtccacactcgaggaggagaacacacaaaggcataaaaaccaggaagtggaggtcattggagtcatctgagaagtctgactgccaccaggagcaacttgcccagagtcaaatgcagtgagagcttaaagtctcagttcttggctgggagtggtggctcacacctgtaatctcagcactttgggaggcaaatgtggg

SEQ ID NO: 52414 - DNA, 550 bp, Homo sapiens
gcaggaccatagctcactgtagcctcaacctcctgagctcaagctattctcccacctcagcctcccaagcagatgggaccacaggcacacaccactacacccagctaattttcaaattttttgtagatatggggtctcaccatgttggccagcctggtctcaaactcctggcctaaagcaatctgactgcctcagcctcccaaagtgctgaggttataggcatgagccactgagaacagtgacttacaaatcttctattcaaaccttgtttcctgcaaatttgaagatgtcctctaactactagtgttaatctatcaaaatggcagtttaagtactgtgcttagcaaacaggttcatctgtaatgagtctgtacatctcccctccttaaaatgctacacgaagactcattcatccacaaatgttagactaaatccataaacaccctagaagaaaacttaggcaataccattcaggacataggtgtgggcaaggacttcrtgactaaaacacctaaagcaatggcaacaaaagcgaaaatagacaaatggg

SEQ ID NO: 52415 - DNA, 1829 bp, Homo sapiens
gtttctttttctccaaaaaccctcgagtcattaaattttggatttaacattgatttactccttttgaagttttgccaaatacaaagagaaattactaagcctaagtgattaaggaagaataatggtttgtttttagtcaacactgtgtttggtattttaattattattatttttaattaaaaagctagtgtgccattcccaacctgctaatggagctggagaagaaaatagcaaccacgttctgaaaaccaaagaactctaattcatcaagccaggctgcagggagggaagatcacccacaggatgtcttagctctgctgtttgctgtgttctggcaaagtttagatactaattgacatttagttgaatgcactggagtctttgagtgtaatttcatgactgtcgacaactcccatgcagaaatccaagtgattttgcttcagtttcatcatttaactcacagctcagccacaagttgactgtgtgttgttagccaagtcagtttttcctctggtcctcatcttctaggcaagtaaaatagggcattagattggaagataatctccaaaacctttttcgactttgaacttgtgtcctcctctcctcttccgtttaccatacatagcaccctttctcaccaaacatacagtgtatcagtaaaactgtcatttaaagctgcaggtaattatctgcattacaaatatccccactgctaataaatatgtactaaattatgtttgtctatgtattttaatatatataaaattgcatataattctataattatatgtaattctacaatatataaaattatgtataattttataatatatataattgcataatatataattatgtaatatatgttaggtaatatttatatattgcatatggtatgtgtaacatataattatatatatattaaaatacacacacacatacatgggaaggaaactccattgtggaaaacctacacataaaattcccaaatcccaaaaacttttctgggagaagtcagagaaaaaaagcaatatatttccaaatctttaatgaaacttaaatttaaaaatgctttgtaactaccgtttggaaatttaacgttggtgaatgcatgatgagcttgcttccttttatcctctttgttcattttcctaccactctttaaaggaggaagtaagaaatctttgcaagcattcatttcatttcatggtgggattgttctaggtgcagaggcaggctcaggattcaacaaacacagmcgcttagcaaatttcttctcaacatgggcatcgcgtgcgtgtataaaagcatgatttacttggtgtttttgaggcagcagtaaataaatttggaagcactgaattgtattagaaaaacatgactgagcatttaaagctttttctcagtgaaattaatggtgtgtttgctggcaatctctttcccatgcattaatagggaaaaagtgatttaccaaaaaatggtaatagaaaccagcaaataccttaatttgttgtattattctggccaatttaaaattcgaggaagcagaaatggcactggcggagacacagcggtagcagctgctcggtgacttcgtggagggtgcactgtctatgggagggagcgccgcgttgccatggcagcgagcaggtccgggcgccgctctgccccagggaggagaggggaaggggcagagggcgtcttccttccttggtatttacgggtgggggtcggggtagggcacaggacctagcattttgctaaatctttggaggatacaggatgtattcatgttggcccctgccttcacgagacttacagttaggccg

SEQ ID NO: 52416 - DNA, 1829 bp, Homo sapiens
gtttctttttctccaaaaaccctcgagtcattaaattttggatttaacattgatttactccttttgaagttttgccaaatacaaagagaaattactaagcctaagtgattaaggaagaataatggtttgtttttagtcaacactgtgtttggtattttaattattattatttttaattaaaaagctagtgtgccattcccaacctgctaatggagctggagaagaaaatagcaaccacgttctgaaaaccaaagaactctaattcatcaagccaggctgcagggagggaagatcacccacaggatgtcttagctctgctgtttgctgtgttctggcaaagtttagatactaattgacatttagttgaatgcactggagtctttgagtgtaatttcatgactgtcgacaactcccatgcagaaatccaagtgattttgcttcagtttcatcatttaactcacagctcagccacaagttgactgtgtgttgttagccaagtcagtttttcctctggtcctcatcttctaggcaagtaaaatagggcattagattggaagataatctccaaaacctttttcgactttgaacttgtgtcctcctctcctcttccgtttaccatacatagcaccctttctcaccaaacatacagtgtatcagtaaaactgtcatttaaagctgcaggtaattatctgcattacaaatatccccactgctaataaatatgtactaaattatgtttgtctatgtattttaatatatataaaattgcatataattctataattatatgtaattctacaatatataaaattatgtataattttataatatatataattgcataatatataattatgtaatatatgttaggtaatatttatatattgcatatggtatgtgtaacatataattatatatatattaaaatacacacacacatacatgggaaggaaactccattgtggaaaacctacacataaaattcccaaatcccaaaaacttttctgggagaagtcagagaaaaaaagcaatatatttccaaatctttaatgaaacttaaatttaaaaatgctttgtaactaccgtttggaaatttaacgttggtgaatgcatgatgagcttgcttccttttatcctctttgttcattttcctaccactctttaaaggaggaagtaagaaatctttgcaagcattcatttcatttcatggtgggattgttctaggtgcagaggcaggctcaggattcaacaaacacagccgcttagcaaatttcttctcaacatgggcatcgcgtgcgtgtataaaagcatgatttacttggtgtttttgaggcagcagtaaataaatttggaagcactgaattgtattagaaaaacatgactgagcatttaaagctttttctcagtgaaattaatggtgtgtttgctggcaatctctttcccatgcattaatagggaaaaagtgatttaccaaaaaatggtaatagaaaccagcaaataccttaatttgttgtattatyctggccaatttaaaattcgaggaagcagaaatggcactggcggagacacagcggtagcagctgctcggtgacttcgtggagggtgcactgtctatgggagggagcgccgcgttgccatggcagcgagcaggtccgggcgccgctctgccccagggaggagaggggaaggggcagagggcgtcttccttccttggtatttacgggtgggggtcggggtagggcacaggacctagcattttgctaaatctttggaggatacaggatgtattcatgttggcccctgccttcacgagacttacagttaggccg

SEQ ID NO: 52417 - DNA, 412 bp, Homo sapiens
cagtgacttcgcctttttaagttcaacacgaaggcggggagaacgaaatcatttatagaactcttatctcccccaggagatatttaagaagtgaacatattttctgaaatttaaaggaatgccaagtttatgtaaaattataccaatgatgacagaagcttgagaacaacaacaaagccagccagagttgatgcccacgctttcaggctgagaaacacagaagaggacagaagagggcagcatgaacgtcatgcaagtggggtgatggggagcaaggcagggagtctctctgagctgggagagcttggacaggggacctcacctttctggctctctaaaattagrtgcagggccaggcacagtggctcacacctggaatcccagcactctgggaggtcaaggtggaaggatc

SEQ ID NO: 52418 - DNA, 533 bp, Homo sapiens
tgacttcatgggcacctgttctcctgcctagtgggctggggtccccagcaccccagcctgaaaggaactttagggattctcttgtccacactccatctccatggaagcttagagaggagcagggacctgcccaaagcctcatcggaatggattttcctctgcttgaagctgcctgggagatttgggcattggaagayaaggacttaggtgtttctgattgcaagaaaacagacgtcttgctggttcctcacccaagagatctcagggcagtgaaaacagcctggaatctggagcctaatagtgcctagattaaatcctggttatatatagctaacatgcagtaataatataataataacgatagctaccatctgttgggcacttattatgtctcagacagggcttatttccaggtagtacaaactggtacagttgtacttgttgttaaaatcatgaaaaacctccatacctgcagtaaatagtccctctcctctccctcgccccaactctctcagccccctgggcctctctgt

SEQ ID NO: 52419 - DNA, 533 bp, Homo sapiens
tgacttcatgggcacctgttctcctgcctagtgggctggggtccccagcaccccagcctgaaaggaactttagggattctcttgtccacactccatctccatggaagcttagagaggagcagggacctgcccaaagcctcatcggaatggattttcctctgcttgaagctgcctgggagatttgggcattggaagataaggacttaggtgtttctgattgcaagaaaacagacgtcttgctggttcctcacccaagagatctcagggcagtgaaaacagcctggaatctggagcctaatagtgcctagattaaatcctggttatatatagctaacatgcagtaataatataataataacgatagctaccatctgttgggcacttattatgtctcagacagggcttatttccaggtagtacaaactggtacagttgtactkgttgttaaaatcatgaaaaacctccatacctgcagtaaatagtccctctcctctccctcgccccaactctctcagccccctgggcctctctgt

SEQ ID NO: 52420 - DNA, 525 bp, Homo sapiens
gcaggtggaggcctctcgggagtttgtccagagaatggaggagaagcagggtcatgagcaggagcggtctgggccacccctgcctgtcccccggggggtgcagcccggaaggagtccagatggatatggccccgcagtgcagagtcagcctcaaaccaggctggtcccaggcagggtgggggcaggaggagccccggagtggccctgtgttgggggtcggggggcaggcagggggtcctggggctcagaagcrgaggaggtgggctggaggccccagtgaccaacaggcccaggtgagtcaggaggtggggtggacggagctgcagggacagtgtcagcgctgaatgggatggagagcacagggagctggggccgggggtgagaccaaggggagctgggctggggctgggggtgagtccatggggagctggggccgggggctgggactagtccatggggagctgggctggggctgggggtgagaccatggggagctgggctggggctgggactagtcatggggag

SEQ ID NO: 52421 - DNA, 525 bp, Homo sapiens
gcaggtggaggcctctcgggagtttgtccagagaatggaggagaagcagggtcatgagcaggagcggtctgggccacccctgcctgtcccccggggggtgcagcccggaaggagtccagatggatatggccccgcagtgcagagtcagcctcaaaccaggctggtcccaggcagggtgggggcaggaggagccccggagtggccctgtgttgggggtcggggggcaggcagggggtcctggggctcagaagcagaggaggtgggctggaggccccagtgaccaacaggcccaggtgagtcaggaggtggggtggacggasctgcagggacagtgtcagcgctgaatgggatggagagcacagggagctggggccgggggtgagaccaaggggagctgggctggggctgggggtgagtccatggggagctggggccgggggctgggactagtccatggggagctgggctggggctgggggtgagaccatggggagctgggctggggctgggactagtcatggggag

SEQ ID NO: 52422 - DNA, 569 bp, Homo sapiens
taacgtcctgttttgtaaaatgggaactagctggagaaaattattatttagttycctccaagctcttaaacactttggctttattcacagagataagtagaacgttggggctatgtacttgtagcagctagcagcagagtgctgacaaaatggcggttatggaagccagagacttagagtgaatgctgtgaatggaggagaaagttcatggccacagagttaggggctctggttctttaaggtggctttactgggaatgctttttgtgaccatgggtaagacactgaaactgcttggacctcaatttcctcagctattaaataatggggaagaactatttagtatctaagtttccttaatgctaaaatactccgtggcttcttggctttcttttcttcttcttcaaaaaatgctcaaaaagtcacgctacagtgagtattttatgatagaaataaaacgatgttgattcaaaagcagcaataatgaaacttgtttccttcactttcactcctggtttttcattcctaccagaaaataagaacatgctggctttgattttattttatgtg

SEQ ID NO: 52423 - DNA, 548 bp, Homo sapiens
tgatgttcacccaatcctctacctctggggcagctaggagggagagagtggtggaaacaagtagcaaagaacacattcattccaatgtaacactggtccactagaataaattggaagtattttaaacgtttctcttttagataattcagatctctcagaatgccctgttcttttgctcctctccaaatttgggggctcctctccaagacagacctggagtgactgggaaaatcacataagtttaagcctcgaaatctctctttgcagggactctggaatctcttccagggatctggaatctattcacaagctgaaacagctttataaaatttgcaaaattaatatrtattaacttcaaccaatgaaaatgactgtccatttccactctgatttcctctctgtcatagtctcccttttgtttagtagcactggagtggccatgggaaattctgcaattagcctatggggatatttagctgagaatatatgcagtgtaagtttggagtaatatttttgtagtttgcagtcactgctgtgtaagttaaatt

SEQ ID NO: 52424 - DNA, 563 bp, Homo sapiens
cctattaaagggacaaaggtccccatggggtgcaggcaccccaggctcagccctggcagctggcccgggcttgkgctgcagcaggaacccccactctcagctctgccatgtcaaggctcagggcagagagggagggatcttggtctcaggtccatctcccttggggcagagccaccccagttgtgtgaggacgggacactgcctggcaggtgctctccctctggcagggcacaggccgctggcagtatgtacagcacttcagtctggattctgggatccagcggtcttgagttcgaatcctgattttgcccctgcccagcggtgtgaacttgggcaagcgacttgacctctctgagcctcagtttcctcatctctgaataaaacagggttaagaatagtcctggttattcatgatccagtgagaacctgccccaaacactgcagagcatgacgcaaagtcagtgttcagtgaatgggagctgctgcttgctgttcttgggagagagggatgggcagatgggcaccacaggagtccttgggctcttgtggcaggtcctggagga

SEQ ID NO: 52425 - DNA, 553 bp, Homo sapiens
tgcaaatttcttaagagttgggacttgattatgctttgtgatatcccacctgccttaccaatatttttcacaaagggtgtgtgtgtgaaaacaaaagaagtgagcactgcctggttgataacaaggcagcacctttaacaaagccaaattgcaattagaaatgtttgacatttggagaagagctggctaattttccctttgttaaaagaaatagaaaatttccatttgctgttccaaatgtgccaaaaggaaaacacaggataaactgcccacgatgcaaacgcagcaagggcatcactacaagaaaactccatgggagttacgtsttagcaacaggagccgctgcccaaacactcaagttcaacagcgcctgccatacctcctgagagatgtttgacacacgtaggctgttagcacagttctcatttcttctccccattttgttgtagctgttgctctgtttccttaaaatcctacacagattgcgggataggcacatttatgggtaagggtcaacatttataaaaaagaaagtgtgagttttgatttccca

SEQ ID NO: 52426 - DNA, 984 bp, Homo sapiens
agaagacactctgattaagaccaaaacctcctgaggagtttggctttaaaccccatgttctccctggcaaagtgtcttgatctgaaatccatgttaagctaaaatgccaagaggataaaatatcttcagacgtagctttagctgggctgctaaaaggagccaagtggaagaaaactggcaacctggaatattacagccgaggtttgctagtggctgcacaggtatgggagtgatagtgatgtcagcggctagaacatcrccttcattttcctacaaatcaattgcaaaatggcttcctttcaccacaaggtatatgtggaataaatactcctgttgctatgaaattaaatatgggcaagcttggcttcagggactgaggtcttgattttagagggcaggctcagtgggagtgagtcagaaagaaacagctttgtgaaagggctacttatttgaactgggagtggggccacaacccccaccatcctctgggaatgcgataggaggcctctgctctctctagcatgttgcttctggagcctgccaacaacgaacctttctaaggcatatgccttacctctaaacttatgtttatatcaagaaatatgtgagggtggctgggcacggtggctcacgcctgtaatcccaacaatttgggaggtggaggcgggtggattgcctgaggtcaggagttcgagaccagtctggccaatatggtgaaaccctgcctctactaaaaatacaaaaaattagccaggcatggtggtgtgtacctgtaatcccagctactccagaggctgaggcaggggaattgcttgaacctgggagacggaggttgcagtgagccgagatcgtgccactgcactccagcctgggtgacagagcaagactccatctcaaaaaagaaaaaaaaaaaaaaagaaatacgtgagggtactgggcaagatggctgactatgcagacaggtggaacagctgccactgaggg

SEQ ID NO: 52427 - DNA, 549 bp, Homo sapiens
tttttataagaacaataaagagaacaggaaaaatagcctgatatattgtttccttctctgatctgttctgtctcactaagctaccaatagcrcagccctaaaaagtaattcgaggaggtttttaagttccccttatatcctctgaaaagcaacccagataaacatgagctctaagtaaaaacattgttcttgggattcaaactcaagatgacagaataaactgctgcaggaagcgtctctcatgactccatagatttatccttttttttttttttttttttttttttttttttttttttttttttttgagacggagtctcgctctgtcgcccaggctggagtgcagtggtgcgatctcggctcactgcaagctccgcctcctgggttcacgccattctcctgcctcagcctccccagtagctgggactacaggcgcccgccaccacgcccggctaatttttttgtatttcttttagtagagacggggtttcaccatgttagccaggatggtcttgatctcctgaccttgtgatccgcccgcctcggcct

SEQ ID NO: 52428 - DNA, 549 bp, Homo sapiens
tttttataagaacaataaagagaacaggaaaaatagcctgatatattgtttccttctctgatctgttctgtctcactaagctaccaatagcacagccctaaaaagtaattcgaggaggtttttaagttccccttatatcctctgaaaagcaacccagataaacatgagctctaagtaaaaacattgttcttgggattcaaactcaagatgacagaataaactgctgcaggaagcgtctctcatgactccatagatttatccttttttttttttttttttttttttttttttttttttttttttttttgagacggagtctcgctctgtcgcccaggctggagtgcagtggtgcgatctcggctcactgcaagctccgcctccygggttcacgccattctcctgcctcagcctccccagtagctgggactacaggcgcccgccaccacgcccggctaatttttttgtatttcttttagtagagacggggtttcaccatgttagccaggatggtcttgatctcctgaccttgtgatccgcccgcctcggcct

SEQ ID NO: 52429 - DNA, 864 bp, Homo sapiens
gtcttccacaaaaccagtccctggtgccaaaatggttggagaccactgatttagatggagctcatgcagggcaggagactcatctgcattatttgacatagacaatgggctcctgggtgagcctaagtggtctgccggattatggtaagatggtgcttttggagataataacaataacattactaaaaatgatatatcatccacataaccctgactctgaatgcttttcagagtgctgctgctctgaatgctttcaatgtattaactcctttaggtccttagtgccaacctttgtagtaggttttagtattatccccctcttacagatgagaaagtgaaggccacagagagattaccgtgtgctaatctttcttagggtaaatggggaaactgaggctgacaccactggagggaggtcatggatgagactgtattgtgagcataggaagaagaggagtgttggaaaccttggcagcctggctgtagctttgagaaagtcacttctgtaaacctgtgttttctactatgcagtagggtaattatgccttcttggaagacttaacataaggattggatgaactcatataagtaaaatgcccagcacattaaagataatcaataaaccatagttgccattattaatcacctaattgctccctcctttgtgcccttactgtttyatacacttctcttctagaagcttattagactattttaactgtcttgctggtattctctgaacatgtctgtcttgctggtattctctgagcctctctcaaaggcaagaccagctcttatctacctctgggctctctagctggcagatggaggtttcatatgagaaaataggcctggaaagaaagg

SEQ ID NO: 52430 - DNA, 1331 bp, Homo sapiens
tgccccttggagctgttgcctgggcaggggtggccttggttgtttaccgccggggttgaccagctaacgaggtaaaaaaagaaatttatacatatatcgttttaacccaattgcctcggaccgtgttctcaatgatctaggaaggttgtaagtgtgaagggcatagtgacagcccattaccttctgtcttggcttccttcctcccttttctcaacattctaaaaacctagggattgaaagatctctgaatctctttatcacagagcttttcatttccccctgcattttcctagggttggtcccgctttcgtagtgtggattttcgtttcctctacttgactctaaatcaatcctgtatattcgcaaactacaaagaggcgcatgcaaatagatactgtactgagggcagatacacgcgcgagatccagagggtgagttaacacacattcagtaaatataaaaacaagtggaacattattaactgatttctgtgagccgtaattttattttataattttcacgtggtaattggggatagacagggagcaagtagattatgtgtctaaaagatatgactagaaaaaaaagtctggtaaaactctcctcaaataacataacacataaagtgagctaattattcccagacattcccaggagggaaagagattctgattttgtttggctggctggttgtgttgctttaaaaaaaaatgaagtaatctttcagttggtggattcgtttttttaaaagcctaaaggatcatagtctctagaataaataaggtaggcatttcattttacataagtgtgtcttatataacaaatgttctcatattttaaaaagtgctctcttgactgtaaatgcaatgtggaaaaacattttcaatgcaataggccatacctaaatattgatgaaaaacctctagattttcctgtatacattcacatgaaggaaaaaacaatgttggagataaagtattacttgatgggctgggcggtatcaacttgctagactctgtcctgttgagtatatctgctaatgaaaatatttggttcaacatttacytaatgacctgactgagagaaccacctccttatttagggaaaaaatatctaattattcgaatacacctcccttttaaaaggcatgtgttactgtcttcagagatccagaggtgtaccatgcaaattcacccactgttattctttcaataaagaccatagaaataaaaggttggcaaagacttacaattcattcagctccctaagtcttctcagtggtgcctatactacagaggtgaacaataaattttgcaaatgccagcggctac

SEQ ID NO: 52431 - DNA, 587 bp, Homo sapiens
catgagctaaggaagggggagcccctgttcaccactaagaactggggctgctggggaacttgcaaatgtcatcccttccccagaacctggcaagggccgggagccyggccccaggctgcaaagtgtcagacagggcagtaggagcagcttcagaggcagcagtggtggcagtgtgtcccctgtgccccatgtccctaaggcagctgactgtgccacacgcatcctcacatggtctggcaggacctgctcccaggcccagagcctccactgcagctttgaccttgctctctgccatgtcctgggagcctacaagcatctggccaatggtgcagcttggactcacaggacaagcccaggaagcatggggttcatttgggtggagttggccagggtcaccgtgccacctgcaccttgcctgctgccactgtggcaagacacagagtaggggcatagcctgggacagggacagttgggagccctgcccctcccaagttggcagggcgggagctccccaggaacagctgcagccatccaggttgtggctgtgggcccaggcttccagaagctctctcagggcccagaagggc

SEQ ID NO: 52432 - DNA, 625 bp, Homo sapiens
tttcatcagttttgaaaaatttttagtgtgtcattaaaaattgctaccatcccctgtactctttccttctaagtttctagttacacaaatgttagaaattttctttcttttgtaatgccttttatataagttttgaaatatgtgtgtttttggkagtttttgtaattaattagtatttaatttcattgtcaccagaaaatagctgatatcattataattctttgatatttgttatcaatttattgaagttaattttttcattagttatatatggtacaaaatgtgcatttaggaatttcatggtgcaggtttttatgtattttcattacattaagtgtgttagctgttcaaatctcttgtaacaattttcaattttatcattgttcaatgtatttattattcagaaagaagttttacaatgttttgatttcagatttggaattattttcattataattctgtaaattttacttacatgtttggagcttatactacttgaagaatacaagcttaaaacagttgtatctcaactctgtcatttattttacaaaataaactgtactcttctataatgtagagcttttccccagttactggagttcttactccaaatcatagttcccaa

SEQ ID NO: 52433 - DNA, 625 bp, Homo sapiens
tttcatcagttttgaaaaatttttagtgtgtcattaaaaattgctaccatcccctgtactctttccttctaagtttctagttacacaaatgttagaaattttctttcttttgtaatgccttttatataagttttgaaatatgtgtgtttttggtwgtttttgtaattaattagtatttaatttcattgtcaccagaaaatagctgatatcattataattctttgatatttgttatcaatttattgaagttaattttttcattagttatatatggtacaaaatgtgcatttaggaatttcatggtgcaggtttttatgtattttcattacattaagtgtgttagctgttcaaatctcttgtaacaattttcaattttatcattgttcaatgtatttattattcagaaagaagttttacaatgttttgatttcagatttggaattattttcattataattctgtaaattttacttacatgtttggagcttatactacttgaagaatacaagcttaaaacagttgtatctcaactctgtcatttattttacaaaataaactgtactcttctataatgtagagcttttccccagttactggagttcttactccaaatcatagttcccaa

SEQ ID NO: 52434 - DNA, 625 bp, Homo sapiens
tttcatcagttttgaaaaatttttagtgtgtcattaaaaattgctaccatcccctgtactctttccttctaagtttctagttacacaaatgttagaaattttctttcttttgtaatgccttttatataagttttgaaatatgtgtgtttttggtagtttttgtaattaattagtatttaatttcattgtcaccagaaaatagctgatatcattataattctttgatatttgttatcaatttattgaagttaattttttcattagttatatatggtacaaaatgtgcatttaggaatttcatggtgcaggtttttatgtattttcattacattaagtgtgttagctgttcaaatctcttgtaacaattttcaattttatcattgttcaatgtatttattattcagaaagaagttttacaatgttttgatttcagatttggaattattttcattataattctgtaaattttacttacatgtttggagcttatactacttgaagaatacaagcttaaaacagttgtatctcaactctgtcatttattttacaaaataaactgtactcttctataatgtagagcttttccccarttactggagttcttactccaaatcatagttcccaa

SEQ ID NO: 52435 - DNA, 575 bp, Homo sapiens
tgagatgagaactatttttgcagaccaaaatgaaagaccacggactcccttttttgttttttctttgcagaccaaaatcaaagacggatggactctatttttttggcagaccgaaatcaaagatgatgggctccattcatttcctttccagagctcttccctgatagcgaagatgttgtgggcagagaaagatagaaaagaatcatttccatagcagttgcacragtctgcgtctgtgtattcagtgcttgggtggctcccccttctcacgcaaggccttgtcacaagctcctgtgtcatgaattgttggaacctgcagcctggctcaaatgaccacaggggtgcctctttgtcagacatacgctgtgcatctggcggcatcatgagggtaatgtgatatggctcacaattttaattttaacaaaaaaatacatctgtcagactcatttcagctgacaggataaatatcatatttcattgccagtttgtaaacacctcacttttcatctctatctgacatgtttcctgggtggtttacaaattgaaaaatcaaatggaatacatttggggccgag

SEQ ID NO: 52436 - DNA, 577 bp, Homo sapiens
gttattaggtatccatggttgtattaatttagtccattaaaaatattacatctggaacagtagcttttattggagtcaccaactaactcaggttatgaaaattcactattgctctctcaaaatcaatcatgttttgcattaactaaactagagaattacactgagcattttataattaccactctgcattttccagccttccatggtagcaataatctctgcacttctcctaggggtgtagtattgttcttgacttactattctgtatggaaagagagatagcctctgcatgtccatatttttctatagctcttactctgtgagttgggaatctaatgtgagtatttttctagctgctgaaatgtattcaaacattatggtcaggacctggggaaataaccatgtaatgggatgagagtcacacgcagccaattgtgagggagactcaggtgaaaattattatcatgacatgtggctctgggaatataatggattgagtgtgtgtgtgtgtgcgtgcatgtgcacayaggtcttcttattggggactaaagttagatacttcataagacatagttct

SEQ ID NO: 52437 - DNA, 561 bp, Homo sapiens
aacattttaatcagtacattttgagtaaagtagattatcatccatagtatggtttggcttcgtccagtcacttgaaagccttaatagaaaaagactgacttcctcagaaaagggagttctaccaccagacaaccttcaggctcaaagcacaacattgactctttcccaattctctagcctgccggcctaccattcaggttttggacttgccagcctccaaaactgcataagccaatttttaaaaataaatctgtttctggctctggctctctctctctctacacacacacacacacacacacacacacacacacacacacacacacacacacgcaattagttctgtttctctggagaaccttgactaacatgtataacacttttttttaattaatgtgattatggtggacttgaagtcagacacatttgagttttgaattgggcctttgccatatttttttaccctaactatattgracctcttccatttcctcatctgcgaaaataccagtaataatctggatctctcacagctgttgtgcagattaaaagaatttgtgc

SEQ ID NO: 52438 - DNA, 597 bp, Homo sapiens
ttgagggtttttaaaatttaaattttgaggtttttgtaaaccatttctcttcagaggactggccttttccagtctgcgttcacggacagatgtgattagaagattttcccttaattgatgccaatgtttgtcttcttatcctggaaatacttaataaaaaatcatagactaatattcatgttgagcacttactatgtgtcargcactgtgctaagtgttttatagataatatattgttgaatcttcattactgatgaagaaactgaggctgaaagagatgaaatgatttgctaagatgatccactggaaaatggcaaatctaggatcccaaatcaggtcttttggatttgccttcctgttactcaaaagatctctttttgtcccaggaatgtactcccacggcctttgactttatccttaccttcctctgtgctccatattatgcacatcaaaaatcttcccggtactattaatgcttacccccactggtgtgctggaacaaacgaacaaacaagcaaagaagcccaccccaatttgtagcgttttccaatttcccaggtgtaaatgcttccaccatggtcaatttcaagctttcaa

SEQ ID NO: 52439 - DNA, 522 bp, Homo sapiens
tggaggaaggacagatcttcagctttctgtgccttcctttggccatgggattccaacagctgtgctcctggcttatttacagtgagaggttgtcttgctcttcctttcatcctcttattcccatcctccaactcctcaagagagttccagaagttcctgtctgtagtctagggaagaggtaaaacacctctcttcaaatttgaaggaaaaaaaaacttggaaataatctttagttgatcatatatcttatttcctatttttttatggggattaggctatggagatggttaactggtctacaaatgaaaaacaacaagaacaacaacagaaacaaaaayaaaacccctaaatctttttttttttttttttttttttagatggagtctctttctgtctcccagggtggagtgcagtggcgccatctcggctcatggcaagctccacctcccgggtttgcgccattctcctgcctcagcctcccgagtagctgggactacaggcgcccaccaccacacccggcta

SEQ ID NO: 52440 - DNA, 607 bp, Homo sapiens
ttgagtaaatacgtgttgcctgtggctgccatattggccggcacagcagggtagcatcttccatgggcagctgttgctctgtgaatttttatatatttatctgttcgtttgcttaacagacaacaagagtgtgctggacactgggaaatgtggtccaggagcagtcacagtccctayagacctcccacaaattaccgtaatgcaaaggtgagaatgtggaatgtctcagaggagacccagattatagcctctggaattcagcggagatctctcgtggtccagagagatgttgcagagatggggtgggactgcgtaagactcctcaagggcgattagtcaaacactgagatgaactgatccatctgcgctctgctgaggagcccttctgggatgtaagtcctcatccgagaggcagctggaggggatggggcccggcagaatagggttaatgcagccaaagttcaaattctggctctattagcagtgaacacttgggagagctccttcactcaccgactctcatcaggaaaatagtgatagcatgaacccctccagatggttttaggattaaaagagatacttgtgcaaagcctcagcatacggtaag

SEQ ID NO: 52441 - DNA, 528 bp, Homo sapiens
tcaggagttcaagatcagcctggcaacatagtgaaagctctacaaaaaaaaaattaatcaggtgtggtgacatgaccgtagtcccagccactcgggaggctgaggtgggaggattgctcgagcccagcagattgaggctgcagtgagctatgatcctgccactgcactccagcttgggtgacagagcaagacttcatctcaaaaaaaaaaagaaaaaaaaaaaagacagaccacagtgacacttggcggagtatttaattcatgtctgtctttcccaccaagagggtagtggttgggcaggattttttcaccattacgtcccagcatctagctcagggactgcctgcctgcctgggatggtcttcccccagatctttgcagggctggctcctcagaatttaggtctcagctcaaaaatcctcaaggatcccccscactctacttgaagtcccgatcacacttgtcactatctgaaatcaatcaccctggccactggtgtgtttcttacctcctttcatgacctgtgta

SEQ ID NO: 52442 - DNA, 528 bp, Homo sapiens
tcaggagttcaagatcagcctggcaacatagtgaaagctctacaaaaaaaaaattaatcaggtgtggtgacatgaccgtagtcccagccactcgggaggctgaggtgggaggattgctcgagcccagcagattgaggctgcagtgagctatgatcctgccactgcactccagcttgggtgacagagcaagacttcatctcaaaaaaaaaaagaaaaaaaaaaaagacagaccacagtgacacttggcggagtatttaattcatgtctgtctttcccaccaagagggtagtggttgggcaggattttttcaccattacgtcccagcatctagctcagggactgcctgcctgcctgggatggtcttcccccagatctttgcagggctggctcctcagaatttaggtctcagctcaaaaatcctcaaggatcccccgcrctctacttgaagtcccgatcacacttgtcactatctgaaatcaatcaccctggccactggtgtgtttcttacctcctttcatgacctgtgta

SEQ ID NO: 52443 - DNA, 1459 bp, Homo sapiens
tttctattctcaatgttgagctttattaactgaatttgaaatagcattcacaacagttagatgctttctctctcacaaaatggatttccaaaagctttactctgattccaagagttggatggaagacagtttatatatacaagctggaagccaccacacccagtctatttcttaaaatttggacaatttattaaagtgatatgtgcccatggttaaaagctgtcactttccaagtctcattcctcagaggcaacttctagaaattcttgcagctttctttttctctagcagttactgctgcactatgtctaaagtatacacttggctgggggtggtggttcacacctataatcccaacactttgggagacaaaggtgaatcgcttgagcccaggagtttgagaccagcctgggcaggtcagtgagactgtctctacaaaaaaattttaaaaactagccaggcatggtgtcataggcctgtagttccagccttaggaggccaagataggaggattgcttgagcttaggagtttggcctggatattaaagcaagaccaccatctcttattaaaaaaaaagctacacactttatcgctattccttaatatatcaaatttagatgtcgtgtgtgggctgctggaaagttcctgatcttagatttaccaaatccacacctgcaaggttaatatttgtgcacaatgtgatttattacttctttttgttttctccccctgggaggaaggcagaaacaagccaagctccatggaagtggtgccagtgctagttttgttgaaatggccaaggacttaggcagcagtgtccaacatttgggttcaccttgtgtgcactgctgtgatttacagccttatttggatgataaggatgatcagaaaccccaagggtttctaataatccttgccatgttcaggaaccaccgtcctaagcggaggttttctcaagcttttcacactgcagggcccaggctacagccctggagcatcgagacctgctgggtttcatcccatctgttctttacagtgtgcaaagctggccaggccccttactacctttatacttggcatttagcacatggggctggcatggggcatttcccttcctcactgagcaggtgagggcaggtggctcagccaaggccgcagagccaggattggagatcaggacttgtcatgggtccttgtgtcccccagggcacacaggtgtggtgctgtaggtgctgaggggtcctaaggtggcgggtgtttaacacctggtgaggttaaatgctagggttttttcttcgaaatggggtctcactctgttgttcaggatggagtgcaggggctcgatcaccactccctgtagcctctacctcccagactcaagtgatcttcctgcytcagcctccagagcagctgagactagaggcgcacatcactacgcccggctaatttttttttttt

SEQ ID NO: 52444 - DNA, 578 bp, Homo sapiens
tgtaaaacaccgtaggaaaacctgccatgcagcattacccttgaacattttgttgctacatatacagtctttctggtgctgctgtatccacctatttattcttcatatttattgtcaatgcttagtactggctaaaaccatgacatgataaactatgtcttgtggatatgttcctagagcctagtcatttgtatatggttatttttggaaataagttttataacaaagactttcatcaataatgtggcctattccattggaagtttttcagatgcccaggaatactctgcacttagtttcctcaagctgacaagccgaaatataagtattatttatacattttctgtctcggtaccccccactccaacttgaccaaccatgcaatcaggctagcctaagagtgttcatgaacttctcaatgcagccasacctagtatcttccagagctcagttccatgcatggtgtcaaatgcttttgtgaagctaacagacacaacaaagagatattaatgtttcaccctgtagttttcccatcttcactgcatgatgagcatcaactcaaggctactctgagtttt

SEQ ID NO: 52445 - DNA, 548 bp, Homo sapiens
gtgattcctccagagttaatgaaattaatgaggatgggctcatgcaaactaaacccacaggagaaagagctataagtcccaaaatatcaattgacaagaatttacaatatcatttatatttgccaaacaagcccaaattctaatgtttagttggtgaatggctggtcaggacagtgtctctctctagtaggaatatgtacatggctagacaaatatttgcatattcagcagatatttaccaattgcatactgagtgccaagcacgatgtcaggtcctagggagtcaaagataaataaaatacagtctgtaggctcttagttcccaccatctagtaaacaagcaagaccaatacagtcagttttgactacacagaaggagacctaacccaggcwcctagagtcataaaaggcttctgggagaaaagggcatctctgccaagtcctgaagtgaatagcagttgtaatcagacaaccagtggggcaaagcagaaacagcaagtccaagacaggggagcagactatgcagaaaccacagggcaaactatcta

SEQ ID NO: 52446 - DNA, 579 bp, Homo sapiens
atttttctgggttatggataatcacagacattttaaaatggaatcatacaatttataaacattttttccaatatactgtgaacacttttccatatcaataaatacaattctagatcccatttttcatagcttcagagcatttcactgtacagacttcctaattcattgacctgatcccttttgtttggatatctaggctgtctgtgcctccttcacctttgtaaccaatcctgtgatgaacatctcatgcgtayatctttgaacaatgtaatattatctctaggataaaagaaaggaactctgattattagcactgctacacacacagcgagtggcccatcactgatgatgaacaagcagagaccacatggcaaggttgggacacaggcattctctggactgactacactctctcaaaaatgcttttcatccctagaccttcacccagtgatcttgaaccagttgattcaacattttggttttctgttaaaacaaaattaaaataagtttatgtatcaggtaaatctttctatagtaagtgacctacacctaaatgagacctattagcagaaaaggaca

SEQ ID NO: 52447 - DNA, 579 bp, Homo sapiens
atttttctgggttatggataatcacagacattttaaaatggaatcatacaatttataaacattttttccaatatactgtgaacacttttccatatcaataaatacaattctagatcccatttttcatagcttcagagcatttcactgtacagacttcctaattcattgacctgatcccttttgtttggatatctaggctgtctgtgcctccttcacctttgtaaccaatcctgtgatgaacatctcatgcgtacatctttgaacaatgtaatattatctctaggataaaagaaaggaactctgattattagcactgctacacacacagcgagtggcccatcactgatgatgaacaagcagagaccacatggcaaggttgggacacaggcattctctggactgactacactctctcaaaaatgcttttcatccctagaccttcacccagtgatcttgaaccagttgattcaacattttggttttctgttaraacaaaattaaaataagtttatgtatcaggtaaatctttctatagtaagtgacctacacctaaatgagacctattagcagaaaaggaca

SEQ ID NO: 52448 - DNA, 1950 bp, Homo sapiens
aatggcccataccatggcggcagacccttgccatgggggacggcgcagcagagcaggacagggagctgctcccagctcagccacgcagagaaagctgagcaaaacaggcagacaagtccacgccctccacagaagtccacatgctccagtgagaggaagaagagcagtggctgcgtagggctcaggatggggggtgagcagggaagagtacaagggaactttctggggtgatgatggggcgttctagaccttgatctgggtggtgattatacacagttgtccaaactcctcccatgttccacttaagacctgtgcattttactgcaagtaaatgatgcctcaataaaacataatcctcaacatggggtccgcgtttgggtctggggtccacgatctgctctcctccctcttctgagctgcccagawttcccaggcagatgctgaagttatgagcaagtgcggtgcctcattccagggccgagggcttctgaggccaccacgcctgccttcctgcccacatccatcttgttattgtcggagccggggaattgctcctgaggcggaatcttgaatattcatttgatttacggcctgctgccgacagctttatgaatccgcccaccaatacctgcagccggtcatcaatcttccctggagattgtgcttctgccagtaactcatgaattaaagaggcccctgacggcccccacgcctgcctcccctcccatgctggagcgtcgtgatggaaggaggacctgaccagaagtcagaacattgttgttttgccgccgcggcagctctgatgaccttgggtgactctctttgtctgcaggaggaggagaaactcagaagccctcagatctgcctcctcccagccccgagcctcagtttccccatccatagagatgcagggcacagcaccacctccctctgcttaactgggccgggggccaaggcaggacggactgccagcttatacgaatgtgggatgcctgccactattgttatgattatctgacttggagatgttcgaagggacaagaaagatggtggtgctcacggctcattccccatggttgtctcattgacagcatgggaatgaagacagcatttccctcgggctttcaggggagaccatgggagggggctcagcacagcccctggcacctggggcaaactccatagggagtacatattcagattttgctccaggaaggagaagtggggcaggctttcgctctggccttgggaagcagctccaaagtgtttccagagctgactcctgggcaagtacccctggcagaaaaccatagcatgtgcggtggcctcagaagcccttggtcccagttggactgtgtctggctttcccgtgagtcccccagcccctgctgtggagacggcactcagtagatgctccagggttggtcccagttggactgtgtctggctttcccgtgagtcccccagcccctgcggtggagacggcactcagtagatgctccaggattggtcccagttggactgtgtctggctttcccgtgagtcccccagcccctgcggtggagacggcactcagtagatgctccagggttgagccagcctttaccaaccggtagacactggtaacatctgcaaagcagttggggccagcagatggagagagtggtggaggcagtgcctctgggctcagacacattggggttcaaatcccactctgttccttaggatcccagtgaccttggctatcttggccccctaagcccggtgagcaggacacaggtgatggctgccttagagggtagactgggctcggagaggcagcctgttggaaatgccttctctgctggtacacaggagcccttgggagggtcagctccagtgggtgtcaccaggcagtgttctgggcaccagagtcagaggaggtaaggacaagacagctcctgctcctcgg

SEQ ID NO: 52449 - DNA, 1950 bp, Homo sapiens
aatggcccataccatggcggcagacccttgccatgggggacggcgcagcagagcaggacagggagctgctcccagctcagccacgcagagaaagctgagcaaaacaggcagacaagtccacgccctccacagaagtccacatgctccagtgagaggaagaagagcagtggctgcgtagggctcaggatggggggtgagcagggaagagtacaagggaactttctggggtgatgatggggcgttctagaccttgatctgggtggtgattatacacagttgtccaaactcctcccatgttccacttaagacctgtgcattttactgcaagtaaatgatgcctcaataaaacataatcctcaacatggggtccgcgtttgggtctggggtccacgatctgctctcctccctcttctgagctgcccagatttcccaggcagatgctgaagttatgagcaagtgcggtgcctcattccagggccgagggcttctgaggccaccacgcctgccttcctgcccacatccatcttgttattgtcggagccggggaattgctcctgaggcggaatcttgaatattcatttgatttacggcctgctgccgacagctttatgaatccgcccaccaatacctgcagccggtcatcaatcttccctggagattgtgcttctgccagtaactcatgaattaaagaggcccctgacggcccccacgcctgcctcccctcccatgctggagcgtcgtgatggaaggaggacctgaccagaagtcagaacattgttgttttgccgccgcggcagctctgatgaccttgggtgactctctttgtctgcaggaggaggagaaactcagaagccctcagatctgcctcctcccagccccgagcctcagtttccccatccatagagatgcagggcacagcaccacctccctctgcttaactgggccgggggccaaggcaggacggactgccagcttatacgaatgtgggatgcctgccactattgttatgattatctgacttggagatgttcgaagggacaagaaagatggtggtgctcacggctcattccccatggttgtctcattgacagcatgggaatgaagacagcatttccctcgggctttcaggggagaccatgggagggggctcagcacagcccctggcacctggggcaaactccatagggagtacatattcagattttgctccaggaaggagaagtggggcaggctttcgctctggccttgggaagcagctccaaagtgtttccagagctgactcctgggcaagtacccctggcagaaaaccatagcatgtgcggtggcctcagaagcccttggtcccagttggactgtgtctggctttcccgtgagtcccccagcccctgctgtggagacggcactcagtagatgctccagggttggtcccagttggactgtgtctggctttcccgtgagtcccccagcccctgcggtggagacggcactcagtagatgctccaggrttggtcccagttggactgtgtctggctttcccgtgagtcccccagcccctgcggtggagacggcactcagtagatgctccagggttgagccagcctttaccaaccggtagacactggtaacatctgcaaagcagttggggccagcagatggagagagtggtggaggcagtgcctctgggctcagacacattggggttcaaatcccactctgttccttaggatcccagtgaccttggctatcttggccccctaagcccggtgagcaggacacaggtgatggctgccttagagggtagactgggctcggagaggcagcctgttggaaatgccttctctgctggtacacaggagcccttgggagggtcagctccagtgggtgtcaccaggcagtgttctgggcaccagagtcagaggaggtaaggacaagacagctcctgctcctcgg

SEQ ID NO: 52450 - DNA, 1950 bp, Homo sapiens
aatggcccataccatggcggcagacccttgccatgggggacggcgcagcagagcaggacagggagctgctcccagctcagccacgcagagaaagctgagcaaaacaggcagacaagtccacgccctccacagaagtccacatgctccagtgagaggaagaagagcagtggctgcgtagggctcaggatggggggtgagcagggaagagtacaagggaactttctggggtgatgatggggcgttctagaccttgatctgggtggtgattatacacagttgtccaaactcctcccatgttccacttaagacctgtgcattttactgcaagtaaatgatgcctcaataaaacataatcctcaacatggggtccgcgtttgggtctggggtccacgatctgctctcctccctcttctgagctgcccagatttcccaggcagatgctgaagttatgagcaagtgcggtgcctcattccagggccgagggcttctgaggccaccacgcctgccttcctgcccacatccatcttgttattgtcggagccggggaattgctcctgaggcggaatcttgaatattcatttgatttacggcctgctgccgacagctttatgaatccgcccaccaatacctgcagccggtcatcaatcttccctggagattgtgcttctgccagtaactcatgaattaaagaggcccctgacggcccccacgcctgcctcccctcccatgctggagcgtcgtgatggaaggaggacctgaccagaagtcagaacattgttgttttgccgccgcggcagctctgatgaccttgggtgactctctttgtctgcaggaggaggagaaactcagaagccctcagatctgcctcctcccagccccgagcctcagtttccccatccatagagatgcagggcacagcaccacctccctctgcttaactgggccgggggccaaggcaggacggactgccagcttatacgaatgtgggatgcctgccactattgttatgattatctgacttggagatgttcgaagggacaagaaagatggtggtgctcacggctcattccccatggttgtctcattgacagcatgggaatgaagacagcatttccctcgggctttcaggggagaccatgggagggggctcagcacagcccctggcacctggggcaaactccatagggagtacatattcagattttgctccaggaaggagaagtggggcaggctttcgctctggccttgggaagcagctccaaagtgtttccagagctgactcctgggcaagtacccctggcagaaaaccatagcatgtgcggtggcctcagaagcccttggtcccagttggactgtgtctggctttcccgtgagtcccccagcccctgctgtggagacggcactcagtagatgctccagggttggtcccagttggactgtgtctggctttcccgtgagtcccccagcccctgcggtggagacggcactcagtagatgctccaggattggtcccagttggactgtgtctggctttcccgtgagtcccccagcccctgcggtggagacggcactcagtagatgctccagggttgagccagcctttaccaaccggtagacactggtaacatctgcaaagcagttggggccagcagatggagagagtggtggaggcagtgcctctgggctcagacacattggggttcaaatcccactctgttccttaggatcccagtgaccttggctatcttggccccctaagcccggtgagcaggacacaggtgatggctgccttagagggtagactgggctcggagaggcagcctgytggaaatgccttctctgctggtacacaggagcccttgggagggtcagctccagtgggtgtcaccaggcagtgttctgggcaccagagtcagaggaggtaaggacaagacagctcctgctcctcgg

SEQ ID NO: 52451 - DNA, 599 bp, Homo sapiens
aaagcttctttctttgtacctctctacaggtgctctacccagaaaattcttaatctgtcagtttgtctgtcaaaatctttctcttcattcaagccctacccaaatatcaacttcctaccaggaccgaaagtaatttttttaagtcctataagacttttagggagttctcatgtggtgctgtttacatctgtagaattcatgtcacaaaatgaactccgaagtaaatcaagggtaatgaccaygcaacaggttttttctggtctttcacaacagtgcatttaatgcagaagaatcttgataaacgtctgttagataggtgaatgtgatgtttgcttagtcaaaacataatgctcaaatggtaattaattgatcaaatcatggtataatatttcatttaacattgtgacaagcaagctcttcttagtgggtaaatttttcttctatgtttggtttgttattcttaggaaataaaaacatgttttttaagttgtaacaagtacagttgactcttaaacaatgcagtttgagcttcgcaggcccgcttatacacaaatttttttgtcaaacaaatgcaaatccaaaataaagtattcatggga

SEQ ID NO: 52452 - DNA, 1695 bp, Homo sapiens
taacttaaaaggccaacaggtggcgcagctgcccccatcaacccccaagcttctgctttggaagaaagacacttcggggaagataggctgtgtattaaaagattccctgaacttctttagaaaactgtaacatgtttccaatataaaggaaaacattaagtcattaggaataaaataaatgaaataaaatggcaagaaaaaaatgtaaactgttaacaccatttaaaaaaaaatgtggctgagcatggtggttcacatctgtaatcccagcactttaggaggcggtgcaaggatcacttcaggtcaggagttccagaccagcttgaccaacatggtaaaaccctgtctctattaaaaatacaaaacttaggtgtggtggcacgtgcctgttaatttcagctacttgggaggctgaggcatgagaatcgtttgaaccttggaggtggaggctgcagtgagccaagattgtgccactgcactccagcctgggtgacagagtgtgactctgtctcaaataaataaatataaaaataaatttaaaaaaaatgagattttgggctgttttactgaattctgtcctaatagagggagaagcaactgtgactcctcctattttagatgagctgtcaaaagatgaaatgatggctccctgcatcagagtagtgggaggatgactggaaggttcctggcaatgttaacactttgtggaaaaggctgagctccaggaaaaggaaactgctgaatcaaagctgtaaactgaaggtcctcagagaaggcagtaattcactgcttcagctagcccatgccccacctccctggcaagttctaaaggagtctaagaattctcctccccagagagtaggcagcacttactgtatcagtttgaagtaaagtcaaatatgacttcttgacttactgcagagtaagagttcacacaatcaaagagaagaaatcccagcagaggaccagctgagaaaatgctggagccctaaagcaggatcctgtaaaggaggactgggcaagaatgggaggaaaggactatggcaacctgtgaactagaccaggcctctgcttcctatcttgaaaaggaagagaaaccacaggactagggaatctagctttccctcccatcactttgaacctcaaagtgaggctttaccagctgagcatcctaaagctcttggtaagtccagaccaggcctacggaatacctacgctttgagatggtgctcttcaaggttctaggccctttctcttaattaggagttttggctttgagttatagttaagagtctccaggaatgaccagcgtgagggctgaaagaactgtcttaggctctctggtcaacaggtcaaaatgtttacrtaacataagcatttgcctctgagattatggagtcctgttaggctgcaaactccccaagatcagggtctaagtcagtagtactatccactgctgggtcttggtgtctgaccacaaatacattcaataaatatgttttatttatttatttattattttattttttgagacagggtctcactctgtcacacaggctggaggggagtggcacgatctaggctcactgcaatctctgcctcctggactcaagcaatcctcccaccttagcctcccgagtagctgggactacaggcgtgcaccaccacacttggctaataaatatggcattttaa

SEQ ID NO: 52453 - DNA, 600 bp, Homo sapiens
tgtttcaggaccaaagtcatgactacagggtgtgatctcacccttcataacagcagactcagagaagcaggggaattttcaaagaaaacctttcctggtgttaaaaagagggagaatctgaggttagaagcagccatgtgcaaacttttcattctgctaggagtgactggtctcagattgactaggggccagagaagacagccacactggtcaaccaggctcttcagattggcctccaacccyacccagccctgcccaatccttgacccaccctgacatgtacaggaagtgcgttaggaaccttagccccaccctgggtggggttcagagttttctctcttacttggagccccaggcctgatgtgtgtgtgtgtttcttggatgctcatgtccttcatggtttagcctatgtgcacaccttcccttcagtttccctacccagctctcttttggctgaggcctatgatagcatttgtctgatccagctggggtgctgacattctctccagtccctgactgggctgtccttcaagttaaagataccccacttgcccatgatattgacattcccaggggtggacttgaagtaccacctctgca

SEQ ID NO: 52454 - DNA, 556 bp, Homo sapiens
gagcaagtctaactgcagcttgattttcttgtcagggatcttattcttctaaaatatagtcttcaatgagttcattgagggtttacctatactaactgattctgttgatgtgtgatcaccctacactgcagcaagctctgtgccaggaactgatgatataggtatgaacaaggcagccttgatgtcygctcccatggtatagcaggtgaagaaagcacacctaccttctgaatcataatgtatcttacctagattcgatttttagcattttgagcaattcaggttttatggttatgtgtggaagagttcccttcttaactgtgatgtctttaggattcctatgtatttcagtctaggttttctgaatgaagggaggtaaggtggttcttgtggatacacctgaaagtcagtgccattttttaatgactaatttacacaaactctattttttctctacaatgtcctctaaagaacaccacgtgatagtggtgatatggatatgtaccccagcccccatttgcaggaaagtaatgaaaacttgagttaaatatcttct

SEQ ID NO: 52455 - DNA, 556 bp, Homo sapiens
gagcaagtctaactgcagcttgattttcttgtcagggatcttattcttctaaaatatagtcttcaatgagttcattgagggtttacctatactaactgattctgttgatgtgtgatcaccctacactgcagcaagctctgtgccaggaactgatgatataggtatgaacaaggcagccttgatgtctgctcccatggtatagcaggtgargaaagcacacctaccttctgaatcataatgtatcttacctagattcgatttttagcattttgagcaattcaggttttatggttatgtgtggaagagttcccttcttaactgtgatgtctttaggattcctatgtatttcagtctaggttttctgaatgaagggaggtaaggtggttcttgtggatacacctgaaagtcagtgccattttttaatgactaatttacacaaactctattttttctctacaatgtcctctaaagaacaccacgtgatagtggtgatatggatatgtaccccagcccccatttgcaggaaagtaatgaaaacttgagttaaatatcttct

SEQ ID NO: 52456 - DNA, 520 bp, Homo sapiens
gggaatgaatgagtgaatgaacaaggatgaaaaatcatcccagccgggtgtggcggctcatgcctgtaaccccagcactttgggaggctgaggtgggaggatggcttgaggcgaaaagtctgagaccagcctaggcaacatagcaagaccccatgtcaacaaaaaggaaaaaaattagccaaggwtggtggtgtgtgcctatagtctcagctacttgggaggctgaggcaggaggactgcttgagcccaggaggtcgaggttgcactgagccatgattgcaccactgcactccagccggagtcacaaagcaaaacattgtctcagaaaaaaaaaaaaaaaaatcatttcagggatccagtggtccccatcttgtaattgaacttgaagaaataatctagcatgtagacaatactcacatgcagaaacgtttacctcaacctcacaacagggaaaagtggaaaaaacgtcagaaacagtgcctggcttttaagtgctacatccacacattgcaataaaaat

SEQ ID NO: 52457 - DNA, 516 bp, Homo sapiens
gcagacagagaggagtcggggatgaatgactccctgagcctctggggagggtggagctggctgcccttaaggctaagaaggctgtgggcagagcaggtttctgcgggagatgaggagtgggttgcggatgcattcaccctgagttgcctggcagtgtggacgtggagtttgggtttaccctcgtgttgacaggtacacgctcgcggtgcggttatcacgctgctgctggtgtcaccacgcgggcgctgcagggacggacctttcccatcgccaggctcttcggggactgctgcaatgccccgtgcagccgccagggagcgcccragccgcacccaggacgcgcggggaccgggtcatcccgcgggctacctgtgcggggcaggacgcttagccgcacccttggcctccgactactcggagtctgttgcattcctccttccccccgcgcgccgtgtgacagccaaaactgtccccagacattgccaggcgccccctggaggggaaagtcgcccccac

SEQ ID NO: 52458 - DNA, 516 bp, Homo sapiens
gcagacagagaggagtcggggatgaatgactccctgagcctctggggagggtggagctggctgcccttaaggctaagaaggctgtgggcagagcaggtttctgcgggagatgaggagtgggttgcggatgcattcaccctgagttgcctggcagtgtggacgtggagtttgggtttaccctcgtgttgacaggtacacgctcgcggtgcggttatcacgctgctgctggtgtcaccacgcgggcgctgcagggacggacctttcccatcgccaggctcttcggggactgctgcaatgccccgtgcagccgccagggagcgcccgagccgcacccaggacgcgcggggaccgggtcatcccgcgggctacctgtgcggggcaggacgcttagccgcacccttggcctccgactactcggagtctgttgcattcctccttccccccgcgcgccgtgtgacagccaaaactgtccccagacattgccaggcgccccctggaggggraagtcgcccccac

SEQ ID NO: 52459 - DNA, 615 bp, Homo sapiens
gttgcagtctgaccctgagatttttcatctgtaaaatgggtagatgtctgtgtgcatgtgtgcccactccataagtgatattgtgaaagaaaaataaatgtgatgtatgtgatatgcccggcatggtcacaatcaacttattgttccgtatcggttacagttctgtggttgcacacaacaaaaattagaactggcaaagttcagccaagaaacggggaggggaaatttattgccaggatgtggagtggctcacagactggagctttggctatgaacaagaatgagggcatgccggaaatgggaggtagcaggagctaatatrccgtgcaaccaggtccctcagcctgttttatcacctgcaggtttcttatcccgccacccccaccacatcactcccatcttgcatcactcaagggtcaacatcctcgtgtgagaatctgatgggccaagtttgggttacatggcagggtattttgattgacagttcctccaagactgcctgccatggggaggaagtaattccccagagagattgtttttgctttccccaggagaaagggtgacttagatgcttggtggtcaaagagtaacacatgtccactacagtaataatgt

SEQ ID NO: 52460 - DNA, 644 bp, Homo sapiens
ttccatcatttgcccagccttaataataattgtgcaaggccgggcgcggtggctcacgcctgtaatcccagcattttgggaggctgaggcgggcagatcacgaggtcaggagatcgagaccatcctggctaacayggtgaaaccccgtctctactaaaaatacaaaaaattagccgggtatggtggcgggcgcctgtagtcccagctactcgggaggctgagggaggagaatggcgtgaacccgggaggcagagcttgcagtgagccgagatcatgccactgcactccagcctggatgacagagcgagactccgtctcaaaaaaaaaaaaaaaaattaattgtgcgaacgccaccccctaccctcgcccagcaacacagcaacattgctgaggaaactgatgcactcccacattttaatgacccagtgttggaagaagtcaactaaatgagttaaaagtgtcccaaggtaggtggcccagtaagaccatcccaaagaaaggaacctgggcagaatccaaaataggctcaaaggagaagattttctctttagggggcttgtacgtgtgagtggacatagatatatacgctgcaaacgtgtaggggatatttaggagcactgtccctgctgctctagggcacctat

SEQ ID NO: 52461 - DNA, 644 bp, Homo sapiens
ttccatcatttgcccagccttaataataattgtgcaaggccgggcgcggtggctcacgcctgtaatcccagcattttgggaggctgaggcgggcagatcacgaggtcaggagatcgagaccatcctggctaacatggtgaaaccccgtctctactaaaaatacaaaaaattagccgggtatggtggcgggcgcctgtagtcccagctactcgggaggctgagggaggagaatggcrtgaacccgggaggcagagcttgcagtgagccgagatcatgccactgcactccagcctggatgacagagcgagactccgtctcaaaaaaaaaaaaaaaaattaattgtgcgaacgccaccccctaccctcgcccagcaacacagcaacattgctgaggaaactgatgcactcccacattttaatgacccagtgttggaagaagtcaactaaatgagttaaaagtgtcccaaggtaggtggcccagtaagaccatcccaaagaaaggaacctgggcagaatccaaaataggctcaaaggagaagattttctctttagggggcttgtacgtgtgagtggacatagatatatacgctgcaaacgtgtaggggatatttaggagcactgtccctgctgctctagggcacctat

SEQ ID NO: 52462 - DNA, 542 bp, Homo sapiens
acagaataccattaaacaataactctaccattggaaagaaaagtaatgtttgaaatgactttgtataattttttctagtctgtgtctctcatggtggtgactattgacttgagcatacatactgaatgcaaggccagacgattggggttccagtcctggatgtgccacttattaccccgactcagttttcttctataagaaatggggattaaatgatctaccttcattttggcttaccaatgaatttcttgcawcagtacctggaatatagcaagtcctcaacaagtatttgatgaagaaataaatgagatgatacctcacaggcagttacataaaagtgcttgatatgtgtgaagttctgagtagatttgaggaatggtaactgtaattctctaggctctgagaattacacctccacccccatttatagaaagaagctgcctttttaagttgcttaacgctgtacatttgtgtaatttatctattaatagttcatttgggttgattttacactagtccttgctacactttaataggggtca

SEQ ID NO: 52463 - DNA, 532 bp, Homo sapiens
tcccttcccacttcagtttattcaatatagagraatttcaggaaacatttctgattggcccagcttggattattatttgaacatcttgcaccaatcactatatccagggggttggagtatgatttggggccactttccctgaaggtgttggatactgtgaatttcagccctaccagaattacttagaatggttgatgaggaaagaaccatttcccatggtaagggatgcgaaacagaccaaaacagtggcctgttacccaccaccccgccaccccaaccccaagcctcagttcctcatctgcaatgggaaaggtgcttgttactatttatggagtacttcctgtgttctgatgttccaaacactttccatgggttagcccatttaatcttggatatgatacaagataacaacgtgcccctgagacagcttctgttattagcccccttttacagaggtggtcactgaggcaccaagcagttgaggtaacctgctggggcaggatggggggtgatgtcccatgatgggtggagt

SEQ ID NO: 52464 - DNA, 509 bp, Homo sapiens
aaaattgctcatctcagataatgacttccagtaaagaaatatgattaaacaaattcaccaaagattggccaaaagctacctgaatgtaaagattttagaagtcctggccagggtttatctgcttgtaaaaggaagctttgtagcaggaagggttttatcccctgagctgaaacatgggtagggatagccgggccctctcacctaagctgaaccttggcccattgggcaggccttggaaagcaggtgctgtctcctttgcttacacagtttgtgggacatgaccctggcagggccattccccatcagggtgctccacttcttgcttcacagtgagtactggggacccctgggggacttggggtgagccctgagtggagggtggggcacagcctccccacccctggccagccctttrcagggttcagagctccacgggcataaactcaggggcttccgccacaatttgaagacgctcctgaggaagaatgttaggcacaggaatgttttgc

SEQ ID NO: 52465 - DNA, 536 bp, Homo sapiens
ggccaccaggaaagccctttaatgaggacttttaggtctcctgatgaaaactataaagggactttctcctggtgggtcccaggatgccaggattaaaactgctaatgattgctgggcacggcggctcacacctgtaatcctagcactttgggaggctgaggcaggcggatcattagagatcaggagttcgaaaccagcctggccaacatggtgaaacctcgtctctactaaaaatacaaaaaattagctgagtgtggtggcaggcgcctgtaatcccagctacttgggaggctgaggcgggagaatcacttgaacctgggaggtggaggttgcagtgggccgagatcrtgccattgcactccagcctgggcgacagagagagactacatctcaaaaaagcaaaaacagcaacaacaaaaaactgttaatgatgaggggacacaggtcatctccaatcagtaaaggcaggacaagttgggcactgcttgatcagaggctttaaatgcaaatctgagagggctgctcaacggcatagg

SEQ ID NO: 52466 - DNA, 585 bp, Homo sapiens
ggtggcaggggagtcctttccacagagtgcagtagaaaagcaaccaaacctggcccagcatgatggctcatgcttgtaatcccagcactttgggaggcaaggctggtagattactggaggtcaggagttcaagaccagcctggccaacatggtgaaaccccaactctactaaaaatacaaaattagctgggggtggtggcttgtgcctgtaatcccagctactcgggrggctgaggcaggagaattgcttgaagccgggaggcagaggttgcagtgagctgagattgtgccattgcactccagcctgggcaaaaagagcaaaactccatctcaacagaaaaaaaaaaaaaaaaaggaaaagcaaccaaacctgcaagaactagttagaggctccactccagcacttaacttgcctaagcccccacttccccatataaaacagaggccaataacattaggcttacagtgtcttattaagtgagatgacatttaagaaagtatcatgtaaactgtaaagttctgcatagagcaggacttattattattaggtgccgaacgacccaagtatggcttcaggaggttcaa

SEQ ID NO: 52467 - DNA, 585 bp, Homo sapiens
ggtggcaggggagtcctttccacagagtgcagtagaaaagcaaccaaacctggcccagcatgatggctcatgcttgtaatcccagcactttgggaggcaaggctggtagattactggaggtcaggagttcaagaccagcctggccaacatggtgaaaccccaactctactaaaaatacaaaattagctgggggtggtggcttgtgcctgtaatcccagctactcgggaggctgaggcaggagaattgcttgaagccgggaggcagaggttgcagtgagcygagattgtgccattgcactccagcctgggcaaaaagagcaaaactccatctcaacagaaaaaaaaaaaaaaaaaggaaaagcaaccaaacctgcaagaactagttagaggctccactccagcacttaacttgcctaagcccccacttccccatataaaacagaggccaataacattaggcttacagtgtcttattaagtgagatgacatttaagaaagtatcatgtaaactgtaaagttctgcatagagcaggacttattattattaggtgccgaacgacccaagtatggcttcaggaggttcaa

SEQ ID NO: 52468 - DNA, 598 bp, Homo sapiens
caagttatcccgtagaacttcaagttaatcttaaaaaagggctttgtcccatttgcttatatttttgaagatatgaaaacactataaacacatgttataaagggttactgagggtagtatgacctttttaaaaggaaatggttaaaatccatacaccatacaccatacaccatacatcgtccacaaaaatttctaagtgagacttaaaatcttcagtctaaagaaaatgatttaaatacatctattatttttaccattaccacttacaaatmatgtgtttacagagaaattctatctacagcagaccctaactttatcacacagaaaaataactttatactaggacactggtgaacatatacatcatacccataattctgtccttaggaaaatctattggcatgttacaaagactgtccacaattttctttggacaaatattgatagcctcattcattttgcattttaatagctatttatttttgtgtataaagtttccaaacttttgcataaatcctcgaaacttgttctcattgggttgatatgagcgataaacaccagtgttgtaattaagcaatggactagacctgccataact

SEQ ID NO: 52469 - DNA, 536 bp, Homo sapiens
tggatttttcctcccacaaatgtcgcatatctttccttccaccctcaggaatgctgcagaagcctcctagacagcttccgaaccgccagacacgtgagcacctgatcagtcttcccagcacacacctcctgtcatctccgtggctctccaatgcccagactcaaatccaaactatttggtcatgcagtcaagatcctccaggacagaattccaactttcagttccaggaatatccctactccctgagacgtaccccccatgctcctgttagaaatcttctgtgatatttaatatactcttccctgtagtcctgccacttatgcactcacctcatgtcctctatgcatttaaatgctcagtcccttgtgaaatatgtattgagtatctactccttgaggacaggggctgagatctatacatcagtatgtcaccccagaacctcgctagcacctggcacttgctacatacccataaaacacataytgaatatcactgaccaccccagatcaccctccaggctgcttgctaccctcaga

SEQ ID NO: 52470 - DNA, 1529 bp, Homo sapiens
aaaatacaaaaaagttagccgggcrtgtgacacgcgcctgtaatcccagctacttgggaggctgaggcaggagaattgcttgaacccaggaggcagagagatctcgccactccactccagcctgggtgacagagtgagactgtctcacaaaaaaaaaaaaaaaaaaaaaaaaaaaaaagaactaggggattatgctccagtcccagattctgtttaaagcccggttaggggccaggcgcggttgctcacacctgtaatcccaacactttggaacgctgaggcaggtggatcacttgaggccaggagtttgagcccagcctggccaaatggcaaaaccttgtctgtactaaaaatacaaaaattagctggactttatggcacatgcctgtaatcccagctacccgggtggctgagacaggagaattgcatgagcctgaggggtggaggttgcagcgatccaagatcgcgccactgcactccagcctgagcaacagaatgagactctccaaaaaagaaaaaaaaaagtccaagttagggccagacacaatggctcacacctgtaatcccaacactttgggaggctgagatgggaggattgcttaagcccagaaattccataccagcttagccaacatggcaagaccctgtctctacaaaaattagctggacatgatggtgtgcacctatagtcccagctacttgggaggctgagtcaggatgatcgcctgagcccaggagttaaaggctgcagtgagccatgatctccagcctgggcaataaagctagaccatgtgtctataaaaataaaaaataaaggccgggcaaggtggcctgtacctataatcccagcactttgggaggccaaggcaggcggatcacctgaggtcaggagttcaagaccagcctggccaacatggtgaaaccccgtctctactaaaaatataaaaattagctcggcgtggtggcaggcacctgtagtcccagctactcaggaggctgaggcagaagaatcacttgaagtcgggaggtggaggttgcagtgagccgagatcgcgccattgtactccagcctgggggacaagagtgagaccccatctcaaaataaataaataaataaatattttaaaaaataaatgaaaaataaaagtgtccaaattagaagtaaaaacttgaagtagccccattttttaaaaggcatattgtcccacttaccctactatctgcctcaggcacagcagccacccactctggaaaatagttttgtcagttgcttaaaaaaaactaaacttgtagctaccatacagcccaacaattacacacctgggtgtttatcctgagaaatgaagatgtaacgttcacacagaaatttgtccacaaatgttcatctcagctttattcatgtcaccaaaaattagaacacccccaatgtccctcagtagttacatggttaagcaaattgtggtacatgataccttggagtgctactcagctataacaagaaaaaagctattgctgtacacagcaacttg

SEQ ID NO: 52471 - DNA, 1529 bp, Homo sapiens
aaaatacaaaaaagttagccgggcgtgtgacacgcgcctgtaatcccagctacttgggaggctgaggcaggagaattgcttgaacccaggaggcagagagatctcgccactccactccagcctgggtgacagagtgagactgtctcacaaaaaaaaaaaaaaaaaaaaaaaaaaaaaagaactaggggattatrctccagtcccagattctgtttaaagcccggttaggggccaggcgcggttgctcacacctgtaatcccaacactttggaacgctgaggcaggtggatcacttgaggccaggagtttgagcccagcctggccaaatggcaaaaccttgtctgtactaaaaatacaaaaattagctggactttatggcacatgcctgtaatcccagctacccgggtggctgagacaggagaattgcatgagcctgaggggtggaggttgcagcgatccaagatcgcgccactgcactccagcctgagcaacagaatgagactctccaaaaaagaaaaaaaaaagtccaagttagggccagacacaatggctcacacctgtaatcccaacactttgggaggctgagatgggaggattgcttaagcccagaaattccataccagcttagccaacatggcaagaccctgtctctacaaaaattagctggacatgatggtgtgcacctatagtcccagctacttgggaggctgagtcaggatgatcgcctgagcccaggagttaaaggctgcagtgagccatgatctccagcctgggcaataaagctagaccatgtgtctataaaaataaaaaataaaggccgggcaaggtggcctgtacctataatcccagcactttgggaggccaaggcaggcggatcacctgaggtcaggagttcaagaccagcctggccaacatggtgaaaccccgtctctactaaaaatataaaaattagctcggcgtggtggcaggcacctgtagtcccagctactcaggaggctgaggcagaagaatcacttgaagtcgggaggtggaggttgcagtgagccgagatcgcgccattgtactccagcctgggggacaagagtgagaccccatctcaaaataaataaataaataaatattttaaaaaataaatgaaaaataaaagtgtccaaattagaagtaaaaacttgaagtagccccattttttaaaaggcatattgtcccacttaccctactatctgcctcaggcacagcagccacccactctggaaaatagttttgtcagttgcttaaaaaaaactaaacttgtagctaccatacagcccaacaattacacacctgggtgtttatcctgagaaatgaagatgtaacgttcacacagaaatttgtccacaaatgttcatctcagctttattcatgtcaccaaaaattagaacacccccaatgtccctcagtagttacatggttaagcaaattgtggtacatgataccttggagtgctactcagctataacaagaaaaaagctattgctgtacacagcaacttg

SEQ ID NO: 52472 - DNA, 1567 bp, Homo sapiens
tcaaccttttcaagtctttttttcttcctgtaaaatacctaactcacagcttgctgagagaattaaaaagatcaaatgtatgttgtaccttcaataatatttggcacatagcaattattgaatgaatagaagacataactgctgagatgatattatacaccagggggtatggggtataggagacatactcaccagtaacaaacacctgagtgccccgacctgattggtactccttgatagctcttccttttatgaacttcacgcagtaataggtgccagcatcagcaagagagatttcacggatgcgggtggaaaagtctgtgttgccaggcttggtggtgtctccaatctcttttactctgggaaagttaccttgtttgaaattgtagattaatttccggtttggccctgttcccttgaaccacaagacaggtccatttggtaaggtatygggtacgctgcaactcaagatgattgactccccagttgatacagtctgtgacatctccgtttgttgcacatggaacacatgtgtgactcctggaaaaaagctgaaaatcatttctcatttcccctgttctggcttaagcatgggtacgggtcacggttgggcctcattcattaattcttttaatgacatgcgcaaatgcccatgcattgagtaaagagaggcctttgcacatggaggcagcttctccctagagtgctgaaggaagggagttagtccagaagaccagatgtattcctcctcagttccattcctcagccctcaaccgtggtaagaggaggacagggagagagaaggggcaattatcaatgggtaatgttcttggagaaagactagtttccctatccatctaattgcctagagtcactcggtacatttggaactgggttcaagtcctgtccttcaaccctacatctccactgagtttggggttggccttcctctctcctctgaagggtgattagcctctgaatttgtacagaaattcatgctgagagatgcacagaagaagttaaaacaattaaagaatgaggtggtcttggcaacagcatatggttccactacttatctcttcaagagagagaagggagagggtttcctctcctcaacaaaaagagattagaacctcaagggccctctacaattttggaggttctcaccagccaccctttaccctcctacacagtcatcatcactaccctacaatgtgtcaggtcctggtaataatctctcctattaagcttggttgtcaaaaccacagactgcctaaggagcaggttagagagaaagggaactcctggctggcagggccaggaggtaatggtaggaaggcagcctgcattgacattatgtaacttaagggaaacctgtggattttccattgccattttggcattatggaatgtgtctggattcaagggaaacattactgggaaggtcagttctcctggtagaactgagggacacctaataccactgtatttcatgacgttaattcagagggtggtgaggagaaggaaatactggttatcctgggaataaaaatactgggaattaaag

SEQ ID NO: 52473 - DNA, 570 bp, Homo sapiens
gttgatagaacaccagaccaattttatttggactaaacacagtcaatcaaataaaattacaattaccttagattactttgttataaaaacgtttttcttttaagggcttaagttgaaaatgttcagtggaagcaaacattctagcaatcccatcaaatgatccgtttcagaactccaggatgcatcccattaaaaagaatgatttaaacaggtgcagtagttgtgtacatagtgcataggaagtgtgtcagtaagccacattaccctaaagcgagaatttattttwggaaaaaaacaggattaaagtagatcaaagtaaagccaataaacatcatatgccatgtgcatagtacacaggtaaagactaaaccttcaaaataatttgagttatattcatttggggatgttgttttggtccctgacaggttcatctgtgaattatgctgacttgggaaattttccaaatgcagtcaacccacagatttctttgcctttcaaaatataggtcccgtaagaagatgggaacccaaatagaaactactaacaaaccattcatcttatagctaaata

SEQ ID NO: 52474 - DNA, 596 bp, Homo sapiens
ttctaaattatgttaataataaaccaggcatgggctaaatgagttatattttatctaatttaaccatyttaacaaatccatgaagtcagtattatactccatttcacaggtgaggaaaccaagataaaggaggttgcccaagatcaaatcgctacatacacagccaagtaagattcgaacctgactacaaagcccattttcttagtcactcttctgcaaattttaagaccctactattgagaatagcaatgataagggaaaaaattgaattaggaataaagaagaatggtaatgtggaaggcaggcttggattatcaaggtttgacaatatagccttgagggccatatgagttaagttcagtcttagaagcctctttcacatataaagaaaggtgtaggctaagatatgtgaaggagctgaaaacacaaacttgatcatgaaggtaatacacagagcaatgaacagatggtcctgggtagtgggaacctcctaagccacactaaatgattccaataagcataactccaattgtttatatattagccatctggattgctatgcacattatagccagaaaagaaagcaaacaatgtga

SEQ ID NO: 52475 - DNA, 553 bp, Homo sapiens
ccatccaatatcatttggtgtgcttttaaagcaatcatttgctttttgttttttaatgcaagacaattccaggctcagatttatttctaagaacaattttggaataatttttactcagttcttctgacggaaagttggctacagcccattgtgcaagactatataccatcttgagttggaaaactgtgaagaaaagttcaaagtgagatcggaaaattataggtcttttatatatgttcctacttcttatatagctggtatagactgataaatttcctttcttttcctgcaaaactattaactaatttttctaaacatttaatggaaagccagaaaagcaggacattgtactaagaaacatatcataagtcaaaacaggcatacgtttcctrtaggattatctgataaatcaggattttatgttgctccttggaccaatgagaaacatcactccacaacttaatttccaagtagcaactcagaaaataaacatttaaattactttgcaaacagcaaggtccaggttatttcatgtaatcattatactaccaca

SEQ ID NO: 52476 - DNA, 553 bp, Homo sapiens
ccatccaatatcatttggtgtgcttttaaagcaatcatttgctttttgttttttaatgcaagacaattccaggctcagatttatttctaagaacaattttggaataatttttactcagttcttctgacggaaagttggctacagcccattgtgcaagactatataccatcttgagttggaaaactgtgaagaaaagttcaaagtgagatcggaaaattataggtcttttatatatgttcctacttcttatatagctggtatagactgataaatttcctttcttttcctgcaaaactattaactaatttttctaaacatttaatggaaagccagaaaagcaggacattgtactaagaaacatatcataagtcaaaacaggcatacgtttcctgtaggattatctgataaatcaggattttatgttgctccttggaccaatgagaaacatcactccacaacttaatttccaagtagcaactcagaaaatraacatttaaattactttgcaaacagcaaggtccaggttatttcatgtaatcattatactaccaca

SEQ ID NO: 52477 - DNA, 542 bp, Homo sapiens
gtcaattcattttgcagtgttctctaaaacagccaccagtaaactgttgaacaaaactacagaattcctttaatattgtatatcttctgattttgtgggtctgatgtaaatgtccatacaaagttaaagaccagtattaaataatttctaattatcatgcagagttaataggaaacagagttcagtttaagaaaacgaatgctaaattcaaattatcaaacaaaacaagcaattagggtcaggatttctatccatcaaggccaggaatttagaggtcaggctctggggtacatcagaattaaaggcgggggcacaggatatcagaagcaagagccaagcctaggtcaagagcagtgcaagaaggasccctgaggatccacagcataatatgccccccaagcaggtcaccacaatggaggcattaaataactagtttttcacgactaattcggcctaaaatataatctgcacatatatagtcttttatttccatataggaattttaaagtattactgccttaggaaataaaaagataggtttg

SEQ ID NO: 52478 - DNA, 542 bp, Homo sapiens
gtcaattcattttgcagtgttctctaaaacagccaccagtaaactgttgaacaaaactacagaattcctttaatattgtatatcttctgattttgtgggtctgatgtaaatgtccatacaaagttaaagaccagtattaaataatttctaattatcatgcagagttaataggaaacagagttcagtttaagaaaacgaatgctaaattcaaattatcaaacaaaacaagcaattagggtcaggatttctatccatcaaggccaggaatttagaggtcaggctctggggtacatcagaattaaaggcgggggcacaggatatcagaagcaagagccaagcctaggtcaagagcagtgcaagaaggagccctgaggatccacagcakaatatgccccccaagcaggtcaccacaatggaggcattaaataactagtttttcacgactaattcggcctaaaatataatctgcacatatatagtcttttatttccatataggaattttaaagtattactgccttaggaaataaaaagataggtttg

SEQ ID NO: 52479 - DNA, 581 bp, Homo sapiens
cacaggacacacaaaagccagactgccacctggagtggatgctttgccagcctattatctgctagctttttatgtccatccttattagtagtttttctccatgactttcaagctcagctgctccagctttggtctctggaaccttccccctcagggctaggccatccatarctgcctcaatagagcctgtgagccctctccagtcagagaagaggagccccatggtctttggggcagagtgtaggtcagaggctgtcaagtgagccttctgaagcaaggattcagagattcagagaactataggtgaggggaggagagaataaaggacaggtgaagagaccaatttctgttatgtaaggcattactctgggccagtccttgccatttacctaattagcccatttttttaagggaggaatcagaggtcagaggccagagaggtaacttgtctggctcaagatcacagacccagcaaatggtggataaaatgctcatgggtggctatgtacctcccaaggttgtttccaaatttagcatttctccttggtgccttcagggtcaggtttggtgtctggctttca

SEQ ID NO: 52480 - DNA, 1100 bp, Homo sapiens
tgcaaatttcaagtagcaatatttgagagatgaagtctgagtttacgccctaggatcttggctgtggttggctgctgttgattctggcacatggcctctggaagaggctcagtaaaatgaacaaagcaaagttttctaaaatgactgcctgcattattaccaaaaataggagaattgagggcagacaaagagacatcagggatttgcaataattctcatagcgccctgcaatttcaaacaaaactttctctaaattttgtattccattttttgggaycaagccatgaaaaaaaaatccaaacaaacagaagaagtgcggaagcttcaaatcccaagtggtacatttaaataaaaacgaagcggagaaacatgtcttcctccttgaaatttgtcttgattaaaaggaaaaaaaaaaaccaaaaaaaagcaataagagataaatcgattttgttttcctaatagtgttccaaggatttatgtgctctttacagatattatcatatagaaagtgtgttttctacctaagagatgctagtatcagatccagatattaagaactgggctatagggtcatagcaaattattactgcttttcaaaaactgaaaatataccttaagaaaatataatcaacgataacaacttataaatgaatattttttgtattactaacagacttttcatactataaaaaaatcattccagttagctgataaatctagaataatttttggttttaaaaactccaattttgttctattttataatattgaactcattgcaaaaaaaattcatcagtgtttgctgtgctatattgaaatctactatacactgtgtagtttttccttttatttttctcttattaaagacttcagaaaaaaattcaatttatgcatgggttaaatttcaatacctggatcttggagatgagactaatgcattcagctcttctacatgaaatataaggtttgaaaaatccacaaatacttacaaattaggatgtagccaatttgctaataatgatcacctctatacccatgtacattcttttacctgaaaaatattttacctccttttcctttttctctatcttgctaaattc

SEQ ID NO: 52481 - DNA, 1100 bp, Homo sapiens
tgcaaatttcaagtagcaatatttgagagatgaagtctgagtttacgccctaggatcttggctgtggttggctgctgttgattctggcacatggcctctggaagaggctcagtaaaatgaacaaagcaaagttttctaaaatgactgcctgcattattaccaaaaataggagaattgagggcagacaaagagacatcagggatttgcaataattctcatagcgccctgcaatttcaaacaaaactttctctaaattttgtattccattttttgggatcaagccatgaaaaaaaaatccaaacaaacagaagaagtgcggaagcttcaaatcccaagtggtacatttaaataaaaacgaagcggagaaacatgtcttcctccttgaaatttgtcttgattaaaaggaaaaaaaaaamccaaaaaaaagcaataagagataaatcgattttgttttcctaatagtgttccaaggatttatgtgctctttacagatattatcatatagaaagtgtgttttctacctaagagatgctagtatcagatccagatattaagaactgggctatagggtcatagcaaattattactgcttttcaaaaactgaaaatataccttaagaaaatataatcaacgataacaacttataaatgaatattttttgtattactaacagacttttcatactataaaaaaatcattccagttagctgataaatctagaataatttttggttttaaaaactccaattttgttctattttataatattgaactcattgcaaaaaaaattcatcagtgtttgctgtgctatattgaaatctactatacactgtgtagtttttccttttatttttctcttattaaagacttcagaaaaaaattcaatttatgcatgggttaaatttcaatacctggatcttggagatgagactaatgcattcagctcttctacatgaaatataaggtttgaaaaatccacaaatacttacaaattaggatgtagccaatttgctaataatgatcacctctatacccatgtacattcttttacctgaaaaatattttacctccttttcctttttctctatcttgctaaattc

SEQ ID NO: 52482 - DNA, 1100 bp, Homo sapiens
tgcaaatttcaagtagcaatatttgagagatgaagtctgagtttacgccctaggatcttggctgtggttggctgctgttgattctggcacatggcctctggaagaggctcagtaaaatgaacaaagcaaagttttctaaaatgactgcctgcattattaccaaaaataggagaattgagggcagacaaagagacatcagggatttgcaataattctcatagcgccctgcaatttcaaacaaaactttctctaaattttgtattccattttttgggatcaagccatgaaaaaaaaatccaaacaaacagaagaagtgcggaagcttcaaatcccaagtggtacatttaaataaaaacgaagcggagaaacatgtcttcctccttgaaatttgtcttgattaaaaggaaaaaaaaaaaccaaaaaaaagcaataagagataaatcgattttgttttcctaatagtgttccaaggatttatgtgctctttacagatattatcatatagaaagtgtgttttctacctaagagatgctagtatcagatccagatattaagaactgggctatagggtcatagcaaattattactgcttttcaaaaactgaaaatataccttaagaaaatataatcaacgataacaacttataaatgaatattttttgtattactaayagacttttcatactataaaaaaatcattccagttagctgataaatctagaataatttttggttttaaaaactccaattttgttctattttataatattgaactcattgcaaaaaaaattcatcagtgtttgctgtgctatattgaaatctactatacactgtgtagtttttccttttatttttctcttattaaagacttcagaaaaaaattcaatttatgcatgggttaaatttcaatacctggatcttggagatgagactaatgcattcagctcttctacatgaaatataaggtttgaaaaatccacaaatacttacaaattaggatgtagccaatttgctaataatgatcacctctatacccatgtacattcttttacctgaaaaatattttacctccttttcctttttctctatcttgctaaattc

SEQ ID NO: 52483 - DNA, 1100 bp, Homo sapiens
tgcaaatttcaagtagcaatatttgagagatgaagtctgagtttacgccctaggatcttggctgtggttggctgctgttgattctggcacatggcctctggaagaggctcagtaaaatgaacaaagcaaagttttctaaaatgactgcctgcattattaccaaaaataggagaattgagggcagacaaagagacatcagggatttgcaataattctcatagcgccctgcaatttcaaacaaaactttctctaaattttgtattccattttttgggatcaagccatgaaaaaaaaatccaaacaaacagaagaagtgcggaagcttcaaatcccaagtggtacatttaaataaaaacgaagcggagaaacatgtcttcctccttgaaatttgtcttgattaaaaggaaaaaaaaaaaccaaaaaaaagcaataagagataaatcgattttgttttcctaatagtgttccaaggatttatgtgctctttacagatattatcatatagaaagtgtgttttctacctaagagatgctagtatcagatccagatattaagaactgggctatagggtcatagcaaattattactgcttttcaaaaactgaaaatataccttaagaaaatataatcaacgataacaacttataaatgaatattttttgtattactaacagacttttcatactataaaaaaatcattccagttagctgataaatctagaataatttttggttttaaaaaytccaattttgttctattttataatattgaactcattgcaaaaaaaattcatcagtgtttgctgtgctatattgaaatctactatacactgtgtagtttttccttttatttttctcttattaaagacttcagaaaaaaattcaatttatgcatgggttaaatttcaatacctggatcttggagatgagactaatgcattcagctcttctacatgaaatataaggtttgaaaaatccacaaatacttacaaattaggatgtagccaatttgctaataatgatcacctctatacccatgtacattcttttacctgaaaaatattttacctccttttcctttttctctatcttgctaaattc

SEQ ID NO: 52484 - DNA, 393 bp, Homo sapiens
gtgcctattagataccaaggcatcatgccaggtacaggggtagggtatgggcattagaataaacacataaatgaaaatacacgattccttcctcatgtacgcattaacaataagcacttgaggatgttataagagtttttgtgcacataagcgcatttgtacacgagatggaagcaatgtggacagtgaatgaggcactggacaccagaagaaaggaattctagtctcaactctaattggctctgtgaccatgaacaatgaacatcagaaaatggaggacsaaaacagtggctctcctacaaggtcaccaaaccaattaataacagacctggagaagaattctggtcttctggctcctagttcagtgatctgtccaaaatactacacatatgg

SEQ ID NO: 52485 - DNA, 393 bp, Homo sapiens
gtgcctattagataccaaggcatcatgccaggtacaggggtagggtatgggcattagaataaacacataaatgaaaatacacgattccttcctcatgtacgcattaacaataagcacttgaggatgttataagagtttttgtgcacataagcgcatttgtacacgagatggaagcaatgtggacagtgaatgaggcactggacaccagaagaaaggaattctagtctcaactctaattggctctgtgaccatgaacaatgaacatcagaaaatggaggaccraaacagtggctctcctacaaggtcaccaaaccaattaataacagacctggagaagaattctggtcttctggctcctagttcagtgatctgtccaaaatactacacatatgg

SEQ ID NO: 52486 - DNA, 559 bp, Homo sapiens
tcaaacttattacacagagaacaataaaggaatttctcatttctgagaattcattctatctcaggagtctgattttcagttatcatcaaagagctgttaccggaaaggtgattataatgaagtttgacattggcaaattcgaatattgtacaacttaccgcattaggaaaagtcatggctttctagttgcctaacaaaamtgtagactattggagagtataagcagagaccaactctcaattcacaaacatgtcacataaccctgagaaagttattgtgtttctcagaagagtaaaatatgttccttctagggaaatgtcccagggcaggaatatctgagagctaagacatgtcctctagcttttcagcatccacaaaacatctttcttcttccagctgggcaaaaaagtgtaatctcttcttagaaacataaaaagttaaaaaaatatgtgatacagcttatctagtctttcacatcttcaaaaatccctggaaatataacagacctatgaacaaattttacctaaatgtttcaaagtacttcaggaataagaatcac

SEQ ID NO: 52487 - DNA, 623 bp, Homo sapiens
gatgcccagtacactgccctgtccccttggcatgggaagctcataccaagaacatcaactttggcacacacacacrgccccctccctatgacaaaattggatagcacatgctccagggttgtcttcgtaaaagacgtgtgtccctgtgagatggagtaacactgacaacaggaactgaagtgtttccatcaacttctaatttccatttcccctcctcccgctctctcccctctacaagagtctatagtctcctggtgatgaacaacaacaacaacattcctcaaagaaacctttgtttaactctcaacacatctgttcttcatttataggaataatggctaacaacattagagagtttacatctatgtccagtactgtgcacttttataaatgattgttcattatttgtagaatccctgtaatgctggtgctaagtaaaggtgacactttaagttcaccacaatgtctgctctgagagcagaaaataatgtcttcaaggccacatgtagatccttcatccgcagtgcacttaccctggtgtggtgctttctttaagaaacactctgattggccaaagaaatgcacagtccacagttcagctctaggagctttgtagtatggat

SEQ ID NO: 52488 - DNA, 598 bp, Homo sapiens
agaagacaggtgcaagatgagtaggactttaaggtgaagataagagggttgagagacactaagaaaaaccattcctggcagaaggttttgtacatgcagaagctttgtggctggagggaacactgtgaatttgaaggaaccgaagtgaccggagcagagacaaaggagaaaggtgcagatgcggagaaggcggaacatgtggtcttatcscaaaagcaagggaaaggaatggggaggacatcgagaacagggaaagaaggtgatggagctgaaattgctggcctgttcactgcacaatcttagacaagatctgtctttacctttatcagtgtgtgggtttccgtttattcataatggggatgaaaatgattcagctggcaagataaaccctgcgagaacacccaccacgttagcctgagctcctccagggcaagcatcctttttttttttccctctgtcctcggtaccaccaagagaaagctggaaacaaggtggcctcagcgtgatttcctccagttaaatctgaccagctctatcttggctccttcctggcttcctttaccctccctgccaacccttaattttgttttggttccca

SEQ ID NO: 52489 - DNA, 624 bp, Homo sapiens
gagaccacaccaggccctgaagtctcagagataactatgatcctgcttccagcactataaagggcactggtagggattatctacccagttcaaagatcctacagtctctttagggctgtcttgtaagtgacttggataccagaggtaccaagctcggtgtccctatggtgccatagcctgggatgtggtccgccctaactctgttttctccttgacccacagtccctgctttgataaccacaggcagctacgggaaagagtgggaaaagtgagatagtcccaagaaacaggcaacagcagggtaagtgaaaatcaatcaacctaaagtcaaactaaaatttgtgaacatgtttccttgaactaagtttcttttttttctttttctttttttttttctggagatggagtcttgctctrttgcccaggctggagctcagtggtgtgatctcagctcactgcaacatccgccacccgggttcaagccattcttgtgcctcagcctcctgagtagctgggattacaggcacacaccaccacgccaggctaatttttgtatttttagtagagacggggtttcatcatgttggccagactgatctcgaactcctgacctcaggtgatctg

SEQ ID NO: 52490 - DNA, 597 bp, Homo sapiens
atcggtgcacaattccaggtgcagggtaagcgtatggcctcctcgggagctggggatggtccccaacctttccaaagagcaccgtgtgggagggggagggaaagtgactctgcagaggagacacctgagggacayacctgagccaggcgacgagggtcaagcccattgtgctgggccctgcggatggtctgggccctcgcacagtgtggtgagaacagcctcacctctgatgtcctgctgctgagaatacctaaccccaggctactcatgagaaaaccatcgcactagttttaatatagggacaacctactcaacccctggccagcacgccgctacactgcccagcgtccaggtcatcaaaaacaaggaaaccctgagaaactgtcccagccaaatgccatgtgggaaccttggcgggatcctggggcaggaaagaaaatgacatctgggaggcactgaaggtgccaaaaaggccgggcacggtggctcccgcctgtaataccaacactttgggagacggaggcaggtggatcaattgaggccaggaattccagaccagcctggccaacatggtgaaaacctgtctttaccaaaaat

SEQ ID NO: 52491 - DNA, 1255 bp, Homo sapiens
gaagtcactttctgcttttattatatagtgctaaatagaaaacatatcatctstaaaacttagcagcataaaacaacaataattatttggcttgccaacatgcagttttgaaagatctatatgggagagacttgtttctatcccaggcatcctcaactgaggctcagttgaaaactgatggatttgcttttatgatggctcactcacacgggcagcagtcagtagggtggtcatcaggctgagggctaaacgacttgattgctcttcatgtgaaacttccctttggctttgatttcctcacagcatggtgactggattccaagggaaactgtatcaagaaaaacagcaccaaaaaaagtcatgtcacctttcctgaccagtgatgcagcttccattctaccacattccattcatcaaggtaggcacaaagctctgctgagattcagtgggcaggaaaataaccctcactgtcattgcctagggccttagcaaagttctaaaagaacatttaagaagacagacattcttgcagccatttttggaaaatacaatccactacacattcttcatagtaatgtaagcttagtttttgttttattttgcccttatatctagattgatattcatattaatttacccatataagtattcatcatgttctggtttgcctaacatatcatttttaagccccttaactgccaactattttgaaaaatcaaatctgagatatctatcacatacaagtgtaatccaattacagtttccaataatttcccgtatataagcaacataggaaattttaagtgtagttctagcccactgcaataaagcaaatatcataataaaatgagtcacacaaattttttggcttctcagtacataaaaaagttatgtttacactatagtgtagtctatcttgtgcaataatatgttttcaaaactatatgtgttagtatgttttcatgctgctgataaagacatacctgagactgggcaatttataaagaaaaattgactcacagttccacatagctggggaggcctcacaatcatggtggaaggcaaaaagcacatcttacattgcggcagacaagagagaatttgtgcagagaatctcccccttgtaaaaccatcagatctcatgagacttattcactatcatgagaacagcatgggaaagacttgcccccatgattcaattacctcccaccaggtccctcccacaaaacacaggaattgtgggagctacagttca

SEQ ID NO: 52492 - DNA, 1255 bp, Homo sapiens
gaagtcactttctgcttttattatatagtgctaaatagaaaacatatcatctgtaaaacttagcagcataaaacaacaataattatttggcttgccaacatgcagttttgaaagatctatatgggagagacttgtttctatcccaggcatcctcaactgaggctcagttgaaaactgatggatttgcttttatgatggctcactcacacgggcagcagtcagtagggtggtcatcaggctgagggctaaacgacttgattgctcttcatgtgaaacttccctttggctttgatttcctcacagcatggtgactggattccaagggaaactgtatcaagaaaaacagcaccaaaaaaagtcatgtcacctttcctgaccagtgatgcagcttccattctaccacattccattcatcaaggtaggcacaaagctctgctgagattcagtgggcaggaaaataaccctcaytgtcattgcctagggccttagcaaagttctaaaagaacatttaagaagacagacattcttgcagccatttttggaaaatacaatccactacacattcttcatagtaatgtaagcttagtttttgttttattttgcccttatatctagattgatattcatattaatttacccatataagtattcatcatgttctggtttgcctaacatatcatttttaagccccttaactgccaactattttgaaaaatcaaatctgagatatctatcacatacaagtgtaatccaattacagtttccaataatttcccgtatataagcaacataggaaattttaagtgtagttctagcccactgcaataaagcaaatatcataataaaatgagtcacacaaattttttggcttctcagtacataaaaaagttatgtttacactatagtgtagtctatcttgtgcaataatatgttttcaaaactatatgtgttagtatgttttcatgctgctgataaagacatacctgagactgggcaatttataaagaaaaattgactcacagttccacatagctggggaggcctcacaatcatggtggaaggcaaaaagcacatcttacattgcggcagacaagagagaatttgtgcagagaatctcccccttgtaaaaccatcagatctcatgagacttattcactatcatgagaacagcatgggaaagacttgcccccatgattcaattacctcccaccaggtccctcccacaaaacacaggaattgtgggagctacagttca

SEQ ID NO: 52493 - DNA, 594 bp, Homo sapiens
gcatagaatcagacctgctcagagtgttrtaatacagaaaccataatatggtattttaattattgcttaattattacataattatacttactgatttcctaaacactaatgaaatagggacccaagcagacaaaataaaatgtattcttagcccaaaagagtattacatttgtttcgcattcttgggaagtgcggtgatctgcgttttaaaaatttacctaactagaaattaccacttaaatggcaaaattttatttctgctattcatttattcacttattcaagtaatactgagagttaaccttttattgtgcctaaatcccatttgctatctgaggaatctttctaaaaacaatgtttttaagtacaaagaaaaaaaaaacctacataagattacaatggacacatcaaaaatacatttatcaaccaggaatggtggctcatgcctgtaatccaagcactttgggaggccaaggtgggcagatcacttgaggtcaggagttcgagaccagcctggacaacatggcgaaaccctgtttgtaaaaatacaaaaattagccgggcctggtggcagatgcctgtaatctcagctcc

SEQ ID NO: 52494 - DNA, 594 bp, Homo sapiens
gcatagaatcagacctgctcagagtgttataatacagaaaccataatatggtattttaattattgcttaattattacataattatacttactgatttcctaaacactaatgaaatagggacccaarcagacaaaataaaatgtattcttagcccaaaagagtattacatttgtttcgcattcttgggaagtgcggtgatctgcgttttaaaaatttacctaactagaaattaccacttaaatggcaaaattttatttctgctattcatttattcacttattcaagtaatactgagagttaaccttttattgtgcctaaatcccatttgctatctgaggaatctttctaaaaacaatgtttttaagtacaaagaaaaaaaaaacctacataagattacaatggacacatcaaaaatacatttatcaaccaggaatggtggctcatgcctgtaatccaagcactttgggaggccaaggtgggcagatcacttgaggtcaggagttcgagaccagcctggacaacatggcgaaaccctgtttgtaaaaatacaaaaattagccgggcctggtggcagatgcctgtaatctcagctcc

SEQ ID NO: 52495 - DNA, 595 bp, Homo sapiens
gtaataaaacaattttggcactgataatcagatatttgtttataagtacccacggatataccagmtatcaatttctattcttacctattgcttagatattttgcacaatattgaatcgggttttgaaggccttattgaaattaattaggtagcacagcatgttggttaaaaatgtgggctataaggctgggcgcggtggctcacgcctgtaatcccagcactctgggaggccgaggtgggcggatcacgaggtcaggagatcgagaccatcctggctaacacggtgaaaccccatctctactaaaaatacaaaaaattagccgggcgaggtggcgggcacctgtagtcccagctactcaaaaggctgaggcaggagaatggcgtgaacccgggaggcggagcctgcagtgagccgagatcgcgccactgcactccaacctgggcgacagcgggactccgtctcaaaaacaaaacaaaacaaacaaacaaaaaaaaatgtgggctataaaatcaaggtctgaaatactggcttcaactcatataccatttaccatatacacaagcaacttatttaactctggaatctttaatttcc

SEQ ID NO: 52496 - DNA, 1209 bp, Homo sapiens
tgcgagattcttttttttgggaagaatccctgaaagccatttatcttgctttatatgaaattatttttttctaaaatagtttgtaagattatttcatatattttggtagcaatagctaagtatgcagcaaggcaagagcaaagaaattaattgttgaataaaattctcactttgaaattcaagtaaagggcttcaggcctggagaactcactgaacttggagatcatttcttaatatcctccaatgagatgtgccagatacctgcaagggtctggaaagtggatactgcactctagagcttactaatattgattcgtatacacacaaaattcaccttttgccctgatgcttctttgagcragaaaataaacaggcacactaatattttaaatatatatatatatttttttataaaatccacaaataatctgattactagaacattcaattgggtccttaatttaaacaaaaaaacctacacggttggaaatcaagaataattatttttcactatgtgaggataattttgaggacaaaacaagtcaggcattttcatgcagtgactgaataatctataattatttgttatctataaaaactgctagaaggaatctgtggaataaatatatttagaaagtggtgttataatttaatgtggttgtttgaaaatccaactactctatatcaaaccagaaatttgaaatacatatttgctttgtcatatttgcttatatctaaaacagtattattcttttaaaagattaatatttttaaaacattctttgagttctggggtacatgtgcagaacgtgcaggtttgttacataggtatacacgtgtcatggtggtttgctgcacctatcaatccgtcatctacgttagatatttctcctaatgctatccctttcccaaccccacaccccttgacaggccccagtgtgtcacgtttccctccctgtgtccatgtgttctcattgttcaactcccacttatgagtgagaacatgcagtgtttagttttctgttcttgtgttagtttgctgagaatcatgtttccagcttcaaccatgtccctccaaaggacatgaacttatccttttttaatggctaatcttttaaaaacagaccacaacaacaatttacaaaacctcttttatacttttctaatattatattttatgcctgttctttctgaattgcctactctttc

SEQ ID NO: 52497 - DNA, 1209 bp, Homo sapiens
tgcgagattcttttttttgggaagaatccctgaaagccatttatcttgctttatatgaaattatttttttctaaaatagtttgtaagattatttcatatattttggtagcaatagctaagtatgcagcaaggcaagagcaaagaaattaattgttgaataaaattctcactttgaaattcaagtaaagggcttcaggcctggagaactcactgaacttggagatcatttcttaatatcctccaatgagatgtgccagatacctgcaagggtctggaaagtggatactgcactctagagcttactaatattgattcgtatacacacaaaattcaccttttgccctgatgcttctttgagcaagaaaataaacaggcacactaatattttaaatatatatatatatttttttataaaatccacaaataatctgattactagaacattcaattgggtccttaatttaaacaaaaaarcctacacggttggaaatcaagaataattatttttcactatgtgaggataattttgaggacaaaacaagtcaggcattttcatgcagtgactgaataatctataattatttgttatctataaaaactgctagaaggaatctgtggaataaatatatttagaaagtggtgttataatttaatgtggttgtttgaaaatccaactactctatatcaaaccagaaatttgaaatacatatttgctttgtcatatttgcttatatctaaaacagtattattcttttaaaagattaatatttttaaaacattctttgagttctggggtacatgtgcagaacgtgcaggtttgttacataggtatacacgtgtcatggtggtttgctgcacctatcaatccgtcatctacgttagatatttctcctaatgctatccctttcccaaccccacaccccttgacaggccccagtgtgtcacgtttccctccctgtgtccatgtgttctcattgttcaactcccacttatgagtgagaacatgcagtgtttagttttctgttcttgtgttagtttgctgagaatcatgtttccagcttcaaccatgtccctccaaaggacatgaacttatccttttttaatggctaatcttttaaaaacagaccacaacaacaatttacaaaacctcttttatacttttctaatattatattttatgcctgttctttctgaattgcctactctttc

SEQ ID NO: 52498 - DNA, 1209 bp, Homo sapiens
tgcgagattcttttttttgggaagaatccctgaaagccatttatcttgctttatatgaaattatttttttctaaaatagtttgtaagattatttcatatattttggtagcaatagctaagtatgcagcaaggcaagagcaaagaaattaattgttgaataaaattctcactttgaaattcaagtaaagggcttcaggcctggagaactcactgaacttggagatcatttcttaatatcctccaatgagatgtgccagatacctgcaagggtctggaaagtggatactgcactctagagcttactaatattgattcgtatacacacaaaattcaccttttgccctgatgcttctttgagcaagaaaataaacaggcacactaatattttaaatatatatatatatttttttataaaatccacaaataatctgattactagaacattcaattgggtccttaatttaaacaaaaaaacctacacggttggaaatcaagaataattatttttcactatgtgaggataattttgaggacaaaacaagtcaggcattttcatgcagtgactgaataatctataattatttgttatctataaaaactgctagaaggaatctgtggaataaatatatttagaaagtggtgttataatttaatgtggttgtttgaaaatccaactactctatatcaaaccagaaatttgaaatacatatttgctttgtcatatttgcttatatctaaaacagtattattcttttaaaagattaatrtttttaaaacattctttgagttctggggtacatgtgcagaacgtgcaggtttgttacataggtatacacgtgtcatggtggtttgctgcacctatcaatccgtcatctacgttagatatttctcctaatgctatccctttcccaaccccacaccccttgacaggccccagtgtgtcacgtttccctccctgtgtccatgtgttctcattgttcaactcccacttatgagtgagaacatgcagtgtttagttttctgttcttgtgttagtttgctgagaatcatgtttccagcttcaaccatgtccctccaaaggacatgaacttatccttttttaatggctaatcttttaaaaacagaccacaacaacaatttacaaaacctcttttatacttttctaatattatattttatgcctgttctttctgaattgcctactctttc

SEQ ID NO: 52499 - DNA, 1209 bp, Homo sapiens
tgcgagattcttttttttgggaagaatccctgaaagccatttatcttgctttatatgaaattatttttttctaaaatagtttgtaagattatttcatatattttggtagcaatagctaagtatgcagcaaggcaagagcaaagaaattaattgttgaataaaattctcactttgaaattcaagtaaagggcttcaggcctggagaactcactgaacttggagatcatttcttaatatcctccaatgagatgtgccagatacctgcaagggtctggaaagtggatactgcactctagagcttactaatattgattcgtatacacacaaaattcaccttttgccctgatgcttctttgagcaagaaaataaacaggcacactaatattttaaatatatatatatatttttttataaaatccacaaataatctgattactagaacattcaattgggtccttaatttaaacaaaaaaacctacacggttggaaatcaagaataattatttttcactatgtgaggataattttgaggacaaaacaagtcaggcattttcatgcagtgactgaataatctataattatttgttatctataaaaactgctagaaggaatctgtggaataaatatatttagaaagtggtgttataatttaatgtggttgtttgaaaatccaactactctatatcaaaccagaaatttgaaatacatatttgctttgtcatatttgcttatatctaaaacagtattattcttttaaaagattaatatttttaaaacattctttgagttctggggtacatgtgcagaacgtgcaggtttgttacataggtatacacgtgtcatggtggtttgctgcacctatcaatccgtcatctacgttagatatttctcctaatgctatccctttcccaaccccacaccccktgacaggccccagtgtgtcacgtttccctccctgtgtccatgtgttctcattgttcaactcccacttatgagtgagaacatgcagtgtttagttttctgttcttgtgttagtttgctgagaatcatgtttccagcttcaaccatgtccctccaaaggacatgaacttatccttttttaatggctaatcttttaaaaacagaccacaacaacaatttacaaaacctcttttatacttttctaatattatattttatgcctgttctttctgaattgcctactctttc

SEQ ID NO: 52500 - DNA, 608 bp, Homo sapiens
tcagcaataatgtcacctccaaaaatagcaacaaaaaagaagggacttaaatctactcatcgtatgaagctatcaattaataaagctgacatagcagcagctaccagaaattgcctcaatgccactggtggaatgactattctcagaaagacacacacataaagggaaaacccacaactggacataaccctgaaagtgtagggagataggctggaagtcaggacactcaatttaactgcagaagagacttctcaaggttcaaggtttaagacacaattaatccattccttattttttaaaaaaattcactccttctctatgtgcctttaaaaccagaattctccaggaccgatctcctagaagcttagtttcacaagcagctcctcagagtcctgctcactgtcatgcaacttcatgctttcctataaagcatagagggaactagcacatgtctagcttttaaaagtgttaaaatataggaaacatgtaaaatagtcaatttaagcttaacatccaaacaatttcccctttctgtcggcttaccccatcaatttcttctcttcacccacagtttctcttagtttgctgagcracccgtgtcttaaaat

SEQ ID NO: 52501 - DNA, 566 bp, Homo sapiens
tgaatttataatgatctaattgagaggaatttatccccaaaggataagtgtttacattttttattttaaattattaagggcatatattattttaattacagagatagtatataagtaaaagattcattttatttaaatgttttcttaaaagtgtgttgtgtctcatttttcaacgtttagaggatgcaagagaaccaactctgaaaatcataaaaggaaagaatgaaacaattatcttatttctcttttacaaattctaacgcaaggtaactcattrgtgcaggacagtttctctttatagaagaattccagcttttaaaaaatgaaaatggaatgatagaattgatatgtcacactttataatccctaatgaaataatggacctaggtagtgatcattaatgactgctaaaactgctaaaacttaagtgaaacttcatgaatggagaagactgataacacctgaacttattgcttaatcttatcacaaagaaagaaacattcagccattttgtgcctcatgatgtgatgcaataagaaatacattctctataaaactgtcttgcc

SEQ ID NO: 52502 - DNA, 807 bp, Homo sapiens
gtctcccctcaatgtgaaggagaacaaatgatttcagccccctcctatcttaacagggatgttatgagtctgagatcacagaggacactgtctttagtaggataattaaggaccaggctgctcttagaaacacccccacagcatggaggctctctctccctggcatcatttggcttcagagttgggcaaccaaatatgcccacataacatgacaaactcagggtttggggccagcatcttgacagatactgtcaggagccctagatgtgaatccattctcacatatataattactatattcaagtgtttaataaacatttagtaatgcttttaagtcaccagtatcttcacagaaatgaccataytgttgcccatctattagaagagatggtgttcaaggtatgaagtagtagaaggttcgtgatcatgaacccctgggcaagtcaagatcctcaattgccacctctataggtggaagtataggcctaacaatactaaggattaaaagtgaaatgctgctggcgcagccctgggctcacagaagcagcaaaacaagcactaaagccctcctcccgcccacggttctgctcaataaataacaagtgctgttaattctttaattgtggatccgaggaaaatgaaacagggttcacccataaacatcttatctgccttgattccccctgtaactccttgactggagcagagtaaacaggctgaactttaattaggatcataacatgaaaatgatcccaggtaagccaggctcataaactccagacaattgggaggagactggtttctaat

SEQ ID NO: 52503 - DNA, 807 bp, Homo sapiens
gtctcccctcaatgtgaaggagaacaaatgatttcagccccctcctatcttaacagggatgttatgagtctgagatcacagaggacactgtctttagtaggataattaaggaccaggctgctcttagaaacacccccacagcatggaggctctctctccctggcatcatttggcttcagagttgggcaaccaaatatgcccacataacatgacaaactcagggtttggggccagcatcttgacagatactgtcaggagccctagatgtgaatccattctcacatatataattactatattcaagtgtttaataaacatttagtaatgcttttaagtcaccagtatcttcacagaaatgaccatattgttgcccatctattagaagagatggtgttcaaggtatgaagtagtagaaggttcgtgatcatgaacccctgggcaagtcaagatcctcaattgccacctctataggtggaagtataggcctaacaatactaaggattaaaagtgaaatgctgctggcgcagccctgggctcacagaagcagcaaaacaagcamtaaagccctcctcccgcccacggttctgctcaataaataacaagtgctgttaattctttaattgtggatccgaggaaaatgaaacagggttcacccataaacatcttatctgccttgattccccctgtaactccttgactggagcagagtaaacaggctgaactttaattaggatcataacatgaaaatgatcccaggtaagccaggctcataaactccagacaattgggaggagactggtttctaat

SEQ ID NO: 52504 - DNA, 807 bp, Homo sapiens
gtctcccctcaatgtgaaggagaacaaatgatttcagccccctcctatcttaacagggatgttatgagtctgagatcacagaggacactgtctttagtaggataattaaggaccaggctgctcttagaaacacccccacagcatggaggctctctctccctggcatcatttggcttcagagttgggcaaccaaatatgcccacataacatgacaaactcagggtttggggccagcatcttgacagatactgtcaggagccctagatgtgaatccattctcacatatataattactatattcaagtgtttaataaacatttagtaatgcttttaagtcaccagtatcttcacagaaatgaccatattgttgcccatctattagaagagatggtgttcaaggtatgaagtagtagaaggttcgtgatcatgaacccctgggcaagtcaagatcctcaattgccacctctataggtggaagtataggcctaacaatactaaggattaaaagtgaaatgctgctggcgcagccctgggctcacagaagcagcaaaacaagcactaaagccctcctccckcccacggttctgctcaataaataacaagtgctgttaattctttaattgtggatccgaggaaaatgaaacagggttcacccataaacatcttatctgccttgattccccctgtaactccttgactggagcagagtaaacaggctgaactttaattaggatcataacatgaaaatgatcccaggtaagccaggctcataaactccagacaattgggaggagactggtttctaat

SEQ ID NO: 52505 - DNA, 1245 bp, Homo sapiens
tgtcaaatatgccaaaaatcgtaagtatttgagattcttgaagcagacgaagggaaaggttgggttgagagtaagctatataagtattcctgttctgtatgccagagaatggggggtgggggcgcatggaatctcatcaatttaccaagtcccaaaaagagtaggttccaggtctctagtaaggcttcgatgccaggttttgtatattctcccttataatcaactttcccctcaattcttagaaagatcttatggagttcagaagacgataaagatggaaagttgtaagtcctgagagatataattgatgtagatatagatatttacagaataaaagccaacagcctaacatggtatgatgtaatcaggcatctcctcccttcctcctaaaaacctctcaccctctcctctctgacctcatctcctagtccttttccgcctcattcccaccagagcactctgcttcagccacagtggccttcttgccattcctcaaatacaccaagcacacttgagccttagggctccaccttaaggcctttaaactggctgtttcctctgcctgaaatgcccttcccccaatatccacgtggcttacactcttacctcctttaaatttttgcacaaatgtgacctattccatgaggcctcatctaaaagctccctaccccttattttaaaatgcaacctgggccaggcacaggtagctcacacctgtaatcccagtactttaggaagctgaggtgggaggattgcttgaagccaggagtttgagaccagcctgggcaacaaaatgagaccctgtctctaaaaaataaaaattaaaaattaaaaaattagccaggcatagtggtatgtgactgtggtcccaagtacttcaggaggctgaggcagaaggatcccttgagcccaggagttggaggctgcaatgagctatcatggtgccactgcactccaacctgggcaagagagagagagaccttgtctctttaaaaaaaaaaaaaaaaaaaaargtagaagaagaaagaagaaaaaattttaaaaagcaactcccctcacaactacccagcattcttgatgctccttactgtacttattaccttctaaatactagcaatttatatattcatcatgtttattgtttgtctccctcttccccaactgaaatgttaactcacagagatctttattgtattgactgaaataaagcatctagagtagtgtctgatacatgatcatcaaaaa

SEQ ID NO: 52506 - DNA, 604 bp, Homo sapiens
agctgaacaatgagaatgcacggacacagggctgggggaacaacacacactggggcctgtcagggggtggggaaatatttttcctaaatattttcctatttaggaaaaatagctaatgcatgctgggcttaatacctaggtgatgggttgataggtgcagcaaaccaccatggcacacatttacctatgtaacaaacctacacatcctagacatgtaccttggaacttaaaaataaaaatttttaaagagttggaggaaggcargcttggagacaaagcccccactctgtggcatctgatgttatctctaggtagatagcattggaattgaactgggggacactcagctggtgtccactgcttggcttgtagagaaataaaaacccacatctttggttacagaagtcttctatgttgatgattgttatggtatgaaatcagaggaaacacacagttcaagagagtctttcctgaaacacaatcttaaattatttctgttgttattgatattgttggttttcaagtacactacttgtgtggataatgccgttgaattaggccacgctggttcaaaaccttaattaaaaggggcaattatttaaat

SEQ ID NO: 52507 - DNA, 1933 bp, Homo sapiens
tgaaagtaaagattcagaggaacagtcatgttggcttccctctacctctcaccctcgtcctctaacttcactaaaagtacaattttgaacatggaaaacttaaagaaatcagtttctgatgtcaaaaatgaattcaattccctaactgcatttggcccttctctttttagacatcactgttacctggtagcactagctgaacaatatgcttaataaggcaaaactttcaaatattcccttcaaggaaatatcatttttgcgtatttaatgacgactggagcatttgttagctttgggatgtattatatccaattttttaatctttgaaaagtaccttaaaaatatagcataaatactgtataggaagaattgacaaaaatgttctcagaattatatttttctttttattaataatgtcatcaatatcactaacaatatcatcactttttatcaacaatatcaacaatgttattttcactatcgtgtcaccttgtaaagctctggtttaaatcacaagaaccacagtgtggcatttgtttattatgtattttgacaatccacaagctttatccaactcatatgaggtaattctttgaacctaagtatgcatttttaaggatatgaaaggatatatattttgtgaagcaattaaaaccctagagtactttcataggaagaaatttaaattataaccaaatttgtttgactggcacaaaatgaaaggatattaactcattgtttcttgtcttgtggatgattacagtttatgtccactctttgtctaatcaccttctttcttatgcattaaagttattatttcagaagaacatagaaacttttccctgttcagagaaggaaaactgatagagaatttagcctgttcaactaacaaatacagctgttgcaaatattgaatactgatatgttattcacagtaaaaataatcttagttgtaagaagtctatttgaattataaaataaatatatttcatacctgtcatggattaaaaaaattttttttaattgaacccgggaagcggaggttgcggtgagccaagatcgcgccactgcactctagcctgggtgacagagcgagaatccgtttcaaaaaataaaataaaaataaaaataaataaacaaatagaagaagttttcctttttcaaccttttggtcaaggctttatatggtgttattttcctgcaaaagagttcataatagcactttctaaaacataatctttcataagcatcggtatccaagaagcaaaatgtatgctcactgatcaaacagatgatcagctaaasgaagcaacagagagatgttcctcaagtaagcaacaaccagcaaaacctgaaggggtgtttatttctttaaaaattttggacatttttctttaaatcccatctgttgggcagcataaaatcgtactacttggtgaatcactagagaacgagaagactttggaaaggcaaagtcacaagaaaataaataatttccacccagagtacatcataacctcatttagaacattctggtttgaaagcaaagtccaaggaaatgcttacattctgcttctatggaaacgaaggaagacaaatcaaatattttggttggatttgagtggaaatcagcagctcagacatgcatcggatggttctaatttgctcttttaatatgtctcagattttcacacgaaggccagatccagaagtaaatttttatctgaattctggtaaattgtgcttataagcccatgaaatgatcagcaatagagggctttcattagaatatgggcactcctgtggtttttttaagaatacaacaagacatcaggaagcaaaaacgtttaaaattagtaaagcaaaccagtcctacaaaaaaagcatgtgtgtgtgtgtgtgtgtgtgtgtgtgtgtatgtgtgtgtgtgtgt

SEQ ID NO: 52508 - DNA, 455 bp, Homo sapiens
aagaggacaaatatatccactataataatcaaggccccactgctctccaggaagaaactttattttcataaaaagaaaaaacataattaagagaaaataagcattctctccttcaaaagtaagttcatcttaaccaataaactgatgcaacaggtcctggatggttgagaaaccacctcattatgattctgagtattaattattaccatatactagataaacacaggagtcagaaaggattcagtatgatgacatagctgggcatacaccttaagtctaccagttagatatgtggacatgagcatattaattagacacactaaccgttgttacccttccctttaaaytgagaaaaaataatagctaccaaataagtttgttatctaaatttaagagagattgtatgtaaattccctgacacaatgctcttgtataggaggcattaaaatggatct

SEQ ID NO: 52509 - DNA, 630 bp, Homo sapiens
ctcagggccacaaggtgcttcgggcacctgcggccgcctgaggttcagtaagtgatgcccacaggtgcyggccactccagcttgggaggatggcccagctgtgtggccacccagcacagtagttgggggtgtccctgagtgaggacagagagcctcctgctagcagcgaggggctggctgcccaaaggagacacacagcaaggagagctgggccccagatgtgccggagcattccggaatggtcatccttcccctccctccctcccctgttgtcagtgcctgctcctctcacttgctgtgtaactgtgggcaaggacaccctcgttaagcctcagtttccccatctgaaacctgggtcgagtggcacatgctcttgcccggctgttgtggcgactaatgcagccaccagagtgttctgcacagcgcctgtccagatgctggccgtgtggtttctgacttgtagagctagacctggacacctctcgtatttgaggtcctaaaccatgtcaccttgcgctgtggactcattcaggccacagactgtctttggtttgtctggtttctacagtgtcagacagatagatgcttcagagtgactttttggtgaacaaacctacgaggagacacgtg

SEQ ID NO: 52510 - DNA, 630 bp, Homo sapiens
ctcagggccacaaggtgcttcgggcacctgcggccgcctgaggttcagtaagtgatgcccacaggtgccggccactccagcttgggaggatggcccagctgtgtggccacccagcacagtagttgggggtgtccctgagtgaggacagagagcctcctgctagcagcgaggggctggctgcccaaaggagacacacagcaaggaragctgggccccagatgtgccggagcattccggaatggtcatccttcccctccctccctcccctgttgtcagtgcctgctcctctcacttgctgtgtaactgtgggcaaggacaccctcgttaagcctcagtttccccatctgaaacctgggtcgagtggcacatgctcttgcccggctgttgtggcgactaatgcagccaccagagtgttctgcacagcgcctgtccagatgctggccgtgtggtttctgacttgtagagctagacctggacacctctcgtatttgaggtcctaaaccatgtcaccttgcgctgtggactcattcaggccacagactgtctttggtttgtctggtttctacagtgtcagacagatagatgcttcagagtgactttttggtgaacaaacctacgaggagacacgtg

SEQ ID NO: 52511 - DNA, 2535 bp, Homo sapiens
gcgtgacaccaagtgccagccccagggctcctcaggggaggagaaggggaccccgaccacactcagggggtgcgtgctgcgggccgggcatcaggagggggtacctggggggtgtcttcctggaaccactgctccgtttctcttcccaaatgttctcatgcattcattgtggattttctctattttccttttagtggagaagcatctgaaagaaaaaggccggactcgggctgttcaacttcaaaagacaccaagtaccagtcggtgtacgtcatatccgaggagaaggatgagtgcgtcatagcaactgaggtcagtgcaggcagcagccgctccctcctcctcggcatgggagcacctgaagctgsagcacgggaatcggtctcaggctaacttcccatttgtcttgtggccccccaggtgtaaaatggaagtgagatggcaagactcccgtttctcttaaaataagtaaaattccaaggatatatgccccaacgaatgctgctgaagaggagggaggcctcgtggactgctgctgagaaaccgagttcagaccgagcaggttctcctcctgaggtcctcgacgcctgccgacagcctgtcgcggcccggccgcctgcggcactgccttccgtgacgtcgccgttgcactatggacagttgctcttaagagaatatatatttaaatgggtgaactgaattacgcataagaagcatgcactgcctgagtgtatattttggattcttatgagccagtcttttcttgaattagaaacacaaacactgcctttattgtcctttttgatacgaagatgtgctttttctagatggaaaagatgtgtgttattttttggatttgtaaaaatatttttcatgatatctgtaaagcttgagtattttgtgatgttcgttttttataatttaaattttggtaaatatgtacaaaggcacttcgggtctatgtgactatatttttttgtatataaatgtatttatggaatattgtgcaaatgttatttgagttttttactgttttgttaatgaagaaattcctttttaaaatatttttccaaaataaattttatgaatgacaaccagaaggcgtagttacttggctttgccttagagcggaggtgtgctcactcacctgcggcccgcgaggctgagggcagaggtggccttggtgtttctcttttcaaggctttggtttccctggatccatgagaagcagcccgttcctctcctccctcaggaagctgcttgctggccatcatgaggtgacttggtaagagcaggcacgcgcatgaagcagccgcgattttctaattccatccccccatgcatttattagttctttccgcagaaagaatgagcgttcctcattcattcattcattcattcattcattcattcattcatgtcagtgtagacttgtgagttattttgtacccagtgggtcacagctgtcatgattttgtcgccgtttgacgccaacatggccccagacggggcgtgggagtcacggaagctgctcctccgcttcccgtcggtgggcagccccgtctctaagcgcgtcccgcctgctggctcagcaggaccgcacgggctccctgtgggctgacccctcatttgccgctttgccccccgctaagcccgggttccttatggtagtgattgcatttttaacttgcgcgtacctcaaagcgctgagcggttcccaggatggaaagagggcgaccgatgtagcaggagctgcgcggaggcactggcgctcactcccctcagacccgactccgcttgcatttcctccttgcattaagggcacgttaaatgccaggccagcaacaccagcaaagaggagaagtgttttgctaagaacattgagcttgaatccgatgacagctctcagtctcattaccagttacggaaacacgggactgaaaactccttcctcgacgccccacgcatctgcgcagccgaatccagggaactctgtagccaaataaattgcaaggaaaaaacaagaaaatggtgagggggaacccatagatacaaagagacacggacatatcaatccatcgcagcgtctggatctggttcctgtttcaaacagtttaaaaattttatgaacccactggagacatgtaagcgctgactgggatatccacatgattttaaagtgcacctgctaaatagtttagatgtgatgtgttattactgttcagtttaaaaagagaccttatcttttagagaaaattctgaaatatttatggatgaaacaatacgaggcctgggactgattcggagccccccgccgcgggcacggtggcacggggagtcccacgagcactgctgggggtcgctgcagctgggagtggcccatgggggcgctcacttccgtgttctttcctctttcgtacacgtttgaaacttcccataagcaaaagcattaagccggaccatacagtgaatacacgcacacgcaaacacgacagtttccgggtgtgtatggaccgccgtgtctgtgacgtgacc

SEQ ID NO: 52512 - DNA, 2106 bp, Homo sapiens
tagtcaaggccaggtaaaatgaagaaatataaccaagtgaatgaaatttttagattgattcgtagaatgagacaggaatattttttaaaatttgtaatttctaatgactatcagtatataaaactaagaattatatggctgtcaattgactaaaaactgtacmtaagatttgagctagtgaaacaaccatatatgaacttctatttccacttttctgtctcaagaatgacttgtgaaaatgatgttttttttgaaattttacattctcattttgaaagagcttcacaaaacttacatgagaatctggatgctcataagaggtctgattttttaatggcatgtttgtatttctgttatgtacatcaatgtcaagcattcgtttcctgagctgttctctacaacacaatttaacttgtaatggacactcaataaatggtcggttggatattcaaatcaacaccttagttccatcaattttcatttcatataaaaatgcctgatcttctatactcaccaatgaaacagagagcgatgaaggagggagagcagttgagactgagaggatgacaagcagacctcattctgcagtggatttcctacactctccacttctgaatgcttggaaacacttgccatgctcaaaaaatattggtatttcctaggcagcaaatgggagttaaagaaagtccatatttctatattgcaataacttacactataatacacagacaacatacatttctaagctatttcaattcatagaaaatgtagataaatttaggtgagcaaggtgtaggagaagggttagtaatcaagctgagtgtgattgtgagattaaatctaatattatgcaattattgtataattgtatcagttgacatatctgttgaaacagaaggtgggagagttttgcatgcgcttccgaaatgtactggatgatgttaggagagaggcgggtcaacgtggctaggccataagtgtttactaattgaggcttaggaaagttaagctcctaaccagagactgggagatagaggcgctaaagtgtataacatttatatttaatatatatttaataatatatagtaaagtcttaaaatgccaattttaagtcttttcattttcttcttaaaaacagaggttttattgcgtttggtccacagtcggtatttcacattatctcatagcgcagggcccctgggtggagggctctgtgcagtacttggcgtggcctggggccgggagagatagagcagtagacctggtcaggcccggaaggggagaaggagggccggggctccttaagacctactgaggggctgggcgcggtggctcacgcctgtcatcccaacactttgggaggacgaaacaggcggatcacatgagggaaagagttccaaaccagcctggccaacatggtgaaatcccgtctctactaaaaatacaaaaaattaggcaggcgtggtggtgggtgcctgtagtctcagctactctggaggctgaggcaggagaatcgcttgagcccggtaggccgaggtgcagtgaggcgagattactccagtgcgcttcagcctgggcaacagagtgagactacatctcaacaaaaacaaaaacaaacaaaaaaccctactgaggaccacggaggtcggggagcaggatggagatgggtcaggcttaaccctgacaactcaaaattccagtaccttgtacgggcctcagtttcctcacggggccccagcgtatgtctgaggtctgttggtctgagggtcctagggaaatccagccactcaggagcctgagatattttagcatcatggctgagccccctctcccaggggacacacttcctagcaccctctccactgtccccgccccattcctcggggaaaaaaatttttttttattttgttaatacttcctgaaactttttcgggtacagaaaccacttactgataggctgagaaaaggggaagaggagaggcaaccagaaaccttcagggacccgttccctccatgtccaggtctcttctctccagcacagctcagcccacagcctggaagtgccagcgggcaccttcaccctacacgcatcaggatacggccttg

SEQ ID NO: 52513 - DNA, 2106 bp, Homo sapiens
tagtcaaggccaggtaaaatgaagaaatataaccaagtgaatgaaatttttagattgattcgtagaatgagacaggaatattttttaaaatttgtaatttctaatgactatcagtatataaaactaagaattatatggctgtcaattgactaaaaactgtacctaagatttgagctagtgaaacaaccatatatgaacttctatttccacttttctgtctcaagaatgacttgtgaaaatgatgttttttttgaaattttacattctcattttgaaagagcttcacaaaacttacatgagaatctggatgctcataagaggtctgattttttaatggcatgtttgtatttctgttatgtwcatcaatgtcaagcattcgtttcctgagctgttctctacaacacaatttaacttgtaatggacactcaataaatggtcggttggatattcaaatcaacaccttagttccatcaattttcatttcatataaaaatgcctgatcttctatactcaccaatgaaacagagagcgatgaaggagggagagcagttgagactgagaggatgacaagcagacctcattctgcagtggatttcctacactctccacttctgaatgcttggaaacacttgccatgctcaaaaaatattggtatttcctaggcagcaaatgggagttaaagaaagtccatatttctatattgcaataacttacactataatacacagacaacatacatttctaagctatttcaattcatagaaaatgtagataaatttaggtgagcaaggtgtaggagaagggttagtaatcaagctgagtgtgattgtgagattaaatctaatattatgcaattattgtataattgtatcagttgacatatctgttgaaacagaaggtgggagagttttgcatgcgcttccgaaatgtactggatgatgttaggagagaggcgggtcaacgtggctaggccataagtgtttactaattgaggcttaggaaagttaagctcctaaccagagactgggagatagaggcgctaaagtgtataacatttatatttaatatatatttaataatatatagtaaagtcttaaaatgccaattttaagtcttttcattttcttcttaaaaacagaggttttattgcgtttggtccacagtcggtatttcacattatctcatagcgcagggcccctgggtggagggctctgtgcagtacttggcgtggcctggggccgggagagatagagcagtagacctggtcaggcccggaaggggagaaggagggccggggctccttaagacctactgaggggctgggcgcggtggctcacgcctgtcatcccaacactttgggaggacgaaacaggcggatcacatgagggaaagagttccaaaccagcctggccaacatggtgaaatcccgtctctactaaaaatacaaaaaattaggcaggcgtggtggtgggtgcctgtagtctcagctactctggaggctgaggcaggagaatcgcttgagcccggtaggccgaggtgcagtgaggcgagattactccagtgcgcttcagcctgggcaacagagtgagactacatctcaacaaaaacaaaaacaaacaaaaaaccctactgaggaccacggaggtcggggagcaggatggagatgggtcaggcttaaccctgacaactcaaaattccagtaccttgtacgggcctcagtttcctcacggggccccagcgtatgtctgaggtctgttggtctgagggtcctagggaaatccagccactcaggagcctgagatattttagcatcatggctgagccccctctcccaggggacacacttcctagcaccctctccactgtccccgccccattcctcggggaaaaaaatttttttttattttgttaatacttcctgaaactttttcgggtacagaaaccacttactgataggctgagaaaaggggaagaggagaggcaaccagaaaccttcagggacccgttccctccatgtccaggtctcttctctccagcacagctcagcccacagcctggaagtgccagcgggcaccttcaccctacacgcatcaggatacggccttg

SEQ ID NO: 52514 - DNA, 647 bp, Homo sapiens
gaaagattgattttgttataataataatggaaatgtaaatatttaaaagaaaaaacagatgccattttttttctagaactctacaaagcaaattgctacaagagaggcagaggaaacataatatatacatatccaaaatataatttgcggtgaaataaatgaaagcacattacagataaacttacctgatttaaaaaactaacctgtaaatggatttcttctaatttttctactgcctgcattgccttttcatctagctccaatttatattcttgtagtttactaagttctaccctattgttttccatatgtgtcttaagatttaatatttcttctttcaacatctttttatcctcctcaagtttttcacattgctgttgtacttttttcatagataaaaactcctgttgaagaacttgattgtctttagccaaattgacacattttgaagataaagcttccttctctgcsgtaagatcatcaaactgcatgaataaaataatatagcttgataatgaagtaggctgagtataatctaatacaaaaccaatagcaaattttgaaatgcatttacttgcaataaaatgttatctgtaatgcagtggattcttcaaatgtgaacccttaaattactcagaattttaaga

SEQ ID NO: 52515 - DNA, 648 bp, Homo sapiens
actagatacataattactgaattttaaagaagaatattaactacaaagccttctggctgctgaaaagtaggaaagattcttgcctggtttgtggctaaattctcttaacgattcaaggcctgcagaggtgagggtggcctctgagagagtgatgagaaccggtgccatgggtgtgaagttggtgccactgagggtgcttttaaggagcaaacgcaccttctgattctccagctagcatgggaatggtttcagtctgcctgggctgctgtaacaaaataccmtggaaattcatatcacataaaccatggaaattcatttctcacggtcctggaggccaggaagtcaaggtgccagcaaagtcagcgttggctgaggccagtgccccatagaagcgggtgctgtgcgtgtcctcctgcagagaaaggggcaagggagctctctgggcctcttccttaagggcactaatccttttcatgagggctctgtcccctggcctcatcaccccccagaggccccacctcctaataccatcaccttgggggcgaggattcgacagacacgttttgaggggacagaaaccttcagaccacagcaggaatgatggaaagcggaatgatgtccagagaggggctgggcttggaggtgtcc

SEQ ID NO: 52516 - DNA, 1465 bp, Homo sapiens
atgtacagaaaattgttttctgggtggggatagagcgggagacaaactgtaggaggataggtgactaattaaggggaagaatttttgattatctgttgtttcagattatcagagtaatcgcttctgtctattaacatggataattaagaattgactgtgtagttaagtaattcaaaccttcctctctcacacacaaaattctcttcagtaataaacaagcatgcacagaattattcactgaaataaatggacttccttcttgtgtttgtcaaatacaatcccctcttcctctcactgaattaccaatttagatgaagaggttccttaaacaagaatctatgtatgtatgtatgtatgtatgtatctattcatctatcatctgttctatatctatgtaatatgaaccgaatatgcactacaatgattttactcttgctctcacctccccccccccctttatttttgagacagtctcgctctattgcccagactggagtgcagtggcaccatctcggctcactgcaaacgccacctcctgggttcaagcaattctcctgcctcagcctcccaagtagctggggttacaggcatgcaccaccacacccggctatttttttttttttttgtatttttagtagagatggggtttcaccatgctggccaggctggtctcgaactcttggcgtcaagtaatccacccaccgtggcctcccaaatcgctgggattacaagcatgagccaccatgcctagacctctcacgaccctcttttgacatttttttggttccttaggcaaataatatatactaaatcaagtataatattttatgttgttactctatggtttttcttaaggcagagaataattaacaggacagttagaaaatgtgaacaggaaatagttgaatacaagctgagaatgttgctaaaaaagaggaagtgagttggaaactaaaggaagctttgtgtttggagggtcatcaaaggagaaaagggttcttttaaaaaaaaaatagaggactcacctcatgcctagactccatgtactaagtctggagtacaagcagaattttcagctgtttccggaaacaagcctgaggggcacatagaccacaagttcccctccaggggttgagagaatgtcttacttaacatgaaattctcccatgttttctagcctagtgcttggcatgttttaggtacccagtaaatatttggtaagtcaaaatgaactttgtaattgagttccaggctttgagaatcaagttggtgattaaaaatcaaaacaaaacaaaacaacagcaaaataaatgagaaatgatggagacttcattttagagtgtgaagggaagattgcaaggatagtaaatgttctcrtctcattttatatgaatcataactgtaataatgcaggacatgtgggcaggttttcagcgacttgctacagctcccctacaatctagct

SEQ ID NO: 52517 - DNA, 519 bp, Homo sapiens
tgacgaggctgcctcctgctggcctccctgcggctgctccactgtggcccttgggccccgctcatcaccaagtgctgcctgagggcttcacctctctcctcccacctttttttcttacctattggcaatgattatttttaaatttttaaaatgcaattgatttttacataaatcacatgggaaataattttctaaaataccccccccttttttttgtaaagagacattttctagtccagtgtgcagaaattcttcatttttctaaagtaaaagaacctgcttcagctgtggttgggaaacccagaacaagaagtgagctgcagttgagagagggctttgkgtgccaccccctgactggggaggcggtggactcggagcaagtgttagaaaatggagccataaaagactccttaaagtgtcgggcgctcagctaacttagggctagaattatatatcatctcttaaaggacctgctgttcttgccttcaggaatgggaagttatcaccaggagctaagag

SEQ ID NO: 52518 - DNA, 502 bp, Homo sapiens
ctctcctgactactggcctgaagctctttccctgtattaaggtacccaagttacaggtgaagacataaaaattgtcccaagaaatgacttgacctctccagctatgagttaattcaagaaagtaacagcaccccccttttcctgtcgcagatgttatttaaaatattgctctrtaagcctccagagcgttttaacaatcaccaaaaactacattgccccaaaggcctaatcgaaatgctgatcatggatattcatagccaacagccttgaatttataaccacctagttctctgtgagtaatggaagcattttccaaaggtgaaaaaaaaaagtgttaaagcaggtaagtgttaaattaggagtaggggagagggaggtcatgggagtgcagaaaagccaggtgtaagaatccaggcttaaggtgtgctggcctgaatgcctggaggcagtaaagtacaggcatggtcagattctgccaacactttaaaggcagagccaatca

SEQ ID NO: 52519 - DNA, 556 bp, Homo sapiens
cagtgagccaagattgcatcactgcactccagcgtgggtgacagagggatacggcatcttaaaaatcaatagataaatacataaataagatgagatatttgaacaaaatgacccacaaggttttggcagtttcacaacgccgtgcttcctttcccagcacttgcagtgtggtctcctgggtgtcgttataatgtatcacctcrgttagataatatcagaagagctttattgtcagatttcacacagaaaagaccagatatggtttgtgttacttcatgttggatgaagccataataattgaatattagagaaggaacctattagagatggattgtgtctaattcacttatttggataactattctattggcgtttgttagcaaaaaaaagccacaggctggcctaactagctataattttataacccttgttttaaaagattaagtggttgttttgggcttagtataggcaggctgctctaataacataaaacgaattttgtttatcatctgaatccttggttattgattggagaatatttattctcttagatttg

SEQ ID NO: 52520 - DNA, 556 bp, Homo sapiens
cagtgagccaagattgcatcactgcactccagcgtgggtgacagagggatacggcatcttaaaaatcaatagataaatacataaataagatgagatatttgaacaaaatgacccacaaggttttggcagtttcacaacgccgtgcttcctttcccagcacttgcagtgtggtctcctgggtgtcgttataatgtatcacctcagttagataatatcagaagagctttattgtcagatttcacacagaaaagaccagatatggtttgtgttacttcatgttggatgaagccataataaytgaatattagagaaggaacctattagagatggattgtgtctaattcacttatttggataactattctattggcgtttgttagcaaaaaaaagccacaggctggcctaactagctataattttataacccttgttttaaaagattaagtggttgttttgggcttagtataggcaggctgctctaataacataaaacgaattttgtttatcatctgaatccttggttattgattggagaatatttattctcttagatttg

SEQ ID NO: 52521 - DNA, 565 bp, Homo sapiens
cagaaggaaattctgggaaggaattgagctcctccactcagtcacgcagcaaatattaaggaagacctactggctgtgtgatctgagccttgatttccttatctgtaaaatggagttgatctacttcctccttcagagtgctcatccaagatccaatctggccactagatatagtttggaagagaagatagaccttacactttaaatgtagtagcccaacggttagagctgaagtttgtacttgggggagtcagggaaggcttccaggagaaggtggcatttgagccaagtcttcaaaagwttactagacttgagcagctgatgctttaaaagagcgtgaactgctttttgagggatgggcagtgaagaaacgacaatcagactcgtagcacattgtacccctccctgctcactgctgttgggcgtttccttcattcctgccttcttttattcagtccatcagcaaaaatctattgggcacctactatgtgcccggcaaataaaatagaacttgaccgttcttttcccactgtgacaaccttgctgacttttttggggtcttatc

SEQ ID NO: 52522 - DNA, 584 bp, Homo sapiens
accgaggctcagaggtagtaagtaacttgccaaaggtttcatagttacatgtgataaaactggaatgtactcaggtctgtaaaattccagtgccatgggtctttccttatcccatacagcctcttgaaagtcagctttccgaggaagacatgccattagaatttgcgtgtaattgtcaaatatggcaagactacctctagaacgaaacacatgaagttactgttccactattacgatggaattggcagttaaatggctctgtacttttaaataatctatattgctttggctgcgagcggcggctgatgcctataatcccaacaatttgggaggstgaggcaggcagatcacttgaggtcaggagtttgagactagcctggccaacatggtgaaaccctgtctccactaaaaatacaaaaaaaaattagccaggtgtggtggtgcatgcctgcagtcccagctactcgggaggctgaggcaagagaattgcttgaacctggcaggcagaggttgcagtgggccaagatcgcaccactgcactgcagcctgggtgacagagcaagactctctcacaaaaaaaaaaa

SEQ ID NO: 52523 - DNA, 1461 bp, Homo sapiens
tgcatattttgcatcaggaaaaataaaagaagcttgagactcttcaaaagtaagacaataattaaacgcagaacctcaaattgtttttcttcttaaaatttctatcttgtttacattatacagggactcccttctgatatttcccacagaacctcaggaaatatcaacactcccgccctttctgaagtttccttggcttcaagtggcttacgattcttttcatgtttcccataagccctgggaaaatatagcaacattttcatcaactgaaatttgcatatcaaagttgtgaagaccatgatatcattcatagactgtgtataaaatattgggttccctgaaacatttgtctattttaaaaatcacatgaatgcagtctaattttaaattatacttggtcgagggtgttttgggttgcttggagttttatttatgttctagcgattatggccacagtttgaataagttttcttgcctgtgaagagcttggtctgatgaaagggataaatcacctcttatccatgatgctgcatacaatgtgacataagccaccttgctgcttattctgggcacttcattattcccattgctgtcagactccttggtaatcctattttaaaagcccaagcaaacttgaagagtcacagagcattgaagagacaagccaacaaacttgaagagacactttcctgaaaggtagttggataagctacttcttgtttcagacaagtctaagtcacttggcctagtcgtacccttaatttggccattctgagatgagcaaacacaccttcccttcagctagttttgaagtgtgcatttccccacatatttaccctggcccactcatcaacacactttcctttctgacaaagtgttgctgcttttgctccagcctcctggcccatatcctgagttctccataggaaatgagtcctgggatgttcaaaatgcgtgtctgcctcacacataattgcaaagatcttttctaactggaaaatatctttgaaatacttattctaaaagaatttcacttagaaaatagctaacagcaactttcattagtatgttctactgaaatgtctttcagcttacacaataaaagcaaagagaaaaacaaccctttttccaccaaagacaaagattaaacaacatccacaagaggtggtgggataacggtgtaaaaagccttaagtaggacaaagaccacttattagactggatgatgttgagcaaatgtttaaaccatgctgtgcctcagtttyctcatctaaaaaaatgaggaattaggctaggtaactatgaaatctctgtcgagtatagtttcaatattaaactttataaatacaacagaaagcccagctttgatatttgactatgtctcttatgcacacatacctgtccttttttcacgtattttctatagcatgttatgtgatttttctataaaagcgcttctcc

SEQ ID NO: 52524 - DNA, 1226 bp, Homo sapiens
tgattataagcctcatgagtacaggttcaacaaaaatttctgaatgaatgaataaataagtaaaaatcagctccatcaatttatgtcttttcctgtggagcatacctattaaaacacagtgacggggacactgagctgaagcaagcagcttgggaatatagagtacaagaaagcattttgttaatgaagaggaaggcatgcagctcacctgaactgatgttctgcgagagctgctgagcagctgcaaacatgttggcaacagactctagaaactaaaccggaaccaggaatagacaattagaaaactatgtgaatgctcttctcattgtcaaagagactgatagtatttctgacattgaagtgattatcagataaccacctcaggtttacagaccatcaactaactgtcccttctggccgtatgtagttaaaaaaggaggatccttggatacagacattctgttttttaattattattttttgagagagggtctcactgtgtcacccaggctggagtgtagtggcacgatctcatctcactgcagcctcgattcctgggctctgcctcagcctgccgccaagtaactagcactacaggtatgtgccaccacacctggataattatttttgtcttttgtagaaatgaggtctcactatgttgacaaggctggttttgaacacctggcctcaagcggtcctcacacctcaacctcccaaagtgctgggattacaagtgtgagccaccatgcctagatgatacaggcattctcaagcacaggtgagacgtttctctaacatataacccactagagttctggaagataccccaaaggaaaagaagtgcttccctggggcataagaaatcaatactccctcaaataaaccaaacagctgtcttctttcaagaacagaaaacaactgagcaaaagagaaggcaagaaaatacaaaatgtccagggcagcctagaaaaagcaaactgaatcagagcaggacccaggagaaatatgatcccatgctgttttgaacttttgttctcttaagtaagtcactggctttacttcatatcatttcttctctaagcttaatgagggagaaaaataggtcttggcccagctgataagggtatgggagatgggtttgtttttgcagaatgttccaaactactcrgaaaaaaaagtagggagctagaaaaccaatgatgcaaagtcaagtgatccttgaggaa

SEQ ID NO: 52525 - DNA, 506 bp, Homo sapiens
ctgggtttatctttcttctgatcctatcccaccaggagattgatggcaacgctctgctgttgctgaagagtgacatggtcatgaagtacctgggcctgaagctgggaccygcactgaaactctgctaccacattgacaaactgaagcaagccaagttctgacttttttaaaaagacagaagcgaaacccaaaacaacagatcccaagattatcttctgccttaccaatatcccgccaacatcacaaactagactctcctcttaaaattaacagccacagagacgtggtctttttataaaacttgtgaatctttgccttttgaagaatttaacatggaccttttcgagaggctcctctgtgttcataatttgccaaaaaattacaaaagcctgtgatttttaacatccctgttatgctggtttctcttaaagtgggtcctatttgcataacgagagagtggggaactgaatgcttatgcccaaggagagttctggagggttcaaagg

SEQ ID NO: 52526 - DNA, 506 bp, Homo sapiens
ctgggtttatctttcttctgatcctatcccaccaggagattgatggcaacgctctgctgttgctgaagagtgacatggtcatgaagtacctgggcctgaagctgggacctgcactgaaactctgctaccacattgacaaactgaagcaagccaagttctgacktttttaaaaagacagaagcgaaacccaaaacaacagatcccaagattatcttctgccttaccaatatcccgccaacatcacaaactagactctcctcttaaaattaacagccacagagacgtggtctttttataaaacttgtgaatctttgccttttgaagaatttaacatggaccttttcgagaggctcctctgtgttcataatttgccaaaaaattacaaaagcctgtgatttttaacatccctgttatgctggtttctcttaaagtgggtcctatttgcataacgagagagtggggaactgaatgcttatgcccaaggagagttctggagggttcaaagg

SEQ ID NO: 52527 - DNA, 506 bp, Homo sapiens
ctgggtttatctttcttctgatcctatcccaccaggagattgatggcaacgctctgctgttgctgaagagtgacatggtcatgaagtacctgggcctgaagctgggacctgcactgaaactctgctaccacattgacaaactgaagcaagccaagttctgacttttttaaaaagacagaagcgaaacccaaaacaacagatcccaagattatcttctgccttaccaatatcccgccaacatcacaaamtagactctcctcttaaaattaacagccacagagacgtggtctttttataaaacttgtgaatctttgccttttgaagaatttaacatggaccttttcgagaggctcctctgtgttcataatttgccaaaaaattacaaaagcctgtgatttttaacatccctgttatgctggtttctcttaaagtgggtcctatttgcataacgagagagtggggaactgaatgcttatgcccaaggagagttctggagggttcaaagg

SEQ ID NO: 52528 - DNA, 506 bp, Homo sapiens
ctgggtttatctttcttctgatcctatcccaccaggagattgatggcaacgctctgctgttgctgaagagtgacatggtcatgaagtacctgggcctgaagctgggacctgcactgaaactctgctaccacattgacaaactgaagcaagccaagttctgacttttttaaaaagacagaagcgaaacccaaaacaacagatcccaagattatcttctgccttaccaatatcccgccaacatcacaaactagactctcctcttaaaattaacagccacagagacgtggtctttttataaaacttgtgaatctttgccttttgaagaatttaacatggaccttttcgagaggctcctctgtgttcataatttgccaaaaaattacaaaagcctgtgatttttaacatccctgttatgctgrtttctcttaaagtgggtcctatttgcataacgagagagtggggaactgaatgcttatgcccaaggagagttctggagggttcaaagg

SEQ ID NO: 52529 - DNA, 667 bp, Homo sapiens
gactatgagtgtcatcaaatgacaggagtccttccttgctgtgtcattttctggctgcccgatctcacgcatctctaaagtgaaaatttcctaatattttcaggtagtctgctccagggtttatcttaagaagtagtgaaactctcctttattttgttgtcacttgtacacattacacattgttctatcatttttcaacttaggaaaaacaaaatttcacataagggatcacatcccttatttttttttttcacttcttcctaattttataaagatgtgtctacagtagaggcccagtgtggtggctcatgcctgtaaccccaacactttgggaggacaaagtgagtgtatctcttgagaccaggagttcaagaccagcctgggaaacatagtgagatcctatccctacaaaacaattaaaaaattaactggtcactggtcacagtggtgtgcgcctgtagtcccagctactcagaaggctgaggaggaaggctcacttgagcccaggagttggaggctgcagtgagccataattgtgccactgcactccagcttgggccatggarcaagaccctgtctcttaaaaaataataataataaaataaaaatataaaaaatgtgtttataataaataaatcagaaaagacataaaataatgaagcaaaaa

SEQ ID NO: 52530 - DNA, 484 bp, Homo sapiens
ggactaaagatgagagtactgcccttgagggagcttatagtcttacattgaagtttgccacctcggcctgctttctggttctcttttctatcaaaatttggccattcccactaggttccacaaagattcaccacagctctacygaaatgggacatatgagggcatcgatgctaaagattcaccttgtgccccaagaattatctgtattcctttctagggcaaaacagtaaactccttgtccccatatataattcactctcaggtccccaaggtataccttcagcaaagttgatcttcttcctttcttcccatgacaattattgctgtgaagttatttaagttggggatgaattacaaacacagaagtcacaggagtctaataatctaggcaaagaactaagggagacgtcctaaggggctctaaatttaaggaatcctatcacacccttagcacctcccgtctgtgccacgtatctccaccttg

SEQ ID NO: 52531 - DNA, 595 bp, Homo sapiens
acggaagcacagagaagttcaagaacttgtctggtaagtggcagggtcaggatttggaccaaaggccacctgcgttcagaaactgctcattaccactttgcagggctacctattaatgtggttttgagacactgagtacagctagatctgaacgtggttcacacatagcctgaacctacaccagcacaagaccattacattttcctccaaaatcaacaccaggaattcatagagaacataataataaagaaaattttgaatatgttttttacagggtacacattaagaaggctttctcctgcatttaaagtagttgtttagagatcaaggaagggttcataactgaaagatgacacaggcttagggagtgattatatttttttaatattaaaagttttataaggaaaaactttaagtgtaaatcaatataaaaattcaaggctttgaagattatctagcaactttgacaattatcttcaataaggtaaaacagtgtgcaaactgccatctagtatttagatattgatgatattgatggtttgttaagtataagactcaatmtcgaaaaaaattctgtaactattaggctcatcaa

SEQ ID NO: 52532 - DNA, 621 bp, Homo sapiens
tcaaatgtgctttagcacagcgcaggcgaccaggggagctccatggacgatggccacggaactgcgatcactactacaacacagcccagaatgaaagcaagtaagcaagtgctctaatggagaaagaaaccacgtgccgagggtccgcaggaaaggagcaagtgatcctgytgtggaaggtcaaggacacagtctcagaagcagcagcacaggagctgggcatcctggagctccagcgttcttggtggaggaaatggcagaagcaaaggcacaaggtgtgggaggagctgcaggatccttgtgtgtgtgtgtgtgtgtgtgtgtgtgtgtgtgtgtgggtctagggtaggagatgaggaaggagaggagatggggagggaggggggtgagatcaggggatacttaaatgctggagggaggaatttgaaccctgtcccagaggtgtgggagccactgaaggatttcgagcaggggtggggcatggcccactgggatttaacatgtctgtctgaggtggcttggatgtggggacaggaagcggaaagggtagctaaaagggggctgatatttcaggtgggagatgctgaagcttatacagaatgtcaaggggggaactgggtg

SEQ ID NO: 52533 - DNA, 621 bp, Homo sapiens
tcaaatgtgctttagcacagcgcaggcgaccaggggagctccatggacgatggccacggaactgcgatcactactacaacacagcccagaatgaaagcaagtaagcaagtgctctaatggagaaagaaaccacgtgccgagggtccgcaggaaaggagcaagtgatcctgctgtggaaggtcaaggacacagtctcagaagcagcagcacaggagctgggcatcctggagctccagcgttcttggtggaggaaatggcagaagcaaaggcacaaggtgtgggaggagctgcaggatccttgtgtgtgtgtgtgtgtgtgtgtgtgtgtgtgtgtgtgggtctagggtaggagatgaggaaggagargagatggggagggaggggggtgagatcaggggatacttaaatgctggagggaggaatttgaaccctgtcccagaggtgtgggagccactgaaggatttcgagcaggggtggggcatggcccactgggatttaacatgtctgtctgaggtggcttggatgtggggacaggaagcggaaagggtagctaaaagggggctgatatttcaggtgggagatgctgaagcttatacagaatgtcaaggggggaactgggtg

SEQ ID NO: 52534 - DNA, 621 bp, Homo sapiens
tcaaatgtgctttagcacagcgcaggcgaccaggggagctccatggacgatggccacggaactgcgatcactactacaacacagcccagaatgaaagcaagtaagcaagtgctctaatggagaaagaaaccacgtgccgagggtccgcaggaaaggagcaagtgatcctgctgtggaaggtcaaggacacagtctcagaagcagcagcacaggagctgggcatcctggagctccagcgttcttggtggaggaaatggcagaagcaaaggcacaaggtgtgggaggagctgcaggatccttgtgtgtgtgtgtgtgtgtgtgtgtgtgtgtgtgtgtgggtctagggtaggagatgaggaaggagaggagatggggagggaggggggtgagatcaggggatacttaaatgctggagggaggaatttgaaccctgtcccagaggtgtgggagccactgaaggatttcgagcaggggtggggcatggcccactgggatttaacatgtctgtctgaggtggcttggatgtggggacaggaagcggaaagggtagcyaaaagggggctgatatttcaggtgggagatgctgaagcttatacagaatgtcaaggggggaactgggtg

SEQ ID NO: 52535 - DNA, 621 bp, Homo sapiens
tcaaatgtgctttagcacagcgcaggcgaccaggggagctccatggacgatggccacggaactgcgatcactactacaacacagcccagaatgaaagcaagtaagcaagtgctctaatggagaaagaaaccacgtgccgagggtccgcaggaaaggagcaagtgatcctgctgtggaaggtcaaggacacagtctcagaagcagcagcacaggagctgggcatcctggagctccagcgttcttggtggaggaaatggcagaagcaaaggcacaaggtgtgggaggagctgcaggatccttgtgtgtgtgtgtgtgtgtgtgtgtgtgtgtgtgtgtgggtctagggtaggagatgaggaaggagaggagatggggagggaggggggtgagatcaggggatacttaaatgctggagggaggaatttgaaccctgtcccagaggtgtgggagccactgaaggatttcgagcaggggtggggcatggcccactgggatttaacatgtctgtctgaggtggcttggatgtggggacaggaagcggaaagggtagctaaaagggggctgatatttcaggtgggagatgctgaagcttrtacagaatgtcaaggggggaactgggtg

SEQ ID NO: 52536 - DNA, 547 bp, Homo sapiens
tgttagtgactgcttcagaactcttaaaagtttgtttgacagattcagcccagatttcacccagtagctttcctccctcgccccatgcctgtctttcaagcaaccaagcagtatcttctgtttactttgtacaaaggttggttctgtgaaggttccagaaacttaaatgatagatgcctttgaggatctgacagcctgtttagggaggtaggacccatatatacatggagaaagacactggcaaatataaggcaatgcatgtatgccagtcatcctgagacaggagaatagggtctggaagcagggaacctaaggctgaatcackctgacttcctagaaccaagtcaaaaggaaaaacccaactttccacacctaagtaacaaaaggaccagaagctacaccttttgcaagtccccttccttttttctatgtagcagatggaaaattgaaagtacctctgattggttgctttttgaaaccaatcagacatttgcataggagtgtaactttgtaactttgcttcagcctctgatcggttgcgttccac

SEQ ID NO: 52537 - DNA, 547 bp, Homo sapiens
tgttagtgactgcttcagaactcttaaaagtttgtttgacagattcagcccagatttcacccagtagctttcctccctcgccccatgcctgtctttcaagcaaccaagcagtatcttctgtttactttgtacaaaggttggttctgtgaaggttccagaaacttaaatgatagatgcctttgaggatctgacagcctgtttagggaggtaggacccatatatacatggagaaagacactggcaaatataaggcaatgcatgtatgccagtcatcctgagacaggagaatagggtctggaagcagggaacctaaggctgaatcactctgacttcctagaaccaagtcaaaaggaaaaacccaactttccacacctaagtaacaaaaggaccagaagctacaccttttgcaagtccccttccttttttctrtgtagcagatggaaaattgaaagtacctctgattggttgctttttgaaaccaatcagacatttgcataggagtgtaactttgtaactttgcttcagcctctgatcggttgcgttccac

SEQ ID NO: 52538 - DNA, 575 bp, Homo sapiens
gcaacatatttttaaataattcatgggtcaaagaagaaaacaaaattagaaactaaaaaatatttcaacatatataataatgagacacatatataataatgagaaatggcatatcaaaaatttatgggatgcaaagcagtatataaagaaaaaagtaatcattttcatgaaaagatcaatcatttggaagactcaatattgctaagatgccaatcttgctttaactattctttagaggccatgcaatccccattaaatactaccagcytgaagaataacaagctgaatgaagaactgagaatagctgcagaaatactgaagaacatttgacagctggatccttacactatcacaaattaagacttactataatgctacagaaattaagaccatggagtattattgcagggataaaaacctacaacaatggaacagaacagagtccagaaacagatccacacaataacctaagtcattacatgggctctactgcaattcgttgttgggaggatggggagacacaattcattaattgcatgatgctgagacaagttgactaggcatctatatgaaga

SEQ ID NO: 52539 - DNA, 563 bp, Homo sapiens
ttaaaacatgcaaaatgacccatggagacagaaataagaggagtgattatctttggtgagaaattccgactgggaagagacaagaaagagcctcctggagtactagcagtgttccatatcttgatcrggatgctgctttcaagggaacacacatatataaaaattcatcaaatccttcacttgagattacttcccttcaagttataccctcatttacaaaaatagaagcttccatagctttcaaatctattcctctccttgtttttcttgtttagaacctcatcacctcttgcctcaattataataggttcccataatcattggtctcctcagacttatgttcatattactcaaggcacttgataaagtcttgcccagaaatcttcctcaagagtagcactttctgcattatcagaaaactcaaaaactgcaagtttcacattgcctagagaattaagtctacatttcttagcattttatctgcttaaagtccccaaatgaaatttcaaataacatttctaggtacaacttttctaagaaggctatttagaaatatatattta

SEQ ID NO: 52540 - DNA, 563 bp, Homo sapiens
ttaaaacatgcaaaatgacccatggagacagaaataagaggagtgattatctttggtgagaaattccgactgggaagagacaagaaagagcctcctggagtactagcagtgttccatatcttgatcaggatgctgctttcaagggaacacacatatataaaaattcatcaaatccttcacttgagattacttcccttcaagttataccctcatttacaaaaatagaagcttccatagctttcaaatctattcctctccttgtttttcttgtttagaacctcatcacctcttgcctcaattataataggttcccataatcattggtctcctcagacttatgttcatattactcaaggcacttgataaagtcttgcccagaaatcttccycaagagtagcactttctgcattatcagaaaactcaaaaactgcaagtttcacattgcctagagaattaagtctacatttcttagcattttatctgcttaaagtccccaaatgaaatttcaaataacatttctaggtacaacttttctaagaaggctatttagaaatatatattta

SEQ ID NO: 52541 - DNA, 382 bp, Homo sapiens
ctatgtggtctggcttccaagccaacactcccaaccgccatgcagaactcaggaggtctgtcaagttgctaccaaacctaagggctgcttatgtagaaatcagtcaaatgtggttgctggttgctgttargaaactgcagtcattgcacttgaatagtaatttccacattataagtaacactgcagcctagtgaattgaatggtgacatggttctcagtggtttatagcacgttgccatgtgaaaggtgccctgtcttgtggcatgagcattttttccctggtggtagagccttacagaggaaatggctgaataaggctatcagagtttgaaagcacttttcatgccctgttccacaacttgtgctctgatctctcttatac

SEQ ID NO: 52542 - DNA, 1344 bp, Homo sapiens
gccgtataataaaatatcatgaatccatgaaaaatgttatagactatgtgataacatgagaagatactgtgtttacacaaacaaacaaacaaaaaagcaggctacaaaacaggaattactgtaaaactccaaagtgatttggaagaatatgtgtatcaagcagtgtttaagaatgatgatttcagccaggcgcagtggctcacatctgtaatcccagcactttgggaggccgaggygggcggatcccgaggtcaggagatcgagaccatcctggctaacatggtgaaaccccgtctctactaaaaatacaaaaaaattagcctggcgtggtggcaggccctgtagtcccaactactcaggaggctgaggcaggagaatggcatgaacccaggagccggagcttgcagtgagtcgagatcgcgccactgcactccagcctgggcaacagagtgaggagactccgtctcaaaaaaaagaaaaaatgatgatttctccaaagggaaaagtgattttcttttcttttcatttgaatttttctaagaagtcatatgtactttgtaataaaaacatacacatactacaatctattataaagaaaaaatgttcaggatcaaacctggaattttaggtctcaagctggaagagagataccaaacaagaaattcagagaaaaatcaaatatcctattaaaataaaataatgtgccctctgagagctgccagctttaactggctagattgttatcatggccaaatgaagtttcctaacaactgatgttaaaaccaaattggcttcattaactcagaactcttacaatttcctcttcaaaccttaggaaacatgccagtgacaaggacagcaaaacacacacacacattaaatattaatgaaaaaagtgtctaaggtaaatatcaacacatttactctccctgtaatacagtactgacaggagttaaatactgtaggccattactatcaagtatttactactggaatatgttctctatagacttgcactgttggctagattctcctctacatatatatatacttagcctgtccaattagtctataaactcccaaagcacaaggactctgctctgtatttcactgtattccttacagtgcttagcacagagtagacgcttgaaaatatctcttctttaattaaagacatttccatactctgtttggaacacagctcccgcacagtctatcgaaagtgacaaagtcccaatttgccaaatggaaagaacttccaaaatgtatctgaaaaaggagcaaatggaaaactgccaccttcatctggtcaatccaatcaagaaaaatggggattttatctag

SEQ ID NO: 52543 - DNA, 577 bp, Homo sapiens
ccccatttagaatataaaaacctcaaggacaggggacacgatcccacttcattccatcctctcccaaacatatcatgcacacagttagtgctgtctaaatgctgtctgagtaacagtggaaatccttgacatgccctgggcatatgtcaagccctgggaaggacctgtacaaatacagacctcagtgtatgcatgacaatacacacattgatgtcttccatgcatacacatggtatagctggtatgatacctttaacggaacatctctaattaaacaacaaaaatgctattctgcctgtgcctgcttggcagttgtggattggtggccagagcactttgcttccacatttctgcagtgtgccgttccctgctcttcaactgtcctccttacagcccaggctctgcacctcctgtcgttcagtatctggtcttccttgaccyctctggctggatgcaagatccatttgcttggagctgtgagctcagcttctctcatgcaaaccttcctatctcttcctagctttggggcattcacccacaatcttggagacccagctccacagatggtcccagtgga

SEQ ID NO: 52544 - DNA, 542 bp, Homo sapiens
taaattattagcaaattaaaataatcagtgatgaagctcagaataaaaacatgagtaaaaaagaatgcccttataaaatctctttagcaatattttcctttaccaatagaaatttaataaagttaaataaagctgagagaacaattttattttaaaaattgatagctgtagccttaggagttgaacatttcaatataggataaggtttacatatttaaaatggaaacgtgccaacattttaaatgttcttatttatagttagcaacattatttcagaactggttatctttctcttatttttgttaccaaaataacttggaaatgagatcaagagattacagataggacttttgatgttatactgacacactgtttaacaagaccaccaaaggacattcaattatttagagaaatataacttcatttgacttagttattattgtgcactaaaggctctgattctccaatgttatgttgttacagatcttgtctgctagtgatgcaaatratctctgtatgggagaaaagataacctcaaggct

SEQ ID NO: 52545 - DNA, 647 bp, Homo sapiens
ggaactgcttccagtgaatccctggtctccaggaactggcgtctggcarttctttactcaggttggaaatccttcaaatacgtgtgtgggaatgccaatttaaacattgcacgtacactgacacctttttcaacctccttaaaaacacagggcaacatggtatatggaacaccttgccacccacctcattggcttccaaagctgagcattcccagctgctggaatgagacagggcgccagctggatgcagacagcattgtgaacagtgccctggatcccacaggagcagcaagaaactgaaacccattggaatgtgctttgggttagcagagatgaccttgaaaccagtctagcagcagaaaactacaatctacagggtacttgcagctgtgatagggagacagaggagcaagcactaggcaattcatgctggaggctggccaggtgtgctcctcccctcccaccaggggcagagaggatggaaattatgtgattgccaagggcagctgagaaaaggagtcatgcctggggttttgctttgttgtgagctgagttgggggaataaagatctgagaggagcggaggaaggctgactatgagtggtgaagacggtgaaggccagcagcagccttccacacctattccat

SEQ ID NO: 52546 - DNA, 647 bp, Homo sapiens
ggaactgcttccagtgaatccctggtctccaggaactggcgtctggcagttctttactcaggttggaaatccttcaaatacrtgtgtgggaatgccaatttaaacattgcacgtacactgacacctttttcaacctccttaaaaacacagggcaacatggtatatggaacaccttgccacccacctcattggcttccaaagctgagcattcccagctgctggaatgagacagggcgccagctggatgcagacagcattgtgaacagtgccctggatcccacaggagcagcaagaaactgaaacccattggaatgtgctttgggttagcagagatgaccttgaaaccagtctagcagcagaaaactacaatctacagggtacttgcagctgtgatagggagacagaggagcaagcactaggcaattcatgctggaggctggccaggtgtgctcctcccctcccaccaggggcagagaggatggaaattatgtgattgccaagggcagctgagaaaaggagtcatgcctggggttttgctttgttgtgagctgagttgggggaataaagatctgagaggagcggaggaaggctgactatgagtggtgaagacggtgaaggccagcagcagccttccacacctattccat

SEQ ID NO: 52547 - DNA, 647 bp, Homo sapiens
ggaactgcttccagtgaatccctggtctccaggaactggcgtctggcagttctttactcaggttggaaatccttcaaatacgtgtgtgggaatgccaatttaaacattgcacgtacactgacacctttttcaacctccttaaaaacacagggcaacatggtatatggaacaccttgccacccacctcattggcttccaaagctgagcattcccagctgctggaatgagacagggcgccagctggatgcagacagcattgtgaacagtgccctggatcccacaggagcagcaagaaaytgaaacccattggaatgtgctttgggttagcagagatgaccttgaaaccagtctagcagcagaaaactacaatctacagggtacttgcagctgtgatagggagacagaggagcaagcactaggcaattcatgctggaggctggccaggtgtgctcctcccctcccaccaggggcagagaggatggaaattatgtgattgccaagggcagctgagaaaaggagtcatgcctggggttttgctttgttgtgagctgagttgggggaataaagatctgagaggagcggaggaaggctgactatgagtggtgaagacggtgaaggccagcagcagccttccacacctattccat

SEQ ID NO: 52548 - DNA, 599 bp, Homo sapiens
tacgtgtgccatgttggtttgctgcacccattaactcgtcatttacattaggtatttctactaatgctatccctcccccagccctcaccccatgacaggccctggtgtgtgatgttccccgtcctgtgtccaagtgttctcattgttcagttcccacccatgagtgagaacatgctygcaccgccgcttctaaatgttttaaaaacaaagacaccaatgcccttcattggggaaatgaaagacttttaagtaaaacgattttgagtgaaaataatatttgttgttttaaaaagttaatattaaccactctccatcatatgttggaattatctttaagatgtgaaagttaaaattagaaaccttgtaaaggaaaaataggaaatagtttcatgaacttgacacaggaaaatatttcttagactagatactgtagcactcaccacaataagaaatcaagcgaattgcacttcatttttaaaaagcttctccttattatgttgttgtttaacaacttaaacgctatctctagaccaggaataattatttgctatataatacagcaaaaaatatgtatgtataaatggactcattcaaaatat

SEQ ID NO: 52549 - DNA, 591 bp, Homo sapiens
agtcaggcagggggaggggaaattcagcaagagggtccctgacctgtggctttgagaaggctctggaagaagctctggttgtagatcctggctacaccactgatctccggcacctgtgtctcctccacggtgcgtccattcacaaagttggctgtgatgccaatggccagtttgcctcgcatttctcgaactttgaagcctagaggtggcggtaggtgaacaatggcaggaggagggggttataacaatctagaaaggcccaggatgtgccagagatgctggcttctttgagggaagtgatcactcaccttcagggacgaatttacctcctgcagccgagataaggacgtcaaattcatagttggccagctgggcaggggggttgggttggagctgggcacgccagccactccctagggcagggggtatgagaggcacaaaggtgtagaagtcgtaagagcccctatactctcaggacaaaccagtgaaatcatcaaaacgtgtaaaggactctctggtttagaaagcaatgatatattayctatcagattacaccttcacagcagctatggaaggcaggtgaggaaggaa

SEQ ID NO: 52550 - DNA, 1227 bp, Homo sapiens
ttgtttgtaaaagtaaaacagtgatgatctcaatgcccactgataggggaaaggtttaattcaccatgattcataaataaagagaaattctatataaagtggaatagatttgtgtggcatggaaggatcgccaaaaagtattttaagattaaaaaaaaagtaaaaaatatgtgcagaattatgcctttttttcatagaaaaaagtctaggggattcaccgctcagcaggccatcctggctatctgggcataaccaccacccagagtgtaatttcttctaaggcaatcacccaagtctttcacattttataccttcacagccctgacaaaaactgctacataataaacactaaacaaatgcctatgaaaggcaagaaggacgtaagagagggaaagaagcaaagaaatgaacaatcgtagcacctgaggccggattaaagaaaggaaaaaagcttgtaagggtcttttcatattgacaaagctttagtggaacactcttttggtgggttttcaagggatcagaacgtttgggcagaaaacagaaaaatacagacataaagaagagacctaaatatataagcataacattgggaaaaagccttttcagaactgcaactcatgccttattcgaacatgttctgaacaaggtctcttatctaaagttgtttctggcttcagacagcaggtggcagcagaatcaagctttctggttgcagaaacttctggagccagccagctgtataaagtttcaaatggttttcggaggagaagcagcttttgagtaaaaacctttaatctaaaaatctaaactcgacacaaaacaaaaacaaaacagagtgaggagctggtgccattggcccctgccatgacagatcctgatgtcattccctgcctgccatctacagagccacaccttgtccttcgaagaaattctgggatttctactggcagcggccaggaaaggaacccaaggttggtctgtcctgttctgacgttgtccttgtcacatgtggaagctggttcgccaggaaacaggctctggtcaaggctgggctcactggagaggtcagcccaaactcaaaacwcatttatgggtaaaggaagggttttttaaaaggagactttgcaggcaacaaaaagaaatatagtattgatatatgccacaatgtggatgaacctcaaaaacattatgttaagtcaaagaaatcagtcacaaaaagaccacata

SEQ ID NO: 52551 - DNA, 1227 bp, Homo sapiens
ttgtttgtaaaagtaaaacagtgatgatctcaatgcccactgataggggaaaggtttaattcaccatgattcataaataaagagaaattctatataaagtggaatagatttgtgtggcatggaaggatcgccaaaaagtattttaagattaaaaaaaaagtaaaaaatatgtgcagaattatgcctttttttcatagaaaaaagtctaggggattcaccgctcagcaggccatcctggctatctgggcataaccaccacccagagtgtaatttcttctaaggcaatcacccaagtctttcacattttataccttcacagccctgacaaaaactgctacataataaacactaaacaaatgcctatgaaaggcaagaaggacgtaagagagggaaagaagcaaagaaatgaacaatcgtagcacctgaggccggattaaagaaaggaaaaaagcttgtaagggtcttttcatattgacaaagctttagtggaacactcttttggtgggttttcaagggatcagaacgtttgggcagaaaacagaaaaatacagacataaagaagagacctaaatatataagcataacattgggaaaaagccttttcagaactgcaactcatgccttattcgaacatgttctgaacaaggtctcttatctaaagttgtttctggcttcagacagcaggtggcagcagaatcaagctttctggttgcagaaacttctggagccagccagctgtataaagtttcaaatggttttcggaggagaagcagcttttgagtaaaaacctttaatctaaaaatctaaactcgacacaaaacaaaaacaaaacagagtgaggagctggtgccattggcccctgccatgacagatcctgatgtcattccctgcctgccatctacagagccacaccttgtccttcgaagaaattctgggatttctactggcagcggccaggaaaggaacccaaggttggtctgtcctgttctgacgttgtccttgtcacatgtggaagctggttcgccaggaaacaggctctggtcaaggctgggctcactggagaggtcagcccaaactcaaaacacatttatgggtaaaggaagsgttttttaaaaggagactttgcaggcaacaaaaagaaatatagtattgatatatgccacaatgtggatgaacctcaaaaacattatgttaagtcaaagaaatcagtcacaaaaagaccacata

SEQ ID NO: 52552 - DNA, 1227 bp, Homo sapiens
ttgtttgtaaaagtaaaacagtgatgatctcaatgcccactgataggggaaaggtttaattcaccatgattcataaataaagagaaattctatataaagtggaatagatttgtgtggcatggaaggatcgccaaaaagtattttaagattaaaaaaaaagtaaaaaatatgtgcagaattatgcctttttttcatagaaaaaagtctaggggattcaccgctcagcaggccatcctggctatctgggcataaccaccacccagagtgtaatttcttctaaggcaatcacccaagtctttcacattttataccttcacagccctgacaaaaactgctacataataaacactaaacaaatgcctatgaaaggcaagaaggacgtaagagagggaaagaagcaaagaaatgaacaatcgtagcacctgaggccggattaaagaaaggaaaaaagcttgtaagggtcttttcatattgacaaagctttagtggaacactcttttggtgggttttcaagggatcagaacgtttgggcagaaaacagaaaaatacagacataaagaagagacctaaatatataagcataacattgggaaaaagccttttcagaactgcaactcatgccttattcgaacatgttctgaacaaggtctcttatctaaagttgtttctggcttcagacagcaggtggcagcagaatcaagctttctggttgcagaaacttctggagccagccagctgtataaagtttcaaatggttttcggaggagaagcagcttttgagtaaaaacctttaatctaaaaatctaaactcgacacaaaacaaaaacaaaacagagtgaggagctggtgccattggcccctgccatgacagatcctgatgtcattccctgcctgccatctacagagccacaccttgtccttcgaagaaattctgggatttctactggcagcggccaggaaaggaacccaaggttggtctgtcctgttctgacgttgtccttgtcacatgtggaagctggttcgccaggaaacaggctctggtcaaggctgggctcactggagaggtcagcccaaactcaaaacacatttatgggtaaaggaagggttttttaaaaggagactttgcaggcaacaaaaagaaatatagtattgatatatgccacaatgtggatgaacctcaaaaacatyatgttaagtcaaagaaatcagtcacaaaaagaccacata

SEQ ID NO: 52553 - DNA, 611 bp, Homo sapiens
catttgcataagtcttgatttcagaacaaacttcagtggggaaaaggtggtcacagcactttayccattttgctatctaaaattgatctgtggtatgattctgaagccaacagacttgtggagacttcctgatgtccagagcatgactaagatagtgtgtttctgaagctagaaagtggttgatggcttcttgatccttagctttcagactatggtaggagcggcgattcttctaacagggcagttctgtggtgttattctgtgagtcattcctggaggccacatttacagcctgccccaccaaccctccaatggttttgcaatccctaaatttagtgacatttcagttatctcttgctgtgtaataagcaccccaaaaacttagtttggctgggcaattctgctgatcctgcctggctccacaggcaggtgggtgtattcagctgtcagtggccctactttgtctcactcgtatgtctaggattttggcagggatgccttgaaaggctgagacctctctctcctatggtctctcatcattcagtaatctagcctgagcttccttacaggacggctgctttcttctaagagggtgagagtgggagccgcaa

SEQ ID NO: 52554 - DNA, 611 bp, Homo sapiens
catttgcataagtcttgatttcagaacaaacttcagtggggaaaaggtggtcacagcactttatccattttgctatctaaaattgatctgtggtatgattctgaagccaacagacttgtggagacttcctgatgtccagagcatgactaagatagtgtgtttctgaagctagaaagtggttgatggcttcttgatccttagctttcagactatggtaggagcggcgattcttctaacaggscagttctgtggtgttattctgtgagtcattcctggaggccacatttacagcctgccccaccaaccctccaatggttttgcaatccctaaatttagtgacatttcagttatctcttgctgtgtaataagcaccccaaaaacttagtttggctgggcaattctgctgatcctgcctggctccacaggcaggtgggtgtattcagctgtcagtggccctactttgtctcactcgtatgtctaggattttggcagggatgccttgaaaggctgagacctctctctcctatggtctctcatcattcagtaatctagcctgagcttccttacaggacggctgctttcttctaagagggtgagagtgggagccgcaa

SEQ ID NO: 52555 - DNA, 611 bp, Homo sapiens
catttgcataagtcttgatttcagaacaaacttcagtggggaaaaggtggtcacagcactttatccattttgctatctaaaattgatctgtggtatgattctgaagccaacagacttgtggagacttcctgatgtccagagcatgactaagatagtgtgtttctgaagctagaaagtggttgatggcttcttgatccttagctttcagactatggtaggagcggcgattcttctaacagggcagttctgtggtgttattctgtgagtcattcctggaggccacatttacagcctgccccaccaaccctccaatggttttgcaatccctaaatttagtgacatttcagttatctcttgctgtgtaataagcaccccaaaaacttagtttggctgggcaattctgctgatcctgcctggctccacaggyaggtgggtgtattcagctgtcagtggccctactttgtctcactcgtatgtctaggattttggcagggatgccttgaaaggctgagacctctctctcctatggtctctcatcattcagtaatctagcctgagcttccttacaggacggctgctttcttctaagagggtgagagtgggagccgcaa

SEQ ID NO: 52556 - DNA, 611 bp, Homo sapiens
catttgcataagtcttgatttcagaacaaacttcagtggggaaaaggtggtcacagcactttatccattttgctatctaaaattgatctgtggtatgattctgaagccaacagacttgtggagacttcctgatgtccagagcatgactaagatagtgtgtttctgaagctagaaagtggttgatggcttcttgatccttagctttcagactatggtaggagcggcgattcttctaacagggcagttctgtggtgttattctgtgagtcattcctggaggccacatttacagcctgccccaccaaccctccaatggttttgcaatccctaaatttagtgacatttcagttatctcttgctgtgtaataagcaccccaaaaacttagtttggctgggcaattctgctgatcctgcctggctccacaggcakgtgggtgtattcagctgtcagtggccctactttgtctcactcgtatgtctaggattttggcagggatgccttgaaaggctgagacctctctctcctatggtctctcatcattcagtaatctagcctgagcttccttacaggacggctgctttcttctaagagggtgagagtgggagccgcaa

SEQ ID NO: 52557 - DNA, 611 bp, Homo sapiens
catttgcataagtcttgatttcagaacaaacttcagtggggaaaaggtggtcacagcactttatccattttgctatctaaaattgatctgtggtatgattctgaagccaacagacttgtggagacttcctgatgtccagagcatgactaagatagtgtgtttctgaagctagaaagtggttgatggcttcttgatccttagctttcagactatggtaggagcggcgattcttctaacagggcagttctgtggtgttattctgtgagtcattcctggaggccacatttacagcctgccccaccaaccctccaatggttttgcaatccctaaatttagtgacatttcagttatctcttgctgtgtaataagcaccccaaaaacttagtttggctgggcaattctgctgatcctgcctggctccacaggcaggtgggtgtattcagctgtcagtggccctactttgtctcactcrtatgtctaggattttggcagggatgccttgaaaggctgagacctctctctcctatggtctctcatcattcagtaatctagcctgagcttccttacaggacggctgctttcttctaagagggtgagagtgggagccgcaa

SEQ ID NO: 52558 - DNA, 585 bp, Homo sapiens
gaactcctggtctcaagggattctcccacctcagcctcccaagtagctgagactacaggcatgtgccaccaaacctggctaatttttaaagtttttgtagagacaaggtctcrctatgttgcccaggctggtctcgaacttctggcttcaaatgatcctttcacctcagcctcccaaaatgttgggattacaggcgcgagccactatacctggcctctattatttatttctaatttgtttcttttgtcggaatagataacagtctcgagcatcttcatgatatagatttttttcttaaactcttcccttggcgtacatttataggagtgagattactgggtgaaaagtaaggtgctgttccttggctaatgggatgttcactgcaagttcttggaaagaaggaggatgcagtggatggagtgcttaaataacaagagtctagcagccatgggaaaagaattggggtttgggagatgatactagaataagggagactagctaggaggataaaatgacctcaaaggtatgaaggcctggtcttcacagttacagtgggattgggaaggaaatgaataagtaagacat

SEQ ID NO: 52559 - DNA, 612 bp, Homo sapiens
actgcttccagtgaatccctggtctccaggaactggcgtctggcarttctttactcaggttggaaatccttcaaatacgtgtgtgggaatgccaatttaaacattgcacgtacactgacacctttttcaacctccttaaaaacacagggcaacatggtatatggaacaccttgccacccacctcattggcttccaaagctgagcattcccagctgctggaatgagacagggcgccagctggatgcagacagcattgtgaacagtgccctggatcccacaggagcagcaagaaactgaaacccattggaatgtgctttgggttagcagagatgaccttgaaaccagtctagcagcagaaaactacaatctacagggtacttgcagctgtgatagggagacagaggagcaagcactaggcaattcatgctggaggctggccaggtgtgctcctcccctcccaccaggggcagagaggatggaaattatgtgattgccaagggcagctgagaaaaggagtcatgcctggggttttgctttgttgtgagctgagttgggggaataaagatctgagaggagcggaggaaggctgactatgagtggtgaagacggtga

SEQ ID NO: 52560 - DNA, 612 bp, Homo sapiens
actgcttccagtgaatccctggtctccaggaactggcgtctggcagttctttactcaggttggaaatccttcaaatacgtgtgtgggaatgccaatttaaacattgcacgtacactgacacctttttcaacctccttaaaaacacagggcaacatggtatatggaacaccttgccacccacctcattggcttccaaagctgagcattcccagctgctggaatgagacagggcgccagctggatgcagacagcattgtgaacagtgccctggatcccacaggagcagcaagaaaytgaaacccattggaatgtgctttgggttagcagagatgaccttgaaaccagtctagcagcagaaaactacaatctacagggtacttgcagctgtgatagggagacagaggagcaagcactaggcaattcatgctggaggctggccaggtgtgctcctcccctcccaccaggggcagagaggatggaaattatgtgattgccaagggcagctgagaaaaggagtcatgcctggggttttgctttgttgtgagctgagttgggggaataaagatctgagaggagcggaggaaggctgactatgagtggtgaagacggtga

SEQ ID NO: 52561 - DNA, 623 bp, Homo sapiens
aggtgggtggatcacttgaggccaggagttcaacaccagcctggccaacatggtgaaaccctgccactactaaaaatagaaaaattagtctggtatggtggtatgcacttgtaatcccagctactagggaggctggggcaagagaatcacttgaatccaggaggtggaggttgcagtgagctgagatcgtgtcacggcactccagcctgggtgacagagcaagactctgtctaaataaaataaaataaatatttgaagggtttttcttcatcttccccatttcatattcataatctcctctcttcaatcagtgatgttgtttagaaccagggttccagcagaggattatgttcaaaagttacttgaattaaatacttttcttggtgtggctgttattactttgatatacagataggtttactttttttttttttttttaattttgagatggagtttcattcttgttgcccaggctggagtgcaatggcatgatcttggctcactgcaacctcygcctcccaggttcaatcaattctcctgcctcagcctcctgagtagctgggattacaggtgcctggcaccacgcctggccaattttttgtatttttagtagaggcggggtt

SEQ ID NO: 52562 - DNA, 549 bp, Homo sapiens
aatcttcctcctccaattcttcttcttatcttccttctcctttatcttcttttccttctcttcctccttatacttttttcccttcttcctcttctccttctgcttctccccttcctcctccttcctcctcctctttctcctcttcttccttttttactttgcctctatttgtaaggagattgagactttcttctttaggaatatccatggcttttcactctttgcctttgtgcaagtaattggaagatgtgcttctttcctgggtggaaatattatcaataaaaaagatggaggtctgagactgaatggaaacattggcctgaagcatttgccacaggtgatggtgattaccaaaaagaaaaatgggatttgaccagaatgactttgttttctgggctaaaaackttgcctaataaagcaccttagctgatgtatgtatttatgagttattatgtgtctagagtattaacataaagtacagaggctcctctggttatgaatgttcaattcagaactgatttgaacaaaaagtccacacggaagcaaaag

SEQ ID NO: 52563 - DNA, 593 bp, Homo sapiens
tatgaatatacaaaaatacctaataaatatatatttgtatactgtatatataccattcttagttcatgggttaaattcagcccttaggctgtcatttgctggcctttgctattgacaataatcatctaaaaggtgaaaaaaatgaaatgcaattatatttatttactttttgagacgatgtctcgctctgtcgcccaggctggagtgcagtggcgcgatctcggttcactgcaagctccaccttccaggttcacgccattctcctgcctcagcctcccgagtaactgggactacaggcgcctgccaccatgcccggctaatgttttgtgtttttagtagagatggggtttcaccgtgttagccaggatggtctcgatctcctgacctcrtgatccgcccgcctcggcctcccaaagtctgggattacaggcgtgagccaccgcgcccggcctgaaatgcaattataaagtataaaaaattttaaaaagtaaaccaaaaaactcataaatgtttacaaatatttttcttctaaaatattcaaaatatttaagatgggaaagtaaaatacacgataattgatattaagccttcat

SEQ ID NO: 52564 - DNA, 593 bp, Homo sapiens
tatgaatatacaaaaatacctaataaatatatatttgtatactgtatatataccattcttagttcatgggttaaattcagcccttaggctgtcatttgctggcctttgctattgacaataatcatctaaaaggtgaaaaaaatgaaatgcaattatatttatttactttttgagacgatgtctcgctctgtcgcccaggctggagtgcagtggcgcgatctcggttcactgcaagctccaccttccaggttcacgccattctcctgcctcagcctcccgagtaactgggactacaggcgcctgccaccatgcccggctaatgttttgtgtttttagtagagatggggtttcaccgtgttagccaggatggtctcgatctcctgacctcatgatccgcccgcctcggcctcccaaagtctgggattacaggcgtgagccaccgcgcccggcctgaaatgcaattataaagtataaaaaattttaaaaagtaaaccaaaaaactcataaatgtttacaaatatttttcttctaaaatattcaaaatatttaagatggraaagtaaaatacacgataattgatattaagccttcat

SEQ ID NO: 52565 - DNA, 630 bp, Homo sapiens
tcaatgccaacctgtagtctctactctttaacctttcccttcattgtccctaccacgatccgaacccacgtgtacttggtttttcttttccttcagaatgtaagctccatgagaggtaggcctctgtccgtttcttgtatccccagtatctaaacaattcttaagagttttgtgctcaatcttaatttttcatatgaatgaatgaaattgaagatgtccctgatggtcgtgatgaagatcttctgtccttgaatccatcccagttagatctacgatcaagtacgtgccagcaaaatgcagggtgttagagctttgaccccgattcctttgtgaaaggcctggtaagctcacctgcattgtcttcctttgggggtgtagtcattcctttagctgagttggtaaccccgtgtcttatcggcctatcgatataagttctaagaagcaagtcactggaagctccaacaaaatgttctctcactgcttcttaccatctaccttctgaatctacctacagtggaaattttcacgtatattcagttgggtttccgawtctgtatttggttcagagttggttctattccttctctccttcatgaatagccaattatacttgctagatctaaatttcca

SEQ ID NO: 52566 - DNA, 630 bp, Homo sapiens
tcaatgccaacctgtagtctctactctttaacctttcccttcattgtccctaccacgatccgaacccacgtgtacttggtttttcttttccttcagaatgtaagctccatgagaggtaggcctctgtccgtttcttgtatccccagtatctaaacaattcttaagagttttgtgctcaatcttaatttttcatatgaatgaatgaaattgaagatgtccctgatggtcgtgatgaagatcttctgtccttgaatccatcccagttagatctacgatcaagtacgtgccagcaaaatgcagggtgttagagctttgaccccgattcctttgtgaaaggcctggtaagctcacctgcattgtcttcctttgggggtgtagtcattcctttagctgagttggtaaccccgtgtcttatcggcctatcgatataagttctaagaagcaagtcactggaagctccaacaaaatgttctctcactgcttcttaccatctaccttctgaatctacctacagtggaaattttcacgtatattcagttgggtttccgatwctgtatttggttcagagttggttctattccttctctccttcatgaatagccaattatacttgctagatctaaatttcca

SEQ ID NO: 52567 - DNA, 548 bp, Homo sapiens
ttcattgctataatatctgtctatttaacctgtaggtctacttactgtctgcttggcttcccagctgttctgcatggtctctgttttttggaagtcctytgctgttatatacaacctctgctcgatcattttctctgtactcattagatccaggccatccctgatactacatcattcctgaagcccatctccggcaggtatctttctccaatcccttaaatatatggattagcactgtaaaaatgatcaagcactgtgtcattatgtaggttgagtcaagggtctaaacttttcacatagggttaatactttagagttaaaggaaggcatgaaatgtaccagcatcatggataaagttggacctaaatatcttgcatttcttaaagtcaggtttctattatactcattggactagaagtggacagcaatagagaagtgagatgaaaaatcactctcattcagtactgtgaactaaatttaaaaaaatgagggctgaattcctgttctattagattttagtaaacagcattctgtagtgcacagggaat

SEQ ID NO: 52568 - DNA, 548 bp, Homo sapiens
ttcattgctataatatctgtctatttaacctgtaggtctacttactgtctgcttggcttcccagctgttctgcatggtctctgttttttggaagtcctttgctgttatatacaacctctgctcgatcattttctctgtactcattagatccaggccatccctgatactacatcattcctgaagcccatctccggcaggtatctytctccaatcccttaaatatatggattagcactgtaaaaatgatcaagcactgtgtcattatgtaggttgagtcaagggtctaaacttttcacatagggttaatactttagagttaaaggaaggcatgaaatgtaccagcatcatggataaagttggacctaaatatcttgcatttcttaaagtcaggtttctattatactcattggactagaagtggacagcaatagagaagtgagatgaaaaatcactctcattcagtactgtgaactaaatttaaaaaaatgagggctgaattcctgttctattagattttagtaaacagcattctgtagtgcacagggaat

SEQ ID NO: 52569 - DNA, 1651 bp, Homo sapiens
ccaggatttaaggtgctggaggtaaacggctccccaagatgcatccccaaaactggtggttctgggaggaagtttggagtctgagctcccctggctcctaccctcacgcagggagcttatttactgggcagagggtcttatccagtaggactgagggagggtctagaatctggagtgtcaacaagctgcccaggtgactcagaggccagaaagggcatcatcatgcccccagaccacagccccctagtattggggagggggtgacagcacagacccccgacccaggaggcaggtggctggttccctcacaaccttgaggtctctgtgcccacagccgcatcgagtgggtgtggctgcactggagcgagtacctgctggcccgagatgagttctaccgctggttccagaagatgatggtcacactggagccccacatcgagctccagctgggcctgaaggagaagcagtggcagctgagccacgcccaggtgctgctgcacaacgtggacaaccaggcggtgctcctggaccggctgctggaggaggcagcctccctgttcaacaggatcggggaccccagcgtggacgaagatgcccagaagagaatgaaggctgagtacgatgcagtgaaggccaaggcccaggtgagggtgaggctgagtgggctacatcctcacccacccatccatgtatccacccttatctacccattccagccactgtttgcctactatcaagctatttacctactatcaatctatctttctactatcaatccatctactcacctgttcactatccaaccaccctcccatccatctgtctacctactcacccatctacctccccactaaatcaccaaatctccccttcactatccacccacacaccaccccattcacctatctaccccaccatttgttcatccatgtattctcccacccatctgttgactcactcatccatctacttccccaccagcctgatcaatctgctattcatctcttcaaccacttaatcgcccacgcattcatctatctactcattcacctacccatcaacccagccacctcttcctcactcacccattcactcatccatctctccactgcctaccccttcaccacctatctacccactattgaccatcacccactcgtttatccagccatccacccacctagctacccatcccccaatcctcacctaccaactcttccaccacccactcaccattatctaccgtccagatacccagtgtttcgcagtgcttaatatacatataggtgtgttgaccgactgactgatggactgtgatgttcactttgatccaaacagcttcccccttctcctcctttctctctcttcctctctccctcctcccctcccttcctcctcctgccctttaatccttctccttcagtgtttcctccttgctctctcttgcccttgccccagtccctctgtccattctctgtctgcatttcctcaccccattcttgccttatttggaaacagttcattgagttatcaagttcaattacatttgttagaaattktatttggttctgtattatgtctccctgttctttttaacaaattatgtcattttccccctgagattttgcattcctcccagatatagcttata

SEQ ID NO: 52570 - DNA, 1651 bp, Homo sapiens
ccaggatttaaggtgctggaggtaaacggctccccaagatgcatccccaaaactggtggttctgggaggaagtttggagtctgagctcccctggctcctaccctcacgcagggagcttatttactgggcagagggtcttatccagtaggactgagggagggtctagaatctggagtgtcaacaagctgcccaggtgactcagaggccagaaagggcatcatcatgcccccagaccacagccccctagtattggggagggggtgacagcacagacccccgacccaggaggcaggtggctggttccctcacaaccttgaggtctctgtgcccacagccgcatcgagtgggtgtggctgcactggagcgagtacctgctggcccgagatgagttctaccgctggttccagaagatgatggtcacactggagccccacatcgagctccagctgggcctgaaggagaagcagtggcagctgagccacgcccaggtgctgctgcacaacgtggacaaccaggcggtgctcctggaccggctgctggaggaggcagcctccctgttcaacaggatcggggaccccagcgtggacgaagatgcccagaagagaatgaaggctgagtacgatgcagtgaaggccaaggcccaggtgagggtgaggctgagtgggctacatcctcacccacccatccatgtatccacccttatctacccattccagccactgtttgcctactatcaagctatttacctactatcaatctatctttctactatcaatccatctactcacctgttcactatccaaccaccctcccatccatctgtctacctactcacccatctacctccccactaaatcaccaaatctccccttcactatccacccacacaccaccccattcacctatctaccccaccatttgttcatccatgtattctcccacccatctgttgactcactcatccatctacttccccaccagcctgatcaatctgctattcatctcttcaaccacttaatcgcccacgcattcatctatctactcattcacctacccatcaacccagccacctcttcctcactcacccattcactcatccatctctccactgcctaccccttcaccacctatctacccactattgaccatcacccactcgtttatccagccatccacccacctagctacccatcccccaatcctcacctaccaactcttccaccacccactcaccattatctaccgtccagatacccagtgtttcgcagtgcttaatatacatataggtgtgttgaccgactgactgatggactgtgatgttcactttgatccaaacagcttcccccttctcctcctttctctctcttcctctctccctcctcccctcccttcctcctcctgccctttaatccttctccttcagtgtttcctccttgctctctcttgcccttgccccagtccctctgtccattctctgtctgcatttcctcaccccattcttgccttatttggaaacagttcattgagttatcaagttcaattacatttgttagaaattttatttggttctgtattatgtctccctgttcttttkaacaaattatgtcattttccccctgagattttgcattcctcccagatatagcttata

SEQ ID NO: 52571 - DNA, 1012 bp, Homo sapiens
tctctgatgtgtattgaatgacaatagcagtaaaacctcaagctgttcatttggatcgggcagccrttgtgcacttggatatgactattctttttatcaaatctcctgttatttgcatttatatgatgcctttcttctaaagctcttaaagcaatttcagcttcacaatacttgtgtgaattgaataagaagaaacatacttcattttgaggttgagataaaagataaattgtcaatgactctcctcaacagaacagaacagagcgcagtgggtactcaaacaatttttccacactgatttccctggaaacctcaaagaaaaggttattttaaaaaggagttctgatcctgggtctagacatcctgggggcaagggtccattgacaggcttcagggcttctgtgaactccctgagagatgtacaaaatgaagttctcctgcacattttcctgggctgagggtttgcattgctgtatttaccagattctaacatggcttaaggaccattgtctggaaccatgctccttaaatatctagtatattcaaatcaattgagatgtttgtcaaaaattccagggcacatatccagaaattccaagttaataagtttggggtggggtcttgggacctgaattttgacaccaagtgattccaattctggtgaaccaagagactcatttagagaaacattggtctagccccttgaaggtggcttagtaagaaagtcacttactggcatctttggaaattattgtttcagactggggaagagaagctaaagtgcaagaccagagagagggtgcagaagctgtagtggcagagaacgccatatatttcgtcatgtgtcctaaaaccagaattgtatttcaagagaagttaggctatcggtctgtgaaagtgaaagattgaaagtggaaaataaaacagcttagatgagaatgatttaaaatgtacaggggaaagtgttagtagacacaatactatttttaggtctttcttatctgttttatat

SEQ ID NO: 52572 - DNA, 567 bp, Homo sapiens
cggaagcatgttgtagaaaagcacttgtgaggttcacaaaataatctaaaagtagagaagctattttgatatcacctttggagaagaggtttatcaggtagactcttacttggtagtgaggcttttatacattctatggtaaaattttgtagtagccaataatttttgaagtgttagtttaaaatgcccatttaaaaatttgttattktaataaatgacaattacactagaatttatcctattataatgatacataaccatgttgtctaaaatagccaggtattcttaaataccactttattttaccaagttattacattttagttttgaacttcagaaggaaatgcacatcaactttctctacatatttagatgcacctcatttcaaatgattatttctgttgtggacatatatagtgtgaacgacttgataagacatagtgtccatctgctaatgtgacaaggtcatgttagtgggaattgttctcctgattaattcagtatcatcaaatctcagaaaaatacaagtatatttcagatgctttattgaggtatgtttgatatgaa

SEQ ID NO: 52573 - DNA, 548 bp, Homo sapiens
gaatggatttttgactttgcagctcactgacatcataccttttctacaaggcctcccttcttggttatgctcatagtacaggttgagcaatcctttcttttaactctggtgcttcctatgtctgatacatgttttcttacttaattgcataatgctttatagtcatttaacttctttagttcttgttttcttatcttccctactagattttcaagcttgtggagtttagggactgccttttactacgttttgttagaattaagcaatttcaggaaacaagaagggagaaaagtagagttatttattgttgcagtgggttcaaaatcatttagattgggaggggcatatttggtttctacttatatattaytatttttgtcagtatcttagtcagccaagactatcacctatgttagctataatcatatctaattaattggaaataaagagttaaattctagcaaggcaaagggtaaataaaagttgtatttccacaaaaattagccgggtgtggtgacgtgtgcctgtaatcccagctactcgggagg

SEQ ID NO: 52574 - DNA, 619 bp, Homo sapiens
ttggttgacagggttcttttgttgttgtttgtttgtttccacttctttactgctttttatgttatcccactacctattggcatcatttatttatttatgtatttatttatttatktatttatttatttatttattttgagacggagtcttgctgtgtcacccaggctggagtgcagtggcacgatctcggcttactgcaagctccacctcccgggttcacgccattctcctgcctcagcctcctgagtagctggcactacgggcgcctgccaccacatccggctaattttttgtatttttagtagagacagggtttcagcgtgctagccaggatggtctcgatctcctgacatcgtgatcggcctgacttggcctcccaaagtgctgggattacaggcgtgagccaccacgcccggccttatttatttatttttgagatggagtcttgctgtcacccaggttggagtgcagtggcgtgatcttggctcactgtaacctccatctcccgggttcaagcgattctcctgcctcagcctcccgagtagctggggctacaggcatgcaccaccacacctggctaattttttgtatttttagtagagacggggtttcaccatgt

SEQ ID NO: 52575 - DNA, 639 bp, Homo sapiens
tgtaccttcctgattcttgatggggctccaggactcttatgttccccaggctggccttgaactcctgggtgcaagtgattctcccgcttcagcctcccaaaatgctgattacaggcatgagccactgggcctcattctactttcactgttcttgagaacagcttttttttgtttgttttttaaactttactgtgcacttttgcaaatkaattttgttctaaaatttttacaggttttcttgatttgcttgctgtttgccctcaggatcatttccaaaggctttaaatgtttttgttttaaaagtaatatttaccagtttcactggggagcaggtcgttgaagctcttcatgctgtcatgttagaataaaatcttctgataagactttatttagcaaatgatgatcaatgtcacacaccttgcctattttgtatcctctgtagtacctgatatagaccttggtacacatcactttgaatctagtgaaattacaattaattagtctaacatactggttaaggtaccatctctgagtcatggttttaaatcctagttcctgaatctatagtagtgtgactttggaaaagccacttaacctctctaagcatttgtgttcttaattgtaagtgggatactccag

SEQ ID NO: 52576 - DNA, 639 bp, Homo sapiens
tgtaccttcctgattcttgatggggctccaggactcttatgttccccaggctggccttgaactcctgggtgcaagtgattctcccgcttcagcctcccaaaatgctgattacaggcatgagccactgggcctcattctactttcactgttcttgagaacagcttttttttgtttgttttttaaactttactgtgcacttttgcaaatgaattttgttctaaaatttttacaggttttcttgatttgcttgctgtttgccctcaggatcatttccaaaggctttaaatgtttttgttttaaaagtaatatttaccagtttcactggggagcaggtcgttgaagctcttcatgctgtcatgttagaataaaatcttctgataagactttatttagcaaatgatgatcaatgtcacacaccttgcctattttgtatcctctgtagtacytgatatagaccttggtacacatcactttgaatctagtgaaattacaattaattagtctaacatactggttaaggtaccatctctgagtcatggttttaaatcctagttcctgaatctatagtagtgtgactttggaaaagccacttaacctctctaagcatttgtgttcttaattgtaagtgggatactccag

SEQ ID NO: 52577 - DNA, 639 bp, Homo sapiens
tgtaccttcctgattcttgatggggctccaggactcttatgttccccaggctggccttgaactcctgggtgcaagtgattctcccgcttcagcctcccaaaatgctgattacaggcatgagccactgggcctcattctactttcactgttcttgagaacagcttttttttgtttgttttttaaactttactgtgcacttttgcaaatgaattttgttctaaaatttttacaggttttcttgatttgcttgctgtttgccctcaggatcatttccaaaggctttaaatgtttttgttttaaaagtaatatttaccagtttcactggggagcaggtcgttgaagctcttcatgctgtcatgttagaataaaatcttctgataagactttatttagcaaatgatgatcaatgtcacacaccttgcctattttgtatcctctgtagtacctgatatagaccttggyacacatcactttgaatctagtgaaattacaattaattagtctaacatactggttaaggtaccatctctgagtcatggttttaaatcctagttcctgaatctatagtagtgtgactttggaaaagccacttaacctctctaagcatttgtgttcttaattgtaagtgggatactccag

SEQ ID NO: 52578 - DNA, 2081 bp, Homo sapiens
gaagatattaatattctcagactggcgatgtacctcctccttttctttttccagacaaaagtctcactctattgcccaggctggagtgcagtgggatgatctcggctcattccaacctccgcctcctgggttcaagcaattstcctgcctcagcctcccaagtagctgagattacaggtgtgcaccagcacacctggctagtttttaaatttttttatttttagtatagatggcatttcaccattctggccaggctggtctcgaactggccacctcaggtgatccgcccgcatctgcctcccaaagtgctgggattacaggcatgagccaccatgcccagcctggcgatataccttctgttgccttctgaactggacttgttgcattgtacaataaaaaaattatgctaattttcaccagagttcatggatttggctttattttagagcacctgctctcattaaagatgttagcacatcagagaaaatgtaaattgaatttctaacaagcactcttggatgggaaaggggttttaaacagaatttctttgttttgtccctttcagcaaatactattgtcatgctccacaagctggaacaataacctacgaaataacctgctaggttatgaatgaaagcatatattttgtgaaatttgtggtcatttagttgggttgaaatgaaatagtcactgatgtttattttctttattattttcttcaatgttttacccttactcaacctatgcacctgggaaaggggaaggctgccagttgctttcttcctgtaccctaccatggacccacagcccctaaactccagtacaattattccctgcactattgttctctgccttaagcattagaaaagggtttagggccggcctgagaactctgtcttcatttgtcacattgtttctttgggaagacacattcccagtttcaaacaaccaacctacaaattaactttaggggctgcctattcactaaaaaagaaggctgatttctgtagagctgattagctgagcagagctcattagcttagcttagtttagcaagtatgatctccttagctaatgtgacaccataacatagacgctgccacccaccggtgtcaggaagcgtgaaaggcagtccagaagtggcaagcctcatggacccgcctgcaggagggcagacccactgcggctgctgctaaaccaacaccagcaggtgccttggcaggtgctgagcatggtgggcacacaaacgggaggacttttcccagtggggcctgcctgcacaagccaggtgctggctaagggctggtagcttacttaacccacacacttcccccatagttggtactgttattagttccattttacagatgagaaaactcagtgccatatatctttggagtctattgtacaaaaatagaatacgttgaacatggaaagtggctttctatttatttatttatttttgagagagtctcgctctgtcacccaggctggagtgcagtggtgtgatctcggctcactgcaacctccacctcccaggttcaagtggttctcctgcctcagcctcctgagtagctgggactacaagtgtgtgccaccatgtccggctaatttttgtttttcgtagaggtggggtttttccatgttggccagactggtctcgaacccctgacttcaggtgatcccctcatctcagcctcccaaagtgctgggattacaggtgtgagccactgttcccggccggaaaatgactcttttctgaaaaataatttatgtcctcctcaactaattcctagggcctttattcaacatcctttgctttgataagactccccagtggtgacagaagccttagtggatacttgggagttgctttagggagagggtctctcctgtctctctaaagtgcccatttgaggggataaaaatagctgttgaccgtttcctagcaatgagtcaaggacagaaagtccctggggcaggtggcactgtgcttggttcatagatgctgaatggaagctgggtccttgtctttggttagataacttgtttttaaatatatattttttaattttggaata

SEQ ID NO: 52579 - DNA, 268 bp, Homo sapiens
tggagtttccccacaytggccaggctggtcttgaactccttgaactcctgactttaggtgatccactcgcctccacctcccaaagtgctgggattatgggtgtgagccacagcacccggcctgaacctcatctctctttataagacttcaccacctaaccttccagacacaggttggcacacttccctttttttattttttacatcttgagccttgggatctgatgaatgtctcacatgatgtcccaaagcgtctatatgataagctt

SEQ ID NO: 52580 - DNA, 591 bp, Homo sapiens
tgcctattaaagagatggtcagtttttaagttttaataactaatttgaagcttcttcatcaatcttctctcaattgccttttatattttaaatgatcgtttttgaaaggctttgtcattgaatatattgtaacgtgtgaaaaaaaaagtgtttatactaaatgtgacttatcctcaaaggtccacagaaaagaacatctgtcattgttaaagatcatgcagcctttttcctctgcctggggaaaagttcaaagttgacagtgagttcacttgaagagatgtaatatgaagtcagagcgaaggtaagttgacaggaccaggacaagcaagataaggtttaccaaggagtcttggcccctttcatctgttccatgatctcacctgaaacaaaatccttgttctgctttatcttcctatgtatccaggagatttaagtagtaactgaagctgtctgtagagtaagtacagtagacataacaccacacctcgttttccttttcatgcyggggaagccatgttcccgtgttgagactacctttagtggggactttctattcctttccagaacaccatttacaagggaagagggagc

SEQ ID NO: 52581 - DNA, 557 bp, Homo sapiens
tgggggaaaatcaaggaactccctgaggttaatcgtacctacttaatagaaactttcatctgagaagcactaagtactttggacacgttagcacataggtcctaataatactcctattaagaagaaagaggtgaaatttacttcacttaatggttggggaaactagtctagagacagagaaaaagcgatttactcaagctcagggaatgtatcagtgttagcgatgagaataaaactcagaggctggaatctcaaactagtgtactatcacagtatgttactcaatgcacactgattcatttgttcattcattcattcgttcgttggttcattcattctgtgccagacactgtgctaggctcccagaaacaacaatgagcataagacccagctcatatcaagcgtatcatctaatagatgaggcagagaatgaaaagcacacagacaaaatcactagaccgtgctaagtgcyatgaagaaagcaagcatccattgaatccttacggtgcctgtcatttgttctcatagcatccctatgaagaaagtattttacaagt

SEQ ID NO: 52582 - DNA, 598 bp, Homo sapiens
cccagtgggcgtgtgttacaggatgctcttttagtttagccatccgtaggcggcttgtgttagtcagctcaattggacccctgccttatcgccaggacagagggctttctgtgtcccggggttcttgccttggtgtaccggaagaatcagatcacacctgcacttggggaatgagttcaggttttttgagwgagaataactcttggcagatgggggaagccagaaggggatggagtgggaaggttttcccctggagtcaggctactgagcggccaactcttctctgaccaccccagctaaactctgagttgttctgctggtcagtggcctgccggcctgccggtacctgtcaacgtgctcttaacatccagccgcctgtgtgtttacctgctagggtctcagggtttttatacgcacaggatagggacgtggcaggccagggtggtcttgggaaatgcaacatttgggcaggagaacaaaaatccctgtcttcacctaggtctgtagccatgggtctgggggtggagccctagccagggaccacgccctaggatggaaagacgttctctctgccctgggtggcataataacaaggcag

SEQ ID NO: 52583 - DNA, 598 bp, Homo sapiens
cccagtgggcgtgtgttacaggatgctcttttagtttagccatccgtaggcggcttgtgttagtcagctcaattggacccctgccttatcgccaggacagagggctttctgtgtcccggggttcttgccttggtgtaccggaagaatcagatcacacctgcacttggggaatgagttcaggttttttgagtgagaataactcttggcagatgggggaagccagaaggggatggagtgggaaggttttcccctggagtcaggctactgagcggccaactcttctctgaccaccccagctaaactctgagttgttctgctggtcagtggcctgccggcctgccggtacctgtcaacgtgctcttaacatccagccgcctgtgtgtttacctgctagggtctcagggtttttatrcgcacaggatagggacgtggcaggccagggtggtcttgggaaatgcaacatttgggcaggagaacaaaaatccctgtcttcacctaggtctgtagccatgggtctgggggtggagccctagccagggaccacgccctaggatggaaagacgttctctctgccctgggtggcataataacaaggcag

SEQ ID NO: 52584 - DNA, 634 bp, Homo sapiens
atacatggaatttgttttaaaaatttgtttcccagttttttgccctagcaggtatatagctgatttttcaataacttgtaattttgacataatttcagacacgattgtatttgctttataattctagctacatgttatttttttcatgtactaaagtgcagacataatgccccctaacctctaaatagttattaacaacaagtacattctctttcataaccacattgcaattatcaatgtcagaaaattaatgttgatatggtactgcttgctgtctaatgtgcatactttgagctgggcttggtggtatacacctatagtcttagctactcaggaggctgaggtgggaggatcgcttgagcctaggagttgaaggctgcagtatgccatgatcaaccctgtgaatagccactgtactccagcctgggcaacaatagtgagatccctatctttaaaaaaaaaactgcwtattttactgaaattttacctattcttttctaatgccaattataaagcaaaattctggttgaggatctcatccttgatcacatggtacatttgtttgtcaaatctcattttctttaatctgaaaaagttctcacaaacattgtcttttatgacttaatttttttta

SEQ ID NO: 52585 - DNA, 589 bp, Homo sapiens
catgcatgacactgaacactaaacaacttgtcctgagtacctactatgtgccaggcactgagcccagcatgtccatgtaccttctccatttagttcatatgtgttctgtagagaagtgattattatcttcattttgcagatgagggacatggagcttagagagtagaggtgtcacatagctagtaggtcctggttgtgattcagaccctggtcttgtgactccaaacccagcattttcctacagtagaattggccgttccatggtgcctaattttctctctaccactggcatcctcatgaaaatatagaaagagatgctaagtcgtaagagctttgccarttaaaaatattagtaaaatcttacaggaaatctgcaaagagttacctcttcatttccactcgttctttcttaaacccactccaatcatgttttcatcccacttccaccaaaactgcttgggaaggtcatcaatgacctccatcttcctaaatccagtggccaatgctcagtcttcatctggccttcatcttgaccttatcagtggaatttgatataattagttcatcctcctccctgggaacaaacttc

SEQ ID NO: 52586 - DNA, 588 bp, Homo sapiens
tttttaaagacaggagctctctatgttgcccaggctggtctcaaactgctgggctcaagcaattctcctgccttagcctcccaaagtgctgggattataggggtgagccaccatgccaggactgatagcatcatttctaggtggaaattactttggcttcaaatgtaaagattaaacataatcttttttgtaaatactcaaagagtatttggaatacaaatattctcttcaaagaggaagggaaagaaatctagaacattgtacgtgctcaataattgagttggttggatttttgtattatagagtaatcttgctttatgcagcttcacaaaatcagatccaattaaccttgaatttgtttcattctttattctttccaatgattcaaagayggttagaggatttaaccttaccccactgcctcattgcaaaatttgagtatagattcaaggttatgctttgctgttcattggtttgaaggccaggctttcacaggaaggcacacgatttaaagtaacttcggtttaagcttctagaggtttgtgggaatcctcttcaaaggacagacaccatcagaacttgaggtta

SEQ ID NO: 52587 - DNA, 1522 bp, Homo sapiens
tgcccaggctggagtgcagtggcacaatcacaactcactgtagccttaaactcctgaacccaagggatcctcckgcctcagcctcctgagtaactgggactacagacatacaccaccatacctggataattatttttactttttgcagagagagagtctcattatgttgcccaggctggtcccaaactcctggcctcaagcgctcctcctgcttcaagcctcccaaagcactaggaccacaagggtgagccaccacaactggccccttttttatttcttataacccttaattttattcaggtattcaccctcctccacatggttaggtacttcagagaaagatgaactaattcccagctccaagcatagggtaacctgacttaagcccattgtggtcatcccattcttcctgcccatgattagtttagggatgagaattcaaactgattctaccaatgaaagctgccaggagactgctgggaagaggccaaaatcctgccaccatcttttgactttgaggtcaccatgggtaaaacccctgagggggacagggcagagaaacagaaggaacctgaatccttgatgacgtttttgaaaatctgtatctatcaacctggaaaactgccctacttttgtaagatgacaatttgttttgtaagatgacaatttccatcctgcatgagccagtttgagttggattaactgttatttgttgctgaaacatcctacattatttaaaaagaaagaaaaagaaaaagaaaagaaaagggagcagggggccagcccagagcctagcgcataaaagacctgctgtcatccatggcagctgagatcattattctatgccacctccactcatccagtctcctctcttgccatcctccaatacattaacaatataacgcagatcaaactactttccatcctcattctggtcactcttattcttaagcaaagcaactattccctatagttaccattagcatatattccaaacttcattttttctaagtacagtttttattgctgacttgggagatttaggaacaagggtgatattcaccagtctgcaattatgaattataggttaggattcactcggtttagttatacctacatttttactctaataaaaaaaaatcaggatgtacaattccaatagattaccttccagcagaaaccttgggtatttgattaccacaagacaaccaaactccagtagaatcctaatagaaaatgaatcctttcagatttttgacaggtaaaacatcaggtgaagttttctgtccttttattttcagattggaggacaagaccaagaagttaacaaaattaagagacaatgccacagcacatatacagatagacatctttttctgaataggaatccagagaccacatggatcacagtggaaaacataatgaagccgggtgcagtagctcacgcctgtaatcccagcactttaagaggccaaggcaggcggatcacttgaggctgggagttcaagaagaacctgggcaa

SEQ ID NO: 52588 - DNA, 592 bp, Homo sapiens
aagatatataatttctattgttgaaaaatggaaatgtaacttatcctgcacaatttgcctgcctatgaaggaatatactttttgccagttttatcatatttcatagtttcaagttatttttcctgtgggaagttgcgggctgggggatgtgtaccccttttctttttctttctttctttctttctttctttctttctttctttctttctttctttctttctktctgtctttcttttttttattatactttaagttctgggatacatgtgcaaaatgtgctggtttgttacataggtatacacgtgccatggtggtttgctgcactcatcaacccgtcatctacattaggtatttctcctaatgctatgcctcctctagtcccccaccccttgacaggccctggtgtgtgatgttcccctccctgtgttcatgtgttctcattgttcagttcccacttatgagtgagaacatgtagtgtttggttttctgttcttgtgttagttcgctgagaatgatggtttccagcttcatccatgtccctgcaaaacacataaattcatccttttttatggctgcataatattcaatgggg

SEQ ID NO: 52589 - DNA, 641 bp, Homo sapiens
cccaagaatcagttgcgataatacataagaaagtttattttattttattttattttatttgagayggagtttcgctcttgttgcccaggctggagtgcaatggtgcgatctcggcttactgcaacctcctcctccccgtttcaagcgattctcctgcctcagcctcctgagtagctgggattacaggtgcccaccaccacacctggctaatttttgtatttttagtagagacggggtttcaccatcttggccaggctggtctctaactcctgacctcataatccaccctcctcagcctctcaaagtgctgggattacaggcatgagccaccacgcccgtcctgaagtcaattttttaaagctgtaaagtgcagagcacttagaagggagggcgatgaagaaaatccatgaagggctggctgatgtccaaatctagttaaagtaagaccagacaaaacccagcagaaaatgagctggccaggatgccagggctagatcagcctggagaagtcatcccgttcagcctctgctcttcgctggtgggaaaagtgaggcccagggagctgagcaacactgcgaggtgctgcctgggggctggaggtggaaaaaagggaggaaccctggactgatgcccttgcctct

SEQ ID NO: 52590 - DNA, 641 bp, Homo sapiens
cccaagaatcagttgcgataatacataagaaagtttattttattttattttattttatttgagacggagtttcgctcttgttgcccaggctggagtgcaatggtgcgatctcggctyactgcaacctcctcctccccgtttcaagcgattctcctgcctcagcctcctgagtagctgggattacaggtgcccaccaccacacctggctaatttttgtatttttagtagagacggggtttcaccatcttggccaggctggtctctaactcctgacctcataatccaccctcctcagcctctcaaagtgctgggattacaggcatgagccaccacgcccgtcctgaagtcaattttttaaagctgtaaagtgcagagcacttagaagggagggcgatgaagaaaatccatgaagggctggctgatgtccaaatctagttaaagtaagaccagacaaaacccagcagaaaatgagctggccaggatgccagggctagatcagcctggagaagtcatcccgttcagcctctgctcttcgctggtgggaaaagtgaggcccagggagctgagcaacactgcgaggtgctgcctgggggctggaggtggaaaaaagggaggaaccctggactgatgcccttgcctct

SEQ ID NO: 52591 - DNA, 641 bp, Homo sapiens
cccaagaatcagttgcgataatacataagaaagtttattttattttattttattttatttgagacggagtttcgctcttgttgcccaggctggagtgcaatggtgcgatctcggcttactgcaacctcctcctccccgtttcaagcgattctcctgcctcagcctcctgagtagctgggattacaggtgcccaccaccacacctggctaatttttgtatttttagtagagacggkgtttcaccatcttggccaggctggtctctaactcctgacctcataatccaccctcctcagcctctcaaagtgctgggattacaggcatgagccaccacgcccgtcctgaagtcaattttttaaagctgtaaagtgcagagcacttagaagggagggcgatgaagaaaatccatgaagggctggctgatgtccaaatctagttaaagtaagaccagacaaaacccagcagaaaatgagctggccaggatgccagggctagatcagcctggagaagtcatcccgttcagcctctgctcttcgctggtgggaaaagtgaggcccagggagctgagcaacactgcgaggtgctgcctgggggctggaggtggaaaaaagggaggaaccctggactgatgcccttgcctct

SEQ ID NO: 52592 - DNA, 637 bp, Homo sapiens
cagctgatggcatcctcgcaggccaaggtggcctgctcggcggaggtggtctccttggtgatggaggacttcttggaggagggggtgtcctgggcgtgctcggcgagggtggcatcctcagcactgtgcaaggcatcacggggtaaggaggggaygggttctccccagaaagcccccatacacctccaaatgggggtgatcactccctgaagctggggttgccggagggaaggtcttcagagccccacacacttcagggtttggcctcaggattggaagttttaagacccccaagttacatggtttgggtcttggcatgaaacagtcctaagtttgagacccagttcagcttttcatgtttgcgtgtgactttgggccattgatatcatctctcgagtctcagtttcctcatctgtagaatggtcatagtaatacagtgtagtggaaaagaccccaaggatttaaaaactatacatatatatcataagttctatgctcagcctgttcctcatagtcgatgtttaatttaacaaatatttaaagctcctgctatgtgcagagtactgtgttggcactggggacatgacccaatggtaagccaagaaaagacacattctctgtctccacggagcttgca

SEQ ID NO: 52593 - DNA, 637 bp, Homo sapiens
cagctgatggcatcctcgcaggccaaggtggcctgctcggcggaggtggtctccttggtgatggaggacttcttggaggagggggtgtcctgggcgtgctcggcgagggtggcatcctcagcactgtgcaaggcatcacggggtaaggaggggacgggttctccccagaaagcccccatacacctccaaatgggggtgatcactccctgaagctggggttgccggagrgaaggtcttcagagccccacacacttcagggtttggcctcaggattggaagttttaagacccccaagttacatggtttgggtcttggcatgaaacagtcctaagtttgagacccagttcagcttttcatgtttgcgtgtgactttgggccattgatatcatctctcgagtctcagtttcctcatctgtagaatggtcatagtaatacagtgtagtggaaaagaccccaaggatttaaaaactatacatatatatcataagttctatgctcagcctgttcctcatagtcgatgtttaatttaacaaatatttaaagctcctgctatgtgcagagtactgtgttggcactggggacatgacccaatggtaagccaagaaaagacacattctctgtctccacggagcttgca

SEQ ID NO: 52594 - DNA, 637 bp, Homo sapiens
cagctgatggcatcctcgcaggccaaggtggcctgctcggcggaggtggtctccttggtgatggaggacttcttggaggagggggtgtcctgggcgtgctcggcgagggtggcatcctcagcactgtgcaaggcatcacggggtaaggaggggacgggttctccccagaaagcccccatacacctccaaatgggggtgatcactccctgaagctggggttgccggagggaaggtcttcagagccccacacacttcagggyttggcctcaggattggaagttttaagacccccaagttacatggtttgggtcttggcatgaaacagtcctaagtttgagacccagttcagcttttcatgtttgcgtgtgactttgggccattgatatcatctctcgagtctcagtttcctcatctgtagaatggtcatagtaatacagtgtagtggaaaagaccccaaggatttaaaaactatacatatatatcataagttctatgctcagcctgttcctcatagtcgatgtttaatttaacaaatatttaaagctcctgctatgtgcagagtactgtgttggcactggggacatgacccaatggtaagccaagaaaagacacattctctgtctccacggagcttgca

SEQ ID NO: 52595 - DNA, 637 bp, Homo sapiens
cagctgatggcatcctcgcaggccaaggtggcctgctcggcggaggtggtctccttggtgatggaggacttcttggaggagggggtgtcctgggcgtgctcggcgagggtggcatcctcagcactgtgcaaggcatcacggggtaaggaggggacgggttctccccagaaagcccccatacacctccaaatgggggtgatcactccctgaagctggggttgccggagggaaggtcttcagagccccacacacttcagggtttggcctcaggattggaagttttaagacccccaagttacatggtttgggtcttggcatgaaacagtcctaagtttgagacccagttcagcttttcatgtttgcgtgtgactttgggccattgatatcatctctcgagtctcagtttcctcatctgtagaatggtcatagtaatacagtgyagtggaaaagaccccaaggatttaaaaactatacatatatatcataagttctatgctcagcctgttcctcatagtcgatgtttaatttaacaaatatttaaagctcctgctatgtgcagagtactgtgttggcactggggacatgacccaatggtaagccaagaaaagacacattctctgtctccacggagcttgca

SEQ ID NO: 52596 - DNA, 594 bp, Homo sapiens
acacacacaaacacacacacaatagttcaatgatattacctaggtgaagacaattggatgcaaaatcagttaatcaatattaatttatttgaatggaaatgcccaataaatgaaagtatgatcatgtatatctaagcataggttcctgatacctaaatatagttttcaaactgtcaatattgtacaaagatgctcaatgactttgcctttattacatctttcttctatgctttaggaggtggttctgggaaaagatattttataaggttacaaaagcttattgctttaaaaacttcagtagtcttaagagatggcatcttgatgtagagtcatattcccagaagctttaacaatgcaaaatatggggtactgtagtgaccttttagttacacccatagcttccaggatacttcctgggaaacasacaagcagcatactccatctattgctgaccttgagctagttactcattcacaaaagttctatttgaattcagtgttggcattcatacttgaatttagagtagaaacagggacactgcatgcatataaaaatgattaatttctgaattcaattaactgataaactgtttca

SEQ ID NO: 52597 - DNA, 553 bp, Homo sapiens
tgtatatctatctacttatgtataagctatatatgtatgtgtatatacatatgtaaactatgtatatgtacatatatgtaggcattttttaaattaagaaactgtagaaatgctctgttcctcttcccagcacccacagtcattgatcatgttttataattcaacctgaaaactatatatatatatgcatacatacgtagtttatagacacacatagtttatatatgtatatatacacgtagtctatatrgtctattcatctttgtatagtctgtatacatatagactatatgtatgtgtaaatacatatatgaaccatacatatgtctatattatatataaagcttatatatacacacatctataaactacatgtatatagacatagactgtatatatgtatggtttatatatatacacatacatatacgtgtgtgtgtatatatatagttttgttttggttttgggggtttttatgagacagggtcttgctctgttgcccagactggagtacagtggcacaatcatggctcactgcagcctcagcctcccc

SEQ ID NO: 52598 - DNA, 546 bp, Homo sapiens
ttcatttgcctcctgaatgttaatgacctttaccttttcacttcagctactcactctggatcttcttgtcactcagaacttttctacatctgaaatcctaaggtcaaaattgcttctctgacagagatcacagtcttattccagctcttcttgctttttagcctcaacacaaatcaaaatatccagtcccttgctccttccattctccccgtagagtaacagccctttgttgacttgctttcttctcccctcagtctggagtctgggtttaatcactttctccctaagacagtttccttatgtcctcgtctttttcaccctactgccctgtaagtcataaactctgagttacttctataacttgctttccgcaaacctacccccaaagtatagagctgatgggggaaaaaattataccacaatgatggtttatgtcttctacaagactgyagtgtctagctttagctagatcatcaataccacctaaaaatcctttttcaaatccctggtcacctccctttcttgtcctattaaaccctcactatt

SEQ ID NO: 52599 - DNA, 1451 bp, Homo sapiens
taacatagtggctgtttatgagcaagagccctcaataaagtcatcgggacggttctctcggcagcgtgtctaatcttctctggctgccattctgggcgcttggctcctgatctattttggtctctctcttctttgactcattctgggacttccgtgccattaatctgagccccccaccagggcctggtcccaccagcaggcagacaattcagaattagctgcagtcatggttgtccaaactgacaggcagggaaactgaggcacagcaggtcgcaggtccttgtctcatctcccacagtgacccrgcagcacagctgccagcaaggcccagggttctggctggggctttagctctggagttgttacagaaggccaggggccatgtgaaatttcacaaagctcttactgggccccacttggttacaaatcccagggctctgctacaaatgtgattgtgatgggaatgcaatgggggtggggagtgtgtgtgtgtgtgtgtgtgtgtgtgtgtgtgtaagtggcgggtttgatagtgtgtttgaaagccttgcatgcctggaatttgacaagcacggaataaagaccagaaaacccaaaataatggggaagaaagaacaaagagtcttcccaaagccatggttcaagctgtgggcaaatgtcttcctgtttctcatccaaaagtccctgcccctaggcccaaggggctggctgggctggtttggccagtccagggccattctgcagcctcaggcctctctagatgtggcctacgtgctctggagagggaagcaggggaggcagggaggcagttagggctttagacactttctaggtgcctcagggggcctacatatttcctatgtaaagttcagtctgtttgcaattagacttctcttctttgcttatttccggagggattataaatagtgaaatcagcttaatttggctctctctgagatcaagaggccactgtttccaacagtctgaaaataccaagcagtcccacccacatccatgggtcatgccacgtggcaggcctggtaggctctccgtgatgaaggaactttaagttgcatgagttttcaacaggtaagactctttctggactctagcaaagatatcgtcttttcaacttcaactaaaatagaaagaatccagcactgtttaggtcttgaaatcctctttctttccttaatgagctcaaagctgtaaaaggtctttcgggaaaacccatcttggttcaattactttaccagttttagacttttcttggggatttgggcacagagaagatcctgagctgcttcagacatgcagatgctgcccctgacttgtcaccttcagcacagcaggtgtctgaggtcatttaaccagcgattgggagagatgtcacggatcagcgtgcctgggggtgcaggagaacagcccgccatctgtgagatgactcgggc

SEQ ID NO: 52600 - DNA, 1451 bp, Homo sapiens
taacatagtggctgtttatgagcaagagccctcaataaagtcatcgggacggttctctcggcagcgtgtctaatcttctctggctgccattctgggcgcttggctcctgatctattttggtctctctcttctttgactcattctgggacttccgtgccattaatctgagccccccaccagggcctggtcccaccagcaggcagacaattcagaattagctgcagtcatggttgtccaaactgacaggcagggaaactgaggcacagcaggtcgcaggtccttgtctcatctcccacagtgacccagcagcacagctgccagcaaggcccagggttctggctggggctttagctctggagttgttacagaaggccaggggccatgtgaaatttcacaaagctcttactgggccccacttggttacaaatcccagggctctgctacaaatgtgattgtgatgggaatgcaatgggggtggggagtgtgtgtgtgtgtgtgtgtgtgtgtgtgtgtgtaagtggcgggtttgatagtgtgtttgaaagccttgcatgcctggaatttgacaagcacggaataaagaccagaaaacccaaaataatggggaagaaagaacaaagagtcttcccaaagccatggttcaagctgtgggcaaatgtcttcctgtttctcatccaaaagtccctgcccctaggcccaaggggctggctgggctggtttggccagtccagggccattctgcagcctcaggcctctctagatgtggcctacgtgctctggagagggaagcaggggaggcagggaggcagttagggctttagacactttctaggtgcctcagggggcctacatatttcctatgtaaagttcagtctgtttgcaattagacttctcttctttgcttatttccggagggattataaatagtgaaatcagcttaatttggctctctctgagatcaagaggccactgtttccaacagtctgaaaataccaagcagtcccacccacatccatgggtcatgccacgtggcaggcctggtaggctctccgtgatgaaggaactttaagttgcatgagttttcaacaggtaagactctttctggactctagcaaagatatcgtcttttcaacttcaactaaaatagaaagaatccagcactgtttaggtcttgaaatcctctttctttccttaatgagctcaaagctgtaaaaggtctttcgggaaaacccatcttggttcaattactttaccagttttagacttttcttggggatttgggcacagagaagatcctgagctgcttcagacatgcagatgctgcccctgacttgtcaccttcagcacagcaggtgtctgaggtcatttaaccagcgattgggagagatgtcayggatcagcgtgcctgggggtgcaggagaacagcccgccatctgtgagatgactcgggc

SEQ ID NO: 52601 - DNA, 1554 bp, Homo sapiens
catcaataataaaaaggtaaggcttaaggagttcctactgataccacctctttatgtagaagtagctttctcttcttgggaagctacttgtacttgagaatttagatttaaaatcagaccgagactgccatgggtctctaggacggccgtctatttttctaagctggtccccactttaacaaatcccaggagctgaagcagtaggatcttcatttactctgttgggtttgtgcccccgagatacagtcctttccatttcagcatcaatcatttgaaaagtaaatatctcaccttcttgtgacctggcaaggatagagtagagttctctccatcagggtcaatttacatctgtgtccttttttttttttttaacttgtattttaggtttggagggtacatgtgaaggtttgttacataggtaaacttgtgttacaggggtttgctgaacagagtatttcatcacccaggtattaagcccagtacccaatagttatcttttctgctcctctccctcctcttctccctccacccatgagtagaccctagtgtttgatgtttccttctttgtgttcataagttcttaccatttaactcccacttacaagtaagaacatgtggtatttggttttctgttcttgcattagtttcttaaggataatggcctccagctccaaccatgttcctacaagagacacgatcttgttctttttatggctgcatagtattccatagtgtatgaagtcttaacaagggcaggagtagggtgggagtctcattttatagggaaaatgttccttggctggtccttccttccctactctctatcctgtcatcctcaatgtcccctaacaaccaggagtggatgacagtaaacaatttcagtgttgggactgatctggccactccccactgggtatggttcccccagacggtgcacagctcctggcctagcctcagtttatttctctgctgtaggagagcacgggccccattctcagattgcctcttccagaatatgcctttaagaggaggagtaaaaaattccaggaacaggcttcatgtcaatgacagtagctggctaatttcttctgagaaaatggaaaccttggtctcctgatgtgtgcaatgacaggcacaagaggaattttccaatacaacaagggaacgaattttctaaggacaagctggccgagaaaagccgccatctcaccgtgaaccagaattaggtaacgtggcacccttggagcagcagaggtgaccggctggaacagtcggccaggaggacagctgcactccccaccaccttctgggtgtgttgccaatgtctgcccctgacgggattagtgacttcaggacagctggaacattcgcagtgctgtttccttacgatgggaagagacatgatcttgactctgcttctgtaggagatggtgatgaggagtagctgaaagctagataggktctttaaaacctgtgacagaaatggcgtgtgccaggcctatctgttttgcaggagcttttacagcagcccagctgtttccttctatgaactca

SEQ ID NO: 52602 - DNA, 827 bp, Homo sapiens
tgattcaaattgatattagttttatgacatgaagaaccataattgataagtcaaaactttaaaatcatttgtggaaaagtaatgattttaaagagtctaaatccatagactcccatctgattaaagctatctcttattattcattttcaactccctataaaagatgtttcctttcatgcatattccttttgcctaccaccatctaaaataagaattttgatttgaaatagtaatttarcttttagtaaccagaaagagaaatgtaaagtcctctgaaatataacttacactcagtttatagaaaagctgcctttaaaatggccagtgcaatatcagacacagagactcagcaggtaaaaggcacatggatggacagcacagctgcagccatttatttgcagggagaaagactgcatcctgaggtttgccttgtcagaatttcttacaggctcttcacaaaggtgaaagatatttattctttggcatgccaagtgaatttctccacaatgctctgctatgtggttagaaatttgtctactgtctaaattcaaccccttattaaaaatatcattgaataataaaaatatctggtgtctttgaatatataatatcacttactagttttattaattcatacctcagtaatgaattatactcctctaattatgtggaaattaacttttcattaaagtggcaattctatacctatttttctttcttgtcaagtccagaaccatgatttagacatatgaaatactgttctcatcaaggattggttctgtcttgtattttgtttcaatgaaaatattaaaagagaaagtaattca

SEQ ID NO: 52603 - DNA, 1509 bp, Homo sapiens
ttttttttttgtttttgttgttttatatagtagtcaaactgtttaggttcaaaccagaagtcctgactcccttctgtgggttgtgttttaaatatttgtttaatgttaaatgttttttcactgctcttctgatttgtcctatgtttatcccactttggggctagtctggaacaagtcatgtataactgtgctctagttctcaaagtttacctacatttattccagttatttctatgcatgttcaatttaaagacaagttcaggacattatatacatatttaatgtatctattcctctcattcctttttttttcaatgatttccctcaaactatctagttttcagtgattagatttcttgatggtctgattaaaaagccaaggatatttcttctcacagctgtcataccccttttggaaatacatacatttgtgggaaaagcagcaagatagaatctttagtgctttcatgcccactgccaccccgctgttgcttcgccttcattactggggctcacttgagggagttctaggaagttaacaaaaataaaacaaaacacaaaaactattctcacatgggacaccatatatagttttcttactaaagacaaactgttttagtctgtgctatttctgttcattctttattgtcattttgggagatatggtagtctgtactggacaatatgagagatgaaagctaatcaaaacaaaaataaaacttaacaaaacaacaaaaacacaggtaacttactcccatataatcacacaattttcatatttctatccagtctgcctgtccttattctttttttttttttttttttttttttttttgagacggagtcttgctctgtcacctaggctggagtgcactggcgcaatctcggctcgctgcaagctccgcctcccaggttcacaccattctcctgcctcagcttcccaagaagctgggactacaggcgtctgccaccacgcccggctaatttttttgtatttttagtagagacggggtttcaccgtgttagccaggatggtcttgatctcctgacctcgtgatctgcacgcctcggcctcccaaagtgctgggattataggcgcgagccaccgcacccggccccttattcttattttttaagattttcaataattgmttttagtattttgtccagagattttagttataatctgatctatgggagataagatagagtgtgtttacttcatgttaataagaaccagcaatttataacatcacatgcacctcaaactgtcaagatacgatttttaaagttgtttaactgggtttttgaaaagtaattgttattgtcataagtcaagagaaatattagcaatgatgctaaccagtttcacctaaatctaggtgctaccatttccaaaatagaaaagcaatgtcgaagtatgcacaactaggtaacagtgctataaaataaattttaacattttattaaatcataaaagctgtttctaaatatacattaatattgaaa

SEQ ID NO: 52604 - DNA, 1986 bp, Homo sapiens
gaactcctgacctcaggtgatccacccacctcggcctcccaaagtgctgggattacaggcgtaagccactgcacctggccctggatactttaaataatctctaaaatacttacaaaacctaatacaatgtaaatgttatgtaaatagtggttctacagtactgtttagaaaataataacaagaaaaatgtttgttcatgtttggtacagatacaaccatccattttatttttctaagtattttcgatctgaggttggttgaatacacggatgtaaaaacccacagttatggtgagccaattataacaatattgccccatggtgagtacacacatgtgccaggtgctctgctgggggatttccatccctcatagcatttaattcatacaaggactctgcatgtgggggttcattataatccccatttaacactatgaagatgagactcagaaaagtgagttaaactgacccatgggtggtcagctagtcaactgcagagtggagttcaagtcctgatcatagatccaggacctggaatcccataccacctatttttggaaacattggagggttttttgggttgatattaaccccctatacacagactttgtgggccccactactacatacatacgttgaggccccccaggatgagaaaggcaagcctacattagattctttggtggctttataaagcatttgaatggaaacagaaatttttaaaaagtttactacttacaattccaaaacaatataataatcttctgcatcaaaaaagtttttaatcttgatgatgcaaggctaagaagagggggagaaaaaagggaaagtagtgagaaactcccaagaggaaaaccacaagagcttagaacatctgcccagagggacagggaggccaagaacaggcatctggccccctgcctcagaggcttggaagttcaatcaggggagaaggcagacagaatctagccaactcctcagtgagaacatgcaagaaattttccaccccaccatgatggtgagagactagttcatatttcatatgcaaggatgctacctgggaatgaaggctaggtctcttcccagtcttcttcctcactaccccagagcagaggtactcaaggacagcctaaggaaccctgagggagactgacaagtagcatgaataaaagctgtcaagtaggagcccagccatgctgccaaacaagggttatttaagctctgggcaactggaacctccaggcaattggaccccatggaacaagatcctaccatttttcaaaggaagaggaaaattctaattttataagaactctaaaacacacttgggtcgggggcagagagagagacagacagacacacacacacacacacacacacacacacacacacacacacctatggctgatagttcatgaccactgatcaatgcagggtgcatggagaacactgagggtaaggaagagaatactgcacattttaaaatgcctatacaatatcatgacttcatacttagcacacctattttttttttaatttttctttcttttttttttattttgagacagtctcattttctttttttgagacagagtctcactttgtcgctcaggcttaagtgcagtggcatgatctcagctcactgcaacctccgcctcccgggttcaagctattctcctgcctcagcctcctgagtagctgggactacaggcgtgcaccaccacacccagctaatttttgtatttttagtagagagagggtttcaccatgttggccaggttcgtcttgaactcctggcctcaagtgatccrcccacctcagcctcccaaagtgttgggattacagcagtgagccaccacgcccggtgggcacacctattgtttttacgatacagaagtcagaagacagttaagctcagtgggtaaataaaagatttggtgagtattcatcagggacatacaccccagcacattggaggactgtagtt

SEQ ID NO: 52605 - DNA, 1986 bp, Homo sapiens
gaactcctgacctcaggtgatccacccacctcggcctcccaaagtgctgggattacaggcgtaagccactgcacctggccctggatactttaaataatctctaaaatacttacaaaacctaatacaatgtaaatgttatgtaaatagtggttctacagtactgtttagaaaataataacaagaaaaatgtttgttcatgtttggtacagatacaaccatccattttatttttctaagtattttcgatctgaggttggttgaatacacggatgtaaaaacccacagttatggtgagccaattataacaatattgccccatggtgagtacacacatgtgccaggtgctctgctgggggatttccatccctcatagcatttaattcatacaaggactctgcatgtgggggttcattataatccccatttaacactatgaagatgagactcagaaaagtgagttaaactgacccatgggtggtcagctagtcaactgcagagtggagttcaagtcctgatcatagatccaggacctggaatcccataccacctatttttggaaacattggagggttttttgggttgatattaaccccctatacacagactttgtgggccccactactacatacatacgttgaggccccccaggatgagaaaggcaagcctacattagattctttggtggctttataaagcatttgaatggaaacagaaatttttaaaaagtttactacttacaattccaaaacaatataataatcttctgcatcaaaaaagtttttaatcttgatgatgcaaggctaagaagagggggagaaaaaagggaaagtagtgagaaactcccaagaggaaaaccacaagagcttagaacatctgcccagagggacagggaggccaagaacaggcatctggccccctgcctcagaggcttggaagttcaatcaggggagaaggcagacagaatctagccaactcctcagtgagaacatgcaagaaattttccaccccaccatgatggtgagagactagttcatatttcatatgcaaggatgctacctgggaatgaaggctaggtctcttcccagtcttcttcctcactaccccagagcagaggtactcaaggacagcctaaggaaccctgagggagactgacaagtagcatgaataaaagctgtcaagtaggagcccagccatgctgccaaacaagggttatttaagctctgggcaactggaacctccaggcaattggaccccatggaacaagatcctaccatttttcaaaggaagaggaaaattctaattttataagaactctaaaacacacttgggtcgggggcagagagagagacagacagacacacacacacacacacacacacacacacacacacacacacctatggctgatagttcatgaccactgatcaatgcagggtgcatggagaacactgagggtaaggaagagaatactgcacattttaaaatgcctatacaatatcatgacttcatacttagcacacctattttttttttaatttttctttcttttttttttattttgagacagtctcattttctttttttgagacagagtctcactttgtcgctcaggcttaagtgcagtggcatgatctcagctcactgcaacctccgcctcccgggttcaagctattctcctgcctcagcctcctgagtagctgggactacaggcgtgcaccaccacacccagctaatttttgtatttttagtagagagagggtttcaccatgttggccaggttcgtcttgaactcctggcctcaagtgatccacccacctcagcctcccaaagtgttgggattacagcagtgagccaccacgcccggtgggcacacctattgtttttacgatacagaagtcagaagacagttaagctcagtgggtaaataaaagatttggtgagtattcatcagggacayacaccccagcacattggaggactgtagtt

SEQ ID NO: 52606 - DNA, 574 bp, Homo sapiens
cttagagggtagtccttctaaatcccaaaccagaccatggggggatattattaggggtccccatccttgacaggccctggacctccaaattgtgttctcagagttccattaggctataaaaagatctgctcagtttttcagcctctcagctgcctgttctggtagctccaagagctacacctctctgagtttctttcctctctggaatgttagccttgctatgcttcattttttaaaaactgccctgttcagctgttgtagttgttctctataagaggttgacctgcacgttatagtccactgtcagcagaagtcaacttttaatattcacaaggactcaatacagacacacttacaggatcatttttagattcaaagatgtctgataagcgaactaatatcaaagtggaagctgamcagtagagggtttctggataggaaaaggtaatggaagggaagaagagaaaagcacccaaaagaatgaaagaaaaatcataccatacctttatggtgtaggtattctttgttttacaatgaggacactgtggtttacattaaaactgagctgctcaca

SEQ ID NO: 52607 - DNA, 574 bp, Homo sapiens
cttagagggtagtccttctaaatcccaaaccagaccatggggggatattattaggggtccccatccttgacaggccctggacctccaaattgtgttctcagagttccattaggctataaaaagatctgctcagtttttcagcctctcagctgcctgttctggtagctccaagagctacacctctctgagtttctttcctctctggaatgttagccttgctatgcttcattttttaaaaactgccctgttcagctgttgtagttgttctctataagaggttgacctgcacgttatagtccactgtcagcagaagtcaacttttaatattcacaaggactcaatacagacacacttacaggatcatttttagattcaaagatgtctgataagcgaactaatatcaaagtggaagctgaccagtagagggtttctggayaggaaaaggtaatggaagggaagaagagaaaagcacccaaaagaatgaaagaaaaatcataccatacctttatggtgtaggtattctttgttttacaatgaggacactgtggtttacattaaaactgagctgctcaca

SEQ ID NO: 52608 - DNA, 533 bp, Homo sapiens
atagagtctataaaattcagtatgaaatttctactgaattaaggagtaaatgaacttgtgttcaaggagtagaaaggccagtgtctggaacatggtaagtgagcagcagagttaagatctgaaagactggcaggacaagatcatgcaggactctgaaggccttggtatagggtcagactggaggcaaaaagtgcattttctgaattaaggctatggatatgaaaaagtgatgttggggctagtagtataaagaaatagcatttacaagacttgtgatmttttttggatgttggggaaggcaaggcagaagcctgaatgactgtgtttctgacttggaggtctggggactggggacatcattctctgagatagggaatataggaagacaagcaggtttgggggaagagacaatgagtgcagtttgggatagaaatgtaaagtgtctgtgagatgttcaattgtagatttatatataaagatggatgtgtagatatgaatcttaacagagggtttgggctagaagtataggtttg

SEQ ID NO: 52609 - DNA, 561 bp, Homo sapiens
tgtttcatccaatattactgttctgagaagtgtattatttcagtatgtagatggtttagctagaattctatttgtctccagtttaattagtggttaatttcttaggctcttccatcatactaatctacactcaattctcagttactccacttgaaagctgtgttaccacggtgcaatatttaccctttgatcttttttctcgtttataaaataaggctagtgtttggtatactgtgaagaatagtggaaayacgtgatctatgaacattggagaggggaggaactatatggtgaagaagaaagtgagaaaatctttcctgtggagagaagcctatacataattcacctcactagactactgccttttcccattaaactagagtgtgaaatgaagaaaatgaactagtcaatcctacttggagagattgcttcggacctgagacatctgaaatctaaccacctgacaagctgtgggtgctggtcacctattttagtccatttaggatgctgtaataaaataacttagactgggtaatttgtaaatagcagaaacttactgct

SEQ ID NO: 52610 - DNA, 583 bp, Homo sapiens
ggctattgtgaacaatgctgcaatgaacacgggagtgcacatatcttttcaatataatgatttcatttctttgggatacatactcagtaatgggattgctggatccatactcaatttaaagatatagaaaacaagccataaatatttatgtcccccaatatccaaaagttaatcaatggccaaatcagcttaatttgtctgttttgtttttactatcaaacttaatacattcaycaatgctctttttcatagttgtagccttttcttgaagattataacgtttagtagtttagattgttatgtagacatgtggtgattaaagtaactcctgcaattaatttaactaattttagttatcatgtactacacttttacatactatttccctcaaaaatgttaaaaagcctttcttaaagcctttttagcagtgccttttatatttattcgtgttactgtttcatcaattgctttagtttggtgacagtttcatgtagttcatttactggattcaagttacagtccagttacttgaggggcccaaaagttaaggacttctgaaagtgcgtgaattgcttctactcac

SEQ ID NO: 52611 - DNA, 583 bp, Homo sapiens
ggctattgtgaacaatgctgcaatgaacacgggagtgcacatatcttttcaatataatgatttcatttctttgggatacatactcagtaatgggattgctggatccatactcaatttaaagatatagaaaacaagccataaatatttatgtcccccaatatccaaaagttaatcaatggccaaatcagcttaatttgtctgttttgtttttactatcaaacttaatacattcaccaatgctctttttcatagttgtagccttttcttgaagattataacgtttagtagtttagattgttatgtagacatgtggtgattaaagtaactcctgcaattaatttaactaattttagttatcatgtactacacttttacatactatttccctcaaaaatgttaaaaagcctttcttaaagcctttttagcagtgccttttatatttattcgtgttactgtttcatcaattgctttagtttggtgacagtttcatgtagttcatttactggattcaagttacagtccagttacttgaggrgcccaaaagttaaggacttctgaaagtgcgtgaattgcttctactcac

SEQ ID NO: 52612 - DNA, 572 bp, Homo sapiens
atttggaagaccatgacaatggccctagggtatgatgctctgtttctcccacctccatctcttttccatatttttggctctgccctagcattaagatagccagtcacccagtctccccaggcctgtgctttctgctgtgtttggccaataagagcagagaggggcagtagcctcccaccctccttgctgggtcctgatgcagctgtggctgttgctatggtttgaatatttgccccayccaaaactcacattaaaattttatctccaatgtgacagacagtattgacaggtggggcctctaagaggtgattgggtcatgaaggctctgcccttgtgaatggattaatcccttcattgatcatgtgagtgtgactgatggttttataagaagaggtaaagagatcagagctagcacattagtttgttcagttctccatcccccatgtgatgccctgcatacctcaggactatgcagagagtccccaccagcaagaaggccctcaccagacacagcaccttgaccttggacttctcagtttccattattataagaaagaaattctttttcttta

SEQ ID NO: 52613 - DNA, 575 bp, Homo sapiens
aagagtattttactgcagtcttgctttgcatttttttaattcagttttcagtaacggatacttttctaggcatttttccatggtttaggatttcaagaaagataaaatttacaaaaaaaccactttgttctatgaaaagaccttaagattgacagagaaaatataatgattaacaatattaaaaatcaaacagaagaaagaactagaaatataaattgatgggttaataagaaaatagtacaattaccccacgccaatacagctgagccccaaaggtacctaatrgtgaatttagtgttgggactctcagggctcctcttccccggaacttccctccgtccagcgccaagaccaggacgagcaactccacggcacctcctttggtgaagtgagtcaaatgagttttgttgttgttgttttgagacagtctcactctgtcgcccagcctggagtgcagtggtgcgctcaatctcaggtcactgcagcctctgcctctcgtgttcaagcgattctcatgcctcagcctcccaagtagctgggattactggggcatgccaccacgcctggctaatttt

SEQ ID NO: 52614 - DNA, 575 bp, Homo sapiens
aagagtattttactgcagtcttgctttgcatttttttaattcagttttcagtaacggatacttttctaggcatttttccatggtttaggatttcaagaaagataaaatttacaaaaaaaccactttgttctatgaaaagaccttaagattgacagagaaaatataatgattaacaatattaaaaatcaaacagaagaaagaactagaaatataaattgatgggttaataagaaaatagtacaattaccccacgccaatacagctgagccccaaaggtacctaatagtgaatttagtgttgggactctcagggctcctcttccccggaayttccctccgtccagcgccaagaccaggacgagcaactccacggcacctcctttggtgaagtgagtcaaatgagttttgttgttgttgttttgagacagtctcactctgtcgcccagcctggagtgcagtggtgcgctcaatctcaggtcactgcagcctctgcctctcgtgttcaagcgattctcatgcctcagcctcccaagtagctgggattactggggcatgccaccacgcctggctaatttt

SEQ ID NO: 52615 - DNA, 1974 bp, Homo sapiens
gaaaagtccaacgggaatcctcagataaaggacaatcgtccctgaaaaagtcagtcccaaaacatctaagaaggtattagaacagtggtcttggctgagtcttatgggactagaatcaggaatttggagcttgcgtttctgctactaatctatgagtcatttggagaayctcattcttctctggactgcagtgtcctcacctataaaatgtgtataagtgtactggggtggtggggagggggttagactgtatcagccttcttctacagggggctcataagcccaatcaatggtatttgtagtccaacctcctgaagctgtgaaaaaaactttgtgtgtacacatatttttctgggaagaaggtccattgctttggacagatctaatcagaagccaggagtcctaaaatgttaacatctggatcagatcatttctaaggtcctctccaagcttcagtattctatgatgttataatctttctgggaaggaacttgtggctgtcaaattaattggatatccctagctatgttctagccgcatcctttcttatgtactctctaatgattttgttaaggcagtcacacctaagttaacagagtcctgcaacaccctctctactagattaggtggcacatcatgtgactgatgtggttcattagggagccaagagagaccagaggagctgtgagagcaactggccagatcccacaggagctcagtggtggaagcaggtgctaattaccatcctttggaggaacaggatatgcattttttgggagtgggtaagaatttctggttagacaagctccaaattctttggcctactttgaaggcactgcctgttccattggctaggatgagattttgtttcctgatgagcaccagctcagccaggaaggaaggctcagaaaaggaggtgtggatattctttgtggaggaattgtcatgcaaataaaggctccttcccaacccaaggtgtaactgtgagggagtgtcagggtcccacctttctggctcaggaaaaacatatctcttacttttttacaggagtaggtttggtagctgagtaatgtaattatatagattatagattaccaacaaacactgagatttcaacctgttctggatatatattatttgtgaggggaggggcttggagaaaaagagcaggaatattggttgggatgtagccaatgggagaaccccattattaaacagagagtgcagtccaagcattgcacccacaagaggaattcaatgtagggagatattgggagtagagatcagtgcttgggagagaggagctgggaaagaaagcaattcctccaaaggctctaagtcagcgtgttgtccagaacggaaattgagtataggaagagagattctttcttggactttggaatatctagtctggttccttttcagaatgatcagaccaccttccttacctattgcctgggccaatggttctcagccctggctctgcattaaaaccaccttttaaaaatttggcaatctctgggccaggtgcggtggctcaaacctgtaatcccagcactttggaaggccaaggcaggtggatcacttgaggtcaggagttcgagaccaccctggccaacatggcaaaaccctgtctctactaaaaatacaaaaattagccgggtgtggtggcatgtgcctgtaattccagttattgaggaggctgaggcaggagaattgcttgaacctgggaggcagaggttgcagtgagccgagatcatgccactgcactccggcctgggtaacagagcaagactctgtctcaaaaacaaaaaacaaaaacaaaaaacttaatgatgtcttggtttcatgctaaatcagtaagtcagaatatctgaggttagagcctagcattgctactaaaaaagttatttccttgtgactttaatatgctgccaaggttgagaaccactggcctacaccaatgatggaaaa

SEQ ID NO: 52616 - DNA, 627 bp, Homo sapiens
ataataaaaaatgtagttgtccacttaaagatatgcaactgggtccatgttctcttcaaatccaaccaggtcagattgccaaatccagattctcattgccttggaaatctgttgtctgcagccatttctggtgcccaaaccagaactgatccgggtttgggtgcatgcaagagatccacattaggtagtgtcaccagcaagggacttgaagcaggggatttggtgctcccaaaattgtttgaaaggtcaagagaaaatactctagactgagcatccagttgtttctgcagagccactttatcctgttgcagcaactgatagatcagaaaactcctaacactgtcacttattgaatgagcatctaacctgacatgaccaggaaagctatactactgctctaaaattatgccacttctaccacaatccccaccagcaaaagagactccccacacccttccttttctttccatgtctctgggttgcacaaattcacctaattggtggagcctaaacatagctggaactctaactctaaggtggtgcagaaattattgtttctagcttttcagcatttatgtaatgggargggttgtaatggaggcaagtgaaccaccatactatcttcca

SEQ ID NO: 52617 - DNA, 574 bp, Homo sapiens
agcaagcacattcccatgactgcctcccccatgttaaagacagtcctgggtcctaccatgccagcrcccccacccgtgtggctgagggaaggagaagggaaaggctgcacagatgggaatctgatctgagagtttacaggctcatcgaatggactctaaggacctttcttgctgtcagaaactgagatttgccaagtcaagacatgaacaatgtgggtcacagccaagaagtaaaaaccctgaggattgagaatcctctgctgatacaaatacaatcccaaggactcatcgtcggcctgttttctgacttcacatggctttgtggcttcccaacagcaggacgtgagtttaggatgcagattgccaaggatcaattcctggagtagacagctgtccccagggaccatcaccatcttccccacagcgtttcttttcttttcttttttatttattttttttacgagagggtttattcataagactgccaagtgaggaggctggagaacaggtctcacatccccctctccatagagagggcttagggatatttatgggatgaagaagcaggggtatc

SEQ ID NO: 52618 - DNA, 574 bp, Homo sapiens
agcaagcacattcccatgactgcctcccccatgttaaagacagtcctgggtcctaccatgccagcacccccacccgtgtggctgagggaaggagaagggaaaggctgcacagatgggaatctgatctgagagtttacaggctcatcgaatggactctaaggacctttcttgctgtcagaaactgagatttgccaagtcaagacatgaacaatgtgggtcacagccaagaagtaaaaaccctgaggattgagaatcctctgctgatacaaatacaatcccaaggactcatcgtcggcctgttttctgacttcacatggctttgtggcttcccaacagcaggacgtgagtttaggatgcagattgccaaggatcaattcctggagtagacagctgtccccagggaccatcaccatcttccccacagcgtttcttttcttttcttttytatttattttttttacgagagggtttattcataagactgccaagtgaggaggctggagaacaggtctcacatccccctctccatagagagggcttagggatatttatgggatgaagaagcaggggtatc

SEQ ID NO: 52619 - DNA, 549 bp, Homo sapiens
ggttatgttttagacttcaggggccccttgaagagatgggacaggaacaggctgcacaggaaccacttttacatatttagaagttgacaataattaatatttgctaaggatgtttgctgtacttggcaccatgctatgtcttttctgccttgtcttatctcttctgcacatcagtaatattgtaaggtaaggatttctacaatccccttgccaaagatgaagaaaagaagtctcaaagacgttacataatgtgcctaagacctggctgctactgagtagccatgctgggatttctatccagtttgccttgactccagccccagtgctcctgaccactgtcttatgagcagcccagtgaacactgaggctccagcacacagtctactgtcccaaggcagcttccacatccttcagcaagagctttggcttggtgctgattggtggcattagcaggatgtggatggagggaaaatgatggggagaggcctttgcttgtcagcttrtagatgctcaattagctcccaggcacacagaaaaggccccgcttcc

SEQ ID NO: 52620 - DNA, 643 bp, Homo sapiens
tgtaaaaatgatcctttagttttcctacttaaaatctatgttttatagtttggcataatttataggagttctcatgatcagattcttgcctactcctccaaacttgtrttgttgtactctgacacacagagcaaaaacaaacaaacaaacaaacaaaaaaacaaaacccgacacactgcttacataataaaatctcctgggtggattttatttacatttttaaatatattgtcacacttactaaaggaatggttgccaaaaaaataaagatttttcatattcccttaccaaactttccctaatgctaacatgttacatagccatactaaaatgatcaataccagagaattaacattgtcacatacttctctctctctctctcttttttttttttaattagatagagtctcgccctgtctcccaggctggcgtgcagtggcacaatctcggctcattgcaacttccacctcctgagttcaagtgcttccctgcctaacctccctagtggctgggactacaggtgcacatcactacgcccagctaatttttgcaattttattagagacaggtttgtttttttttttcttagttttctcctttcttaacagttgccaggtctttaattttccttcacagcattgat

SEQ ID NO: 52621 - DNA, 643 bp, Homo sapiens
tgtaaaaatgatcctttagttttcctacttaaaatctatgttttatagtttggcataatttataggagttctcatgatcagattcttgcctactcctccaaacttgtgttgttgtactctgacacacagagcaaaaacaaacaaacaaacaaacaaaaaaacaaaacccgacacactgcttacataataaaatctcctgggtggattttatttacatttttaaatatattgtcacacttactaaaggaatggttgccaaaaaaataaagatttttcatattcccttaccaaactttccctaatgctaacatgttacatagccatactaaaatgatcaataccagagaattaacattgtcacatacttctctctctctctctctyttttttttttaattagatagagtctcgccctgtctcccaggctggcgtgcagtggcacaatctcggctcattgcaacttccacctcctgagttcaagtgcttccctgcctaacctccctagtggctgggactacaggtgcacatcactacgcccagctaatttttgcaattttattagagacaggtttgtttttttttttcttagttttctcctttcttaacagttgccaggtctttaattttccttcacagcattgat

SEQ ID NO: 52622 - DNA, 1773 bp, Homo sapiens
atcgtaattatacttctacaacttcacaaggcatttagacatgttaccagcctcttgcatgagctcaatattgctttctgtgatttttatgtccctgttttaaaaaacgtatgacatcagagtgaccacaaattaacaggaaagccaraagttctgagagagggactgaaggctggggtggagagggagtgcttccttttctggcttcttctgtcagtacagctccctacccctcactcaaatgttccagactatttacttgtcatctgaagtcagtcggcattctgcctatgcctgcatgggctttgttcagccctgatgcaccaggcacagggggaaaggcaacaataatatcaaaaaaggccgagtgggaggatagatctgagcacttaggaagaggaatgttcctataaaacagggactcttggcagtagagccagtgaaaaatgataccaattacataaagcaaaatgccacccatcaagcagaacattttaattctccctattccaggctatttatgactttttgtccaagattcaatacatatctgtaaaaataaatggaatcaaactcatctgttaggtagaatggggcctgtgctagaggggaaaaaaaaggcaagaaaacattaccagcatgttattggagaattccaggggctgggcacagaagaacttcaaatataattttgcctctcatgttttttcctgtttaggttagttgtatgaaaaagagagaggtaaccaattttatggagacatttaaaatatttaaattaattttactttctttgagaagtttctattttgattcaatacttatactatcccgcccaaaaacaatgaatgaaccaacaaaccaacaaaccagcgaaccaaccaacgaagcaacagaccagccaaccaaccaaccaacccaccaacccagctctctgttttccagggcaacttttctttacagttctgccggagatggtccaggactcacagctggtttcctgaaaggctgccacaagatggcgacaacgtcacagtggagaatggccaattgcttctgctggacactaacacaagcatcctcaacttactgcacattaaaggtgtgtgaagtttgtaggttggtaatattattctatatgattatatcacttgtaggggggatggaggagggaaactttctggataagttccagaacttagttgacaatttatcctcagaccaaactgaaattttactatgtaaaggaagaagtggtcagagggttcaaagtgaaaggcctttctttggactcattataagcacagagcttgattagtttaatttttcaaaaacaagaaggttaacagtgttctcaaagaatatgcttctttattcaagcactttttagtcatgcttatccaggacagcccccacaatatagcaaaatgccctgaaattggttaacgttgctgcctttgaaataccctgccaagaaagccatgtcttcctgcttttaccctgttgtggttttgacttcttggtcccatggaaagtcatataaataggctttcttattgcaaaaccggctatatagctctagggtttatgaagttggaagaggctgagatttcgaatttcaaccctactaccacatcttcaaatggctaagtcagttatttcacctctttgtgcatttctttccttatctgctaaatgagaataaaaatcatggcctactttagtggctggaaataaggaatagttatcaaaatgcctctgttcattggcaaa

SEQ ID NO: 52623 - DNA, 1773 bp, Homo sapiens
atcgtaattatacttctacaacttcacaaggcatttagacatgttaccagcctcttgcatgagctcaatattgctttctgtgatttttatgtccctgttttaaaaaacgtatgacatcagagtgaccacaaattaacaggaaagccaaaagttctgagagagggactgaaggctggggtggagagggagtgcttccttttctggcttcttctgtcagtacagctccctacccctcactcaaatgttccagactatttacttgtcatctgaagtcagtcggcattctgcctatgcctgcatgggctttgttcagccctgatgcaccaggcacagggggaaaggcaacaataatatcaaaaaaggccgagtgggaggatagatctgagcacttaggaagaggaatgttcctataaaacagggactcttggcagtagagccagtgaaaaatgataccaattacataaagcaaaatgccacccatcaagcagaacattttaattctccctattccaggctatttatgactttttgtccaagattcaatacatatctgtaaaaataaatggaatcaaactcatctgttaggtagaatggggcctgtgctagaggggaaaaaaaaggcaagaaaacattaccagcatgttattggagaattccaggggctgggcacagaagaacttcaaatataattttgcctctcatgttttttcctgtttaggttagttgtatgaaaaagagagaggtaaccaattttatggagacatttaaaatatttaaattaattttactttctttgagaagtttctattttgattcaatacttatactatcccgcccaaaaacaatgaatgaaccaacaaaccaacaaaccagcgaaccaaccaacgaagcaacagaccagccaaccaaccaaccaacccaccaacccagctctctgttttccagggcaacttttctttacagttctgccggagatggtccaggactcacagctggtttcctgaaaggctgccacaagatggcgacaacgtcacagtggagaatggccaattgcttctgctggacactaacacaagcatcctcaacttactgcacattaaaggtgtgtgaagtttgtaggttggtaatattattctatatgattatatcacttgtaggggggatggaggagggaaactttctggataagttccagaacttagttgacaatttatcctcagaccaaactgaaattttactatgtaaaggaagaagtggtcagagggttcaaagtgaaaggcctttctttggactcattataagcacagagcttgattagtttaatttttcaaaaacaagaaggttaacagtgttctcaaagaatatgcttctttattcaagcactttttagtcatgcttatccaggacagcccccacaatatagcaaaatgccctgaaattggttaacgttgctgcctttgaaataccctgccaagaaagccatgtcttcctgcttttaccctgttgtggttttgacttcttggtcccatggaaagtcatataaataggctttcttattgcaaaaccggctatatagctctagggtttatgaagttggaagaggctgagatttcgaatttcaaccctactaccacatcttcaaatggctaagtcagttatttcacctctttgtgcatttctttccttatctgctaaatgagaataaaaatcatggcctactttagtggctggaaataaggaatagttatcaaartgcctctgttcattggcaaa

SEQ ID NO: 52624 - DNA, 656 bp, Homo sapiens
cattttcatttagaccaactgcaaaatttttctcagaacagttaccatagtagaaaaatatctttaaagatatattttaaacaattagtttgtggaaaaaacactagaataaggtcaaaagaattaaattctaagctggcttttcttactatgtgtccatggtgatagcagataagtctcaattattctatcagtaaaatggggctaatgatagatgatagatgttctttttatttcacaaggttcttataagggaaatacaggtaataggtaggagttactttgaacttttataaagaaaatatcaatgctattaaagtttttcaataccatgttataatgctgttgacttacaaatgttcaaaataarttagtatgtcttatttaatatttgtagttgtactttgaagtaactactacaaaaagttaagttgtatattataaaattctgttttaaaaatggatgaattttaatgttgtaggaatgagactttataattaacttggcatcttttttttatataaaatgcaaggtcaactaaagatttttgccttcaatgatttggccattatcatgggatttcttttcagaccactagatggcgcaacttaagtctactacttgttaaaagacattgtcagaggcctaatgacag

SEQ ID NO: 52625 - DNA, 579 bp, Homo sapiens
gacttggtggatactcagtatcagtgagttcaagataattctaacagacaaatactcagaatatagatggatatctmttaatgaccttaataaggaaatgtgtctgagattattactcaaataccacaacttggctacagaatgagtttgtgctttgtttcaatgctaagagttaatttccttggttctctttctcaacactaagttgggtgcagtgactcatgcccataattccagctactcaggaggtagtactgaatttgtggaaagtattaaaagttgctctcggctgggcacagtggctcacgcttgtaatcccagtactttgggaggccgaggtgggtggatcacgaggtcaggagatcgataccatcctggctaacatggtgaaaccccatctctacaaaaaattagctgggcgtggtggcgggcacctatggtcccagccactcgggagactgaggcaggagaatggcgtgaacccaggaggcggagcttgcagtgagacaagatcgcgccactgcactccagcccaggcgacagagcgagactctgtctcaaaaaaaaattttaaaaagt

SEQ ID NO: 52626 - DNA, 613 bp, Homo sapiens
tttagctacatagaaccaaatacttatttgtaatattatgctgaggcctttagatggcagtagtcctgcatgaggaatattttttatttttttttagtaatcttaaaatctttacatttcttaataaaaaatacttcattttctactctcttgattttctactctgttcttaccacaagaagaagaagcctacttagaaatttcactgtggttttttggtgtgtgaatttattttygatgatggagagggaggacgtaatgggacaaagtccttttgtgtccgtagttggttccttccagggggttcttggtctcactgactttaagaatgaagccgtggacctttgtggtgagtgttacagctcttaaaggtggcatggacccaaagagtgagcagaagcaagatttattgtgaagagcgaaagaacaaagcttccacagcatggaagaggacctgagtgggttgccgctgctggctggagtggacagcttttattcccttatttgtccctgcacacgtcctgctgattggtccattttacagagcgctgattggtccattttatagagtgctgattggtccattttacagagtgctgattggtgcatttac

SEQ ID NO: 52627 - DNA, 544 bp, Homo sapiens
gggtgggtcatgcagaaagatctgtttcctcaaaggatactcctgagcctcctggtaaaactcttggtttctgcacacaagatggaaagataggccgagcctcctggcattggtggggaggaaaagagacattgggcaatggagtccctaagctttccagccacaggttatttaggacggaagaaaaaaacctccactctccctcccctcctcggcctagattcttctcttgcctgactggtcagtgctactgtccaggctgaggccaagctgtccaggatagcagtggggccctggaagggggcagagaaggaatcagccaaggcacatcgttgagatgaaactacagaaagattggagaggaaagggagatttaaaatctaagtgttttagcacccaatggtgggtggttggctgggcagctcctgggaatgggagtttgccatgtcacytcggtctctccagcaggctgagttcaatgcttttcttccctcatttgagtttagcctacatgtttgccaccattctttagggagagagtgca

SEQ ID NO: 52628 - DNA, 525 bp, Homo sapiens
aaactccccccagttaacttcagtgagagatataaattgtatcattttctatgtatgccatgacaggaagaaggttgagaagtacccatctagtaaactataatttccaatatctacttcaaccttttgggtgtcctccaagggcagtaccttgtaaaacacaaggaataaatgttttgtgagtgaatgaatgattgaacagatcttctagaactgtgaaaagcagctctggggtgatgagtatctcagtcaacaaaactgacagcctgagtrtggggaaaacaccgtgtgcatttcagctgtctgcatggattgattccatttggcctgctgaatggtgaggtaagggctctgcagaaggtgtcaacgctgaacttgtctgtgcttgcggaagctcagaaatgatcctgccgcaactccagcctccccaggctgcctggctgggggctttctgtgacactcattcgccttgctacaacctcaacactcatcttcaccttctttgtcccctagccctaaataaaa

SEQ ID NO: 52629 - DNA, 525 bp, Homo sapiens
aaactccccccagttaacttcagtgagagatataaattgtatcattttctatgtatgccatgacaggaagaaggttgagaagtacccatctagtaaactataatttccaatatctacttcaaccttttgggtgtcctccaagggcagtaccttgtaaaacacaaggaataaatgttttgtgagtgaatgaatgattgaacagatcttctagaactgtgaaaagcagctctggggtgatgagtatctcagtcaacaaaactgacagcctgagtgtggggaaaacaccrtgtgcatttcagctgtctgcatggattgattccatttggcctgctgaatggtgaggtaagggctctgcagaaggtgtcaacgctgaacttgtctgtgcttgcggaagctcagaaatgatcctgccgcaactccagcctccccaggctgcctggctgggggctttctgtgacactcattcgccttgctacaacctcaacactcatcttcaccttctttgtcccctagccctaaataaaa

SEQ ID NO: 52630 - DNA, 525 bp, Homo sapiens
aaactccccccagttaacttcagtgagagatataaattgtatcattttctatgtatgccatgacaggaagaaggttgagaagtacccatctagtaaactataatttccaatatctacttcaaccttttgggtgtcctccaagggcagtaccttgtaaaacacaaggaataaatgttttgtgagtgaatgaatgattgaacagatcttctagaactgtgaaaagcagctctggggtgatgagtatctcagtcaacaaaactgacagcctgagtgtggggaaaacaccgtgtgcatttcagcygtctgcatggattgattccatttggcctgctgaatggtgaggtaagggctctgcagaaggtgtcaacgctgaacttgtctgtgcttgcggaagctcagaaatgatcctgccgcaactccagcctccccaggctgcctggctgggggctttctgtgacactcattcgccttgctacaacctcaacactcatcttcaccttctttgtcccctagccctaaataaaa

SEQ ID NO: 52631 - DNA, 525 bp, Homo sapiens
aaactccccccagttaacttcagtgagagatataaattgtatcattttctatgtatgccatgacaggaagaaggttgagaagtacccatctagtaaactataatttccaatatctacttcaaccttttgggtgtcctccaagggcagtaccttgtaaaacacaaggaataaatgttttgtgagtgaatgaatgattgaacagatcttctagaactgtgaaaagcagctctggggtgatgagtatctcagtcaacaaaactgacagcctgagtgtggggaaaacaccgtgtgcatttcagctgtctgcatggattgattccatttggcctgctgaatggtgaggtaagggctctgcagaaggwgtcaacgctgaacttgtctgtgcttgcggaagctcagaaatgatcctgccgcaactccagcctccccaggctgcctggctgggggctttctgtgacactcattcgccttgctacaacctcaacactcatcttcaccttctttgtcccctagccctaaataaaa

SEQ ID NO: 52632 - DNA, 586 bp, Homo sapiens
cagatttcaggagaagtaattcaaaagcctattttgatgtcagaatatcctctcacaacatcccctttttctcctcgctgtttcaacttctcaatgaactgcactgctatccttgcagttcctggggcacaccctcccctttcccacctccatgcttttgcttaagctgagcccacagcccagaatgttcccctgcatttttgccagttgaaatacaaatcaaaaaccaacctctaagttttcacccaaggtattgatcaggtctgtctctgctacygaaccaagagccctgaggtggggacacaaatcggccctgatttctctgtatccagagcatctagttcagtatccagcacatggtaggagtagagtggctgtctgctcactggtattgaactgatttgagtcaaatgaaataaaaaaccctttcttttttcttctttagacccaaggcaaatacgaattcatattaaaagagtatgaatcatactcagattttgaacgcaatgtcacagagaaaatggcaagcaagtctggtttcagttttggttttaaaatacctggaatatttgaacttggcatcagt

SEQ ID NO: 52633 - DNA, 1564 bp, Homo sapiens
tgcatgtaagagctgtaacactcactgcgaaggtctgcaggttcactcctgaagtcagcgagatcacggtgcgaagaaacttgcgacatgccatctgtaagaactgtaacacttagtgctagggtccgggccttcattcttgaagtcagtgagaccaagaacccaccagttccagatacaaagagatacctcatacaacaagtagascagtactactggtactatttactggtatcaatagttgcaatactactgtcgctgctaactcactgcactccttgtcgatcagcgaaaggccttgattcctacttacaaagaatatagaagctcctagacatgaactccattaaatgcttgccttcatgactatttccttaatcaccagagaacactgctcattacgtttgtaaagggtaatgtctgtgcacttgtgctctttatcttccattctctctaaataccttgatgttctatttgtctcctctcttttttatgtcctcttctctactggtttcctactcctctccctggccctcaccacccaccaacatagaaaaatgatacaaacctttcttagaaggttaaagaaagtgcagtaacttggatatattgttacatctgaagaacaatttgaaatacttgtattgctagatctctctgtaatattttaggttgttgctgatcatccctatttgttgaaactgctccctttgttggttttcatgatgcacttctgattacatttgcaaaactctggccattccttttcagtctagctcacaatgcctcttctcgtatccactccttaaatgttggcttttctcagagttcattcttggctgccttcttttcagcatctgtgtcccagttggtgatcttccctcccacacgtggcttcagttatcctctgtatgctgacgatgaccaactacacatccagctcagacttctgaacagcagcactaggtgcaagaagtggtagaataaattttcaaagtgtttaaagaaaaaaattaaacagtgtttttaattatcacttacatattttcatgaagtggatactaagactcagaccacctaacacacatgttaaaagcactgttggaggaaattatccggttagaagcaaataagatataggaaataaatatcagtaaataatttagtaaaatttcttgtctaaacaagtaatgaatgacaacaaaagtctatcaatgtttaaacttagaaaacaacaacatgagtcaggttggtgttggagtccagagagaccaaagagcttactaaggcatttctgttgaaagtgaaggggataaggaaaatatagctactgacaagctttagaattctattactgtaggaaataaatcagtgaatactaaatataagaacagaagttgagaaaaataccagaagactaaaatcatgtgtaattttcaaaccagcagagtaaaactcagtctatccaatagatgttaggaaaggagggaaacagaagaaacaaaaaggaaatacagaaaatggaagagataaatgcaagaaataaataataaacgtttgtgaa

SEQ ID NO: 52634 - DNA, 1564 bp, Homo sapiens
tgcatgtaagagctgtaacactcactgcgaaggtctgcaggttcactcctgaagtcagcgagatcacggtgcgaagaaacttgcgacatgccatctgtaagaactgtaacacttagtgctagggtccgggccttcattcttgaagtcagtgagaccaagaacccaccagttccagatacaaagagatacctcatacaacaagtagaccagtactactggtactatttactggtatcaatagttgcaatactactgtcgctgctaactcactgcactccttgtcgatcagcgaaaggccttgattcctacttacaaagaatatagaagctcctagacatgaactccattaaatgcttgccttcatgactakttccttaatcaccagagaacactgctcattacgtttgtaaagggtaatgtctgtgcacttgtgctctttatcttccattctctctaaataccttgatgttctatttgtctcctctcttttttatgtcctcttctctactggtttcctactcctctccctggccctcaccacccaccaacatagaaaaatgatacaaacctttcttagaaggttaaagaaagtgcagtaacttggatatattgttacatctgaagaacaatttgaaatacttgtattgctagatctctctgtaatattttaggttgttgctgatcatccctatttgttgaaactgctccctttgttggttttcatgatgcacttctgattacatttgcaaaactctggccattccttttcagtctagctcacaatgcctcttctcgtatccactccttaaatgttggcttttctcagagttcattcttggctgccttcttttcagcatctgtgtcccagttggtgatcttccctcccacacgtggcttcagttatcctctgtatgctgacgatgaccaactacacatccagctcagacttctgaacagcagcactaggtgcaagaagtggtagaataaattttcaaagtgtttaaagaaaaaaattaaacagtgtttttaattatcacttacatattttcatgaagtggatactaagactcagaccacctaacacacatgttaaaagcactgttggaggaaattatccggttagaagcaaataagatataggaaataaatatcagtaaataatttagtaaaatttcttgtctaaacaagtaatgaatgacaacaaaagtctatcaatgtttaaacttagaaaacaacaacatgagtcaggttggtgttggagtccagagagaccaaagagcttactaaggcatttctgttgaaagtgaaggggataaggaaaatatagctactgacaagctttagaattctattactgtaggaaataaatcagtgaatactaaatataagaacagaagttgagaaaaataccagaagactaaaatcatgtgtaattttcaaaccagcagagtaaaactcagtctatccaatagatgttaggaaaggagggaaacagaagaaacaaaaaggaaatacagaaaatggaagagataaatgcaagaaataaataataaacgtttgtgaa

SEQ ID NO: 52635 - DNA, 541 bp, Homo sapiens
aatgaatgaatgaatgaatgaatgaatgaatgaaaaccggcaagcaagaaatatctggctgggagtgcatccgatgccagtttgggagctgagcccaccaccagaaaaggctttgagattgccgagggcaagtcttgtgtggaggaggtagcctgggcactggagcctgcccagccgcattcacactccagctctgtctcttccagctgtgcaccatgggcaagggacttaacctctctacacctcagttcccccatctgtaaaatggggtgactgatagcgcctgtcttckgggatcgctgtgaggttgcagaacttaattcatggaaagggctttgcacagtgcctggaacacagagaaaacccttgataaatgttattgtgttaccatctggatgaaaaggaaaatatggtaacaggaaagcctcctgagttacaaaataacaacaaaacttttcatgatggtctgctttttggccaagcagagaaaagcagatgtatcctgactctgagagcaagagcaaaagtaccagagcaaaag

SEQ ID NO: 52636 - DNA, 2262 bp, Homo sapiens
gtctggaaccatttgctgccttctttcttttaggtaatggccattatcccagccattgcatatcagctgccttgagttaaaaccttaatattcccttatttgttctcatgtggttaaaggcaacttccactcacagaatgaactatgacattccccaagccgaacaaatcgaaaagttcacagttctataacctcagagttcaatgaatgtaaagtaaggtgttcttacattgattaatgagcaaaaaatactttaatctcctagaggggaagatttgccaagcaaaaacttttttaaataatagaaaaagaaaactcattgataatttctggattcttataaatcagtgaaaatatttcatgcttattagttcagctatatgttcattctaagcaacttaattgatataacttactgtgaacaaaagccatgtgtgaaaatcctatgattgactcactaatagatgaagctcatatttaactgtggcctaataagtcataatgtcatcttaaatttatttaaagttgtataatattttattcaaaggcttttagtctaaaaataaagatgggttttttgtttgtttaatcagatgaagaacgttataagaaaaaaattctcaaaaaagaattttcctatggcaacaaacaaaatggcaaatrcaacttcaaggtggaaaatgcaaattacttctgaaagaaaacttggtatcttgggtattcctcaatgaaaaggaagcatgtcataagaaatagaagtctttccccaaacaattaaaaaagttgcttctcaatataaatattactgcatatcagagcacttaatagtgctatttagagattcttcaaataatacataaactcaaatcattaaaacatcatctgagctaataaggtcattaaaaacagaattataattgactttaatatgtttatgaaagaatcttcagcaacatcaaacatacttttaataatactttgttttgcctcctaaggagactttgttgttccttgctcattgctttttttaataaacagctgatttaatgagaattatctgatctacgctattttcctagtgttgttttgagtcccatgttttacacagaagactttttaagatgtattttccattagccccagccctagtgggaaagcatatttaataggcaggtgatgatgaccaataatatgtttgaaattccttttattgttcaggaaattaagaaagtgtttattaattttagaatttaagtcaaatatgcatgctgagattttcaggaaaccaacaacagaaataaaaatagaacatatatcttccaaatccattgagggaaaaagtaaaacctccttgtaaggcacacaatttaatcataaagacatagaaaggataaaaataagaaaaaagtaacgaaaatatcagccaaaataaaagtctgtatgatcagattaaaaacaatcaaaatagagtttaaagcaataaaacaaaatgtacttctgagaaattaagtgggtcactgcttaattagaaaacatacgttaagtattctaaaatcttcccaattaataatatagagtcatagtataagatattattgaaataaatggacacaggcacatacatttaacccattatctcaataattcacagcacaaacaaacaaaaacaaaatgtgatgagagataaaatgaagcgatattagcttaatgtaatggagttgcatagaattctgtagataacaatcaggcaaaatctctaatttaaagcaactgaccaaattgctaaaacataaaaacaaatcacaacaaatacacacacacacacacacacacacacacaaacaaacgaatactttccaggctatgtcctttgacttaaatgaaaataatttagaaatatgtaattaaagatatctatataccaaaaaagttttgagacattatcctaaacaattgattaatcaaaaaagataattgaattagaaaagtttaaagctgaatattaacttaaaattacatataaaagattgagggaggcagctaaattagttcttagagggaaatgtatagccttatattaagaaaaacaaaacaggccagtggctcaggcctataatcccagcactttaggaaaccaaggcaggagagtatctcttgagcccaggagttggagtctacagtaagctaagatcgtgctactgcatcctagcctggatgacagggtaagaccttgtctcttaaaaaaagaaaagaaaaagaaaa

SEQ ID NO: 52637 - DNA, 628 bp, Homo sapiens
gtctcggggaggaagaacgatgtggggaaggagggtggccgaagagtgcagagtggccatcagtctcctgacttggaagatggcagcatgggtaaaatggccttcttggagaaagggagagatggggcactcagggtgggggcagctctggaggtcagttcagaacaggttggcaaagagtccagtaggtggatggatggatgcgaatgtaacttagaaagaaaattccactttagtcaaacaggcaaatacaaaactacacaacagaaatcgccaatcacataagtggaaatggagagaaatgaacagktttgcaaaagaattactcattcagtaaaagggttctttataaagttccatctaagttaaattatatctggtataataaaatgtgattcatttacatatttcatttccacagagaaattgttgggaatgtggctgtcacattatgcttggtctgacatagacaagtgactatgtgtggcaatatttttgtcgcttttggcaaaggttctcttatcttttccttctccatttctggcaaaataattgttcacttattgactgaattcttgttccagtgggtaaagtctttccttcacaatcaggagtaacacttcatgcc

SEQ ID NO: 52638 - DNA, 1630 bp, Homo sapiens
tctggcttccaggccccccctgcaatttaggggaatggctgggactggctttctgcaagtgctaattttcagctgttgmgttcatgtggaacctaaaattaattagctcctacatgagctccagcctgagtgcataaaaaggatcctcattaggaaaacttcaccctttggttgacaggaggctggcagctggaagtcagatctatagagcagtaacggtgcagtggctcggccaggagaagtcccacttgcccctaacccttcaggtcatgcctgcctccccgagaaaactgggtgcttccaaagcccattaccaccccgcaggtgttcctgagtgtggacctaatcgcaggctttgaggaaccctggcctatgcagtaggaagccctagaggatgtcatttggacgggatgtcagagaaggcccatttaaggtgacttaggtagtgacatttaaggaggaacccccagtaggagttagccaagcaggggacagagggaacagctttccaggcgggggaacaacccttgcaaataccatgagttgaaaaagagcttggcagagagccagggtgtctggagcacagagaatgcagcagagtggtggagacctgaaggtggcaagggacagtctagaccgggctttggaggccagcaggagcgtttgatctttattctaagaactgtagggatctagaagggtttgggcagggagaagactggaccaggcaccttccaaaaagactccctcccccaatgctctctccaaagagggaagaatccccccagccccttccccacccgccgacagcatctagcgccactgccatcgtcactgtggataattgctaggtgtgccgggcaagtgttttctcttctgctgagccagcggcgggcaggcgataatcacagctttcaccatcctccctccagccagcctccacctccctatcccccgtcctcatatcctttatttggcagagccctgaggaggctgcaaaaaggctcaggacccaagaactgagagggtccttggaggctgctgaagaggtgaaaggcatcaggccagtctttccaaacataataataaataatgttgctgtcgtttgtaataagaatgatgaggagccagcatttgccaagcctttcctatgctcaggcataattgcttgaatttcctcattgaatcttatctctctctctgtgtgtgtgtgtgtgtgtgtgtgtgtgtgtgtgacggagtttcactcttgttgccgatgctggagtgcagtgtgtgtgtgtgtgtgtgtgtgtgtgtgtgtgacggagtttcgctcttgttgccgacgctggagtgcagtgacgcgatgttggctcgctgcaacctccacctcctggttcaagcgattctcctgcctcagcctcccaagtagttgggattacaggcatgcgtcaccacgcctggctaatttgaactcctgacctcaggtgatccacctgccttggtctcccaaagtgctgagattataggcatgagccaccacgcgtggtctaatctccttttttaatttgcaattttttgggttcatagtaggtgtatatatttatggggtacatgagatgttttgatacaggcatgcaatgcgtga

SEQ ID NO: 52639 - DNA, 1379 bp, Homo sapiens
accttctccctcagctctcctgcattctttacttccatgtctctttctttctttttctttcttccctccctccctccctcccttctttccttctttccttctttccttcattcattcttmtctcttcctttctctttctctccttcctcccttctctctctctctctctctctcagaggctcactctgtcacccaggctgaagtgcagtggtctaaccacagcacacttcggtctcgacctcctgggcacaagccatcctcccacctcagtctccagagaagctgggaccacaggcgtgtgccaccatactcagcttattttttttaatatagagaaggggtctcactatgttgcccaggttgcttttagactcctgggctcaagcgatcttcctacctcagcctcccaaagtgctgggataacaggcatgaaccaccatacctggttcatgttcttttgcacacttctcaataactttttaactcaatctgtttctcattctacagtagagcctgcattataaccatgtccacaaaatggagagatagactggtaaaccttttctccatgatgccactgctctgtacagggagaaactttgtggtccatggaccatgagggatctcatcatgtgggctgaggttcagactctcaggtgttaaatacatgatagttagaagcataaaaacttagaatatagtgaaggtgaaagaaaaggaaaagttaaagtaggtctctcacaagaactgggatttctattttctttgcaaagagaattgctttgtaggagttttttgttgttgtttctagcagaaaagtaactaaaataaatgttttcagaaatgtgaatgtagtagtgatggttccaagaattaaaactgctttgagaatgaaacagtaaattgcttctgggtcaaaggccagattaataatccatagactgttgcttttggaaagaatttgttataacaacaaagaaggaaagtcctaagatagtaggagtggtctgggttagactatggttgagctgtaatggttagagggataagagctagatggtgaaggagcttttcagagatattgtgacatttggcaaagcctggttgtgagcctggttgtggagcaagatcctgaactgggaagagcatatttcccctttcctctgaatggaatacagctcaccaatgatgggcagctgtagacaagggttttggctttttgtttttttgccacagtagcctctcattagacgaaactctaaatagaaaaattactggagttttcttctctctgtcctcctttcttagcttttatagctcagtggttaaaactactgacctggaataaatatacgtgtgcatgtgtctttatagcagca

SEQ ID NO: 52640 - DNA, 1379 bp, Homo sapiens
accttctccctcagctctcctgcattctttacttccatgtctctttctttctttttctttcttccctccctccctccctcccttctttccttctttccttctttccttcattcattcttatctcttcctttctctttctctccttcctcccttctctctctctctctctctctcagaggctcactctgtcacccaggctgaagtgcagtggtctaaccacagcacacttcggtctcgacctcctgggcacaagccatcctcccacctcagtctccagagaagctgggaccacaggcgtgtgccaccatactcagcttattttttttaatatagagaaggggtctcactatgttgcccaggttgcttttagactcctgggctcaagcgatcttcctacctcagcctcccaaagtgctgggataacaggcatgarccaccatacctggttcatgttcttttgcacacttctcaataactttttaactcaatctgtttctcattctacagtagagcctgcattataaccatgtccacaaaatggagagatagactggtaaaccttttctccatgatgccactgctctgtacagggagaaactttgtggtccatggaccatgagggatctcatcatgtgggctgaggttcagactctcaggtgttaaatacatgatagttagaagcataaaaacttagaatatagtgaaggtgaaagaaaaggaaaagttaaagtaggtctctcacaagaactgggatttctattttctttgcaaagagaattgctttgtaggagttttttgttgttgtttctagcagaaaagtaactaaaataaatgttttcagaaatgtgaatgtagtagtgatggttccaagaattaaaactgctttgagaatgaaacagtaaattgcttctgggtcaaaggccagattaataatccatagactgttgcttttggaaagaatttgttataacaacaaagaaggaaagtcctaagatagtaggagtggtctgggttagactatggttgagctgtaatggttagagggataagagctagatggtgaaggagcttttcagagatattgtgacatttggcaaagcctggttgtgagcctggttgtggagcaagatcctgaactgggaagagcatatttcccctttcctctgaatggaatacagctcaccaatgatgggcagctgtagacaagggttttggctttttgtttttttgccacagtagcctctcattagacgaaactctaaatagaaaaattactggagttttcttctctctgtcctcctttcttagcttttatagctcagtggttaaaactactgacctggaataaatatacgtgtgcatgtgtctttatagcagca

SEQ ID NO: 52641 - DNA, 1379 bp, Homo sapiens
accttctccctcagctctcctgcattctttacttccatgtctctttctttctttttctttcttccctccctccctccctcccttctttccttctttccttctttccttcattcattcttatctcttcctttctctttctctccttcctcccttctctctctctctctctctctcagaggctcactctgtcacccaggctgaagtgcagtggtctaaccacagcacacttcggtctcgacctcctgggcacaagccatcctcccacctcagtctccagagaagctgggaccacaggcgtgtgccaccatactcagcttattttttttaatatagagaaggggtctcactatgttgcccaggttgcttttagactcctgggctcaagcgatcttcctacctcagcctcccaaagtgctgggataacaggcatgaaccaccatacctggytcatgttcttttgcacacttctcaataactttttaactcaatctgtttctcattctacagtagagcctgcattataaccatgtccacaaaatggagagatagactggtaaaccttttctccatgatgccactgctctgtacagggagaaactttgtggtccatggaccatgagggatctcatcatgtgggctgaggttcagactctcaggtgttaaatacatgatagttagaagcataaaaacttagaatatagtgaaggtgaaagaaaaggaaaagttaaagtaggtctctcacaagaactgggatttctattttctttgcaaagagaattgctttgtaggagttttttgttgttgtttctagcagaaaagtaactaaaataaatgttttcagaaatgtgaatgtagtagtgatggttccaagaattaaaactgctttgagaatgaaacagtaaattgcttctgggtcaaaggccagattaataatccatagactgttgcttttggaaagaatttgttataacaacaaagaaggaaagtcctaagatagtaggagtggtctgggttagactatggttgagctgtaatggttagagggataagagctagatggtgaaggagcttttcagagatattgtgacatttggcaaagcctggttgtgagcctggttgtggagcaagatcctgaactgggaagagcatatttcccctttcctctgaatggaatacagctcaccaatgatgggcagctgtagacaagggttttggctttttgtttttttgccacagtagcctctcattagacgaaactctaaatagaaaaattactggagttttcttctctctgtcctcctttcttagcttttatagctcagtggttaaaactactgacctggaataaatatacgtgtgcatgtgtctttatagcagca

SEQ ID NO: 52642 - DNA, 1379 bp, Homo sapiens
accttctccctcagctctcctgcattctttacttccatgtctctttctttctttttctttcttccctccctccctccctcccttctttccttctttccttctttccttcattcattcttatctcttcctttctctttctctccttcctcccttctctctctctctctctctctcagaggctcactctgtcacccaggctgaagtgcagtggtctaaccacagcacacttcggtctcgacctcctgggcacaagccatcctcccacctcagtctccagagaagctgggaccacaggcgtgtgccaccatactcagcttattttttttaatatagagaaggggtctcactatgttgcccaggttgcttttagactcctgggctcaagcgatcttcctacctcagcctcccaaagtgctgggataacaggcatgaaccaccatacctggttcatgttcttttgcacacttctcaataactttytaactcaatctgtttctcattctacagtagagcctgcattataaccatgtccacaaaatggagagatagactggtaaaccttttctccatgatgccactgctctgtacagggagaaactttgtggtccatggaccatgagggatctcatcatgtgggctgaggttcagactctcaggtgttaaatacatgatagttagaagcataaaaacttagaatatagtgaaggtgaaagaaaaggaaaagttaaagtaggtctctcacaagaactgggatttctattttctttgcaaagagaattgctttgtaggagttttttgttgttgtttctagcagaaaagtaactaaaataaatgttttcagaaatgtgaatgtagtagtgatggttccaagaattaaaactgctttgagaatgaaacagtaaattgcttctgggtcaaaggccagattaataatccatagactgttgcttttggaaagaatttgttataacaacaaagaaggaaagtcctaagatagtaggagtggtctgggttagactatggttgagctgtaatggttagagggataagagctagatggtgaaggagcttttcagagatattgtgacatttggcaaagcctggttgtgagcctggttgtggagcaagatcctgaactgggaagagcatatttcccctttcctctgaatggaatacagctcaccaatgatgggcagctgtagacaagggttttggctttttgtttttttgccacagtagcctctcattagacgaaactctaaatagaaaaattactggagttttcttctctctgtcctcctttcttagcttttatagctcagtggttaaaactactgacctggaataaatatacgtgtgcatgtgtctttatagcagca

SEQ ID NO: 52643 - DNA, 1379 bp, Homo sapiens
accttctccctcagctctcctgcattctttacttccatgtctctttctttctttttctttcttccctccctccctccctcccttctttccttctttccttctttccttcattcattcttatctcttcctttctctttctctccttcctcccttctctctctctctctctctctcagaggctcactctgtcacccaggctgaagtgcagtggtctaaccacagcacacttcggtctcgacctcctgggcacaagccatcctcccacctcagtctccagagaagctgggaccacaggcgtgtgccaccatactcagcttattttttttaatatagagaaggggtctcactatgttgcccaggttgcttttagactcctgggctcaagcgatcttcctacctcagcctcccaaagtgctgggataacaggcatgaaccaccatacctggttcatgttcttttgcacacttctcaataactttttaactcaatctgtttctcattctacagtagagcctgcattataaccatgtccacaaaatggagagatagactggtaaaccttttctccatgatgccactgctctgtacagggagaaactttgtggtccatggaccatgagggatctcatcatgtgggctgaggttcagactctcaggtgttaaatacatgatagttagaagcataaaaacttagaatatagtgaaggtgaaagaaaaggaaaagttaaagtaggtctctcacaagaactgggatttctattttctttgcaaagagaattgctttgtaggagttttttgttgttgtttctagcagaaaagtaactaaaataaatgttttcagaaatgtgaatgtagtagtgatggttccaagarttaaaactgctttgagaatgaaacagtaaattgcttctgggtcaaaggccagattaataatccatagactgttgcttttggaaagaatttgttataacaacaaagaaggaaagtcctaagatagtaggagtggtctgggttagactatggttgagctgtaatggttagagggataagagctagatggtgaaggagcttttcagagatattgtgacatttggcaaagcctggttgtgagcctggttgtggagcaagatcctgaactgggaagagcatatttcccctttcctctgaatggaatacagctcaccaatgatgggcagctgtagacaagggttttggctttttgtttttttgccacagtagcctctcattagacgaaactctaaatagaaaaattactggagttttcttctctctgtcctcctttcttagcttttatagctcagtggttaaaactactgacctggaataaatatacgtgtgcatgtgtctttatagcagca

SEQ ID NO: 52644 - DNA, 995 bp, Homo sapiens
cctcatgatccgcccgcctcagcctcccaaagtgttgggattacaagcgtgagccaccatgcccggcccggaacctacttgttaatagtttatataattttaacagtcttatttaactgtatattattaggttgctgaggactagaaacagcaaattataagagaagagcctgttataatcagatattttagcaaacagcaaaaataagtggcaaaaagaggaaaaatatgaaaactaaaagaatagataccactcacaaagcactgtttgtgtaagagtaaayagacagacatacctccaaatagcaaggaaatttaaatgtatttgaaaatatatattgcaagatatttcttgatatgatagaaactaaatgtttacttgcatgaaataaaaacatgttgatcacaatattagctatccaaaattagtaatttctctgcataataagtagcagttatctctataaattatctgtatatcatgttgttttaaatatcagcttttgcctgttagagttaattggtatttacattttcttaagttattttggaggccaaaattattgctatagattgtcatagaagtgttaataaattttctactacatttttgtattattgttttattttgtgatgtttcagtgtcactcatccaaccaaatgacttactctacactaacattaatatttcctaaataattatgtctgtattctttcataagatactgagttatatttccagtaggaatataaactgatgcattttcttttatatgaacagaatgttcactaattttcattatagatgacaattgaaactatgtggatcaaatcattagcatatgttcgttattctagaatagtcttactctggtttgaataatgtctcaggtatctaaacagttttttatagcactttagaccacaacaaaaaatatttttctccctaacaatattattttaggtagagttcattttcagagtttgtctatttt

SEQ ID NO: 52645 - DNA, 555 bp, Homo sapiens
accgcaatagcttttgcaccaacataatacattattttgttgctcgaattgttctggctttgaccattgatgtaatttctttttttcctgatcaggatttctttatctccaattagtgctttgcatactgtattttgttcattctatgatacacaatttttatgtctgaaatttatataattaataacatctgataattacaattggtggtgacttttttgttccttagtcacatctaaaataatagtgttcctttcaacaaatggcatcttagattcaatgaaactcrgaaattgctaaataataagaaatacttttctaggatagtgtattcaattcttagcacccttgccctgtcaagctctgacattttatagagaacattttcttcagagattgtttttgtttgatctttttgatttaccgtagacatgttgctttttctcttgatcatttgaacacatgtacattgatctactgaaacaaagaatttatgttcaggcatgagaatatcagcaatggtcattgcctaaccctgttggctaattctgagat

SEQ ID NO: 52646 - DNA, 578 bp, Homo sapiens
acttttgagaattagtaactaaattgtataaaacatatctgtactactccctaataatatttaagtacatatatattcttaaggatatatataaattcaaatatatattatatataaatacatactatatataaatatatatatggtatgtttatacagaggatatatatatgtctactcctcatcctgttaagatattgtttttttccaaaatagcatttgataattcacattaaaatatgggggatagtaacaactyctaaaggactctcaatgcttggctgatgggagcttaaaacaggatcatgaggaaaacgtagtgatactgttttgtcattcatgtttaaagacacttcagtgcctactttttcctggtgctctgataggcacaatggagaatggaaaaacaatgtggttctggacctcaagcagcatgtcagtagtggaagagataaggtgcacaataactagatacaaagtaggatatgaaaggtataatgtgtgacaacagaaacatctgggacttaaggggagatagtgatcatttccacttgagaatgttctagagactgtttgta

SEQ ID NO: 52647 - DNA, 578 bp, Homo sapiens
acttttgagaattagtaactaaattgtataaaacatatctgtactactccctaataatatttaagtacatatatattcttaaggatatatataaattcaaatatatattatatataaatacatactatatataaatatatatatggtatgtttatacagaggatatatatatgtctactcctcatcctgttaagatattgtttttttccaaaatagcatttgataattcacattaaaatatgggggatagtaacaacttctaaaggactctcaatgcttggctgatgggagcttaaaacaggatcatgaggaaaaygtagtgatactgttttgtcattcatgtttaaagacacttcagtgcctactttttcctggtgctctgataggcacaatggagaatggaaaaacaatgtggttctggacctcaagcagcatgtcagtagtggaagagataaggtgcacaataactagatacaaagtaggatatgaaaggtataatgtgtgacaacagaaacatctgggacttaaggggagatagtgatcatttccacttgagaatgttctagagactgtttgta

SEQ ID NO: 52648 - DNA, 1597 bp, Homo sapiens
gaatttaaatacatttactcgctgctgcacaacatataaatgaccactctaagatcagaatttacctacctgcctccaaaacccatgtgtcaagccactccacaaggcttctaatccaatcctatccaatccaatctaatcttcattcctcaggcccctggctggtctcaaaacaaaaagcacatatgagttaagaatagaaaatataagactgcatactgtaaatagtttttccccgatcaccatctagttagccaggatttgaaagcaggggattcccctcttctggctggcatgaagcatcatcaaatccatgagcgtcaatctccagggccttgctgtaaatcactcccacaacatagaaagcctggtactcacatccatatgggtcaaatagaagaggtgatcttgccccaagaagctgattcccaagttccctgtccgttgatccaaggcatccactcaggtgcttgtgttggtgacaaaagagctccccagagggctgtcaggaagctgatcatgtgatagatcctctgtgtagctctggccctttcaccagcctcaccctttgacagttattactgctgcaataaattcttcagtaaaacaaacaggcacgctgtaaatttattagtctgggcactctgtgttacttaacgtaatggccagtcttaaacaggtaactactgcagtaaataaaccagtttatttaggcactgtcagccctaagtgttcacgggggcctggagaaatggcattggcctttataagcatgatatatgcctacataaattacacttgcccactcagatatttgatggtaacacaccacctgggaagagtgtgacagctcaaaacatctctgtaaacttcaaaaagtctatttacaggggacatggtactttatatggaactgtatatataagtagaatttgtatatatggtctcagtataaaataaaccagtgccctgcatttgcatattatgtgaatgcatgcaaaattgactaaggttttctgctgagctgtttgcagagggctaagtggagaacagaaataagagaagaaagaaaggaactcatatttattgaaccagaccaatgtctaggcatctccagacaccaagttcaagcaaataataaattctgggcctctgtgccaggttctgtgctaggctttccataaaaatatttgttgggtagtagatcctttcttaggactgccatragaaaagtcatcacaaactgggtgatgacttaagacagcagagattgccgggcatggtggctgacacctgtaatcccagcactttggaaggcctaggtgcgtggatcacgaggtcaggagctcgggaccagcctggccaagatggtgaaatgtctctgctaaaaatacaaaaaatagacgggcgtggtggcaggtgcctgtaatcccagctatttgggaggctaaggcagagaattgcttgaatccgggaggcagaggttgcagtgagccgaaatcatgccactgcactccagcctgggtgacagagtgaggctccatctcaaaaaaaaaaaaaaaaaaaaaagacagagatttattctgtcacagttcta

SEQ ID NO: 52649 - DNA, 579 bp, Homo sapiens
cacatgtgtccctgtgtactgggactttcatttttataagttagattttctgaagtataaattctgagtcaaagaaatgtgtatatttaattttaataaacgttgcccatagtgagggatagcggcacatgcctctaatcccagctactcgggaggctgaggagggaggatcacttgagcccaggaggtcaaggctgtagtgagctatgattgtaccactgcactccagcccaggcaatagagcaagatcctaatgtctaaacaagtyaacaataataacaaaataaatgttgcccaattgttttccaaaaaggattgtaacaattcttatttccaacagcaatgagaacaccattttcctccagcagccataccaaaatggatattatcacacttatatttttaccagactgatgagtttaaaccttattgttaatttattttccattttcctaattactagcaagtttagacaccttttcacaagtttgtaggccacccagctttgctcctttgtgagttgttttctttttattttgggttgtatgttggaagagctcatatattaatattgtattt

SEQ ID NO: 52650 - DNA, 2171 bp, Homo sapiens
ggacccaaagaagctagacaccaaaaattatcactctatgattccaagagaagtttaaaactggggacgatgagtctatgtgtcaagataatgttacaaatctctgtggttacctttggagatgcaggtggggtggggagtgggaggggtaggaaggggacttcggaggtgctgtaatattctccttcttgtttggggttgtcatcacatgctgtatgcactttggggaaattcattgatatgtgtacacttatggtctgtgcccttttttgtattcatgtgatttcaataaaaaagctaaaaagaaaaattattcactccaacttctccatctgttgtccaagagaaaactctagatctccctccaaaacaacagattttagtctctcccagtcccatactaattttgaaatgtatttctctttattcaggttacccaggaatgaaattgattctagctttggtttctgaaaagggcttcatgaacactgtcacaggtaagcctggcctatgtgatatgactggcatacactataatagtttgcatttgttgagacaacctttgccattattctgttttttttttttcacctggatctgtttggacacctttccttattataacaatacgtcatataatttagtattctttttaacagtaaaaagtatattttatcaagcctttgatacttgatacttgagatgaaggctcactgcagtctcaaactcctgagttcaagcaatcctcccacctcagcctcccgagtagttgggacaacaggcacacgccaccacgcccagctaaccatacctggctaattcttctagtttttttggtttttttgtttttatttttttgtagagacaagatcttgctattttgcccaggctgttctcaaacccctgggctcaatcgatgcccccacctctgcctcccaaagtgctagaattacaggcatgagtcactacacctggcctgcatttccttctttcttgggacaattgttacattgttttcttagaacccagcatctaggaaatgggaagatgtttgtctaaatgcataaactcagttaaaaaatgaataagttctgaagacctgacgtacagcatggtgactacagttaataatgcattctatacttgaaatttgctgagagtagaccttaagcgttctcaccacaaaaataggaattatgtgagatgatggatatattaactaacttggttgtggtaagcattttacaatgtattcatatatcaaattctttttgtcaattatgcctcaataaagctgaaaaacaacacaaaaacccagcagtcagcttaaatcccaaagaattaaatcccaaagaatgagagtatctgcagtttattgtatactcaccctgttccgggaagaacaaatagaaacatatgctaagtatattgcatacgtatttcatttgtttttgtgtttcacaaagctatgctttgatatagcatcactgatttatggaagaggaaactgaggctcagagaggttgagaacttccttcaaggagaagcagaactggacctaactccagggcagttaggccctaaccctaagaagttctcagagaggctgagaattcctacaatggtaagtagacctggacctaacaccggggaagttagactgtaaagcctgttacctcgggcaccatgttcccttccctgctccaccttctcactaagtagattcaggggtttgtctcccttgcattttcttttttgtccagatgcacaagtcactttagcaagcaatcttgataatttcctctcttatttcatcccccaaaacatgacattccaaggatcctccagaactaaaactgacaacttcagaaaatacctgtgatggtcaggcataggggctcatgcctgtaatctcagcactttgggagtctgaggtgggcggatcacttgaggtcaggagttcgagaccagcctggccaacatgggaaaaccctgtctctactaaaaatacaaaaaaattaccagggcacggtcrtgtgtacctgctactcgggagtagttccagctacttgggagactgaggcaggggaattgcttgaagctgggaggtggaagttgcagtgagccgagatcgcagcactgcattccagcctgggggacagagcaagacc

SEQ ID NO: 52651 - DNA, 2171 bp, Homo sapiens
ggacccaaagaagctagacaccaaaaattatcactctatgattccaagagaagtttaaaactggggacgatgagtctatgtgtcaagataatgttacaaatctctgtggttacctttggagatgcaggtggggtggggagtgggaggggtaggaaggggacttcggaggtgctgtaatattctccttcttgtttggggttgtcatcacatgctgtatgcactttggggaaattcattgatatgtgtacacttatggtctgtgcccttttttgtattcatgtgatttcaataaaaaagctaaaaagaaaaattattcactccaacttctccatctgttgtccaagagaaaactctagatctccctccaaaacaacagattttagtctctcccagtcccatactaattttgaaatgtatttctctttattcaggttacccaggaatgaaattgattctagctttggtttctgaaaagggcttcatgaacactgtcacaggtaagcctggcctatgtgatatgactggcatacactataatagtttgcatttgttgagacaacctttgccattattctgttttttttttttcacctggatctgtttggacacctttccttattataacaatacgtcatataatttagtattctttttaacagtaaaaagtatattttatcaagcctttgatacttgatacttgagatgaaggctcactgcagtctcaaactcctgagttcaagcaatcctcccacctcagcctcccgagtagttgggacaacaggcacacgccaccacgcccagctaaccatacctggctaattcttctagtttttttggtttttttgtttttatttttttgtagagacaagatcttgctattttgcccaggctgttctcaaacccctgggctcaatcgatgcccccacctctgcctcccaaagtgctagaattacaggcatgagtcactacacctggcctgcatttccttctttcttgggacaattgttacattgttttcttagaacccagcatctaggaaatgggaagatgtttgtctaaatgcataaactcagttaaaaaatgaataagttctgaagacctgacgtacagcatggtgactacagttaataatgcattctatacttgaaatttgctgagagtagaccttaagcgttctcaccacaaaaataggaattatgtgagatgatggatatattaactaacttggttgtggtaagcattttacaatgtattcatatatcaaattctttttgtcaattatgcctcaataaagctgaaaaacaacacaaaaacccagcagtcagcttaaatcccaaagaattaaatcccaaagaatgagagtatctgcagtttattgtatactcaccctgttccgggaagaacaaatagaaacatatgctaagtatattgcatacgtatttcatttgtttttgtgtttcacaaagctatgctttgatatagcatcactgatttatggaagaggaaactgaggctcagagaggttgagaacttccttcaaggagaagcagaactggacctaactccagggcagttaggccctaaccctaagaagttctcagagaggctgagaattcctacaatggtaagtagacctggacctaacaccggggaagttagactgtaaagcctgttacctcgggcaccatgttcccttccctgctccaccttctcactaagtagattcaggggtttgtctcccttgcattttcttttttgtccagatgcacaagtcactttagcaagcaatcttgataatttcctctcttatttcatcccccaaaacatgacattccaaggatcctccagaactaaaactgacaacttcagaaaatacctgtgatggtcaggcataggggctcatgcctgtaatctcagcactttgggagtctgaggtgggcggatcacttgaggtcaggagttcgagaccagcctggccaacatgggaaaaccctgtctctactaaaaatacaaaaaaattaccagggcacggtcatgtgtacctgctactcgggagtagttccagctacttgggagactgaggcaggggaattgcttgaagctgggaggtggaagttgcagtgagccgagatcgcagcactgcaytccagcctgggggacagagcaagacc

SEQ ID NO: 52652 - DNA, 566 bp, Homo sapiens
tcacagcccttggccagtggtcattttgagggtgcagggggaatgctagaagaggctggtaattgtggggtgtattaaagactcttggccgctgggcaaaccccacctgtgggaggctctgagggtcagccctggtactgatgaggcaggtggcacttcttgatgggcatagtggcagagaaatcctagaaattgcaaccacacccctccctgtctggagtggtggggtggggtgggagcatcctgggccctgctccccagctgtccaaggcaaatcgactggagtccatctggctgtccccaccggtccaggcatgcttcccatcctggggcrtcagtcctcagtgggtgcggctgaggggccggtggatcagtgctctgcctgggcacacccggagctgagcggcatcctggggtgagggggctcaagagctccaggtagacacccactggactgccttatcttttctaggctctgtgctgatggtggccacctgcttctctggcaagtgtggttgagggctgtttccataggcacaccttgctctctttctgggtcccatctg

SEQ ID NO: 52653 - DNA, 583 bp, Homo sapiens
gctcaggctgagatataaacttgctctgagcattctcaaacaagaatgcagcatctttgtgtagcaggaaagaactcagtttaacctggcataaaccagcttcccaaactcatttttccctcagcccacctctcttctgacttaactatctctggtaatgttgcttctcatcttagtcaccaaagtttttatttttcgcttacactttayatccctacatgaaatcaaatccaaggaactatcaattctatctctaccaagtttgtacttctgtctcttttgcttctttcttgttctctctagcctactttatattgcatttagttatttttattgcttggactactacagtaattccctaactggtattcacttttttttctctcctttactcaaaattttctctccttttatcaagtcactctacatatgctgctaaattaatattcttgaactttgctctgatcaaattacatttctgccaaaaaagttcaatagttttttattagttatgggttaaatctgagctccttaggctggctctgcacaacatggtctcatctcactttctagtcttacctcc

SEQ ID NO: 52654 - DNA, 583 bp, Homo sapiens
gctcaggctgagatataaacttgctctgagcattctcaaacaagaatgcagcatctttgtgtagcaggaaagaactcagtttaacctggcataaaccagcttcccaaactcatttttccctcagcccacctctcttctgacttaactatctctggtaatgttgcttctcatcttagtcaccaaagtttttatttttcgcttacactttatatccctacatgaaatcaaatscaaggaactatcaattctatctctaccaagtttgtacttctgtctcttttgcttctttcttgttctctctagcctactttatattgcatttagttatttttattgcttggactactacagtaattccctaactggtattcacttttttttctctcctttactcaaaattttctctccttttatcaagtcactctacatatgctgctaaattaatattcttgaactttgctctgatcaaattacatttctgccaaaaaagttcaatagttttttattagttatgggttaaatctgagctccttaggctggctctgcacaacatggtctcatctcactttctagtcttacctcc

SEQ ID NO: 52655 - DNA, 592 bp, Homo sapiens
aggaccataaaagacccaatttacttctcctgggcttgagaaagacatgcttctcttaagtagcagaagccaataataaggttgagttttcttatgctgctacattaaatccttaatataactctccctattatattaggaggtcacatgttcactagctatttttatatcttttgtaagttatcactttctgttatttaccatttgtttggtaatttatgtctctatgagtaatgctaaccttttgtctgtaacaaacatatgttgaaaatatttttccaagtttatttattggtcacacagaaggtttatgttttttttttgtttttttgttttttgtttttttgagacagagtcttgctctgtcacccaggctggagtgcaatggtacgatctcagctcactgcaacctcctccttctgggttcaagcgattctcctgccttagcctcccaagtagctgggattgcaggcacctgccaccatgcctgggtaatttttgtatttttagtacagatggggttccgccrtgttggccaggctggtctcgaactcctgacctcaggtgatctgcccgccttggcctcccaaag

SEQ ID NO: 52656 - DNA, 631 bp, Homo sapiens
ttgacttagtagagatggactctcctgggatttctttggggtagctgggaacctgcaccgctgtaactacattcctggtyggcagggatgctctggggttgatggtgtgtgctcttagagtatacttctctctcatggtggctgatcaaccctacagcgtggactctcttgagtgcctgttactgtaccaaaggaccgaaacggtgaagttcattcgactcagcaacctttgctaagagcttactacaaggacacccaggtgaccaggacccagtccctgctaagagcttactaccaggacacccaggtgaccaggacccagtccctgctaagagcttactacaaggacaccaggtgaccaagacctggtccctgcttgtagaggggcagactacacaaagcagacccttgggacattcaggtcaaagtcattgtttttttttttgagacagagtctcgctctgtcgcccaggctgaagtgtagtagcacaatctctgctcactgcaacctctgcctcctggcctcaagtgattctcctgcttcagcctcccgagtagctgggattacaggcacccaccaccatggccaggtaatttttgaatttttagtagagatggggttttgccatgt

SEQ ID NO: 52657 - DNA, 601 bp, Homo sapiens
caaagattctgtccctttttaaggataaataatatattttgtatattaaagccacactttaacagactatattattcatccttaaggagggacagaattaccagctaggcaagacagtaaaatttagtgttgaggaactacatccaacatttgtagtaatcccaactcagtgcacaacaatcatccaagtatttttgactatctagacatattaagtcggcttttatttattgagcattcattatataacagagttattataccactgtagggtgtggtagaaagttkaataaacaaacaaatgattacacatctattatatttcaaacttggtgctggggcagttttacatactatgttagtcaattcttatcaaaaagctatgaattttttgtttttgtagatgaggaaacattcagaaatatacaacacacagtaaactggtattcaaatttgggttttctgattctaaacctagtgcttcttctataagaagaaagtttctaactttaatgaacatattatctggtttaagaatcagacttgtacacagagtataagatcaggtaaaataagatatataatcataggaaaagtattt

SEQ ID NO: 52658 - DNA, 601 bp, Homo sapiens
caaagattctgtccctttttaaggataaataatatattttgtatattaaagccacactttaacagactatattattcatccttaaggagggacagaattaccagctaggcaagacagtaaaatttagtgttgaggaactacatccaacatttgtagtaatcccaactcagtgcacaacaatcatccaagtatttttgactatctagacatattaagtcggcttttatttattgagcattcattatataacagagttattataccactgtagggtgtggtagaaagttgaataaacaaacaaatgattacacatctattatatttcaaacttggtgctggggcagttttacatactatgttagtcaattcttatcaaaaagctatgaattttttgtttttgtagatgaggaaacattcagaaatatacaacacacagtraactggtattcaaatttgggttttctgattctaaacctagtgcttcttctataagaagaaagtttctaactttaatgaacatattatctggtttaagaatcagacttgtacacagagtataagatcaggtaaaataagatatataatcataggaaaagtattt

SEQ ID NO: 52659 - DNA, 601 bp, Homo sapiens
caaagattctgtccctttttaaggataaataatatattttgtatattaaagccacactttaacagactatattattcatccttaaggagggacagaattaccagctaggcaagacagtaaaatttagtgttgaggaactacatccaacatttgtagtaatcccaactcagtgcacaacaatcatccaagtatttttgactatctagacatattaagtcggcttttatttattgagcattcattatataacagagttattataccactgtagggtgtggtagaaagttgaataaacaaacaaatgattacacatctattatatttcaaacttggtgctggggcagttttacatactatgttagtcaattcttatcaaaaagctatgaattttttgtttttgtagatgaggaaacattcagaaatatacaacacacagtaaactggtattcaaatttgggttttctgattctaaacctagtgcttcttctataagaagaaagtttctaactttaatgaacrtattatctggtttaagaatcagacttgtacacagagtataagatcaggtaaaataagatatataatcataggaaaagtattt

SEQ ID NO: 52660 - DNA, 604 bp, Homo sapiens
caattaaaaatatatatagatagatgatttcagtaaattaaaacaaaaggggagtaagctcttcattaaacttttggtatttttttctgatacagagtatgaacactcaacttgtttttactttgaagaaataggacttctacgtctgtgtgtgtgtacgcgcatgcatgtgtgcacacttgctcacgcgtgtgcgtctgtgtggtgcggttttgtaaaatcacccagataattctaaggcatttctgtctttcccctacctccccataatcattgatagaatgtctcattttcctttaaagacaagtttggaatattgcagagggtgaaaacataagcccacaatatgggcatgctagaatgaaaaagctcttttagtttactatatttgtaagtaaaaatttaaccgtgttatcagggttaaactataggcagtttctaactaaaaataaccaaactcaaataaaaaatagtaacatttatgtgtaataattaatatctatttcaattataaaatttmtacctgtagaactctactataaagtaatatacacactactttccacagcaataaataaaatggattgcatatttcagtgtctca

SEQ ID NO: 52661 - DNA, 551 bp, Homo sapiens
cagcctgggtgatagagcgagactctgtctcaaaaaaataaaaataaaaataaaaataaaaataaaaataaaaaaattatcccaacagaatagcaaggaaagaatttgcaatagagagaaccacatgaacaatgatctctttgtcatcctcaaacacatcagacgcgcttccatctcaaggtcttgcacttgctattccctctacctgagatgctctttgttcaggtctctcatctccttccgatctttgctccaacattgcccttttctgacttacttatttaaaactagacagccctttccctcatctagcatagttgtctttttttctgcttttctttttcttctgtatcaattatcaacatctgataaaatatttattttgtacttttttccttttcctgtctccctttccttctagaatcatcttttagagctgagtgaatggtgtctctggattgcatctgcaacctgaygttccagaatgctggctccatgaagacaaggagttttctctctttggttaactgctgataccagtgcctggtaca

SEQ ID NO: 52662 - DNA, 529 bp, Homo sapiens
acctccaaataatttaattagtaacatcaaagatcactaatcacagatcaccataacatatatagtgataatgcaaatgtttgacatattatcagaatcaccaaaatgtgacccagagacagaaagtgagtacaggctattggaaaaataatgccaatagatttgttgaatgcatggttgccacaaaccttctatttgcaaaaaacaagagatccatgaagagtaataaagcaaagtgtaataagacaagatatgcctgtatatgtatggtgcaatcactatatgttattgctactgtttttgctcattatattactgcatgttgctaatattttcaatatcagcaaagatattgtgtcattgattttctcatactttttctatctttcaaacattataatatatagtaatatacagtagagtagatcatgagtatgagytagttatatatatacatatatacatacagacatatataagactgcttgctaacttttaaaataatgtaacattatgaagtttgatgaat

SEQ ID NO: 52663 - DNA, 563 bp, Homo sapiens
tgatttaaaaaaaaaaaaaaagaagaagtgctcccagcaagaaaagatctgggtgtgcgtgcagcaagatgaaacctcctgtttgaacaatagacacctgctcagaagccaaacaaaagagactggctcctgtctgcttgattctcacttcaagcaaaagccacagaagatggatgtgagatagcaggtcttgccttgtgccctagatgtctacaaatccagccagggtaggactggccacagtagcaagttccacaragaggagcacttgatattcctgttgggagatgacatgtaatctgagacatatgcacagagattgttcaattggcttcaatggtgagaaaagcagtctagcacagtctaagcttccaaattttaatgtgcatataaaccacctgggtgggagagtgtagttaaaatgcagatcctgattcagtaggtctgggttggccaaggattctgcatttccaacaagttcctaggtgatgtccactctgatggttaaagaatcatacttagagagtggctggggtctcttggttttagagatcatgcccctt

SEQ ID NO: 52664 - DNA, 563 bp, Homo sapiens
tgatttaaaaaaaaaaaaaaagaagaagtgctcccagcaagaaaagatctgggtgtgcgtgcagcaagatgaaacctcctgtttgaacaatagacacctgctcagaagccaaacaaaagagactggctcctgtctgcttgattctcacttcaagcaaaagccacagaagatggatgtgagatagcaggtcttgccttgtgccctagatgtctacaaatccagccagggtaggactggccacagtagcaagttccacaaagaggagcacttgatattcctgttgggagatgacatgtaatctgagacatatgcacagagattgttcaattggcttcaatggtgagaaaagcagtctagcacagtctaagcttccaaaytttaatgtgcatataaaccacctgggtgggagagtgtagttaaaatgcagatcctgattcagtaggtctgggttggccaaggattctgcatttccaacaagttcctaggtgatgtccactctgatggttaaagaatcatacttagagagtggctggggtctcttggttttagagatcatgcccctt

SEQ ID NO: 52665 - DNA, 604 bp, Homo sapiens
taaattcccaacaaataccagtgatgatatcatgtgccaggattatgctaaatgctttacatgtattctatcatttagtctttgaaacaatgtcctgtgacaattgttattattccaagtttattagttgagaaatgttgtctcagaccctttaaagcatcttgctcagttaatatgcggagggctggaatcgaactcaggccatttttgctacaaagctcaagctcttaatcactctggtgtagtgcaakgttaaattgggacactgcttgaattcttcctgaggctttcagatgcaaggctttcctccagagcagtagctctcaaagtgcaatccctgtcccagcagtgtcagtattaccagggaactgattagaaatgcaaatgcttgggctccaccccagacctactgaatcaggaaccttaagggtggggtccagcattgtggtttaataagccctccctgcaattgtgatgtatgctaagaaggtttgagaaccacttctctggagacactgactcatacttcgttggtagtcatcattaggctcaatgattataacagtaaatgactaaagcagttttgaactcaccatctgattca

SEQ ID NO: 52666 - DNA, 562 bp, Homo sapiens
gatagtgccattgcactccagcctgcgcaaaaagagcaaaactccgtctccaaaaaaataaaaagtgctttggtgctraagaagaggctgagggcaactttccctgagaaaatcaaggcatgctttgcaatggagtaaatgtgtgactaaatcaataggagttcaattgccaagtagaaaaccacagaggaataaaacagcacagaatggaatctattcccacacagctacaagggcactacaacaaagggagtaagtggtagggacaagactgaaaaggtgagctgagagataattcagatattcatcagatatcaatattaacaatcccagtccatatttagtaagcatatattatgtgccaggcactaccttataggaattatctgccaggccgtataggaattaccacatttcttcctcacaactccctgagatgggcactattattttctccattatacagatgaggagtagaaagcacagagagtgaaataatgtctccagggttacacagctaatgtgcggtgaagacaggctttgaatctaggcaatctgtctc

SEQ ID NO: 52667 - DNA, 562 bp, Homo sapiens
gatagtgccattgcactccagcctgcgcaaaaagagcaaaactccgtctccaaaaaaataaaaagtgctttggtgctgaagaagaggctgaggrcaactttccctgagaaaatcaaggcatgctttgcaatggagtaaatgtgtgactaaatcaataggagttcaattgccaagtagaaaaccacagaggaataaaacagcacagaatggaatctattcccacacagctacaagggcactacaacaaagggagtaagtggtagggacaagactgaaaaggtgagctgagagataattcagatattcatcagatatcaatattaacaatcccagtccatatttagtaagcatatattatgtgccaggcactaccttataggaattatctgccaggccgtataggaattaccacatttcttcctcacaactccctgagatgggcactattattttctccattatacagatgaggagtagaaagcacagagagtgaaataatgtctccagggttacacagctaatgtgcggtgaagacaggctttgaatctaggcaatctgtctc

SEQ ID NO: 52668 - DNA, 562 bp, Homo sapiens
gatagtgccattgcactccagcctgcgcaaaaagagcaaaactccgtctccaaaaaaataaaaagtgctttggtgctgaagaagaggctgagggcaactttccctgagaaaatcaaggcatgctttgcaatggagtaaatgtgtgactaaatcaataggagttcaattgccaagtagaaaaccacagaggaataaaacagcacagaatggaatctattcccacacagctacaagggcactacaacraagggagtaagtggtagggacaagactgaaaaggtgagctgagagataattcagatattcatcagatatcaatattaacaatcccagtccatatttagtaagcatatattatgtgccaggcactaccttataggaattatctgccaggccgtataggaattaccacatttcttcctcacaactccctgagatgggcactattattttctccattatacagatgaggagtagaaagcacagagagtgaaataatgtctccagggttacacagctaatgtgcggtgaagacaggctttgaatctaggcaatctgtctc

SEQ ID NO: 52669 - DNA, 562 bp, Homo sapiens
gatagtgccattgcactccagcctgcgcaaaaagagcaaaactccgtctccaaaaaaataaaaagtgctttggtgctgaagaagaggctgagggcaactttccctgagaaaatcaaggcatgctttgcaatggagtaaatgtgtgactaaatcaataggagttcaattgccaagtagaaaaccacagaggaataaaacagcacagaatggaatctattcccacacagctacaagggcactacaacaaagggagtaagtggtagggacaagactgaaaaggtgagctgagagataattcagatattcatcagatatcaatattaacaatcccagtccatatttagtaagcatataytatgtgccaggcactaccttataggaattatctgccaggccgtataggaattaccacatttcttcctcacaactccctgagatgggcactattattttctccattatacagatgaggagtagaaagcacagagagtgaaataatgtctccagggttacacagctaatgtgcggtgaagacaggctttgaatctaggcaatctgtctc

SEQ ID NO: 52670 - DNA, 562 bp, Homo sapiens
gatagtgccattgcactccagcctgcgcaaaaagagcaaaactccgtctccaaaaaaataaaaagtgctttggtgctgaagaagaggctgagggcaactttccctgagaaaatcaaggcatgctttgcaatggagtaaatgtgtgactaaatcaataggagttcaattgccaagtagaaaaccacagaggaataaaacagcacagaatggaatctattcccacacagctacaagggcactacaacaaagggagtaagtggtagggacaagactgaaaaggtgagctgagagataattcagatattcatcagatatcaatattaacaatcccagtccatatttagtaagcatatattatgtgccaggcactaccttataggaattatctgccaggccgtataggaattaccacatttcttcctcacaactccctgagatgggcactattattttctccattatacagatgaggagtagaaagcacagagagtgaaataatgtctccarggttacacagctaatgtgcggtgaagacaggctttgaatctaggcaatctgtctc

SEQ ID NO: 52671 - DNA, 1727 bp, Homo sapiens
gatggctactccaattaccaggtgaatttagaatgaattatgaaaaattgtatagcaaacaatgtcaaatcctcttacaagggggcaaattaccattaattttgaggacatgtttgtaatagattgtatctgcccaactagataaaaagtaagatctctttctgtctggcatctgattagcagattgtctacaatgtgcttcccagtccagttcaatattatttggtaataaaactgttctccttcttttctacgtttgtgaaggggattttctgggttagcaggagattttgtttttattttctccaacacctccttccatcttcttatttcttttcaccttcccaatatcagccttctgaggcttctctgttctccagtactcaggagatagagaacatggccccaaggccgttgtgagccaggagacagacaaacatttcttgatattctgtcctgcctttcacagaaaggaccaattcccttctcttgtcttggaggctgccgtgttagtactgggcagaatctgttactgaaacaccaggggttgggtctaggtcctgctggttgccagtcagaaaaccaatcactgagacgagtattgcaagggaagaaggccttaattgagtgctgcagccaagaagatgggagatcagtctcacatccatctccctgactgaccaaaatcaggggtttgtatagcagggaagaaatgtaactatgtgtgggaaaacagaaattagggagaggtaagttggaacaggaaggaggtgattggttaggcaatatgactgatgaggagtgtgggttctcattgtccacatgcaatgatttggtaagttgcagctccttgatactatctgggaggcctgatgtttggttttcctgagaaaggaactcaggacaaatgtgaccttctcaagttttaagactgggggaatccatttcttttctttccttttcctttctttttttttttttggacagggacttgctctgtcattcaggctagagtgcggtggcatgatcaccgctcatgtagcctcaacctcctgggctcaagtgagtcttccacctcagccccgagtagttgggactacaggcacatgccaccacacctggcaatattttttaattttttgtagagatggggtttcaccatgttgcccaggctgatcttaaactcctaggctcaggtgattctcccacctcagcttcccaaagtgctggaattacaggcatgagccaccgcacctggcctggaaggaccaatttctgtttattcaaagaaaccataaacatcaattctgtgggacaattgggacagtttcaaatccagcccttgatctggagccctccctcagcatccctctgtgctccatgtgactgttattcatcacgtgaataaaatctatggaacagttgaattaaaaatacaaggacagaggtgacatcaatgggaaatctctgtcccttctgtttaattttgctatggacataaaattcatctaaaaatgaagtctattcataaaagagaaaattaggaaaattttgcaatgttttacttgcccctcgccctgctttcctccctggctcttcagcagtctcaaagcctacattcacagcatgggatgcaattatgacagacccacagctaacatcatactcaatggtgaaaactgaaaactyttcccctaaggtcagtgacaagacaaggatgcttactt

SEQ ID NO: 52672 - DNA, 548 bp, Homo sapiens
atcgcttgaacccaggaaggggaggctgcagtaagccgggatcatgccactgcactccagcctgggtgacagagagagactccatctcaaaaaaaaaaaaaaaaatatatatacacatatatatatgtatatacacacattatgtatatatatgttttcctactaggtagggctagcatccatctctaccccataaactgtccctgctcacaccataacaaaaataattgaaacagtgtcacagccaaggggtactctaggtacagcatatttatggagaaaggagagatgtttctcctgggggactggggggtgagagggaaggttcctggargagatgacatttactgtgaatcaaagaagttgggaggcttgcgacaggtggaaagtagggaggcatccggctggaagaggaggatgtggagaatccagggcttcacaagtgcctggattcaaaacacctgacctgtgggctgggccatagcgctgactatccatttattctttatattaactgatttttgcatagctgcctgcaacctcacagt

SEQ ID NO: 52673 - DNA, 802 bp, Homo sapiens
tgattctctttggaatttgaatgagccctagaggctggaattatgttgtgaaaaagtccatctccctgtagttgcattcctyagtcttcttttctgagacagataatgagatttcagagaagggaggaaaacaattgtatttctcttagaaagaagatttcttggtcagataaggaaattccagagagagtccctccctgtgcttgaggcaagggctgagggacaaggcaaagttagagggaccttgatttgcgggctgcgtctaaggcctcttagcctgtcatagcaccagtgtttgggttattgctttctgagccccaacgttatactctatccaaaggtttattttattttaattttttataaactctatgtccaaacaactgtaaaactcacaacatgtgacctaagggtatcatagtgaggttacagtgacctagtagtcagtgtgtaatttctaggatttaaacggtaagctgttttctctgtggagaatgacactatagtatactatttggggttatgggcaagctaatagatttggcagttctcattttttccccttggtcaaaaactactcaagttctgaatgcaaataagagatctcagagcagcctcaagtactcaaaacactgaacatggctctataaaacaacagggtataatgagctatcttggtttccaaattgggtctgggattttccaaattttaccccaaatactgtccttttggctttaatactctctgtaccagatatatcagaatgagagaatcaagagtaaaacaaacttgcatttccca

SEQ ID NO: 52674 - DNA, 589 bp, Homo sapiens
tcctgatctgtgtgatttccctgggctggactctccactaagtgggatcaacctgttcttcccaaagacacatgctgtagacgggcccctgcactattcagaaagactactgggcttcctatttttaaagcaatattaatgggaggttaggtggcaaagtgccgggtytctcaagtaaatgaaaaagcaaggctgaaacttggttttaagtatctgttgggaagacaggcagctgaagtggagggtatccctatctccagcagccacctcctcatccagaagcccccaacgacagtgtagaccttccatagccaagggaggagtttgtttgcaagttcaggagctccctgagctacagacctcattataaacctgagctaaagatttgttgaatgaaaccaagaggattggaatatttgctctgagccaagcactgtatatgaaatagatttcttgtgacgatatattggtattggggggacaccagggtggaaattgtgactggtaagcactgccttgggtaccaagtttctttactgcgtgcctctgcgtacttccacttgcctctctgcacttcctttgtccattc

SEQ ID NO: 52675 - DNA, 581 bp, Homo sapiens
ggtactgatgttcttcttaccatttggcaccaaaaacctgcaggtatctattttgggaccacagaagcagaatatgttgtcaatattaataacgaatactattattaattcttaattccatattcgatgactgattagatgtaagttttactgcagaagtctaacgccattaatatgatatcactatttcaagatttgttaactcagatttttataaaaacaaattacagcccaactttattaggaatgaatgattaaactgattgcctctaagactgtaaaaaagaaaatatttaagtaataattttcaagccctttagaacatccaaactcaaaaagataacaatatgtttatagcaaataattttcatttatagtttacttgcctttagtgtttatatatatagtcatatcaaaatagcatttattttaaaaattccataatttagatgtttcacaaactgaggctacactgtctctcatttgacataaaagaataaggtctatctacattaaatttaaatttgctccatcaacraaagttctatttctatctcctaatgcctcagcttacctagtaa

SEQ ID NO: 52676 - DNA, 604 bp, Homo sapiens
tttcatgttgtttctagaaaaattctatgatagggtgttaaaatatgactccaaattatagaatgctagatataattgagttcatagttttccagattttttttttaaatggtgggtaaaacagacaaattgacttgcctgaagtgataaaactaagcatcacagggaaatccaaataatcacccaagtttacatcctgatgccttcttacaacacttaaaaaataaaataatgatcactagaaagaagtgggttcagaaagagaccaacagaatccacaaagtcacagcaaagtcatctttaataagtgattaaatagggaaacaccatagagtcagtgtatcagcattctagcaaagcatttcattcagcattgggtgatatccttgcagacaagatgggaaaatgccaccaggtgctagtaacagccaggaggatttagaatagttgggtggtttaacagtcatagcaaacttgtgggtagaggccaccttctgtgtgcarcaaggctctcattgaaacatctgtattatgactttggggtagagatggcaagtatgtttatcaaatctatgttataatactaaaagaaaatttgaaaaat

SEQ ID NO: 52677 - DNA, 1435 bp, Homo sapiens
tggctcaatctctgctcactgcaatctccacctcccgggtacaggcgattcycctgccttagcctcccgagtagctgggatttcaggcatgtgccaccacacctggctaattttgtatttttaggagagatagggtttctccatgttggtcaggctggtctcaaactcccaacctcaggtgatccgcctgtctcagcctcccaatgtgctgggattataggcacgagccatcatacccggctcaggtatttctttacagcagtgtgagaacagactaatacaggctccctttgttatttatattgtagtatacaatgtctcaaaaataaaatttaaaaagaggattattggctggatttgggtaatcttctcttttatctcataagaatttgtgctaccatgggatatgacctgtggtcatttttgacatctaagcagtaacgaagagaagcctaaaatccacatgccttctttgtccctaaaattcatcaggaggcaaataagaaaataaaagccagaccttccttttctgatggaggtggttattaatgaaaaaagtatccctttgcttctagggaagctggtaatttccaccaggacctactctggttgacagtgttcctttaaaaggcccctccattcatttcaataaggaccctccattcatctcaataaggaccctgcatacatacctctgcctgctgcatccttccacatgggcaagcccagtgcatggtgcagagaagagaccagcatatttgtcttcattgacaggccacatatgtctttgtcatatattagatgcttctaataatctatgtatatgcatttaggaggaaaaaaaagttgtgtcttcttgatagtcatagaatggcatacactggttcctctcttcacggatatgcagatgagctgcaagttgttccctcttgtaatttcgagggaagaccataaattctaatgggtcctaactgaatctgtgcccttttgtggatgtgaatgcttttgagtctggttaattcgatcacactttctcttggtattgtgtatccttctagatccaggggaatgaatgaatttatttatcttctgaaagaggaaattcactactagatgttcaactatccatggccctggaagtgaaaattcacagttcatgcatcttttgaggctagtgtggattacaaataagaagggaaagcaagtcagaagcacataaaataggagtttaagaaaagtcaagtcaaagagcacatggatcgtggactatgagttatgaactgaaaaagaagttgtggtgttcccagccctgtgtccaagtgttctcattgtttagttcccacctatgagtgagaacatgcagtatttggttttctgtccttgcgatagtttgctcagaatgaaggtttcccatcattctgttgcttcatccatg

SEQ ID NO: 52678 - DNA, 1435 bp, Homo sapiens
tggctcaatctctgctcactgcaatctccacctcccgggtacaggcgattcccctgccttagcctcycgagtagctgggatttcaggcatgtgccaccacacctggctaattttgtatttttaggagagatagggtttctccatgttggtcaggctggtctcaaactcccaacctcaggtgatccgcctgtctcagcctcccaatgtgctgggattataggcacgagccatcatacccggctcaggtatttctttacagcagtgtgagaacagactaatacaggctccctttgttatttatattgtagtatacaatgtctcaaaaataaaatttaaaaagaggattattggctggatttgggtaatcttctcttttatctcataagaatttgtgctaccatgggatatgacctgtggtcatttttgacatctaagcagtaacgaagagaagcctaaaatccacatgccttctttgtccctaaaattcatcaggaggcaaataagaaaataaaagccagaccttccttttctgatggaggtggttattaatgaaaaaagtatccctttgcttctagggaagctggtaatttccaccaggacctactctggttgacagtgttcctttaaaaggcccctccattcatttcaataaggaccctccattcatctcaataaggaccctgcatacatacctctgcctgctgcatccttccacatgggcaagcccagtgcatggtgcagagaagagaccagcatatttgtcttcattgacaggccacatatgtctttgtcatatattagatgcttctaataatctatgtatatgcatttaggaggaaaaaaaagttgtgtcttcttgatagtcatagaatggcatacactggttcctctcttcacggatatgcagatgagctgcaagttgttccctcttgtaatttcgagggaagaccataaattctaatgggtcctaactgaatctgtgcccttttgtggatgtgaatgcttttgagtctggttaattcgatcacactttctcttggtattgtgtatccttctagatccaggggaatgaatgaatttatttatcttctgaaagaggaaattcactactagatgttcaactatccatggccctggaagtgaaaattcacagttcatgcatcttttgaggctagtgtggattacaaataagaagggaaagcaagtcagaagcacataaaataggagtttaagaaaagtcaagtcaaagagcacatggatcgtggactatgagttatgaactgaaaaagaagttgtggtgttcccagccctgtgtccaagtgttctcattgtttagttcccacctatgagtgagaacatgcagtatttggttttctgtccttgcgatagtttgctcagaatgaaggtttcccatcattctgttgcttcatccatg

SEQ ID NO: 52679 - DNA, 1435 bp, Homo sapiens
tggctcaatctctgctcactgcaatctccacctcccgggtacaggcgattcccctgccttagcctcccgagtagctgggatttcaggcatgtgccaccacacctggctaattttgtatttttaggagagatrgggtttctccatgttggtcaggctggtctcaaactcccaacctcaggtgatccgcctgtctcagcctcccaatgtgctgggattataggcacgagccatcatacccggctcaggtatttctttacagcagtgtgagaacagactaatacaggctccctttgttatttatattgtagtatacaatgtctcaaaaataaaatttaaaaagaggattattggctggatttgggtaatcttctcttttatctcataagaatttgtgctaccatgggatatgacctgtggtcatttttgacatctaagcagtaacgaagagaagcctaaaatccacatgccttctttgtccctaaaattcatcaggaggcaaataagaaaataaaagccagaccttccttttctgatggaggtggttattaatgaaaaaagtatccctttgcttctagggaagctggtaatttccaccaggacctactctggttgacagtgttcctttaaaaggcccctccattcatttcaataaggaccctccattcatctcaataaggaccctgcatacatacctctgcctgctgcatccttccacatgggcaagcccagtgcatggtgcagagaagagaccagcatatttgtcttcattgacaggccacatatgtctttgtcatatattagatgcttctaataatctatgtatatgcatttaggaggaaaaaaaagttgtgtcttcttgatagtcatagaatggcatacactggttcctctcttcacggatatgcagatgagctgcaagttgttccctcttgtaatttcgagggaagaccataaattctaatgggtcctaactgaatctgtgcccttttgtggatgtgaatgcttttgagtctggttaattcgatcacactttctcttggtattgtgtatccttctagatccaggggaatgaatgaatttatttatcttctgaaagaggaaattcactactagatgttcaactatccatggccctggaagtgaaaattcacagttcatgcatcttttgaggctagtgtggattacaaataagaagggaaagcaagtcagaagcacataaaataggagtttaagaaaagtcaagtcaaagagcacatggatcgtggactatgagttatgaactgaaaaagaagttgtggtgttcccagccctgtgtccaagtgttctcattgtttagttcccacctatgagtgagaacatgcagtatttggttttctgtccttgcgatagtttgctcagaatgaaggtttcccatcattctgttgcttcatccatg

SEQ ID NO: 52680 - DNA, 1435 bp, Homo sapiens
tggctcaatctctgctcactgcaatctccacctcccgggtacaggcgattcccctgccttagcctcccgagtagctgggatttcaggcatgtgccaccacacctggctaattttgtatttttaggagagatagggtttctccatgttggtcaggctggtctcaaactcccaacctcaggtgatccgccygtctcagcctcccaatgtgctgggattataggcacgagccatcatacccggctcaggtatttctttacagcagtgtgagaacagactaatacaggctccctttgttatttatattgtagtatacaatgtctcaaaaataaaatttaaaaagaggattattggctggatttgggtaatcttctcttttatctcataagaatttgtgctaccatgggatatgacctgtggtcatttttgacatctaagcagtaacgaagagaagcctaaaatccacatgccttctttgtccctaaaattcatcaggaggcaaataagaaaataaaagccagaccttccttttctgatggaggtggttattaatgaaaaaagtatccctttgcttctagggaagctggtaatttccaccaggacctactctggttgacagtgttcctttaaaaggcccctccattcatttcaataaggaccctccattcatctcaataaggaccctgcatacatacctctgcctgctgcatccttccacatgggcaagcccagtgcatggtgcagagaagagaccagcatatttgtcttcattgacaggccacatatgtctttgtcatatattagatgcttctaataatctatgtatatgcatttaggaggaaaaaaaagttgtgtcttcttgatagtcatagaatggcatacactggttcctctcttcacggatatgcagatgagctgcaagttgttccctcttgtaatttcgagggaagaccataaattctaatgggtcctaactgaatctgtgcccttttgtggatgtgaatgcttttgagtctggttaattcgatcacactttctcttggtattgtgtatccttctagatccaggggaatgaatgaatttatttatcttctgaaagaggaaattcactactagatgttcaactatccatggccctggaagtgaaaattcacagttcatgcatcttttgaggctagtgtggattacaaataagaagggaaagcaagtcagaagcacataaaataggagtttaagaaaagtcaagtcaaagagcacatggatcgtggactatgagttatgaactgaaaaagaagttgtggtgttcccagccctgtgtccaagtgttctcattgtttagttcccacctatgagtgagaacatgcagtatttggttttctgtccttgcgatagtttgctcagaatgaaggtttcccatcattctgttgcttcatccatg

SEQ ID NO: 52681 - DNA, 1435 bp, Homo sapiens
tggctcaatctctgctcactgcaatctccacctcccgggtacaggcgattcccctgccttagcctcccgagtagctgggatttcaggcatgtgccaccacacctggctaattttgtatttttaggagagatagggtttctccatgttggtcaggctggtctcaaactcccaacctcaggtgatccgcctgtctcagcctcccaatgtgctgggattataggcacgagccatcatacccggctcaggtatttctttacagcagtgtgagaacagactaatacaggctccctttgttatttatattgtagtatacaatgtctcaaaaataaaatttaaaaagaggattattggctggatttgggtaatcttctcttttatctcataagaatttgtgctaccatgggatatgacctgtggtcatttttgacatctaagcagtaaygaagagaagcctaaaatccacatgccttctttgtccctaaaattcatcaggaggcaaataagaaaataaaagccagaccttccttttctgatggaggtggttattaatgaaaaaagtatccctttgcttctagggaagctggtaatttccaccaggacctactctggttgacagtgttcctttaaaaggcccctccattcatttcaataaggaccctccattcatctcaataaggaccctgcatacatacctctgcctgctgcatccttccacatgggcaagcccagtgcatggtgcagagaagagaccagcatatttgtcttcattgacaggccacatatgtctttgtcatatattagatgcttctaataatctatgtatatgcatttaggaggaaaaaaaagttgtgtcttcttgatagtcatagaatggcatacactggttcctctcttcacggatatgcagatgagctgcaagttgttccctcttgtaatttcgagggaagaccataaattctaatgggtcctaactgaatctgtgcccttttgtggatgtgaatgcttttgagtctggttaattcgatcacactttctcttggtattgtgtatccttctagatccaggggaatgaatgaatttatttatcttctgaaagaggaaattcactactagatgttcaactatccatggccctggaagtgaaaattcacagttcatgcatcttttgaggctagtgtggattacaaataagaagggaaagcaagtcagaagcacataaaataggagtttaagaaaagtcaagtcaaagagcacatggatcgtggactatgagttatgaactgaaaaagaagttgtggtgttcccagccctgtgtccaagtgttctcattgtttagttcccacctatgagtgagaacatgcagtatttggttttctgtccttgcgatagtttgctcagaatgaaggtttcccatcattctgttgcttcatccatg

SEQ ID NO: 52682 - DNA, 539 bp, Homo sapiens
gggaaatgggagtgtcacacagaaaagttcagtgatttgcctaaagccacacagcaaacacagctgagacctcctgactcccgagcctggggcattccctgcccctcaaacaagtgtgtatgtcaggagaggcggagctcacccaggggtaggccctgcctgagtttggaaggagaccaggctccgcttcacagacaccatctctgttaaccctcagcgcacctcttaaggaatgccttcttgttcctattttaaagttgaaaggactgaggctcagagaggtagagcaagtctccagaggacacacagtaaggggtggagctgggatttgaaccccagatctgggtgctgtgcattggagaatgtcgctaaggacgcgcggacttggtggaaggaacaccgctgtcaggggtgacggtgcggaggacacaggtyggctgggagccttcagtgttgggaccgaacggccttcttttcctcttagcctgaaacatctatgctgctgtacctttccgctttctggaatagatttaggttgc

SEQ ID NO: 52683 - DNA, 539 bp, Homo sapiens
gggaaatgggagtgtcacacagaaaagttcagtgatttgcctaaagccacacagcaaacacagctgagacctcctgactcccgagcctggggcattccctgcccctcaaacaagtgtgtatgtcaggagaggcggagctcacccaggggtaggccctgcctgagtttggaaggagaccaggctccgcttcacagacaccatctctgttaaccctcagcgcacctcttaaggaatgccttcttgttcctattttaaagttgaaaggactgaggctcagagaggtagagcaagtctccagaggacacacagtaaggggtggagctgggatttgaaccccagatctgggtgctgtgcattggagaatgtcgctaaggacgcgcggacttggtggaaggaacaccgctgtcaggggtgacggtgcggaggacacaggttggctgggagccttcagtgttgggaccgaacgrccttcttttcctcttagcctgaaacatctatgctgctgtacctttccgctttctggaatagatttaggttgc

SEQ ID NO: 52684 - DNA, 265 bp, Homo sapiens
tggccttacaatataatatttcattgacatcatttacagattcaaaaatataaatatactgcatcrtgcagctaatgttgatgtgtgcgtgtgtgtgtgtgtgtgtgtgtgtgtgtgcatgagagagaaagattgagagagagagagagagacttctaagacaaatttcaacagaagcagttaaggtactaagaaaattaataatatgctgtaatcttattaatgaattacctaacccgtgttgaaaatctgatgaccatcattt

SEQ ID NO: 52685 - DNA, 2607 bp, Homo sapiens
cgggttcaagcaattctcctgcctcagcctcccgagtagctaagattacaggcatgcaccactgcacccagctaattttgtacttttagtagagacagggtttctccatgttggtcaggctgtctcgaactcccaacctcaggtgatccgcccgcctcagcctcccaaagtgctgggattacaggcgcccggctgcttttttcataaattgcaaattcttgatttaaattctcgattttcatcttttgtgcataatttcttctatttttaatgtattcataatcagtacttcaacatccctcttgactaacttcagaatatgaggcatctctgggtctgcctctattgtccatttttccttctggttactttttcttcttctttgaaggtcacatttttttaaaattgtgtgatgactgtttggtgtaagagatccataaaggctatagatgatgctattttccaccagagagttttcctctttccccagcaattgggctggatcatggctggggtggaccttacgtaggttcagcccacctctggtttatatctggtctttgaacatggccctcctggatgtaaagtttctctatttcctcaattctatgaacgttagctcatcttgtcctttgttgattccacagcttttcaatgtctatagagtataattttggtaacttttccatttttttcctaattgttacagcaggaacccaggctgctgtgacctactgcattctatacagaggtgaaagttggacaagccattttgttgttgttcattgctgttttcccagtacctgggagaatatttagcacacagtggatgctcaaaaatattattggattgagtccaaatattggactttgaatagaaaactcagatttaagttttgattctagctctggggaccatggaactgttatttcrcatctctgaggctcagtttcaccatctgtaatatggtggtaataatatctttctgcctatagagttgtgaaaagaataaaaagagagcttatatataatgtacttagcacatcggagatatcaagcaaattgaatacctaagatgttacttattctacttttcctactctgccatgcatttaagttatttgagtgtaatgatgactgtggtggtgaagacaaagggtgtgagacataattaaaagatagaattggagatgttgagataagggagaagcagaagctgagtataaagtccaactttctgcaccgtggcctcggagctggcattccctgggccagttatgggtgggtttcacacttttctattgcctagggttccttggcctaatgacagagttcatcaacactgtacaaatgcacgtgcaatggagtggtgtttccatttgtgtggtcacagtggggagtggggagagaaattctaagagataaaccccggcatctttttttaagatgacttgaaacccatctagtatgcagactgtgggggccaagtgctattagccactatcaggaattattcatcaagtctagtcatgtgagaggggcttggaagcccttgcagtttctaatcaccactggtgtgtgaaatagattttaattagcatacaggttgtaggagtctttgatcagtcctgccatttggatcatataactgacccaacagtttgagattctctaagccctagtaataaatagcagggagaagaagaggcttagaatgtaataatcatggctcagcctcgggtttgggatgataaagcttcttgctgaatatatgcaggccttcttgatcctgggcattaaacaacttttctctctctcttctctctctctctctctctctctctctctcctctctctctctatctcactgtatgtgtgtaaaataagtttggggaattattttctaaatatcaacatttagggggctgggggttatttgttaaatatcaacatttccaaaaaaatacaggtgtcttcaaatcaaccatttttgatagccagagatcacagtgtgctggcagtatgatgggttttcttagcaaactgaggtaatcacactaaccactttcatggcatttcccaggggaccagcgtttccggaggcatcaggcggaaggcagagatctaggatctgattgaaaaaaacacctgcaatcaaatgcattctcaaaccatttatctaggtacaggtgtgagcatagatttaggtgtaggcataggtataggtatatgtatagatatagatgtacctaaatctataatccttggagattctttgtcatctctgaatctctgccttctcatctctaaagtgggtttaataacagtctctccctgatggagttactgtaaggattaaatgagataccataatctaaaaatcctggcagagtatctttcctctttcatgtttttcatttttgttgttgttgttgttagattgtttgtttttgagatggagtcttgctatgttgcccaggctggagtgaagtggcgcgatctcagctcactgcaacctcccgtgttcaagccattctcctgcctcagcctcccaagtaactggtagccgggattacaggcatctgccatcacacctggctaatttt

SEQ ID NO: 52686 - DNA, 2607 bp, Homo sapiens
cgggttcaagcaattctcctgcctcagcctcccgagtagctaagattacaggcatgcaccactgcacccagctaattttgtacttttagtagagacagggtttctccatgttggtcaggctgtctcgaactcccaacctcaggtgatccgcccgcctcagcctcccaaagtgctgggattacaggcgcccggctgcttttttcataaattgcaaattcttgatttaaattctcgattttcatcttttgtgcataatttcttctatttttaatgtattcataatcagtacttcaacatccctcttgactaacttcagaatatgaggcatctctgggtctgcctctattgtccatttttccttctggttactttttcttcttctttgaaggtcacatttttttaaaattgtgtgatgactgtttggtgtaagagatccataaaggctatagatgatgctattttccaccagagagttttcctctttccccagcaattgggctggatcatggctggggtggaccttacgtaggttcagcccacctctggtttatatctggtctttgaacatggccctcctggatgtaaagtttctctatttcctcaattctatgaacgttagctcatcttgtcctttgttgattccacagcttttcaatgtctatagagtataattttggtaacttttccatttttttcctaattgttacagcaggaacccaggctgctgtgacctactgcattctatacagaggtgaaagttggacaagccattttgttgttgttcattgctgttttcccagtacctgggagaatatttagcacacagtggatgctcaaaaatattattggattgagtccaaatattggactttgaatagaaaactcagatttaagttttgattctagctctggggaccatggaactgttatttcacatctctgaggctcagtttcaccatctgtaatatggtggtaataatatctttctgcctatagagttgtgaaaagaataaaaagagagcttatatataaygtacttagcacatcggagatatcaagcaaattgaatacctaagatgttacttattctacttttcctactctgccatgcatttaagttatttgagtgtaatgatgactgtggtggtgaagacaaagggtgtgagacataattaaaagatagaattggagatgttgagataagggagaagcagaagctgagtataaagtccaactttctgcaccgtggcctcggagctggcattccctgggccagttatgggtgggtttcacacttttctattgcctagggttccttggcctaatgacagagttcatcaacactgtacaaatgcacgtgcaatggagtggtgtttccatttgtgtggtcacagtggggagtggggagagaaattctaagagataaaccccggcatctttttttaagatgacttgaaacccatctagtatgcagactgtgggggccaagtgctattagccactatcaggaattattcatcaagtctagtcatgtgagaggggcttggaagcccttgcagtttctaatcaccactggtgtgtgaaatagattttaattagcatacaggttgtaggagtctttgatcagtcctgccatttggatcatataactgacccaacagtttgagattctctaagccctagtaataaatagcagggagaagaagaggcttagaatgtaataatcatggctcagcctcgggtttgggatgataaagcttcttgctgaatatatgcaggccttcttgatcctgggcattaaacaacttttctctctctcttctctctctctctctctctctctctctctcctctctctctctatctcactgtatgtgtgtaaaataagtttggggaattattttctaaatatcaacatttagggggctgggggttatttgttaaatatcaacatttccaaaaaaatacaggtgtcttcaaatcaaccatttttgatagccagagatcacagtgtgctggcagtatgatgggttttcttagcaaactgaggtaatcacactaaccactttcatggcatttcccaggggaccagcgtttccggaggcatcaggcggaaggcagagatctaggatctgattgaaaaaaacacctgcaatcaaatgcattctcaaaccatttatctaggtacaggtgtgagcatagatttaggtgtaggcataggtataggtatatgtatagatatagatgtacctaaatctataatccttggagattctttgtcatctctgaatctctgccttctcatctctaaagtgggtttaataacagtctctccctgatggagttactgtaaggattaaatgagataccataatctaaaaatcctggcagagtatctttcctctttcatgtttttcatttttgttgttgttgttgttagattgtttgtttttgagatggagtcttgctatgttgcccaggctggagtgaagtggcgcgatctcagctcactgcaacctcccgtgttcaagccattctcctgcctcagcctcccaagtaactggtagccgggattacaggcatctgccatcacacctggctaatttt

SEQ ID NO: 52687 - DNA, 2607 bp, Homo sapiens
cgggttcaagcaattctcctgcctcagcctcccgagtagctaagattacaggcatgcaccactgcacccagctaattttgtacttttagtagagacagggtttctccatgttggtcaggctgtctcgaactcccaacctcaggtgatccgcccgcctcagcctcccaaagtgctgggattacaggcgcccggctgcttttttcataaattgcaaattcttgatttaaattctcgattttcatcttttgtgcataatttcttctatttttaatgtattcataatcagtacttcaacatccctcttgactaacttcagaatatgaggcatctctgggtctgcctctattgtccatttttccttctggttactttttcttcttctttgaaggtcacatttttttaaaattgtgtgatgactgtttggtgtaagagatccataaaggctatagatgatgctattttccaccagagagttttcctctttccccagcaattgggctggatcatggctggggtggaccttacgtaggttcagcccacctctggtttatatctggtctttgaacatggccctcctggatgtaaagtttctctatttcctcaattctatgaacgttagctcatcttgtcctttgttgattccacagcttttcaatgtctatagagtataattttggtaacttttccatttttttcctaattgttacagcaggaacccaggctgctgtgacctactgcattctatacagaggtgaaagttggacaagccattttgttgttgttcattgctgttttcccagtacctgggagaatatttagcacacagtggatgctcaaaaatattattggattgagtccaaatattggactttgaatagaaaactcagatttaagttttgattctagctctggggaccatggaactgttatttcacatctctgaggctcagtttcaccatctgtaatatggtggtaataatatctttctgcctatagagttgtgaaaagaataaaaagagagcttatatataatgtacttagcacatcggagatatcaagcaaattgaatacctaagatgttacttattctacttttcctactctgccatgcatttaagttatttgagtgtaatgatgactgtggtggtgaagacaaagggtgtgagacataattaaaagatagaattggagatgttgagataagggagaagcagaagctgagtataaagtccaactttctgcaccgtggcctcggagctggcattccctgggccagttatgggtgggtttcacacttttctattgcctagggttccttggcctaatgacagagttcatcaacactgtacaaatgcacgtgcaatggagtggtgtttccatttgtgtggtcacagtggggagtggggagagaaattctaagagataaaccccggcatctttttttaagatgacttgaaacccatctagtatgcagactgtgggggccaagtgctattagccactatcaggaattattcatcaagtctagtcatgtgagaggggcttggaagcccttgcagtttctaatcaccactggtgtgtgaaatagattttaattagcatacaggttgtaggagtctttgatcagtcctgccatttggatcatataactgacccaacagtttgagattctctaagccctagtaataaatagcagggagaagaagaggcttagaatgtaataatcatggctcagcctcgggtttgggatgataaagcttcttgctgaatatatgcaggccttcttgatcctgggcattaaacaacttttctctctctcttctctctctctctctctctctctctctctcctctctctctctatctcactgtatgtgtgtaaaataagtttggggaattattttctaaatatcaacatttagggggctgggggttatttgttaaatatcaacatttccaaaaaaatacaggtgtcttcaaatcaaccatttttgatagccagagatcacagtgtgctggcagtatgatgggttttcttagcaaactgaggtaatcacactaaccactttcatggcatttcccaggggaccagcgtttccggaggcatcaggcggaaggcagagatctaggatctgattgaaaaaaacacctgcaatcaaatgcattctcaaaccatttatctaggtacaggtgtgagcatagatttaggtgtaggcataggtataggtatatgtatagatatagatgtacctaaatctataatccttggagattctttgtcatctctgaatctctgccttctcatctctaaagtgggtttaataacagtctctccctgatggagttactgtaaggattaaatgagataccataatctaaaaatcctggcagagtatctttcctctttcatgtttttcatttttgttgttgttgttgttagattgtttgtttttgagatggagtcttgctatgttgcccaggctggagtgaagtggcrcgatctcagctcactgcaacctcccgtgttcaagccattctcctgcctcagcctcccaagtaactggtagccgggattacaggcatctgccatcacacctggctaatttt

SEQ ID NO: 52688 - DNA, 556 bp, Homo sapiens
ttttctcaggccccaaacaaagaacacagaaccttagagctagaagagatctcacatattatctagtcttcctgctacagataaagaaagcaaggccctgagaaattacatgaactatcttcyagctcccaatccttttcagtatgaacccctcttgaccccccttcttcctgtcaaaatagaagaaagaagaaagaaaaaattagttgctttaacttgggcaagtaattttgattcttcgaattatttctcatctacgaaatgtgggtgtttggcttgatgggcaacatgaagaggagtctggggaaattagatacatggcctatgaatccttttccaagttataaaacctacgattaaggtataatggagtcatttaatctatctaccaggaagtggagggatctgacaggcttatttcctttcttcccaatgccaccttacagctgtggtcttgtggtaatatggctgctacagttagaaaccaaaattagaaaccaagcaaccacaagaggaaaggctctggaacaattctaggccctgacccagcatttcc

SEQ ID NO: 52689 - DNA, 541 bp, Homo sapiens
aaaaccacctccctgttttacatgaaactaaatgccttttacacgagttcctcaaaaagcaactcaattaacttcactggtgcaattacatgaggtgtgacgggaagaatattcccagaagcttgctttagtcccagcgagttttaggtaatgcttagttgcctagagaaaggggaagacactatttcaacctttcagacagtgaggtttaaaggagccactgactggtttatatgaatcatacagcatctcagggaacctccactcactaaagcatctcatctctttatgcctggttaacctgtgttccgtctctctcacctacccatactccaggctttccattttgccactgtccttaggatcagtaaaaacttggagacgtcaataactgagtcatttttgttaaaaatatacatcataaaattccaggtagctcgtattttactaatgaaatctgtgkttttttttttttccttgcatgacagttcatttttaacgtgctggattttccgatgaaagcctgaaacctgcacatctg

SEQ ID NO: 52690 - DNA, 605 bp, Homo sapiens
tttcctatttttcttttctattgcctcatgttttgagggtggaagatggtaagctggaaggccattaaaaatctcaagagcataccataggaagaaaacagaatatctcttaaggcaggtggggaaaaaaggtggtgttttgggatttgctaaagaagataaaatagaaaaaaagtgtttatctatgaaattgatctcagattattaaacacataatttatattataacaaaatagcggtataaagtagcactgtgatgtgataagaaacattttgtattatcgagtttaataatataattagtaaacaactaatttagacttcatcagtcttggctgcaggaagtctggggtcacagaatgccaaagaaatgctgctccaggacactcyggaacaacagactaccacaggaggcccctgtgccactgtccacagagaaaggttcattatggtgtgtattgtatacgatgatggtaaagtcttattacttctactaccttatcgacacagctatttaattcctcactcagagcttccttttctttcagcagtttttcgttgtagcttagaacactagagattttttgctggaagtcagagagatc

SEQ ID NO: 52691 - DNA, 650 bp, Homo sapiens
ggaaataaaaggtatatagagcaggaggaaagaaataaaactgtctttttttgcagatgacatgacagtcaatgtagaaaatctgaaagactgagtgaaaaattaacacttcccaaactaataagttatcacagaaaggttgtaggatataaggttaatatacaaatgtcaattattatgctacctaccagcaatgaacaagtggaatttgaaactgaatacacaaatcctacataccagcaatgaacaagtggaatttgaaactgaatacaaaatatgacttgcattaccatccaccaacattgaaacactcagatataagtctaataaaatatgtatgaaatctgtatgaggaaaataaaattctgacgaagaaatcagagaaaaactaaataaatggagagatatttcatttcatgaataggaagacttgatgttgtcaagatgttcagttcttctcaaattgatttataaatttattgtaatcaaaattaaagtcccagcaatttatttggtggatattgacaaagtgattctaagctttatatggagaggcaaaagacycagaacacctggcttagcctcgtagggcagagaaaaaactagtttaggaatctaactactctatttgaatctctaactttagtcat

SEQ ID NO: 52692 - DNA, 552 bp, Homo sapiens
taaggtgcttagaataggaagtcctcagtcaatgttagtttgatcaatatatgttgcttctggactcttcctatctgagattcagacacagcaagtggctcacccaagactgcccagccagtgagtggcctctagttcctgtcctgcagagtgggcaggggcttacaagcacagagcatgaagaaatatattcctgcagtgagtcagagggccggagccctcacagaggcttagagccttcctgaatgcaaagcccttctctccacacacatgaactttccccctaggtggcctgaaagatgaggcaggtcctagaagtcctcggctcccatccaagctcccctgctcatgttctgtgcagctgtgggcacgtccctttttctcgatggacctcagcttccaagtccataaaatgggaagacaggggtagagaagggggctttgcaaggtgatcttagcgagacccttgcccrtgaggtcatagcaggcagtgagaataatatgacagtggagcaaaggcctttcccaagggcagggctgcagaaacccatg

SEQ ID NO: 52693 - DNA, 541 bp, Homo sapiens
ctctaaaactaaagaaactctagttgggtgagctttggtgaaggattaacttttccattttttttttcccagatgctgtttgaggtacccatttgcttgaaagatacctatgactatggcctaaaagatgtctaaagtagagatctgtggaatccaggaaaatcagtcaggagtcaaaaagcaaagaatctagattcatttattgaaggcgagacttgttgctactgaattgatgctaaagcatcaaaacacggtacaggaaacaaacaatcaaacaaaaacctaagttacctgactagtcaaaatgcctaacagaaagaataaaaaaaaaacaaggaaaaaatcaaatactgttcattaaagaaattttaaagttagttttatgaaaytctctcaatttcttattaaaaacattcatgtagctttagcttttcttttgaaaagcaaaggtgaggcacaagtgagcttcccaatgtaattgtttattggaaaaaaactgaactgcagtatttcaggcaacttgctatttaagtttcagaca

SEQ ID NO: 52694 - DNA, 541 bp, Homo sapiens
ctctaaaactaaagaaactctagttgggtgagctttggtgaaggattaacttttccattttttttttcccagatgctgtttgaggtacccatttgcttgaaagatacctatgactatggcctaaaagatgtctaaagtagagatctgtggaatccaggaaaatcagtcaggagtcaaaaagcaaagaatctagattcatttattgaaggcgagacttgttgctactgaattgatgctaaagcatcaaaacacggtacaggaaacaaacaatcaaacaaaaacctaagttacctgactagtcaaaatgcctaacagaaagaataaaaaaaaaacaaggaaaaaatcaaatactgttcattaaagaaattttaaagttagttttatgaaactctctcaatttcttattaaaaacattcatgtagctttagcttttcttttgaaaagcaaaggtgaggcacaagtgagcttcccaatgtaattgtttattggaaaaaaactgaaytgcagtatttcaggcaacttgctatttaagtttcagaca

SEQ ID NO: 52695 - DNA, 595 bp, Homo sapiens
tagtaataataatagagagtaaaaaagagcaactaaaaaactgagatgtgaagatacagcctagccggtaacaggttggatgttttatagagacaatcttgagaaaaatggtttgagtgttattttttaaaaagaagytttaaaagcagtgggagaaaaaaaaacccaaagaataattcagaaagacatactacttgaaggtattgccgatgtattaatatgtgctagaaataagtggctcaggaggcatcaatatgcctcagccctggtcatttttcaagcctggatgaatgtaaaccaaaatcaaatagtcacaagtagatttgaacgatatattggctaatttttgtggcaaaagcaggaataggagaagcagtagataacagcatctctgagcctttttgactgcattttagaaataaattggtttccagaatgaatgtaccttcaagtcggtcttgcaaaggagttgggattgtgtcatgatatacatgtaggtattgaaaaaaattcatagttatacatctcacccctgaaaggttctgcaagcagaagcaggaactgagagtgggtctcatggatctcccacccctct

SEQ ID NO: 52696 - DNA, 595 bp, Homo sapiens
tagtaataataatagagagtaaaaaagagcaactaaaaaactgagatgtgaagatacagcctagccggtaacaggttggatgttttatagagacaatcttgagaaaaatggtttgagtgttattttttaaaaagaagctttaaaagcagtgggrgaaaaaaaaacccaaagaataattcagaaagacatactacttgaaggtattgccgatgtattaatatgtgctagaaataagtggctcaggaggcatcaatatgcctcagccctggtcatttttcaagcctggatgaatgtaaaccaaaatcaaatagtcacaagtagatttgaacgatatattggctaatttttgtggcaaaagcaggaataggagaagcagtagataacagcatctctgagcctttttgactgcattttagaaataaattggtttccagaatgaatgtaccttcaagtcggtcttgcaaaggagttgggattgtgtcatgatatacatgtaggtattgaaaaaaattcatagttatacatctcacccctgaaaggttctgcaagcagaagcaggaactgagagtgggtctcatggatctcccacccctct

SEQ ID NO: 52697 - DNA, 595 bp, Homo sapiens
tagtaataataatagagagtaaaaaagagcaactaaaaaactgagatgtgaagatacagcctagccggtaacaggttggatgttttatagagacaatcttgagaaaaatggtttgagtgttattttttaaaaagaagctttaaaagcagtgggagaaaaaaaaacccaaagaataattcagaaagacatactacttgaaggtattgcygatgtattaatatgtgctagaaataagtggctcaggaggcatcaatatgcctcagccctggtcatttttcaagcctggatgaatgtaaaccaaaatcaaatagtcacaagtagatttgaacgatatattggctaatttttgtggcaaaagcaggaataggagaagcagtagataacagcatctctgagcctttttgactgcattttagaaataaattggtttccagaatgaatgtaccttcaagtcggtcttgcaaaggagttgggattgtgtcatgatatacatgtaggtattgaaaaaaattcatagttatacatctcacccctgaaaggttctgcaagcagaagcaggaactgagagtgggtctcatggatctcccacccctct

SEQ ID NO: 52698 - DNA, 857 bp, Homo sapiens
cgtgggcctggcttcacaatgaataatctgtaacttcttgttttgctctgggtagagctttcctgtaaaggccgctgctttgagtccttcgagagagggagggagtgtgactgcgacgcccaatgtaagaagtatgacaagtgctgtcccgattatgagagtttctgtgcagaaggtaagcatcacagtaccaaccaatgcttctcagtacagccagatctgtgcrcctaccttagcatcactgataatgtctaacacgcagtccatcttaggccttgattttactaacatataagctatttcataataattttgttttgtggagatgaattaaagaagaaaagcgccttccaacagcagaacccccaggctcagccaggctccaagagtacaagatgttgccagagggggaacatagaggatgaggctgaatgtatatgtcttttttttcttcagatatggttcaatttcaggttaaatcaacagtaatcaaatcacttgatgatttcttgtctcacccttgctgacttcacgaagtcaactatcctttgagctatctgtgcttttggcctcagtgtttgagtatatatttaaggacataagcaacactttcagcttccctaaaccagtaaatttatgaattagtttaagccattaaatttataggcaaatctacctaacacgttgttaactgtcatgttccttcccatttctgcagtctcctcagcagtctctattccaatacatgtgcatggtaaagtcaataacaagggatattcccatcttaaaatcaaattctctatttataggtcttgaaggactcctctagagtataacaaaaggctccagattttaca

SEQ ID NO: 52699 - DNA, 857 bp, Homo sapiens
cgtgggcctggcttcacaatgaataatctgtaacttcttgttttgctctgggtagagctttcctgtaaaggccgctgctttgagtccttcgagagagggagggagtgtgactgcgacgcccaatgtaagaagtatgacaagtgctgtcccgattatgagagtttctgtgcagaaggtaagcatcacagtaccaaccaatgcttctcagtacagccagatctgtgcacctaccttagcatcactgataatgtctaacacgcagtccatcttaggccttgattttactaacatataagctatttcataataattttgttttgtggagatgaattaaagaagaaaagcgccttccaacagcagaacccccaggctcagccaggctccaagagtacaagatgttgccagagggggaacatagaggatgaggctgaatgtatatgtcttttttttcttcagatatggttcaatttcaggttaaatcaacagtaatcaaatcacttgatgatttcttgtctcacccttgctgacttcacgaagtcaactatcctttgagctatctgtgcttttggcctcagtgtttgagtatatatttaaggacataagcaacactttcagcttccctaaaccagtaaatttatgaattagtttaagccattaaatttataggcaaatctacctaacacgttgttaactgtcatgttccttcccatttctgcagtctcctcagcagtctctattccaatacatgtgcatggtaaagtcaataacaagggatattcccatcttaaaatcawattctctatttataggtcttgaaggactcctctagagtataacaaaaggctccagattttaca

SEQ ID NO: 52700 - DNA, 857 bp, Homo sapiens
cgtgggcctggcttcacaatgaataatctgtaacttcttgttttgctctgggtagagctttcctgtaaaggccgctgctttgagtccttcgagagagggagggagtgtgactgcgacgcccaatgtaagaagtatgacaagtgctgtcccgattatgagagtttctgtgcagaaggtaagcatcacagtaccaaccaatgcttctcagtacagccagatctgtgcacctaccttagcatcactgataatgtctaacacgcagtccatcttaggccttgattttactaacatataagctatttcataataattttgttttgtggagatgaattaaagaagaaaagcgccttccaacagcagaacccccaggctcagccaggctccaagagtacaagatgttgccagagggggaacatagaggatgaggctgaatgtatatgtcttttttttcttcagatatggttcaatttcaggttaaatcaacagtaatcaaatcacttgatgatttcttgtctcacccttgctgacttcacgaagtcaactatcctttgagctatctgtgcttttggcctcagtgtttgagtatatatttaaggacataagcaacactttcagcttccctaaaccagtaaatttatgaattagtttaagccattaaatttataggcaaatctacctaacacgttgttaactgtcatgttccttcccatttctgcagtctcctcagcagtctctattccaatacatgtgcatggtaaagtcaataacaagggatattcccatcttaaaatcaamttctctatttataggtcttgaaggactcctctagagtataacaaaaggctccagattttaca

SEQ ID NO: 52701 - DNA, 548 bp, Homo sapiens
tgagacggagtctcgctctgtcgcccaggctggagtgcagtggcgcgatctcggctcactgcaagctccgcctcccgggttcacgccattctcctgcctcagcctcccgagtagctgggactacaggcgcccgcyactacgcccggctaattttttgtatttttagtagagacggggtttcaccttgttagccaggatggtctcgatctcctgacctcgtgatccgcccgcctcggcctcccaaagtgctgggattacaggcgtgagccaccgcgcccggcctatttgtatacaattttaaaaagggttccaagcctcttctgattacaatcattgactatacctggatgatggattaaccgtcaaaaatcgacattttcctttgaagatgaatgagagaatacttcaatctaggaaataagaggtcatcttcaaatgttttaatctcacacagctcaaacttttctttgttagttatttgtagattcatataatgctattgaatgacaatctatagtattatggcttatcaatatcaagaaggcaaa

SEQ ID NO: 52702 - DNA, 548 bp, Homo sapiens
tgagacggagtctcgctctgtcgcccaggctggagtgcagtggcgcgatctcggctcactgcaagctccgcctcccgggttcacgccattctcctgcctcagcctcccgagtagctgggactacaggcgcccgccacyacgcccggctaattttttgtatttttagtagagacggggtttcaccttgttagccaggatggtctcgatctcctgacctcgtgatccgcccgcctcggcctcccaaagtgctgggattacaggcgtgagccaccgcgcccggcctatttgtatacaattttaaaaagggttccaagcctcttctgattacaatcattgactatacctggatgatggattaaccgtcaaaaatcgacattttcctttgaagatgaatgagagaatacttcaatctaggaaataagaggtcatcttcaaatgttttaatctcacacagctcaaacttttctttgttagttatttgtagattcatataatgctattgaatgacaatctatagtattatggcttatcaatatcaagaaggcaaa

SEQ ID NO: 52703 - DNA, 534 bp, Homo sapiens
gaaatgtacatttatatactcaatgtccctctagtagtttattccaaaacctgactttgacccagttgcctagttctgaggctggggctgtttccaggtcttctcagtggagtaattgaatattctgggccttctggttgagaccgyggttgctttttttcttcagcagaatattccacataagttcattggttctggagagaagacacttgttaatggtattaccctttaccatagccacagaacctcaagaatggccctccagagtatgcacagatgctgttccaaagcatgaattaatggattctcagtagcatgccatagataaatgaagggttcatctgcccgttaattgatgttttgggtttttcattcctttaccccaaatttactgggcattattgtgcttatgcttcattttggacttcagcagcctctttttgtccagtgatcttgagggccttgatttgtatgtcagtcttcaacaaatatttactgagttctcatttaatttgccagacatgctgtaggccc

SEQ ID NO: 52704 - DNA, 618 bp, Homo sapiens
acggttggtggaaatttgggggattgggcaggagcaagccatctctccaacaagccaaacactgagacatttcctcctagagggaaatagcagttttacagaaatcttcacttatattcctttccttcttcctaaccaaaagacattaaaaataaaataataatgttaaatatgattgcataatacagaaaccaaacaaaaggagctgggataattgtatatctgcagtcgtctctcctacccattctccttgcagagtggatgactccaaacactctgtgttttgttcacatttgtaaagtaggatggatacttgatatayacataaacaagtcatttttcctattggaaaagtaagctactgactgggggctgcctttgccatggaggagatcagggtagatgaaatcaattttagactagtcatcccctccatctgaaatgcacacatgctgattcttccccttcagtctccagcatagtagaatggaagccctgccacacagcttttgctcagggagaccatcccaataccacaagctgtgttagttttgactgactgccaagtttccatgacaatatagggaataaaagagccagcctaaggttccatctggg

SEQ ID NO: 52705 - DNA, 537 bp, Homo sapiens
gccgagttaaagtcaaggatttaaggcgccaaaacggcatttctataaaattagcccaaaaagcagagggagaatgggaaaattctcagatgatttcttgaggtactcaaaaggagacacatgaagagacacaggctttagtcttcagcgctgtctgtgtgatccttatataggtttaccctttctaggttagragctctggaataggatgatgacttaaagaaggagtcacggattgacagttgaggcatatagcagctgccacaagaaaatcctttttgactgaagagaacatacaaggagtgaatctgaaaataatactagcttgagctcacacctcgttgtataactgagagttttcatattggccctccatataaatatattcgtatctaattaagctagctactagtttacatcgtttcatatactggtgagaggtaagaaattgtttgaatgtaatgaatatgggagaacttactgagaatgatctcacacagattcaaaattttttttttttttttggagacagagtct

SEQ ID NO: 52706 - DNA, 1460 bp, Homo sapiens
caggggatttcatgtgtttggaaggattctttctcctaagcctgttatcttaaaagtgtcttgatttctcaagcaaacctcaatccataatatttggaaggaagggcctcttggctccttatgcacttcaccctcccagtttcccaatgctggatcctaatctagagaatctgttccttatagtgcaagttaaatgaaaccagctttaaattaatgcccaaagattggcaaccaaacaatgcttctcaaagtgtggttctgagatcccctgccccaagagctggaggaacttgtttaaaaggtggatttggggattccattccacacccattgaatctgaaactgagtctctgagagaatagccgcacctatttattttattttaagaaatcccatttatttttggctattggagcaatgtcatcttttcagcaagtttaacacattatagaaatctcaaatgtaggatagaacaaaaccaagtgtaggggtaggggaagcaacagcaaaaagaagatatgagatgttgcagaaaagatggaggagggttcccctctcctctggggattgattcaaacactgtggcagtatacaccatcacacatagtcagggatgttaattccttttcgggataagaaaaggtggggattaagacatttctggaggcttagggaccaaggatggtctcttttccccacttgatccctttctctgatctgcgatgtacttgaagagcttctggatgaccatgttgacaataccagtgaatgacattttcaggccatgagatgggatgtcagactgttcttgacgttgttggagatccattccacaaagtagctgctgtttttgttttgcatatttaacattttgtcattgacgtccttcatggatatctgaccagtgaagacagcagccaaggtgaagtataagccatggcggggttcacaggcagccatcatgttcttggcattgaagacatgctgggtgaattcagacactgtgagcttgatactgctggcttccatggctggtgagaggggaagagccaggcataaagaaatggagatgtgggaaggggaccatgttgactgccaacttgtggaggtcggcattgagctggccagggaaacagaggcaggtgatgacactgttcatggttgctgagacgagggggttcatatccctgtaggttggtgtggtccgcttcagagtgygggagcagatgttatacagggcttcattgtcaatggaatacgtctcatcagtgttctctaccaactgatggacagagagggtggcactgtagggctcgaccttggtgtcactttgggtgaaggcactacactgaagatgttcacaatgcaatcagggtactcttctcagatcttgctaatgagagtgcccattccagagcctgtgcctctgcccagtgagtgggtcacctagaagacctgca

SEQ ID NO: 52707 - DNA, 644 bp, Homo sapiens
gctaacagagataaactagtagctggttcttaaaagagggatttgtttacactacgtaatttttatcagtgggacaacctgtttgcctgcctgagatcttattacttattaatgcatattacctgtgaataagaaaaaggtgcttgcatttcagaagtttgtgtgaatcacgtgtcctcctcatttcctaccagagttcaggtatttgtttattttgaataatgacagttctcagtaaagctaaggttttaaggtcatgcccttctgcatagaacctaatctgtcaatggctctttcctgttcagaattttagacttagtaaaaagtttgcaaactaagagcttttataaacagaatatgaccattaatatacttgtttstgaattccaagggaaaatgtatgacagttttcataatttcaaatgccttgaccaatgtcacaaagctaatactgattatggaacccatgagtatgacactaaaattcaggggctttggaattccattgttgttttgcttaattaaatagacatacattagggcatgtatactatacatgctcagtctaaagaagaataaccaaaggaaaactcttgttttcatcaccatttaaggagaccattaccaattccaatgtgatctct

SEQ ID NO: 52708 - DNA, 642 bp, Homo sapiens
catcttctgagttggtggaaaccctccgaataccacctaatccagaaaatgacagattgagaaatctaaagagatctgttggggagagtaagggagaaaatgcctcatctgcttccagttatagcaaagagtcagagcatcagttccttgggacagaaggagcctccacccatcaacacaagcataacagaaagcaccaccaaacagcctcacacaccagccctcagcccctctctcaarggagtcttgcatgtagcaatgctgaaagaaccttaactcattggcatgaaaaccagaagtgaaaatcaaagggaaaatttgttaaagattaaaactagtaggactgaagttttgcagccaccaaatgggccaagggggctggaggaacatcagtcctgctgagatggtcaaagtaatggcctgcatggccaaggccgccttcaagcacatgtcactgaggacccaaggcttgggagaagtggtagtaggaactaagcacagagagtctaactccaataagggacgatacatgaccagagtagtcatccagccagtttggagaggtagtaattttcaggaaatagtgtttttgagaggttcagttatctttaaaggacttacagtatttttggttgctgcttg

SEQ ID NO: 52709 - DNA, 1291 bp, Homo sapiens
tcgattgtatgtaaacacacaaatttagactaattcattgcattttatcttagaaaaattttatggcattaaatgcacgtaatttcttttaattcacattccttctaccatgttgtatgtgctttaaattacaaaaagatgtactgcacataatccacaaaaaaacattttttatttttttttttttttgagacggagtctcactctgtagcccaggctggagtgcagtggtgtgatcttggctcactgcaatctccgcctcccaggttccagtgattctccttcctcagcctcccaagtagctgggactacaggcaggtgccaccatgcccagctaatttttgtattttttagtagagatgaggtttcaccatattggacaggctgctctcaaactcctgccctcgtgatccacctgactcagcctcccaaagtgctgggattacaggcatgagccaccgcgcccagccaaaagaaaagctagttttaatctgtagcaatctcattctataaaccaaatcccaaaccttaccctgggatcccaccacacagttgagtgcatagccactgatgagcatactctccatttgacttctcccatgggctttcaaaatattaacagagttgactggatagcgtggctggcctcttatgtctgtgtatttaatagcaagtacagcatctactaccatgttagcaaagaaatcaccatttctacgccaaaagttaaggacagtaacaggtttggaatggacaaagggtacacacgtgaaaaatcaagggtaatttcaagggacttccttttagtaatctaatctattaaagmagcaagcattacttgtcaccaaaatgttacaacattatcactatctgcaattcatatcacttttagacatgctttttattaccttttcaccctaaaaaagcagggaaggcaacaggtaatttcaatacagcattactcctctctattgatatcaatttgcataaaattggttattcaaaattttattgcacaaaattgatactgctgctactacgcacgcgtgcgcgcaacacatgcgcacacacgcacccactcccgagacagggtcttgctatgttgcccacattggactggcactcctgggttcaattaatactcctacctcagcctccttagtagctgggactacaggcacataccaccatgcccatctcaaagtcttatgctttaaaaagtctaaattttatctgacaaccacaaggatacattccaatgattttggaagacatggatgtcttagcagca

SEQ ID NO: 52710 - DNA, 1291 bp, Homo sapiens
tcgattgtatgtaaacacacaaatttagactaattcattgcattttatcttagaaaaattttatggcattaaatgcacgtaatttcttttaattcacattccttctaccatgttgtatgtgctttaaattacaaaaagatgtactgcacataatccacaaaaaaacattttttatttttttttttttttgagacggagtctcactctgtagcccaggctggagtgcagtggtgtgatcttggctcactgcaatctccgcctcccaggttccagtgattctccttcctcagcctcccaagtagctgggactacaggcaggtgccaccatgcccagctaatttttgtattttttagtagagatgaggtttcaccatattggacaggctgctctcaaactcctgccctcgtgatccacctgactcagcctcccaaagtgctgggattacaggcatgagccaccgcgcccagccaaaagaaaagctagttttaatctgtagcaatctcattctataaaccaaatcccaaaccttaccctgggatcccaccacacagttgagtgcatagccactgatgagcatactctccatttgacttctcccatgggctttcaaaatattaacagagttgactggatagcgtggctggcctcttatgtctgtgtatttaatagcaagtacagcatctactaccatgttagcaaagaaatcaccatttctacgccaaaagttaaggacagtaacaggtttggaatggacaaagggtacacacgtgaaaaatcaagggtaatttcaagggacttccttttagtaatctaatctattaaagcagcaagcattacttgtcaccaaaatgttacaacattatcactatctgcaattcatatcacttttagacatgctttttattaccttttcaccctaaaaaagcagggaaggcaacaggtaatttcmatacagcattactcctctctattgatatcaatttgcataaaattggttattcaaaattttattgcacaaaattgatactgctgctactacgcacgcgtgcgcgcaacacatgcgcacacacgcacccactcccgagacagggtcttgctatgttgcccacattggactggcactcctgggttcaattaatactcctacctcagcctccttagtagctgggactacaggcacataccaccatgcccatctcaaagtcttatgctttaaaaagtctaaattttatctgacaaccacaaggatacattccaatgattttggaagacatggatgtcttagcagca

SEQ ID NO: 52711 - DNA, 1291 bp, Homo sapiens
tcgattgtatgtaaacacacaaatttagactaattcattgcattttatcttagaaaaattttatggcattaaatgcacgtaatttcttttaattcacattccttctaccatgttgtatgtgctttaaattacaaaaagatgtactgcacataatccacaaaaaaacattttttatttttttttttttttgagacggagtctcactctgtagcccaggctggagtgcagtggtgtgatcttggctcactgcaatctccgcctcccaggttccagtgattctccttcctcagcctcccaagtagctgggactacaggcaggtgccaccatgcccagctaatttttgtattttttagtagagatgaggtttcaccatattggacaggctgctctcaaactcctgccctcgtgatccacctgactcagcctcccaaagtgctgggattacaggcatgagccaccgcgcccagccaaaagaaaagctagttttaatctgtagcaatctcattctataaaccaaatcccaaaccttaccctgggatcccaccacacagttgagtgcatagccactgatgagcatactctccatttgacttctcccatgggctttcaaaatattaacagagttgactggatagcgtggctggcctcttatgtctgtgtatttaatagcaagtacagcatctactaccatgttagcaaagaaatcaccatttctacgccaaaagttaaggacagtaacaggtttggaatggacaaagggtacacacgtgaaaaatcaagggtaatttcaagggacttccttttagtaatctaatctattaaagcagcaagcattacttgtcaccaaaatgttacaacattatcactatctgcaattcatatcacttttagacatgctttttattaccttttcaccctaaaaaagcagggaaggcaacaggtaatttcaatacagcattactcctcyctattgatatcaatttgcataaaattggttattcaaaattttattgcacaaaattgatactgctgctactacgcacgcgtgcgcgcaacacatgcgcacacacgcacccactcccgagacagggtcttgctatgttgcccacattggactggcactcctgggttcaattaatactcctacctcagcctccttagtagctgggactacaggcacataccaccatgcccatctcaaagtcttatgctttaaaaagtctaaattttatctgacaaccacaaggatacattccaatgattttggaagacatggatgtcttagcagca

SEQ ID NO: 52712 - DNA, 542 bp, Homo sapiens
tttctttaatatcaccccagttcctctacttctgcacattgtaagataacaatcctcaggtttccttgcagttagctgtgtgtcagagtctgagccaggaatggtgggtagaatgaasgtaagtcacttctaagtttgacccttgaaaacgttccgcttgaaactccttcctctcatttctctgctagagtgactctgggaccacattttccagtggcatagtcatcagaggaaggagagcctacccagtgtgatgtgaataaatggatgaggttccactgcattactacttcatggcccagttccctaatgcaggctacggatcatgcaagtttacagcatcatctaacggtaagaaaactaactgtgtatttaaagcccttggaatcaaagactgtttgtgatgtgctcatctttgtattccccagcacatttcacagtgcctggctcaccaccatgcttgtttctctctctctctcttttcttttcttttttttttttttttgagacggagtctcactctgtctcccaggctggagtgt

SEQ ID NO: 52713 - DNA, 502 bp, Homo sapiens
agtggcaccaatctggcgaatctagagcagtggccagtttgtgatgagccacatccrgaatgaagtgggggagctcacaactggacatcttagcaaataccaaatccaggtgtgtcagttgggacaactgggggaggaggtgtggtgggctgtgcagccgggggaaacttcaccaaaatgactagagaaatgagaagaacaattataactgacagataggaacagcctgctcagatacgctaaaaatgagtcaggccttcaggatgatgacaactttgacaaggattttggaggtaacaacaaatggaaagctttatgtatccagttcaacacaactgttcattagagcccccgagggtttgatgcatttagcaaatgactattttatgtgctttttaattttcagatgcttccataaattcatagtcttaaaaggaagacatttcttcagagctctgtaaatcttacagtctgagtcctaagggagttggtggaggtggga

SEQ ID NO: 52714 - DNA, 502 bp, Homo sapiens
agtggcaccaatctggcgaatctagagcagtggccagtttgtgatgagccacatccggaatgaagtgggggagctcacaactggacatcttagcaaataccaaatccaggtgtgtcagttgggacaactgggggaggaggtgtggtgggctgtgcagccgggggaaacttcaccaaaatgactagagaaatgagaagaacaattataactgacagataggaacagcctgctcagatacgctaaaaatgagtcaggccttcaggatgatgacaactttgacaaggattttggaggtaacaacaaatggaaagctttatgtatccagttcaacacaactgttcattagagcccccgagggtttgatgcatttagcaaatgactattttatgtgctttttaattttcagatgmttccataaattcatagtcttaaaaggaagacatttcttcagagctctgtaaatcttacagtctgagtcctaagggagttggtggaggtggga

SEQ ID NO: 52715 - DNA, 580 bp, Homo sapiens
aaatgcacactcacattctaccagttgagcacagagagatgaagagcgtgtccagtgtgacattgccggkaggtggcagctggagtgactcacagccgcaacacacagcctgaccactatcttcctcacctttcctacctggagtattcaagaaatccttccctccctgaaagtcatattccaacattttctttttgaagttttggttttcatagacagaagaagtccttccttccccaagagtcatattttccaacatgttctttttgaagttttggttttcatacacaggtgtttaatccatcctgaattgagtgttgagtatgatatatggctggaatcaatttttgtaaggtatggaaaaatagttgtcccagcattattttttgaaggacccattcttttcccttgtcctcaaggccacctgagtcactgagcaagtttccgttctgtttcattcatctctttctcgatcactatttcaatatcagcctctctcaataactagagctttgtaaacaactcgatgtctggtgcaccctcccttcatgttcttctccaaattgcctaaattattctt

SEQ ID NO: 52716 - DNA, 608 bp, Homo sapiens
acagtgtatttcgtacctcaatgacgaacagcaaaatgtgcttgtgataaggtaaagaataacctttaaccctttggttcttagctctggctgctgagatacactggcaccaactgtattacttttttataaaatcccaatgcccaggccacaactgggagcatgacaatagaatttctgggaggtgggactcacatatgagtaattattaaagttcccaaagtgattacaatgtgcagacaagactgagaagcacggagctaaccatagatgtaatgtttaccctcatgcataccattccaacatctttatctgcagccacaaatgcttatcaycttgactttcaaatgtcagctctatattccacctagatgctctaaaagtccaaatcttcaaaaataaatgtttcatgttctgtcttaaacatggcattatcgacttcctgaggtcaccaatcccttatcccaccccttttgttctattgtcaaggtcctaatcaagaaacctgctcctttctctgtcctctgtgggttcaattccatggcagactggctgactaaagtgaaaatgacttttgctgagatcaaacaatgcagaaatgcaaagga

SEQ ID NO: 52717 - DNA, 624 bp, Homo sapiens
caggaactcagtaaatgattttttctggaaaaaaatcccaaataaggattatatttgtttctctggtatcgcctggctatatttgatttacttccctaaaatataagagcaacatttgaccagcttccttcatggggctctttatactgagtttgttgacagtcatggtacttttttctctgtgattttctgcctccagtttttcttgacatagtgtatatctgagagtaattgcaagaaaatatgtaatcatctttattcaggccatgatacatctgatttctggtcttttatctgtttcctttcagtttggtaccaaccacaaataccagtgactctgaagcaaacaaggactgtatggagayggttgttggacatgctcttcttgcaaggcctaaactttctttcctatttctggcctgaaatatgattctacctccatttactttctcttgttgtatttcccaagacaactaagacaggatactaaaacttgattttaaagcaatcttcattacgcaatctacaatggaaatttcatattagaaaccaggggaatttatctgtagccagaaggccttttagtttagagtgaggcaagagtaaaatcagagccactggctg

SEQ ID NO: 52718 - DNA, 1963 bp, Homo sapiens
aaaaataaagctctatttggttaagtctctaatcgggttgtaggtgcacacaaccaagtgcaatcctgactgatacaaatggaaattctgggtcaaatggtacatggatttaaaagttttacagatatggccaaagtgtcctctaaagggttgccatgctccctgacatcacatgtaggacttcttgacttaacccacagatgcacctttgcagctttgtcagttttatcagcctctactattactgggtctagctttctttctcttcaccaatgtcctctttggcagctggtccagcaaaccttatgcttgtgcatgctaaaattacaccaaaggcaattaatgaccactgtgttaaccagcacagtctgtcaattaacaaatgcttaaatgacatttttgtttactttcttgatctcattggtaaaagtggtggctttttccttggtataaaatggtgtttaaaaatgaaacatacttgtgaaaatacaaaaatttttccatttactaattataatcaaggcaaggggctgtgcatttgtgtgatttggttaaataaacacaattctcaattttgctggtgtatttctccagttctattaatgaaaatatcagggtaaacattttaggcccggcctgctgaactataatggctgggttgatcgatgtcaggagagagcctagttttaaaaccatagcctttgaccagaagagcaatcgtgttttggtttataaggctggggttgaaatcaaaatttgaggcaaatcagggcttctcaaacttataatgcatacaaatcacttgagtatattgttaaaatgcagattctgattcagaagaactgctttggggtcagaaattctacttccaagtgatgccacatccactaataggatcttgaaataacagaggcaaaggagctgcttcatcatcagaagcaagctgggcacgattataatgagtggcaaggtcagagtggcagccagggagcttgacctgcagagagctttagagactgttaaaataacacggcatctctacgggcaaaatagatgggtagccaacaacacatttctccatcttttggatggtcaggtaaaaacacgttgctcctaaagccaagacacacatagagcaagcatcttggtttagtatctgtatccatcgaggtctaatcagaaaaatagaaatcatgatacgtcacacaaaggggatttaacacagggaattggttacagaaatattggcaggttgagagggcaaaacaagcatgctgaggtcactcagagatgaataactgtagaaggcagtgccatgttatattatagctcagggagctcaaaggaagaattggagtcaccagaatctaggagcattgagatgaggctcttacttagaaaaatgagatcctggactctgaaccaatgccataatggggtgagactttgagggtcttctgggaagaagctaaataattcgtggccagagggcaggctatggttcactaaagactctcgacactcttctcatggaaaaatgggatctatttccccatccttaaaatccaggctggcctgtgactcctttgaccagtggaatatggcagaagcaacagccatttgggacctagtctttcagagaagtagcagcttctgccttagcctcttggagtcctgacctgccgttttaagttcacccacccacgggagaggtcctgagactggatgaggaagaaaaggctgagctcagccttccagggtccccgccaaggtgccaggtatgtgaagaggtcagttggacccttcagaccrgactagccactagctaagtaccacaaaatgacccactgatgtcccatggatcagaagaatctcctggaccagctttgcccaaaagacctacaaaatcaagagacataaaataaaatggttattgtttcaggccacacattttgagagtagc

SEQ ID NO: 52719 - DNA, 555 bp, Homo sapiens
ggaaaacgcggtgtaggctgtaaacgctgagtaagttagttattgttatcatttccttaaaatcttgtgatgtaaccttgaccgctactactatgagaaaagtgttcagctttccatgtcccatctacctcttcccttcctgaaaatatgaacaagcgcgcaccatccctgggaaggagagttttagggctctatcatttctgcagtggcratgagcaacacctggaataaagagcttcacatttgccagtttttctacattcagtgtatacacaaagcaccatgaataatgcaggtcaaatgatatgactgaacatagaattaaacatgctttgtcaattgtttagcaaatactacaaatttaattatgctaatgttacatttacctttactggaaatttcagctgattatataattcagaaactagaagattatgaccaagagtctttctcatcttcattattctgacgatagcagcatcaatctgatattgtctatcctgaaacactctctcagtggtgctaacctgttcctcaacctgtataaaaaagaaa

SEQ ID NO: 52720 - DNA, 593 bp, Homo sapiens
tttatttgtaattctgctggaaccattccctaagcattgacatttacaggcaatcactggacctcttctggcctctggctttttataaggaagctgacccacttctttagaggtaaaatacctttcgacttggtaccgggtcatggatgcttccatccatcccccctgccctcagacatcagactgcagcttctttgacctttggactcttggacttatactagtggtttgctgggggcttttgkgcctttggccacagattgaaggctgcattgtcagattccctacctttgaaaattttggacttggaccgagtcactattggcttctttcttcctcagcttgcagaggacacacacacaaactaagtacaaaaaaagatatatcccttgtaaagatgtgagtcaagccaatggagcagctgaatggctccctgctaaatattcaaatgtcccccacccttttgcagttagatggggtcatgtagctgtttgtggccaatggggtgtgaaggaaagtgatatggtcactgttctgtggtgaccatagaagctgtgttctggtgtgaaggaactacaacctggaagcagcct

SEQ ID NO: 52721 - DNA, 553 bp, Homo sapiens
aaacctcaggaaatttcgcaagttcagccagcagaggaattaagtaaacctttggaagatggacagcccacaagtgattcaaaagaagccaagtgggtgtctttaacggtaagaaactatttatgttggaaacacctaagagttatgagaattgaggatgtgcaggtgtgaagaattggcccaggcaaggaccaacgtatggggctgggggcrggggtgatggtgtgttcactctgaaaagggggcctcagaagtgcaagttgcccacttaggaaaaggaaacatgttttttgagggtttctagtgtcaaccctaattgcaactctggggagaggaaacattttcaaggagggaaggaatttttaggtcttttagaaattggccaagaatcttctagttaccatctcgaggaagtcaggaattgtagtctaggaaatagaacttggtgaattttatagcttttataactttacctcatttaggttcatactaacccctgagtctttttctactgtgaggatgtttacaagattcattttatccattgtttaca

SEQ ID NO: 52722 - DNA, 579 bp, Homo sapiens
ttgcccaggctgctcttgaattcctggcctcaagtgatcctcccacctccacctcccaaagtgttgggattacccatgtgagccactgtgcctggcctgggggcacaaattattaacatatgagtattcagagctccccctctttccccattgctaaagggaattttgtatttgtctacttgattttaatcctcttcctcctggctttccccagatggaagagaatttagatggatccactgggaagrcagaagtgatactagaaagctgcactggctgtttattaaagagttttattctggtatgagtaaaacagttttaccatggcatgtgagatgattagagaggagagaaaaagggaacaaataagtgatgctgtggattatgaaaagaatctgtttttgatagtctctgagaaattcaaaaggagaattgagttgctttttaaatactttcactttttccttgatggcatcacccaccctgagtctggtcctagatacgtgagcattgcataaacatgaacctagtgttggaagctgcaatgctattccggggactgactgctgtccttgtaaa

SEQ ID NO: 52723 - DNA, 552 bp, Homo sapiens
cacataagacacaagtgattttcagcttgtaggctcttgagaaacaggagttggtggagcttggctccaagcaaaactgcaaaggagaaggctcaggcttcccttctgttccctgttctccacaccgccccatgatggcaaagacagtcagtcagctcagactattctgttaggaagcctttccctgagcctgagttaggtaccctcctctgcccccatcacacctgtgcgctctccctctgagcagtgatcacactgtatagccatggcctctctcctcagctgcctcccattgtgggctctgaaccatgtgatggcaaagactgtttccttgtctgtaaaatgaggatgagtaggcagatgttggacctaccctgaagcatgaactgacaattagacacrtaaagaattaagcatatagtttccttcttcacctgaaacaattttctccattttggtctgtcaatcagccatgcaggttcaatggctagagttggcccctacattgaaatgctaggaccaatcactctcattgggagtttggggttcctg

SEQ ID NO: 52724 - DNA, 555 bp, Homo sapiens
ctactccagaggctgaggcaggtgaattgcttgaacttgggaggcggaggttgcagtgaaaggagatcgcgccactgcacttcagcctgggctacagagtgagactccgtctcaaaaaataaaaataataaatatatatatttggccgggctcagtggctcacrcctgtaattccaccactttgggaagctgaggcaggcagcggatcacctgcggtcaggagtttgagaccagcctggccaacatggtgaaacctcgtctctactaaaaatacaaaaatcagccgggtgtggtgctgtgcgcctgtaattccagctactcgggaggctgaggcaggaggcaggagaatcgcttgaacgtgggaggctgaggagatctcggtgagccgagattgcaccattgcactctagcctgggtgggcaacaagagtgaaactccatctcaaaaaaaaaaaaaaaagaaagaaagaaagaagaaagaaactgcttattttgccctctgtgtcttcactaatagacatggactacattacaaaccccaacagcaacaacccag

SEQ ID NO: 52725 - DNA, 555 bp, Homo sapiens
ctactccagaggctgaggcaggtgaattgcttgaacttgggaggcggaggttgcagtgaaaggagatcgcgccactgcacttcagcctgggctacagagtgagactccgtctcaaaaaataaaaataataaatatatatatttggccgggctcagtggctcacgcctgtaattccaccactttgggaagctgaggcaggcagcggatcacctgcggtcaggagtttgagaccagcctggccaacatggtgaaacctcgtctctactaaaaatacaaaaatcagccgggtgtggtgctgtgcgcctgtaattccagctactcgggaggctgaggcaggaggcaggagaatcgctygaacgtgggaggctgaggagatctcggtgagccgagattgcaccattgcactctagcctgggtgggcaacaagagtgaaactccatctcaaaaaaaaaaaaaaaagaaagaaagaaagaagaaagaaactgcttattttgccctctgtgtcttcactaatagacatggactacattacaaaccccaacagcaacaacccag

SEQ ID NO: 52726 - DNA, 596 bp, Homo sapiens
ccatgacctgagtccttcctagaaggtcatcacttgacccaaaatatgggtgggagaagtatcccactttttaccacgttaagatgagggaaaaaaaatgcatcttagaattgatgatggtgcaataactaattttgtgtgtcgacttgacttggttatggttcccagttgtttaatcaaacactagtctggctgttgctgtgaaggtagtttgtagataatactgtttacaaccagtagatcttgagtaaagcagatgatgctcaataatgtgggtgggcctcatccaatcagttgaaggccttaaaagcaaagaccaaagttttccagataaaaagaaattatccttaagcctgtaacctagaaattctgccaagatttctagcctgatgccctgcctgycctacggatttcagacttgctgcctctcaatttgcatgagccaatttcttaaaataaaataaatattttacctccctgcccatatattctattagctatgttttttggactagcacatatggtatatatgtctttatggaaaagagtaaaaaagaaatctgggatgaaatagataactttctagaaaaacaaaa

SEQ ID NO: 52727 - DNA, 629 bp, Homo sapiens
taaaacttccaaaccataactatgaaatggtttagtcgaagcttttggcttaaaacttgagacctactcatagctaaaattgaactgaggaatagaagttaaaagaatactggctggcgggcacggtggctcacgcctgtaatcccagcactttgggaggccgaggtgggcggatcgcaaggttaggagatggagaccatcctggctaacatggtgaaaccctgtctctactaaaaatacaaaaaaaattagccaggcgtggtggcgggcgcctgtagtcccagctgctcaggaggctgaggaaggagaatggcatgagcctgggacacagagcttgcagtgagccgagatcgcaccactgcactccagcctgggcgacagagcaagactccgtctcaaaaaaaaaaaaaaaaagagtactggctgggcatggtggctcacgcctgtaatctcagcactttgggaggacaaggcgggcagatmacctgaggtcaggagttcaagaccagcctggtcatcatggtgaaactaaaaatatgaaaattagccaaacgtggtggcagacacctttaatcccagctactcggcaggctgaagtggagaatcgcttgaacctgagaggcagaggc

SEQ ID NO: 52728 - DNA, 1102 bp, Homo sapiens
gtttttcagaatttctcaggggcttaggagggcggcagccgtgccaaaattacaagctttcctctagtcagaagggatgtcttttcaaagcccagccctcatttttcagtctgatgtaagtaaatttacctctgtgtgctgggctgagcagcttttctttgtcgtttttgtttttctaatagctgctgctctggcagagctattcatttcaaagggaagttagaagcattcttcactcttccccttttagattatttgcagttactgactcttctgaaatcttagatttgaacagaaacctaaagcacagcaccattttaaaacagcaaatcaccagcattcctgggatcacatttctctagagcaactatccaacatgaggcacaagaactaagtsgaactgggctaaaattgacaaaattaaagacaaaagaattatctcttttaaaaattggggcctactgtgctctgacagcatgctaaaggacaaccatcgtttggaaacattgtttcagaaccagagaagaggtggtggagttctgtttgccagttagctaaattaactgatttcttaagaaatccaagtgaactgtatagtaaggtggtcaatttttggaaacattgtttaggcaacagataagagatagtgaggttttgttttgaagttaatttacttcatgagaaagtcaaatcaacagtcatagaccatgaagctgataagatctatgataaaatccagtgggcgaactatcagtaagttcttaatttgcccacgtcccagtgtattcaacgggcttcagttggcaatggctggaccttgctcttgttacttctgaagggagttgttttacgtggacaaggccaggatcatggtctctgagtgctccaaggggttaacctctgtgaattctacttctgtgtcacatatttaaatgagtaacttagagttcaatatctttgtgttcaactaaagtcaacttcttctttatcagccaacattctcttactctaatcgttgaacacacttgaattcatatcagttctgggattttcgtaaccatcaatcataaagtcatagtaagaagaagaataaagcgatatc

SEQ ID NO: 52729 - DNA, 1102 bp, Homo sapiens
gtttttcagaatttctcaggggcttaggagggcggcagccgtgccaaaattacaagctttcctctagtcagaagggatgtcttttcaaagcccagccctcatttttcagtctgatgtaagtaaatttacctctgtgtgctgggctgagcagcttttctttgtcgtttttgtttttctaatagctgctgctctggcagagctattcatttcaaagggaagttagaagcattcttcactcttccccttttagattatttgcagttactgactcttctgaaatcttagatttgaacagaaacctaaagcacagcaccattttaaaacagcaaatcaccagcattcctgggatcacatttctctagagcaactatccaacatgaggcacaagaactaagtcgaactgggctaaaattgacaaaattaaagacaaaagaattatctcttttaaaaattggggcctactgtgctctgacagcatgctaaaggacaaccatcgtttggwaacattgtttcagaaccagagaagaggtggtggagttctgtttgccagttagctaaattaactgatttcttaagaaatccaagtgaactgtatagtaaggtggtcaatttttggaaacattgtttaggcaacagataagagatagtgaggttttgttttgaagttaatttacttcatgagaaagtcaaatcaacagtcatagaccatgaagctgataagatctatgataaaatccagtgggcgaactatcagtaagttcttaatttgcccacgtcccagtgtattcaacgggcttcagttggcaatggctggaccttgctcttgttacttctgaagggagttgttttacgtggacaaggccaggatcatggtctctgagtgctccaaggggttaacctctgtgaattctacttctgtgtcacatatttaaatgagtaacttagagttcaatatctttgtgttcaactaaagtcaacttcttctttatcagccaacattctcttactctaatcgttgaacacacttgaattcatatcagttctgggattttcgtaaccatcaatcataaagtcatagtaagaagaagaataaagcgatatc

SEQ ID NO: 52730 - DNA, 1351 bp, Homo sapiens
cattatggtccaaaataaccttgggaggtcaagcccaggcctgggcatccctcatccaaggagccctgatgggggggtctctcagggcctagccgaagagtcagttccgctccatagcagcactgatggttcaggtcagtcccaggcccatgagaaaaactccagttctgcaccaaaacacagtggcctttggagtccatcagactccaagcattaggaagggccaagcycttctcccattggtagttctcacacacctgtgggtccagagaggggctacccgccatgatcctgggagctgtggtctaagggatctctgtatacctgagtatgctcagctgcggtttggtgttttttattagtgaatggcttagctcctcagctggaccataaacttctcaagggaacatgctgtgcccttatctttgtgtgcctgcatgacagcacacagccagcatgcaaaccatgacctcatatgcacttaacacttgactatatctctttggcgactagactctactcctttggacagggacttcttaattctgtatttctgaatggcctagtgctggctgtgacacagggtagttatataattgatggtgttgatttgaattgtccagtttgaataaagaattttctaaatgagtcgacattatgacacaatggatatagatgagaccattaatgcatttgaaatttacactagtggacacatgatggtagatgctatagatacaggaacccatgcaaattccaactttgagaaactagtaacctatttcgaaattataccttctcctgttcttcatgggcaaagatgatccaagcatggaggacatgacatttaagccttcttcccagtgtaagggatgtgccttcagctaaatttttctctcagtcaacatttatgggcacctactgtgtgttaggcactgtactatgggctgagtattcaaagaaaaactaggcacaggtgaatcgtaaatggagagctacgggtctagtggggctgaaggcactttctcaaggaactcatggcactgaaatagctgctgcttgagaagtatggcctaagctccatgggagtgagaagggatgaattcttcctggggccaggaagggaggatgaaatcaggaaaggcctcccagaggagcagatgtttgaaggatggacaaatccagatggacaatagagtatgtattctaggctggagggtattaaccaaagcatggaaccccctcagttctttgggaggagaacagtctcctctgctctcactgtagctggtggcttgattgctgaccaaggtcagggtgacacctttggccaaagaatggggcatttgct

SEQ ID NO: 52731 - DNA, 1351 bp, Homo sapiens
cattatggtccaaaataaccttgggaggtcaagcccaggcctgggcatccctcatccaaggagccctgatgggggggtctctcagggcctagccgaagagtcagttccgctccatagcagcactgatggttcaggtcagtcccaggcccatgagaaaaactccagttctgcaccaaaacacagtggcctttggagtccatcagactccaagcattaggaagggccaagctcttctcccattggtagttctcacacacctgtgggtccagagaggggctacccgccatgatcctgggagctgtggtctaagggatctctgtatacctgagtatrctcagctgcggtttggtgttttttattagtgaatggcttagctcctcagctggaccataaacttctcaagggaacatgctgtgcccttatctttgtgtgcctgcatgacagcacacagccagcatgcaaaccatgacctcatatgcacttaacacttgactatatctctttggcgactagactctactcctttggacagggacttcttaattctgtatttctgaatggcctagtgctggctgtgacacagggtagttatataattgatggtgttgatttgaattgtccagtttgaataaagaattttctaaatgagtcgacattatgacacaatggatatagatgagaccattaatgcatttgaaatttacactagtggacacatgatggtagatgctatagatacaggaacccatgcaaattccaactttgagaaactagtaacctatttcgaaattataccttctcctgttcttcatgggcaaagatgatccaagcatggaggacatgacatttaagccttcttcccagtgtaagggatgtgccttcagctaaatttttctctcagtcaacatttatgggcacctactgtgtgttaggcactgtactatgggctgagtattcaaagaaaaactaggcacaggtgaatcgtaaatggagagctacgggtctagtggggctgaaggcactttctcaaggaactcatggcactgaaatagctgctgcttgagaagtatggcctaagctccatgggagtgagaagggatgaattcttcctggggccaggaagggaggatgaaatcaggaaaggcctcccagaggagcagatgtttgaaggatggacaaatccagatggacaatagagtatgtattctaggctggagggtattaaccaaagcatggaaccccctcagttctttgggaggagaacagtctcctctgctctcactgtagctggtggcttgattgctgaccaaggtcagggtgacacctttggccaaagaatggggcatttgct

SEQ ID NO: 52732 - DNA, 1351 bp, Homo sapiens
cattatggtccaaaataaccttgggaggtcaagcccaggcctgggcatccctcatccaaggagccctgatgggggggtctctcagggcctagccgaagagtcagttccgctccatagcagcactgatggttcaggtcagtcccaggcccatgagaaaaactccagttctgcaccaaaacacagtggcctttggagtccatcagactccaagcattaggaagggccaagctcttctcccattggtagttctcacacacctgtgggtccagagaggggctacccgccatgatcctgggagctgtggtctaagggatctctgtatacctgagtatgctcagctgcggtttggkgttttttattagtgaatggcttagctcctcagctggaccataaacttctcaagggaacatgctgtgcccttatctttgtgtgcctgcatgacagcacacagccagcatgcaaaccatgacctcatatgcacttaacacttgactatatctctttggcgactagactctactcctttggacagggacttcttaattctgtatttctgaatggcctagtgctggctgtgacacagggtagttatataattgatggtgttgatttgaattgtccagtttgaataaagaattttctaaatgagtcgacattatgacacaatggatatagatgagaccattaatgcatttgaaatttacactagtggacacatgatggtagatgctatagatacaggaacccatgcaaattccaactttgagaaactagtaacctatttcgaaattataccttctcctgttcttcatgggcaaagatgatccaagcatggaggacatgacatttaagccttcttcccagtgtaagggatgtgccttcagctaaatttttctctcagtcaacatttatgggcacctactgtgtgttaggcactgtactatgggctgagtattcaaagaaaaactaggcacaggtgaatcgtaaatggagagctacgggtctagtggggctgaaggcactttctcaaggaactcatggcactgaaatagctgctgcttgagaagtatggcctaagctccatgggagtgagaagggatgaattcttcctggggccaggaagggaggatgaaatcaggaaaggcctcccagaggagcagatgtttgaaggatggacaaatccagatggacaatagagtatgtattctaggctggagggtattaaccaaagcatggaaccccctcagttctttgggaggagaacagtctcctctgctctcactgtagctggtggcttgattgctgaccaaggtcagggtgacacctttggccaaagaatggggcatttgct

SEQ ID NO: 52733 - DNA, 580 bp, Homo sapiens
cagaacacatatagtttaaggcacattgggaaacttaaaatttattaataaagaaatgattaaaataataggctaaaagaactagaaaataatcaaaatagaaaatgacaatgaaatgccaatagacacaacattttgcccctagagaggaatacaaaaacaataagcagaacaaaaattaaaaaaaaaaagaaaaaaaattgactaaaaatattgagacttcaacctacatattgttcaacatgaactcagagaaatttgatagtcaacacatatcacagttattgaaatacacaggagaaaaaagaatcccagaggagccagacaaaaagaagaagtaaagaaaatattttgggagtcaaatgtctccacagaaacatttatttccaaaataaagtgaacaaaacctattaaacayaaagttttcagacatagatttaaacatgaaagaactcagactactgtttatatgagaagatagatgagtagaagatgaactgtagccaatcaaaaaacaaatagaaaattggcaatgttgaatatgtttaactatagatttaaaatgaaaagaaaggtaaca

SEQ ID NO: 52734 - DNA, 597 bp, Homo sapiens
gaatattaaataacaccttataaagaggcctaaaataataagaggaaaataaatacagcatgtgaaactacagaatctagcttacaaccattaccaacaatgactaacatcaacatcaacaggtactgacaatataatataagtatttggaacccagatctggagccaaactatttgggttcaaatcctaattctaccatttactagctgtttaactttggacaggttacttaacctctctgtgcctcatttttctcatctttaaaaagataactgtacttatctcacagaggtattgtgagggttaaatgaacacttataatagtgcttgaacatagtaaatatatattggctattaatgttataactaggcactttttataagccacacactttatatataatatttgttaatttaaccttcacatgatgctctacttcagtagttctcaaatttttggtttgtaacactcttgaaamttattgaaaactctgaagaacttttgtttatgaatgttttatgtatatatacttactgtattaaaattaaaactgtgagattcttaaaaatattaataactaatttaaaatgatgag

SEQ ID NO: 52735 - DNA, 604 bp, Homo sapiens
ttcgcctcggcctcccagagtgttaggattacaggtatgagccactatgcccagctgggctagtgcttttccttgagacaaccatagtgcttctgaacacagcagaaatgttctctgcatactgtccattttgtcacacagaacattagtgttaaaaagacatatactcaatggttgagatttaatgaaagtaatacttattactgattcatcaaggtcattcttaaggacttttttctgtaagtgcaagaaatccagtgattagtagtgtggcactcttattttgattggtgctagggcaccagtagtagtttcacccactctttcttttgtatcatcagagcaaatgtcaasccagtgaaaaaggcaaataacatagtagtatgatgaaaattgttttatcctagtggaccttccagaagattctaaagaatctccagaagtccagtgattgtactttgagaaacactgctttaaccttctacctcctcagggttactgcaagcccatccagaatcttttacatccagacctaatagactgagaactagtcccgtctcaaatctacctaaaagccactgtattagtcagttctcacactgct

SEQ ID NO: 52736 - DNA, 604 bp, Homo sapiens
ttcgcctcggcctcccagagtgttaggattacaggtatgagccactatgcccagctgggctagtgcttttccttgagacaaccatagtgcttctgaacacagcagaaatgttctctgcatactgtccattttgtcacacagaacattagtgttaaaaagacatatactcaatggttgagatttaatgaaagtaatacttattactgattcatcaaggtcattcttaaggacttttttctgtaagtgcaagaaatccagtgattagtagtgtggcactcttattttgattggtgctagggcaccagtagtagtttcacccactctttcttttgtatcatcagagcaaatgtcaacccagtgaaaaaggcaaataacatagtagtatkatgaaaattgttttatcctagtggaccttccagaagattctaaagaatctccagaagtccagtgattgtactttgagaaacactgctttaaccttctacctcctcagggttactgcaagcccatccagaatcttttacatccagacctaatagactgagaactagtcccgtctcaaatctacctaaaagccactgtattagtcagttctcacactgct

SEQ ID NO: 52737 - DNA, 604 bp, Homo sapiens
ttcgcctcggcctcccagagtgttaggattacaggtatgagccactatgcccagctgggctagtgcttttccttgagacaaccatagtgcttctgaacacagcagaaatgttctctgcatactgtccattttgtcacacagaacattagtgttaaaaagacatatactcaatggttgagatttaatgaaagtaatacttattactgattcatcaaggtcattcttaaggacttttttctgtaagtgcaagaaatccagtgattagtagtgtggcactcttattttgattggtgctagggcaccagtagtagtttcacccactctttcttttgtatcatcagagcaaatgtcaacccagtgaaaaaggcaaataacatagtagtatgatgaaaattgttttatcctagtggaccttccagaagattctaaagaatctccagaagtccartgattgtactttgagaaacactgctttaaccttctacctcctcagggttactgcaagcccatccagaatcttttacatccagacctaatagactgagaactagtcccgtctcaaatctacctaaaagccactgtattagtcagttctcacactgct

SEQ ID NO: 52738 - DNA, 592 bp, Homo sapiens
ataactagcttgatttggtgtgtaaaaatcccataaagcagagaaagctttagcaccaaagaaagtgattgatgacagtgaaactgtttccaagtccaagggaaaaaaagctaagaaagtattcttttatacaatattatctgcattggaagcattctggtgtatttattccctgtagcaagtggatcgtgattgtatgctgtgctagctctgtgggaggaagggcaaaaaaaaaaaggttccagattccgggaccagttatatttgcaagcatcagttactagttggatggttattaccgaaacataaacctggacacttattgtcccatgcctaccttgtcatagctaataacggtacttggtctttttagaacccttttaaattcttacataatactgtcatttcttgaccaacttcacgcccgtaatttttctttctaatagtgttttcctatccttctaagacttgatggtaatttaatataacctgacttaaagcaccagtaaagatctttgctattcctcatgttggaaccctccaccaagamtggattcagcagcttatgtgaggctaggtcacagccatgacc

SEQ ID NO: 52739 - DNA, 1033 bp, Homo sapiens
gaaaaaaacctaaatagagtgacttaaataaataggagcttttcccacaaaacaagcaacccagaggtaacttgctgctggcatttgttcagcagtttagcagtgtcagagacaataatgatttaatttttctggccttttcctcatggttacaagatggctgttgcatactcagccatcatgtccacattccatcagatgggctaaaattgagtgaggggaagagcaaaggactgaatcaacaaagcaaaaccttcctcagggatacagagaagacayggcttatgtctcatcagccagaacttttaacagggccaatcccagctggaatgtggctttgaagaaaggaggttataaatggaggctgggcatgacaggcagcctctttgagatggcctccattatcctacatcctggtatttatgcctacatctttccttttcatgtgcacttgacctagtgactcacttctgtgcatgcactatggcaagtgatgacatgtcactttagacattaggtttcaaagagactgtgtcatatcttctgtcttgggcatgccctctcctgctcccccttgattgcttggcttggggtgaccagctgccacactgtgtggcagtcctaagaagaggcccatgtaagtgagcttaggaatagatcttctgaagtctgttcacaaccgtgtgtgtgagcctgggagaggatccttcagccacagttgagatttcagacgagtgtatccctggccaacagcttgagtgcaacctcatgacagaacttgagctggacacacccaagtaaactgcatccaattcctggtccacaggaactgtgagataataagtttttgttttaagttgctaattttgggctaatctgttacacagcaatagataagtgatacattgggtcaatgaattaaccatgtcttttacatctatatgtgataatattcaacaacaaaaaactgcttgatgagaaacttattaaaggtttctcgcaagtttaagtaaattaagtgttctaattctcc

SEQ ID NO: 52740 - DNA, 2394 bp, Homo sapiens
ttttggaacataaaaataagatacttaaaagtcatctttgaaatgataatcaaggtaagacttctgatagtaaatttctcatttctcttggtgatcttactgattttaaaaggcaaaattacaggccaggcatggtggctcacacctgtaatcccagcacttcgggaaggtgaggcgggtggatcacctgaggtcaggattttgagacaagcctggctaacatggtgaaaccccatctctactaaaaatacaaaaattagctgggcatggtggcggacacctgtaatcccagctactcaggaggctgaggcaggagaatcacttgaacccaggtgattgcagtgagctgagatggcaccactgtactccaacctggatgaaagagcaagactctatctccaaaaaaaacaaaaaaaagtaagattacatatttttaatcataaaagagcagtttaaaatatatatatttatatataaattaatttttttaatttaatttctttagaattcagttaagaagttagttgtagctaattctcaatctcaaacagtattgtctgaaaaaaattcatttacctacttatgatccctgaaattctacatgatatttttgtattaatagaaataagaaattagatttttaagttaatatgttgcattttcttctataattacattgttacaaattggacttgttattgcaaatggatcttctatttaatttttatagtaaatggtttatatttagtaaataaagttaattacagttgattcttgaatatcgtgggggttagggactctgatccctgtgcagttgaaaatctgagtataactttgactccttccaaacgtaactactaatagcctactgttgactggaaactttactgataatataaacagtcgatgaacacataattggtatgtgttgcattattatatactatgcttttaaaataaagtaagctagagaaatgaactgttataaagaaaatcatcgaaaagaaaaaatatacttactattcataaacataagtgaatcctcccaaaggtcttcatctttatcatcttcaggttgattaggctgaggaggaagaaaacggttggttttgctgtctctgcgttgcagaagcagaagaaaaatctgcatataagtggacccctgcagttcaaactcttgttgttcaagggtcaactgtattacacaggaatctgtgtcactaagaaagtaactgtctttagaactaggaattcaacaatccctttctgataccataaacaaatggcaataagaaccataaaactgagccagtgtgcacccatacaaataggagattatttttgaagatacctactgaatgcagaagacagaaaagtaattccttcccaagaagcagaagttatgttatgtattcctatacaaacaaggtctatttgtaatttattcaccataagttggaagctcatgagatatattcacttcttagaacaagctgtgtgtttttatgtgctggataattatcataataatagtaattttgctggaagaagataatctgttaccaggctgggtgtggtggctcatgcatgtaatcccagcacatgagaggccaaggaaggcagatcacttgaggtgaggtgtttgagaccagcctggccaacatggtgaaaccctatctctactaaaagtacaaaaattagccaggcatgagggtggtcacctgtattcccaactactcggaagactgaggcaggggaattgcttgaacccgcgaggtgtagattgcagtgagccgagaatgcgccactgcactccagcctgggtgacagagcaagattccatctcaaaaaaaaaaaaaaaagatactctgttaccattaggcaagatatgatcataataaatattctaatagccaaactctaggctcaaaaaatgaaaaaaattataataaaattataaaaatggttcacaataacaaaaacatgacacctaatgcattgtacagtctgaaccgtataaagacaccgttaatttagtaaataattatcaaaccacttctataagttaggtttggcaaattgtaggagacaaagatggaattgacatagtttttgtctttaagatgctcataatagaatatagataactgtttaatttttgtgtttttttcaacagaatttttaagaaaaatattttaattcattcatatactyatccacttaaaaaataaccatcatgtatcttttatagactaagcatttttccaatgttacaaaatacatttaaaaaatagttaggagattgttattaccactgttatttattttatttactaccttaagtagtgcttactgtgtgtccaatgtcatctgggagcttatagttattattta

SEQ ID NO: 52741 - DNA, 1015 bp, Homo sapiens
tgctatttatttctcctctcaattctattagtatttgctttatatatttagatgctctgatgtttggtggataaatacatacaattgtacatcttcttgataaattgattcctttattattacaatgaccttttctagtctcttgtgactattttttagttaaggtctattttgtctagtgtaagtatagccaccttgctctcttctggcagcccaagctgtcaataaaagctagaatggtggtgcagaattattaaagtagaagtgatagggtgaaaacccagggttagaatgagagcatgcatagcctttctggccatgccacggagtgtggagactcactgccaactagaatgcagacaaatgatttgattcatcattgattcctttgttttccacgtcattttacagactaaagtcagtaagaacccaaaattattacagttatcgcactctgtcagcctttggtattgaattcatatgggattatatgaaataaataaagttttcttagaacatgcaaaaaatctagaacatttactacctggccctttatagaaaaatactgctgagccccagtctatttatataaagcccaatgttaccctgaatgtgaactccctcatttcayacaataactctcaaattatgaatctttgtcaacacacacagacatatacgcatccacttgagatgtttccatggaaacatggatttattctcacaatgccatgcccttctgtaagcatagtctttgctgtgtttgcatccctccccaacctgatagattggaagaaaatggtgccctctgatgtcagcctcccttaaaggggccccaaggtagcatgtcttgggcctcaagtatttcaggccataagtggaatggagtaatccctacaaccctgtactcagaagcctattaccttactttgacttggctttatctggtcagtctcattttgtttggctctttctctcttagaataatagtttaagtttcctttaagtacagttt

SEQ ID NO: 52742 - DNA, 1015 bp, Homo sapiens
tgctatttatttctcctctcaattctattagtatttgctttatatatttagatgctctgatgtttggtggataaatacatacaattgtacatcttcttgataaattgattcctttattattacaatgaccttttctagtctcttgtgactattttttagttaaggtctattttgtctagtgtaagtatagccaccttgctctcttctggcagcccaagctgtcaataaaagctagaatggtggtgcagaattattaaagtagaagtgatagggtgaaaacccagggttagaatgagagcatgcatagcctttctggccatgccacggagtgtggagactcactgccaactagaatgcagacaaatgatttgattcatcattgattcctttgttttccacgtcattttacagactaaagtcagtaagaacccaaaattattacagttatcgcactctgtcagcctttggtattgaattcatatgggattatatgaaataaataaagttttcttagaacatgcaaaaaatctagaacatttactacctggccctttatagaaaaatactgctgagccccagtctatttatataaagcccaatgttaccctgaatgtgaactccctcatttcatacaataactctcaaattatgaatctttgtcaacacacacagacatatacgcatccacttgagatgtttccatggaaacatggatttattctcacaatgccatgcccttctgtaagcatagtctttgctgtgtttgcatccctccccaacctgatagattggaagaaaatggtgccctctgatgtcagcctcccttaaaggggccccaaggtagcatgtcttgggcctcaagtatttcaggccataagtrgaatggagtaatccctacaaccctgtactcagaagcctattaccttactttgacttggctttatctggtcagtctcattttgtttggctctttctctcttagaataatagtttaagtttcctttaagtacagttt

SEQ ID NO: 52743 - DNA, 1335 bp, Homo sapiens
catttaatgatataaacaaggaatggactatttgaggaaaaatgtacaagcaagcctatgatacaaggaacaaaataggaaacaatgggtacgatatatgtggtaacaacaatatctattatcaaaactcaaaagaaatcaaactctttttggtggacccatttaaagtttggagaagattcatggtagtatatgataaggtgcatttatcaagatagcaagaggcaaatattttattccacgttctatcctaaccttgtcatcttgtcaaaatgcattactctttatgaatattagttcttcatctacarttggaatggcaacatttttctgcttatgccacagaactgtggtattacagttcttttcataaactttgactagttttcaaattgtcaagtctcattcaaatatatattgattataaatcatttttcagattttatgatctgttccagtaagcattttatattatactaagaaaaaacactttgatctaagatatttacagaacccacagacaaaaatagaaaataaaagtgtatataagaagctatacatcattgtgacttgaatatgataattaccaataaaaacttggtgataaaattagtaaatgatcataattcatgattttatgaaatacattatttttaaaaattaaaatgccaggatgtttgctgagagagctctctatggacaatttgtcaattgtttacatgtccaggttccctagaattttgtcagctgttttcccaatagcaaataaaaattgttttagcagactttatattttcccaattgtatacagaatgggccaaattatatcttccttaatagaagcatgcaatgatacacatggtaaagacaaatatattattaggtgggtccagttaattagtcttaatatcagtaacacaaagtggaagtggtggttaggaaattgagcttccatctgtaagacacttttgcatgccaaatggcagtgttccagttaacagttttagaagagagagtagaatatattacaagtcttcagctacacattatctcacaactataaggttgaaatacacaaaaatttaaaaaaggaatgaaggtgaaatgtgcagggcatttagcagtcctgctggttagcatataggatactcccatagggatatcccagctgagaaagctagttaaatgccctgctgttttcaaaatgctttcataccatcagttgaaaatattctataaatgtgaaaagtcatctatgggtgacattgcaactcaaagctgaaaggatttcatctgaattcatataatgggtgtctgtaataaaatcttgtatgt

SEQ ID NO: 52744 - DNA, 1335 bp, Homo sapiens
catttaatgatataaacaaggaatggactatttgaggaaaaatgtacaagcaagcctatgatacaaggaacaaaataggaaacaatgggtacgatatatgtggtaacaacaatatctattatcaaaactcaaaagaaatcaaactctttttggtggacccatttaaagtttggagaagattcatggtagtatatgataaggtgcatttatcaagatagcaagaggcaaatattttattccacgttctatcctaaccttgtcatcttgtcaaaatgcattactctttatgaatattagttcttcatctacaattggaatggcaacatttttctgcttatgccacagaactgtggtattacagttcttttcataaactttgactagttttcaaattgtcaagtctcattcaaatatatattgattataaatcatttttcagattttatgatctgttccagtaagcattttatattatactaagaaaaaacactttgatctaagatatttacagaacccacagacaaaaatagaaaataaaagtgtatataagaagctatacatcattgtgacttgaatatgataattaccaataaaaacttggtgataaaattagtaaatgatcataattcatgattttatgaaatacattatttttaaaaattaaaatgccaggatgtttgctgagagwgctctctatggacaatttgtcaattgtttacatgtccaggttccctagaattttgtcagctgttttcccaatagcaaataaaaattgttttagcagactttatattttcccaattgtatacagaatgggccaaattatatcttccttaatagaagcatgcaatgatacacatggtaaagacaaatatattattaggtgggtccagttaattagtcttaatatcagtaacacaaagtggaagtggtggttaggaaattgagcttccatctgtaagacacttttgcatgccaaatggcagtgttccagttaacagttttagaagagagagtagaatatattacaagtcttcagctacacattatctcacaactataaggttgaaatacacaaaaatttaaaaaaggaatgaaggtgaaatgtgcagggcatttagcagtcctgctggttagcatataggatactcccatagggatatcccagctgagaaagctagttaaatgccctgctgttttcaaaatgctttcataccatcagttgaaaatattctataaatgtgaaaagtcatctatgggtgacattgcaactcaaagctgaaaggatttcatctgaattcatataatgggtgtctgtaataaaatcttgtatgt

SEQ ID NO: 52745 - DNA, 563 bp, Homo sapiens
gtatccaaaaactagatccaaatatctgaaataataaggctgtttggaggattgttttcatctaattcatatagtataatatccatgattttctaaaataactttwttgtgtgaatatgtcatgccataatttttgtttttttttagtatgaatgccctcattcctcaaagtcaacctttgatataagtgtaaatagacttcatcagtgtgttcagggaaaagataagaaatataaaactgttaaaaatttgtatgcatatttaaaaaaaaatttgtacttcatcctttctcagacacagccccaaagccaagacaaataatatgatagaagatttcattctaaataaaaatcttctttttaaaatggtaacctgaagctgtataatagtatttgtacaataactaattcttatattgaaagtttagtgaggtatctaggcagcacttgccatgtttgcagtttattaagcagtttgaagatggttgaacattagatacaaaaataattgaagctcaatactgttaggtttagtaagaacataatgtgtcttctctttccttt

SEQ ID NO: 52746 - DNA, 563 bp, Homo sapiens
gtatccaaaaactagatccaaatatctgaaataataaggctgtttggaggattgttttcatctaattcatatagtataatatccatgattttctaaaataactttattgtgtgaatatgtcatgccataatttttgttttyttttagtatgaatgccctcattcctcaaagtcaacctttgatataagtgtaaatagacttcatcagtgtgttcagggaaaagataagaaatataaaactgttaaaaatttgtatgcatatttaaaaaaaaatttgtacttcatcctttctcagacacagccccaaagccaagacaaataatatgatagaagatttcattctaaataaaaatcttctttttaaaatggtaacctgaagctgtataatagtatttgtacaataactaattcttatattgaaagtttagtgaggtatctaggcagcacttgccatgtttgcagtttattaagcagtttgaagatggttgaacattagatacaaaaataattgaagctcaatactgttaggtttagtaagaacataatgtgtcttctctttccttt

SEQ ID NO: 52747 - DNA, 563 bp, Homo sapiens
gtatccaaaaactagatccaaatatctgaaataataaggctgtttggaggattgttttcatctaattcatatagtataatatccatgattttctaaaataactttattgtgtgaatatgtcatgccataatttttgtttttttttagtatgaatgccctcattcctcaaagtcaacctttgatataagtgtaaatagacttcatcagtgtgttcagggaaaagataagaaatataaaactgttaaaaatttgtatgcatatttaaaaaaaaatttgtacttcatcctttctcagacacagccccaaagccaagacaaataatatgatagaagatttcattctaaataaaaatcttctttttaaaatggtaacctgaarctgtataatagtatttgtacaataactaattcttatattgaaagtttagtgaggtatctaggcagcacttgccatgtttgcagtttattaagcagtttgaagatggttgaacattagatacaaaaataattgaagctcaatactgttaggtttagtaagaacataatgtgtcttctctttccttt

SEQ ID NO: 52748 - DNA, 508 bp, Homo sapiens
ccaaatgatacagaaatatataaaataatgaaaattgtgcacctctgggccacataatcccaaccctaccccagagattacattgttaacagtgtacacatgtatttctgtatacagatatggatatgcatggagatggggaaacagatacaggcttaagaatatgttcatgtctacaaccacagctctttcatctctactatgtttaacaaatacataagttatgttctgttatctrcctgtttctgtttaacaatatgctttacaagtttttacccacagatacgtatgtaaatgttttatttttttgaagggtcctttagtcatgcaaatatgtgaatgtatcactcattaatctggttgtgtattaaaaaccaactagatttcttacagtttctttgttattataaacaaatccacataaaccttttgcccacttgcctgattatttctttaggtccacatgatgcttttatgccatttcattccctttattgacctctgctga

SEQ ID NO: 52749 - DNA, 321 bp, Homo sapiens
ctgcaaacgtatatgtcaattaattacttgcgaatctagtattaatatatcattttttttccctaaagaaaagccttacataatgtaaaaaagcttttggrccttaacaaacagcctagtgaatcaaaatttaagtacaattctttattacttcatttgtgagtgaatcttaccaatctcattatctccctcttttctttctccccatatattgagactctaccacagactactctttttagttcaatggggtaatagctaaatgattaaaaatgaaataggaagactccacatgtcttcctagactatttttctgacaca

SEQ ID NO: 52750 - DNA, 841 bp, Homo sapiens
gaaagcaggatctcaaaatggtatttgaacatccacattcatagcagcattattcacaatagccaagaagggaaggtaacccaagtgtccattgatgggtgaatggataaaaaaaaaataatatatacatacaatggaatacgattcggccttaaagaggaatgaagctctgacacatgctataacatgaatgaaccttgaggacattaagctaagtgaaataaaccagtcacaaagagcaaatattataaaacttaatatgacgtgccaagagtagccaaatagagacagaaagtagaatggtggttgccagtggctgggatctggagaaaaagagagttattgtttaatgagaacagactttcagttgtgcaagatggaagagttctggagatggatggtggtgatggttgcacaatcatgtgactatacttaatgccaatgaaccatccacttcaagatgatcaagaaggtatattttatgttaccatgcataccatgtgtattttaccacaattacaaagaataataacttttaaaaattatataagctggagttgccattctggaaacagatcctgagcagatggaagttatcagtgcagcaaaactttcatatctcctgatatgtgataaagggagtcacatttgctcctttcttaagctagtaagttgaagggaagagtattccttccacatgytacactggtgggtaagtgggggattccaggtgagagtaaggggagcacaaagaagcacatgtagaataatcttgtttataacattaataacattaaattagcatgtagtatttattgagtctttgtgctaaacattttaa

SEQ ID NO: 52751 - DNA, 991 bp, Homo sapiens
atcaaatgatgcctgatttaccagcagtttagatatttgctagaaattgcttatctcatgcttcctagctcccagaggctgtgtttctaggacamgtccaatctggaggccacagatatgaccaagtagaaagagtataatcagtgctacgtataggaacaaaatgttttgtcttcattttgcccctcccaccaagtcagtgtgtaaacttgggcaactccctttttctctctgggccttatttctatcagagtttacagttgagggtcttgactgatagtaactattgttatgaaggctacagtttatagagcacttacatgctgggcactttacatgtatgattctgtttaattctcgtgatcacccagtgagaagtcctattttgacccccgttttgcagacaaggctcagagagagtaaatggcttatatgaggtcaccatgctagtgagtggtgaggaaccttttgctacctggcaggaccaggttagggcaggggtgggccctcggcaactctgagaattctttctggcaggcacagaggacatacggatcgatgagaggacagtcagccccttcctgcaattgtcagatgatcgaaagaccctgaccttcagcaccaagaagtcaaaggcctgtgcagatggcccggagcgcttcgaccactggcccaatgccctggctgccacctccttccagaatgggctccatgcctggatggtgaatgtccagaacagttgtgcctataaggtgggcgtggcttcaggccacctgccccgcaagggttctggcagtgactgccgtctgggccacaatgccttctcctgggtcttctctcgctatgatcaggagtttcgtttctcacacaatgggcagcacgagcccctggggctgctgcggggcccagcccagctgggtgtagtgctggacttgcaggttcaggagctgctcttctatgagccagcctccggcacagtgctctgtgccca

SEQ ID NO: 52752 - DNA, 640 bp, Homo sapiens
ccttgatgagtagtttctgtgggactcaaacatctcaaccacactggcctctatgatgtcttcatggcttaggtcatttgctaaggtcatgttttactgaatctgtagtacagcttcggtttgaaaggagccataatttttgtggtcattcatgggacagatcatcttccatacagcattcactgttaayaaatggactccctgccaagaccaggcactgttccacactgtccatgatatctcagactcaccaaatatgggcttctatatatcattagttcatcacaggtgttcaccagaagatatacaagcactaagccttgaaagtggcattcacacttcgatcaacaggctatgaaatagtccctcttagactatcagataaatcatctaaatttacaggcctggcctggggcattattatatggaacacagaacctttgaacaaaagggcaaaaaatataaatgagccatccttgaggcctgcttattgctgccttggccttcctgtttgttaggttacaacactgctctcaggtgagctcaggagcaggcttggggaggcctgggattttcagaatagtagacaagtaaacaccttaattttatgaaagtcatcctcagcatggcctcaagtgat

SEQ ID NO: 52753 - DNA, 640 bp, Homo sapiens
ccttgatgagtagtttctgtgggactcaaacatctcaaccacactggcctctatgatgtcttcatggcttaggtcatttgctaaggtcatgttttactgaatctgtagtacagcttcggtttgaaaggagccataatttttgtggtcattcatgggacagatcatcttccatacagcattcactgttaataaatggactccctgccaagaccaggcactgttccacactgtccatgatatctcagactcaccaaatatgggcttctatatatcattagttcatcacargtgttcaccagaagatatacaagcactaagccttgaaagtggcattcacacttcgatcaacaggctatgaaatagtccctcttagactatcagataaatcatctaaatttacaggcctggcctggggcattattatatggaacacagaacctttgaacaaaagggcaaaaaatataaatgagccatccttgaggcctgcttattgctgccttggccttcctgtttgttaggttacaacactgctctcaggtgagctcaggagcaggcttggggaggcctgggattttcagaatagtagacaagtaaacaccttaattttatgaaagtcatcctcagcatggcctcaagtgat

SEQ ID NO: 52754 - DNA, 593 bp, Homo sapiens
tgaatgaaggactccaggaagtacacacgtggtcacttgctatttcccccaacatgggagacatagtcctgcctcagggcctttgccctggctgtgccctaggcctggagctctttcctcatctcgatgctcagctcactccttgatttccttcaggtctatacttgagcatcacttcccagacaactttacaaaaaggatcctctcccaaagatccactttactgtgtttttcttttccttacagacctgatcaccactgatggagtgtgtattgttccttgccagtctttctcaacacagcctactttgcagttttgttcattactgtgtctccagtgtctgtcccttgaaagaagctcaasacattttgaatggataaatgaacagaagagaatacctgtgtgtgaatcttgttcctgccctgtgccagctgtgtgaccttaggtgaattattgccccctctgagcttcagtttctttatttcaaaaccaccaagtggctgagaaaataaacccaggcaagagaagaaaacacctgccctgccaggggagctgatgaatatctccttcttccttctttctttctcccatt

SEQ ID NO: 52755 - DNA, 603 bp, Homo sapiens
agcatggacagtatagtaagaccctgtatctaataacttttttatttaaaaaaaaaaacacgatttcaagaatatcgaaactctccattttgttgaaacagtaatcacggggcagagagttttctaaataaagcatatgtggtctataaaggccagacaaaaggtggaagtgtcttaattttaaaaaaggaaaggtgaagagaagaactaagatttactgagtacctatcatgtgccaggcaccttacaaccttacaaaagctatttcatgtgttcctcccaacatacagcaagttaagccagttgtagtttaattacttgcccaacattacacagtgaagaaactggggttcaatctcaggcttaaaaccaaagcattttattaatgtcaatacaaactatctaaaacttggaaattagacagttgggcaggatggggagggggtgggagatgaaggggtgccatatcctctcaatgtaatatggtagcattgttttacaagcctcccaaggattatttaactctcyagaagagtgtatttgtgtttaattttgccatctgctgtctgattggagtccgcacactgtgaagttacatgttga

SEQ ID NO: 52756 - DNA, 603 bp, Homo sapiens
agcatggacagtatagtaagaccctgtatctaataacttttttatttaaaaaaaaaaacacgatttcaagaatatcgaaactctccattttgttgaaacagtaatcacggggcagagagttttctaaataaagcatatgtggtctataaaggccagacaaaaggtggaagtgtcttaattttaaaaaaggaaaggtgaagagaagaactaagatttactgagtacctatcatgtgccaggcaccttacaaccttacaaaagctatttcatgtgttcctcccaacatacagcaagttaagccagttgtagtttaattacttgcccaacattacacagtgaagaaactggggttcaatctcaggcttaaaaccaaagcattttattaatgtcaatacaaactatctaaaacttggaaattagacagttgggcaggatggggagggggtgggagatgaaggggtgccatatcctctcaatgtaatatggtagcattgttttacaagcctcccaaggattatttaactctctagaagagtgtayttgtgtttaattttgccatctgctgtctgattggagtccgcacactgtgaagttacatgttga

SEQ ID NO: 52757 - DNA, 542 bp, Homo sapiens
ctgaactcactgaatgcttatattctttcatcacatatagagcttgcgttagagtcatttgtgtgtatgtgttatctcatgtattagactgtaagtttctttaagatagaggcttttgtattcmtttttgtattccccatagaatcctagtgcctgacacatagtagggggctcaataaatgtttgtagaattgattaaagtgtgaacactaaaaagcccgagtctgctgtggatatgtttatttggatgtataattggcagtttccccatggatcccttcaagagtgtgttgataccttagcagctctttgaagttatggtgcatttaattaaatgtgttatctttttagagatcttgtaccaagaaaatagattgcatattataatgtattcattgttcattccaaaaaaagacctatgcatctgtttaagtattcagttaacaaagataccagagatgagaaataacaggtgttccaagtaattaccaattctagtcaaccaaaaattagatgttttaaaatcttctcttttctatttc

SEQ ID NO: 52758 - DNA, 577 bp, Homo sapiens
gaaaaaaataaatcaaatgcttcatattttgctggcagcatattggttaactgaaaacaatttctttatgcctttacagaaaagagagcaaactcctgaatttaaggtgaactaacagtaatatttctctctctctttctttctctctccctctttctctctctctctctctctctctcgctctcactctcatttttctgtgtatttgaataaaagtaataaattctctcacttgcttaaaaactctggcccaatgcctttgaaaaaagtctctgaaatcttagtttgaactgaatctgagttaactgtcaaagatttctccctgaagttgtgctctcttcgaaatttagtttcccttggacacagtatttgcaaccaaagcaatctctagaatggaagaccagaaactgsccagcctgcgtctgacctttctggcagatgtttttaaatggaatggattgcctttcccagcccgaaatgcgtaatctttggttagggttgttttccatgcaaatacttagacagactgtggtttgtgctgctgggcgttggtaatgggatatgcacagagctcagg

SEQ ID NO: 52759 - DNA, 525 bp, Homo sapiens
ttaggatttttataccagtgaactaagctgtatttaagtaccatgggatatgatggttatgttccaaaattgaatgattgtctctagagcaacttataatctactgggaagatagaaaaaccaccaaaaactagctagttatttgatttttaaaagtcaatgatatatatacagccttcattcacctattgactcaatcgacaaatatttgttgagtgtctcttatgtaccccacactccgttagttacaagagacacaaaacaaagttgactgtagtcctgtcaaaagcttagtttatctgggtaaacagacatttaaaaaggaactgaaataactgtaggaagtactaygccagaggaaataccaggtgctgtgacattaattaataacttgcaggtatactaatacgtagaatagattacttgaatgattaaaatccttgaatcaagatgaagctaatccaggaagatgtatgaaatgttaagttttaaatagtgttttgaaggaagggagaggtgaatgac

SEQ ID NO: 52760 - DNA, 454 bp, Homo sapiens
ctcaattaatcacaccacactttggccttccaaggtcggggtactacaggtgtcagccactgagccaggcttaatggcaatgtatttttaagctatctwacactaagcaactttagggacttaaagtacgaattgaattgttcgaggtctaggggaataataaaatgaaaaactcaaagatatacctaaacctttaatttcatcatcatacaaaatgaattatctaccttaaaagactgatgtaaggatcaaatgagatatttgtgtaaaaagcgaatggggcagggtgcagtggctcatgcctttgaataatcccacactttgggaggccaaggcaggtggatcgcttgagccgaggagttcaagaccagcctgggcaacatagtgaaaccttgtctctacaaaaaaacacaaaaaaattagccgggcatggtggcttgcacctctggtccca

SEQ ID NO: 52761 - DNA, 533 bp, Homo sapiens
ttaggcaaaaataactgtcagggaatagtcattgtcaagagcagtttgtattgcaacccacaaagtaagttttttttttaactttttatagtatattctggcaatgtagaaattagttgagatccaaatcttacaaaccttttgaagtttatgtttatgtaraaaagttaaagaaaataaaaataactggcaaaaatgaaaaataaatccattctaaaagtgtttctcatatagcattctgtacataagctcaagtgacaaacttttatttgcagttttcaactcaatgcaaatgatatgaaaatgcaaaactggcacttattggcattttgcttttcttttaaaagctattaacacattagcatatcttcatatttgatattatgcatatagagcacttattttaactagcagtattctagtagttttatttgcaggtgtacttgcagcccatattattataaatctggagttttattaaatattccaagttggtggtggattccttggtcctttgggttttgaaaaacggt

SEQ ID NO: 52762 - DNA, 499 bp, Homo sapiens
gtctgtagtcccagctgcttgggaggctgaggcagaagaatcacttgaacctgggagatggaggttgcagtgagctgagatagcgccactgcactccagcctgagcgacaaagtragactccatctcaaaaaaataataataataataagaagaagaagtttgaaatgtgtgattagaaccttgctattcaaagtgtggtgcctgtggccgagcatggtggctcacatctgtaatctgagaactttgggaggctgatgtgggaggatcacttgaggccaggggttcaacactagccttggcaacatggctagagcctgtctctacaaaaaaataaaaaattagccgggcatagtagcacatgcctgtggtcccagcttcttgagcagctgaggtgggaggatccttgagcccaggaagtcaaggctgtagtgagccatgaaggcaccactgcaccccagcctggacaatagagcaagaccctgtctcaaaacaaaaaaa

SEQ ID NO: 52763 - DNA, 499 bp, Homo sapiens
gtctgtagtcccagctgcttgggaggctgaggcagaagaatcacttgaacctgggagatggaggttgcagtgagctgagatagcgccactgcactccagcctgagcgacaaagtgagactccatctcaaaaaaataataataataataakaagaagaagtttgaaatgtgtgattagaaccttgctattcaaagtgtggtgcctgtggccgagcatggtggctcacatctgtaatctgagaactttgggaggctgatgtgggaggatcacttgaggccaggggttcaacactagccttggcaacatggctagagcctgtctctacaaaaaaataaaaaattagccgggcatagtagcacatgcctgtggtcccagcttcttgagcagctgaggtgggaggatccttgagcccaggaagtcaaggctgtagtgagccatgaaggcaccactgcaccccagcctggacaatagagcaagaccctgtctcaaaacaaaaaaa

SEQ ID NO: 52764 - DNA, 588 bp, Homo sapiens
gggcccagcattttgtgtgttacgaagccctccagttgattctaatgtacactaatgtttgagaatcaccgctctaagggttccagctgkgtttctggggtgttcagtggggtccctatgcgtggcaggttctgatctctaatcgcagtctccttagcattttgaaacttccaaaaactttactatgcttttcagaagcttcttgcttttttcagaaactttctactttgcttctaccctgtacaagttcagaatttggtatatacttagagggaaaaatcagctgtgtatcaggctctattttcaaacttgcctttttcagttgagttctaaatctttgagtctacaatttttgtcttagcagcttgtgagactgcaagaagccttgcctgcccccagcagcagccttcttgtgtccattgcccatacttctaatttcttgcgttccaccaagaatcatcaaataatctaagggaaaaagcaatttcagaatgtcattttacctctaaatttcctccccttccggaatctttggaccctcaagccatagttttcttagaagtttccctgtaacactaattcaacagg

SEQ ID NO: 52765 - DNA, 588 bp, Homo sapiens
gggcccagcattttgtgtgttacgaagccctccagttgattctaatgtacactaatgtttgagaatcaccgctctaagggttccagctgggtttctggggtgttcagtggggtccctatgcgtggcaggttctgatctctaatcgcagtctccttagcattttgaaacttccaaaaactttactatgcttttcagaagcttcttgcttttttcagaaactttctactttgcttctaccctgtacaagttcagaatttggtatatacttagagggaaaaatcagctgtgtatcaggctctattttcaaacttgcctttttcagttgagttctaaatctttgagtctacaatttttgtcttagcagcttgtgagactgcaagaagccttgcctgcccccagcagcagccttcttgtgtccattgcccatacttctaatttcttgcgttccaccaagaatcwtcaaataatctaagggaaaaagcaatttcagaatgtcattttacctctaaatttcctccccttccggaatctttggaccctcaagccatagttttcttagaagtttccctgtaacactaattcaacagg

SEQ ID NO: 52766 - DNA, 588 bp, Homo sapiens
gggcccagcattttgtgtgttacgaagccctccagttgattctaatgtacactaatgtttgagaatcaccgctctaagggttccagctgggtttctggggtgttcagtggggtccctatgcgtggcaggttctgatctctaatcgcagtctccttagcattttgaaacttccaaaaactttactatgcttttcagaagcttcttgcttttttcagaaactttctactttgcttctaccctgtacaagttcagaatttggtatatacttagagggaaaaatcagctgtgtatcaggctctattttcaaacttgcctttttcagttgagttctaaatctttgagtctacaatttttgtcttagcagcttgtgagactgcaagaagccttgcctgcccccagcagcagccttcttgtgtccattgcccatacttctaatttcttgcgttccaccaagaatcatcaaataatctaagggaaaaagcaatttcagaatgtcattttacctctaaatttcctccccttccggaatctttggaccctcaagccatagttttcttagaagtttccctrtaacactaattcaacagg

SEQ ID NO: 52767 - DNA, 601 bp, Homo sapiens
  misc_feature (1)...(601): n = A,T,C or G
gccctattagtcaaaaaataaaaaacaatttttttattaaggtattgtytggatttgggtagaagattattttccccttattaacttgcttcaaaaaatatttcagtttcatttcttttcaatgtctgacttaccatnnnnnnnnnnnnnnnnnnnnnnnnnnnnnnnnnnnnnnnnnnnnnnnnnnnnnnnnnnnnnnnnnnnnnnnnnnnnnnnnnnnnnnnnnnnnnnnnnnnngtaatcaaaaaattaaaaataggcccagacagtcagtcttaaaataaacttagtaccaaaaaaaaagtaaaagcttatcaactccaaagaagctattatcagtgggtaaagagcctatcactagccattgctgctgtttcctatgccatgtgatcccacattaaatcctaaaagcattagaaaaaacaaaagagaaacaagatgaccaccacccacgccactatagtagcaaagcagtgcattatcaacccagaagaatttcttcatttctgacttttggaaatttaataaattcattttatacatgagaaagttactgttttatttgactgttaccgattccaaggtgtaaactctccaccca

SEQ ID NO: 52768 - DNA, 887 bp, Homo sapiens
caacccatatcctaggcttgtacctcgataaattatcccctttttgactctgttgtacctcaaacaatcagtatattaacacgtgacctcctcaagaacaaaaactagatggtactatttaatacttcttttggggtcccacccagtcctaacagcaatgatgctgacattggctacctctctgaccttgtccctacatctcccaaacccccatgcagccacattggcctttatgcagtccctcacatgtgccaaatatgcttctaccacagggcgctttcacttgctgttccctctgcttggagcattccactcacttccatctgtaacagtcatttcttctctgcttttcctgacgctccagcctaaaatcacaccaccctccagtactttccatccttttccaacctttattttctgcccagccctttttaccacctcacatgatatatattcacttatgtgtttattctgttgacccttaaacaataaggcacttgaaggcaggggttttattttgatcttcctgtctccccagcacctgagacagcagctagtgcacagtwggggctcaataaatacttgctgaatgaataaataagcaagcatgtagaacaaattgtgagctaaacacaagtgtgtgcatcataaggaaactggcttggttagatggaagtagcaaatgatggttggttataaagttaaaatttaacacagcacgcgattggagacactattggagtttgtttgtatggggtcagctgagatgcggagtagcaatctaggaaggcaatgaagaaggattcatgggaaaattgaggctggttgagtctgagacactccctcaagaaaggcttagtacgaagatcccaatcatgaatcctgca

SEQ ID NO: 52769 - DNA, 628 bp, Homo sapiens
caagctctcatcactgaartgttaaacaacaggcattgaagataccagaaagacaccacacaatactaaacagattgaagtggatccgattatttccttatcattataaacatccaaatccaaattcagttccagctcccctgcatattttccgaattaatcatgtctcccaaatgatgaaaatattatgggttttactttttgtcagtttctgctctccttttgtcttctccagcaacattctcctttctcatgattttcccatttttccttcactactacttcttaattgtttaagatgtttcatttcatttgaaatgactttggagcatcaattttacttcatttgttcacacagtgttagcagaaagatacagaagaaacaaaaattacaggagtctcctaggaccgggacattgtttctgcccactctcctgggcagaaaagaagacacagctcctgtgattgcctggtcgtaacttgtgcccaaaaagcaaaaagagtaaacattaaaatgacaaattgggaaaagttctgtatagagctctattagctaaattgtttattaatctatggagttttaaccatttgggtggtaaaactaatatccttaagaaaaatgtgagta

SEQ ID NO: 52770 - DNA, 628 bp, Homo sapiens
caagctctcatcactgaagtgttaaacaacaggcattgaagataccagaaagacaccacacaatactaaacagattgaagtggatccgattatttccttatcattataaacatccaaatccaaattcagttccagctcccctgcatattttccgaattaatcatgtctcccaaatgatgaaaatattatgggttttactttttgtcagtttctgctctccttttgtcttctccagcaacattctcctttctcatgattttcccatttttccttcactactacttcttaattgtttaagatgtttcatttmatttgaaatgactttggagcatcaattttacttcatttgttcacacagtgttagcagaaagatacagaagaaacaaaaattacaggagtctcctaggaccgggacattgtttctgcccactctcctgggcagaaaagaagacacagctcctgtgattgcctggtcgtaacttgtgcccaaaaagcaaaaagagtaaacattaaaatgacaaattgggaaaagttctgtatagagctctattagctaaattgtttattaatctatggagttttaaccatttgggtggtaaaactaatatccttaagaaaaatgtgagta

SEQ ID NO: 52771 - DNA, 672 bp, Homo sapiens
aaagagaacagttttccagttagtagcataggttaataggagctatcacctgctgttggtttgaatgtgatgggcacagctgagggaaaagggaccccatgcccccaatattgagtgccttctccagatattgtcacaccagatctattaaacacttcgaggtgttctttagccctaaattagatgaaacattctagaaagtggcaaaattgatgaatttcagatttttctctaaagcttgagagctttacatatcctttataagcctgcttgtgaaagatattgtttttaatacatgctttaatgttttcagggcttgtcatcagaatattgatacaattttttttaatgcagtaggacccaaactagaaatgaattacaactattgggaaagaaaaaactattgttattattgcagatgatataatggtccaagtagaaagcctgggaatctcatcttagaattaatatgaaattagcaaaaacctccagatatccaaaagttaatagacaaaggtagctttaagatataattgtagtatatcaccatttgttgtsgcaacaagctttgtcacatttatagacaaactgagcatgtgtgcagaaactatacaaagataacagaagacctgtatagatggaaaaatacactgctcctagctgataaaatga

SEQ ID NO: 52772 - DNA, 672 bp, Homo sapiens
aaagagaacagttttccagttagtagcataggttaataggagctatcacctgctgttggtttgaatgtgatgggcacagctgagggaaaagggaccccatgcccccaatattgagtgccttctccagatattgtcacaccagatctattaaacacttcgaggtgttctttagccctaaattagatgaaacattctagaaagtggcaaaattgatgaatttcagatttttctctaaagcttgagagctttacatatcctttataagcctgcttgtgaaagatattgtttttaatacatgctttaatgttttcagggcttgtcatcagaatattgatacaattttttttaatgcagtaggacccaaactagaaatgaattacaactattgggaaagaaaaaactattgttattattgcagatgatataatggtccaagtagaaagcctgggaatctcatcttagaattaatatgaaattagcaaaaacctccagatatccaaaagttaatagacaaaggtagctttaagatataattgtagtatatcaccatttgttgtggcaacaagctttgtcacatttatagacaractgagcatgtgtgcagaaactatacaaagataacagaagacctgtatagatggaaaaatacactgctcctagctgataaaatga

SEQ ID NO: 52773 - DNA, 1189 bp, Homo sapiens
gttctgaaatttggtaaatttattataaattcctggaactggaagaatcttagatatctacttcaacttcttcattttacaaatgagaaaattaagaaccaggggagggatttgccaaggtctcatagttaattaatggcaaagccaagattagaatcaatattccttgactccttcctagagcagtgctcgttctagcacactacaaagcctttcatagttacagtaaattctgaacttatgaatggattgtactttaaatattcatttatgaatcatttgtggctagaactgggaattcattttcccctggaaataattcttaaaatttgactgagtttctaatataacacccacataaaggtcctgtaaggaactaatagtttttaattcaacagcctgcacaatgaggaagaattaaagttaaagggaaggctagttttatgtgaaagtccttacacctcatagatgaagcttcctgaacacatgttactaatgattcttgcagttgaaaaakgcaggatgactttctaaccaggtattactgtgattctagaacactttcccacctttaatatccaacttcgtaaggattagatttggggatatttttcctttgtacttagaatatctgccagatgtcttgtagttgccagccatcctcagctgcgtgcctgcctgactccaaaacttttctgtaggagctggcaagacttgcattaaatatgacagtttcaacatacttgttggcttaagtccagccaacactgactacccagggtaactaaatgttcttattatcttaaataatctaggcctaccccagatatggcagcagtgtgactatctccctaaactcataggaagtatataaaagagatgaaagacctaagaaaaatctgggtattataagggaaatagatgctgagtgatcaatcaataaatgtctgctacagcaagagagaatgttccttgttttataattttcttctagacacagtgtcatttccagattttcacggcagtctttcctcaacacaaaattcacaaactaccttttcctctataaatctccttctaccagtcattttcataccctgagtttgtcagatttcccatgtatacaatatagttacaaagcagccagccaaatcatttttctgctttatgaatgaacataaacataatg

SEQ ID NO: 52774 - DNA, 517 bp, Homo sapiens
agtccattttcatgctgctgataaagacatmcccaagtctgggtaatttataaagaaaaagaggtttagtggactcacaatttcacgtggctatgggggcctcaaaatcatggcagaaggcaaaaggcacgtcttacatagtggtaggtaagagaagaaacgagaaccaagcgaaaggagtttctaaagctatcagatcctgtgagacttattcactaccatgagaacagcatggggtaaaccacccccaatcattcaattatctcccatttttatatcagcagctcactcaaataatgcgtaatttaggcttggacaacaatcttacgatgtagacatcatcatatatagagactgaatgtttcaaagccaacatctattttcatccctgtgcctagcttttctgttttttttttaatcggtacattcttatatcttgattttaaaatccattgtccagtttttctgtgtacgcttatatttatccataacatgaaccaacccagatgtggaaaga

SEQ ID NO: 52775 - DNA, 517 bp, Homo sapiens
agtccattttcatgctgctgataaagacatccccaagtctgggtaatttataaagaaaaagaggtttagtggactcacaatttcacgtggctatgggggcctcaaaatcatggcagaaggcaaaaggcacgtcttacatagtggtaggtaagagaagaaacgagaaccaagcgaaaggagtttctaaagctatcagatcctgtgagacttattcactaccatgagaacagcatggggtaaaccacccccaatcattcaattatctcccatttttatatcagcagctcactcaaataatgcgtaatttagkcttggacaacaatcttacgatgtagacatcatcatatatagagactgaatgtttcaaagccaacatctattttcatccctgtgcctagcttttctgttttttttttaatcggtacattcttatatcttgattttaaaatccattgtccagtttttctgtgtacgcttatatttatccataacatgaaccaacccagatgtggaaaga

SEQ ID NO: 52776 - DNA, 549 bp, Homo sapiens
accctgtgttctcctgtgccaagtgtgcacgtcccagctgtgaatttaaacccaatctcattttaagtttccattgtactcagtatgatcctcatttttcactgcattgccctcgtcagggccatggtctagtctaggacactaccactgataaaccaaaagctgtaattgaacttataactacacatacttttcctcccgccacaaaagtattcctataaatgagagcgaatagactttcatgctttgaagatggtgggtratcttaaatagcaataacagcatgcccatgatcaatgtcaaatagaaacactgtgtaactgcctcacatctgactctcaaacaggtacaagtaattgtactcatacgttagcacatctttgaaaagcacttttagatggtggagatggagaccacctggcaagggaagcccatatcctgaaattaatcaaatacagctagactgcaaatatatgctttctaataattgtaaacacatgtactctccttgtttttaggtgtattttttaaaaagaaaggtctttcaat

SEQ ID NO: 52777 - DNA, 617 bp, Homo sapiens
acatgtggtaggcactatgcagatatttgatggaatgaatgtaaaagcaaaatgttgattgtacagctactaagaatgaaagatcacctgactactcgggaacacaatctgttgctgcagtggtgacctggttggctcagacatcacaaagcctgaaactatagaaataacaatcgaaaaagtctaggagcctcaaaatgccaacaaggaaattcaacatgtttatgttttaaagcataaaccttcctagatgcgagagatgtaaataaagggtaaccctgaaccatgttaggtatcgcacagaggggactgaaatgaaagacttgggcccactggtgttaagagtctggaaaacacaagaacggaacaccttggtaacccggcgacaatatccccaggaaacagctasctccctcccctagggctgcgggacaagaaagggagagggggcatatccaatctggatggagaagaaggtcgggtgggagagtgagagtgcgaggaaaggggagagaggacagaagctgggcaagtcctgaggtcagcccggtccgacctcacccaaacagaagtccaggagagagcgctagtgagcactgtgcctccaccccaggcag

SEQ ID NO: 52778 - DNA, 617 bp, Homo sapiens
acatgtggtaggcactatgcagatatttgatggaatgaatgtaaaagcaaaatgttgattgtacagctactaagaatgaaagatcacctgactactcgggaacacaatctgttgctgcagtggtgacctggttggctcagacatcacaaagcctgaaactatagaaataacaatcgaaaaagtctaggagcctcaaaatgccaacaaggaaattcaacatgtttatgttttaaagcataaaccttcctagatgcgagagatgtaaataaagggtaaccctgaaccatgttaggtatcgcacagaggggactgaaatgaaagacttgggcccactggtgttaagagtctggaaaacacaagaacggaacaccttggtaacccggcgacaatatccccaggaaacagctacctccctcccctagggctgcgggacaagaaagggagagggggcatatccaatctggatggagaagaaggtcgggtgggagagtgagagtgcgaggaaaggggmgagaggacagaagctgggcaagtcctgaggtcagcccggtccgacctcacccaaacagaagtccaggagagagcgctagtgagcactgtgcctccaccccaggcag

SEQ ID NO: 52779 - DNA, 617 bp, Homo sapiens
acatgtggtaggcactatgcagatatttgatggaatgaatgtaaaagcaaaatgttgattgtacagctactaagaatgaaagatcacctgactactcgggaacacaatctgttgctgcagtggtgacctggttggctcagacatcacaaagcctgaaactatagaaataacaatcgaaaaagtctaggagcctcaaaatgccaacaaggaaattcaacatgtttatgttttaaagcataaaccttcctagatgcgagagatgtaaataaagggtaaccctgaaccatgttaggtatcgcacagaggggactgaaatgaaagacttgggcccactggtgttaagagtctggaaaacacaagaacggaacaccttggtaacccggcgacaatatccccaggaaacagctacctccctcccctagggctgcgggacaagaaagggagagggggcatatccaatctggatggagaagaaggtcgggtgggagagtgagagtgcgaggaaaggggagagaggacagaagctgggcaagtcctgaggtcagcccggtccgacctcacccaaacagaagtccaggagagwgcgctagtgagcactgtgcctccaccccaggcag

SEQ ID NO: 52780 - DNA, 612 bp, Homo sapiens
taaaggagagataacaccaagattgaaaacatattgctcgatttggaagataaaagaaagttggggattttaggagaacagctttaggaaaatggtagggatagatgttaggacataaaggattaagaattgggtcagtggtctatgagttgacatttattaacaaccaccattgggccatattcaaacaatttcactatctaaaggaaaaactgtacagggaatttaaataaatatacaaattagtccaaaagaaagtgaaattaaaaattccacagcaaagatttttggcacacactctctacgacttagctggtttgggatgctgcagtgtctttcacattctcttccatttcttgactttgtccattcaacgaaagcttcctcaaaacttatctgtgagccattaggtgggacatgtgatgccaatttttggtgtaatctcacattgaaaataattttaaaattataaaatccaggaagttcatctaactctcataagaccctcatatttaaccgcccacccctctcttgctaccattctgagactttcgcagctgctcttctctctaaaagsaagagtgcaagaagttcactttcaagagttctcca

SEQ ID NO: 52781 - DNA, 559 bp, Homo sapiens
tatcctcaacgaggtccaaagtatccagtttttttctttttttttttttttgagacagggaccttgctttctcacccaggctagagtgcagtggcacaattatggctcacaagagccccaacctcctgggcttaagcgatcctcctgtctcagcctccctagtaactgggacyacaggtgtgcaccagcaggagctgattgtgtgtgtgtgtgtgtgtgtgtgtgtgtgtgtgtgtgtgtagaggtagggtctcactatgttctccaggctggtctcaaactcctgggttcaaacaatcctccctccttggcttccccaagtgctgggattacaggcctgagccacttcacccaactacagtatccagtgtctaagtttgttcttaaatgagctatgtgctggagggaaaaagacgagctttgtctactctaaaccagatcgtagaggtcttttgtttgtcgcccttggggtttttcaccaagatgccctgggcctttgggatgagccggacgggcctttcccggacaggcggaggaagaaagttcaaggtgagcagtg

SEQ ID NO: 52782 - DNA, 577 bp, Homo sapiens
tgtctccatttaaatttctaatttgacaaatatcagtagaatccattcaaaggggtacttggaccaaaaaattttacaatttctaggttatttttttcttacattctttcaaaagcccagtgctttaaattttaatgaccacagggagaaggaactgacacatatttgtgtatgttataatcagaaaaaaatatgtacagttaggtgatacaggtgacagaattgtcatttttttgaaactttctttttgtttctgattatttctgctgtgcartgtactttttcagccagtttttgttataagcctgttctcataaaaataaggtcaggaagtgacaccaaaacaactcagaagcctgtggtggtttctaactttagagctgcctgttacagatagcttcatgctaaacctttgcttgatttgagcagaacaaggcagtcacgatacttctgaacaagtgatcagtgctgtgagcactaaaagctgaacctcaaaaacagctcaagatccatggacagagcctcaggagacacatttctatggcactcgcttactgactagcattctccttttcta

SEQ ID NO: 52783 - DNA, 543 bp, Homo sapiens
tggaatttcatccagtagctggagtacctgtcctatgtggtagaggctgtccagccatgcaccccctctctggatttggtacccagagtcaagatccccaggagtaggtgtgagtgctgactcatgttgcactgaacatcccatcatcaaatcccagctccatctgctcatcctggtccaaagtggacgakaatcccattgttaagacatgtctcattaagacttctctaagatggagccagcaaacagcccagtagcatcgaggctgctgcctgggaaagagtcccctcctctcccctgttcattaatgattatgggaggttttattccccccaacaaaagtgttaattagacatcatcggaacagggatattacacaaatgaattaaactcaaaccaatcaacaagctggctctgtgcttcaggtcccccgaacgaaaagggaattgaaggctgtaatgggaaacaaacggtaagatgtctttcctaatatcaaataataactaggaaggctgcctttgcttctagaacttgtcttcttat

SEQ ID NO: 52784 - DNA, 535 bp, Homo sapiens
tggaaaagacacctctttattccagagcattgatcattttcagaacacaaggttgacatttcttaaacctggccattatggcacaaggaaataggctggcatcggatggcaaggcagagttggcccggcctcgtgggactggcacccctagttgtacctgccctgtcctctcccctcttggctgtgcctttcagagggcactcctggccacacaggcagggcgcaccccagctgcgggtctccgataccagatgctggaatgtgtttttccagcagcagctgtggcagcggtggcaggagcagcatggggcatgtggaactcactcccttcctggctccttctcaagcttctccgctggctctcctgcagaacttttgcttaagaggacaggctgacaatctgctggctgctttgctggatgccattgtgttttgacttgcttttgatggcacagactttattggctctgggtgtaaagtttctgtgcaaacctttgctacrgtgcgtgccgagtcagtgagttcaatgtccatc

SEQ ID NO: 52785 - DNA, 532 bp, Homo sapiens
gggtccactattcttctcttaattggttctaaactcagaaaaggaagagagagctgctctttcacccctttatattagtagggcaaaggctaagttgctgtaacagtggcccaagaggtcagtggcttaaataagacagaagtgtgtttgcctcacacacagcagaggtgagcagtctagactggcggcaggttccacttcacacactctttggggacccaggttctccatctcaggtcctggcatccccagtgttagcctcacaggcatgacgaagtctgggtcacactgcccatccatcacagcccacaggaagggagatgagaggatagaggagcaagtgcccwgtgtcgtaaggccatggcctagaggtggtacgtgtcacttccacttcccttcaaacccagtactacggccaaagctgcctgtgaggacaaaggacatctctagctcggtggctccacccgcccagccactccacctctcatttcttcggatgattcactgattccagcattcaccgtgtcctttc

SEQ ID NO: 52786 - DNA, 566 bp, Homo sapiens
ggagtccaaagatcaagccacaagtgctacaaagtaaaaggtagcattaccttgcatttggagacactctcatcctgccgtgaatcagaaagaaggtaaggagggagggaaggaaggaagggaagtgaggaacaaaagaagggaggaaagaaggaaggaaggagagggagggagggaggaaaggcaggcaggcaggcaggcaggaaggaaggagagggaggattttatttctctgttcccactggcctcttcttcagggcagactttgctgcagccttctccagctcaggcactgacactggcttagctgggccctaacacttggctgctgggtgccccagaggatttagaaggcacagggccctctccctcctctaactcgccctcaggctatgggtccagagagcattaccaccaaggaggaaaaagagaaatttggggaacscgagagaccgagatcgctgaaatctgagaccagaatgctatgacctctgcttgtttgttgtaagcgcctgagcacaggctctccacttgctgtgaaaggccatatttatctcctcagaagg

SEQ ID NO: 52787 - DNA, 602 bp, Homo sapiens
aaaatgcattattgatataattttgatggaatatggaaatacaattgagttttttatatgaatttgccttcagcaacttgttaagttcatttattaattttaaagggtggctgtcaacatccttgtttttatttttgtaattacataatctgcaaatagcaacactttgtttcttccttttcctttcaaagatttcccattttaatactttttttggataggatacagaatatttcatagataatatttattaagaaagattgtttttattcactataaattggtttctattcaaatagtgttgacatttataaaacgatttttctccatctactgtgataatcatataatttgtatttattgtgttaatattgtaaattatattaattttcaattactaagacttttctgaaataagcttaatgagattgaaaaatagtatatcctcattttactatatgtcaattagatatcaattttacattaataactcattgaagatttttggattcatgtktaagagagaaattggctaagacttttcattttttttttttgttattttcctttcaggtttccgtatcaaagttttgctagggcct

SEQ ID NO: 52788 - DNA, 600 bp, Homo sapiens
tgtcttatttttcaaattgtgagtcagaatcttgagagcagtaactatggcccacactgatgtggattctcttatagtcctagcatagtacctggtacctagagcggttattcaataaattatttttgagttgagtggatcgagatgggagaatttggcagtaacaaataaagatttagtactatataagattatatggctgtaatttaggaaactaatacaattgagccactattctcaatgttttagcaagtttgcttcagtttactttcatcattattcagtattattcagaaacttaagagatacgttgcttcccactataatgaaactttttttwccatagaattgaagccaaaatatgtgaaatggatactggagggccacagtttattcatcacaagtttgggtctaaatatcagcaattttttgcataccagcttctctaactgaaggtaattatgattcgatttttataacataaggaattatatctaaagctgttctccttgaagaaaatttaatctacagctgtgaagagtccatgtggagtagacactcttcgtttggctttgaaaagtcataaaatattgttgaaca

SEQ ID NO: 52789 - DNA, 544 bp, Homo sapiens
ttttagatggagtctcgccctgttgcccaggctggagtgcagtggcgcgatctcggctcacggcaacctttgcctcccgggttcaaacaattctcctgcctcagcctgccgagtagctgggattacaggcatgcgccaccacgcccagctaattttgtatttttagtagagacggagtttcaccatgttggccaggcttgtctygaacgcctgacctcgtgatctgcccgcatcggcctcccaaagtgctgtgattacaggcgtgagccaccacaccctgcctaaacctctttttctttataaattaccagtctcaggtatgtctttattagcagtgtgagaacagactaatacccccctcatgcaaagatgagaaccccaagaaggggactcacccatggagctaagttaatagcaaaggcaagataagaactcagatcttgggctgcagccacaggcccctccctttataccactctgactcctggaatcagtaagaaaatctccgtctcaccaagaagcctcccaaacagaaacatcatac

SEQ ID NO: 52790 - DNA, 544 bp, Homo sapiens
ttttagatggagtctcgccctgttgcccaggctggagtgcagtggcgcgatctcggctcacggcaacctttgcctcccgggttcaaacaattctcctgcctcagcctgccgagtagctgggattacaggcatgcgccaccacgcccagctaattttgtatttttagtagagacggagtttcaccatgttggccaggcttgtcttgaacgcctgacctcgtgatcygcccgcatcggcctcccaaagtgctgtgattacaggcgtgagccaccacaccctgcctaaacctctttttctttataaattaccagtctcaggtatgtctttattagcagtgtgagaacagactaatacccccctcatgcaaagatgagaaccccaagaaggggactcacccatggagctaagttaatagcaaaggcaagataagaactcagatcttgggctgcagccacaggcccctccctttataccactctgactcctggaatcagtaagaaaatctccgtctcaccaagaagcctcccaaacagaaacatcatac

SEQ ID NO: 52791 - DNA, 520 bp, Homo sapiens
tttaaatacttttcacgaagtatkacttctaaaataattattttatatttacctgcatacgatttctgtataaatactgattacctaaagaaactcctaccttccattttaagtctttgcatcacacaacacatcctgatttctaggacagtttacatgacggtggagttacaccttacatgagcactttgctccaaactcagctcataaggcaaaaagcacattgaatcaaaattaccctttaaaccaggtacagtaactctgaacggtaattcttatgaacactaaagtttggtcacaccaatgtagaataaatgaaggaacaaaaaagaaaatctgtaagcacaaactggatagtcaaacaattctgccttaaagataactattaaatgttgtggagaatgggaagtaggtggaggagtctaatatgtgcatttcaccatcagagtttatagcaatttttttaatgttaagtctctgtatctaacttcaataaatactaatataatagatttgcttg

SEQ ID NO: 52792 - DNA, 520 bp, Homo sapiens
tttaaatacttttcacgaagtatgacttctaaaataattattttatatttacctgcatacgatttctgtataaatactgattacctaaagaaactcctaccttccattttaagtctttgcatcacacaacacatcctgatttctaggayagtttacatgacggtggagttacaccttacatgagcactttgctccaaactcagctcataaggcaaaaagcacattgaatcaaaattaccctttaaaccaggtacagtaactctgaacggtaattcttatgaacactaaagtttggtcacaccaatgtagaataaatgaaggaacaaaaaagaaaatctgtaagcacaaactggatagtcaaacaattctgccttaaagataactattaaatgttgtggagaatgggaagtaggtggaggagtctaatatgtgcatttcaccatcagagtttatagcaatttttttaatgttaagtctctgtatctaacttcaataaatactaatataatagatttgcttg

SEQ ID NO: 52793 - DNA, 520 bp, Homo sapiens
tttaaatacttttcacgaagtatgacttctaaaataattattttatatttacctgcatacgatttctgtataaatactgattacctaaagaaactcctaccttccattttaagtctttgcatcacacaacacatcctgatttctaggacagtttacatgacggtggagttacaccttacatgagcactttgctccaaactcagctcataaggcaaaaagcacattgaatcaaaattaccctttaaaccaggtacagtaactctgaacggtaattcttatgaacactaaagtttggtcacaccaatgtagaataaatgaaggaacaaaaaagaaaatctgtaagcacaaactggatagtcaaacaattctgccttaaagataactattaaatgttgtggagaatgggaagtaggtggaggagtctaatatgtgcatttcaccatcagagtttatagcaatttttttaatgttaagtctctrtatctaacttcaataaatactaatataatagatttgcttg

SEQ ID NO: 52794 - DNA, 630 bp, Homo sapiens
gtcctttaaaattatttaaaatctggcctggcaaatataatgtatactttcaagtgtgcagtctttacctgagaagaaaatccacattcctttgcatataatccatgcctttccaaactggtacttgcctgcctttattctcaactgggcactcttggcaataactttcagttgctattttagtttcggtgttttggtaacaactcattttcttcaagaccatttcctcttatgggcttctctttcattctttaataggagaatttctctcacatttcaaccccaggttcacatatcttatctatttcctatgaatacttctactctatagaaagagacactctcttctccaggatccaacagagctctgggtggatttctattattgttcttgaccctgtatagtatagtcatttgtctgtgagctattccaaaccattcttttatttatayatttttgaaaaatgtgtttagttccttcactgtgccagatactgtgtggctattaaggattcagatgtaaaatcaacattctccctgattccagggagcattccatgtaaaagggactgtatttgtctctgaatctctgtcactttgcaccaaatgatagggacccagtaaatttta

SEQ ID NO: 52795 - DNA, 1746 bp, Homo sapiens
taagtgcattgctggggaaggagtgggcaatgaggtcagagcttagaagagccaggttctgctccctcacacactccccgctgtttctggtggaccacagaggtataggggaagaaggatcttacattttcttacaacctgatgacagtctagtggcccacrttttttcaccaaaactgatggggattaggattaacacgtgcattgtgaaggtcagtgaacatagcatgagaaggcctatattctagtcctaggtccccatggaccagctgtgtgaccttagacaagtctctcacttcctgggaatgggggggtggaaggaaagaggtgatggaagaggaatgccatccaaccttgaaagtgaggttagtccacatgaactctgaggtatacgatgaattaatttttcgaagagaggctgccaccaactcacatcacctgacacaccccatcccaactttctcttacccctccaagtttcctaaacaaatcctagaaggtcactgtccccataaaatcaatgggcctggacttgcctcctaatttaatgcaaatccaagcctgccttattgtgctggagtttctgttcatttcaactttcttggtgacgcaatccatcctcatttccagttgagtttctaatccctgcaatttccatggtgctagtaattacagggaaaaggctgaagcacagaaattctgcatcctgcctatgagattacacactttagtggcgtttattaaatttattttgcagttactgaggagatgaaactcactgtacaactccagagggcaaagcaaggactggttcatagaatccaccagaaagcagcttggaattcaaagggaagaagcattttctgacagtcagagctgctcagcatggagtgagccatcccaagagatggggtgaggctggcagggcccaggcctggggtggtcaatgtgggggccaatgaagtgcaatggctttgggtcagacctgggttcatttcctcactgcccactttcctggggattcaggcaagagctcgcttttgtaagccttggttcccccttgagtaagatggtgacagctgtgctggcccacctctacacccaaccatgcaggagtctgaaccctgatgagaggggtcaatgcacctctgatgggtggctcctccctgtctggtcctgaggtctgtggggtcgagggcgggggccacattccctcaggggtaagcaccgtcctccagcatcagccttatgggtgataaagagggttcatttctattcaacatgcccttgaccctgtcaattggactgaggaagggaaaccagtgcctttaatgagcccccaaacctcaatgttattgccacaagggctgaaagctcggccaacatctcacctatgttcagaggagagaagtccaagcccatggaaagacatgaggagaaggatggacaggctgcaccaatccctgctgttggcctgggggccaggcatgcacccagagagggtggcattggcagactgagcaaccacacaactgggtatgtgagtttgaggatcaagatcagcagaggagaagggttgaggggcaaatgtgaagctgaaggggtgggatgggggcctggatataataaggccacaactttaccatcacggagacctgaatgaagtcctggcctcccccttcctagccatgcagccatcagtacatcatttagccttcctaaactccactttccttgactggaaaa

SEQ ID NO: 52796 - DNA, 1535 bp, Homo sapiens
tgcattttggaatccacatctccagtaattagcaccagcacacagggaccagttcctaaggctgaactgattccctgatgtcagagcactggctctgcaggtggacagcagcagagtgcttcttatacaaggactgggaaggctggggcaggaatcctgcatatgtacaggggcaaaaggagagacagagaaataataagagagttcctatgatggacataggacgacaccatctcctgtgaccttaacttgtcccagtgacattcatatgaggcagggttgttactatcctcatcatctttcccctggataactacggtgagctcctcagaggccccatttttacctacacagtggccagggctactcctamaaactgtaagtcaggtcgtggagctgctcttttcagactcctcggatgatttctcatccatctccttcagaataacatccaaagtccttatcatggctgcctaggacacctgctctcgctcagcaggtaccactccctcctctctgcctatgtttcagcccctccagtcttcttgctgcttcatctttgcatactgaaagcacatatctgcctcaggacctttgcacatctgtttcctctgcctggaagcctcttcctgcacaagtgtgcatagcttactcccacacttactcacatctctgctcaaacatctcctcctccataaaggctttagctgctttagctgaaagagcactcccattactctctattgctttagcctattttattttttcctcataacctttatcacctgacatatcacatcttttgtctttgcttattattttcttcctcaactagaataaaagttttatgaaagcagggacttgttactcttctctactgtattctcagtgttaaaaatgtgtctgtttcctatggtgtgcccaataaatatttgctgaatataagagtgagtgtagaaattgttatgggccaggataaatgcctttcggtaatttaatccttccattaactcaatgatgtaggtttaattgttactcctattttatgaatgaggaaatggaagtttttggaggtcgagtaacttgcccagggtagcactgctagtgagcagcagagtggggattggaaaccaggtcgcccaactctctggcccactaggtgaggtgatctagaagaaaatgaaagtaaattaagatctcctacccctgaaattacccaggtaaaggatagtttcatgcccaggtatttgcaatctggcctctgcccagagtgaatgatttggggaaaattaggataatgcttccagagaaggcagaggtgtagggactaaagaggagagaatgtcgcttccccacttaaccccatgcctgcagccttctgagtacccatggctcactcctgcaggctcagccagcctcagcctcaaagccaacaccagcatcaggcaaacgatttctttatgacttggcagtggtattgggtctgcatcatttctgatgccgtttctttcttgcagctatgtctggtgttcaca

SEQ ID NO: 52797 - DNA, 568 bp, Homo sapiens
actgcagcctcatggaattgtgctgctgtgggggctgtaggctcctggccctcttggagggtggatactccatgccttgtatcatatagcttttagctgccagcatctgctaggctttggaatacccaactctgattttstgggaggcttttatggtattacggcactgtttctcaaatagggttgatcataagacccactttggttgcttgtaaaaatgttaaatctcaggccttactctagaaagaaactgcaggagaggggcctagaatgtctgttttttgtttttgtttttgtttttgtcaagtaccttagacaagtcttatgatcaggcaaattgaagcactttcatatactggcttaaaataactggctgcagtaacttatacttaactggccatgtgaatcttttttctttttcttttttttttttgagaacggtctcactcttgtcacccaggctggagtgcagtggtgctcactgcaacctctactttccaggctcaagcaatcctcccacctcagcctcccaagtagctggaactataggtgcatgacaccacacttg

SEQ ID NO: 52798 - DNA, 592 bp, Homo sapiens
tgcggctaacccagatcccactggtggaatcctgctcatgggcttgatggacccaatcacagccttggcttctgtcttgggggttggggtagtgagattgggagcataactaaaaaagctctaggatctcacaggcgtggaaatcagatctgagctccaccacttgctacttgtgtgaccgctaagtctcagtttcttatgtatgaagtgggaatagcaatagctcctatctcataggattcttgtgaagattaaataaaatactacatagatggtgattagcccagttccttgcccatactaatactattattaataataataataattttaatattctggtgcacagagtttgattgatcaaaatttgtcattcatgaaacactgtcacyattgctccttccttgtccccatcccctggcaccttcaccccagagcgaccatttttacctaccatacttattcattcctttgttttgtttcctatggttgctttaaaaaaaaaaaaatatatatatatatatatatatatatatatattcacctatgcaatatgttacttagttttgctttgtttttgaactttataaag

SEQ ID NO: 52799 - DNA, 522 bp, Homo sapiens
gaagagaattgcctgaaaagtcctgcaggtgttcaagtcctgctgttcagagaaaccctgctcatatatgcaccttggtggccgatggaatctcctcttcagatgacaaatcgctaattcgggtcccagccttagaactgcactgcttataggtgcattttatagcaatgcattgtgtatactcattagattgaatttacygatttcacaagcatgtgctggggaaccagggacataaatgcacagtgacaatatctaaggttccatagagggagaaatgcacctacaacagtaacttgaagtgaaggaaccaagtggaagctgccattagaggctcccagacaaagagccagggctcgactgcctcttcagaggcctgggatcatcacaccaatcagcaggcactctggggtgtgatacagcttgctgcaaaggatcctctaggctaaccgtgactcattggccttaggctcccactgcctgttcccatgaggttggagaaagaacatgggctttgagcaa

SEQ ID NO: 52800 - DNA, 546 bp, Homo sapiens
aaaagtgatctgaagctcagtaacatccttagttcataacttttgtatgcatgtttgcataattgaaatgaaaacattctggctgcaagttaagtgattatggctgtataccctatgcaccatatgcttattatgtctatgaaacagtaatgaggccaacatggccagaaagactccattaggcagtagtgaaaaaaatatgtaggatatttggataaaagtagatatgcgtagggtaggacaagactatggaatgtcttgaaatcaagttaaggaatttgaaagttgtagcaatcaataaaatcagtgtaaaatactatcctgcaacagaaagacgtgcaaatcatacacatatataatatcttactatttggaatctattttctactaacttcaggaattgactcactccaaagctgtaaaaagaaaacagaacatgtgtttcttctaattggtacagtcagtctcattacaaatcctgatccccaaagtaggaggctggcgggggtagaaaaggaaaagakacacaactaaattccatgcaag

SEQ ID NO: 52801 - DNA, 560 bp, Homo sapiens
tgacagacccttcctccaatgcatgtgggtggagcatggtcaccatccccaagatttctggttctcagtctcaaaatgtgggcttagcaatctatggagtagcctttccaagcatcccctgtgagcaaagacagtctaaaaccaacataaaaatgagtgtccatgtgggtgtagagttttcatgatccaggacggcgcattaaaaagacctagagagattcagcagtactgaggcctggccccaccacagaccaatgaaagcagaatatctggggaggggtcaggcatctttattctttgaactcctcagctgattttaagaggcagccggggtggaaaattctgggtcaggccttacagagactggagtccayggctcctccagctagcctgatagcaattctatccgcacaagaaccatcctgtccccacacactctgtgtcgtccagccagtggttctcagactttgatgtatgtccaagtcacctgggaggatcataaggaccatagagccccaggttccttgaagtgggtgggacccgggcccagggatttctca

SEQ ID NO: 52802 - DNA, 638 bp, Homo sapiens
tttcccatggaatatcaattaattccagacataattcacaaatagtggatttagggttgggagtggctcctaacacttaagcattcagtttggctatgccctcaaatagtcagtgatcttcccaaaggggccaagaagaagcaaaaccctgggctaggaagaacattgttctcctgcgaagagaacattgtagcctgggaagttcccaggctagcccactaaggcctgttgacctcatccaccatgggagatgcaacacagttactacaccagtggctttaaaggacccaggaaaacagcatagaataagaaatgtcttttaatttaacttgtctggtgttgcttaaggaaaaaggggttcaattactggcaagtgagaaggttggtgcagacttgcatgagctcccgaagggacctccggggctgygtggctgtggcactgagtcttcattccgcctcatttccccccagaacttatgactttaatttacctgaatagaagcacatccaggcgctgcgcctgtgtccagctgctgagacagggaaagcggggttctgcaggtggcactgggggtgcagggggaagagggaaattggcagggggagatatattcttaagagaactggagagtggttgg

SEQ ID NO: 52803 - DNA, 1708 bp, Homo sapiens
tgtggaattgactacaggtaatttgaatgttggccttatcaaccctttcsttaaatccgaagaggcaagggaagcctggggaaatggcggggacagcagctgtggtcagcttgctggagaggaaaaggatctctcaggcctgatgtcttctcccttctggttattagatataagcacagtggaatgaatccaacatgagcttgctgggaactttattcttagtccttatttatggttacagtggcacctccatgtgttatttgggactctttccccttacggcaattaaccagatcaaccaaggagtaaatcagtgtgtcctttgacaccagtgtggttcctggattagtcacatcagctttcacgggagcttggcaacaatgcagatcttgggcctgtcccatgagagcctggtagaaatgcagaccctgggtccatttcagatccaccaaattggagtttttgaacaatttctccaggggattctgatgcaacatcaagtttgaacgctgtgtttgaggtagtggaataatctggcctccttctccccaccgcctcaggaggcatttcgcagtgcagcgccgtttttcctttagtgttcacaaagaagacagtgagagtagggagcgagagacagggcaacaatggaacccaaatgtccttgaatgggttttgtttcttttagacccgcggttcccaaacctgaacatgcatcggaaccactgggagggctcgttaaggcccagcttctgggccccatctcagagcttccagaggcgtaggcctgggggcatcgggggccttgagaatttgcagttctcagaagttctcctgcgatgcctgcccggcctcacattcagaaccactggcttgtagaaacaaacaggaaactctcaactcagctgttttaaactccagggatggggaacacattttaaccaatagacacaatatatgctaaataatgccctgtagcttcacagccttgccagggtcggggaagtggctggaggagagagaagcagacatttgggaggttggaaaaggaagtgaatagagccaaggaagggacgaagacaagggtgcctggagaggccggggaggtgaggaagcctctctaagaggagagaggaaaagccaggatgcaaaccaacaaaacctctggaatgttagggaaacacgaaacacgagctttgggattagccgaggtgcaaagccggaagcttgttcatgtggaatcacccatagagcctctgtcccttctcacatctcctgcctttagaaacggttggctcaggctgggtgtggtgtctcacacctgtaatcccagcactttgagaggccaaggtaggtggaccacctgaggtcagcagttcaagaccagcctgcccaacatggtgaaagcccgtctctactaaaaatacagaaaaattagccaggtttggtggcgggcgcctgtaatcccatctactcaggaggctgaggcaggagaattgcttgaacccgggaggcggaggttgcggtgagctgagatcacaccactgcactccagcctgggtgatgagagcaaaactctgtctcaaaaaaaataaaataaataaaaataaaaagaagtggttggctcaatagccgtgattcacagattgaatctgctggctgttaaacctttgtgttttgtgaatacaattattgctgagcgcttcatatt

SEQ ID NO: 52804 - DNA, 572 bp, Homo sapiens
ggcactccagcggcccagcagcccatgcctctcagaacatgcccttctgtctttttcctcggttctggctgctttcctgcctgtcctgcagctcccagttttcgggacctgtcttttactcattctttagtattcagccaggggggcaggtaccgctttcagaaagttctcctgagcctctaggctatagcatttctgtagtccctaagtrggatctgatgacatacacattatatgtggattctccatggctgtgtctactcgcctcccgtgcagagcagggcctgtctttttatcttcttttagcctgccagtggccatccagtgaggtgcctggtatatggtaggaaaccaggagctgtgtcctgaactgaactgttgacagttgcttccagcaggctgtagactacagctggtcgctcatgaactgaaggatgtggctctaaaatcctaaggtcccacctaaatttcttctgtttctgtcctgtgagttgtgttgtcagttcagaacccatggcctcagaaaccttggtgtttccttttggcctcttaggttggcaaactagcacctc

SEQ ID NO: 52805 - DNA, 536 bp, Homo sapiens
gttgctcaacctgccacaaaagggcttctctaaaacactaagaggttttctacatttaaaawtttctattggctgggtgcggtggctcatgcctgtaaccccagcaccttgggagaccaaggcaagaggattgcttgagcccgggagtttggcaatatagcgagaccctttctctaaaaacaatgtttagaaattagatgggcatagtggcacatccttgtggtaccagctacttgggaagcagaggttggaggcttgactgagcccagaaggtcgaagcttcagtgagtcatgatcataccactgtactccagcctgggtgacaaaggaagacgctgtttcaaaaaaaatttttttaatttatatggtgattcctagaataattaaacatagaattaccatatgatccagcaattccaattctgggtataaactcaaaataatgaaaagtaaaaatgtaaacacatttatacacccataacagcattattcacaaaagccaaaagctggaaaaaaaccccaacgtccatcaaagg

SEQ ID NO: 52806 - DNA, 515 bp, Homo sapiens
tcaaaatggagccacttgtgttaaaaccctgacaaatggaactaggaatgaccatgaaggagggttcgcatgcacatactcctgataagaagaactaccataaattgactctgcttaatcacaaccttggatagaagccaccaacaccatataaaacttccttctacaaagatatgtgtccagcaactgcctgttcagccttatactgatgccacccttggtattgattctacaagcacaggataattctttcaaaacagcttatgtaacccacctcattttcacttcataaacctatggattgacatcctgtagtcactgctgcatttcttattaatgttaataagccccctttacaatattcgaaacaatttttctctgatatctcttctaaaataaagaatttccaagttgacgccaataaagaagayacttaggaagatctatttggcatatttggaaggcatatttttatttatttatttacttttgagatggagattcactcttgttgc

SEQ ID NO: 52807 - DNA, 1643 bp, Homo sapiens
agccactgtgcccggactgttttctttcattttctgttttggtttacaaacctccactttagtcttcaaatacattcattttattaattatgctgaccattgaatttttttatgctggcaagtatattttaatttccaaggacatttcattgcctcatcagtactttttcatagctttttgttcttgttttataaatgcaataatctcttgactctctctgaagataccaatttggattttctgcttgtttaagtttgcttaagttccttgtatttttgtttccctgaaattggtttatctgcttattttggaccttttaggctcttctttctttttattttccaaatatctgcttttacttatttgtccatccatatttgtgaatgattgactactttggttcattataggcaggtggcatgggttcctctggaatcttttagtcttgttttcttagtagtcttctcrtctctaaatgagagggcagctgcggctccatgtagataggtaggagtatagacaaaccttgagcaatgtggcggttaggggcgttgacccattgcacagttggaaatccatatacaacttttgactccccaaagccttactactaatagcctactgttgaccagaagctttaccaagaacatcaacagtcagttaacacatgtgttgtgttgtatgtactatgtactgtattcttacaaaaaagtaaactagagaaaagatgttaaaaaaattataagtaaaaaaatatatacttactattcatgaagaagaagtagatcatcataaagttcttcatcctcatcgtcttcccactgagtgggctaaggaagaggaggggttggtcttgctgtcttgggtggcagaagatgaaggaaatcttcatacataagtggacccacatggttcaaatctgtgttgttcaagggtcaacggtagatggcacttagacttccctataaggtgtgtagtcagggaaccgcctggtagggacccctacagtcacctgacttaggaagtgtgttactcttggggatggagcacttcatttcttttactcctgggcagagctgacttttcttctccaatgatagtccccttctgtacttctgggtatgtcagtatttactttaaactactctattcctctttcaatcccacaccttttgaaatgcatttatatatttgatgcttcttatcttttttaagcctgtaagttgtctgactaacagaaatttcccaagtaggtaaatcttaggaaacaaattaaaatgataaatatggtgaaatttaagaccttctaaatgattaataaagtatataaaattcataagtttgcaacttaaaatctcaaatctaaaccaactactcagtcacacattttaaattggaattaaatgactgatctgtttctattgagccgaactctcttaaacactaaaaatatgtaaaatgtgaaatatgcacaagctcctttacataaaaaaatattatttatatttgtttagtcattgaaatagctctgcttttaattataaatttttctggacttgcccacaaaggaataatttatatcatcctagctcagccagttaagattatataacagccagaaatattggcccagatgctgaat

SEQ ID NO: 52808 - DNA, 536 bp, Homo sapiens
aaacaaatgccttaaaaacactggggatacccagcacagatgaggctgtggagtagcagcattgaccacgtgcaatggcataatgctcaggggaaccatagccatagagagtatggctaaacatgcgcatgcatgctgtgctccagcaattcagctccttgttatttacccaaaagaaatgaagaataaaaacataggcccaagctgggtggtggctcatgcctgtattcccagcactttgggaggctgaggtgggaggatcacttgaggtcacgagttcgagaccagcctggccaacatagtgaaactccgtctctatgaaaaatacaaaaattagccaggtgtggtggcaggtgcctgtaatcccagctactcaggaggctcagtcaggacaattgcttgagcccaggaggcagaggttgcagtgagctgagatcacaccactgcactccagcctgggtgacagagcaagactctgtctcaaagaaaaaaaaatgtccacaaayaagagtgttcatagtagcttcattcataat

SEQ ID NO: 52809 - DNA, 636 bp, Homo sapiens
gcggtgagtcaccaatcctgtgcagctctgcaagaggatgggctgagtgtcattttcaatyccttccaggcgcctggcaattctttcttttctgtgaaatacaccacaagaggcagagtgagcaacagcgatcgaatctaaaggaaaatggaatactgctttgccaagctctcttctacttcctaactcccactataaagatcttaccttttcatttctaagaattctttcttctttggttcaaagatttgtcttaattctgcaactggaagaaaaccaaaaaagaacaaaatatagtatttagtagtcgtgcgctcattttattcactcatgcaacgtgtttattgaactgcaaatttcagttcttgattcctatgtcacagtgacatgcaaaactgaccaagttcctgctttcttggaaactgtttcctagtaggggaggcagatgccaaatgaataagagtgtgcagacacacacacacacacacacacacacacacatggacacaccctaggacgcatcatcctcttctaaggtcaagctgaatatttgatgcccataaaaatgacagagttatcaaggcaaagctaagacatgctcactcaacatactgtttaatatgaaatatatatgta

SEQ ID NO: 52810 - DNA, 636 bp, Homo sapiens
gcggtgagtcaccaatcctgtgcagctctgcaagaggatgggctgagtgtcattttcaatcccttccaggcgcctggcaattctttcttttctgtgaaatacaccacaagaggcagagtgagcaacagcgatcgaatctaaaggaaaatggaatactgctttgccaagctctcttctacttcctaactcccactataaagatcttaccttttcatttctaagaattctttcttctttggttcaaagatttgtcttaattctgcaactggaagaaaaccaaaaaagaacaaaatayagtatttagtagtcgtgcgctcattttattcactcatgcaacgtgtttattgaactgcaaatttcagttcttgattcctatgtcacagtgacatgcaaaactgaccaagttcctgctttcttggaaactgtttcctagtaggggaggcagatgccaaatgaataagagtgtgcagacacacacacacacacacacacacacacacatggacacaccctaggacgcatcatcctcttctaaggtcaagctgaatatttgatgcccataaaaatgacagagttatcaaggcaaagctaagacatgctcactcaacatactgtttaatatgaaatatatatgta

SEQ ID NO: 52811 - DNA, 636 bp, Homo sapiens
gcggtgagtcaccaatcctgtgcagctctgcaagaggatgggctgagtgtcattttcaatcccttccaggcgcctggcaattctttcttttctgtgaaatacaccacaagaggcagagtgagcaacagcgatcgaatctaaaggaaaatggaatactgctttgccaagctctcttctacttcctaactcccactataaagatcttaccttttcatttctaagaattctttcttctttggttcaaagatttgtcttaattctgcaactggaagaaaaccaaaaaagaacaaaatatagtatttagtagtcgtgcgctcattttattcactcatgcaacgtgtttattgaactgcaaatttcagttcttgattcctatgtcacagtgacatgcaaaactgaccaagttcctgctttcttggaaactgtttcctagtaggggaggcagatgccaaatgaataagagtgtgcagacacacacacacacacacacacacacacacayggacacaccctaggacgcatcatcctcttctaaggtcaagctgaatatttgatgcccataaaaatgacagagttatcaaggcaaagctaagacatgctcactcaacatactgtttaatatgaaatatatatgta

SEQ ID NO: 52812 - DNA, 636 bp, Homo sapiens
gcggtgagtcaccaatcctgtgcagctctgcaagaggatgggctgagtgtcattttcaatcccttccaggcgcctggcaattctttcttttctgtgaaatacaccacaagaggcagagtgagcaacagcgatcgaatctaaaggaaaatggaatactgctttgccaagctctcttctacttcctaactcccactataaagatcttaccttttcatttctaagaattctttcttctttggttcaaagatttgtcttaattctgcaactggaagaaaaccaaaaaagaacaaaatatagtatttagtagtcgtgcgctcattttattcactcatgcaacgtgtttattgaactgcaaatttcagttcttgattcctatgtcacagtgacatgcaaaactgaccaagttcctgctttcttggaaactgtttcctagtaggggaggcagatgccaaatgaataagagtgtgcagacacacacacacacacacacacacacacacatrgacacaccctaggacgcatcatcctcttctaaggtcaagctgaatatttgatgcccataaaaatgacagagttatcaaggcaaagctaagacatgctcactcaacatactgtttaatatgaaatatatatgta

SEQ ID NO: 52813 - DNA, 542 bp, Homo sapiens
atgtcagaatgtgtggaacatagctaaatttgtccttgaagggaaattgagagcattaaatagatatattagaaaagaggacgggctcagtggctcacacctgtaatcgcagcactttgggaggctgaggtggagggatcacctgaggtcaggagttcgagaccagtctggccaatatggtgaaacccgatctctgctacaaaacattagccaggcatggtggcgggtgcctgtagtcccagctgctcaggagggtgaggcaggagaattgcttgaacctgggaggcagaggttgcagcaagctgagatcgtgccactgcgccccagcctgggcgacagagtgagaccctatctcaaaaataataaatggggaaaaacycatttcatacatgaaaatgtaagaatcctcataaagacagtaactgaatctagcagtgttaaatagtacatcatgaataagatgtttcattccagaaatgcaaaaatactttaacacccaaaccttagacactgtaagttttaggacattagtggactaaaaa

SEQ ID NO: 52814 - DNA, 931 bp, Homo sapiens
aaaaatgaatctgtatttccggtgaaaaagtgtttgaaatgtccagccgcaagactgatattagtagtagaatatatgcagttaaacattcttatggtaaaaatatgtccattgtttagtggttgtcagaaagtaaaattcctgcaaaattaaaattaggaatttaactaggaagaatatctaaagaccctttaaaaatagatcagtgtatttggtatttcaagtagatttatgacatcaggctcatttataaatttatataaaatcacaatacttaatccatgcatacacagtgacagataatgggagttatgtttttaaggagtcttgaaaaggcctctaayatgatgagtttaaaaagtaattctcctacacacctatctcaaactttgctatagtgcggtcagtggtggtcagcagaccactggtctgggggtgttgaagttaggccttcttatacttgctcttatgcagagttcatgtatttggcagaccttcagtggtggacatctctaccctcaatacaatttctggtgactaaggaggggaagttgtttgagctgactgatgttttggggtctaaaattacatagggctaaaggaataacgtttcttacgtggtttttaaaataatagtgcttctggaagtggaatttcaaaattattttaagcaatggaaataagggagcatgcatcacttagctaagttgattactttaataaacaatactcatttgagtgtacatatgacttactgtcataccttatttatatctgtttgttgtaacatttattcacatagtattcattcatattactgagtgcctaccttgtgccaggcactgctctaggtgccgagatagagctgtgaacaaaacagacaaaatagacaaaatctttcctcataaattttacattctaatgtgagaga

SEQ ID NO: 52815 - DNA, 660 bp, Homo sapiens
ggttcgtatgtcatttttcaataaatccctacaacaatcctgtgcatgggatattgttatccccattttttatttgagaaaataatgagagatgtcttcttgctactaaatttaaagtttcataatttaaaaaatattccaaatgttttcagtttttaacatagaaaataactattaaataagaacctttttaaaatatagaattgttggggacaataatcatagcttacaggtggatattcacaatttttctgttatacaccaagaagaccatggatactcacccaaacttacgagattgctattattattccatgttactgtaaaacaaactgaagttcagtgaggctaactcactttgtctatgttcacaataaaaatgatttatctyctttaaaataggctaaaatttttgaacataaactacagatacttttatcaccaaagctagagaaagaactgttagcagcagagtaggtttgtaagagattattgaacaaaggaaggtgctccagtgctgagctagaaaagtaagacataactcagatcaagctttagtgggattttttattactactcatttttactgcaaaggctgattatggatttatatatcttatcaagaacaaagcataaggaagttactttaatatgtgttaa

SEQ ID NO: 52816 - DNA, 660 bp, Homo sapiens
ggttcgtatgtcatttttcaataaatccctacaacaatcctgtgcatgggatattgttatccccattttttatttgagaaaataatgagagatgtcttcttgctactaaatttaaagtttcataatttaaaaaatattccaaatgttttcagtttttaacatagaaaataactattaaataagaacctttttaaaatatagaattgttggggacaataatcatagcttacaggtggatattcacaatttttctgttatacaccaagaagaccatggatactcacccaaacttacgagattgctattattattccatgttactgtaaaacaaactgaagttcagtgaggctaactcactttgtctatgttcacaataaaaatgatttatcttctttaaaataggctaaaatttttgaacataaactacagatacttttatcaccaaagctagagaaagaactgttagcagcagagtaggtttgtaagagattattgaacaaaggaaggtgctccagtgctgagctagaaaagtaagacataactcagatcaagctttagtgggattttttattactactcatttttactgcaaaggctgattatggatttatatatcttatcaagaacaaagcataaggaagttactttartatgtgttaa

SEQ ID NO: 52817 - DNA, 605 bp, Homo sapiens
tcctacactataaaataaagctcattaacctgaaaagcaaacgtcttttaagcatctgcaatatatacacaaaagttaacattactacaatatacaaacagctattttaaaagacaataaaaatgaacaccttaaaggaaaagaaatgggcaatgaatgtgaacaggcaattaaataaataaaagaatataaatgggtaataaatatatggagcaatgaccaatcctgctagctattaaacacaaatttgttttttatacattaccttctcaaagattaaaaaattattacacccaatattggcaaaggaataaaaaaatatacctctcataagtaggagagtcaactagtatctttctgaagggtatgtaggatatacattgattttaaacattgacttctgctatgatttgaatgtcacctccaaaactcatgttgaaattgaaytgtcattgtgacagtaataaccagtgagtccataaaaagtaactgggtgatgaaggctctgccctcatgaattgagtaatgcccttatcttaggagtgagttcctggtaaaatcgagtctggccccgtcttgcccttgtttgcacttgtgctctcttg

SEQ ID NO: 52818 - DNA, 633 bp, Homo sapiens
aatctcagttcattggtataacatttgatgtgctttgtaatctaacctctatcacaagactctggtctccttttcaggtaccactctcctttgcagtatgataaacactgcttgttgcttgaggcctctgtacctctgggcaatatgttattctggttttgtctttcgtttgatgggtgtctatgctttatttaccaatctagaaaatagattgcatgccagaagagattgcagagtaaactccctttctacaggtgttggttgactaaaattgtcagagggaggataaagaaagrtagaagatgtagctattctgatctcattagtgcctcctgtcagtattggcatggctgatgtgactctgaggtagcaacagacttttggaaataaactagctacccttcaaatgaggatcactggagcagaaatgtgaatggtctgcattccctccaaaacagtagagcatcttgacttatatttatgtttatttccagatgagctttccaggaattaaaacacaaaatgtgtaccatctgcatccttttggtgtagtacagggagatgctgaagtcatcatgtagttgatatttgaagagaaaagtttgcaagattctttaatatgtcatcaatcag

SEQ ID NO: 52819 - DNA, 532 bp, Homo sapiens
aaactctgaaccggctgagcctggttagcccttgattcattgtataagtgtgagtaaattcctaaatcactttgaacttgatttctttctccttaaaaacattattattattaacaatatatattatataataaaggtatcataatattatatattattaatatataatattgctgtataacaatactgttgttatatataataatattgggtcttcctttatttcccaagaatgagtaaaaaaaaatcattatgatggacatttgaactctttgatgaaaggtaatttatcaagcccagatcaagttattagttcctattatgtctataaatattcttcttgtttctgagggcactatatctcccaaactttattctatatgagacaccactgccaactcccatgacctcatttttggaacacgtaacagctcttgccaaaggagtctgacacaaatgaagcgtcctctagcctcaagtcttccttattcacactttctctttaaaaacatttctgattgatgcycaaggc

SEQ ID NO: 52820 - DNA, 543 bp, Homo sapiens
ggagccagctctcttgcaagagctgtgggctgggagttggcaccaccagttccatggagaagttggcctggtggtggctgtggagctctggaacaggaggcccccaaggggctgcacgccagtgcacagactgcctctctcattgctgatgggtgaagcagacccttgggacagaaggaccctgtgctcccccgccccccaggccaggatcgggtggctctcatcagaaggccccactccagggtgtcgctgtcggcttcctgggtccccagcaggctttgatccttcccccacagccacagagggtgggcctccctcacccacaggagtrttggagggcagtgttcccaccacgtgaggtcccccagggtgctaactcccctgccctttggctgctgtcctccagctgtgcaggagtggagagcagccctgctccataccagcagtggccagaggcgttctagccacccaagcaggaagctcacagccctgccttgactctaggttaaccaaacacaagaccaccgtgggccactggctgcc

SEQ ID NO: 52821 - DNA, 575 bp, Homo sapiens
cagggtggtaaatatgggcctccctgacccgacctgcccagggaggtcctcggtgttcatgtctgcaaaacagcaatgggggagcttgcctcaaaagagtgctggaaatagcaagagacttcaaagatctttgaaaactttacaaggcacacaaaaaaatacagtgatcacaaaatctctccaaggcacatgcaaagaagtatggccaaggatatgttttgcataacacaaccaaagttgtgttatgcaaagaaaygggatcaacccagtgacccagcaatgagggactggatacatccactggaaacattcagtagaatgggtgtgatctcagcctgtttgtcttctaaggggaagaggcccatccctacagagtagcaagatgacacgtaaggcatgtgcccaggtgcgatgcccagaaacaggccagagctcatcacctgtctctgggtgaggggattacaagcaatttcccttcttgctacctagatatgcaggtgtgtgtatacaaacacacacacacacatatactatacacactacctcaggagggaggaacaaaggaaggaaggaag

SEQ ID NO: 52822 - DNA, 575 bp, Homo sapiens
cagggtggtaaatatgggcctccctgacccgacctgcccagggaggtcctcggtgttcatgtctgcaaaacagcaatgggggagcttgcctcaaaagagtgctggaaatagcaagagacttcaaagatctttgaaaactttacaaggcacacaaaaaaatacagtgatcacaaaatctctccaaggcacatgcaaagaagtatggccaaggatatgttttgcataacacaaccaaagttgtgttatgcaaagaaatgggatcaacccagtgacccagcaatgagggactggatacatccactggaaacattcagtagaatgggtgtgatctcagcctgtttgtcttctaaggggaagaggcccatccctacagagtagcaagatgacacgtaaggcatgtgcccaggtgcgatgcccagaaacaggccagagctcatcacctgtctctgggtgaggggattacaagcaatttcccttcttkctacctagatatgcaggtgtgtgtatacaaacacacacacacacatatactatacacactacctcaggagggaggaacaaaggaaggaaggaag

SEQ ID NO: 52823 - DNA, 1969 bp, Homo sapiens
aaaaacagtagctccgtatcgaatacattgacaaatggatgtgtcatcaatggacatttggacttcccctccacgaccccgctcagtgggatggaaagcaggaatggccagtgcttgacaggaactaacggaattagcagtggattagccccaggacagccgtttccgagtagccagggttctctctgcattagtgggactgaggagccagagaagaccctgagagctaaccctgagttgtgcggttctctgcacctgaacgggagtccaagtagctgcatagccagtaggccttcctgggtggaagacattggggataacctgtactatggacactaccacgggtttggggacactgctgaaagcatcccagaactgaacagtgtggtcgagcattccaagtccgtgaaggtgcaggagcggtacgacagtgccgtgctgggcaccatgcacctgcaccacggctcctagagacgctgacctggctctcggaaacgcaggagtccttcctggtagccagctcagaatacccatgtagcagcaacttgaacgaatgtcacaacttgtackttttttatatacttcaactttctgaaaaagtaaacttcgacaagttcccagcaactgcttgtttgtgcatgagtagggcttactaagtgcatagatgtttctacagtgaggtgtcctttttataaggtgcacttttggagtttttctgatgccaatctcaacattgtctttttaatactgtcaccagatattgccatttttctttttgtaaaaagattatatgatcaagataaaatggggtggtaaatcaggtgcctggtaatttatctcttggacatgggcatcattttaaaaagcttgctttcactcttttctgtagaatttgacggaacacagctatttccctatgcaaggtacagccttacaaagatttctgcagtgatttgtgtgaagaagagaacgttgatctttttcaatgaagctttgcagatcaccatgtggttgaaggttttagttgtggacacagtggtccctccttaatgatgaagatcactgccttgggcttcatggaaaacaggcccagcctggggctgcgtttggatttattgtttttattccacacttcctacttggtctctggaagttttaccacatgtaacagattcctttatatgtagtggaaatcactatttgtagaaactgtcaggtcaaaatatttaactgactgttgacatgtattttcttttttccttgtttttgttttttggggttttctgctttaagatatataccactatgtatatccagttaactgagagaattttgactctcttaataaaactgcattaagtttttgattttgtagaaattagcttttgtctaggcaactagtggttatactctgcaaatattgtaatgaatttttacttttttgatttttgtaataaaaattggtgcagataaaatgtcaaatgaacaaaccagtgttctaagagtgttactaacattttgttctaaaactgtccttcacaaattgaataaaaaactctcacactcagtgtgtccctggggtttctctctgggcttgggggccggcggggtgtggatatctgtggaaggaatgggaagggaagagaagtttactattgtttcattttgcttataagattttacttgactcttctgacactcttcatacggtgttttttctatttttgagtttctactctagttttatgggcaccgttggtactgaacctctgtggaggaaggatgaattgcatgtcagttcagtattgtgcctgggtgcttattttcataaaagacagcaaccataatgttctaaacttctttggttttagcaactgttaattaatgtaagccttttaggaatatgaattacagttataaatagcaccaatatagccattctggcatgcctacatatgcaatttaaaac

SEQ ID NO: 52824 - DNA, 2966 bp, Homo sapiens
aaaaatctgggcctcccgccaagggtgggaaacatcagaaagctcagaaaagctcagaggaccacacctgcccgttcacctgtcctgggctcctgctgaagccagggctaccagatgggagctaaagacctcccttaagcaagtcccaaaccaccattacctcccacgagtacaggtaggcggggtgttcgtgcatcaggtacggccaccagaggttggcacccagcaccttcagctggccctgggtcccagcctggttgtccacgactttgttktctgatttcaaaagacacacttccaacttgaactggttactgcacttgacggagatatggtaattcaccagccctgcaggaggcaagagagaccagggcttagggagggacatgacctgggtcacacgaacaggaatgccccacaatgaccactcccaggcactctcatttgcttctgttgcttttttttttttttttttttgagatagaatctcgctctgtcacccaggctggagtgcagtggcatgatctggactcactgaaacctctgcctcccaggttcaagtgattctcctgcctcagcctctggaatagctgggattacaggcacctgccaccacatccagctaatttttgtattgttagtagagaccgggtttcaccacattagccaggatggtcttgatctcctgacctcgtgatccgcctgcctcggcctcccaaagtgctgggattacaggcttgagccaccgtgcccggccctgaaccaatgcgcccggcccgcttttttttaatttaattttttaattttctttttttttttttttttttttgagatggagtctcactctgtcacccaggctggagtgtagtgctgcgatcctgactcactgcaacctccacctctggagttcaggtgattctcctgcctcagccttccgagtacctgggaatacaggaatgcaccaccatgcccggcgaatttttgtatttttagtagagacggagttttgccatgttggccaggctggtctcgaactcctgatctcaggtgacccacccgcctcagtctcccaatagattagatatattattaacgaattgcttcctttaacacgctattcattgaattttccagtaaaccacaattactaattactcctgaaatcagaaaagaggttaaaaagattttataacagtatcttatgaaatctactactttcaagtaatagtagttgaattaccaaaacccgtcactcaagccaatgactacaattaagatatcagtaatatttcctagataaataaagtcaattaattatatttgcatctgggaaatagagaaagtacatataagccatgattttgaagtcaaaagagagagaatatttggcaaggaggggtgagttatagtatgtaattataacatatagtagttttttgtatgctggtaactaattttaatttcctacatttttatgtagatttctgctattcttgtgctgttttcctaatcacctttctatatggatgactacataagtctgagaataccaaaagagacagacacagaaccaatcggattcctttcttcttgaagcttctgcacagcagaagaaactgtcaacagagtgaacagacaacctacagaataggagaaaactgttgcaacaatgcatgtgacaaagatctaatgtccaacactgataaggaacttaaacaaatttacaagaaaaaaaaaatctcattagaaagtgggcaaaggacataaacagacacttcaaaagaagacacacatgcggccaacaagcatatgaaaaaaagcccaatatcgctgatcattagagaaatgcaaatcaaaaccacaatggcataccatctcacaccagtcagaatggttattattaaaaagtcaacgccgggcatggtggctcacgcctataatcccagcacttcaggaggccaaggcaggcagatcgcatgaggtcaggagttccagaccagcctgcacaacctggcgaaaccccgtctctactaaaaatacaaaaattagcccagcgtggtggcgggcgcctgtaatcccagctactcaggatgctgaggcaggagaatcgcttgaacccgggaggcagaggttgtagtgagccgcgatcatgccactgcactctccagcttaggtgacagagcgagactctgtctcaaaaaaaaaaaaaaaaaaaaaatttgaattttgtttaaatcactaacacatactgggcatttaataacaaaaaaaaggacatgagattgtgatccttaggagggtttgagaggcatttcactagggttcaacatagagcagtctgaaacatactgtaataatttaatccaatggctcatctacagcacctaaaaagattacagcagattctcattattcagtgtagttacggtctagaaagttccatgaacaaataaaaagttaggtttcagcaagctactggtcacatttttgtaagcttaccaacacctacttttgttgtatgtgtgcttatttaatatatattgttggccaggcacagtggctaatgcctgtaatcccagcactttgggaagccaaggcgggcagatcatttgaggtctggagttcgagaccagcctggccaacgtggtgaaaccccgtctctactaaaactacaaaaaatatatatatatattagccaggcatggtggcgcatgcctgtagtcttagctacttgggaggctaaggcaggggaatcgcttgaacccaggaggcagaggttgcagtgagccaagactgcaccactgcactccagcctgagcaacagagtgagactctatctcaaaaaaaataataataattaattaaatgaagaataaataaataatatacattgttcattcattaacattgaactcacagccaatggcactacagcactcacgcctgaatggagtttattcaatgca

SEQ ID NO: 52825 - DNA, 650 bp, Homo sapiens
tttcagtttgtatgcttagagaagcctttaaaggtgccgaaacctcccgcagcagtaaaaataaaatgacggaaagaccaaagttgacgttcaattmcatttaatctgcaatttcccaaactcattacacttcagagaattgttctcttgagtaatacctaagaattatgccccaggattagttttctgacccactgtggtacatggtgctttataatattatagatattaatcacagctaacccttgaacaatgtggggacaggagccctgagcaacgtcgcagtcagaaatccacgtgaaagttgtgattcctcaaaaacacagtagcctgctcttggccagaagccttactgataacatcaatagtcaattcacagatatttatgtatatatactacattcttacaataaagtaagctagaggaaaaaaaggttattaagacagtaatgaggaggaaaaaccatatttacaattcattaaatggaagtgggtcatcacaaagggcttcatcctcaccatcctctcattgagcaggctgaggaggaggaggaagaggaggggttggtcatgctgcctcaggtgtggcagaggtggaagaaaattctttcagtgacctgtacagtttaaacctatattgttcaacaatc

SEQ ID NO: 52826 - DNA, 635 bp, Homo sapiens
ctcgccgctcgagccgatccgagtggcctccggcgctccctgtcctgcgggtcgcacggtcgctcggtcgcttagtcagtttggcacccgagaccccggttgtcggttcgctcccgtcagccctgggccgtcagacaggccgcggcgccccgaccctttcgttcggcctctccccctgccccattccctcgctctccaatctgctgtcctcccctccgcccatcggcttggcctccggaatctcgacccccgtggcgtgtcaggcagatgctggagccccggggccatcagtcaggttcggtggccccgggcctggcctggccttgccttaggccgggcctcctaacctcggcccctgcccyagggcagccgggccatcgctgcccaccggttcgacatccgagactctcctgcccggcccagccgagtgtcagttcgcgcggcccacagccgcaatccagcctcagtcgcccgggcccagcctgcttcgctccagaccgggcctcctggcctcgccccccgcgcccccgagccaggccgcggtgcgggtcagcctgcccatttaggtctccgtctttactctgtccagccctgtcagtcacaaaattcattctccgatcctacgagctggcttt

SEQ ID NO: 52827 - DNA, 580 bp, Homo sapiens
agagctgaaccaggatcagactgctctttaaaaacacctgttctgtaaacctgagttagtgagggcagcatcttccaastgactcagcccagccactgctgcccctctgccagagggcctggtgccattcgggcaaggactcaggtgccttacccccagacccttcatgacccactgccacacaaaggcgagggtgccagcaccaatgggcacatccatcccaatctgccatttcaaagcagctgcctgcaggctgtgtccgccctctgctagcagagtgcaatggggcagagaaattaaaatccaggggagctggggaaaaaagaaagatggaaatcttaaagacagtatcttggaagcatacgttttagaatcactgcagccagttccctgtcaagaaaatattggccttgttggttggtccaatctcatgtagccacagatggttttatgcctcactattcagatacccactccccagagtagtgagaaacaaaggatgtggtgctttgtggtgtagttattctgccacctagtgttacatgtaaaaacaaacaaataaattaaaaaaaaaaggcta

SEQ ID NO: 52828 - DNA, 539 bp, Homo sapiens
tgcaggtttgttacatatgtgtacatgtgccatgttggttcactgcacccattaactcctcatttacattaggtatttctcctaatgctatccctccccgctgcccacgctgcatgacaggccccagtgtgtgatgttccccgccctgtgcccaagtgttctcattgttcaattcccacctatgagtgagaacatacagtggttggttttctgtccttgcgatagtttgctcagaacaatggttttcagcttcatctatgtccctacaaaggacacgaactcatccttttttatggctgcatagtattccaaaggattataaatcatcctactataaagacacatgcccacatatgtttattgyggaactattcacaatagcgaagacttggaaccaacccaaatattcatcaatgataaactggattaagaaaatgtggcacatatacagcctccattcttattaaagaaaactgcactggctacacctttctgatcctctgtagcctggtcttgaagatgagacaaaatcatctctg

SEQ ID NO: 52829 - DNA, 1096 bp, Homo sapiens
gcatttatagagctagcaataagtgggagttgagaattccaaataacctagtgcaaaacgtctcccaaaccaggaagtaaatagctccaagtaagcgcctggctctgagattactacaagatgtttctttgctctcttagcctgagttccttccgggctatctgtatctggggaattgtgagtctgagaatggtttcttctggtttctgcttggtattttaattggcatattaagttttttatctacttctcctytatgtttttaataatacccctttgtggttgcaggctaagtgcagaaagaacgtattagaaatagctcatagagataaaggccttaaacacactgagggctagtagcctgggatcatctaattgcaagctgagggagctggctgccaactccatgaggtgtttttggagggctgcattcactgggtgaggagatggggaggctcgggggcacccaaaggaccagctgaaattctcctgttctgattctcaaggacggccactgggccttgtctcttttcctgagagccccagtcaagaactcttaatgtctcgggcctctccttcaaggctgaaaatgacatttaataggtaacaccggtttgggtagaaaggaatgcatttctcaaaaacataatcctgtctttggccctgctaatgatagccacaaaccaaggaggaagaaaaacatttttaaacctaattctgggaagtagattgccccctgacctcctccccagggccagaacaccaactatcagactgaaggcaaacatgctgcaaaacaagacagtggggagacaccacttcatgactaattggctttaggaacatggaataaaggaaaatatataaacaactatctgagctttaaaaaataaatactactaagggccatggattgctcacataatttcacttttattagaaataccaaccccagtgactatcactgtcccaccctaatgttgagttcatttgagatctagtattgtaaaagataaatcttcaactatattcaaaattttactggtttttggtccctctttcattttttttacctggtggtttcagagaaatctca

SEQ ID NO: 52830 - DNA, 1096 bp, Homo sapiens
gcatttatagagctagcaataagtgggagttgagaattccaaataacctagtgcaaaacgtctcccaaaccaggaagtaaatagctccaagtaagcgcctggctctgagattactacaagatgtttctttgctctcttagcctgagttccttccgggctatctgtatctggggaattgtgagtctgagaatggtttcttctggtttctgcttggtattttaattggcatattaagttttttatctacttctcctctatgtttttaataatacccctttgtggttgcaggctaagtgcagaaagaacgtattagaaatagctcatagagataaaggccttaaacacactgagggctagtagyctgggatcatctaattgcaagctgagggagctggctgccaactccatgaggtgtttttggagggctgcattcactgggtgaggagatggggaggctcgggggcacccaaaggaccagctgaaattctcctgttctgattctcaaggacggccactgggccttgtctcttttcctgagagccccagtcaagaactcttaatgtctcgggcctctccttcaaggctgaaaatgacatttaataggtaacaccggtttgggtagaaaggaatgcatttctcaaaaacataatcctgtctttggccctgctaatgatagccacaaaccaaggaggaagaaaaacatttttaaacctaattctgggaagtagattgccccctgacctcctccccagggccagaacaccaactatcagactgaaggcaaacatgctgcaaaacaagacagtggggagacaccacttcatgactaattggctttaggaacatggaataaaggaaaatatataaacaactatctgagctttaaaaaataaatactactaagggccatggattgctcacataatttcacttttattagaaataccaaccccagtgactatcactgtcccaccctaatgttgagttcatttgagatctagtattgtaaaagataaatcttcaactatattcaaaattttactggtttttggtccctctttcattttttttacctggtggtttcagagaaatctca

SEQ ID NO: 52831 - DNA, 627 bp, Homo sapiens
cagttggaaccaggaactctgctgtcaggttgagagttttgtttctcttccagcttttcactgtgtgggggtcttttctcttatgtcagctctttctatcacatggcagctgacctctcacgctccactctgcagcttggacacccagtagaccctgaatttcactctctctaaaaggttctgagggctcatcctgggccaggggccctcctgtgcactgttrgctatggccacgggagcctccagagctgcctggtagcttcaggttgacctgcttatcaggcctacgatccttctgatttaagtacagctggaaagtattatctaattaagttcatgatagtgcttttggagaacttgtcaaattacagccaatgagaaaataaggacctagcatactgtggagaaccattaaaaatttgagaagaaacaacaagtattatgtcaacttacttcaaaggcgtagttttgggaatttgatgcagtaaagattaccctgttttatgattgttccttgaaagtcaaatgggggacctgtccattgtgctctattaatcttgtcagaaaactgtcaccaaaacaaaacttgagtttgtccttgttctaggagttactgggtagttgtaa

SEQ ID NO: 52832 - DNA, 627 bp, Homo sapiens
cagttggaaccaggaactctgctgtcaggttgagagttttgtttctcttccagcttttcactgtgtgggggtcttttctcttatgtcagctctttctatcacatggcagctgacctctcacgctccactctgcagcttggacacccagtagaccctgaatttcactctctctaaaaggttctgagggctcatcctgggccaggggccctcctgtgcactgttagctatggccacgggagcctccagagctgcctggtagcttcaggttgacctgcttatcaggcctacgakccttctgatttaagtacagctggaaagtattatctaattaagttcatgatagtgcttttggagaacttgtcaaattacagccaatgagaaaataaggacctagcatactgtggagaaccattaaaaatttgagaagaaacaacaagtattatgtcaacttacttcaaaggcgtagttttgggaatttgatgcagtaaagattaccctgttttatgattgttccttgaaagtcaaatgggggacctgtccattgtgctctattaatcttgtcagaaaactgtcaccaaaacaaaacttgagtttgtccttgttctaggagttactgggtagttgtaa

SEQ ID NO: 52833 - DNA, 627 bp, Homo sapiens
cagttggaaccaggaactctgctgtcaggttgagagttttgtttctcttccagcttttcactgtgtgggggtcttttctcttatgtcagctctttctatcacatggcagctgacctctcacgctccactctgcagcttggacacccagtagaccctgaatttcactctctctaaaaggttctgagggctcatcctgggccaggggccctcctgtgcactgttagctatggccacgggagcctccagagctgcctggtagcttcaggttgacctgcttatcaggcctacgatccttctgatttaagtacagctggaaagtattatctaattaagttcatgatagtgcttttggagaacttgtcaaattacrgccaatgagaaaataaggacctagcatactgtggagaaccattaaaaatttgagaagaaacaacaagtattatgtcaacttacttcaaaggcgtagttttgggaatttgatgcagtaaagattaccctgttttatgattgttccttgaaagtcaaatgggggacctgtccattgtgctctattaatcttgtcagaaaactgtcaccaaaacaaaacttgagtttgtccttgttctaggagttactgggtagttgtaa

SEQ ID NO: 52834 - DNA, 627 bp, Homo sapiens
cagttggaaccaggaactctgctgtcaggttgagagttttgtttctcttccagcttttcactgtgtgggggtcttttctcttatgtcagctctttctatcacatggcagctgacctctcacgctccactctgcagcttggacacccagtagaccctgaatttcactctctctaaaaggttctgagggctcatcctgggccaggggccctcctgtgcactgttagctatggccacgggagcctccagagctgcctggtagcttcaggttgacctgcttatcaggcctacgatccttctgatttaagtacagctggaaagtattatctaattaagttcatgatagtgcttttggagaacttgtcaaattacagccaatgagaaaataaggacctagcatactgtggagaaccattaaaaatttgagaagaaacaacaagtattatgtcaacttacttcaaaggcgtagttytgggaatttgatgcagtaaagattaccctgttttatgattgttccttgaaagtcaaatgggggacctgtccattgtgctctattaatcttgtcagaaaactgtcaccaaaacaaaacttgagtttgtccttgttctaggagttactgggtagttgtaa

SEQ ID NO: 52835 - DNA, 627 bp, Homo sapiens
cagttggaaccaggaactctgctgtcaggttgagagttttgtttctcttccagcttttcactgtgtgggggtcttttctcttatgtcagctctttctatcacatggcagctgacctctcacgctccactctgcagcttggacacccagtagaccctgaatttcactctctctaaaaggttctgagggctcatcctgggccaggggccctcctgtgcactgttagctatggccacgggagcctccagagctgcctggtagcttcaggttgacctgcttatcaggcctacgatccttctgatttaagtacagctggaaagtattatctaattaagttcatgatagtgcttttggagaacttgtcaaattacagccaatgagaaaataaggacctagcatactgtggagaaccattaaaaatttgagaagaaacaacaagtattatgtcaacttacttcaaaggcgtagttttgggaatttgatgcagtaaagattaccctgttttatgattgttccttgaaagtsaaatgggggacctgtccattgtgctctattaatcttgtcagaaaactgtcaccaaaacaaaacttgagtttgtccttgttctaggagttactgggtagttgtaa

SEQ ID NO: 52836 - DNA, 597 bp, Homo sapiens
tttggtctggaatttatattggagtaaggcatgagaaaggatccagctttattttttcaggtagcttgacagatcccccagttttgtttataggctggctagtccaattttttcctcatcgatttgcgttcttagaattgaatattgattgggaggtcatctcttctgtttctcaagaaatgcacagtttatctagaactacttgctgcagtatgtagctaatgagcacttgaaatgtgactagtttgacttgagatatggttttacgtgtaaatatacactgcattttaaaggcttagttttgttttaaatgtagagaatctcattaataattttgtttgcatgttaaaataactttatggagatattggattaaataagatattaaaattaacttcacytgtttctttttaccttttaaaatacagatactggaaaaattttaattacatatgtgagtcatattacatttctgttagacagtgcttctctagaacaagggtcaacaaactacctgtttttgtatgacctgtgagcttaaggattttttttacatctttaaggaattatatgtggcacacacatctctttacagaa

SEQ ID NO: 52837 - DNA, 537 bp, Homo sapiens
tgtggttttgatttgcatttatctaatcgtcagtgatgttgagcttttttcatatgtttgttgaccgcatgtatgtcttttttwaagaagtgtctgttcatgtcctttgcccactttttaatggagttttttttcttgtaaatttgtttaagtaccttgtagttgttgaatgttagatatttgtcagatggatagattgcaaaatttttctcccattctgcaggctgtctgttcactctgatgatagtttcttttgctgtgcagaagctcttcagttttgttagatcccacagacatttgtgctttccatgacaacttgcagcctctccggaggcaccaggcagtgaccctgactctgccgggagccccttcctcacatcgtgtagaaagtaagtctttgtggtcaatggatgaggagagtgcgctcttctagaatcacagagggtgttttccttcctcacatcgtgtagaaagtaagtctttgtggtcaatggatgaggagagtgcgctcttctagaatcacagagggtgttttcc

SEQ ID NO: 52838 - DNA, 602 bp, Homo sapiens
caaaattgattttgagaaacaccagactgtgtaacttttacttctctgtagcttacatgtaaattccrgcctgatctggctagcctacctctgccatactatctcttgtcaccctacccacttttctacaaaattgatgtgttttccttaaacatatcatgtcctctttttttctctctgagttgtctgtgttccctcttctttttcaccagactttttgagactcaggtcagttatcttgtagtgttgctgtatcttccatcgtacagtggaatggcatcttacagaaggggtttcggtcctatggttagcttaatgttgaagtcagggaaagtcaaaatcaccattggaactcccttcaactgtctataaaatacactatgcacagtaccttggtttacgtatatttgcataaatacatactttgtatagtcacatgttgtatgacaacttactgagttgttcgatgaacaactctatgtgctaataataattttgatgtattaaaatgggaaagcatttgcttaactgagtggagaggcacaggttgctgagtcagacgtatctcctgttgcacacgtaccttcaggatggacttgctg

SEQ ID NO: 52839 - DNA, 1932 bp, Homo sapiens
tgccccacgtatttgaagagaacttgcactgaagtctcttctcaatttactgtactgttttcctagagtaaagatactaaagaaatctgtgcacttttgtatcacagattgtttatcaacatcgagggcttttctctggctttcaaagcaaatttggcattagcagggctacatcccgaggggacacagcagaaatcagggcccatttattcctgaacagtatctctactgtgctttccagagttccacaaagtccacctctctgcagaacctaagctccttttatcacaagctggaggggggggggttgtcctcttctcccccttgcccaagactctagccccacctcctcatggcactctgtcaccaacaataagtcatcgccctccatcccttgctcatgataaaaaagtaagggacatgcgcaacaatgagaatgtacttaatgccactgaattgtacacttaaaaatggctaaagtggctgggtgtggtggcacgcgcctgtaatcccagctactcaggaggctgaggcacaagagtcacttgaacccgggaggtggaggttgcagtgagctgagatcacatcactgccctccagcctgggcgacagagtgagacccagtctcagggaaaaaaaagaaaaaaaagaaaaaaggctaaaatagcaaatgttatgttaggtatattttaccacaattaaacataaggagcagggggattgtcttactgtaagattgcctgcagctcagcccaagcccagcctgccctcacctcaaagtcttctccagtgccctcctgcctgggtaatccaagcaaaatgacgcctggcctcgcctcctgtctgcttccatgtgctctttcctgggcagtgtgcagacccaggatgtctctttgcaacttcctccccaacatacggccccaggcaccgcctcttgcctcaggagaccccactgctctcaggtcctcatctccaaggtcccacccgcaagctctttcctgagctctccactgtcagtcccacttgcaggggaggctgggcctataatttctgctacttataagctattagcaatgcctgatccctcaacaatttcattttttattttccaaatgtcaaatgagcttctcagcagccaagcctaataatgtgtccttatttgaccccagactcccctgacttccaggtacaaggctttctcacagcccacggggcctagaaagtgccttatatcctcctggcatctctcgcccaccctctgccaggcattctgtgccctgcccatcccgctaccccactgtggccgggcagaggagactggtttgtgtccttgtgcgggcaccaatgggtctcgtggatcccctatagctccctgcatttctcacggacaagttcatttccctctctgctttggtctccctgttctttttctcccatcctccaaacctcccatcagaaaaattcttccaaactctagtgagctgaatcgtgtctccatcaaattatctcctcctggaacctcggaatttaaccttacttggaaagagggtcttcactgatgtcattgaagtacggattgagatgaggtcacgttggattaggatggacccyaaatccaatgagagtgcctgtaagagacagaagaggacagagggagacacagggcagaggccgacgtgaggatggaagctgagattgcagtgttgtgtccgcaagccgaggaacaccaagggttgccggccaccagcagcagctgggagagaggcatggaaaagattctcccttggaggctccagggggaaccagccctgccgacaccttgatttctgactgctggcctcctgacctctgagagaataaagttctgttgttctaagccactcagtttgttaagacagccccaggaaattaattcataaaccaactggcaaa

SEQ ID NO: 52840 - DNA, 1354 bp, Homo sapiens
gtgagtacaacagtagtagagctggaactaactgggatctatgctttctaattaagctgattaaaatttactcaatcaaagagatttaaggagattgatggttacagcctagcatgctatccatctttcattccaggctttaacctagaacactctgctattaattatcctgagtattagatttacatgtaagatttcttttgaaagtctttcaaaacatcattttattctcttacatacccttttctcgttgaaaattatattggtcactctgaatacaaagagtatttctgttatgacactgatgatttgaatacagaaatcacttgcttgaacagctatgactgataagtaactaagaaaacttgggaacctcagtgaacctggtaacctaagtcaactaaggtttgagactttaagagttgtcaatgggattattatcttggctctgcaagtgggccgtgggttggaagccactgcttagacagaaacctgttactttgtgggctgcttcaaagagattgagggctttgaaatagggagatatcaagtccatctctctattgtttaaagcaaatgtaaagcagatgtatagcagccgctaagatacatctgctatatagtaaattaaaagagggcatggagatgtgtagctacccagagtaccactgagtcactatcttttaattatcggcctgcccaaatactttgcaagtgaatgtagttcaggcaagccagaatataagacggaaatgggttaggatgagattagcacctccaggagcctagagggaaaaatgccttatctagtccagtggaaaaatacctggggcttcacatcctacaatcagacagtgttcaggttttatgagaaactgaggtttctagaaaatccgaaaatagttgtcaatttatgtctatctccacagacacacacaattatattatattatatatatttgtatattatatatatagtattggtatatattaagattacatattaaacattttctttaacctaaatttttagttaatcataagaataactaaaaattggccgggcgcggtggctcacgcctgtaatcccagcactttgggaggccgagacgggcggatcacgaggtcaggagatcgagaccatcttggctaacacggtgaaaccccgtttctactaaaaatacaaaaaattagccggacgtgttggcgggcgcctgtagtcccagctacttgggaggctgaggcaggagaatggcatgaaccygggaggcggagcttgcagtgagccgagatcgcgccaccgcactccagcctgggagacccagcgagactccgtctcaaaaaaaaaaaaaaa

SEQ ID NO: 52841 - DNA, 1354 bp, Homo sapiens
gtgagtacaacagtagtagagctggaactaactgggatctatgctttctaattaagctgattaaaatttactcaatcaaagagatttaaggagattgatggttacagcctagcatgctatccatctttcattccaggctttaacctagaacactctgctattaattatcctgagtattagatttacatgtaagatttcttttgaaagtctttcaaaacatcattttattctcttacatacccttttctcgttgaaaattatattggtcactctgaatacaaagagtatttctgttatgacactgatgatttgaatacagaaatcacttgcttgaacagctatgactgataagtaactaagaaaacttgggaacctcagtgaacctggtaacctaagtcaactaaggtttgagactttaagagttgtcaatgggattattatcttggctctgcaagtgggccgtgggttggaagccactgcttagacagaaacctgttactttgtgggctgcttcaaagagattgagggctttgaaatagggagatatcaagtccatctctctattgtttaaagcaaatgtaaagcagatgtatagcagccgctaagatacatctgctatatagtaaattaaaagagggcatggagatgtgtagctacccagagtaccactgagtcactatcttttaattatcggcctgcccaaatactttgcaagtgaatgtagttcaggcaagccagaatataagacggaaatgggttaggatgagattagcacctccaggagcctagagggaaaaatgccttatctagtccagtggaaaaatacctggggcttcacatcctacaatcagacagtgttcaggttttatgagaaactgaggtttctagaaaatccgaaaatagttgtcaatttatgtctatctccacagacacacacaattatattatattatatatatttgtatattatatatatagtattggtatatattaagattacatattaaacattttctttaacctaaatttttagttaatcataagaataactaaaaattggccgggcgcggtggctcacgcctgtaatcccagcactttgggaggccgagacgggcggatcacgaggtcaggagatcgagaccatcttggctaacacggtgaaaccccgtttctactaaaaatacaaaaaattagccggacgtgttggcgggcgcctgtagtcccagctacttgggaggctgaggcaggagaatggcatgaacccgggaggcggagcttgcagtgagccgagatsgcgccaccgcactccagcctgggagacccagcgagactccgtctcaaaaaaaaaaaaaaa

SEQ ID NO: 52842 - DNA, 1354 bp, Homo sapiens
gtgagtacaacagtagtagagctggaactaactgggatctatgctttctaattaagctgattaaaatttactcaatcaaagagatttaaggagattgatggttacagcctagcatgctatccatctttcattccaggctttaacctagaacactctgctattaattatcctgagtattagatttacatgtaagatttcttttgaaagtctttcaaaacatcattttattctcttacatacccttttctcgttgaaaattatattggtcactctgaatacaaagagtatttctgttatgacactgatgatttgaatacagaaatcacttgcttgaacagctatgactgataagtaactaagaaaacttgggaacctcagtgaacctggtaacctaagtcaactaaggtttgagactttaagagttgtcaatgggattattatcttggctctgcaagtgggccgtgggttggaagccactgcttagacagaaacctgttactttgtgggctgcttcaaagagattgagggctttgaaatagggagatatcaagtccatctctctattgtttaaagcaaatgtaaagcagatgtatagcagccgctaagatacatctgctatatagtaaattaaaagagggcatggagatgtgtagctacccagagtaccactgagtcactatcttttaattatcggcctgcccaaatactttgcaagtgaatgtagttcaggcaagccagaatataagacggaaatgggttaggatgagattagcacctccaggagcctagagggaaaaatgccttatctagtccagtggaaaaatacctggggcttcacatcctacaatcagacagtgttcaggttttatgagaaactgaggtttctagaaaatccgaaaatagttgtcaatttatgtctatctccacagacacacacaattatattatattatatatatttgtatattatatatatagtattggtatatattaagattacatattaaacattttctttaacctaaatttttagttaatcataagaataactaaaaattggccgggcgcggtggctcacgcctgtaatcccagcactttgggaggccgagacgggcggatcacgaggtcaggagatcgagaccatcttggctaacacggtgaaaccccgtttctactaaaaatacaaaaaattagccggacgtgttggcgggcgcctgtagtcccagctacttgggaggctgaggcaggagaatggcatgaacccgggaggcggagcttgcagtgagccgagatcgcgccaccgcactccarcctgggagacccagcgagactccgtctcaaaaaaaaaaaaaaa

SEQ ID NO: 52843 - DNA, 614 bp, Homo sapiens
ttttgtctcataaaaggaagtgaatctgcaagtcagaaaacacaacattctcttaagttataaagaaaaattaacatggtgggatattaaatattcaatggaaagatttttcagtgtaatttcactgaggttgagaaacagtcttcctacggccattatcatatgaagtgtggtggaaagtaaagagtgttcctgccaagtgcccctccctgagctggaaaggttccctacagttctcaagttcaaatgcstctccctagttcagaagcttcagttcagaagcccctgtatggcttctcagctcttccatctcctgcaaaaaccaattcctgcgctcacatccctctgttttcaatactttctggtttctttttcctgggtggactttgctgggtgtgctcactaattgatgtccagccttaacccaaacacccttgaggaaggggcaccccttacttcccaaacagagcagcctacttcatctcaaaggcagggctgcctgaaggtgccacttccacaggggttcagcgtgtagacagaatctcgattgaaggaggtactagaaagatctttctgggcaggggaagaagcatatgaaggtttgtcaattacca

SEQ ID NO: 52844 - DNA, 490 bp, Homo sapiens
gaaagaaagaaaaggcaaggccaggcaagtccaggcaaggcaaatctacctgctttcactacatctggggagaatcaggaaagtccccaacaacaacaaggcctaaagtggagctgccatctgtcaaacccgagcggaagagtccacgcgggttaaagacacgaagaaagacaaggaaacccctgaccaaggagaagaacaatcgggcccagccagggtctgtctcccggggttgtctgggcaaccagggagggcgggcctccgagactccgtctcgaaacatcaatcatgataataacataaaatgaagttaaaaaaagaaatcacgcataattcctaacgtgtttgaggcctcgaaaggcgagaggcgtacgtgtatgtcacggtggggttgttctgttttgttgttttyttcttttttcttttcttctttttccccagaaactcactttttaattattttgttgcgtttcattttcattttcatttt

SEQ ID NO: 52845 - DNA, 569 bp, Homo sapiens
gcatgagccaccgcgcccggccagggctgtctttcaaagtgccatgttctccttgtccaaggtacagccaggcaacctggccaaatccataagactcactcttccaggggggtaaattctgaatggggtgacaagttaaagctcactatttygcctgcaatctccagtgaccatgtctgtgagctcctactacctccaaccccagaactgcccacatccttgtccttgcaagacctgcttgctcagctttttcttgagtctttaagaatgagtttctgttgcttgcagccatcaaactccaagtgatgcagggtctgatagtgggcaaggtgtgtagcctctttgagccctggattctgcatttatatactggagataccaggacatacctcatgaggcgaggggcaaggtgcttagtccatcatgtgtgtttcacaaatatttcaccctttcttccttgccctgctgaacaagtgaccttcaaaaggtaatggactgtacccacattccacaggtggccagtggcaaacatcgatggtcaagtctcctgagacctcgtgttgttcttc

SEQ ID NO: 52846 - DNA, 1020 bp, Homo sapiens
ttaacatatatttttataagattgacaaataataaggcaaaattcataagtgtcctacacttatgtcaaaatatcctacaattagtctccctagccacacctccatacaaattaatacaaaaacaacaattgaaaatcttccctaacataacttcgtgtaaaaacaaaagtgaaggtgggargaggataaggagaccaaaaaaaaccaaacaaccgtttagatcacagaccacaggcagtgtaaacattctgctctatgggctaatgagttccaatgtggtgtactctgctcagttctgggtagcacatactaagggtactctgagaggaaaagatgcagactcgcaggacacagaagaccctgaagataggagactaccctgggcatgcttagcccaaagaagaacgaaggaggctcgtggctgctgtcttcaacccatatcacatcgctctcattatatttaaccttgggaaagcttgccactgcacttagaataaaatgtgaattgctcctacatccagccctgtcttttcttcactcagttccagcagacagagcttatcctgtatccaccttttgtatgaaatgctcttcagtctacctgggacattatttcatagctgcctcttttatatcctttacatctcagtttaaatatcaccttctcagaagggacttgccccacctcactctctccaaattagttccccaactggccattttctgtcatatcactaataattcatcctagttttttgtttgctttattatctatttcctcccaccataaggtaagctccctgaggacatggacttgtcttgctcaggctacattccttgtctctagaatagcacctgcatataacaggtatgaaaactattttttgaatcaatcagttcaggcagaataaataaattgtacctggagaactccttttccacttccccctttctttctctgcatcttcatcacttcaccaccaccacaagcaattgaacatttatacagttcattacag

SEQ ID NO: 52847 - DNA, 673 bp, Homo sapiens
atccaggagtttcttaagtgcctaacagacccacattcccccttcttaatccataggaataataggcaaattttcctacttaaatttccaccttcatatcctatgacccttctacactggccatcaacaacaaaaccatcaacaaatagacaaaggagaacttagtggactgtgagatgacctagtgtgaaattaagcacaatgagagtctaaccaactcaataacatgaaatcccatggagacagtcacaagactggaagactcaatcttccagtcttggataacagagcaataaatgcctacttgagagcgagtgagatgaccaggtcaccagatccagctactgatgggcaactggaattgctgaagaattagagacaatggaatactaattgttccaattctcaagaccaaacaatatgacctgaaactattttgtgtgttttcttatctcctcatacatccatataaaaaatataaaaaactgataaakcccagtacagtagctcagccttataatcccaaaactttgtgaggacaaggcaagaggatcacttgaggccaggagtttgagaccagccctgggtaacatagcaagaccctgtctctaaaaataaaaacaaaaacaaaaaaaaaatacaagtcatgtagttgaacaaccacatatagatg

SEQ ID NO: 52848 - DNA, 540 bp, Homo sapiens
ccactcttctgagtgatggaaatgctctacgtcctgattgggtggtagttacacagctgtttacatttaccaaactcatcaaattgtccactgggggggaaaaactattattttcactgtatacgaaaacttcgcctcaacaaaaaatgaactaaaaaagaaaaaaaaggggaggggggctggcgacgttgaaaagtaacgctaaactatgtaaggatttgataattggggtaagccttttctttaaaacgtctagtaaagaaaacattccaagaaggtctgctagattctgtgactaaacaaggacattaaaaagccctgaatccagcttggtcaacgtagtgaggccctgtctctacggaatttttttaaagttagccaggcgtagtggtgcgcgcctatagtcccagctactcgggaggctgaggtgggaggatggtttgaacacagcagctcaaggctgcagtkagcagtggtcggtgcccactatactccagcctaagggacagaaaccttgtctcaaaaaaaagaaaaaagaaa

SEQ ID NO: 52849 - DNA, 540 bp, Homo sapiens
ccactcttctgagtgatggaaatgctctacgtcctgattgggtggtagttacacagctgtttacatttaccaaactcatcaaattgtccactgggggggaaaaactattattttcactgtatacgaaaacttcgcctcaacaaaaaatgaactaaaaaagaaaaaaaaggggaggggggctggcgacgttgaaaagtaacgctaaactatgtaaggatttgataattggggtaagccttttctttaaaacgtctagtaaagaaaacattccaagaaggtctgctagattctgtgactaaacaaggacattaaaaagccctgaatccagcttggtcaacgtagtgaggccctgtctctacggaatttttttaaagttagccaggcgtagtggtgcgcgcctatagtcccagctactcgggaggctgaggtgggaggatggtttgaacacagcagctcaaggctgcagttagcagtggtcggtgcccactatactccagcctaagggacagaraccttgtctcaaaaaaaagaaaaaagaaa

SEQ ID NO: 52850 - DNA, 587 bp, Homo sapiens
aatatatttattgatattattyattgtatatatttttaactggataaacatcaacatttatgacaggaattttccatgctggggaatttctcattttggtgtttttattaattgctaactcttgtgggatttcttttttcaagtaggacttatttcagtagtttcatggaaaaaatcttagaattgtactattgattttcagtaagtaaagataaatcttcctgtgtctgctttacatcatgtgcattctaccctttaagaatgagttccatttctaagtgagatttaagtaaaactgcatggcaaaatgaggatactataggtatgaattatttattgttttacaaatttgctactttctgaagtgtttttttaaaattgcaagataaatagtggagaagtgttaattcacaatagtaatttggagttttaagtttcatgattgaaattgcttcaagtgaagttttaagtttcatgatttaaatggataaaagtttggctttttataggaataatatcttgattttaatcgtataattttaaactgtaaggccaggcttttaagaaaatcatttttaatgtgaaaa

SEQ ID NO: 52851 - DNA, 587 bp, Homo sapiens
aatatatttattgatattatttattgtatatatttttaactggataaacatcaacatttatgacaggaattttccatgctggggaatttctcattttggtgtttttattaattgctaactcttgtgggatttcttttttcaagtaggacttatttcagtagtttcatggaaaaaatcttagaattgtactattgaytttcagtaagtaaagataaatcttcctgtgtctgctttacatcatgtgcattctaccctttaagaatgagttccatttctaagtgagatttaagtaaaactgcatggcaaaatgaggatactataggtatgaattatttattgttttacaaatttgctactttctgaagtgtttttttaaaattgcaagataaatagtggagaagtgttaattcacaatagtaatttggagttttaagtttcatgattgaaattgcttcaagtgaagttttaagtttcatgatttaaatggataaaagtttggctttttataggaataatatcttgattttaatcgtataattttaaactgtaaggccaggcttttaagaaaatcatttttaatgtgaaaa

SEQ ID NO: 52852 - DNA, 587 bp, Homo sapiens
aatatatttattgatattatttattgtatatatttttaactggataaacatcaacatttatgacaggaattttccatgctggggaatttctcattttggtgtttttattaattgctaactcttgtgggatttcttttttcaagtaggacttatttcagtagtttcatggaaaaaatcttagaattgtactattgattttcagtaagtaaagataaatcttcctgtgtctgctttacatcatgtgcattctaccctttaagaatgagttccatttctaagtgagatttaagtaaaactgcatggcaaaatgaggatactataggtatgaattatttattgttttacaaatttgctactttctgaagtgtttttttaaaattgcaagatamatagtggagaagtgttaattcacaatagtaatttggagttttaagtttcatgattgaaattgcttcaagtgaagttttaagtttcatgatttaaatggataaaagtttggctttttataggaataatatcttgattttaatcgtataattttaaactgtaaggccaggcttttaagaaaatcatttttaatgtgaaaa

SEQ ID NO: 52853 - DNA, 587 bp, Homo sapiens
ggtgatcctccttcctcagcctcttgggtacctgggactgtatgcacatgccaccacgtctagctatttttttttttgtactttttgatacagtcagkgttcatcatgttgcccacgctgatcttaaactcaactcctgggctcaagcagtccacctgccttggcctcccaaagtgctgggattacaggtgtgagacactgcgccctgcccagttttctgttagatgaattaggtataaggaaaataaaaacaaacaaaaaacaggaataaggaaaatagcaggtgtctcactcattttgtatgtttcaaataattctaccgtaaaacattaaaaaaaattcttttcgcttattctaggcagtgatgacttcttagggaattcagtccctcaacctttgctcagatcctacttcacttggtgtactttgcagggggaccttttatgggtcagcaggacacgaggctgggagaagtgatggtggacgaggacggctgggagcagggacccaccttcctgatgtcatgactgtgcaagctggggctgttggtgagtgggctcgggacaagcagagaggcacccgggtgc

SEQ ID NO: 52854 - DNA, 552 bp, Homo sapiens
actaaaaatgcaaaattagctgggtgtgccagagacatcctcccatttgggtactttttattatttaacaaacactggatacataaacaagtgaaacacaacctagacacgatttacagactttctgtttccagttaaaacagagaactatgactaaagtattagtagcatacagagtttatgcataagtacatytctaaataaaattcccaatttgccactcttttgtttggaataatcctcacaaaaccattagaatcctaaagtaaaaatacatttattacttacatcagaaacaacgaattcagaatggaaagtagttaaaaatctgaaatgttttttctcataaacttggaaagaaacaatgaattcaaaatggaaagtagttaaaaatctgaaatgatttttctcataaacttggaaagaactaccttctacttccataaatacattatgctttataacaatgtattgtgttgccacatacaacagacctttatgaactgctaatacaacttttcagtctcactctgaacaattctagattgttga

SEQ ID NO: 52855 - DNA, 552 bp, Homo sapiens
actaaaaatgcaaaattagctgggtgtgccagagacatcctcccatttgggtactttttattatttaacaaacactggatacataaacaagtgaaacacaacctagacacgatttacagactttctgtttccagttaaaacagagaactatgactaaagtattagtagcatacagagtttatgcataagtacatttctaaataaaattcccaatttgccactctttwgtttggaataatcctcacaaaaccattagaatcctaaagtaaaaatacatttattacttacatcagaaacaacgaattcagaatggaaagtagttaaaaatctgaaatgttttttctcataaacttggaaagaaacaatgaattcaaaatggaaagtagttaaaaatctgaaatgatttttctcataaacttggaaagaactaccttctacttccataaatacattatgctttataacaatgtattgtgttgccacatacaacagacctttatgaactgctaatacaacttttcagtctcactctgaacaattctagattgttga

SEQ ID NO: 52856 - DNA, 552 bp, Homo sapiens
actaaaaatgcaaaattagctgggtgtgccagagacatcctcccatttgggtactttttattatttaacaaacactggatacataaacaagtgaaacacaacctagacacgatttacagactttctgtttccagttaaaacagagaactatgactaaagtattagtagcatacagagtttatgcataagtacatttctaaataaaattcccaatttgccactcttttgtttggaataatcctcacaaaaccattagaatcctaaagtaaaaatacatttattacttacatcagaaacaacgaattcagaatggaaagtagttaaaaatctgaaatgttttttctcataaacttggaaagaaacaatgaattcaaaatggaaagtagttaaaaatctgaaatgwtttttctcataaacttggaaagaactaccttctacttccataaatacattatgctttataacaatgtattgtgttgccacatacaacagacctttatgaactgctaatacaacttttcagtctcactctgaacaattctagattgttga

SEQ ID NO: 52857 - DNA, 597 bp, Homo sapiens
gaaactcaggaagcaggaaggcccatggcctggtgctggacactctgtgtccgtccactgataattgccaagccctcatttgcagaagccactggagctcctgcagtagtctgacttttttttcttttttctgagacrgagtttcgttcttgttgcccaggctggagtgcaatggcacgatctcggctcactgcaacctccgtctcccaggttcaagcaattctcctgcctcagcctcccaagtagctggggttacaggcatgcaccaccacaaccggctaattttgcatttttagtagagacagggtttctccatgttggtcaggctggtctcaaactcccaacctcaggtgatcagcccacctcggcctcccaaagtgctgggattacaggcgtgagccactgcgtctgacctagcctgacttttttttaatgcaatgtgtctttctgaacactgtagaccaatccccagaagctgcacctgtgggaaaggctatatttaatatttgtagtctcatatatcagccaaaagctgaatggagagattaacaacattcctaggtggcattattctaataagtttatttttttaattga

SEQ ID NO: 52858 - DNA, 597 bp, Homo sapiens
gaaactcaggaagcaggaaggcccatggcctggtgctggacactctgtgtccgtccactgataattgccaagccctcatttgcagaagccactggagctcctgcagtagtctgacttttttttcttttttctgagacggagtttcgttcttgttgcccaggctggagtgcaatggcacgatctcggctcactgcaacctccgtctcccaggttcaagcaattctcctgcctcagcctcccaagtagctggggttacaggcatgcaccaccacaaccggctaattttgcatttttagtagagacagggtttctccatgttggtcaggctggtctcaaactcccaacctcaggtgatcagcccacctcggcctcccaaagtgctgggattacaggcrtgagccactgcgtctgacctagcctgacttttttttaatgcaatgtgtctttctgaacactgtagaccaatccccagaagctgcacctgtgggaaaggctatatttaatatttgtagtctcatatatcagccaaaagctgaatggagagattaacaacattcctaggtggcattattctaataagtttatttttttaattga

SEQ ID NO: 52859 - DNA, 597 bp, Homo sapiens
gaaactcaggaagcaggaaggcccatggcctggtgctggacactctgtgtccgtccactgataattgccaagccctcatttgcagaagccactggagctcctgcagtagtctgacttttttttcttttttctgagacggagtttcgttcttgttgcccaggctggagtgcaatggcacgatctcggctcactgcaacctccgtctcccaggttcaagcaattctcctgcctcagcctcccaagtagctggggttacaggcatgcaccaccacaaccggctaattttgcatttttagtagagacagggtttctccatgttggtcaggctggtctcaaactcccaacctcaggtgatcagcccacctcggcctcccaaagtgctgggattacaggcgtgagccactgcgtctgacctagcctgacttttttttaatgcaatgtgtctttctgaacactgtagaccaatccccagaagctgcacctgtgggaaaggctatatttaatatttgtagtctcatatatcagccaaaagctgaayggagagattaacaacattcctaggtggcattattctaataagtttatttttttaattga

SEQ ID NO: 52860 - DNA, 971 bp, Homo sapiens
ggccagcctgggctctgcctctatctgctgagcaagccaccgcccctctctgtgcctcagcttccttgcctgtcaaaaagaaggggcaagagtatcctggggagaaggagggggctcaactgtgacttagtgaggcagaaacgctgcctggtttatgcggggtatgaggctggcctagcacccatctcctggcaggtacatctcaggatacacagggccttcattttcactatgaaatttgaagtgaatattgtcattcttgtgcttaaagccatagatgggaaagcgcttttcatctattaaaaaaattctcagctctcatcacatccctctaccactctgtattcaaaccagggaggatttcattactcctcaagccccactgggcaccttccgcccygtctcgtgctgttcccctctatccttccttcaggggtcaggcaagccccatctgattccctccactgggattcgtctctcctcctcatgctccccggcagctgtattactctgacttgtgcttgattcattcattcattcatcattcattcattcattcaacaaacacactgtgagtgccggctctgtgtcctaaagacacaaatcaaagatgggacagagaagaaatggatgaagtggagaaagcaaaggtgaaggtacagaataagtctagacacatttccaaactctctccatccagacttttaaaattctatgtgtttatatttctatgccatatagaattctgttctcttttttaggaattaacatttgtatcctttccatggaatactcgttaagaatacatcaaacgcatgcggtacaaatgaatacttcgaggacagcctgatgattacatgacacctggagatttccatggggacctgtgtggcttgccgttccagttctgtcctctccggggcttgggaaggttccacccagctggaccccgcccacgggcccacctggtg

SEQ ID NO: 52861 - DNA, 547 bp, Homo sapiens
ttgttactgtatacatatatttttatttaactttaaaaatttcttggtattttgcattttggccatttaaaaagattgacactggggcatggtggcatgtacctatagtcccagctactcaggaggctgtggcaggatcacttgtgcctaggtgtttgagtccagcctgggcaatgtaacattgcaataccccatatctttttaaaaaaaaattttttttaaagattggcattgaaaggggttctaaagcaaagaatttggaataaaaytgtattctcagtcatacactttgggttgcattaaagattccatactcagttgctgttttctcactgagaccctgaaaatatcttaacaatagcagcattatttgtgattgggaaaagcagctaagaggcactggctcccatttgctttctatattgaccatatggcaccagtaaatgatattaaactacttcaaagacaagttaaaagtacaagtttccctccccctgctgagtttgctattagttttatgtctagggtgctataccctacaatattt

SEQ ID NO: 52862 - DNA, 547 bp, Homo sapiens
ttgttactgtatacatatatttttatttaactttaaaaatttcttggtattttgcattttggccatttaaaaagattgacactggggcatggtggcatgtacctatagtcccagctactcaggaggctgtggcaggatcacttgtgcctaggtgtttgagtccagcctgggcaatgtaacattgcaataccccatatctttttaaaaaaaaattttttttaaagattggcattgaaaggggttctaaagcaaagaatttggaataaaattgtattctcagtcatacactttgggttgcattaaagattccatactcagttgctgttttctcactgagaccctgaaaatatcttaacaatagcagcattatttgtgattgggaaaagcagctaagaggcactggctcccatttgctttctatattgaccatwtggcaccagtaaatgatattaaactacttcaaagacaagttaaaagtacaagtttccctccccctgctgagtttgctattagttttatgtctagggtgctataccctacaatattt

SEQ ID NO: 52863 - DNA, 553 bp, Homo sapiens
gtgacatggtatctcattgtggtttggartaccctaatgactaatgatgtagaatatctgtcatgtgcttaccagccatctctatgtcttctttgaagaaatgtttattcttccctgatttttgagatcacattctattggttttcctctgtctcctgtatgggttcctagtcttctgtccttgctttaaatattgaagttcctcattattctgccccagatcctatcccaggatgatctcatccatgttcaggcatttgttaaaatctaaaagtcaattatttctaattctccagttcggttctctcttttaatatccagatggatatcaaactatttactgaacatgtttaaacttgaatgtattgttctccaccaaaccccaacccttttttcctaggatgaatggtccaatcattcagcaaaacacccaagctcaaattctagctatcctccttttcccttttcatcaaccgtacatctaaagtgaccaaatccaccctattcaacctcttaaattgtccttaaatagggttttctgaccttttcttaa

SEQ ID NO: 52864 - DNA, 1628 bp, Homo sapiens
ggactaatacacttggaaatggctaagttccctttttaaattggttttcaattttccctgctcttaatactttaaaattctcccaagaagttaaggctgggtgaaacattaaaccttccagaagaacrtgctaaagggtcgtccacgtgcagagagtccttgtgtgctgcttctgtcacccccagacccactgtccacctgccagcccccttctgccctggaagcctgccctgcatggctgcatggactgcactctacaactcctgggccctctggcttctgggtgggtttggccaggggccgggggagccccagcaggagttcagggggagagaggaaggtgaggcttctcattgctctgcatcccccgactctgtaaaatcacctgtggaggggctgtcctcctcacaactttctccttccatgtttcagttctgataacctctccctccctcaccccgctggatctggtgcgagtgacagctcacctgctgtggcctggggttcctgcatggctcccctgcacctgcccacaccttgtaggtagtccgtatatagagaaactctcctctatgatgctaatttgagtgtgccttctgcttcctgttgggaccctgcctgataaggtctggagagtttagaaatcctttgacaggagaatgtgccttacctcaatttaccagcagcttgagggcttgaagccagcagaagctttgctacttctcacaaagtctctgcagagttagggataagggcacatgaaagaggccgctcacaacctagacaatttctactttcccacctggcaagaaaattcacttctacctcctgatcccacattgatttggtggacatggctgtttttcgttatccccaaaagtcatatgcctgtttacccatgtgtgtatgccagagagaggtccactgctcaggtcacttaaatcctcttcaaatgtgcgttgcccctcatgctgcgggggaggaaacagacccaaagaggaagaggatctgccctgaatgagctgccagctagccgtaaccctaggaataaaacccaggtgcacctgacccaaactggagacggctggacaacagaactggcctgttagctgggtgcaatcagccaggcaggaatgatggttacttctccacactgccaacaggatcacctcccagtgagctggacctgatgaagtaaggggcaacctcctattgaccttcactacagagccctggctgtaggagatacccaggcgatatgggttgacttgaattcatcatttatttcaaagcagagggcaaaggagctggaagaggtcagagctagtttgcagacacagaaaacctcacttcctggtggattctttctaggaggtgcatttcacaatggctgtttcacctcttagtaacctggcagcttccacagggccttactgcacacgttctgagcgccaggaaaaatgattcctctcactgccaaccatggtttttaatatgtgagcatatggctctgctgcttcttttcaatctccctccactagtgctgagctacggcactggggaggaaaccagaaacgcagagtgggtttgtctgatttgtccaagggtgtattttagtattggtagca

SEQ ID NO: 52865 - DNA, 1628 bp, Homo sapiens
ggactaatacacttggaaatggctaagttccctttttaaattggttttcaattttccctgctcttaatactttaaaattctcccaagaagttaaggctgggtgaaacattaaaccttccagaagaacatgctaaagggtcgtccasgtgcagagagtccttgtgtgctgcttctgtcacccccagacccactgtccacctgccagcccccttctgccctggaagcctgccctgcatggctgcatggactgcactctacaactcctgggccctctggcttctgggtgggtttggccaggggccgggggagccccagcaggagttcagggggagagaggaaggtgaggcttctcattgctctgcatcccccgactctgtaaaatcacctgtggaggggctgtcctcctcacaactttctccttccatgtttcagttctgataacctctccctccctcaccccgctggatctggtgcgagtgacagctcacctgctgtggcctggggttcctgcatggctcccctgcacctgcccacaccttgtaggtagtccgtatatagagaaactctcctctatgatgctaatttgagtgtgccttctgcttcctgttgggaccctgcctgataaggtctggagagtttagaaatcctttgacaggagaatgtgccttacctcaatttaccagcagcttgagggcttgaagccagcagaagctttgctacttctcacaaagtctctgcagagttagggataagggcacatgaaagaggccgctcacaacctagacaatttctactttcccacctggcaagaaaattcacttctacctcctgatcccacattgatttggtggacatggctgtttttcgttatccccaaaagtcatatgcctgtttacccatgtgtgtatgccagagagaggtccactgctcaggtcacttaaatcctcttcaaatgtgcgttgcccctcatgctgcgggggaggaaacagacccaaagaggaagaggatctgccctgaatgagctgccagctagccgtaaccctaggaataaaacccaggtgcacctgacccaaactggagacggctggacaacagaactggcctgttagctgggtgcaatcagccaggcaggaatgatggttacttctccacactgccaacaggatcacctcccagtgagctggacctgatgaagtaaggggcaacctcctattgaccttcactacagagccctggctgtaggagatacccaggcgatatgggttgacttgaattcatcatttatttcaaagcagagggcaaaggagctggaagaggtcagagctagtttgcagacacagaaaacctcacttcctggtggattctttctaggaggtgcatttcacaatggctgtttcacctcttagtaacctggcagcttccacagggccttactgcacacgttctgagcgccaggaaaaatgattcctctcactgccaaccatggtttttaatatgtgagcatatggctctgctgcttcttttcaatctccctccactagtgctgagctacggcactggggaggaaaccagaaacgcagagtgggtttgtctgatttgtccaagggtgtattttagtattggtagca

SEQ ID NO: 52866 - DNA, 1628 bp, Homo sapiens
ggactaatacacttggaaatggctaagttccctttttaaattggttttcaattttccctgctcttaatactttaaaattctcccaagaagttaaggctgggtgaaacattaaaccttccagaagaacatgctaaagggtcgtccacgtgcagagagtccttgtgtgctgcttctgtcacccccagacccactgtccacctgccagcccccttctgccctggaagcctgccctgcatggctgcatggactgcactctacaactcctgggccctctggcttctgggtgggtttggccaggggccgggggagccccagcaggagttcagggggagagaggaaggtgaggcttctcattgctctgcatcccccgactctgtaaaatcacctgtggaggggctgtcctcctcacaactttctccttccatgtttcagttctgataacctctccctccctcaccccgctggatctggtgcgagtgacagctcacctgctgtggcctggggttcctgcatggctcccctgcacctgcccacaccttgtaggtagtccgtatatagagaaactctcctctatgatgctaatttgagtgtgccttctgcttcctgttgggaccctgcctgataaggtctggagagtttagaaatcctttgacaggagaatgtgccttacctcaatttaccagcagcttgagggcttgaagccagcagaagctttgctacttctcacaaagtctctgcagagttagggataagggcacatgaaagaggccgctcacaacctagacaatttctactttcccacctggcaagaaaattcacttctacctcctgatcccacattgatttggtggacatggctgtttttcgttatccccaaaagtcatatgcctgtttacccatgtgtgtatgccagagagaggtccactgctcaggtcacttaaatcctcttcaaatgtgcgttgcccctcatgctgcgggggaggaaacagacccaaagaggaagaggatctgccctgaatgagctgccagctagccgtaaccctaggaataaaacccaggtgcacctgacccaaactggagacggctggacaacagaactggcctgttagctgggtgcaatcagccaggcaggaatgatggttacttctccacactgccaacaggatcacctcccagtgagctggacctgatgaagtaaggggcaacctcctattgaccttcactacagagccctggctgtaggagatacccaggcgatatgggttgacttgaattcatcatttatttcaaagcagagggcaaaggagctggaagaggtcagagctagtttgcagacacagaaaacctcacttcctggtggattctttctaggaggtgcatttcacaatggctgtttcacctcttagtaacctggcagcttccacagggccttactgcacacgttctragcgccaggaaaaatgattcctctcactgccaaccatggtttttaatatgtgagcatatggctctgctgcttcttttcaatctccctccactagtgctgagctacggcactggggaggaaaccagaaacgcagagtgggtttgtctgatttgtccaagggtgtattttagtattggtagca

SEQ ID NO: 52867 - DNA, 1628 bp, Homo sapiens
ggactaatacacttggaaatggctaagttccctttttaaattggttttcaattttccctgctcttaatactttaaaattctcccaagaagttaaggctgggtgaaacattaaaccttccagaagaacatgctaaagggtcgtccacgtgcagagagtccttgtgtgctgcttctgtcacccccagacccactgtccacctgccagcccccttctgccctggaagcctgccctgcatggctgcatggactgcactctacaactcctgggccctctggcttctgggtgggtttggccaggggccgggggagccccagcaggagttcagggggagagaggaaggtgaggcttctcattgctctgcatcccccgactctgtaaaatcacctgtggaggggctgtcctcctcacaactttctccttccatgtttcagttctgataacctctccctccctcaccccgctggatctggtgcgagtgacagctcacctgctgtggcctggggttcctgcatggctcccctgcacctgcccacaccttgtaggtagtccgtatatagagaaactctcctctatgatgctaatttgagtgtgccttctgcttcctgttgggaccctgcctgataaggtctggagagtttagaaatcctttgacaggagaatgtgccttacctcaatttaccagcagcttgagggcttgaagccagcagaagctttgctacttctcacaaagtctctgcagagttagggataagggcacatgaaagaggccgctcacaacctagacaatttctactttcccacctggcaagaaaattcacttctacctcctgatcccacattgatttggtggacatggctgtttttcgttatccccaaaagtcatatgcctgtttacccatgtgtgtatgccagagagaggtccactgctcaggtcacttaaatcctcttcaaatgtgcgttgcccctcatgctgcgggggaggaaacagacccaaagaggaagaggatctgccctgaatgagctgccagctagccgtaaccctaggaataaaacccaggtgcacctgacccaaactggagacggctggacaacagaactggcctgttagctgggtgcaatcagccaggcaggaatgatggttacttctccacactgccaacaggatcacctcccagtgagctggacctgatgaagtaaggggcaacctcctattgaccttcactacagagccctggctgtaggagatacccaggcgatatgggttgacttgaattcatcatttatttcaaagcagagggcaaaggagctggaagaggtcagagctagtttgcagacacagaaaacctcacttcctggtggattctttctaggaggtgcatttcacaatggctgtttcacctcttagtaacctggcagcttccacagggccttactgcacacgttctgagmgccaggaaaaatgattcctctcactgccaaccatggtttttaatatgtgagcatatggctctgctgcttcttttcaatctccctccactagtgctgagctacggcactggggaggaaaccagaaacgcagagtgggtttgtctgatttgtccaagggtgtattttagtattggtagca

SEQ ID NO: 52868 - DNA, 1628 bp, Homo sapiens
ggactaatacacttggaaatggctaagttccctttttaaattggttttcaattttccctgctcttaatactttaaaattctcccaagaagttaaggctgggtgaaacattaaaccttccagaagaacatgctaaagggtcgtccacgtgcagagagtccttgtgtgctgcttctgtcacccccagacccactgtccacctgccagcccccttctgccctggaagcctgccctgcatggctgcatggactgcactctacaactcctgggccctctggcttctgggtgggtttggccaggggccgggggagccccagcaggagttcagggggagagaggaaggtgaggcttctcattgctctgcatcccccgactctgtaaaatcacctgtggaggggctgtcctcctcacaactttctccttccatgtttcagttctgataacctctccctccctcaccccgctggatctggtgcgagtgacagctcacctgctgtggcctggggttcctgcatggctcccctgcacctgcccacaccttgtaggtagtccgtatatagagaaactctcctctatgatgctaatttgagtgtgccttctgcttcctgttgggaccctgcctgataaggtctggagagtttagaaatcctttgacaggagaatgtgccttacctcaatttaccagcagcttgagggcttgaagccagcagaagctttgctacttctcacaaagtctctgcagagttagggataagggcacatgaaagaggccgctcacaacctagacaatttctactttcccacctggcaagaaaattcacttctacctcctgatcccacattgatttggtggacatggctgtttttcgttatccccaaaagtcatatgcctgtttacccatgtgtgtatgccagagagaggtccactgctcaggtcacttaaatcctcttcaaatgtgcgttgcccctcatgctgcgggggaggaaacagacccaaagaggaagaggatctgccctgaatgagctgccagctagccgtaaccctaggaataaaacccaggtgcacctgacccaaactggagacggctggacaacagaactggcctgttagctgggtgcaatcagccaggcaggaatgatggttacttctccacactgccaacaggatcacctcccagtgagctggacctgatgaagtaaggggcaacctcctattgaccttcactacagagccctggctgtaggagatacccaggcgatatgggttgacttgaattcatcatttatttcaaagcagagggcaaaggagctggaagaggtcagagctagtttgcagacacagaaaacctcacttcctggtggattctttctaggaggtgcatttcacaatggctgtttcacctcttagtaacctggcagcttccacagggccttactgcacacgttctgagcgccaggaaaaatgattsctctcactgccaaccatggtttttaatatgtgagcatatggctctgctgcttcttttcaatctccctccactagtgctgagctacggcactggggaggaaaccagaaacgcagagtgggtttgtctgatttgtccaagggtgtattttagtattggtagca

SEQ ID NO: 52869 - DNA, 596 bp, Homo sapiens
ttttccactccaatttacttaacttgaaagtaagttttaaagttagaattacctaactatggacaaattatattttctatgattaacttctgtctgaattgaggcccacttttaaaaacaagagtcagagtgttcatgatatagaaaagtctggtaatacatatgaattatttctaaattttatatatatatataaacaagcacacatacatatatgtatatattttatatatgtatatataccatacatacacatatatgtgtacataccatacatacacatatatgtgtacataccatacatacacatatgtgtgtacatagcatacatacacatatgtgtgtgcatagcatacatacacatatgtgtgtgcatakcatacatacacatatgtgtgtgcatatcatctatacacatatgtgtgtgcatatcatctatacacatgtgtgtgcatatcatctatacacatatgtgtgtgcatatcatctatacacatatgtgtgcatatcatatatacacatatatgtgtgtgtacatatcatatatacacatatatgatatatgtgtatgtgtgtatgcatatcatatatacaca

SEQ ID NO: 52870 - DNA, 596 bp, Homo sapiens
ttttccactccaatttacttaacttgaaagtaagttttaaagttagaattacctaactatggacaaattatattttctatgattaacttctgtctgaattgaggcccacttttaaaaacaagagtcagagtgttcatgatatagaaaagtctggtaatacatatgaattatttctaaattttatatatatatataaacaagcacacatacatatatgtatatattttatatatgtatatataccatacatacacatatatgtgtacataccatacatacacatatatgtgtacataccatacatacacatatgtgtgtacatagcatacatacacatatgtgtgtgcatagcatacatacacatatgtgtgtgcatagcatacatacacatatgtgtgtgcatatcatctatacacatatgtgtgtgcatatcatctatacacatgtgtgtgcatatcatctatacacatwtgtgtgtgcatatcatctatacacatatgtgtgcatatcatatatacacatatatgtgtgtgtacatatcatatatacacatatatgatatatgtgtatgtgtgtatgcatatcatatatacaca

SEQ ID NO: 52871 - DNA, 599 bp, Homo sapiens
ccctggccaggagacattcaagggctaggcctggctgaagggtccttcagagaggtaagggctggctcagaaggacagagaagatgagtatgtatctccataaaaactaatcaaacttagaataaataaaattgatttcgaagatagctgaaaaggctgtagattgccagggaagaagctggaatataagcaaactgcatatgtataatatttgagtgtatatattctattaagaatgtagatgctgagttcagatcccagatctgtctcttatcattcctagccatatgaccttgggcaagttattcaattgtctagaccctcagttttcaaatctgtaaaatgggtactataatagtctctgcctcatagagctkttatgaactaatggatgtcaagcgttttaaacagtgcctgttgggcagtgagggtttataaccacctacttgagtggttactgatgtggcgtggaatgatagatctccatttcatatggtcgaaagttaccccgaggagcaagaaacttcaggcttgtccttcgttttatctccccattgccagtgaagttccccagaggcccaaggagaccctgctgatca

SEQ ID NO: 52872 - DNA, 599 bp, Homo sapiens
ccctggccaggagacattcaagggctaggcctggctgaagggtccttcagagaggtaagggctggctcagaaggacagagaagatgagtatgtatctccataaaaactaatcaaacttagaataaataaaattgatttcgaagatagctgaaaaggctgtagattgccagggaagaagctggaatataagcaaactgcatatgtataatatttgagtgtatatattctattaagaatgtagatgctgagttcagatcccagatctgtctcttatcattcctagccatatgaccttgggcaagttattcaattgtctagaccctcagttttcaaatctgtaaaatgggtactataatagtctctgcctcatagagctgttatgaactaatggatgtcaagcgttttaaacagtgcctgttgggcagtgagggtttwtaaccacctacttgagtggttactgatgtggcgtggaatgatagatctccatttcatatggtcgaaagttaccccgaggagcaagaaacttcaggcttgtccttcgttttatctccccattgccagtgaagttccccagaggcccaaggagaccctgctgatca

SEQ ID NO: 52873 - DNA, 304 bp, Homo sapiens
ttctttagcttttatcagttatgaaggtgatgttttgatctctaattgcttgatttattatgtgtttctctcaattgatcctaaacttttgaggagaaaagtgtgttatttattggtagcttcaaactgaaatatctacgtgcttttgtcagggcccacctgcttaaatactaaagtcaaaataaataaaggtacacgaggaaggtggggtttagaaacagcatatgagaaaaagacatggatctttcayttatttaaattatgtgctctcagtaatgctgttgcaattttagcctattagtag

SEQ ID NO: 52874 - DNA, 607 bp, Homo sapiens
tggtaataatatgataatattactgcctactctttaagatacaggcctccattgctgagatacacagataaataaaacacaggaccttctcttgtgatttttcttggagaataggttacccaatggaggttagaacaaaggtaggcctgtcaagcaggacttggagccacaaaggagatcctgccacaggcactgtgaggagttaaggaagaaatgccctagcactcatggctaagcttctgttctgttgaacataaacactttcacaggtaccatcttccgaccatacgtgactgtgataaatcaagacaaaaacaaaacagctatataatcatgtatgatcatagacaaaacaaaaacatcatcccaaccaaacagatagaccaaatatcctctgtcytggccaatatgagtagttgcatcactactcattgaaacatttgcctcactcaccttcaagagaagaattattaagatgcccaatcatagaattacctgtttcttcccagcatcaaatccagaataaagcctcacttccttaaggtctcctccaaatcacctaaccctagacaaatcctaaaataagtactttctagtacccttttat

SEQ ID NO: 52875 - DNA, 532 bp, Homo sapiens
tgtcacgtggcgggatgttaaaagtacacgggattagtcacacaaactgtgacatttcagtcgtgatgtgatacatgtaaaaacagcaaacttcatccagacagaaaacaaaaatctacctgatcacatctgagtaagaggtcccccggccgcccctccacccctgctgcaaggaccttcgtggggtccctgggctgcacagcttggggaggataagcagagttcatcctctttacccccagttaacagtgaaccagccaggaaaccctgggctctgaatatatacccactatgcgctgaaaacctgccagtgggtaacacacacccygatcagacgcgtgcatggacaaatagcactttcccaagatgtaggtgctaacagagcccgtcacagggggtgtatgagttggaaccaagttagttggtgagggacagaaggccccaaatcacggtgccttgaaccaggcagaggcttctctcttctgtctacacccgggggtgggtggggagggctagctgaggacccacggtg

SEQ ID NO: 52876 - DNA, 607 bp, Homo sapiens
ctcccatctaccagctgctggagcgcgtggaggagccggtgcttcagaaccagatccgggagcacgtcattgccatcgaagatgtctttgtgaacagctaggaatggacgctgagtcgatctgtcccggagctcaaagtggtggcaggttcaagaaagagattgttgttgatggacagagctatctgctgctgattaaatatgaaggggaccccctggaggcgcagtttgccatgtcggtggatgcagttatatttgttttcagcttggaggatgaaataagtttccagactgtttactacagtggaatggccaactatcggaacatgagcgagattcctctggttctggtgggaacccaggatgccataagttccactaaccygagggtcattgatgatgccagggtaaggaagtgctccaacgacctgaagcggtgcacgtactatgagacgtgtgctatgtatgggctgaacgtggaaagggacttccaggaggttgcccagaagattgttgccacaaggaagaagcagcagctgcccataggaccctgcaagttgctgcccagttctccaagccattccaccgtctgttctgcacaggtgtcc

SEQ ID NO: 52877 - DNA, 1305 bp, Homo sapiens
  misc_feature (1)...(1305): n = A,T,C or G
gtcagaccgaaagagaagggcccttggcctgcatgttgggaaatgttgcagacttcagcaagagcacagatgccttcaccaaaggcctgatgactgtaagaatgaaactcagctgacctatttaaagcagttagaggaagaatggagacttagcaggtgagagagggaaactagagaaggggccttcatagggcaatcaggcctaattttccacgagcagaaccaggatcaacagggcaccacaaaaggtctgtgtccacctcagtgcaaggcctgtaggccccattgtcaatagaaatgaaagtctaattaatagacactgttttgccccatgctgaatgcactaaaatctaacttggttctttaagaagtgggagaacagaagaagcttgtgagaggaccttaaatttttctttaggagaaacctttatgctaacaggaaatcatttaagttgaaantcacataggcagaattnatcagggtctaagagcatgtgacttgaccctgtctttggcaagggctgtcttaggaaataaagatgcctacacttgaggtgctatgcacaaacacaaacacacacatgcacacattcacacaaatacacacacacacacacacacacacacacacacacacacacacacgccacgttaatactgggcctgcctattccccccagtcatgatagttcctgktgcttctcaccctattctatccccctaaaaataccccgacacagtgaaagacacaggccagaagttgaacacacgctacagaaccctgaaagggagatgggggccttagagaaggcagaggacatttgcagaatcctgagcatgctgggaaaggatggtcgcacagctattccccaagattattcggtgtggcttttcgggtactggcccagccaagaggttcaactgaaagagaaagagaatttccagttttgggttgtgtgttttttttgttttgtttttgtttttgtttttttgccaggacactttccccttgtccttgctttgccctttcctgttgtggagggggccactctctggcttcaagatgtgcctcctctctgtggacctgcactgcaccttggatgggacacccaaagctgcttgtccccaggcaattttgccttcagatgtcctcagccatgacagcctggtgcccaagcccactcaggtgccaccctgccatctcaccagcttatcctggggcactccctacagggaaaacacacagacaaagggcaccttagctccctggccctggactgcaggggctgtcattggagccctgca

SEQ ID NO: 52878 - DNA, 875 bp, Homo sapiens
ttaaaacaaaagaagtaggctgcagttacgtgtttctttttttgttgtttggtgtcaggagtagaatacatttggccagcttcatgagaggattagaaagttggagaaggaaaaatagaattgtttatggagccaggagaataattgtctataattatagatgcttgttttgaggtttggaaaaggtggtttaaaaaacttttaagaaaaaccatgataaacatctataaatatgaggaagaaaaattgtttgcaacatttaaaaaaawtttttttgagagggagtcttgctttgtcgcccaggctggagtgcagtggcaggatctcagctcactgcaacctccgcctcccgggttcaagccattctcttgcctcagcctcctgagtagctgggattccaggttcccgccatgatgcccggctaatttttggatttttagtagagatcgggtttcaccatgttggccagactggtctcaaactcttgcctcaagtgatcagcctgccttggcctcccaaactgctgggattacaggcatgagccactgctcttggccaggttgcaacatcttcattagaattgtttaaatgaaaattttcctttgttaaatggaagaaaataagctctgtttgggagagtgaggaccaagtaggacatccttgatacacattgaagatctatttatttatttatttaaatttttagctctgcaaaattgaccagagtatgaagatcattttagttggttaatatttaagttttgacttcctggccagagatagtagattggaaaggatttaaagatttactgagggagttaacccaagtttttaacattgtgatgcaaaatgatgttaaaacgcgtttgtttccc

SEQ ID NO: 52879 - DNA, 636 bp, Homo sapiens
acagaagcatgtctatttgacaaaacctgcttataacttcctgaatatggttttagttataagtttctcactactaccaccatcaccaccaccattacctgctttctctaaaggataaaagatttcaggatatttaagcrtagacagtgataaaactaggaaagattctttcacaatctgaatgtggtttatctcttctggtccatcttgcacaagtctgacataatgccactccccatttcataaaattccacattatataaagaatgaattacagaagcttattatggagatagacatatttgtccttctaccctcttaaaagacccttgaaaccaataaacttgatcattatttcccaattcattggtattctctttccttcatactttcttaggctcatctctttatctgccatgcagaacattttaattcttaatcattctttaaggcttatatgttaccttttccaggacataatttcctggtttgttctctcatcacatcgtgcttataattctccaggagggcttaccacagctggcttgtggatgacccccatgatactggtggatcatgaatgtcttgaaggccagtcaccacgccttgctcactttagcattccttagacacctg

SEQ ID NO: 52880 - DNA, 636 bp, Homo sapiens
acagaagcatgtctatttgacaaaacctgcttataacttcctgaatatggttttagttataagtttctcactactaccaccatcaccaccaccattacctgctttctctaaaggataaaagatttcaggatatttaagcatagacagtgataaaactaggaaagattctttcacaatctgaatgtggtttatctcttctggtccatcttgcacaagtctgacataatgccactccccatttcataaaattccacattatataaagaatgaattrcagaagcttattatggagatagacatatttgtccttctaccctcttaaaagacccttgaaaccaataaacttgatcattatttcccaattcattggtattctctttccttcatactttcttaggctcatctctttatctgccatgcagaacattttaattcttaatcattctttaaggcttatatgttaccttttccaggacataatttcctggtttgttctctcatcacatcgtgcttataattctccaggagggcttaccacagctggcttgtggatgacccccatgatactggtggatcatgaatgtcttgaaggccagtcaccacgccttgctcactttagcattccttagacacctg

SEQ ID NO: 52881 - DNA, 594 bp, Homo sapiens
ggaggaaagcaggccatgtggctatgggtggtatgatgttccaggcagaaggaagagcaggtgccaaagccccaaggcaggagaggactgaggaggtcctaagaagagcagagaaactggtatgtcaggaaggaattgaacaagggaaggaaaggtgggaggagagttggagaggaagcagagagacgaaatcttaggkctgtgaacaacgatgaagactttggattttatagtgagtgagactggaacattttaagcaaacaagggacataatctgacttgttcaaaaagtatcattgatgtgtgaattacagactattgagaataacggaagcaggacaacccattaggaagacacagtattagttcagatgagagacgattatgtcttgggctggaatggtagttgcaatagcagtgagagggagccagatttaaaatatatgttgaaagtgaagccaacagaatttgctataggagagttatctaggatgctgcaaatgtttaacacagagaagtgagattgacaatatttgggggtggttcagtttttttttttttaaattaactttagtttttagagaagttttgggt

SEQ ID NO: 52882 - DNA, 594 bp, Homo sapiens
ggaggaaagcaggccatgtggctatgggtggtatgatgttccaggcagaaggaagagcaggtgccaaagccccaaggcaggagaggactgaggaggtcctaagaagagcagagaaactggtatgtcaggaaggaattgaacaagggaaggaaaggtgggaggagagttggagaggaagcagagagacgaaatcttaggtctgtgaacaacgatgaagactttggattttatagtgagtgagactggaacattttaagcaaacaagggacataatctgacttgttcaaaaagtatcattgatgtgtgaattayagactattgagaataacggaagcaggacaacccattaggaagacacagtattagttcagatgagagacgattatgtcttgggctggaatggtagttgcaatagcagtgagagggagccagatttaaaatatatgttgaaagtgaagccaacagaatttgctataggagagttatctaggatgctgcaaatgtttaacacagagaagtgagattgacaatatttgggggtggttcagtttttttttttttaaattaactttagtttttagagaagttttgggt

SEQ ID NO: 52883 - DNA, 575 bp, Homo sapiens
ttgttgcccaggctagagcgcaatggcgggatctcggctcactgcaacctccgcctcccgggttcaaacgcttctcctgcctcagcctcctaagtagctgggactacaggctcacgacaccacgcccagctaatttttgtgtttttagtagagacagggtttcaccatgtcgtccacgatgatctccatctcttgaccttgtgatccgcccacctcggcctcccaaagtactgggattacaggcgtgagccaccgcgcccggccgaatcctgggctatttctatgcctccacccgggtccaccggctactgctttgaattggrggtctcacctgtaatcttcccgcttccacatggtgtcacaggaaaatgctcccatttcacacacctttatgaatgtcactgccccaaatcaagtcatacaaagactcctgtgtttccatggcaactgccacctcttttcccattccccatttttattatttatctcaaagtagttttgtagacacatatggttccagattacagacagggaaccacaggcagcaaaagcaagtcagcagcagctctcaggtc

SEQ ID NO: 52884 - DNA, 1918 bp, Homo sapiens
gatgattctgggctgagtggcaccaggagccatcgcttggtgcttttctccagctccctctggtcctcagaggaggcagaacagggcctgtaaccatggcaattctctaatgttctttcataaaccataaatataggggaaggcttcattacagctccttcaagaagaaaacaaagctttccctgaatggggcagggcagggtggcggggggagaggggaggagaagggaagaaggaagactttaggctttttttttttttttttttttttttttgccayaaagacaaactgcgtcagaattggctcagttcagaatgtggctccagcatttaagcaagatgtagcccagggccaggcacaaagcaggcgctccttaagtattagttgaaagcaggaagggagaaaagcagggagggagtgatgtggaagggagaggatttggaatcacacagagtaaatgtgagtggccagatgagcccacattttgaaagggtttaatgttctgctgacctgtctaacaggccccttggaagagcaagatgatgtacagattgtcctacctgaagactgtggaggagaggaaggtgtctcatctccccagtctccaaatcgtcagcattaagaagtgtttgttgaataaactgaataaacaaatgaagagatgagtggaccaaatttttaaatgtcttgggaaggggtcataatcatattgagaatataaatataatgaaaactatgacttcttattccgaaattacacttatgaaaacacattttatgtgtcatttcaggatgtttacagatactgatgaccatccctagaattcatattgagaatttccgtgccacattaacttccagatgtccttgggaaaagtgtctactatgctgccttggtttcctcaatgagagtgagaacaaatggatctgaagaggtgatcttggccctaatttccaagttctgggaagataaacagggttttcttttgaatccttcggagcctgggagcttcaagagaaactcaactccaggcacttgaactgacagagaatttagattctcctccagggaaaggggcagagcatggatcctggctttgagccgcctcccagcttttctgttgtccttgaggctgctacgttaacactgtccttgctttgtgtggttttgctgttactacctgtcctgtggatttctgacaattacaagccgtgtaccccaccacacatgcaagcatttctcatttattctgagtactttaaggactgcccaatctgaatgcagagaactatgtctcattcatttttgtgtgtccaggccctcacagggtttggggatcctgatatagggttggattcggtgacctctcaaatcctcttcagcactttcatgcacagaagccagcatcctctggactgtcattatccagttttattaaagcaggttacaatataaaagaacccatcatcagccatcatcactgatcttggatagcttgcccttggctggtggcctaaggattcctttctttttttacctatcaaaatcattcttgtacataagctgtccccctccctgcaaagtattccttgactatcatagacaaaatatgtcactcccttccctcttcccatgatctttgctttacattcaaatgtcaccattttatggatccatttgttttctttatcggattgtaaattccttgagggtggagactggatctaattcaacatggtatcccatggttccttgccatgggatatagtgaaaatgcagcaagtgtgggacttggtgaacagcggatagttcacttgctgcagaggatgggtttttctttctctacccatgccctttgactttgagtttggccattggacttgctttggccaatgggatgctcacagacaccatgc

SEQ ID NO: 52885 - DNA, 467 bp, Homo sapiens
aagaaagaaaaaaagactgagtttatcataaataaaaatagaaaagtagagtcctataggatgggctgacatctactcactagactcaagacactgctactcttgaaatgctttggtaccaggtgaaaacctgccaattcatgactcagctgcaaagctcagcatggagagagggagggatgagaaggtcccagcctagaaagccatagtgcagatgcccacagagctgcattaaagctccctccttgtgccacagctctgtgcactgggaagtgaccaaagccccttctctggtgttttggaccttactccagctattcgattatttttgtgtgtcagttggtaaacactcttactcatttcttttagcaaaatgaagaaatgatgttgactttaaatttcatacaatgtgcaataaaacatgatttcactgatatatatatatatatataaatrcatttaggaat

SEQ ID NO: 52886 - DNA, 643 bp, Homo sapiens
tgcaatttttcttgggctgtcagttatgaggggaacagccctcccctggtttatcccccgggagcttggtgtggggctctgtgtgtggccctgcgtcagctatgaagtcctggttgatttgaagccaaaactggcccttccagctggggaggggagcaagtgtgaattattttcaatgccctaattaataataatagtaatattcactgacaattactaaatactgactatgcaccaggtactttccatgaattatctcattttcaaatgatcaccagccttctgagggaggcgctgmtgtgcccaccccaccggtgaggagcccaaggcactgaacacggggttgcgtaggtaggattcgaacccaggccctgcagacagcagagactggcgctgctgagagtcgactgtggaacacggggctttttctggctctgtccttttctggcctttctttaagaggcagcaccagcagctggattccactttgagttgcagtgtgtcctggggttggaactctgggaaaatcccaacagcaagcatcccgggctgcctcctgcaggtgcatgggttgaagacatctatgcagaggctggacttgtccaggaaggggtgggaggcatagatatcagggccttcggcc

SEQ ID NO: 52887 - DNA, 562 bp, Homo sapiens
catcagcaatgaaagagactacactacatatactatactacaaagattaaaagaaaataaggtaatatgaaaaatttcatgctgctactttaggacaaaactactgttttccttggaaaaaaacagaagcacatacagagttatatttctttgaaatagctgtttctaagtgtagtcaaccatgtaactatcacttttaaccaaagtaacttctattttgcagagaaaagtkgggggctggataattgtgaactgtcacaacccagcattttatcagattagcagaggtcgtcaatatgcataacacaactttctacagtggctaatatccctaatacaacttctcaaagtggcaaaaataaacacgttccttaatatgacccaaagagatagcctgtctatagcacataaaaataaaaagcaaaagtaaagctataattatgcttaataactaatattttaattgttacttagaaattatctagatatgcagtgatttttccattaactagcccaatttaaaaccgatccaagactttaatttacatagatctcggaaact

SEQ ID NO: 52888 - DNA, 1917 bp, Homo sapiens
ggaggtcaccatgagaaatgaccttccaggagggagatatcacttccacactgctaccccaagccttcttcattacaagtgagagagctgcttaacctgagtcaatagaaggtcaagcaagtcgttacactgtctggctgcagggcttaaccaagtttcaatgggcgttgtcaccaggtaccacaggtgaagctttaggatgaggtggcattatggcttgaaggtctccagccttctaccaccttagtaagaggagaagtatccaggtagtggcaatggtaggaagtctagtgtttcaatatactctcatgaaaaagagaagtgacaaattctcaaaagaaatcttatggacttgaaaggcaagttgtagaaactttatgtttcatccaagcccagatagtcaatgaataagttcagaaacttatagtccrtattttttttctaaataataggatcacagttttctacttggcataacaataatacttaatttcagggttgtgacaaataaatgagattgcagtcttagcccagtgcctgacacaatgttagcattcaacaagtgaaacttctctttccacttccataaatgtgagtatccttccacctccccaagaaactgggatttatgttggtctgcaactcagcctgaatatattattcacagatgttttattattgtcactatcagtttttaaggaccacctctaggttcttgtgtttcaaataaaattttgttgaaatgaaaaccaaaataagtcctgtcgtttttttaaagacttcttaagctttctgatttctagtaacatgaaattctaggtaaaaagctatctttaaccaatttttaaaaatcaagtctactgtgattgatccagctgtttcctcagttgaaacaaggaacatcagaagtgcctacttctagagcttggagagtaggggtaagccagataatgcatctttcaccaaaggaaagctccacttcacagagaagactaggcacagcaagaagaggtgctgacttctattttacatgagatataattatttccattgcttctcctcttatttagtgaagacagacttgtgttcctataagtcaatctcatttgctaagtctagttctttgctttgttagcatccaaagaacatttatttttcctttcctatttacatgtttcaaattcccatcctgcaatgatttctcccctctctgcacattcatgtatttctcacactgtttctctctctcccaagaccattctgccctttcttttcttcctattagcttgctacaccaaagccattacaggaacaggctgtctctataatgccttactgaaaatgcagtgaaaacctccacagcagctgtgtccctggatgagacacaatgtcccaactgatgttttcatattcagtccacactgtgctcagggcctcactaagagggtgtgcaagctttcataagtgtgttctttaatggccgacacaaatatgtttactcttcactcttcccacttctctaaaattaacaagaggaaaactcttgtgatgctagtagaagaataatataggcctgggtaataataaatcaatttcctcatcatttcaccaaatgaaatattcagccccgactgggcgtggtggctcatgcttgtaatccccacactttgggaggctgaggctggtgaatcacctgaggttgggagttcgagaccagcctggccaacatggtgaaatcttgtctctactaaaaatacaaaaatagcccggcatggtgatgggcgtctgtaatcccagctacttgggaggctgaggcaggagaatcacttgaaccaggaaggcggaggttgcagtgagctgagatcatgccactgcactcgagcctgggcaagggagaaagacttcatctcaaaaaaa

SEQ ID NO: 52889 - DNA, 553 bp, Homo sapiens
gggcgactttcacacttgctaatgaataaaatccctgtgcttctagaaactgctgagccagaccttggagaaatagagataaatgggtgacctagtttactcactcaggacatgaagttccacattaaggggttctttagaggtacccttactttaaatgggccacaaaggcccatatagggggaaagatttctgtgcctcgccccactcaacagggccaggcctccactagtgtttctactggatgttcttctctggagatctggaggacacagtagctggcaagctgctgacagtctggaaagaggccattggttggaagtatggtattgtgagaattatgtatttggttgtaggatggccaaackcagcagacaggagccaaatacagcagtgagttctgaaagccttagtgctgggatggttagcctgcccagaatcaggattggcattgcccaaaacaaagaggccttatcttcttaagtcctttgttaggagcatagtgagagagaggcttttttcggacaaaaatgggtccagttcccacccttca

SEQ ID NO: 52890 - DNA, 607 bp, Homo sapiens
tgagacatgagctccatgctctggcaggaaagggactgggccataaracccattcccctcttgtttcttgaggcatgagaagtatcaaaaccgtcaccccatgccctttatatcctgcttctatttacacatcccacccaccatcatgtctctccataaagaagattcactcagcctagctctgcaaaaatgaaaaaattacctgggtgtggtaacatgtgcttgtagtctcagttactcagcaggctgaggcaggagcgtcactggagcctaggagttcaaggctgcagtgagccttgatcatgccattgcactccagcctgggcaacagattgagaccctgtctcaaaaaaaaaaaaaaaaaaaaaaaaaaaaagaagaagaagaagaagattcacttgagtcataatccagctatggataattcatacaaataattcattcccaatgcggaattcagcattgcttattctgagtggttccatgtggcatcttagagctctctttccaaaggaagtttgcattctctgcaggtgtaatgatgtctctgttcttcacagaatcccaataatagttggcataccaatagttggcataccaatgggag

SEQ ID NO: 52891 - DNA, 550 bp, Homo sapiens
tcaggatatttgcatgtcaaattccagcatgggtttcaagcgagtaaatggtcatatttattagtaatagcggtggtagatgagtaagagggatttaataaatgtatgttcaatatgttcgtgtttctatagcacttaacagtttgcaaagccgtttttccccctgaaatcatgtatttgattcttaaacaagcaaacaaacccaaaaggcctgcgatgaggacaaagagcaattatcctcgttttactgatgagaataaggctagagaaagattttattttgcccaacgtcatataactgactcataggtgtcagagttatgattagaacttgagtttgtctaccagctagcactgcctttcctctgtatcatgttgcttcatggtgtttcagaagggacasaggaatagaacaggagttatattaactgagtgcaggagagtgcaatcaataatagctaaaacctattaaacgtctactatgaatctgccatggatattatctcatttaatttttttttgtggagggggatggagtcttgctctgtca

SEQ ID NO: 52892 - DNA, 635 bp, Homo sapiens
ggattgggagtctgtcttatgagtaatgtaacctctggtgggcttcacttctctgatcccccagtttcttctgctgtaaaatgtggatcgtggtgacagaagcacgggatcattgggaggactaaagaaagtccctaggcacagcggggcccccccaacaagctgcagctcggcccaggcaccactctcccctcttcctccaccagggggagcctggggaccaagagagcccagcctgtacccgctctacctagcctcccccaatgctgcagcctctgctgctaaactcccaccctgcctgccctcgcttccagcggcttctcacccactccttacaaacccagaacagacctagcaggggagtcgcttgcagyagcagcagtgacagcaatggctactgcatcaacaggccctcctgatgccaggccaggagggagagtggaaaggagggagacagagccttcttccctgccgctgtcaactccccactcatcccagactcatctcctcctgctcaaatcctctagagacctaaggctctcctggcctctcctagctcagtgccaggccaggtcctgaggctaagagactcctgtgggttggagagctctagagaaaaaaataccaggccttgg

SEQ ID NO: 52893 - DNA, 1636 bp, Homo sapiens
  misc_feature (1)...(1636): n = A,T,C or G
gtcaggagttcgagaccagcctgactaacatggtaaaaccccgtctctactaaaaatacaaaaattagttagatgtggtggagtgtgcctgtaatcccaactacttgggaggttgaggcaggagaattgcttgaacctgggaggcggaggttgcagtgagctgagatggcgccaccacacttcagcctgcatgacagagcgagactccatttcaaaaaaacaaaaaacaaaaaacaaaaaaaaccttcagtcattctttactctaaaaacatttgctttgccttttgtacaaagggtgcttgcaaaaagttgacacccatttgcacccttatctaacaccttctcacagtaacagagaagaagcaatcccaacttgttcttaacttgtctgagagtacagccctagccaaactccttcgcagctcctgagccaagaataaaatattttcatgttgaatttaggagtcacggatcatcattctgcagtggttaagaattcaccttccatatgttaatgcttcatttcccccatagaatcaactatgtttggcgcagaagcagagaaatgcatttaaatgcttatgatgaataatctcttaagcttattatgagtatgtttgtgccaagtgataagtgaaagccaatacctctttatacagtgtctgcataggtccccatgatgtttaaggagcacttactgaataaaaaagcgtctcagtgattatagccaaatgtctctgtcaattccattgcgtataataatttggggaccattatgctaatcacatctgccataatacttggagtattgctgctcttaacgttacgagatgacacttttccagtttgtgcatgcgcccagtcatactatttcttgatggccttttaagggtgggatnnnnnnnnnnnnnnnnnnnnnnnnnnnnnnnnnnnnnnnnnnnnnnnnnnnnnnnnnnnnnnnnnnnnnnnnnnnnnnnnnnnnnnnnnnnnnnnnnnnnctgcattgaatattaaagaatagctaatcattccctaagacattttgaaggtaacagcaataataatgtccttgtgaatgtcatgttatgccctgcacttcacacacactttctcattcagtgcttctccacaccgtaggaggaggtatgaaaagcccccttttacagattaggagtgtctgtgggcagtgtataaaaatgtaagtggagacttaccccttacrtatatgcatgtttgctctctttataacatgaacatcatgcctgttatatgccaggaactcttcaatgcttgatgcatgctaatttgtttactcttcatcatggccctgagactggttacttgcccaggactgtggccctttagtgactggtgcctgtctgtgccaaaccctcattctacccccaccatgctatgctgcatctctgcaggttagccatgccaggtcacattcagcagcatgtccctctccttcatagccataaccacctgaaaagtaggtaattactggtccactccttctccagccatgtactccacaacagcaaagaccagacgtgctacttactacagtctccaggactcaacacaaaacctgacagatggcaggccctcaaaaatgaaagactgcattttg

SEQ ID NO: 52894 - DNA, 548 bp, Homo sapiens
attccactttggcttttgccatttgaccatggcactgcccagcacagtatgtgttcttctgagttcagtatgtctatttgtgtgtaaggcaatgacttcagtctcccaaccatacctcttattgaaatacgatggaaacttctcttgaacagcatgatatgacattgtttggtcttcacttagtttgggcgtatcatttacatatttagtccacttcttttctcattagtctgacatcatttaggtacggctgcttgcagccaatgtgatcataagcagaaatacaaatataaacacaaataaaatgtcagtacttgattacaaaacaattcataatatgctaacattaaaatttataggtcatttaaatgaaaatataaaatttcaaaatcctggagacccctttcccgaagaatacacctcttgatctacgtttcagaaacacggccagggagatcacgtctgrtgaatggccactgctccttgcacacttgcttttattttttatttcttctctcagggtctttgaaggaagaaggctggagtgg

SEQ ID NO: 52895 - DNA, 624 bp, Homo sapiens
caaaacctaaactgactaatatagtgatcaacactaatattcaggtattagctaagtgctgtaggaggcttgggaaagtagcaactcacagataaaaggagtcaaaaagaaagaagactttgaaggtgatgctggagctgggtcataagaattgagttagctacgcagatatgcaagtaagaggcttcattgtrgtggaaacatgctgggcaaaagctgggggtggaggggcttcaatggcctgatgtgctggggggaatcatgcctggattcctttggctgcaagtagaatgtgtggctgagagaatggcttttgtcaggccaagagttcagctcattacaacagaaagccttctgagcatgctgactgtggatgctgaaagacagcaagaattccaagtaaaagaagaaaatcaaatgtcagagcttctacttaatcatgataattaggggtagaattaagggtttcctttccaattcaggctttcagtccttgctgtcactaaataccattaaatgaagtgatataacctattagggtctttcaatctattccctctgggcccacagaggtctcttttgagagatgaaaactttggaaccagtagtgtaaatagaaattat

SEQ ID NO: 52896 - DNA, 558 bp, Homo sapiens
ggttcaagtgattgttgtgcctcagcctcctggttagctgggattatgggcactggccaccacgcccagctaatttttgtatttttagtagaggtggggtttcaccaggttggccaggctggtctcgaactccttatctcaagtgatccatcccatcctcggcctcccaaagtgccgggattacaggtgtgagccactacacccagccagttaattaactttcaaaaatctagagtaaattttggagtatggtatctggttacactataamtttttttccccaaataaacaatatccctttcttctcctactgcctagtatttattttattttcttaaattgctctatacatgcatgcatgtttaaacttcatgtaagtatgtatatgttattacatatacatttattttttatttttattttaaaaaattttttgaagagacagagtctcgctgtgtggcccaggctggtctcaaacttctggcctcaagcaatccttataccttggccacacaaagtgttgggattataggcatgatccactgcacccagcccaca

SEQ ID NO: 52897 - DNA, 3113 bp, Homo sapiens
  misc_feature (1)...(3113): n = A,T,C or G
ggttgtgaagttatggctatgtgtttgagaacaaggaaggcagtattgcgtaactcagttcccaagcttaattttccctttgacacagtgagcttggagttggggtctctattctcttttctctcacaaaatcatatgggaacattccagaaaatgtgaggttctgtgctcactattaaataaaaatgaccaagagagccatgggtaagctcccttctcagtcatcaggactgcaacagagagttttcccctgtgtggacagggtcctgaattctgcaggatcccgtggggacacaagtgtcaggatagaggcactcattcagccaggtacagtgtctcacgcctgtaatgtcagctacactggaggctgaggtcaccttgaggccaggatttcaagaccagcctgggcaacatagcaagatctcatatctaagaataaaattagccgggtgtggtggcatgcacctgtaatcctagttaattgggagggaggctgaggtgggaggattgcttgagcctaggcgttggaggctacaacgagctaggattacaccactgcactccagtctcggcaacagtaagactccatatgtgacaacaaccaacctattctgtgttttgagtgtaaattaccatagcctttgtaacagaaattaggcagtaactcttatcattcaaaatgcataagaaatttggctaagcaattgtacttctagattatttatttatttatttattattgggcannnnnnnnnnnnnnnnnnnnnnnnnnnnnnnnnnnnnnnnnnnnnnnnnnnnnnnnnnnnnnnnnnnnnnnnnnnnnnnnnnnnnnnnnnnnnnnnnnnntttgtagaaacgggactttgccatgttggtcagactggtctaaaaacttgtgacctaaggtgatccacccaccgatgcctagtaaagtgctggattacaggctctagttcctaatttagagccgcattgtttaatgtctaaaagcactcttacatatttattactgcattgtttgaacttaaatatcctcaccaggataacaggataattaaacagttaattgcactatggcacatccatctgttaccaaaatgaagtcgatctttttgtactgtggtggaaagattttctgaacatagttcaggtaaaaaaatgaccactgttgaataatgcttctggtataacacatagtgtttgaaaatgtacacaatacactgtaatatccaatgcatacatcaaagtaaatatattttattctaggataattattaaaacattaagaaatactctttaatcatatatgttaaaacttgtagaaaatcaataacatacaagtaaagaagatcaagaagtcaaaaaaagtaattccaagtgtagaaagcatggtgaaaagtgatggaagaaaactgcagaaatttaaaatgtgaaattaaaatatataattattaatcaaaatacataattcttaattaaaatacataattcttcattgaaccccgaatctgtcaggacatatgtgtgatcttggataacgcattcaacctcctgaacactgaatttccttgactgtaaaatgttttagagatgttcctcacccggttgcatgaagcaaacctctgtgtgttaaggcacttcccacagcatctgcgacacagaacagtggcatctgtgctcttcgtagtctctgaacacagacccacagmagtatattttgtggtttttttttctatataaaaggctttgaaaatgtcccacagcttcctcagtaagtgactgtcaaaaggggcagccttcaaaagtagaattctggcaaatgtcttcaaaagacacaaaattatggcaatgggcacatttccctcctgccttgctcttctggatgcatccattctctctcacagcatagtcattttcttccactccactgtagaaattttccttctagtggcaagagtgacgtgagtgatatgtggaaatttctttccaagcgtgttggagaagcttcctctgcctgcttctttttggccacctcctgccagggtaagagcagagggcctccagggctgctctgtcacccccaacagcatggacctcactgcagtcactccggaagctttcctctaaagaaagcttgtgcaggaaacatcatgcatcgagcagcatggggacaggggctggccagcttggcaggttcttcaacaaccctttcccctttgtggaaccaaaaccttttttttcccaaaaaaggggaaaaaactccaggatactcctctgttcccaccaggggcagattccctgcctaaagttttccctcatgtccagcaaatgctgcatggagccctggatttctacgtggaaagctagaagaagggagagctgaatcaggatgtaatcaccctttccaaagaggtcagtccagtactaccatgtgctcctgggcaagctctccaggttgagggaacaggagcaggggttatgtcaggtgaaggttggagtgagagacctcccaggaggtgtagaatattccactagggacatctcatacccttccaggattagaccttgaggcctggagatccccaggcaattagtattgaaggtcgaaaggccaatgacaggaataggaaggcccactgtgtcattcacaaagcacttccaaacccatcaccacaggtgaccctcacaacaaccctgtgagacctgcaggacaggggctctcacaaaggaggtgtcgggaatgtcaagattttaacaccttctccaagtcaggatcaggaaacgctgtcccagcactgacctatattccctatgcttcctcccacaaaacagcttagggtgactgataacttgtgggcagagaccctcacttccaatccccacaaggggctgtgcagtggggaggacgaggccccctcctctgactgtctcctccaagaccctgttttctgaggaaggtcactctgggaactgttggcctctgcagatgggggcctggaccatgtggaaagatgatgtgaaggtcacacctggcaggcaccagcgctggagggcaaacctcacctttaaaactcacacttttttaaaaattttatttttatttttaatttata

SEQ ID NO: 52898 - DNA, 677 bp, Homo sapiens
ctctgggaaagagttgagggtgtcatccactcagcaggtaccgcatgatctttgggaaggatttgtgttatacctgtccctggtgggatagaagcctccagagctgggcagtatttgggctgtagaaacctgagaagcccctgacccatcatgcatcagagcccactcccaagatgtggagccatcagctggaagagctgggcagtggcaggggaccccggaccctgaggccttcctcccttccatcaggtgaccctaccatgtggcctcagctctagagaggtgggccctagctggaggcactgcacagcagcatcctgggtaaaggtrccagaagggcaggcctgcctttgaggctgtgaggcagggctgcggcaggcagtggccagtggagggaaccgggtgggtgccgagggactacatggccatctcctggacatggggtctggctaggggacatgggatgggcagacactgccatcttgacttcatcggcccatctgtgggctgggggggcagctgggagtgtggccagctgggaggtaggaggactcttggggaagtgagagtcacctgcatgaactcagggctagagggctgtggctctgggacacacagggtggccagggggaggctgcagcggcctctgctgttgggaatgaaaggtgtctgccttg

SEQ ID NO: 52899 - DNA, 677 bp, Homo sapiens
ctctgggaaagagttgagggtgtcatccactcagcaggtaccgcatgatctttgggaaggatttgtgttatacctgtccctggtgggatagaagcctccagagctgggcagtatttgggctgtagaaacctgagaagcccctgacccatcatgcatcagagcccactcccaagatgtggagccatcagctggaagagctgggcagtggcaggggaccccggaccctgaggccttcctcccttccatcaggtgaccctaccatgtggcctcagctctagagaggtgggccctagctggaggcactgcacagcagcatcctgggtaaaggtgccagragggcaggcctgcctttgaggctgtgaggcagggctgcggcaggcagtggccagtggagggaaccgggtgggtgccgagggactacatggccatctcctggacatggggtctggctaggggacatgggatgggcagacactgccatcttgacttcatcggcccatctgtgggctgggggggcagctgggagtgtggccagctgggaggtaggaggactcttggggaagtgagagtcacctgcatgaactcagggctagagggctgtggctctgggacacacagggtggccagggggaggctgcagcggcctctgctgttgggaatgaaaggtgtctgccttg

SEQ ID NO: 52900 - DNA, 2313 bp, Homo sapiens
  misc_feature (1)...(2313): n = A,T,C or G
ggtttctcaagtacagcagcaactaactgagctgtgtgctgggcactaggataaatgtggtagttggggaattcttaggaggaggaagttcagtggtttctccaattaaagaccttgtaaggagaacagagaactgaacccagtctttgactacagaacctgcacggtctcacccagccactccacccccttgcttcaaatttgccagtggcgccatgtggtttctggaatggaattcattcttagcttcacatggcactcttgttcttgcctctcgcttcctgtctactcttcatgtcagcaaatccaacttcttgcattttcttaatagtgccacacggctgtagaccttcatgtgattccatattgtttcctatgtttggaacacactttccttccttattagcaaatttttattcatccttcaaaattcaacttatagktcaactctgggtaagcactctgaaactgcccaacaccaccctgctccctttttttaattttttaaaggaaagaagaagaataaggaaaaaactatagttgtttcttattgtttttgggataaagtccagaatccttaccatggtctgtgtttcctgcctttctcgccttatgtcctgtcaccttcccatttggggatggtattgtcactctggcattttctcagcttcttaaatgctctgctccctggtgctcatgctgtccctctgtcttaagatcttctgcactcactcgcctggaccccagcaaggcactctgcagtcctgtaagttcacagccccatacacgtttccacagtgacacttgcaccacttgtaattgtacatttattttgttctgatctgaatcatggttctctggcctcaggctccaggaagtcaggggggggactagatttgcttttgctcagtactgtcagcccaatatcaatgccagacagcttgtggggtgcacaagtctgtgtgtatgagttatgtttatggcagcccctctcttgtcttccagacaccgtatgcaaagtcctggctataacatgtccccatnnnnnnnnnnnnnnnnnnnnnnnnnnnnnnnnnnnnnnnnnnnnnnnnnnnnnnnnnnnnnnnnnnnnnnnnnnnnnnnnnnnnnnnnnnnnnnnnnnnntatatatatatatatatatatatatatatatattttttttttttaaggtcttcctgcaaataaagtcagcatgattcctttgtccttgggatcagtgtcacatatgtgttgtaggcaaacaaagagctaatgcatagccatgcagtaacaggataatttggagaagacaattagcaggggatgagcctcagcaggaaccaggaaaacagccctcagcctgcccaaccccacctcagatgccatccgcttctcagaactacactcagctacccccgtcagtgccatgaaagctccacgctcatcctgacatgtcttgtaccacagcccacagtcagcgcagatgggccctttgtgcctcatgagttgaatgtccatgtgtgcagcctgtcactactgacccatctgcccacatcgtcactgttgttgtggccctctcggtgcctcatgctaggtggccatgcagacagcaggtcccaaccctctatcccaagctaggtcagaaatgcttctcctcacagagtaagggactcaggtctggatctgtttcttcctgtgttctggctgaactcacaaactagcccagagaggagtctctcttctcctttccaacactctcacccctctgcttttggctccccatcccctgagatcttcagatctggtccatcccctaaggaacgagcagggatgggggaagggatgtattacagagatgtcatatcagtagcatttttaagaaggacagatgctccttgacttaggacagggtcacattcccataaaactgtcataagttgaaaatatatttaatgcagtacacccaacctacagaacatatggcttagctagccaattttaaatgtgctcaggacactacccttagaatacagttgggcaaaatcatctaacacaaatcctattttataataaagtattgaatatttcatgtaacttactgaaagctatactgaaagtggaaacacagtggttgtatgggtactcgaagtatggtttgtacagaatgcctgttgctctcatgccatcataaattcgagaaatcctaagtcaaaccatcgtatgtctgggaccatctttagactaaattcaggaaacaagatatgttagaaatacggtgtcttcaaaatcatttcctttcccttttaaaaaata

SEQ ID NO: 52901 - DNA, 491 bp, Homo sapiens
caggagttcaaggccagcctgggcaacatagcaagaccccatctcaaaacaaaagaaataaaaaatatgaagatcatagagacagaatgtcatcctgataattgacataggctacaaggaacaacattagagtcaaaattggttctatcccagcactttgggaggccaaggcaggaggatcacttgagcacagtaattcaagatcagcttgggcaatatagtgaggcctcatcrctataaaatatagatagatagatagatagatagatagatagatagatagatagatagagaaatagattttttttttaattagccgagtgtggtggcacgtgctatagtggtcccagctactcgggaagctgagctcaggaagatcgcttgagcccaggaggtggaggttgcagtgagccgagatcatgcctctgcactccagcctgggtaacagagtgagaccctgtctttaaaaaaaaaaaaattatataagtata

SEQ ID NO: 52902 - DNA, 491 bp, Homo sapiens
caggagttcaaggccagcctgggcaacatagcaagaccccatctcaaaacaaaagaaataaaaaatatgaagatcatagagacagaatgtcatcctgataattgacataggctacaaggaacaacattagagtcaaaattggttctatcccagcactttgggaggccaaggcaggaggatcacttgagcacagtaattcaagatcagcttgggcaatatagtgaggcctcatcactataaaatatagatagatagatagatagatagatagatagatagatagatagatagagaaatagattttttttttaattagccgagtgtggtggcacgtgctatagtggtcccagctactcgggargctgagctcaggaagatcgcttgagcccaggaggtggaggttgcagtgagccgagatcatgcctctgcactccagcctgggtaacagagtgagaccctgtctttaaaaaaaaaaaaattatataagtata

SEQ ID NO: 52903 - DNA, 603 bp, Homo sapiens
tgaggcaggagaatggcgtgaacccgggaggcggagcttgcagtgagcagagatcacgccactgcactccagcctgggtgacagagtgagactccatctcaaaaaaaaaaaaaaaaattggaatattaagatacatttacaataatttttatcttaaaatatcactaggattgtggtggacattccagtgagcaaaagtgaataaactgggggaaaggatagtaaatgaaatgsaaaatggggacctgggagaaatataattaaaaactcaagtaacccaagaatattcagagtttcccaagtttcagagcatctcagtagattactactttataataaggccttcccaaagctccactggagcctgccaccaaaattacctagcacatttccaacatttcaacaagtaataatagtaatattcccagatgtcagtgaagttattctattctttaagacttaaaataatgttgggagagtgacatcagtaagatggtggaacaggagttccctagcttctctccctgccccagaaattcaactagcaattacccacaggcaagaatatcaatgtgaaaattccagaacttgggagtgaggctg

SEQ ID NO: 52904 - DNA, 970 bp, Homo sapiens
tttttctgagtgcctgccgtgtgcaaatcacagtgctaaacagggaagcctttttcttctccccaccccttccccagacgtctccttcccagttttcacatcctattgactcccttcatagtggacagtcttccatcctccccctcctcttcctggtaatgtctggaaaggaatcccagggctcactgcgaagacagctgttcctagttcagaaatcggccttggtcaaggcaagtcaaacatgatttctctggcagatgagcaacccacggctcctttcttcactttggtagccacctacttcctcagacacgcagctggagaggaagtttctgccactgtctggctcccatttgagagaaggaggagaaaagggagaaagagaaagctgagaaagaaagaaataaaaaggcctgcaatcttggtacaatggagaaaggagaaaaaggaaagggcaagttagagagggaagtgatgagatggttgggctctgggtgtgagagatccacagtgctaacatttcattcccttggattggaagctgcagaccacgctagtggggtccctcctttgcgagtgagaaggtatgtatccaaggaactgtcttcagcttgaaggcctcttcacaagggagataaattcatcatgatgtattctggctctatgaaaaacagcttcagaaaaacacaagattgcaaaaaataaaaataaatagaaaccagtggaagctattctcaagcaayggtgactacttactattccctgaaaaaatgtaaaatgagcttaataacgatttcatctttattggcatttacttttacttaaatcgccttagaaatgtgataatgtcactgttccagaagttatcaagatggagggaaaataagtgatcattttaaacttataattggcgatataaatatttattgtttaagtgatgtcattacggaaccaagaagagataggctta

SEQ ID NO: 52905 - DNA, 544 bp, Homo sapiens
tgttaactgcaattattactattaaaacatttgaacaccatgtgtgatgaaatattctttggcaaagggaggctggaatgactctcaggtaaagagtagtaaaagggctataagtagagcaataaaatgcaaatgtatgacctccgctttccccagagctgtacatcattccatttgttgaaaaagggaacggggcctactgctgaacgcaatataacaaatataacwcagagacccccttaaggtgccatatctgtttatagcctatttaaagaacaaaaaatagatctttctgtggcacttaatctggccaggacactcacaatacccgttagaatgtgtgcttatttcatcgttacaataatgggagttcacaaatgttctctgctcttttcactgaagcctctaggggtagaggtgaaagaaaggaaacaaaatttaaaatgctcagggtttgtttttaaaggcaacgactcgttcatgaagagtttgaacatacagggagaccagctgacttgagctgtctacaccttccagctctgtt

SEQ ID NO: 52906 - DNA, 544 bp, Homo sapiens
tgttaactgcaattattactattaaaacatttgaacaccatgtgtgatgaaatattctttggcaaagggaggctggaatgactctcaggtaaagagtagtaaaagggctataagtagagcaataaaatgcaaatgtatgacctccgctttccccagagctgtacatcattccatttgttgaaaaagggaacggggcctactgctgaacgcaatataacaaatataactcagagacccccttaaggtgccatatctgtttatagcctatttaaagaacaaaaaatagatctttctgtggcacttaatctggccaggacactcacaataccygttagaatgtgtgcttatttcatcgttacaataatgggagttcacaaatgttctctgctcttttcactgaagcctctaggggtagaggtgaaagaaaggaaacaaaatttaaaatgctcagggtttgtttttaaaggcaacgactcgttcatgaagagtttgaacatacagggagaccagctgacttgagctgtctacaccttccagctctgtt

SEQ ID NO: 52907 - DNA, 544 bp, Homo sapiens
tgttaactgcaattattactattaaaacatttgaacaccatgtgtgatgaaatattctttggcaaagggaggctggaatgactctcaggtaaagagtagtaaaagggctataagtagagcaataaaatgcaaatgtatgacctccgctttccccagagctgtacatcattccatttgttgaaaaagggaacggggcctactgctgaacgcaatataacaaatataactcagagacccccttaaggtgccatatctgtttatagcctatttaaagaacaaaaaatagatctttctgtggcacttaatctggccaggacactcacaatacccgttagaatgtgtgcttatttcatcgttacaataatgggagttcacaaatgttctctgctcttttcactgaagcctctaggggtagaggtgaaagaaaggaaacaaaatttaaaatgctcagggtttgtttttaaaggcaacgactcgytcatgaagagtttgaacatacagggagaccagctgacttgagctgtctacaccttccagctctgtt

SEQ ID NO: 52908 - DNA, 759 bp, Homo sapiens
ggtaagcatggagtgtttcttcaggatgggcccaggtaagcatggascattccttcagagtggagtcaggtaagtgtggaccattccttcaggatggagcaaggtaagcatggactgtttcttcaggatgggcccaggtaagcatggaccattccttcaggatggagccaggtaagtgtggaccattccttcggaatactgccaggtaagcatggagtgtttcttcaggatgggcccaggtaagcatggaccattccttcaggagggagccaggtaagtgtggaccattccttcggaatacagccaggtaagcttggagtgtttcttcaggatgggcccaggtaagcatggaacattccttcaggatggagtcaggtaattgtggaccattccctcagactacagccaggtaagcatggactgtttcttcaggatgggcccaggtaagcatggaccattccttcaggatggagtcacataagtgtggaccattccttcacgatggaatcaggtaggcagggaccattccttcagaatacagccaggtaagcatggactgtttcttcaggatgggcccaggtaagcaaggaccattccttcaggatggagccaggtaaatgtggaccactccatcaggatgcagcaaggtaagcatggactgcttcttcaggatgggcccaggtaagcatggactattccgtgaggatggagccaggtaatcagtgaccattccttcagaatacaaccaggtaagcatgg

SEQ ID NO: 52909 - DNA, 674 bp, Homo sapiens
cccagctaatttttgtattttttagtagaggcggggtttcaccgtgttggctaggatggtcttgatctcctgaccttgtgatccacccaccttggcctcctaaagtgctgggattacaggcgtgagccattgcgcctggccaattgtggtcattttttattgctcctcaaattaccccatctttgttagtgggagcctcttcacattaactctctctgagtccttgggacataactccagaagtgattgatggcctgattgctttctgttatgacaagttttgtacattttctgccctatacctggagttgactattttcctgaagagctctgcttccttttattggaaaatgctatttaggatccataatctgagtgctagaagtgaaagacccaccttgttttcctttttaaataacagtatttatcacctcacatggtttgtatgggtcataattctgaggtgccttagttcgatggtagtggcttggtgtctgctgtcaagatggcttacttacattgtaggcaatttgataccggctattggcaagatgtctcagtctctccccatgtggaaggctcttaggactgcttgagtgtcttcacaacatggtagctrgcttccttgagaacaagtgatccaagacagccagcagcatctttggattcatttt

SEQ ID NO: 52910 - DNA, 657 bp, Homo sapiens
aaaggactagttttcatgctgtaaaacactggccagataacttatgataatttatgatgagcttattcacttagttactaatattttcaggaacaacttaatgggcattcacaatacataagatcaacaattttagcaaaaaatcctttatatccctctctttttttttttttttttttttgagactgagcctctatcgcccaacctggagtgcagtggcactatctcagctcactgcaacctctacctcccgagttaaagctrttctcgtgcctcagcctcttaagtagctgggattacaggcgcccaccaccacgcctggcttttttttttttttttttttttttcccgagatggagtctcactctgtcacccaagatggagtactgtggcgccgtctccgctcactgcaaccttcccttcccaggttcaagccattctcctgactcagcctcccgagtagctggaattacaggcaagcgccaccacgcccggctaatttttgtatttttagtagagacggggtttcaccgtgttgaccaggctggtctcgaattcctggcctcaagtaatctgccacctcggccttccaaagtgctgggattacaggcgtgagccacggcgcctggtccattttttgtatttttagtagagatg

SEQ ID NO: 52911 - DNA, 510 bp, Homo sapiens
aatggaggaaggtggaattagggggtgcaaaactggacgccgaggagcagctgggatgccaatgaagggatcgatgggatgaggatacaaaggagaggaagaatttgaaaaatactttggaagtgagttacagaagctgagggagaaaagtcaaggatcctaaggtctaggtttatgacttgggattatgaagagatagttgtaccacaaaatgagatagagaataaaggcttgggaggaacttcaatgatgaatataatcaaattaataaatttaaatttgttaaatataatcacaagagtygtaagaaacatttacaatgatcttattcttaataaagacccataatctttagtttccagttcaagaccattcatgatgggtctttgtcttccccattagcatggcatctaaaattatagactctgaagaatatcgctgatatcataattttttctcatgatattcttttctaatcaacccatagtccatatttttatggttggagag

SEQ ID NO: 52912 - DNA, 510 bp, Homo sapiens
aatggaggaaggtggaattagggggtgcaaaactggacgccgaggagcagctgggatgccaatgaagggatcgatgggatgaggatacaaaggagaggaagaatttgaaaaatactttggaagtgagttacagaagctgagggagaaaagtcaaggatcctaaggtctaggtttatgacttgggattatgaagagatagttgtaccacaaaatgagatagagaataaaggcttgggaggaacttcaatgatgaatataatcaaattaataaatttaaatttgttaaatataatcacaagagtcgtaagaaacatttacaatgatcttattcttaataaagacccataatctttagtttccagttcaagaccattcatgatgggtctttgtcttccccattagcatggcatctaaaattatagactctgaagaatrtcgctgatatcataattttttctcatgatattcttttctaatcaacccatagtccatatttttatggttggagag

SEQ ID NO: 52913 - DNA, 539 bp, Homo sapiens
cctcaagcaatcctcctgcttcaacctcccaaatagctgggattataggcacaagcaaccacacccagctatttgtgagattctgtgttaatactagtaagatacgtttttcctacttatactaaaccagtaaaaaagtggcccacagataaaagtgatgagtagctaaaagataaagaactttatagtttccattttgaactgtgctattcacaaaatgtaatctccaatttatgatatagcatccatgacacacaaaattctgggccagagatactgtcagggatacaaaggtgactaagaccagttctygcccacaagaagtttacaatgtaataagacaagacagtaaacaagtaatgccatatgacattatatgttaagtgtcataaaagagacacaaaatcttacagaagtttcaaaggaaggacagattgcatctgatacataagaaaggaaaaactacatgaagaaggtagaactggacacttggcagtgccctgggcttagatgtctattcttttagaagatggaggctg

SEQ ID NO: 52914 - DNA, 570 bp, Homo sapiens
  misc_feature (1)...(570): n = A,T,C or G
gaaaatggagtttaatttttttaatacaaaaaaactcaatgaagttatacttacgttaaattggtggttattttagktcagtggttttaaaactcaacaatgaaacttttcaaaaagagttgttatacagaacagaaaaaagcagccacaattttaaaaaagatatgaagacccagattctcactaactcattcagctcccttcatactccctccccacagccaccccagctcctgaggcaggttcccagggctccaaggaacatacttttaaaaaatcagtattttgaatacataataagtgatgtaacttaaaagtatggtgagaaagtcccattgccaagagaaacatgttaatttaattttttatttaaaaaatcatcactcgtttcattgtgacatcttgaagaacgctgaatggcttcaaaataactgcatatgccaagatttctggagtgggcacgtttgatcttctttcataatgaaaactgacaaacctttttaaggggatagtattgnttcttcactcttncccctcctcacccctgcacacacatacatttctccttnc

SEQ ID NO: 52915 - DNA, 570 bp, Homo sapiens
  misc_feature (1)...(570): n = A,T,C or G
gaaaatggagtttaatttttttaatacaaaaaaactcaatgaagttatacttacgttaaattggtggttattttagttcagtggttttaaaactcaacaatgaaacttttcaaaaagagttgttatacagaacagaaaaaagcagccacaattttaaaaaagatatgaagacccagattctcactaactcattcagctcccttcatactccctccccacagccaccycagctcctgaggcaggttcccagggctccaaggaacatacttttaaaaaatcagtattttgaatacataataagtgatgtaacttaaaagtatggtgagaaagtcccattgccaagagaaacatgttaatttaattttttatttaaaaaatcatcactcgtttcattgtgacatcttgaagaacgctgaatggcttcaaaataactgcatatgccaagatttctggagtgggcacgtttgatcttctttcataatgaaaactgacaaacctttttaaggggatagtattgnttcttcactcttncccctcctcacccctgcacacacatacatttctccttnc

SEQ ID NO: 52916 - DNA, 570 bp, Homo sapiens
  misc_feature (1)...(570): n = A,T,C or G
gaaaatggagtttaatttttttaatacaaaaaaactcaatgaagttatacttacgttaaattggtggttattttagttcagtggttttaaaactcaacaatgaaacttttcaaaaagagttgttatacagaacagaaaaaagcagccacaattttaaaaaagatatgaagacccagattctcactaactcattcagctcccttcatactccctccccacagccaccccagctcctgaggcaggttcccagggctccaaggaacatacttttaaaaaatcagtattttgaatacataataagtgatgtaacttaaaagtatggtgagaaagtcccattgccaagagaaacatgttaatttaattttttatttaaaaaatcatcactcktttcattgtgacatcttgaagaacgctgaatggcttcaaaataactgcatatgccaagatttctggagtgggcacgtttgatcttctttcataatgaaaactgacaaacctttttaaggggatagtattgnttcttcactcttncccctcctcacccctgcacacacatacatttctccttnc

SEQ ID NO: 52917 - DNA, 590 bp, Homo sapiens
tcaagcttgttttctcaggttctgggtagggacaggtagcactattatgagggctgaagttagagaatgggaggaatgagaaagtgctgccctggcattagatacgcactcggtagaaaacatacttcacgtgttcatatagccattttgttttttcactttcactacagtatttaacaagtgagatattcaacactttattataaaatgggatttgtgctggataattttgcccaatggtaggctaacgtaagtgttccgagcatgtttaacataggctaggctgctatgaygtttgataggttagaagtgttaaatgcattttcaacatcatattttcaaattacgatgggtttactgagacataaccccatcgtaaatagagaggcatctgtatattttggaaattaagcccttatctgatacatagtttgcaaatatttttcccattccacaggctccctttccactctcttgttgctttctgtgctgtgcagaaaaaaaaaaaagaaagaaaagaaagagaagaaatcaaagactctgaatgtgtaactgatttgcccaagaccacagaattagaaaaaggcaga

SEQ ID NO: 52918 - DNA, 1839 bp, Homo sapiens
gatagagagtctctctgttatgtcccacaatgccaagtacagaagactcttcagctggtgaatttggttytctagatcgatatcttaacacatgacactggcatgttggagccagcatgcttacagaaatttactaggaaactacctggaatgtggaatttactctctgattccgtagacccatctgccttcaaatgtttgtcagttgcctctttgggttctctgctgcctttttagttcatcaatttgtttagtactttcatgatgcctagaggatatgggtattatggatgtcagtagttatttcaaagctagttttttttccctcagtttaattttagttgtgtagtacttggggaagcaaagtatttctatgtaatttctccaggtgtactttttcttgctgttctcaacatctctgggaattgatgttgtctggctggtcaagatgtgaagtttttaaaatttctttctccccctccttcataatttccactgggaaattttgtaattttcaggacttgaggggcttgcgttttgctttgctttagcaacaaatgtaatcaccaaatccccaaagcagaaacatgaggaactgagcaaaaattctgagcagtctctaagttaagggtatgatgatcaggtctgagaatatgcaacattcatacttacacaaccacatgtctgcaactttggactttgacccgtcttagtactcatcactccagactagctgggaaacccctatttataaggaacaaagcagctggtgcctgcagaactcatcctcaggcttaggactgaaggcaggcatggtgaggtggggcaggggtgaatttgactaatgaagaacatgagttctgaaaccctgtcttgttgttcaaaaataggtatggaaatgtggtggatgttctttctaagagaaaaacctacatcattaagaaagccagactggcagggcgtggtggctcatgcctgtaatcccagcactttgggaggccgaggcaggcacatcacgagatcaggagatggagaccatcctggctaacacggtgaaaccccgtctctattaaaagatacaaaaaattagccgggcgtggtggcgggtgcccgtggtcccagctactcgggaggctgaggcaggagaatggcgtgagccgagattgcgccactgcactccagcctgggcgacagagcgagattccatctcaaaaaaaaaagaaagaaagccagatcaagcattgggatccttcctctccattcccctggctcttcagccacctttaatgacactttacatcacagaatttaatgtgaattctggatcctagcaaaatattttgacttggggttttattcatggtatcgttttgctaactgtggtctctcattagtcttttaagaattacatctcacgctgttggttttattaaaagacttcacagctcactgaattttttcatgctatcttttctaacctattttttaaattgaaaaggtgatacatacacatagtctaaaaaattgatagaagaatatgagtggagaagcagagacaaggctttctctttcactgctgatttccagtcctccaagccacctccacagagttagccgttcctaccagtttgctttgtgtctttctgcaattttccacgcatctaggaacatatatatggatattcattctatgcatactgatttgtatcatgcatttttctgttttttgtttctttctatatcagctcatggatctccacctcattctttttcaaagctgttaggcttgtcttttacattctaatttaattttaagaagaataagaaacctatttttcg

SEQ ID NO: 52919 - DNA, 1839 bp, Homo sapiens
gatagagagtctctctgttatgtcccacaatgccaagtacagaagactcttcagctggtgaatttggttctctagatcgatatcttaacacatgacactggcatgttggagccagcrtgcttacagaaatttactaggaaactacctggaatgtggaatttactctctgattccgtagacccatctgccttcaaatgtttgtcagttgcctctttgggttctctgctgcctttttagttcatcaatttgtttagtactttcatgatgcctagaggatatgggtattatggatgtcagtagttatttcaaagctagttttttttccctcagtttaattttagttgtgtagtacttggggaagcaaagtatttctatgtaatttctccaggtgtactttttcttgctgttctcaacatctctgggaattgatgttgtctggctggtcaagatgtgaagtttttaaaatttctttctccccctccttcataatttccactgggaaattttgtaattttcaggacttgaggggcttgcgttttgctttgctttagcaacaaatgtaatcaccaaatccccaaagcagaaacatgaggaactgagcaaaaattctgagcagtctctaagttaagggtatgatgatcaggtctgagaatatgcaacattcatacttacacaaccacatgtctgcaactttggactttgacccgtcttagtactcatcactccagactagctgggaaacccctatttataaggaacaaagcagctggtgcctgcagaactcatcctcaggcttaggactgaaggcaggcatggtgaggtggggcaggggtgaatttgactaatgaagaacatgagttctgaaaccctgtcttgttgttcaaaaataggtatggaaatgtggtggatgttctttctaagagaaaaacctacatcattaagaaagccagactggcagggcgtggtggctcatgcctgtaatcccagcactttgggaggccgaggcaggcacatcacgagatcaggagatggagaccatcctggctaacacggtgaaaccccgtctctattaaaagatacaaaaaattagccgggcgtggtggcgggtgcccgtggtcccagctactcgggaggctgaggcaggagaatggcgtgagccgagattgcgccactgcactccagcctgggcgacagagcgagattccatctcaaaaaaaaaagaaagaaagccagatcaagcattgggatccttcctctccattcccctggctcttcagccacctttaatgacactttacatcacagaatttaatgtgaattctggatcctagcaaaatattttgacttggggttttattcatggtatcgttttgctaactgtggtctctcattagtcttttaagaattacatctcacgctgttggttttattaaaagacttcacagctcactgaattttttcatgctatcttttctaacctattttttaaattgaaaaggtgatacatacacatagtctaaaaaattgatagaagaatatgagtggagaagcagagacaaggctttctctttcactgctgatttccagtcctccaagccacctccacagagttagccgttcctaccagtttgctttgtgtctttctgcaattttccacgcatctaggaacatatatatggatattcattctatgcatactgatttgtatcatgcatttttctgttttttgtttctttctatatcagctcatggatctccacctcattctttttcaaagctgttaggcttgtcttttacattctaatttaattttaagaagaataagaaacctatttttcg

SEQ ID NO: 52920 - DNA, 1839 bp, Homo sapiens
gatagagagtctctctgttatgtcccacaatgccaagtacagaagactcttcagctggtgaatttggttctctagatcgatatcttaacacatgacactggcatgttggagccagcatgcttacagaaatttactaggaaactacctggaatgtggaatttactctctgattccgtagacccatctgccttcaaatgtttgtcagttgcctctttgggttctctgctgcctttttagttcatcaatttgtttagtactttcatgatgcctagaggatatgggtattatggatgtcartagttatttcaaagctagttttttttccctcagtttaattttagttgtgtagtacttggggaagcaaagtatttctatgtaatttctccaggtgtactttttcttgctgttctcaacatctctgggaattgatgttgtctggctggtcaagatgtgaagtttttaaaatttctttctccccctccttcataatttccactgggaaattttgtaattttcaggacttgaggggcttgcgttttgctttgctttagcaacaaatgtaatcaccaaatccccaaagcagaaacatgaggaactgagcaaaaattctgagcagtctctaagttaagggtatgatgatcaggtctgagaatatgcaacattcatacttacacaaccacatgtctgcaactttggactttgacccgtcttagtactcatcactccagactagctgggaaacccctatttataaggaacaaagcagctggtgcctgcagaactcatcctcaggcttaggactgaaggcaggcatggtgaggtggggcaggggtgaatttgactaatgaagaacatgagttctgaaaccctgtcttgttgttcaaaaataggtatggaaatgtggtggatgttctttctaagagaaaaacctacatcattaagaaagccagactggcagggcgtggtggctcatgcctgtaatcccagcactttgggaggccgaggcaggcacatcacgagatcaggagatggagaccatcctggctaacacggtgaaaccccgtctctattaaaagatacaaaaaattagccgggcgtggtggcgggtgcccgtggtcccagctactcgggaggctgaggcaggagaatggcgtgagccgagattgcgccactgcactccagcctgggcgacagagcgagattccatctcaaaaaaaaaagaaagaaagccagatcaagcattgggatccttcctctccattcccctggctcttcagccacctttaatgacactttacatcacagaatttaatgtgaattctggatcctagcaaaatattttgacttggggttttattcatggtatcgttttgctaactgtggtctctcattagtcttttaagaattacatctcacgctgttggttttattaaaagacttcacagctcactgaattttttcatgctatcttttctaacctattttttaaattgaaaaggtgatacatacacatagtctaaaaaattgatagaagaatatgagtggagaagcagagacaaggctttctctttcactgctgatttccagtcctccaagccacctccacagagttagccgttcctaccagtttgctttgtgtctttctgcaattttccacgcatctaggaacatatatatggatattcattctatgcatactgatttgtatcatgcatttttctgttttttgtttctttctatatcagctcatggatctccacctcattctttttcaaagctgttaggcttgtcttttacattctaatttaattttaagaagaataagaaacctatttttcg

SEQ ID NO: 52921 - DNA, 1839 bp, Homo sapiens
gatagagagtctctctgttatgtcccacaatgccaagtacagaagactcttcagctggtgaatttggttctctagatcgatatcttaacacatgacactggcatgttggagccagcatgcttacagaaatttactaggaaactacctggaatgtggaatttactctctgattccgtagacccatctgccttcaaatgtttgtcagttgcctctttgggttctctgctgcctttttagttcatcaatttgtttagtactttcatgatgcctagaggatatgggtattatggatgtcagtagttatttcaaagctagttttttttccctcagtttaattttagttgtgtagtacttggggaagcaaagtatttctatgtaatttctccaggtgtactttttcttgctgttctcaacatctctgggaattgatgttgtctggctggtcaagatgtgaagtttttaaaatttctttctccccctccttcataatttccactgggaaattttgtaattttcaggacttgaggggcttgcgttttgctttgctttagcaacaaatgtaatcaccaaatccccaaagcagaaacatgaggaactgagcaaaaattctgagcagtctctaagttaagggtatgatgatcaggtctgagaatatgcaacattcatacttacacaaccacatgtctgcaactttggactttgacccgtcttagtactcatcactccagactagctgggaaacccctatttataaggaacaaagcagctggtgcctgcagaactcatcctcaggcttaggactgaaggcaggcatggtgaggtggggcaggggtgaatttgactaatgaagaacatgagttctgaaaccctgtcttgttgttcaaaaataggtatggaaatgtggtggatgttctttctaagagaaaaacctacatcattaagaaagccagactggcagggcgtggtggctcatgcctgtaatcccagcactttgggaggccgaggcaggcacatcacgagatcaggagatggagaccatcctggctaacacggtgaaaccccgtctctattaaaagatacaaaaaattagccgggcgtggtggcgggtgcccgtggtcccagctactcgggaggctgaggcaggagaatggcgtgagccgagattgcgccactgcactccagcctgggcgacagagcgagattccatctcaaaaaaaaaagaaagaaagccagatcaagcattgggatccttcctctccattcccctggctcttcagccacctttaatgacactttacatcacagaatttaatgtgaattctggatcctagcaaaatattttgacttggggttttattcatggtatcgttttgctaactgtggtctctcattagtcttttaagaattacatctcacgctgttggttttattaaaagacttcacagctcactgaattttttcatgctatcttttctaacctattttttaaattgaaaaggtgatacrtacacatagtctaaaaaattgatagaagaatatgagtggagaagcagagacaaggctttctctttcactgctgatttccagtcctccaagccacctccacagagttagccgttcctaccagtttgctttgtgtctttctgcaattttccacgcatctaggaacatatatatggatattcattctatgcatactgatttgtatcatgcatttttctgttttttgtttctttctatatcagctcatggatctccacctcattctttttcaaagctgttaggcttgtcttttacattctaatttaattttaagaagaataagaaacctatttttcg

SEQ ID NO: 52922 - DNA, 523 bp, Homo sapiens
cagaatatactcagctatggcttggctttctagatggtgctatatgtggactccttctctggggcagtatagccttgtgggcatcaagcagcttcctaaactaggctgctagagatggggtttcaccgtgttggtcaagctggtctcaaactcctgacctctggtgatctgcccgccttggcctcccaaagtgctgggatcacaggtgtgagccaccatacctgacctaccttttttttgttttgttttgttaagaaacttgcttatgttgttctttattttcttcttgacttttttttccccaggtttccttacagtcatgcgtcacttaatgaggtagatacgttctgagaaatgtgttaggcaattccattgtcatgcaaacatcrtagagtggacttacacagacctagatgtgtagtgtgtacctataaacctggtacacacctagactatatggtataggctattgctcctaggtcacaaactatacagcatgttactctactgaatactctaggca

SEQ ID NO: 52923 - DNA, 523 bp, Homo sapiens
cagaatatactcagctatggcttggctttctagatggtgctatatgtggactccttctctggggcagtatagccttgtgggcatcaagcagcttcctaaactaggctgctagagatggggtttcaccgtgttggtcaagctggtctcaaactcctgacctctggtgatctgcccgccttggcctcccaaagtgctgggatcacaggtgtgagccaccatacctgacctaccttttttttgttttgttttgttaagaaacttgcttatgttgttctttattttcttcttgacttttttttccccaggtttccttacagtcatgcgtcacttaatgaggtagatacgttctgagaaatgtgttaggcaattccattgtcatgcaaacatcgtagagtggacttacacagacctagatgtgtagtgtgtacctataaacctggtacrcacctagactatatggtataggctattgctcctaggtcacaaactatacagcatgttactctactgaatactctaggca

SEQ ID NO: 52924 - DNA, 523 bp, Homo sapiens
cagaatatactcagctatggcttggctttctagatggtgctatatgtggactccttctctggggcagtatagccttgtgggcatcaagcagcttcctaaactaggctgctagagatggggtttcaccgtgttggtcaagctggtctcaaactcctgacctctggtgatctgcccgccttggcctcccaaagtgctgggatcacaggtgtgagccaccatacctgacctaccttttttttgttttgttttgttaagaaacttgcttatgttgttctttattttcttcttgacttttttttccccaggtttccttacagtcatgcgtcacttaatgaggtagatacgttctgagaaatgtgttaggcaattccattgtcatgcaaacatcgtagagtggacttacacagacctagatgtgtagtgtgtacctataaacctggtacacacctagactatatggtatagsctattgctcctaggtcacaaactatacagcatgttactctactgaatactctaggca

SEQ ID NO: 52925 - DNA, 1159 bp, Homo sapiens
ttgacctccaggcctcaagttatcctcctgccttggccttctgaagtactgagattacaggtataaaccactatgcccagcccttcatatgctttttaacccattcttgaaagacttttgtgatagccaatatacacctttgacacattaaattattcagacattgtggattaagtcagctgtaatcactaaatgatctaatcccaaagccagctctaatcccacaatgggaacacctgacaagatttcaataaacagtaatagaactcctttttgagctctttaaatgtatactttaaaaagttacaaactaaaattatgagacataggtctttattaccataaaagtataagcattcatttttcatgatattatgtattccaaatccttaaagactggcactatgtcttatttcttatgttctttttatcatggagtacaggaaatcatatgcatgatatattttattagaacataccagactgatatatccattcattcatacaatacttttgagtgagcactcttgcaaggtaccatgaaatacactggtgaataacagtcattttatttcatcttctcaaaaccagtggaggtacagacaataaattaaacaaacaattacaaattgtgtcctaacactaaagaaagcattgaataggggacagtggttaaaaaaaaataaaaataaaacaaaaaactaattaaaacctaattaggggacaggaaaggctgctattctgaggaggcaacaccgaacccagaggataaggagccggccttgggatgcatataccagagagtgagaatgagctgaaaacccttgaagcagaagaaactagcctatttaacaacaaaagcagctagtgtggctataacagaggtagtgtgatacaygggtaagaggccattatcatgcaggtggccttgctggcctggttgaggagtttgggttttctttggatataacaggaagctgggaggttgatattaattgatttacattttgaaaagaagatcacagctgctgggtggaaatgtatcaggagaaagatggtaaaagaggaaatggggaaaccagtcaggaagctactgcaatagcctaggctagaaagaatggtaatctaggcagcaatggatcaagagtcggctaaggga

SEQ ID NO: 52926 - DNA, 625 bp, Homo sapiens
attaatttaatgttttatttccttctatatcttggcacaaaagagcacattataaattagtaaagtagatgaagtctacatgtaagttctcttttctatttctccatcctttggggctccttacccttttctgcactcccttttgttctccacactctctaaccctcctaaatacagcacacacattcattcttcattcagccagcttgtccagtgtttttccaactgctccttttttgattatttaaaaaaaamccccacaaaacctaagaaagtcacaacgaaaaaagagaactacaggccaacatccctgaagaacatagatgcaacaatttttaaccaaatactattgaaccaaatcaagcagcatatcaacaagttaatttagcacaatcaaataggcttcattcctgggaggcaagtttggttcaacatacacaaatcaataaatatgattcaccacatgagcagatttaaaaacaaaaaacatatgatcatctcaatatacaaagaaaaagcttttgatcaaatttattcatgataaaaatcctcaagaaactaggcaccaaagggacatacctcaaaataataagagccatttatacaaactcacagccaatttcat

SEQ ID NO: 52927 - DNA, 651 bp, Homo sapiens
ccacttaaatatatatatatataaaacatttacagataacaatagcaataagatgaattaatataaagagaaaaatcatattaagtatagcatcaaagtaggaaatacgcaaattttatttaaccacaaatatgttacaaaaacattgctgacaaaatgaagatgacaaaacttttctgtgagccataaaagaagacaaaaattttaagaacacaaaaacaatgacaaaaatgaatagatctaaaaagtagccagacttatctccaatttaaataaatataaagggagcattatccgttttctttcttttttatttatttatttatttttttttgacagagtttcactcttgttgcccaggctggagtgtaatggtgcaatggtgccatctcagcttactgcaacctctgcctcccgggttcaagcgattctcctgccttggcctccccagtagctgggattacaggtacctgccaccaygcctggctaattttttgtattttgagttgagatggggtttcaccatgttggccaggctggtctcgaactccacatgcctcagcctcctaaagtgctgggattacaggcatgagccaccgcacctggccagagcattatacattcttaataaaatgaattatttaattgtaa

SEQ ID NO: 52928 - DNA, 540 bp, Homo sapiens
cctccacaatgctgcagtccagctaaatcatgcaaatattcatccaccatttactatggataaaacaataatgtgctgtggggaatccaattacacacacacacacaaaagtgcacacacacatgcatgcacacacactgctcctgctgtctcagaggttccaggctggcaaggaagaagtgcaaacattagtaggtaagtccactagcaggaggaatgtgataagtagatccaacagggtacaacacagtatgatagragcaaacaaggtagaaatgagttctgactccctttcacttatgaaactgattatggaatagtgtatgaaaggcttgcctgaatgaatctcatattttccaagtgttttctatcccagcgattggaactttcattcatttataccattgtccaaaaggaaaatacaggagattttcctaagaccatcctctgtcttatcgctcatatcatatccccaaacatcaccaagccctgcccacttttacctactcagtttctctccagttgttctgttttctccat

SEQ ID NO: 52929 - DNA, 540 bp, Homo sapiens
cctccacaatgctgcagtccagctaaatcatgcaaatattcatccaccatttactatggataaaacaataatgtgctgtggggaatccaattacacacacacacacaaaagtgcacacacacatgcatgcacacacactgctcctgctgtctcagaggttccaggctggcaaggaagaagtgcaaacattagtaggtaagtccactagcaggaggaatgtgataagtagatccaacagggtacaacacagtatgatagaagcaaacaaggtagaaatgagttctgactccctttcacttatgaaactgattatggaatagtgtatraaaggcttgcctgaatgaatctcatattttccaagtgttttctatcccagcgattggaactttcattcatttataccattgtccaaaaggaaaatacaggagattttcctaagaccatcctctgtcttatcgctcatatcatatccccaaacatcaccaagccctgcccacttttacctactcagtttctctccagttgttctgttttctccat

SEQ ID NO: 52930 - DNA, 540 bp, Homo sapiens
cctccacaatgctgcagtccagctaaatcatgcaaatattcatccaccatttactatggataaaacaataatgtgctgtggggaatccaattacacacacacacacaaaagtgcacacacacatgcatgcacacacactgctcctgctgtctcagaggttccaggctggcaaggaagaagtgcaaacattagtaggtaagtccactagcaggaggaatgtgataagtagatccaacagggtacaacacagtatgatagaagcaaacaaggtagaaatgagttctgactccctttcacttatgaaactgattatggaatagtgtatgaaaggcttgcctgaatgaatctcatattttccaagtgttttctatcccagygattggaactttcattcatttataccattgtccaaaaggaaaatacaggagattttcctaagaccatcctctgtcttatcgctcatatcatatccccaaacatcaccaagccctgcccacttttacctactcagtttctctccagttgttctgttttctccat

SEQ ID NO: 52931 - DNA, 605 bp, Homo sapiens
taaaacgctatctgtgaaagaatagaatctgatgggtaatgcgcagaaactaaagcagtgaataatactcattactctcagagactattcagcttggcattatttgcttttcctcttctgatgaaaatctctaaaaatttttcagaagctatgaatataaaaattataacctaaggattcccagcaggttgaattatttgctgaaacacttacgaacagcaggtgtttagagaatatgtggcatcaaaagccattttctctcagccaaagcattcttttcacatggaggcataaaatgctatcaagattcagatttaaaaatgctgaggcatctgttattttttctctcccatctctgtatttgagtttttttttcatttttaggttattttaggcattttatcttttgtatcttttggtagtaaacaaaatattatttatttattattttttctgtaattctttggacttaatcacttgtagacaaattaaacatattcattatacaatttttagtcagtagttctctgaatactcccawtctgaggttaataggaattataggcattatcatttaatttagcactaaattataggattttgtc

SEQ ID NO: 52932 - DNA, 639 bp, Homo sapiens
ccgaattgctgctttaaacccctcagctttgtggtagttacatgggaatagctaatacaaataagtggtgcagaccccggacacagagctgatacacaggatgtcactgggagaaacagagaaagagtgtggttgtctccccatatctacagtttcacattctgggatttcagttacctgyatttaacggaggttgtctgaaaatattaaataaaaaattcccaaagtaaacaattcgtaagttttagaatgcatgccattctgagtatcataactaaacctcatgctattttactttgtccttctcaggatgtggtttcaggtatccggtgagggtctcagaatttatcccctgtggataagggaggactactgtaatcagaaaagcagaaagagatgggttaactgttagcttaagcaattatggaaataaaatttagaaaataaacaataccagttcccaaacatttatccaaaagtcttaggactatatgtgcttgaactatagaaattttcatactttataaagttattagaatgcatacacactatatgttttaacagtcaccagcaggttctgggacaatgcctcaatacatcattctggagaaaaataaatgaatattcacataaagcaaa

SEQ ID NO: 52933 - DNA, 639 bp, Homo sapiens
ccgaattgctgctttaaacccctcagctttgtggtagttacatgggaatagctaatacaaataagtggtgcagaccccggacacagagctgatacacaggatgtcactgggagaaacagagaaagagtgtggttgtctccccatatctacagtttcacattctgggatttcagttacctgcatttaacggaggttgtctgaaaatattaaataaaaaattcccaaagtaaacaattcgtaagttttagaatgcatgccattctgagtatcataactaaacctcatgctattttactttgtccttctcaggatgtggtttcaggtatccggtgrgggtctcagaatttatcccctgtggataagggaggactactgtaatcagaaaagcagaaagagatgggttaactgttagcttaagcaattatggaaataaaatttagaaaataaacaataccagttcccaaacatttatccaaaagtcttaggactatatgtgcttgaactatagaaattttcatactttataaagttattagaatgcatacacactatatgttttaacagtcaccagcaggttctgggacaatgcctcaatacatcattctggagaaaaataaatgaatattcacataaagcaaa

SEQ ID NO: 52934 - DNA, 639 bp, Homo sapiens
ccgaattgctgctttaaacccctcagctttgtggtagttacatgggaatagctaatacaaataagtggtgcagaccccggacacagagctgatacacaggatgtcactgggagaaacagagaaagagtgtggttgtctccccatatctacagtttcacattctgggatttcagttacctgcatttaacggaggttgtctgaaaatattaaataaaaaattcccaaagtaaacaattcgtaagttttagaatgcatgccattctgagtatcataactaaacctcatgctattttactttgtccttctcaggatgtggtttcaggtatccggtgagggtctcagaatttatcccctgtggataagggaggactactgtaatcagaaaagcagaaagagatgggktaactgttagcttaagcaattatggaaataaaatttagaaaataaacaataccagttcccaaacatttatccaaaagtcttaggactatatgtgcttgaactatagaaattttcatactttataaagttattagaatgcatacacactatatgttttaacagtcaccagcaggttctgggacaatgcctcaatacatcattctggagaaaaataaatgaatattcacataaagcaaa

SEQ ID NO: 52935 - DNA, 605 bp, Homo sapiens
atgtataatcatcttataattgtataaaatattctaaaaagcattgcaatctaatatcygattttacggaattaattttttattctatacaaacagagtcttaactaatttcagggagaatgatctgtttgtaatttaaccttcaaattaaaatccaactagctataagcttttagatgcctgcctcatagggaatgagatatttatgagggaagtctaatggttaagtcctaaagtcttcccttggaagaaggataaaaggtttctaatcattgaatttttaaaaaatcattaatgaaggtattaactggactaaggcataaggggtaaagagtggcctttaatgagatttgaagacttgttctagaatatatgttttgccagaataaaacatgtatcttctgatgggatttggaaaggtagctaccaaaccagggaaaagagtccattggagaggggagaatggaaacacttctacctggcgcatgtagggtacaggtgggtatggaaggcgcgatatgcgaatatagggtttatccccaggcgtcaaggtacatgagaggtgggaaacagtgctcagcacaagtgagtgccatatactgttt

SEQ ID NO: 52936 - DNA, 693 bp, Homo sapiens
ttgataatgatgttggcagctgctaaccctgtctgcttcttaataataactaaaattgctttattatttggctgaagtasataaaaacatgctgcttttgctatttggttaaaatcctttattatatttaaacaattttcttctattgtattttatttcaaatatttcaaggtaagaattatttaactctatcaaagactttttctcacctaaatatgcaatctgagccaatatttgaagcttacatgtcacttacaatcttcagaattttgaaaaaggatggcacatatcaattttcagaaaacagctattgttgttatgaagattttcactttaatcaaggatatctgtgttttgtttgccacataatattaatcttagaaaaatgtgtgcatttctgcagtagaaatctactcatctcaaaacatgtcctcaatgacaaattttcatgataaatttgtaatagtgttgcaatgtctaattgcattgatttacatcccagtcgcattttatatctcttgatcttacagtaaatttaacattctgattactggtactgcttctcctgtcttcagaatatcccaagtagtaattttcagacttattttcaaatccttgcttgtcagcatttgccacaattagaatattgcaaatatttaaggaatactgttttgttttttgtttttttctatt

SEQ ID NO: 52937 - DNA, 693 bp, Homo sapiens
ttgataatgatgttggcagctgctaaccctgtctgcttcttaataataactaaaattgctttattatttggctgaagtagataaaaacatgctgcttttgctatttggttaaaatcctttattatatttaaacaattttcttctattgtattttatttcaaatatttcaaggtaagaattatttaactctatcaaagactttttctcacytaaatatgcaatctgagccaatatttgaagcttacatgtcacttacaatcttcagaattttgaaaaaggatggcacatatcaattttcagaaaacagctattgttgttatgaagattttcactttaatcaaggatatctgtgttttgtttgccacataatattaatcttagaaaaatgtgtgcatttctgcagtagaaatctactcatctcaaaacatgtcctcaatgacaaattttcatgataaatttgtaatagtgttgcaatgtctaattgcattgatttacatcccagtcgcattttatatctcttgatcttacagtaaatttaacattctgattactggtactgcttctcctgtcttcagaatatcccaagtagtaattttcagacttattttcaaatccttgcttgtcagcatttgccacaattagaatattgcaaatatttaaggaatactgttttgttttttgtttttttctatt

SEQ ID NO: 52938 - DNA, 743 bp, Homo sapiens
atgtgtggtatgtcagtattggaagtacagctgtaaattaaccatctctagaataagtgcaattagaaacaaaaaaacaaaaaagaataagttcaattaaagtatgctcacattaactttcattgtcacttgtctcttttataagcaaaaaaaaaaaaaaaatagcactgttgcaaagcctatgttgctttttaatagtctcttgggatataaactgttaaatattaagctctcttctgaacccaggcagtagtccagatttgtgccttcacattgattctttttctagaaatttgactcccctaaaaaaggttcaggtattagaaaatgatactctagtgagaggcttttgataaatgtctakaagattaaataattttggtgattgaatttctgttgccattactaaagagaacacccttaatatgtggcgagtcacccctactttgtttaattgactatggctgctttcagtatcacagagtttcttacataaaggccaattttagcccccttttccactagccctttttccaaatatgcttatttttaaataagagtatttcttcttgttttttaattttaattttggctttctcttattaactttaattaatatgatgagtttaaaaaaaatcacaggtcaggtcgggtgtggtggcatgtgcctgtaatcccagcactttgggaggcaggtggatcacttgagcaagtggatcattcgagactagcctgggcaaaag

SEQ ID NO: 52939 - DNA, 585 bp, Homo sapiens
cttgctttggattttccaaatcgaaaataaatattgggggcaattacctttccttagttctctgatgtatgaaggggagttttcatctattaatttaagaaccctctcatttcattcggaaggtattagcccatggaacttgttaacttaatatcaacacagtctgtctaggttttgactgaaaagagaaaggggtygttatgctctaggttaatattttcctctctttaagaagtcttgggtatgccagacacttctcggacaaaaacagctgttttcttcccattgctgaacgcattgtttgtgcgagttcacttacttgctatactcagaatatcctccaggagtcagcaaatcccaacctctggacgtggctcagggccgccctgcccattgctgagctgatttggaatttgggcctgagagaggaagtgattattggatgacaggctgcctcctagggggcttctctgggcttgccatgaaagcacttccggaggaaaagcagagctccatcagtctcttttggagagctgtgaacgtgaccagacctattaattacttaactgaggtgctgaactttga

SEQ ID NO: 52940 - DNA, 549 bp, Homo sapiens
gatgtcatacagaaatttctgtgctgtctctgcagttttaaaatttcattttgatgcataatgtttagttcyataaaacattcacctggttccaaagtcagatctatatagcaagacctattcagaaaggtctagtgtctaaccttgtcccaacatttaaaaatagtttatttatcattctactggttctttgaaaaaatctagacatgtgtgactatctatgggtattactcgtttcttacacagaatgctaaacacatttatatggtttggctgtgtccctacccaaatctcatcttgaattgtaaccccataatccccatgtgttgtaagagggactcagtgggaggtaactgaatcatgggggtggctcccccatgttgttctcatgatagtaaattctcatgagatatgatggttttataagacgctccccccttcactgggcacttattctctctcctgctgccctgtgaagcggtgccttctgcaatgattctaagtttcctgaggcctccccagccatgtggaactgtgcatcaattaaac

SEQ ID NO: 52941 - DNA, 549 bp, Homo sapiens
gatgtcatacagaaatttctgtgctgtctctgcagttttaaaatttcattttgatgcataatgtttagttccataaaacattcacctggttccaaagtcagatctatatagcaagacctattcagaaaggtctagtgtctaaccttgtcccaacatttaaaaatagtttatttatcattctactggttctttgaaaaaatctagacatgtgtgactatctatgggtattactcgtttcttacacagaatgctaaacacatttatatggtttggctgtgtccctacccaaatctcatcttgaattgtaaccccataatccccatgtgttgtaagagggactcagtgggaggtaactgaatcatgggggtggctcccccatgktgttctcatgatagtaaattctcatgagatatgatggttttataagacgctccccccttcactgggcacttattctctctcctgctgccctgtgaagcggtgccttctgcaatgattctaagtttcctgaggcctccccagccatgtggaactgtgcatcaattaaac

SEQ ID NO: 52942 - DNA, 540 bp, Homo sapiens
caaatttaccaacaaagagatttcccctattttacctagtgttttaatgttagatatagtgacccaaataaaataatattattttttaaatgagatttacatccattaaatattctaattgttcaactggctcccggtgaggctttaagcctccctaagacagcaagttggattcacagtatgggggctgtggagtcaggtcaagaagagtagacagtaaagtcaaatgcctgtgagaaagtgttttcatagagccaccaatttagctaaatcctccacaagaatgaagggacctgcttgctgacatgtagttcctccagtttggggggattaatcctgcctgtgatctgtttgtacaggtagaaaggagaaatcttcccttgtttcctctccatgggtgaaaacccatcctaactagcttaamtataatagacaacgcaggtgtttttgttctgttccatttcaatattttgttaaaaagaaaaagaaaattctttacatttttcttagaagaactacatttcagtcctgtggttctaa

SEQ ID NO: 52943 - DNA, 578 bp, Homo sapiens
ctagatctctaagtaatgtcttcctccctcagtcctcagcacccgcctggtcgggcattgggtctcaccaagctacagagccctaggtgcgctgtgttaggtcaccaagactttagtctggtgatactgaccccagggccccaaatcaccatgtctgcaagtctggaacccaaaggcctccgttccccggggtggtgcagggaagccgcagggagtgcgtcagctgtggagagcgyaggggtgggaagtgaaggctgtggggtcccccagggggtcaggttcgtcctcgaaggcaggccctccacaggaagacctggttggggtgggatcggacacgcggcccagacccaggcacctgtggatggacggccgggcatgtggccatcggctgggggcctctgcaggccgcgccaccagagtgggcactcagggtccgcaagggtctggggcgcccccagagaagcccgccgccccaggccggtgcggagttgactgggtccccccggccccgtgtctgtcagctcccgcgcggcccctgggaagggacgcggatcggatgcgggctccgggccctgcag

SEQ ID NO: 52944 - DNA, 628 bp, Homo sapiens
ccgcagccattcccgggtgggcggggtgggtccccaggctctgcccctgccgacgtcctgcctgtgctcttggccagccggggtgtgtggggagtgcagtgcggggcctcttttcccctactcaggcctcctgtgctcccctgtggggaaggaatctgttggattccttttgctagttaaaatttcattgtaaaggagattgttgagaagcattttactgttcattcatggtttccgtcagcrgacagaggcatgtgtttgtgtcaattgtcaacggacttgcggcccccgacccactggcccaagggttttaatcaggtcgctggggtttctctgctctcaccttagagtggtgcaaggatcaacatctcagagggaaactgcccagagaggattgtgaccatcacaggccccacagacgccatcttcaaggcctttgccatgatcgcatacaagtttgaggaggtaacctgcaccccaggcacctctgccagcctggcgggggcaggcctggtcccagctggctccctgggtcctctcccctacacctggactaggggatgccccagcccgcccaggcaaccccataactacgctcacctcctttgcctcccagggcctctccgca

SEQ ID NO: 52945 - DNA, 932 bp, Homo sapiens
ggccataaagcccaccttaacacatttcaaagtataaaaaccatgccatacctgctctctgaaaacactggaacctattatacaaaccagtaatagaatgatagctgggcaatctcaaaatacttggatattcagaaatacacgtctaaataacataagggtcaagaagaaatctcaacagaaattaaaataattctttgaactacatgaaaacaaaaatacagctaatgcctccaagagtttctcacttcccctatgggaaagtctgtatttcctacagagatcagtcaaagctggacagggagcctccaggaagggtctctgtcatggctacagttttgtctggagcacagatgcatacagcactcccgaaaacgtttctcttttcaaattagctagctgagacattccctaactagtcatggaggccagggagggcatcccttccacctggtggactgagtggggattggtcataggaggcaccctgcaaaattgtatctaaacccctctctggaggccaggacaaatctgaatggaccatggaactggggagagcctggatgggagccagtggtcaggaaggccttgggggctgctcagatggggccaggtatgaaggcctgagaagggtaccttgttgcatgggtctggttggcccaatgagtctccaaaagtttcttaagacccctggttggggggaggactgcatctggctataaagtgaaggccccaggaatggttggtgccctactttccactccagtccaaagcagtgcctgtcatcagaggcaycagaaaatatgttctaagtactccctgtttgtgggcaccaggtaaggatgcccagtaaggcctgggaagggcttgtgaatccagtcacagttcttcctggccttgtctatggcatgcaaattctttaaatgtttgca

SEQ ID NO: 52946 - DNA, 550 bp, Homo sapiens
agatcacaccactgcactccaggctgggcaacagagcgagactccatctcagcaacaacaacaaaaaggaatactacttagccacacacgcacacaaatgtcttttgcagcaacttggaactggaggccattaccataagtgaagtaactcaggaatggaaaaaccaaatactgcatgttcttacatataagtgggagctaagctatgggtacacaaggtatacagaggggcataatggacattggaggctcagagaggaagggagagggataaaaaaaaatcacctcttgggtacactgtaaattatttggtgacagatacagtaaaagcccagacttctccactatacaatttattcatataaccaaaaactatttgtaccccttaagctattgaaataayaatttaaaaaataattagtagagttcatctcaaacttaatataagcttttgtttcataaatccatgaggtattggagcttctcaaaatgactttacaaaactagctcaccttagactacatactgggttttcaagaaggtgcttgtg

SEQ ID NO: 52947 - DNA, 550 bp, Homo sapiens
agatcacaccactgcactccaggctgggcaacagagcgagactccatctcagcaacaacaacaaaaaggaatactacttagccacacacgcacacaaatgtcttttgcagcaacttggaactggaggccattaccataagtgaagtaactcaggaatggaaaaaccaaatactgcatgttcttacatataagtgggagctaagctatgggtacacaaggtatacagaggggcataatggacattggaggctcagagaggaagggagagggataaaaaaaaatcacctcttgggtacactgtaaattatttggtgacagatacagtaaaagcccagacttctccactatacaatttattcatataaccaaaaactatttgtaccccttaagctattgaaataacaatttaaaaaataattagtagagttcatctcaaacttaatataagcttttgtttcataaatccatgaggtattggagcttctcaaaatgactttacaaaactagctcrccttagactacatactgggttttcaagaaggtgcttgtg

SEQ ID NO: 52948 - DNA, 550 bp, Homo sapiens
agatcacaccactgcactccaggctgggcaacagagcgagactccatctcagcaacaacaacaaaaaggaatactacttagccacacacgcacacaaatgtcttttgcagcaacttggaactggaggccattaccataagtgaagtaactcaggaatggaaaaaccaaatactgcatgttcttacatataagtgggagctaagctatgggtacacaaggtatacagaggggcataatggacattggaggctcagagaggaagggagagggataaaaaaaaatcacctcttgggtacactgtaaattatttggtgacagatacagtaaaagcccagacttctccactatacaatttattcatataaccaaaaactatttgtaccccttaagctattgaaataacaatttaaaaaataattagtagagttcatctcaaacttaatataagcttttgtttcataaatccatgaggtattggagcttctcaaaatgactttacaaaactagctcaccttagactacatactgrgttttcaagaaggtgcttgtg

SEQ ID NO: 52949 - DNA, 572 bp, Homo sapiens
ttgcctcagttattcaatttacaaaagagtggtagtgaggsatttgttaaaaagaaaggagagaagagaggaggaagagaggtggggaaataaaccaaatatttgatttcataggaacgtgtgaggaaattagcatgttgaatgtatgaaaacactatatatgtgtataatgttaccatgtgaaaatatttacgtgaactaacattatgttaaaagtggtatgtactcataatatgactgaactttaaagataggggaaaatataattgataatgattttcttgtgcaatcagaaagtaatagtaatattcaaaacggcatggctcttacagtttataaatactatgcagaagtcctttctcagtctcctcagtggaaagaccattggaaaaggggggatggcaagatgaagtacaagtttttagacttgtacttcaaacagttacttgtaacttaaaacagttacttttctctttgaataatttctttagctattctcccgtgactgtggaaactaccttttttctagcacttcccaaaatgtgacacagcgtatggcttgcaaggtgatt

SEQ ID NO: 52950 - DNA, 572 bp, Homo sapiens
ttgcctcagttattcaatttacaaaagagtggtagtgagggatttgttaaaaagaaaggagagaagagaggaggaagagaggtggggaaataaaccaaatatttgatttcataggaacgtgtgaggaaattagcatgttgaatgtatgaaaacactatatatgtgtataatgttaccatgtgaaaatatttacgtgaactaacattatgttaaaagtggtatgtactcataatatgactgaactttaaagataggggaaaatataattgataatgattttcttgtgcaatcagaaagtaatagtaatattcaaaacggcatggctcttacagtttataaatactatgcagaagtcctttctcagtctcctcagtggaaagaccattggaaaaggggggatggcaagatgaagtacaagtttttagacttgtacttcaaacagttacttgtaacttaaaacagttacttttctctttgaataatttctttagctattctcccgtgactgtggaaactaccttttttctagcacttcccaaaatgygacacagcgtatggcttgcaaggtgatt

SEQ ID NO: 52951 - DNA, 550 bp, Homo sapiens
tgacttcatgtctgagtttaggatttataactcaactctgtgattgtttaggggactcataatcatattttctattttctgctaggaatcgtcaaaataagtatgatttgagactggaattgccaggagcatgagatggaaggcaatagaaaacagatggaaagaaagccagggcatataatgtttaagccttagaatcaaaccatgcctaatacaagacctcccctgacattttcctttaattaagccaattttttttttttcttttgagacggtgtctcactctgtcgccaggctgcaggctggagtggagtgcagtggcgcaatctcggctcactgcaacctccgcctcctggattcaagtgattctcctgcctcagcctcccgaatagctggttctacaggcacccgccaccatgcccagctatttcttttttatttttattttttgtattttttgtatttttattagagacggkttttcactatgttggccaggatggtctcgatctcttgacctctggctccgcctgcctcagcctccgaaagt

SEQ ID NO: 52952 - DNA, 586 bp, Homo sapiens
agtgttgggattatgggcatgagccaccacacctggccgtagaatatggtgcttcttgatgaaagggtcagctgaggcagccatctcatarctgttgaagtaaacctaaaatatagagacaaatctccaaattcaatgttttatttgggaagcaagaattgtaaattagggcctacacacagaccaggtggtcttcagtatgtccaaagaacaaaaggaaggttgggagttttattagagaaatgttatgtgttgttttgaaagaaagctcattggcactagagaagcttttgggtgtggacaagctctgattggtgagtgacgacagcaggtaaaaccagtcttagagtcacagtaggtggtcccagcagctactagctaaaactggtcttggtgttacagcaggccatttcagcagctaggcttatagaaagtgtaaattttggagcaggtgcgacagtgctatgtgccctgagtgctttttcctcctggccccttgactctgatttagttgggtaagacaagaatgacctaatttgtataatcaaccttcacacagccaagaaaagttcagtttgaaggaaca

SEQ ID NO: 52953 - DNA, 586 bp, Homo sapiens
agtgttgggattatgggcatgagccaccacacctggccgtagaatatggtgcttcttgatgaaagggtcagctgaggcagccatctcatagctgttgaagtaaacctaaaatatagagacaaatctccaaattcaatgttttatttgggaagcaagaattgtaaattagggcctacacacagaccaggtggtcttcagtatgtccaaagaacaaaaggaaggttgggagttttattagagaaatgttatgtgttgttttgaaagaaagctcattggcactagagaagcttttgggtgtggacaagctctgaytggtgagtgacgacagcaggtaaaaccagtcttagagtcacagtaggtggtcccagcagctactagctaaaactggtcttggtgttacagcaggccatttcagcagctaggcttatagaaagtgtaaattttggagcaggtgcgacagtgctatgtgccctgagtgctttttcctcctggccccttgactctgatttagttgggtaagacaagaatgacctaatttgtataatcaaccttcacacagccaagaaaagttcagtttgaaggaaca

SEQ ID NO: 52954 - DNA, 526 bp, Homo sapiens
tttttgaaaatcaggacatttgcccatcttcagttttctggcacttccttcattctctgtagtttcctcaaaagcaatgattatatctgtaaatacctctgggtcgctgggatgtcatatgtctgggcttcaatgagtgagctcattgtaggtaacttgatgtcttcttcctatcgcttgactatcttgggtctcwatttcctccttatcctctttattccacaatttgaagtaaaattgcctgtatcttgctctgcctgccctcgagcctaagccagagcagattccttcttgttattcttagactttgaaagctttttgctcttgtctttgccaatttcccccgacttctgttcactggagcttcagggctttgctaacgccattcttacagatctgccaatcttccagattcctcttgggttattgattccttcttgcctcttttgtgtgtgtgcttttcataccctggctcattggaaaactacaagtgcagcctcacaagattttctataaaacttgattt

SEQ ID NO: 52955 - DNA, 508 bp, Homo sapiens
caatgaaaaagaagaaaaaacaataaacagctttagaggaaaaatatactagaaatttttttaaaatcacaatttgtttaacgagaccaataagaagagccaaacatagactggcctttatattggcccctctttcttcttctcagccctggacctaggagtattggcttgatgaattctgaactccttgtatagagctgttgccttgtgatttactcattctacttagggaaaagaacctttcaggggcacactgatgtttagggaggaagtgtcccacaaggagagagatttttaaattctttatgtgccttaatataggcactctagaataaggggtaaatcaggaattcggaaataacctgtatcatggtaagcctattagtaggactgatttctggtatccttcatgtcatggcaaatttccagtatttagcatrtctctcaaagaacctaagaagagtacttcatttaccaatagaagcagtggctgcagaaaactttgtca

SEQ ID NO: 52956 - DNA, 555 bp, Homo sapiens
atgatcagatgtgtgtttttagaaagttgttctggcaatggtatggagtgaaaggagagagttttgctggaaaacaattgaaatggtttggytgagagatgatggaagtttggaccaggaagttggtaatggctttaggacagtttttcagcattagcactattaaaattttgaactaaaatcatttgtgtgtgtgtgtgtggcggggtgcatatgtgtgcacgcacactatggggttatctcatacattgtaggatgtttagcagctttcctggcctccatctactagataccagtagcacctccacccaggtgtgacaactaaatatgtctctagacattgccaaaagtccgctgtggggaaaagttactcctagttgagttctgagtcagaaaaaattagacaaaatgcataggtatttaagtgttggaattaaaaggactaattgttcaaccctatcaatcagtcagtgttttataatcacatacatttcctgggccgaatggtagaaggcacctcacacttacatttgcttgtttccatactgatataaa

SEQ ID NO: 52957 - DNA, 508 bp, Homo sapiens
gttgctcatgagactgtagagccagtgatagccggtctccagcagctaccacagtgcctgatgctcaataagaacttactaaatgaaggaattactgcagtaggaatcaaaatgaatgctttggcttaagagctaacatgcacagatataatagatcaacctaatgcccataggtgagtcaatagctgaataaactaagacatgttcatagtttagaatgctaggtggctatttaaggaaacaggaggcacataataggtctatataataatagacrtggagaaataataactcagaagtacataggtattattactgagtgaaaaaatttcaggacaacattaaatagcatgatgccgtgtatataaacaaaaactttttaatctatataatttctacgggtatgcatatccacacacagctgatatctagaattatataattaataaaagttacctttaaggagcaggagagtgggtcaaaggaggtggtagccttatgtgtaatg

SEQ ID NO: 52958 - DNA, 508 bp, Homo sapiens
gttgctcatgagactgtagagccagtgatagccggtctccagcagctaccacagtgcctgatgctcaataagaacttactaaatgaaggaattactgcagtaggaatcaaaatgaatgctttggcttaagagctaacatgcacagatataatagatcaacctaatgcccataggtgagtcaatagctgaataaactaagacatgttcatagtttagaatgctaggtggctatttaaggaaacaggaggcacataataggtctatataataatagacatggagaaataataactcagaagtacataggtattattactgagtgaaaaaatttcaggacaacattaaatagcatgatgccrtgtatataaacaaaaactttttaatctatataatttctacgggtatgcatatccacacacagctgatatctagaattatataattaataaaagttacctttaaggagcaggagagtgggtcaaaggaggtggtagccttatgtgtaatg

SEQ ID NO: 52959 - DNA, 500 bp, Homo sapiens
  misc_feature (1)...(500): n = A,T,C or G
annnnnnnnnnnnnnnnnnnnnnnnnnnnnnnnnnnnnnnnnnnnnnnnnnnnnnnnnnnnnnnnnnnnnnnnnnnnnnnnnnnnnnnnnnnnnnnnnnnncctgaggttcaaagtaatcctgttttacctaggaggtcttattgctccagttatggacttttataagtaccaaagacaaaggaaaaaattactattgactttgycttatgtaatatcagaaaaactttagcagtgaaaaattatagaaaaaaaagattactgattattgaaatttccaagcatataatcaagatggaaaactcaaatcttagatttaataagaaatagtatgatgctatattcatgactacacattagcagattttagcaaatattctgaagatgaaattagagtactgattaatttttaaacacacttaactcccttagagatgccattcagtagtgtttctagtcaggaaatatcctgatatgagctaatataaagtttagaggggt

SEQ ID NO: 52960 - DNA, 500 bp, Homo sapiens
  misc_feature (1)...(500): n = A,T,C or G
annnnnnnnnnnnnnnnnnnnnnnnnnnnnnnnnnnnnnnnnnnnnnnnnnnnnnnnnnnnnnnnnnnnnnnnnnnnnnnnnnnnnnnnnnnnnnnnnnnncctgaggttcaaagtaatcctgttttacctaggaggtcttattgctccagttatggacttttataagtaccaaagacaaaggaaaaaattactattgactttgccttatgtaatatcagaaaaactttagcagtgaaaaattatagaaaaaaaarattactgattattgaaatttccaagcatataatcaagatggaaaactcaaatcttagatttaataagaaatagtatgatgctatattcatgactacacattagcagattttagcaaatattctgaagatgaaattagagtactgattaatttttaaacacacttaactcccttagagatgccattcagtagtgtttctagtcaggaaatatcctgatatgagctaatataaagtttagaggggt

SEQ ID NO: 52961 - DNA, 602 bp, Homo sapiens
tcacacaactgggcctgcccgatccaaagcacacacgacagtctcacagcccagtgctagtccgctacccacagtgcaatcactgcaaacagctccagttgtttcctcaagttcctttggttctgggatataacccactagggctatatgtaagctccgaggattggcttttaatattcctggcagctgagaagaacaaggtgccgtgaagagccacagcccctccagaaactgcacctgggcagcgggcygtgtggccacagctgagaccctgaggagtgggtccccaggggactggtctcggggagaggggctgcctcttaaaacacgacgatggacagacagatggatacgttcaacagcagcatgaacaagttctacaactagaaatcattatttgtaaaggaaaaacccatttacgagttgaatcagaggagaggctcgtgtctctgagttctgaattcatgtggggaggaacaaatagaggaattacctgaaacgtaaagcaaaaatactgcctcgaggaagttatgagggaaaagagattttgagaacagatccagtagccccatatgcaaataatagggaaataaaatataata

SEQ ID NO: 52962 - DNA, 602 bp, Homo sapiens
tcacacaactgggcctgcccgatccaaagcacacacgacagtctcacagcccagtgctagtccgctacccacagtgcaatcactgcaaacagctccagttgtttcctcaagttcctttggttctgggatataacccactagggctatatgtaagctccgaggattggcttttaatattcctggcagctgagaagaacaaggtgccgtgaagagccacagcccctccagaaactgcacctgggcagcgggccgtgtggccacagctgagaccctgaggagtgggtccccaggggactggtctcggggagaggggctgcctcttaaaacacgacgatggacagacagatggatacgttcaacagcagcatgaacaagttctacaactagaaatcattatttgtaaaggaaaaacccatttacgagttgaatcagaggagaggctcgtgtctctgagttctgaattcatgtggggaggaacaaatagaggaattacctgaaacrtaaagcaaaaatactgcctcgaggaagttatgagggaaaagagattttgagaacagatccagtagccccatatgcaaataatagggaaataaaatataata

SEQ ID NO: 52963 - DNA, 489 bp, Homo sapiens
ttatatgtatgctctgccagagcctgtgctttgtccctaagtgctgggaagagttttataaacatttacggtataaaatatattctgagcagagtgatgcctggaaacttatgcccattacttaaaaacactgttgtctctggttcctgttccttactgcaaatgtagtagacaagcttgccatcaaatattgcctctagtgggaatacttctgtattcggcctcagcccacagagaaggaatcttccatcaatattttgtcctttcatcagatgctaggaaagtttgcaccattctgcccatccctactcattggatggaagcatggctaatacaaggaatgtggtggttccatgtatatgaggtggggttcaagcagttttattttgaygaatctccaaaggtgatctagaaatacaatcttgatctctgctttttctactcactctctttgtctcgcatttaatcataccaatttggtaagaatat

SEQ ID NO: 52964 - DNA, 1210 bp, Homo sapiens
gctgggggcaacctacgagactgtttctaaagcccaggacatagctgcatgactacttggctggtctaggaggtttgtctgtgggtggtggcccacctagctgtttcatgggtccaggatgctggtgtrtcactgcttggttggcctggggccttgaccactaggggcagcctgtggagttatttctcagtcctagggtgtgtgtgcacagctccttggccagcctaagggagtttctggtagaggcagcccacagatctgtttctcagactgattgtagatgcagggctgatggactggtcataggcctgtctgcagggtttggggtacctcagggctgtttctcaggctctgggcccaggtgcattaccattctgctggcctgggagcatgtcagcagcttggaggcttgagagtctctcttgcccaaaggcagccttactctgggcaggattgccagtctgttcctctggctggaagtaagggtggcaggagttggtttctctgctgtctaggatcagcctcatactcaatcctgggcctaggctccacactgctgggattgtggtgttcagctattggtatgggcacagtagtatgaagataggattccagtgctggagaagtacagtgcctactggtctctagagcagggcacactccagaggtggctctggtctcaagatagcaccatgctgcagcagcatggcccacagggaatgggtggaggggtagagaagttaaaccttgacctcccaatccagagtaatgcaactgcatgaatcctcagcacctcttcaaactgggcgactgtgggattctcctgtcataaggactgtaggtgtttgtggtggtaatgtgggctggtggagatcttctgcttaccttcctccacacctcccaaaggaaagtgcctcctaactctaggcagatttgatctaggtgagggagatggggctacacagttcaggtgcttccatactgctgtcctggacttctgatcaccacaggtgtgtctctactcacctgatgcactccagcactctggcgtcaacactccagtcaaagcttagctattttttcattgccttgctgctttgttgtgagagggacaaatgccaggcatctcgagtaaaccttcttgttgacatcactctatctattgtctccagaaggttttatagacttatactccaactgttggtccaca

SEQ ID NO: 52965 - DNA, 1210 bp, Homo sapiens
gctgggggcaacctacgagactgtttctaaagcccaggacatagctgcatgactacttggctggtctaggaggtttgtctgtgggtggtggcccacctagctgtttcatgggtccaggatgctggtgtgtcactgcttggttggcctggggccttgaccactaggggcagcctgtggagttatttctcagtcctagggtgtgtgtgcacagctccttggccagcctaagggagtttctggkagaggcagcccacagatctgtttctcagactgattgtagatgcagggctgatggactggtcataggcctgtctgcagggtttggggtacctcagggctgtttctcaggctctgggcccaggtgcattaccattctgctggcctgggagcatgtcagcagcttggaggcttgagagtctctcttgcccaaaggcagccttactctgggcaggattgccagtctgttcctctggctggaagtaagggtggcaggagttggtttctctgctgtctaggatcagcctcatactcaatcctgggcctaggctccacactgctgggattgtggtgttcagctattggtatgggcacagtagtatgaagataggattccagtgctggagaagtacagtgcctactggtctctagagcagggcacactccagaggtggctctggtctcaagatagcaccatgctgcagcagcatggcccacagggaatgggtggaggggtagagaagttaaaccttgacctcccaatccagagtaatgcaactgcatgaatcctcagcacctcttcaaactgggcgactgtgggattctcctgtcataaggactgtaggtgtttgtggtggtaatgtgggctggtggagatcttctgcttaccttcctccacacctcccaaaggaaagtgcctcctaactctaggcagatttgatctaggtgagggagatggggctacacagttcaggtgcttccatactgctgtcctggacttctgatcaccacaggtgtgtctctactcacctgatgcactccagcactctggcgtcaacactccagtcaaagcttagctattttttcattgccttgctgctttgttgtgagagggacaaatgccaggcatctcgagtaaaccttcttgttgacatcactctatctattgtctccagaaggttttatagacttatactccaactgttggtccaca

SEQ ID NO: 52966 - DNA, 1210 bp, Homo sapiens
gctgggggcaacctacgagactgtttctaaagcccaggacatagctgcatgactacttggctggtctaggaggtttgtctgtgggtggtggcccacctagctgtttcatgggtccaggatgctggtgtgtcactgcttggttggcctggggccttgaccactaggggcagcctgtggagttatttctcagtcctagggtgtgtgtgcacagctccttggccagcctaagggagtttctggtagaggcagcccacagatctgtttctcagactgattgtagatgcagggctgatggactggtcataggcctgtctgcagggtttggggtacctcagsgctgtttctcaggctctgggcccaggtgcattaccattctgctggcctgggagcatgtcagcagcttggaggcttgagagtctctcttgcccaaaggcagccttactctgggcaggattgccagtctgttcctctggctggaagtaagggtggcaggagttggtttctctgctgtctaggatcagcctcatactcaatcctgggcctaggctccacactgctgggattgtggtgttcagctattggtatgggcacagtagtatgaagataggattccagtgctggagaagtacagtgcctactggtctctagagcagggcacactccagaggtggctctggtctcaagatagcaccatgctgcagcagcatggcccacagggaatgggtggaggggtagagaagttaaaccttgacctcccaatccagagtaatgcaactgcatgaatcctcagcacctcttcaaactgggcgactgtgggattctcctgtcataaggactgtaggtgtttgtggtggtaatgtgggctggtggagatcttctgcttaccttcctccacacctcccaaaggaaagtgcctcctaactctaggcagatttgatctaggtgagggagatggggctacacagttcaggtgcttccatactgctgtcctggacttctgatcaccacaggtgtgtctctactcacctgatgcactccagcactctggcgtcaacactccagtcaaagcttagctattttttcattgccttgctgctttgttgtgagagggacaaatgccaggcatctcgagtaaaccttcttgttgacatcactctatctattgtctccagaaggttttatagacttatactccaactgttggtccaca

SEQ ID NO: 52967 - DNA, 1711 bp, Homo sapiens
  misc_feature (1)...(1711): n = A,T,C or G
tagaaactatgatcagtgctttacatagatgatctcattacatctttactgtaascccatgaggtaggtactcttatggtccctattctacagatgtgcagagaaccagcacctcaactctctgatttcaagttgagaggttggggttggcctggttggctcttcaagtcaagaggacattttattctgtcccatcaagtgacctttgggtcaccaaggcattagttctcagtggatattgctggtgtgcctgacggaggtggccattaggcctccctccattacacatgccgatagctcttggttttcttttatttgcaatacaattcaaaaatgtgaataaaacctcaaaaaatagggaaatgaagtctgaacaataaaaatagctgagatattgagtatttagtcttgccaggcactgtttgccaagcactgttctgtgaggacagtgcctggcaacattaaatactcagtatcttaggaggtaggtactattatcatccccattttacaggccgccaagaggttaagtgacttgcacaagattgcacagctcttaattggagaagctggcattcaaatccagcagtagcatcggcctgttccttgccaaatacaacaaggctttctaccttcttggatgtttatttcctaccacacttttaaaaacaattcaccaaacacgtaagaagtagctaaaacaaggggctcacattcaatgtgtaatgtagaggtgcagctttgtggttggttccttctttcagttaagtaatgaaaaatgatacaacacataaaaatataacaaaaccgaaagaggtgagtgccctaaggaggatacaaatacagccctgtggaagctaaagtgttggaagagatcctgctgagttaggtcccaaagaatcactaggatctncacgaacagagatgggaaacagacagtagcactgtagcaggaaaagaacttcgtggtggaaaagtgtctgggggtccagaaatagtgagatactgatatctgatggatcaagtaggaagtcatggatgattccaggatgaaaaaaaattcatagattcatcagaacaattagcaggtgaaatttagcaatattttcaacacaccttcaaaaacacttggtagtggcacatggggcagaagagtcccatatatatggatgtccaggtttacaccagatgtcctggcaacccatcgggttagcaaccctaaccattctcaagatccttgcatggacaataaattatatgaccaccctgtatctggcaaattgaaagatagggcccaacacttaggtgtattaacggtgcttaagaagtcatattgtggccaggcatggtggctgacacctgtaatcccaacactttgggaggctgaggcaggaggagcacctgcgcccaggaattccagaacagtctgggcaacatggagaaaccccatctctacaaaaacaaaaaacaaaacataattagctgggtgtggtggcacacaactgtagtcctagctactcaggagactgaagtgggaggattacttcagcccaacaggttgaggctagagtgagccgtgatagtgccactgcactccagcccaggcaacagagtgagaacctgtctcaaaaccaacaaacaaaaaaccaaaacaaacccacaaataagtcatattttaaaagcctacatctcaatgcctagctaagcttta

SEQ ID NO: 52968 - DNA, 1711 bp, Homo sapiens
  misc_feature (1)...(1711): n = A,T,C or G
tagaaactatgatcagtgctttacatagatgatctcattacatctttactgtaagcccatgaggtaggtactcttatggtccctattctacagatgtgcagagaaccagcacctcaactctctgatttcaagttgagaggttggggttggcctggttggctcttcaagtcaagaggacattttattctgtcccatcaagtgacctttgggtcaccaaggcattagttctcagtggatattgctggtgtgcctgacggaggtggccattaggcctccctccattacacatgccgatagctcttggttttcttttatttgcaatacaattcaaaaatgtgaataaaacctcraaaaatagggaaatgaagtctgaacaataaaaatagctgagatattgagtatttagtcttgccaggcactgtttgccaagcactgttctgtgaggacagtgcctggcaacattaaatactcagtatcttaggaggtaggtactattatcatccccattttacaggccgccaagaggttaagtgacttgcacaagattgcacagctcttaattggagaagctggcattcaaatccagcagtagcatcggcctgttccttgccaaatacaacaaggctttctaccttcttggatgtttatttcctaccacacttttaaaaacaattcaccaaacacgtaagaagtagctaaaacaaggggctcacattcaatgtgtaatgtagaggtgcagctttgtggttggttccttctttcagttaagtaatgaaaaatgatacaacacataaaaatataacaaaaccgaaagaggtgagtgccctaaggaggatacaaatacagccctgtggaagctaaagtgttggaagagatcctgctgagttaggtcccaaagaatcactaggatctncacgaacagagatgggaaacagacagtagcactgtagcaggaaaagaacttcgtggtggaaaagtgtctgggggtccagaaatagtgagatactgatatctgatggatcaagtaggaagtcatggatgattccaggatgaaaaaaaattcatagattcatcagaacaattagcaggtgaaatttagcaatattttcaacacaccttcaaaaacacttggtagtggcacatggggcagaagagtcccatatatatggatgtccaggtttacaccagatgtcctggcaacccatcgggttagcaaccctaaccattctcaagatccttgcatggacaataaattatatgaccaccctgtatctggcaaattgaaagatagggcccaacacttaggtgtattaacggtgcttaagaagtcatattgtggccaggcatggtggctgacacctgtaatcccaacactttgggaggctgaggcaggaggagcacctgcgcccaggaattccagaacagtctgggcaacatggagaaaccccatctctacaaaaacaaaaaacaaaacataattagctgggtgtggtggcacacaactgtagtcctagctactcaggagactgaagtgggaggattacttcagcccaacaggttgaggctagagtgagccgtgatagtgccactgcactccagcccaggcaacagagtgagaacctgtctcaaaaccaacaaacaaaaaaccaaaacaaacccacaaataagtcatattttaaaagcctacatctcaatgcctagctaagcttta

SEQ ID NO: 52969 - DNA, 560 bp, Homo sapiens
atggttatattcaagagtgacagcctgggtgacagagtgagactctacctcagaaaaaaacaaaaaaaagagttggactgcagggcttagaaaccaatttttctccccttttctctgatacattcttcgtgcttagaatagatggatgaaggtgcgtatacctgtgtaggattatatacagatgtgctcttcagagacatgacattgtcagttgcctgttttgtgcttttgatttgtttatttttgccaataacatcagaactatacatcaaagtgagyactggctattcctaaatagtccaacagcactaaaaactaaaaatttagttttccagctcatcttggaaaactaaatatgcatttaatatcaccactgccaattcatttctggaacttgtccttaaaaattcactttggagctgaaatcagaatgtttagaatagactaaccggtgtcaagtcttcattttggggggatgggagataggatttttagaaccagtcatattctagtaagttgtttaaaatttttatatgctatgtatacatggaaaaaaaaaa

SEQ ID NO: 52970 - DNA, 1595 bp, Homo sapiens
taaataaataaataaataaataaaaagaaaaaascccatggtaattatagtatgaaaataaggggagtctctaaaagaaatatgcatcacgcaacaatcattgtcaggtatttttagatgaaatttagtcaggttgcatattagttctttgtttcttttgtagcaaggaggtctccctatgttgcctaggctggtctcaactcctggcctcaagcaggtcttcccaccttggcctcccagagtgctgggattataggcgtgagccaccatgcctggccaggtctctttggaatactgtccaaacctgatgtcaagggcaaaaggacataagataaagtaaaagtaaattcttgagtaaataaacgaaaaacagtgaggcagaaaaaatagtgaaaactaacatatagctttgaatttaaattctagacccactaatgactagctgtgacttagggaaagtaactaactctctgaaactgcttccttctctgtaaaatggtgataatgacatttacgtgagtactgttggtattgttcagacattatttcacttatggaggtgaataataccaacagcactcacttctctttttggatacagactgaacatgtatggaaatattcccatccctacttcaaagacatgtacatgctggtgaaatattcctgctttcctcacttaaatttcctcagtaaatattcctctttacctatttcccatagaaaaaataggttctaaaagaagaaaaggaagtctgcaggtggtagaaataaagagggaacccacagaacttgaaaccacatggcccattgaggttcctagactggatacgttgtgccttaggaattagggggtttcaataatgctggggaagtctgggcacgatggctcacgcctgtaatcccagcactttgggaggatgaggcgggaggatcatgaggtcaggagttcgagaccagcttggccaacatggtgaaaccccatccctactaaaaatacaaaaattagccaggtgtggtggcacatgcctgtagtcccagctactcgggaggctgaggcagaagaattgcttgatgtgggagggagaggttgcagtgagccaagactgcatcactgaactccagcctgggcgacagaccgagactccatctcaaaacaaaacaaaacaaaaaagtgggaaatagatattaggaattgaggctgcagtcatattggatagtaaagagcagaaatgggcacatttagaattgggaaagccctgttccaatataaggactgaaaaatcagtatctactagtccagagtcattgcaagaaacaagttccccatctcaggtcatgggttgaaacaaagtcatccaacaagagtcttggctgcatgtgaatacagagccaattcatactatctgcatggtgaaggagtcccatttaacaaaacataatatttggttcagtttcagaaaaccatataaggccccagcagaaataatctaaaaatttctccaaaggaagcagttgcatccataacgaagccatgaacaaaaccctctcagaagaaaagtcctatagaagataagcttgcagatacaaattta

SEQ ID NO: 52971 - DNA, 1595 bp, Homo sapiens
taaataaataaataaataaataaaaagaaaaaagcccatggtaattatagtatgaaaataaggggagtctctaaaagaaatatgcatcacgcaacaatcattgtcaggtatttttagatgaaatttagtcakgttgcatattagttctttgtttcttttgtagcaaggaggtctccctatgttgcctaggctggtctcaactcctggcctcaagcaggtcttcccaccttggcctcccagagtgctgggattataggcgtgagccaccatgcctggccaggtctctttggaatactgtccaaacctgatgtcaagggcaaaaggacataagataaagtaaaagtaaattcttgagtaaataaacgaaaaacagtgaggcagaaaaaatagtgaaaactaacatatagctttgaatttaaattctagacccactaatgactagctgtgacttagggaaagtaactaactctctgaaactgcttccttctctgtaaaatggtgataatgacatttacgtgagtactgttggtattgttcagacattatttcacttatggaggtgaataataccaacagcactcacttctctttttggatacagactgaacatgtatggaaatattcccatccctacttcaaagacatgtacatgctggtgaaatattcctgctttcctcacttaaatttcctcagtaaatattcctctttacctatttcccatagaaaaaataggttctaaaagaagaaaaggaagtctgcaggtggtagaaataaagagggaacccacagaacttgaaaccacatggcccattgaggttcctagactggatacgttgtgccttaggaattagggggtttcaataatgctggggaagtctgggcacgatggctcacgcctgtaatcccagcactttgggaggatgaggcgggaggatcatgaggtcaggagttcgagaccagcttggccaacatggtgaaaccccatccctactaaaaatacaaaaattagccaggtgtggtggcacatgcctgtagtcccagctactcgggaggctgaggcagaagaattgcttgatgtgggagggagaggttgcagtgagccaagactgcatcactgaactccagcctgggcgacagaccgagactccatctcaaaacaaaacaaaacaaaaaagtgggaaatagatattaggaattgaggctgcagtcatattggatagtaaagagcagaaatgggcacatttagaattgggaaagccctgttccaatataaggactgaaaaatcagtatctactagtccagagtcattgcaagaaacaagttccccatctcaggtcatgggttgaaacaaagtcatccaacaagagtcttggctgcatgtgaatacagagccaattcatactatctgcatggtgaaggagtcccatttaacaaaacataatatttggttcagtttcagaaaaccatataaggccccagcagaaataatctaaaaatttctccaaaggaagcagttgcatccataacgaagccatgaacaaaaccctctcagaagaaaagtcctatagaagataagcttgcagatacaaattta

SEQ ID NO: 52972 - DNA, 1595 bp, Homo sapiens
taaataaataaataaataaataaaaagaaaaaagcccatggtaattatagtatgaaaataaggggagtctctaaaagaaatatgcatcacgcaacaatcattgtcaggtatttttagatgaaatttagtcaggttgcatattagttctttgtttcttttgtagcaaggaggtctccctatgttgcctaggctggtctcaactcctggcctcaagcaggtcttcccaccttggcctcccagagtgctgggattataggcgtgagccaccatgcctggccaggtctctttggaatactgtccaaacctgatgtcaagggcaaaaggacataagataaagtaaaagtaaattcttgagtaaataaacgaaaaacagtgaggcagaaaaaatagtgaaaactaacatatagctttgaatttaaattctagacccactaatgactagctgtgacttagggaaagtaactaactctctgaaactgcttccttctctgtaaaatggtgataatgacatttacgtgagtactgttggtattgttcagacattatttcacttatggaggtgaataataccaacagcactcacttctctttttggatacagactgaacatgtatggaaatattcccatccctacttcaaagacatgtacatgctggtgaaatattcctgctttcctcacttaaatttcctcagtaaatattcctctttacctatttcccatagaaaaaataggttctaaaagaagaaaaggaagtctgcaggtggtagaaataaagagggaacccacagaacttgaaaccacatggcccattgaggttcctagactggatacgttgtgccttaggaattagggggtttcaataatgctggggaagtctgggcacgatggctcacgcctgtaatcccagcactttgggaggatgaggcgggaggatcatgaggtcaggagttcgagaccagcttggccaacatggtgaaaccccatccctactaaaaatacaaaaattagccaggtgtggtggcacatgcctgtagtcccagctactcgggaggctgaggcagaagaattgcttgatgtgggagggagaggttgcagtgagccaagactgcatcactgaactccagcctgggcgacagaccgagactccatctcaaaacaaaacaaaacaaaaaagtgggaaatagatattaggaattgaggctgcagtcatattggatagtaargagcagaaatgggcacatttagaattgggaaagccctgttccaatataaggactgaaaaatcagtatctactagtccagagtcattgcaagaaacaagttccccatctcaggtcatgggttgaaacaaagtcatccaacaagagtcttggctgcatgtgaatacagagccaattcatactatctgcatggtgaaggagtcccatttaacaaaacataatatttggttcagtttcagaaaaccatataaggccccagcagaaataatctaaaaatttctccaaaggaagcagttgcatccataacgaagccatgaacaaaaccctctcagaagaaaagtcctatagaagataagcttgcagatacaaattta

SEQ ID NO: 52973 - DNA, 514 bp, Homo sapiens
ttttgcaagcgagaggagtaatggggtgtgtgctcatttggccatcctgaattggcagacaagacatatttctgaagtagtcaagaaggcccacctcgtcactatgcacatcytcaatgccctcatgccatcctcgatgccaatgactggcatgtacgtctccagagctccctcctgaatccagtcttctgtcactgactgtgtccttgacatctccacctgcatgtccattgctcaaaaccaaaattctgatcctctcccctaactttgttccacttacagtgttctccacctcaggatggagctgccatctttctagaatctcaggccaagtattttggaatcatgttgattcttttctttctcttgaatctccatttcatccatcagaaaattctggatactttagcttcaagatatgcccagtattccatcacttctgaccccaccaccatcaccccatctcaactgtcataatctctcacctggatggtgtagtggtctcctaactggc

SEQ ID NO: 52974 - DNA, 829 bp, Homo sapiens
ctccatgctggtctttccctgcctgttccatttccaccagacctctcgtcttttctcccctcccagctccccttgttgtaggacctgcctctcttgtgcagagatgttgctttcaaggaagaattcccttgtcttgccaccagcagaaccacacccttacctgcatcagctcctcactcagaactgtgccctgaggctatggaagagcctccctggcctgactggggggattttcttctgtcttttcatcctgtgctcacctgcctctgtcctagataaaaggttcttacctctactggcttcttgcaaacaccatttgcatgtgtttaaccctctccatgtttaaaaaaaaaaaaaaccatcagacaatagaaaaacaaccctatttgcatttgcagttcctcacagtcggtttctccrcctttctgtagtcagtcttctggaagaagtgacctacctttaacatctctacttctttatctcatatctcatatgcatgttttgtccattccaactctgttttaatccccaacaatctactaaagtggattttcatgtttctgaatataattatgatgataaagataaaaataataaaatagatgtttgttataatgacactatagtgtctttaagtaagttctggtgtttgtatatttgttggatgtaatttgtaaatatcgatatatagagagactctaatttaatcatctaagcaattcattgaggtgggtattattgttgcccctctttcacagatgaacatgctgaggccccgagtgggtgagtcacacagctagtaagtgaagaggcagcagtcaaacccagg

SEQ ID NO: 52975 - DNA, 608 bp, Homo sapiens
tggagcgtaggtcggccaactctgcaggaggagtggccatcagcttctctctgactgcagagcattcagggaactactactgcacagctgacaatggctttggcccccagcgcagtaaggcggtgagcctctccgtcactggtaagccctgggttcctgccaatcacccacccctggccaagagtcctctcttacccaacccttcagaagtcagcrtgtaccttctagtatcctctgtttctttcttgaaacaacctaatatcctcctccactctctagctcactgaaccagctgtctgccccttgagcctcatcccattgcagtctgggtgccttcccacccctgcctaatgatgtagcagctttcttttccctgctcctcaaattctgagcagccaattgcttttcttgtgctctccacttgtcctgtagatctgccagatgcctgattttggtttactaaattattcttagtagatatagactcagactcagttctcaggagcacagaaatgtcccctgtccagttaacatcagacatcaatgaataaccagatgcaaagtcatgtaagacacaaagacaagtcgctggatcacagttaacccaa

SEQ ID NO: 52976 - DNA, 608 bp, Homo sapiens
tggagcgtaggtcggccaactctgcaggaggagtggccatcagcttctctctgactgcagagcattcagggaactactactgcacagctgacaatggctttggcccccagcgcagtaaggcggtgagcctctccgtcactggtaagccctgggttcctgccaatcacccacccctggccaagagtcctctcttacccaacccttcagaagtcagcgtgtaccttctagtatcctctgtttctttcttgaaacaacctaatatcctcctccactctctagctcactgaaccagctgtctgccccttgagcctcatcccattgcagtctgggtgccttcccacccctgcctaatgatgyagcagctttcttttccctgctcctcaaattctgagcagccaattgcttttcttgtgctctccacttgtcctgtagatctgccagatgcctgattttggtttactaaattattcttagtagatatagactcagactcagttctcaggagcacagaaatgtcccctgtccagttaacatcagacatcaatgaataaccagatgcaaagtcatgtaagacacaaagacaagtcgctggatcacagttaacccaa

SEQ ID NO: 52977 - DNA, 608 bp, Homo sapiens
tggagcgtaggtcggccaactctgcaggaggagtggccatcagcttctctctgactgcagagcattcagggaactactactgcacagctgacaatggctttggcccccagcgcagtaaggcggtgagcctctccgtcactggtaagccctgggttcctgccaatcacccacccctggccaagagtcctctcttacccaacccttcagaagtcagcgtgtaccttctagtatcctctgtttctttcttgaaacaacctaatatcctcctccactctctagctcactgaaccagctgtctgccccttgagcctcatcccattgcagtctgggtgccttcccacccctgcctaatgatgtagcagctttcttttccctgctcctcaaattctgagcagccaattgcttttctygtgctctccacttgtcctgtagatctgccagatgcctgattttggtttactaaattattcttagtagatatagactcagactcagttctcaggagcacagaaatgtcccctgtccagttaacatcagacatcaatgaataaccagatgcaaagtcatgtaagacacaaagacaagtcgctggatcacagttaacccaa

SEQ ID NO: 52978 - DNA, 608 bp, Homo sapiens
tggagcgtaggtcggccaactctgcaggaggagtggccatcagcttctctctgactgcagagcattcagggaactactactgcacagctgacaatggctttggcccccagcgcagtaaggcggtgagcctctccgtcactggtaagccctgggttcctgccaatcacccacccctggccaagagtcctctcttacccaacccttcagaagtcagcgtgtaccttctagtatcctctgtttctttcttgaaacaacctaatatcctcctccactctctagctcactgaaccagctgtctgccccttgagcctcatcccattgcagtctgggtgccttcccacccctgcctaatgatgtagcagctttcttttccctgctcctcaaattctgagcagccaattgcttttcttgtgctctccacttgtcctgtagatctgccagatgcctgattttggtttactaaattattcttagtagatatagactcagactcagttctcaggagcacagaaatgtcccctgtccagttaacatcagacatcaatgaataaccagatgcaaagtcatgtaagacacaaagacaagtygctggatcacagttaacccaa

SEQ ID NO: 52979 - DNA, 612 bp, Homo sapiens
tggctgccactcaaagtatcttcacaggaaaacagggcttgaggcacacacacaacagacagacacacacggctcacccaaaaagtcactgtgtacggacttaactttgttcaacatggattttggttttgtggaatctaaatgcagacactcgtttacctcacacccttggatttgtctgtttttggacatatatatatattttttgtttgtttctttctttcttccataacatcaatgcttcgtctgaatatcatcatcgttcaagagttgggggaagaamgacttcatatgcacagggccgggtggggaatgtttgttttggctgtttgctgcctccattcagattttcctatcgcagctcagctggtgacctgaaggcgagcaacaggcacaagggtccccagggccttccggatggccgctttcacctcctgcctgggccaccgagtctctacacagaaaaatgagtcacccgactcaaaaggggtgggggtagaggcagggacaaggcaagaaaaccacagataaccaaggtgtttcttccaagtggtcagtttaaaacaaacaactgccaccaaaaaaaaaaaaaaaccccacaaaaaatattta

SEQ ID NO: 52980 - DNA, 612 bp, Homo sapiens
tggctgccactcaaagtatcttcacaggaaaacagggcttgaggcacacacacaacagacagacacacacggctcacccaaaaagtcactgtgtacggacttaactttgttcaacatggattttggttttgtggaatctaaatgcagacactcgtttacctcacacccttggatttgtctgtttttggacatatatatatattttttgtttgtttctttctttcttccataacatcaatgcttcgtctgaatatcatcatcgttcaagagttgggggaagaacgacttcatatgcacagggccgggtggggaatgtttgttttggctgtttgctgcctccattcagattttcctatcgcagctcagctggtgacctgaaggcgagcaacaggcacaagggtccccagggccttccggatggcygctttcacctcctgcctgggccaccgagtctctacacagaaaaatgagtcacccgactcaaaaggggtgggggtagaggcagggacaaggcaagaaaaccacagataaccaaggtgtttcttccaagtggtcagtttaaaacaaacaactgccaccaaaaaaaaaaaaaaaccccacaaaaaatattta

SEQ ID NO: 52981 - DNA, 612 bp, Homo sapiens
tggctgccactcaaagtatcttcacaggaaaacagggcttgaggcacacacacaacagacagacacacacggctcacccaaaaagtcactgtgtacggacttaactttgttcaacatggattttggttttgtggaatctaaatgcagacactcgtttacctcacacccttggatttgtctgtttttggacatatatatatattttttgtttgtttctttctttcttccataacatcaatgcttcgtctgaatatcatcatcgttcaagagttgggggaagaacgacttcatatgcacagggccgggtggggaatgtttgttttggctgtttgctgcctccattcagattttcctatcgcagctcagctggtgacctgaaggcgagcaacaggcacaagggtccccagggccttccggatggccgctttcacctcctgcctgggccaccgagtctctacacagaaaaatgagtcacccgactcaaaaggggtgggggtagaggcagggacaaggcawgaaaaccacagataaccaaggtgtttcttccaagtggtcagtttaaaacaaacaactgccaccaaaaaaaaaaaaaaaccccacaaaaaatattta

SEQ ID NO: 52982 - DNA, 1177 bp, Homo sapiens
ttaagtaaactgaataaaaaatagtccattctctcaaatttggattttctttctctagttaaaatggtagcattttcataacagtttagtagagaaaataatttcataaaaagggagttttttaaaaaatcacatctctttatgaatataatgccatgccaaaggcatgtaccttttctcctaaactagggctttttagggttatatagaaagaatcttcacagtctaaagcattttgagtatgttgtgggccagaatacattaactgataatttactatgcatgaatcaattgactaatgtgtcagtgaaggacagatagcaagcaaacacctgcctactataatttattactcaatataaatgaaacttatcacattctctttttctgattaccagaaaaaaaatccttttagttcattttggaagaaaattgaaacctacattaaaagcattacaatttttggtaaaatatacccttgagcaaatatatatgaaaaatgttaattgtaagttggctgtcattcctacctaacatgtagtttatctcaacacaaagctgagcagccaagcacaaagataatgctaatttttttatagccattaatagttaatgctagaaaagctgtcatattttgttttaaaatattccctagaatgtagtatttcatatctatgacatttcataggaatacaaaaatgcatacctctcaacatttataacaacaacaaaatccttcagtgtgatattttggcaaaaataagggagaaagttccaaattttgaataaattaatctttagtactttttcttatagttgaaaaatgagacagaaaaattcttgtgtaagactagacaaatattaaactgctttcacattttgtcttaattactcacttggttacattcctattgaagaaaaagtttatcagtgagtcagtraggcaccaagatgtcaaagcattaatactacagaataaaaaagcctaataaatacaaatgtccacagaactatttgtacacaaatgtttatggcagctttatttttaatagtaagaaatgagcctagatgttcatcaactgttgaatagataaatgcttgtagtataaccgtccaatggaatagtaatccaatatttaaaaggaatgaattattaatgcaaatgagttaatttcaa

SEQ ID NO: 52983 - DNA, 1177 bp, Homo sapiens
ttaagtaaactgaataaaaaatagtccattctctcaaatttggattttctttctctagttaaaatggtagcattttcataacagtttagtagagaaaataatttcataaaaagggagttttttaaaaaatcacatctctttatgaatataatgccatgccaaaggcatgtaccttttctcctaaactagggctttttagggttatatagaaagaatcttcacagtctaaagcattttgagtatgttgtgggccagaatacattaactgataatttactatgcatgaatcaattgactaatgtgtcagtgaaggacagatagcaagcaaacacctgcctactataatttattactcaatataaatgaaacttatcacattctctttttctgattaccagaaaaaaaatccttttagttcattttggaagaaaattgaaacctacattaaaagcattacaatttttggtaaaatatacccttgagcaaatatatatgaaaaatgttaattgtaagttggctgtcattcctacctaacatgtagtttatctcaacacaaagctgagcagccaagcacaaagataatgctaatttttttatagccattaatagttaatgctagaaaagctgtcatattttgttttaaaatattccctagaatgtagtatttcatatctatgacatttcataggaatacaaaaatgcatacctctcaacatttataacaacaacaaaatccttcagtgtgatattttggcaaaaataagggagaaagttccaaattttgaataaattaatctttagtactttttcttatagttgaaaaatgagacagaaaaattcttgtgtaagactagacaaatattaaactgctttcacattttgtcttaattactcacttggttacattcctattgaagaaaaagtttatcagtgagtcagtgaggcaccaagatgtcaaagcattaatactacagaataaaaaagcctaataaayacaaatgtccacagaactatttgtacacaaatgtttatggcagctttatttttaatagtaagaaatgagcctagatgttcatcaactgttgaatagataaatgcttgtagtataaccgtccaatggaatagtaatccaatatttaaaaggaatgaattattaatgcaaatgagttaatttcaa

SEQ ID NO: 52984 - DNA, 1177 bp, Homo sapiens
ttaagtaaactgaataaaaaatagtccattctctcaaatttggattttctttctctagttaaaatggtagcattttcataacagtttagtagagaaaataatttcataaaaagggagttttttaaaaaatcacatctctttatgaatataatgccatgccaaaggcatgtaccttttctcctaaactagggctttttagggttatatagaaagaatcttcacagtctaaagcattttgagtatgttgtgggccagaatacattaactgataatttactatgcatgaatcaattgactaatgtgtcagtgaaggacagatagcaagcaaacacctgcctactataatttattactcaatataaatgaaacttatcacattctctttttctgattaccagaaaaaaaatccttttagttcattttggaagaaaattgaaacctacattaaaagcattacaatttttggtaaaatatacccttgagcaaatatatatgaaaaatgttaattgtaagttggctgtcattcctacctaacatgtagtttatctcaacacaaagctgagcagccaagcacaaagataatgctaatttttttatagccattaatagttaatgctagaaaagctgtcatattttgttttaaaatattccctagaatgtagtatttcatatctatgacatttcataggaatacaaaaatgcatacctctcaacatttataacaacaacaaaatccttcagtgtgatattttggcaaaaataagggagaaagttccaaattttgaataaattaatctttagtactttttcttatagttgaaaaatgagacagaaaaattcttgtgtaagactagacaaatattaaactgctttcacattttgtcttaattactcacttggttacattcctattgaagaaaaagtttatcagtgagtcagtgaggcaccaagatgtcaaagcattaatactacagaataaaaaagcctaataaatacaaatgtccacagaactatttgtacacaaatgtttatggcagctttatttttaatagtaagaaatgagcctagatgttcatcaactgttgaatagataaatgcttgtagtataaccgtccaatggaatagtaatccaatatttaaaaggaatgaaytattaatgcaaatgagttaatttcaa

SEQ ID NO: 52985 - DNA, 628 bp, Homo sapiens
tctggaaatggagaacacagctgataacaaattactgacattgggaraagcttagaataatcatattgaatgcataggagaaggacaaagagattaaagccattggaagaaacagaaaaaatgtatggggggcaaaggaaacaagtcaacagtcccagatgcagagaatccaacaaatgaaacaaagtattcaaagcataataaaaaccattttttcttaaaagagaacagaatatttcggtcaaaataagcatatttcattttagaaaaaattaacagaataattaatgccaaggcatattctggataagtttttgaaattgaaggataacatatctgtcaagagctgtgaggagtctgagatttcaccctacttgcaagctaacaatttagcttgccacagattaatggatgctgatagaaaacacaaaatttccgggtcagagttaaagaactttactgctcacagcacagcatgcagcatgagtgtcagaatatttgcattggttccccctatctccaaatttcacagggcaacacaatccatcagcccaggtggatgctacacacacagtgggtaggtctgcatctcagatgaggagcccccagacaagggtccgggactcct

SEQ ID NO: 52986 - DNA, 628 bp, Homo sapiens
tctggaaatggagaacacagctgataacaaattactgacattgggagaagcttagaataatcatattgaatgcataggagaaggacaaagagattaaagccattggaagaaacagaaaaaatgtatggggggcaaaggaaacaagtcaacagtcccagatgcagagaatccaacaaatgaaacaaagtattcaaagcataataaaaaccattttttcttaaaagagaacagaatatttcggtcaaaataagcatatttcattttagaaaaaattaacagaataattaatgccaaggcatattctggataagtttttgaaattgaaggataacatatctgtcaagagctgtgargagtctgagatttcaccctacttgcaagctaacaatttagcttgccacagattaatggatgctgatagaaaacacaaaatttccgggtcagagttaaagaactttactgctcacagcacagcatgcagcatgagtgtcagaatatttgcattggttccccctatctccaaatttcacagggcaacacaatccatcagcccaggtggatgctacacacacagtgggtaggtctgcatctcagatgaggagcccccagacaagggtccgggactcct

SEQ ID NO: 52987 - DNA, 2023 bp, Homo sapiens
ataatgtcacccagggaatacattaatgccaaccactatttctcagcagagaaagcttctcattctgaattcctgtgaagcactttccttcttcgttggccacacagtctgaaatatttagttcacaatggaaaaagataaaaacttcaactctatccgttttttttcaggctaaagagaaataaaccttaatgcctctcaagcttgtgataggtgacctttgttgtctgacaggaaaatgaaaagccccctattgttatatttggcttaataaggtgcttgaggtagtatgctcagtagccaaaactgactggtgatttcctttctagatgacccattaaaattggctgaagataatgaattcatccatcacttatgactaagtgtactgtcccctgcatgcactcaggataatagcatttcaaaatgaagggtattaaaatcatcagataaatctaacatcactgaggaaagtcatttcaaaatgatcacccggaggtcatcattatgcacactgatgccagtttccaactggttgaggcccaaaattggagaagggaacagggcaaggagcagtttcttgtgagtgacatcactattttttagctactaggtttctcagcctttttcaggaagaaagagactgagacatagagagataagaatgttttgcagttccaggtttgtaggaaatttttctgcattttacaaaactgaacctttatttattttattaatatgaagccatatgaagtcataatatttccagagaataggatgaaaatgtgatgaaagacacgcagctttgacacagctccaggagaagctgtctctagcataagagtgagggctaactcagcttcattctggactctaccacttgctgcctggataaactttgaacaaggcatttaattactttctgcctcagtttcctcaaacataaatggggataataataatattagccacctaatgaggatgaggtgaaaatcacatgtattaatatatgtaagatatttatcatagtaactgggacctagtaagccctccacaaaggttattcatgatatttttcttatcattgttttatttctttctgttctgactaggtatctgaaaaaaaaagtactgagtaaatgtggtttttgtggttactttcttggatttgtgtttcaactaaattccttaggatatcttccaagccatcttgcattttcttttattaactggatttcataacactcatgatcagaaactaatcttgtttaatccaacttacctattactttgggaaacgtgggatactgaaagcataatattggacttagtttgttggtggggggtggtagagcaaggagtctggaatgataagaaccctctggaacatgaatggtctgatgttctttcattgtggaaggtgataaaaagacaggataggagtgtcaatctatctcaaccaaaaccttctatcattcattatgggtgactgttgttatggtaaaggaacatagtggagcagaatggatgttggagaagatattacaaccagtttacctataaagcaaaatatgccaaattcccctaatctactttctccctattaccctgggaccctataggagctaaagtaggatcctccttcccactaaacctgtagggaacattctcatttgttttctttttatcagattaagagactataaccaactactgtgtacagggcaaacttgctgatgaaamgtttcacttatttgtggcccatctttattaagaaatatctacttagctaattaactctttgtttagatcctaggactacaaatataagtaagatataatcctcgccttcagggatctcatagtccaacagaggaaaaccctatgatagagtggctctaacaagtaacaaatcatttaagcataaaaattgttctagaaactgagaggaggaagaagctggttgaccaagtaatcagttgctgctgaccaatttttatagcatcagtgaaaattcattcat

SEQ ID NO: 52988 - DNA, 1139 bp, Homo sapiens
ccgaccacaagccatgtggaagtggtcactgggaggaagcagcagccagtgtggttctgctgtcacctcatcaaggcagaggggtgaaagataactaaggccaaggagttagctcctcctgtgcccctccaagaagtcctgggtcaattactgatgtcttaagactcgcgtacctcaccctacctaccgttgagaaatagcttttccaatttctccagcagctcagcacattgattcagctgttcctggaaaccctcggccacacagtaatccacatcactggcctgcagcaactcctcaaatgccttaatcatggtgttcatgtgttgacgggagatgacacagatgccatggccatccttaatctgctgccgttgaagggagagctccctggcttgggactgaactaatgaatcgtatctgataaaagaggggaaagaaaatacttggaccattttagaattgaatttttgtgaccttaacactaattggaaaaatgacagagtacaatttttaaaagcctgcagctgtacaagtatatatacttttagaaaaattgaaactgtacaaggtcagctcttctttgatttcacacagccaacaaaggctggaacaaagattcttctgcaacatttttaaccttataaagcccccaattaaagtacagattggcaagaactcaggcaaacaataagtttccatacactcttcaaaaatactattctgaattgtagaaacaagtgccccaagggtcagaggatctaccaaaaattctcatgaagtgtgataaagaaagtgtaccacaaagaaaaaaagacaggactctctcctcccgaacaaaacgtcactgaataatcatgmtgctaactaccatttactgagggtctaggacctgtcagtaactgaattcagtgctttatatgttatctgatcctctcagtcttccaacaaatgtataaatgtccccttttacagaagaataaactgactgcaaagctaattaagtggtaaagattttggattcaaacacaattctcactttgaagatcattatgcaatattacctttttaccgtcatgtgccaccttttcctacgtgagcccataagagaaagacactgagaagtaaacaggttaagg

SEQ ID NO: 52989 - DNA, 345 bp, Homo sapiens
tggttaataaccaccagcattaactacagttactactccaagtaaagggtctgtgggagggccattcttactgtttggygacccacagagactcgcccagagaaaatgacaccaacagcaagcaataaatggtttgcctttactggtccctgttaaatggccctgctgtagtgaatatgatatcagggtcttgtactgctggcagagcaaactcaaattgggcggtatcaagggcacaagaaaattatgtatgtgactcagaaaaggggaaatacaagcccagaaattcgagaccaccctaggcaacatagtgagaccccctctctacaaaaaaataaaaaatta

SEQ ID NO: 52990 - DNA, 583 bp, Homo sapiens
tttttaaaaaaaaattcaattgaaaactaatttttgcacttctttaatcaataaaaatgttctaagggtcttacaagtgccttctaataaattccaaattttggtggktctaagatggctgaataggaacagctccagtctatagctcccagcatgagcgacgcagaagaccggtgatttctgcatttccagctcaggtactgggttcatctcactggtgcttgttggagagtgggtgcaggacagtgggtgcagcccactgagcatgagccgaagcagggcaaggcatcgccagacccaggaagtgcaaggggttaggaaattccctttcctagccaagggaagttgtgacagatggcactgggaaaattgggtcactcccaccctaatattgcacttttccaatggtcttagcaaatggcacaccaggagattatatcccgcacctggcttagagggtcctacgcccatggagcctcgctcattgctagcacagcagtctgagattgaactgcaaggcagcagtgaggctgggggaggggagcccaccattgctgaggcttgagtaggtaaacaaagcggt

SEQ ID NO: 52991 - DNA, 583 bp, Homo sapiens
tttttaaaaaaaaattcaattgaaaactaatttttgcacttctttaatcaataaaaatgttctaagggtcttacaagtgccttctaataaattccaaattttggtggttctaagatggctgaataggaacagctccagtctatagctcccagcatgagcgacgcagaagaccggtgatttctgcatttccagctcaggtactgggttcatctcactggtgcttgttggagagtgggtgcaggacagtgggtgcagcccactgagcatgagccgaagcagggcaaggcatcgccagacccrggaagtgcaaggggttaggaaattccctttcctagccaagggaagttgtgacagatggcactgggaaaattgggtcactcccaccctaatattgcacttttccaatggtcttagcaaatggcacaccaggagattatatcccgcacctggcttagagggtcctacgcccatggagcctcgctcattgctagcacagcagtctgagattgaactgcaaggcagcagtgaggctgggggaggggagcccaccattgctgaggcttgagtaggtaaacaaagcggt

SEQ ID NO: 52992 - DNA, 363 bp, Homo sapiens
attgaggaggtagcttttgatcccagctttgaaggaaggaaaggatttagacatacagaagtgaaaaaagatgagaaaggactttacagacagcaaacagcaagattaacrtctcagagatgggcttactgaagatgtcaagtggaagaggagtggggacaggagatgagtctggtaagtcctgttggggtcaggtcacagggagcctttagggccagacggatgatttgggttttattcacaaagcaatttttaagcaggagaaagatcaacactggattgtagcagtaggagaatgagtagatgtaagtagggagagattggaggcagagtaaaaactaacaagggccaaaattagggtaa

SEQ ID NO: 52993 - DNA, 363 bp, Homo sapiens
attgaggaggtagcttttgatcccagctttgaaggaaggaaaggatttagacatacagaagtgaaaaaagatgagaaaggactttacagacagcaaacagcaagattaacatctcagagatgggcttactgaagatgtcaagtggaagaggagtggggrcaggagatgagtctggtaagtcctgttggggtcaggtcacagggagcctttagggccagacggatgatttgggttttattcacaaagcaatttttaagcaggagaaagatcaacactggattgtagcagtaggagaatgagtagatgtaagtagggagagattggaggcagagtaaaaactaacaagggccaaaattagggtaa

SEQ ID NO: 52994 - DNA, 640 bp, Homo sapiens
ctaggattacaggtgtgagccaccgcgcccggcctgttattatagtctttaaaaaattgtcctttaactgccatcgattatttttacaaatttgaattatgtaaaatttttatatagaaaaaatatatgagacatttaacagatgctaatatcttgtcacagcggcttaagactttttttttttaaagagagaacactggagaattggcaagttcctaaacatccatatccctttcttccccattgatattgtttggctctgtatctccacccaaatctcatctggaatataattcccatgtgtcgaaggagggacctggtgggaggtgattggatcacgggggaggtttccctcatgctgttctcgtgatagtgagggagttctcatgagatctgatggtttaacagtggcagcttcccctgtgctctctcttctcctgctgccttgtgaagaaaatgcctgcttccccttcmccttccaccatgattgtaagtttcctgaggcctccccagccgtgcggtactgagtcaattaaacctcctctctttataaattacccagtctcaggtgatatctttatagcacggtgagaatggactaatacatctatctcaaaggaaatcttattttgcttatgca

SEQ ID NO: 52995 - DNA, 560 bp, Homo sapiens
tctgtgtgaattctctgatgtgctgtaaagtctaatttctggtagagggcatctgtacattcattatgttcaccaaatttatctccagcttgtgttttctgatgtactatatgggctgagctctggctaaaattttcttcacatttattgctttcaaaagcactccatcctgtaatagttctctgagattgagtgaggggtgacttcctactgaaattaatccccctttcattacactcatagtgtgtcatagccatgtgaactttattgtattcaacagcggtggttttgtcacaggatgtcccatattcattaagatcagagcatttcccccttktgtcagttctcatgtggttaaataaagtgattttatcaaagttttttctaaattcatcatccttacaggacttttctcctgttagaaaactctgaggtgtaatacagattgtcttatcatataaaccttgtccagatccatcacattcaaaagattcctccaaagtttgaaatttccaatgctgatctttcttataactgaaagctttagcattttcaccatg

SEQ ID NO: 52996 - DNA, 560 bp, Homo sapiens
tctgtgtgaattctctgatgtgctgtaaagtctaatttctggtagagggcatctgtacattcattatgttcaccaaatttatctccagcttgtgttttctgatgtactatatgggctgagctctggctaaaattttcttcacatttattgctttcaaaagcactccatcctgtaatagttctctgagattgagtgaggggtgacttcctactgaaattaatccccctttcattacactcatagtgtgtcatagccatgtgaactttattgtattcaacagcggtggttttgtcacaggatgtcccatattcattaagatcagagcatttcccccttgtgtcagttctcatgtggttaaataaagtgrttttatcaaagttttttctaaattcatcatccttacaggacttttctcctgttagaaaactctgaggtgtaatacagattgtcttatcatataaaccttgtccagatccatcacattcaaaagattcctccaaagtttgaaatttccaatgctgatctttcttataactgaaagctttagcattttcaccatg

SEQ ID NO: 52997 - DNA, 2032 bp, Homo sapiens
tcttccctccaaaattaattccatctactatttagtaagccaaagatttcagtagataaaaatataggctgggcacggtggctcacgcctgtaatcccagcactttgggaggccgaggcgggtggatcacaaggtcagaagttcgagaccagcctgaccaacatggggaaaccctgtctctactaaaaatamaaaaattagccgggcatggtggtgcacacacctgtaatcccagctattcaggaggctgaggcaggagaatcgcttgaactcaggaggcagaggttgcagtgagccaagatcgtgccactgcactccagcctgggcaacagagtgagacttcgtctcaaaaacagaagaagaaaaaaaaatgtgtgcgtgtgtgtgtgtgtgtatatatatctatatatctatatatagatatatagatatatagatatatagatatatagatatatccctttcctgaaaagaactctatgtctataggagtatttaactcttttttcccatatcaaataaataaaccttttttaaaacaaatattggagaaaactgtcattttctgagagacagtcagccattattatttcactcattcaggatctgtgtattggatactccccctatgactcaggcattaggctgaacactggaaaaaaaaggaggaaagtggacaaagccctgcagtcactgtgaaagatggacatggaaacacataattttacagagctctaggtctacaacagaggcagaatcacaaaggaaggagaagccaaatgctgtaagggtgagggcaggccaaaaactcagcagaatgaacacttttttttttaactaaactctgaagatcagcagaaggttgacaggtgaggagaagagaaagcaggcagagggaggaacaaatatacaaaagcccatgtgtgatgaaacaatatggcatgctgaagaagtaaatgagtcatttgatatcactcgtgtgttgggtttatggttaagagtgtggcagagctgccaggaaagaggtgtgttcagtataaggggtcttgtatccaggccaaggaagaggtgtggcacggctaagccttccagctgcaagaggttcccaaaactaagcatctctgtcgtagaatggcatgtcataagccattctatgacagaaatgaggagcacaagccaaagcaccatatcaaccacaagagctattcaccagcacacagtaatttatttatgctttaacaatcaaattccctgactgcaccaagagctctttgagcgcaaggaccgaccgtgtcttactcaagttatctcccagatgtctactaacataattcccttacttaacaaatgccaagcacatacgacgcactaggtgttatactaaacactgggtagtcacagatcgtagactaccctgtcccaactaaccttagagccttctctgaggaactgatacctgagaataaaaaaaggttagcttctagaatttttggttcctaccctctccttatatcctcagctgatgtttaacattaaatcttctctttaatacacttttatttggattcaaagccattcttcccttaattccctttattctcctaagaacagtcttcttcctctctattcttcattctatgggtatcattccaaaactcagttcagcccaccatcttctcattggaggcctcactctactctgcttatttcagggttttttttttaagcctatgctttttagattgcttttatataaattatctgaggggaaatgcagtgtagtagttaagaatagcagccagatacccacaagttccaagaccactcttggtaatggtgactgtaggtgcctttctaaggcctgtttcccccccggtatgactgggacaaatgaatccaattcctaacttgttttgaaggctaaatgagatactacatccaaaagtgcttagcataataccacaatagtgctagctattttattattaatcatgaaaccaacatcctaaggaacttacggcatgaattgttg

SEQ ID NO: 52998 - DNA, 569 bp, Homo sapiens
ccctccagtctcagggtctccttatcctccttgagccctgttcatagcacgagtactgacatctcttcagctctgagacccagctargggctggcagtttggccccaccatgctgggccgccaccttgtagcctctcttcttgtctcatctgtcatggactctcctgtgtgggcatctcacctctttcatccatcacacccgagtcctgtactgtaggtgtgtgagatccaggtgccgccctgccctctgctacactggactcctgcagtgcctggaacacaaaaggtcctgcggtggggatttttttcttacctatttctgcctcttccaccactctcaaccctcactgcccaccaggcacccagcactcagggcccctagaccaggagccagcactttgaagtgaaaatggacaaggtgaaggatcctatggcacccccagatgttcacgtggcattcctggctttcgtgattgggtgggatctgtttgttcagagtaatgttgatgacaccactgcgattcctgggctgtgtggatggatttagtgaagtcacttgtaagaacaag

SEQ ID NO: 52999 - DNA, 634 bp, Homo sapiens
tgaattaatttaagtttaaataatagtgacctgtggctagtggctgccaatgttggacggtgcagctctatagtttaaaagtattggtaggttggtgtcctcttaaaagccatcctattcaactctcctttttcatttttttaacagagacttgaggcctctcacactgactcctttcctttattgggtggtctttgctggcttgaaaatttagtttctcaattcctagtggtctcccaattttctaaacaaattctctttgcttctcttttctcttttggctatctgtgttttgatcatttctctaccctcttgctgctgagctaaggaaaagcacatgaaaggaggtgaaaattaagtctgtcctgcctcagtaggtctttgggccactgctcaagctcctgtagtcctcacaatrcctgtgtcagtcacctgatgccaggtatccacagccacttctcagtcataatgatgaaagcaagatcatgacattaagtaccatcatgtagtgaataacaccacctccctgccaacctcatctctcattgagtgatcttgcctattaggtggtgttatctccactttacagatgtgaaaattaaggcccagaaagactagtgccagggggatttaa

SEQ ID NO: 53000 - DNA, 650 bp, Homo sapiens
tgactttagagcataataccctgttgttctcaacaatgagcaatatggacattgtcataatgaagtgatgactgcttagcctctaaatctggtaactactttgggacaatatgggaggaaaagtgaagacagtgatggtgtaagagctaaatcctcatctgtcatatcaagaaatcactatataatgtataaaacaatcaagaaatgcctaagtagttatgtgagaaaaaaatagaggacattgctaaaagagttaaaagtcattgctctggagaattaggagggatagggyaggggactggtaggatgcattataaactgaagaggcttttaaaaatttcatgtattaatatatgcattcacttgaaaaactaaaaaaataataattggaaaaacccatgaaggtaactaccagaaggaaaaactgagagaatgagaagtgcttgcctctggaaagaacaactggcaggactgttgctttcattgtaaggcttttggagccatttgattgtacttaatcatttttatctatttctttaataaaaacaattttatcttaataaagagttacacttgttcgaaaaaaaaatcttcatgattttgcaggttggaaaagatattttagacaagatacaggaaagagaagcaac

SEQ ID NO: 53001 - DNA, 543 bp, Homo sapiens
ttgcctattgcatcttcaagcacgaaggggaaaatatatattttttatggagatactttgatctttcaaattctggacctgggatgtgaaatggccatggccttagttattttaactggctaactcatagaatcccttttctgtgttccacaaatgtgccacattttgtgctattcatattcctgtatctagtatatcctctttcattaatctattttagtgcagtaatagttatattttcagatctaagaactaattgcttgactttgttaatggataaaacaaactgtaatatattttaaagaggtttattctgaaccaatatgagtgactgaggcctggagaaaacacgcaaccaagaaggcttgagtaagtggttccgaggtggcckggttggtttggttttatacatttcagggaggcaggagttacgggcaaagacatcaacacatggaaggtatacactggttcggttcagaaagggggattatcttcaggagaggtcttataggttgtaggtggacttggggattctctggtttg

SEQ ID NO: 53002 - DNA, 359 bp, Homo sapiens
cttgggcgacagggagagactccatctcaaaacaaacaaacaaagaaacaaaattctgtgaggtgtcttttgtagcaactggaatgaaactagagttcattatcttaagtgaaacaagccaggggaagaaagtcaaatatcacatgttctcacccataaatgggagctaaataacctgtatagatggatgtagagagtgggatgacagacaatggaggcttggaatgctgagggtggaatgagaggrgtggatgatgagaaattagttgatgggtacaatgtacgttattttggttgatggataccctaaaagccctgacttgaccactacacaatctatgcaggtaacaaaattgcag

SEQ ID NO: 53003 - DNA, 303 bp, Homo sapiens
tcgggaggctgaggcaagagaatctcttgaacctcggaggcagaggttgcagtgagctgagatcgcaccgctacactccagcctaggcaacagagtgagactctgtctcmaaaaaaaaaaaaacaaaacccacaatctgctgtccccccactatgagtttctgatccagtaggtctagggtggagcgatagcatttgcatttctagcaagttcccaggtaaggctgaggctgctggtttaataaacacactgtgagaactgtcaatccagaatactctattggtaaatgcagtgtgtgaggta

SEQ ID NO: 53004 - DNA, 303 bp, Homo sapiens
tcgggaggctgaggcaagagaatctcttgaacctcggaggcagaggttgcagtgagctgagatcgcaccgctacactccagcctaggcaacagagtgagactctgtctcaaaaaaaaaaaaaacaaaacccacaatctgctgtccccccactatgagtttctgatccagtaggtctagggtggagcgatagcatttgcatttctagcaagttcccaggtaaggctgaggctgctggtttaataaacacactktgagaactgtcaatccagaatactctattggtaaatgcagtgtgtgaggta

SEQ ID NO: 53005 - DNA, 2553 bp, Homo sapiens
  misc_feature (1)...(2553): n = A,T,C or G
tgggacagagggaggagaggaaataaaaagggtggcaggaattagtgtaaactcaaaacagaatgggtttggttttacggatatattgtactgttgaagtgcctttagaaacttgggaaaggggctgggcatggtgattcacacctgtaatcccagtactttgggaagccaaggcgggcagatcacaaggtcaggaggtcgagaccatcctggccaacatggtgaaaccccatctccactaaaaagacaaaacaaattagctgggcatggtggcgtgcctgcagtcccagctactcaggaggctgaggcaggagaactgcttgaacccgggaggcagatgctgcagtgagccaagatggcgccactgcattccagcctgggcgacagagtgaaactctgtctcaaaaaaaagaaagaaagttgggaaaggaagcatatatgagaaaaaagggaaggagaaaaagccaggtttttttgtttgtttgttttgttttgtttttaaagtttgctggctaatgggaagccagcatttcaagcttctatagaaaaactataaagtagagcttttaagaggtaattagtaagtcaatgaaaaaaaaaggggggaaagtaattttgggggatttgagcaaccaaagatggcagtttatgtgacatataggtcatatttatgaagttttgctcagcgccatatgttagggcctggaagatacagagtggcaggaaaaacaccacctgcagaaatgcgtattattcctttctcactcctatagttttcatgaacccacacctttcaatgtctggaaacctaggaatgccactggggccagggaatggagaaagatgctccatgcctcttgggaccacacttaggctcagcctgtatgcttcacctctgctttcaaggagctctcaactggagaagtctcctatacacacaagagacgtgggtgacaagacctgaagcagagaatgactctayctgccatgaaggtcaggtggttattgggcacatttagataatatgagagcttaaaatcatggatgaagaagtgaaaaaagtgccaatgaaaactggaacaatcttaacaactgcctagtgactaagcttcagacagaccaaagaaaagatctaaatgcaggtgaggtgggagagcgggagctggactgagggctgcgctatgctgctgagtggtgaatggcaaaaacctgagtaacacagtcccttggcagggcaccagggcagggctcccaagtgtgaatgaccctaacccagggtaacaaagggctgatcttggagagtagtagaaaagaatatctcaaaatctctatgnaaaaaaagttataggaagaacaatcaccactggaacgtctctgtctggcatgcaaatcaattcagaaaactggtcaggaaagctcttcctcatttataaatttatttcatataagactaactctttgaacgggtttttttttttgctttatcttagtctgttggtaataactgatgtttataaaaacatacaacatttacgaggcccttttaattaactatgagagaaagtgtgttacccagaacttttgggtctatgttccattttatttccactgagccttaatgtcacaatctcttttgtggcatttctgaacttccaaagcacattgttaagaagattgatggtctttcttcatacctgtggtgatggcaactctttattacaagctccaaagatgtgcaggtgggagtttggtgggggagagagatgggaccagtgagtgggtgcccactgggcgggctggggacctctaaatccgtccctgctgtgccagcccctcttgaggttttatatgaatactctagccctagacctatcaaacgttcagccttaaacttagtggcagaaaagactgcaggcattattcagtaaggctgaagattgacacaaaacattacgagccaaacgattttttaaagtggactacttcttgacttttgtgtatctctgctgagttccaaacctcactcccaagccatgagacttgggtcaacacttctgctttgctttcacacaacccaatgcactcagtaggttttcatgaccactgaaaccatgcatgcaatcatcatctgtgggttactatctaccatacttcatgcctcaatcccgtttctagttttcccctctccagtctatccacctcacttctggaattcatacttcccaaagagaggttcagcctgttttaactcctcttttaaaaggacagtttcctactgttcacagggggaaaaaaattccaaatttctgagtatggctgttttccaaagtcctcactccacaccccaatccagagtcctggccttgtatcctacatcagcactataagccagtgttcccctgggctctgtgtattttcgttgcacctgtagccttttttcctggcttatggcaatgactattttctcaagatctatcttttgaaatcccccactatccttaagaatcagctctaatgtcacctttcaaagcttcctcagatgctgtcaggcag

SEQ ID NO: 53006 - DNA, 2553 bp, Homo sapiens
  misc_feature (1)...(2553): n = A,T,C or G
tgggacagagggaggagaggaaataaaaagggtggcaggaattagtgtaaactcaaaacagaatgggtttggttttacggatatattgtactgttgaagtgcctttagaaacttgggaaaggggctgggcatggtgattcacacctgtaatcccagtactttgggaagccaaggcgggcagatcacaaggtcaggaggtcgagaccatcctggccaacatggtgaaaccccatctccactaaaaagacaaaacaaattagctgggcatggtggcgtgcctgcagtcccagctactcaggaggctgaggcaggagaactgcttgaacccgggaggcagatgctgcagtgagccaagatggcgccactgcattccagcctgggcgacagagtgaaactctgtctcaaaaaaaagaaagaaagttgggaaaggaagcatatatgagaaaaaagggaaggagaaaaagccaggtttttttgtttgtttgttttgttttgtttttaaagtttgctggctaatgggaagccagcatttcaagcttctatagaaaaactataaagtagagcttttaagaggtaattagtaagtcaatgaaaaaaaaaggggggaaagtaattttgggggatttgagcaaccaaagatggcagtttatgtgacatataggtcatatttatgaagttttgctcagcgccatatgttagggcctggaagatacagagtggcaggaaaaacaccacctgcagaaatgcgtattattcctttctcactcctatagttttcatgaacccacacctttcaatgtctggaaacctaggaatgccactggggccagggaatggagaaagatgctccatgcctcttgggaccacacttaggctcagcctgtatgcttcacctctgctttcaaggagctctcaactggagaagtctcctatacacacaagagacgtgggtgacaagacctgaagcagagaatgactctatctgccatgaaggtcaggtggttattgggcacatttagataatatgagagcttaaaatcatggatgaagaagtgaaaaaagtgccaatgaaaactggaacaatcttaacaactgcctagtgactaagcttcagacagaccaaagaaaagatctaaatgcaggtgaggtgggagagcgggagctggactgagggctgcgctatgctgctgagtggtgaatggcaaaaacctgagtaacacagtcccttggcagggcaccagggcagggctcccaagtgtgaatgaccctaacccagggtaacaaagggctgatcttggagagtagtagaaaagaatatctcaaaatctctatgnaaaaaaagttataggaagaacaatcaccactggaacgtctctgtctggcatgcaaatcaattcagaaaactggtcaggaaagctcttcctcatttataaatttatttcatataagactaactctttgaacgggtttttttttttgctttatcttagtctgttggtaataactgatgtttataaaaacatacaacatttacgaggcccttttaattaactatgagagaaagtgtgttacccagaacttttgggtctatgttccattttatttccactgagccttaatgtcacaatctcttttgtggcatttctgaacttccaaagcacattgttaagaagattgatggtctttcttcatacctgtggtgatggcaactctttattacaagctccaaagatgtgcaggtgggagtttggtgggggagagagatgggaccagtgagtgggtgcccactgggcgggctggggacctctaaatccgtccctgctgtgccagcccctcttgaggttttatatgaatactctagccctagmcctatcaaacgttcagccttaaacttagtggcagaaaagactgcaggcattattcagtaaggctgaagattgacacaaaacattacgagccaaacgattttttaaagtggactacttcttgacttttgtgtatctctgctgagttccaaacctcactcccaagccatgagacttgggtcaacacttctgctttgctttcacacaacccaatgcactcagtaggttttcatgaccactgaaaccatgcatgcaatcatcatctgtgggttactatctaccatacttcatgcctcaatcccgtttctagttttcccctctccagtctatccacctcacttctggaattcatacttcccaaagagaggttcagcctgttttaactcctcttttaaaaggacagtttcctactgttcacagggggaaaaaaattccaaatttctgagtatggctgttttccaaagtcctcactccacaccccaatccagagtcctggccttgtatcctacatcagcactataagccagtgttcccctgggctctgtgtattttcgttgcacctgtagccttttttcctggcttatggcaatgactattttctcaagatctatcttttgaaatcccccactatccttaagaatcagctctaatgtcacctttcaaagcttcctcagatgctgtcaggcag

SEQ ID NO: 53007 - DNA, 614 bp, Homo sapiens
tgtattattattttactaatatctgtagctattttgttttttgctttggttattgtttttttcccttttcttagctatgagctgatcattgctccttctcacctcctgccatgatactgtcagttaccttagttaacaagctgaatatttagtagaaatgatgcttctgctcaggaatggcccacaaatctgtaatttgaaatttagcaggaaatgacctttaatgacactacattttcaggaactgaaatcattaaaattttatttgaataattatgtgctgaaatttgagtatctgatttttctagaccttccctcctattcctgcccaacctagataagaattatgaaatgttctgtgtttattgctattgctttataatgtgatggtcagggaccattttgatgcaaaactgatctctcagcagtacatttgatgttattttgcacaggctataggtttttgtttgatgagtgtttccaaaraactatttttctctgttagatagcatatcaagtataaggtaaacatattttcagagaaaacttcattttaacactaaaaattagactcttgtgatacagaattaagtataaattttacttggcaaaaa

SEQ ID NO: 53008 - DNA, 1571 bp, Homo sapiens
tgaccagaaattttccaccaattggcttgtagtagcctgtcacaacaaccaccggctgctggaagcaaaatcggggtttaagctaatgcaagcttcaagatttcagaagctgatgagctgagtgggtgttttccatgactcaccttcctcccatttgcccctgaagcatgcagattttctcagtcctgtttcctttcttttagcttagtctacaatgtttctacctgtttttcagtagtagttaactgtgattttgcttacctttaatatatgctcctttcttcggataatggaagcccagtcttccttttgggttagataaggctggctcaaggctagtccattggcattgatcccctggccacagaaatggattcagagatgggtctttaattgaacgtggttcaacaagactcaatatggggcttttgttggaacactttggagggactgaggttgctgagcttgtagcagtgttgttttagagttgctggtaatcatcttgttctatgagggggaagcctgcctaacggggaggcaaaaacagagaaatgcagagcaagaaaacaagaaaaaacgaaaaagagcaagagagtgacagcacacacaagtgagagaacaagtcctaacaacagcacaggagagcttgaaaataactattcttgaaaatggaactttaatcctgtatttttcggttttttgagccataaagctcctattcaagttatacgtagttgagttttccaccacttgttaataaaagagttttcacagatataccttagaatcttggttctgttctggttcagtcaattattcctctatttaaggttgacctcctgttccatctgtttattggagaccatgaagttcttacatcttgagccttctttgttgatgggtagagcatcagggcaagtctaccaggattctacagggattagggatctcactcaatgttcaaacaaatgaacaaactgcccttgcctttataaatgtttaacattactattttactaatgtttaggtcactacttgtcatctcaataagtgttctttggttttgaagatatgcatgaagatcatctctgatttgaaaaaacatgatctcaattgttttgccataagattcttgacagttaaagacttgactaatacacaaaatactcccaacaatagtcctacccagtgctttgcaccaatcttttggttggacaaaaatagtgttaggttagtgttacacaacttatgaactgtaggcttggttgttaattgtaaggctttgrgtgaagaggaaacccaaataatatattcagtttcttagaacttataagtaactttgttttaagagagtttgattcgatggctgcttttgctgacaaattctttttaaagaggagaaaaaagcactaaaagggggaaattagcttgaagtttgatgaagctgtgcatttttctagtttttcatgtatcagtaggaaaatacagtgtcttataataatgctatttatgttgggcactcagagaatctgctttatatctaaacgctttttgctactttactaagtaaa

SEQ ID NO: 53009 - DNA, 604 bp, Homo sapiens
ctttttacttgaagggcttcctacacccctcagcccctttgaaacaagaccatgaagtatccactgctctcaagaaggaggcatttcaagagagagagagggraaaaaaagctatacttggcttttggattttaaaatgtctttgaatattcaatgcagagacaaagatctttatagcagggccttgtgatattaaaatctctgcttttgaataccaaaggaacaaagcccttatgccttaggacagaaaagaacagataaagaacccagggcctccagtctaagataggctgaaaattccagagcctacaggaggggagagtcagaggaggcaagttctccccagccttctgcccaagtgaggaccagatagatcgcagagccaaagtgagcttctatcttgcttcctatattgtactcagccaaatggcagggtctcataatttcacagatccaaacccatgaacagtacagatatggtgacaaactaattccaggctgatggggctgtggcaacccttccttctccctccaccaataggctgcaatctccaagcggccagagagagcattcttagctttccagcactcctaaagaggcccg

SEQ ID NO: 53010 - DNA, 433 bp, Homo sapiens
aggtatccatgcttacccccgactgcccatggtgcctacgcgggcaacctcacaaccggtctgctgagctgggtggaggagaggttccacccaccccagaaggartccactcccatcccctaaacttcaggagctgcccttggctgaggaaggactgcagagggcacggtgcaagctgagcccagggtggcaggggctgcatggtgcccgggatgcctggcaggagagagacccgcagcccagaaggcttcctctccaggactgggggcccctcagtgctcacacttcccactaactgccagcatcccctacaacatggcccacgtctcaagggattggaaggagcccccgcagaggccatcggcacggactagaatgcaacccagtggggcatccaccgatgtggtcaaacgctcagccaagatggtgggaa

SEQ ID NO: 53011 - DNA, 539 bp, Homo sapiens
acgcgcgcgcacacacacgtgcgcacgcacgcacacacacgtgcgcaygcatgcacatgcgcacacacgcacacgcacacagacgcacatgcacacacgcacacacacacacagacacgcacacatgcatgcacatacacacagagaaaaagtaaaaagtttcctcgaatacataacctgtcctctgactcagtaactctgcttctaggagccagccctatggaagtaatcagaggcaggcagcaatgaatgcactagtatgagtgctttaatgctatttacaaagtaaaaaaattaggaaaacaaaaacaagagagggctaaataaattaaagcatgcctaaactagtatgtagccattacaattatgtttataaatacattttaattgcttggaaaatgcttgcaatgttaaatgaagataataaaatgaataaataactatacaatatgaattcaaatatttgagtttctctctatatattagatggatggatggatgcaaaggaaaaagattagacagaaataattatagttatt

SEQ ID NO: 53012 - DNA, 267 bp, Homo sapiens
accagacgttggtctgtcactttctcagtttgaaactttattttgcctttagcgttttgctrttgctttttcgttgtcttttgtttcgtttcgttcctaagttctggggtatatgtgcaggatgtgcagatttgttactaaggtaaacgtgtgccatggtggtttgctgcacctgtcaacccatcacctaggtattaggcccagcatgcagtagctgtttttcttaacgctctgtctcccggaaggccccagtgtgtgttgttcccc

SEQ ID NO: 53013 - DNA, 1304 bp, Homo sapiens
aagtcatggaaaaagcaacaagagtaaaaaatgtattatggaagtaagcagaaatacttgcctaaatggaaaaccaaactgggaagtcaaataatttgtctctaagacttgcctaaacttgctttggtaaaacttacagtcctatggccaaagctaagtcagatctgccctagagcctttgaaggtaaaaataagatactggttaccactgaaatcgtcaaatttattaggactaaccacattctaacaataaacttaaatgagagttcaaggtatttaaactctcattaatttagaagttaatcaaattaatgaatccgattgatctgattcagacctatactttgatccaagggctgcacagatatctatcaatctatgctgaggagcaagagaaaggatttggaaggcaggyaggctgatggtcaaactgcaggccagctactttgttaactatgggatcatgaggcaattaatcagctctaatccatagttgtttatttaacagtaggttataggaacacagatgttatgatggctttatgagatgataaatgcatagaacatattaggatgtctagcccagaatacaacactcaacagatattagtttcttccatctatattttcttagttaacataattttttaaatctatgaaatcttacctgactgcagattcatcaggaattccaacatctattaaagaaaaaggtaaaatgcattttaaatcaataataaatgtacagaatattaaaatcataagaatgcacagtgatgcatgcctctaatccaaactacttgggaggatgaggcaggaggatcacttgaggagcccagaagtttgagaccagcttgggaaacatagtaagactctaccttcataaaaaaattgtgcacacttgtgtgtatgctttagatcctgtttttgttgttgttgttgttgttgttttggtttggtttggttttttaaagcataagactgacgctttgttacaaagcattcctttgggagcatgcctgcgaccttattagaattaacattcattatacgtattggtaggtaattaatgcagtaagaactcttccctctgtatttattagatgcaaagaagaataaatttattaaaatttggtatctacaagtgaactgcagtatacaagtcatcctagccaaagcctatgagattgagtaaaaatggtattgttagcagaacaggtgtgatgagtcaacagtgtcaaagagcatgatttctggaccaaaatatgaggggccattacaacagagtatacactagtacccct

SEQ ID NO: 53014 - DNA, 1304 bp, Homo sapiens
aagtcatggaaaaagcaacaagagtaaaaaatgtattatggaagtaagcagaaatacttgcctaaatggaaaaccaaactgggaagtcaaataatttgtctctaagacttgcctaaacttgctttggtaaaacttacagtcctatggccaaagctaagtcagatctgccctagagcctttgaaggtaaaaataagatactggttaccactgaaatcgtcaaatttattaggactaaccacattctaacaataaacttaaatgagagttcaaggtatttaaactctcattaatttagaagttaatcaaattaatgaatccgattgatctgattcagacctatactttgatccaagggctgcacagatatctatcaatctatgctgaggagcaagagaaaggatttggaaggcaggtagkctgatggtcaaactgcaggccagctactttgttaactatgggatcatgaggcaattaatcagctctaatccatagttgtttatttaacagtaggttataggaacacagatgttatgatggctttatgagatgataaatgcatagaacatattaggatgtctagcccagaatacaacactcaacagatattagtttcttccatctatattttcttagttaacataattttttaaatctatgaaatcttacctgactgcagattcatcaggaattccaacatctattaaagaaaaaggtaaaatgcattttaaatcaataataaatgtacagaatattaaaatcataagaatgcacagtgatgcatgcctctaatccaaactacttgggaggatgaggcaggaggatcacttgaggagcccagaagtttgagaccagcttgggaaacatagtaagactctaccttcataaaaaaattgtgcacacttgtgtgtatgctttagatcctgtttttgttgttgttgttgttgttgttttggtttggtttggttttttaaagcataagactgacgctttgttacaaagcattcctttgggagcatgcctgcgaccttattagaattaacattcattatacgtattggtaggtaattaatgcagtaagaactcttccctctgtatttattagatgcaaagaagaataaatttattaaaatttggtatctacaagtgaactgcagtatacaagtcatcctagccaaagcctatgagattgagtaaaaatggtattgttagcagaacaggtgtgatgagtcaacagtgtcaaagagcatgatttctggaccaaaatatgaggggccattacaacagagtatacactagtacccct

SEQ ID NO: 53015 - DNA, 629 bp, Homo sapiens
attcctctgaccccgcctcctttctaaatgcagcgacctctgttcttcaggcctatccctttctattactctgaccccgcctcctttctaaatgcagcgacctgtgttcttcaggtctatccctttctattcctctaaccccgcctcctttctaaatgcagcgacctgtgttcttcagccctgtccctttctattcctctgaccccgcctcctttctaaatgcagcgacctgtgttcttcagycctatccctttctattcctctgaccccgcctcctttctaaatgcagcgacctctgttcttcaggcctatccctttctattcctctgaccccgcctcctttctaaatgcagcgacctgtgttcttcaggcctatccctttctattcctctgaccccgcctcctttctaaatgcagcgacctgtgttcttcagccctgtccctttctattcctctgaccccgcctcctttctaaatgcagcgacctgtgttcttcagccctatccctttctattcctctgaccccgcctcctttctaaatgcagcgacctgtgttcttcagccctatccctttctattcctctgaccccgcctcctttctaaatgcagcgacctgtgttcttcaggcc

SEQ ID NO: 53016 - DNA, 629 bp, Homo sapiens
attcctctgaccccgcctcctttctaaatgcagcgacctctgttcttcaggcctatccctttctattactctgaccccgcctcctttctaaatgcagcgacctgtgttcttcaggtctatccctttctattcctctaaccccgcctcctttctaaatgcagcgacctgtgttcttcagccctgtccctttctattcctctgaccccgcctcctttctaaatgcagcgacctgtgttcttcagccctatccctttctattcctctgaccccgcctcctttctaaatgcagcgacctstgttcttcaggcctatccctttctattcctctgaccccgcctcctttctaaatgcagcgacctgtgttcttcaggcctatccctttctattcctctgaccccgcctcctttctaaatgcagcgacctgtgttcttcagccctgtccctttctattcctctgaccccgcctcctttctaaatgcagcgacctgtgttcttcagccctatccctttctattcctctgaccccgcctcctttctaaatgcagcgacctgtgttcttcagccctatccctttctattcctctgaccccgcctcctttctaaatgcagcgacctgtgttcttcaggcc

SEQ ID NO: 53017 - DNA, 629 bp, Homo sapiens
attcctctgaccccgcctcctttctaaatgcagcgacctctgttcttcaggcctatccctttctattactctgaccccgcctcctttctaaatgcagcgacctgtgttcttcaggtctatccctttctattcctctaaccccgcctcctttctaaatgcagcgacctgtgttcttcagccctgtccctttctattcctctgaccccgcctcctttctaaatgcagcgacctgtgttcttcagccctatccctttctattcctctgaccccgcctcctttctaaatgcagcgacctctgttcttcagscctatccctttctattcctctgaccccgcctcctttctaaatgcagcgacctgtgttcttcaggcctatccctttctattcctctgaccccgcctcctttctaaatgcagcgacctgtgttcttcagccctgtccctttctattcctctgaccccgcctcctttctaaatgcagcgacctgtgttcttcagccctatccctttctattcctctgaccccgcctcctttctaaatgcagcgacctgtgttcttcagccctatccctttctattcctctgaccccgcctcctttctaaatgcagcgacctgtgttcttcaggcc

SEQ ID NO: 53018 - DNA, 546 bp, Homo sapiens
catatttacagtctccagacttactcccacagatggcgaactttatttccgccatttccaatgtaagaggaaacatctcactgctgtccccattgcattgctgccattcaacagaagaacaaaaatctattaatatctcttaggcatgttgaattaatctccccactctcattttgtctcaaatctacacttctcgttaccctaaagtcgtggaaatgtaaaaataaagatattcatttgtatgtatcagggtcaccagtcaaagcagatactagttaaaatgtttggagaggggcaaagkctgatatgggtattagttggagctctctactagacgctttcatagattttccccttattttgcaaatattactttgatacagcacaaatcgaatttatgtttcacaattcacacagctgactgacttgtttcatgttctataataattccagctgctattttaccttttatcccctctctcacagtgttagcctatcacttgagcatttaggaggggtgggactgtgttagaacacatctggcat

SEQ ID NO: 53019 - DNA, 640 bp, Homo sapiens
tatatataaatatattatagtgtatacatttatatattagtgtgtgtaaataagttctttgaatagcatatatgaatatatatacaatggcagaatatgtatatattactttaaatatattttagaggaatacaaggtaaaaacacatatagaagagaaagaagtggaaattgaaactgggctaccacagtttctaacacaataatccgttgtgtacaagagaaatttaataaatattactttaaaatgtttaaaataaagaataaaggagtaartaataaaaattgtatgttgtcctaaaagcacttttcaaagcatctgcatctattggatattactcattatctgttaaacatttctttaatcaagcccagccctcacatcaaggtcaatgtatttatagtttatatattatggtaaagaacattaatttgaagtgcaaagttttaataaaatatccttcttcctctttgcatataatgctaacctactaggtcctatgcagcccataggatcactaattaaagaaagcagggcttcagtaaccgccttattagtatcaaagtttaattttctcacttgaaagtcattcaaactgcttcagtagttatgttttttcctgcacatctctcttctgctt

SEQ ID NO: 53020 - DNA, 558 bp, Homo sapiens
gttcagcaatacttctgcattccagacagtaaaatgtgtaagaagagatgtaaaaacaatcrgctttgtctttatggagattaacttaaatttatgctcataatataatttatattatatttgatcaaaattaatcactgataagagactatagaaggtaatctcctgcttgtggtcatatgtacttaggattctattactaaacaaaatgaaagaatgcattatatggacaattagtggtctctagtacaaagaaattaccaggtcatttccaattctcaatattaaaaaaaagtttatttcttactgcactatcaaattggaaaggtcagtacaggggcattcaataatagtaaaaatattaataacaatcatatgtataacaacagaatcatttaaaaagatgtatatttaaaatgtgattattgcattttatttcccctggcagaaaataataaactggagaaaaatcacatttgattgatgtctgttacatggatttttaaaatttgtatcaatgaatgctttttaaaggtaaactaattgaggcctactgaa

SEQ ID NO: 53021 - DNA, 558 bp, Homo sapiens
gttcagcaatacttctgcattccagacagtaaaatgtgtaagaagagatgtaaaaacaatcagctttgyctttatggagattaacttaaatttatgctcataatataatttatattatatttgatcaaaattaatcactgataagagactatagaaggtaatctcctgcttgtggtcatatgtacttaggattctattactaaacaaaatgaaagaatgcattatatggacaattagtggtctctagtacaaagaaattaccaggtcatttccaattctcaatattaaaaaaaagtttatttcttactgcactatcaaattggaaaggtcagtacaggggcattcaataatagtaaaaatattaataacaatcatatgtataacaacagaatcatttaaaaagatgtatatttaaaatgtgattattgcattttatttcccctggcagaaaataataaactggagaaaaatcacatttgattgatgtctgttacatggatttttaaaatttgtatcaatgaatgctttttaaaggtaaactaattgaggcctactgaa

SEQ ID NO: 53022 - DNA, 558 bp, Homo sapiens
gttcagcaatacttctgcattccagacagtaaaatgtgtaagaagagatgtaaaaacaatcagctttgtctttatggagattaacttaaatttatgctcataatataattyatattatatttgatcaaaattaatcactgataagagactatagaaggtaatctcctgcttgtggtcatatgtacttaggattctattactaaacaaaatgaaagaatgcattatatggacaattagtggtctctagtacaaagaaattaccaggtcatttccaattctcaatattaaaaaaaagtttatttcttactgcactatcaaattggaaaggtcagtacaggggcattcaataatagtaaaaatattaataacaatcatatgtataacaacagaatcatttaaaaagatgtatatttaaaatgtgattattgcattttatttcccctggcagaaaataataaactggagaaaaatcacatttgattgatgtctgttacatggatttttaaaatttgtatcaatgaatgctttttaaaggtaaactaattgaggcctactgaa

SEQ ID NO: 53023 - DNA, 558 bp, Homo sapiens
gttcagcaatacttctgcattccagacagtaaaatgtgtaagaagagatgtaaaaacaatcagctttgtctttatggagattaacttaaatttatgctcataatataatttatattatatttgatcaaaattaatcactgataagagactatagaaggtaatctcctgcttgtggtcatatgtacttaggattctattactaaacaaaatgaaagaatgcattatatgsacaattagtggtctctagtacaaagaaattaccaggtcatttccaattctcaatattaaaaaaaagtttatttcttactgcactatcaaattggaaaggtcagtacaggggcattcaataatagtaaaaatattaataacaatcatatgtataacaacagaatcatttaaaaagatgtatatttaaaatgtgattattgcattttatttcccctggcagaaaataataaactggagaaaaatcacatttgattgatgtctgttacatggatttttaaaatttgtatcaatgaatgctttttaaaggtaaactaattgaggcctactgaa

SEQ ID NO: 53024 - DNA, 558 bp, Homo sapiens
gttcagcaatacttctgcattccagacagtaaaatgtgtaagaagagatgtaaaaacaatcagctttgtctttatggagattaacttaaatttatgctcataatataatttatattatatttgatcaaaattaatcactgataagagactatagaaggtaatctcctgcttgtggtcatatgtacttaggattctattactaaacaaaatgaaagaatgcattatatggacaattagtggtctctagtacaaagaaattaccaggtcatttccaattctcaatattaaaaaaaagtttatttcttactgcactatcaaattggaaaggtcagtacaggggcattcaataatagtaaaaatatkaataacaatcatatgtataacaacagaatcatttaaaaagatgtatatttaaaatgtgattattgcattttatttcccctggcagaaaataataaactggagaaaaatcacatttgattgatgtctgttacatggatttttaaaatttgtatcaatgaatgctttttaaaggtaaactaattgaggcctactgaa

SEQ ID NO: 53025 - DNA, 561 bp, Homo sapiens
tttttgtatttttagtagagacgaggtttcaccgtgttagccaggatggtctcgatctcctgacctcgtgatccgcccacctctgcctcccaaagtgctgggattacaggcgtgagccaccgtgcccggccgaaattattcttatttgattaatcactgatacctttagttcccatttgtttgtttcctttattttttgcttttgttaattccactgcctaacccccaaacgtttaccctwactgctctattttgcatctgaacgttatttgctactgctgctgtacttctctgggtttaaaacgggacagtagtagatatgaggaatcaagagcagtagaaacctagatcttacattttggtcagattgtaaacgtgtgatgacaataagatatgatcaactttttgaccttacccttcagctctccaactgacattggttgtttggagggggacaaatcctgactcaggatccaagtatctttcttcccctccatggtaaagaatgtaattctaattgggaaaagaagaaagaattatcaaattttaacacatcaactg

SEQ ID NO: 53026 - DNA, 561 bp, Homo sapiens
tttttgtatttttagtagagacgaggtttcaccgtgttagccaggatggtctcgatctcctgacctcgtgatccgcccacctctgcctcccaaagtgctgggattacaggcgtgagccaccgtgcccggccgaaattattcttatttgattaatcactgatacctttagttcccatttgtttgtttcctttattttttgcttttgttaattccactgcctaacccccaaacgtttacccttactgctctattttgcatctgaacgttatttgctactgctgctgwacttctctgggtttaaaacgggacagtagtagatatgaggaatcaagagcagtagaaacctagatcttacattttggtcagattgtaaacgtgtgatgacaataagatatgatcaactttttgaccttacccttcagctctccaactgacattggttgtttggagggggacaaatcctgactcaggatccaagtatctttcttcccctccatggtaaagaatgtaattctaattgggaaaagaagaaagaattatcaaattttaacacatcaactg

SEQ ID NO: 53027 - DNA, 619 bp, Homo sapiens
acccttacctcatcttctcctggtcatggattttctatttatctatctgtttatctatctatctatctatctatctatctatctatctatctatctagaaacagggtcttgcactgtcacccaggctggagtgcagtggcatgatcatagctcaatgcagcctcaaactcctgggcaaaagggatcctcccaccttagcctcccaaatagctggaactacaggtgcataccactacacctggctagtttcttttaaacttttttagagacaggggtctcagtatgttgstcaggctgggctcaagtgattttcccacctcagcctccccagtagctgagattacaggtgtgagtcaccacacctggctcttacttaaaaataataaaaacaaaaattaatcataacattattttttcttgataaatgttttatgaaatgttgcccaaatgcaagtgtaatagccaccattatcaagctcattctgtcagccagttgctgtgttacatgctttctactctttatttaatcttcacagtaactctgtcaagtaagcattatcttcatttttaaaatgaaaaaaaccgagactcagtaagggtaactaaatggcccaagatc

SEQ ID NO: 53028 - DNA, 601 bp, Homo sapiens
tgctgtcacagcttttcatttctaacaactaggttgaatctgtgctacacagatttggttattaatagatataattcagccttcttcactgaratcggtgcttccttttatttctttctgctcctgatgcaagctaggcacacactaggcattcaaaaatatttgttgactgatgaaaagtcactgaatatgcacaatcagagtttaccattttgaactgctacagaaaacagtttaaaactgtggattcaatagtccatggtcatttcaactcatatctttttcccaagtatcgggaaaatattttctggacagatttttctccagtgaaactgaaacctaaatttgatctatttattcagagttcaggcccaacacttaaattataggaaggtatgtctataattccaaattcactccaagtggactttcagcccaggggagctaactaatggcctcaattcttccactcctttccctgctgcaggaatcagtcccctggactctgatgtgtggctgggttggctgggttgccctgggcagacttattagcttggactctttcgcatgcaaaagatagcacctgtgtgactgtacatat

SEQ ID NO: 53029 - DNA, 601 bp, Homo sapiens
tgctgtcacagcttttcatttctaacaactaggttgaatctgtgctacacagatttggttattaatagatataattcagccttcttcactgagatcggtgcttccttttatttctttctgctcctgatgcaagctaggcacacactaggcattcaaaaatatttgttgactgatgaaaagtcactgaatatgcacaatcagagtttaccattttgaactgctacagaaaacagtttaaaactgtggattcaatagtccatggtcatttcaactcatatctttttcccaagtatcgggaaaatattttctggacagatttttctccagtraaactgaaacctaaatttgatctatttattcagagttcaggcccaacacttaaattataggaaggtatgtctataattccaaattcactccaagtggactttcagcccaggggagctaactaatggcctcaattcttccactcctttccctgctgcaggaatcagtcccctggactctgatgtgtggctgggttggctgggttgccctgggcagacttattagcttggactctttcgcatgcaaaagatagcacctgtgtgactgtacatat

SEQ ID NO: 53030 - DNA, 867 bp, Homo sapiens
aaacaacacccttttattagttcagaatttcaaaagctcgggtctgatgggtctctcttcctcagctatcacaaggctgaaatcaaggtgttggctgggctgtgagtcatctagaagctctgaggaagcttccaagttctttcaggttattgaaaaaaattaacttctttgtgatggaatgactgcggtcactctttctttctcgattttggctaggggtcactcttagctcctagaggctgctctgagctccttgtccccacatggcctccttcttctatgaagccacattgaggaatccccattttggtgaatccccccacacttcaactcacttttaggaagtgcaagagctatttataggccagttttacccatgatggttcctctttcttaaagttaactgtcccatataatataacctaatcatgataatgactgttccatcatatttacaagtcctgggatttgtacagggacatgtatgggtatatgaatcctgggggctattytagaattctttctaccacaacaaaataaaattttcttactaaaatacatctcagttcaaaggaagattttatacacttttgcagcttttatacttctttcaatatcttaaatgtatattttatcatacctacagagatcatatattaataaggtcttgtaatatgaaaatattggctttacaattcaataacttttcaaatgaattttaaaaacctacatttttttttgtggtaggctctctcctagctgggaattcatcagtgaatgaaacaaagtttccttcccctgtagaacttacatgctattggagagcgatagataatacacaactatagccaataagtaaattatcta

SEQ ID NO: 53031 - DNA, 559 bp, Homo sapiens
gccaccatgcccggctaatttttgtatttttagtagagacggcatttctccgtgttggtcaggcttgtctcgaacttccaacctcaggtgatcggcctgcttccgcctcccaaagtgctgggattacaggcgcgagccaccacacctggcccagaatgtgagattatctgtgaaaatgctttacatatagtaggcattcaataacggctcattaaatacatttcaaattaaagtatttctttctgccttttcagctaaagacatgattgtcacatcaggtttgttgatttcttttaaagaaatacaacagaggatcagttaccttyagcacctttcacttgtagatagtacaggccagtgaagagagaatgggtaaggagcaagagagaagaaaccccaagcagggccacatgctactagtctgcagattggtgacaaggcaggtgtggaaatgagataaaagtctcagcactgcaaggtgtgtgtcttccatcatgctgccttgaaacctgcccccactatggcacatgctaatatgcttcttcattaaatccccaaa

SEQ ID NO: 53032 - DNA, 589 bp, Homo sapiens
atctcttctcagctcagcagctaggccacagtgagaggttcagatccaggccagaccacactcctctgaggccagacccctgcatggccccagctcactgctgactgtgrccctcaggtctcacctgacttggccctgtcccctctgaggcaccccccatctcataactattcccacctctctggtttcctggtactccctgcacatccccacctgggggcctttgctttgcctggaacatgttctctgcctcatggcctgtttcgtccaccttgtcagcgagacctctcctgacctctctcccaccccattcccttccttgctatagttttctccatcgcatcttttcagtactctatattaatggtttgttttctgtcttcctccactaaaatagatgctccaggagggagaacagcatgtctcttgggcctgtatccctccccagtgccaggaagagcacctggaacctagcagccctcagtgtacccagggcaagtggatccaagaccaagactgtcttttgctctcgaggaatgcaccatccagaccagaatcaacacagacttgcattttaaaactgactctg

SEQ ID NO: 53033 - DNA, 531 bp, Homo sapiens
gcttgtgggtgccaaggtcctccacctcccagtgggagctgcagcctggggcagaggaaagccagctcagatgtgaaatgctgggatgctccgtctccagtgcccatccccatcagaccctctctctttaaggtctgaggcaagagctaggaaacctagaaacaactcaaagaaaaaaagagatgctggcctgagcaccaggactcctgtgttctcaactctgcagctgaccagctgtgtgaccttgggagagccattcaacctctctgagccttagtttctcagggaaaacaccatctttccacccagagatggagacagtgaggcaggggctctatggcctgagatgctcaaactccccccagcccctccctatgcagccagcaggcagaagttcaagggtaagcyggggtctgtctgaaccacctcagaatgccctccatgggcttaggagtcagacacacccattggctaagaaacctaaaatagtggttacttagctacactgaggctctgtttactcatttgtaa

SEQ ID NO: 53034 - DNA, 3132 bp, Homo sapiens
aaaaagtgtaagtgcacacttgctccagtgtgtctctctagtccccgtcctgtagacttcacattgcacagtgttgctcgacgtctaatacatactgtgagctaggtgtgagctagatcattaccgccttgcctggaactattagtggtggtcttacctattagsctttctgtgcataagtgtatgtacctatgtgtgcatgtgcacatgtattcctgagtgtatgtgcatgtgtgtatatgtgtatgtgcatatgggtgcatgtgtacatgcgtgtgcatgtgttcatgtgtgtatgtgcatatgggtgcacgtgtgtgcatatgtgtgtgctcgtgtgcatgtgcatgcatgcatgtgtgtgcatatttgttcatgtatgcatgtgcatgtatgcacatatgcatatgtatgcatctgtgtatgtacatatgcatgcatctgtgtatgtgcatatgtgttcgtgtgtgcatgtgcatgtgtgtgtgtgtgcatttgaatatgtgtgcatgctcagactgtgatcatgggaaatgatcttttctggaaatagcatttaatctaaagacaaaaagaagaaacatggaggaatcccagcactttgggaggctggtgggggtggggggtgtggatcatgaggtcaggagttcaagaccagcctggccaacatggtgaaaaatctctactaaaaatacaaaaattaggcaggcatggtggcacgtgcctgtagtcccagctactcaggaggctgaggcaggagaatcacttgaacccaggaggtagaggttgcagcaagccaaaattgcgccactgcactccagcccgggcgacagtgagagactctgtctcaaaaaaaaaaaaaaaaaaaagaagaaacatataggtatggtgtgttttatttttctccagaaacatttttaaatttttcttttaaagaaaatgtatcattttctttacttaacacaaactacaattgtgataattaatctgaaacatgcctttattaatgacaatttagaaaatatagaaagacacaaagaagaaaatgaaaatcattcgtcccaatgattacaaataagttttatggacacactagcatagagctttcagcaatcttctagccatatgtatatttaaacgacgcatggattaacaatatgttgtgtatcatgacccatttttataatttaaaatatttgttaaataattcatgtcattaaacagtgctttacaaatttcaacattaataatgttactattcagttgaggaattagtggcttaacaccatgaaagttaagtacaagaatatccgggaagagtgtggggcagggctctgttccacacagacactcatggatctaggttgagagaggccctgggttgacattgtaacagcagaaggcacggttaaagcacacacactcacacaggaggttttcatgactcaggtctggaagggttggcctccttctgagtaccttttttttaacaagaagtgaatcacaccagcacaccgaattgacaggcacctgggaagtaaagtcttgtaggtacaggagtccctattttcgtctgatctcgggcacctggcttcacccacaccatttgcttaaaacctttcttaatttcatctttggctgcttggggtctcaaagcaatcaccgtttctaaccctgcaaaccccccaaaatttagtttgcctgttttcttgattctgctggtcagttgctgactcacgtctgtatgcatctctttctccaacagcatgctaaatgctgctggtgccaacagcacccctaattgagtgtgcttttccaccctccttcctgggagtttcacgtctggctagcctctaggttgccttccacattatcccagctgtgctgttccactgaacgtgtttgccaccgcgtcagacagatcttaatttctcagcttctgaaaagtgcagggccccaggactaaccaacatcacatatgttaggttgtcttacagtagcaccctacttccaggaccagtttcatatgaattaatgtaattgacctgctgtcataaagaaccctgaaatataaagttgttaatatcggttagtaaagtcctactgatggctttgggcaaggggtgtgtgctccatggagccatcgggaagcccctgctgagggcagttctgtgattttactgcagggttgaggctcatctggtcaaccacattcagccagcagaggaggaaaagagagcactgaggaatccaataagccagacctagagaaggttctcatcccttcgctcctccaggagcactgcgcaggctcctagccaggagtggcgggagccatgccaccccccaggggcaacctcagctcagcaagaattctctggatggaaaagaatgatagaattctggtggccagccagccgtttctcccacataggcattgaaaaataaagaggtaattatttggaatgaaaatggtatggattacgattttatgttgggtcaattatttcctggtgaattatgccggcatctccctctcctcacagaactctctctatgtcgctgtgtgaaatggatccctgggaggtgtcccgcaaggctcttccagagcagcccacactggtgtgggggattttccggcttcactcacaaagcaggcctgccctgtggccttcctgacttttgggtctattatttttttataaatcttaagttccaatggtcatgtattatttgacctaatattcctttttttctactgaatactacaggtagaataaagtcattttgatttcatccaattatgacctttccagtaaatatctctaagttataggggtttatcttgtagtaatatagaagtcagattccaataataaatgcgggcatgtaattaacatacctaggtttataatcccagtttaccattttataaccagagtcacaaaattataaaacatgtatgatgtcagaaacgctttcaaaagtattcccagcaaaaaacttaatgcaaaacctaaagaaactcacacatactggatcctttaaaaaagaatgtgctgactgtattaatataacattaaaatttaaataatctaaattatcttggaattctgtacatcttaggaagat

SEQ ID NO: 53035 - DNA, 3132 bp, Homo sapiens
aaaaagtgtaagtgcacacttgctccagtgtgtctctctagtccccgtcctgtagacttcacattgcacagtgttgctcgacgtctaatacatactgtgagctaggtgtgagctagatcattaccgccttgcctggaactattagtggtggtcttacctattaggctttctgtgcataagtgyatgtacctatgtgtgcatgtgcacatgtattcctgagtgtatgtgcatgtgtgtatatgtgtatgtgcatatgggtgcatgtgtacatgcgtgtgcatgtgttcatgtgtgtatgtgcatatgggtgcacgtgtgtgcatatgtgtgtgctcgtgtgcatgtgcatgcatgcatgtgtgtgcatatttgttcatgtatgcatgtgcatgtatgcacatatgcatatgtatgcatctgtgtatgtacatatgcatgcatctgtgtatgtgcatatgtgttcgtgtgtgcatgtgcatgtgtgtgtgtgtgcatttgaatatgtgtgcatgctcagactgtgatcatgggaaatgatcttttctggaaatagcatttaatctaaagacaaaaagaagaaacatggaggaatcccagcactttgggaggctggtgggggtggggggtgtggatcatgaggtcaggagttcaagaccagcctggccaacatggtgaaaaatctctactaaaaatacaaaaattaggcaggcatggtggcacgtgcctgtagtcccagctactcaggaggctgaggcaggagaatcacttgaacccaggaggtagaggttgcagcaagccaaaattgcgccactgcactccagcccgggcgacagtgagagactctgtctcaaaaaaaaaaaaaaaaaaaagaagaaacatataggtatggtgtgttttatttttctccagaaacatttttaaatttttcttttaaagaaaatgtatcattttctttacttaacacaaactacaattgtgataattaatctgaaacatgcctttattaatgacaatttagaaaatatagaaagacacaaagaagaaaatgaaaatcattcgtcccaatgattacaaataagttttatggacacactagcatagagctttcagcaatcttctagccatatgtatatttaaacgacgcatggattaacaatatgttgtgtatcatgacccatttttataatttaaaatatttgttaaataattcatgtcattaaacagtgctttacaaatttcaacattaataatgttactattcagttgaggaattagtggcttaacaccatgaaagttaagtacaagaatatccgggaagagtgtggggcagggctctgttccacacagacactcatggatctaggttgagagaggccctgggttgacattgtaacagcagaaggcacggttaaagcacacacactcacacaggaggttttcatgactcaggtctggaagggttggcctccttctgagtaccttttttttaacaagaagtgaatcacaccagcacaccgaattgacaggcacctgggaagtaaagtcttgtaggtacaggagtccctattttcgtctgatctcgggcacctggcttcacccacaccatttgcttaaaacctttcttaatttcatctttggctgcttggggtctcaaagcaatcaccgtttctaaccctgcaaaccccccaaaatttagtttgcctgttttcttgattctgctggtcagttgctgactcacgtctgtatgcatctctttctccaacagcatgctaaatgctgctggtgccaacagcacccctaattgagtgtgcttttccaccctccttcctgggagtttcacgtctggctagcctctaggttgccttccacattatcccagctgtgctgttccactgaacgtgtttgccaccgcgtcagacagatcttaatttctcagcttctgaaaagtgcagggccccaggactaaccaacatcacatatgttaggttgtcttacagtagcaccctacttccaggaccagtttcatatgaattaatgtaattgacctgctgtcataaagaaccctgaaatataaagttgttaatatcggttagtaaagtcctactgatggctttgggcaaggggtgtgtgctccatggagccatcgggaagcccctgctgagggcagttctgtgattttactgcagggttgaggctcatctggtcaaccacattcagccagcagaggaggaaaagagagcactgaggaatccaataagccagacctagagaaggttctcatcccttcgctcctccaggagcactgcgcaggctcctagccaggagtggcgggagccatgccaccccccaggggcaacctcagctcagcaagaattctctggatggaaaagaatgatagaattctggtggccagccagccgtttctcccacataggcattgaaaaataaagaggtaattatttggaatgaaaatggtatggattacgattttatgttgggtcaattatttcctggtgaattatgccggcatctccctctcctcacagaactctctctatgtcgctgtgtgaaatggatccctgggaggtgtcccgcaaggctcttccagagcagcccacactggtgtgggggattttccggcttcactcacaaagcaggcctgccctgtggccttcctgacttttgggtctattatttttttataaatcttaagttccaatggtcatgtattatttgacctaatattcctttttttctactgaatactacaggtagaataaagtcattttgatttcatccaattatgacctttccagtaaatatctctaagttataggggtttatcttgtagtaatatagaagtcagattccaataataaatgcgggcatgtaattaacatacctaggtttataatcccagtttaccattttataaccagagtcacaaaattataaaacatgtatgatgtcagaaacgctttcaaaagtattcccagcaaaaaacttaatgcaaaacctaaagaaactcacacatactggatcctttaaaaaagaatgtgctgactgtattaatataacattaaaatttaaataatctaaattatcttggaattctgtacatcttaggaagat

SEQ ID NO: 53036 - DNA, 3132 bp, Homo sapiens
aaaaagtgtaagtgcacacttgctccagtgtgtctctctagtccccgtcctgtagacttcacattgcacagtgttgctcgacgtctaatacatactgtgagctaggtgtgagctagatcattaccgccttgcctggaactattagtggtggtcttacctattaggctttctgtgcataagtgtatgtacctatgtgtgcatgtgcacatgtattcctgagtgtatgtgcatgtgtgtatatgtgtatgtgcatatgggtgcatgtgtacatgcgtgtgcatgtgttcatgtgtgtatgtgcatatgggtgcacgtgtgtgcatatgygtgtgctcgtgtgcatgtgcatgcatgcatgtgtgtgcatatttgttcatgtatgcatgtgcatgtatgcacatatgcatatgtatgcatctgtgtatgtacatatgcatgcatctgtgtatgtgcatatgtgttcgtgtgtgcatgtgcatgtgtgtgtgtgtgcatttgaatatgtgtgcatgctcagactgtgatcatgggaaatgatcttttctggaaatagcatttaatctaaagacaaaaagaagaaacatggaggaatcccagcactttgggaggctggtgggggtggggggtgtggatcatgaggtcaggagttcaagaccagcctggccaacatggtgaaaaatctctactaaaaatacaaaaattaggcaggcatggtggcacgtgcctgtagtcccagctactcaggaggctgaggcaggagaatcacttgaacccaggaggtagaggttgcagcaagccaaaattgcgccactgcactccagcccgggcgacagtgagagactctgtctcaaaaaaaaaaaaaaaaaaaagaagaaacatataggtatggtgtgttttatttttctccagaaacatttttaaatttttcttttaaagaaaatgtatcattttctttacttaacacaaactacaattgtgataattaatctgaaacatgcctttattaatgacaatttagaaaatatagaaagacacaaagaagaaaatgaaaatcattcgtcccaatgattacaaataagttttatggacacactagcatagagctttcagcaatcttctagccatatgtatatttaaacgacgcatggattaacaatatgttgtgtatcatgacccatttttataatttaaaatatttgttaaataattcatgtcattaaacagtgctttacaaatttcaacattaataatgttactattcagttgaggaattagtggcttaacaccatgaaagttaagtacaagaatatccgggaagagtgtggggcagggctctgttccacacagacactcatggatctaggttgagagaggccctgggttgacattgtaacagcagaaggcacggttaaagcacacacactcacacaggaggttttcatgactcaggtctggaagggttggcctccttctgagtaccttttttttaacaagaagtgaatcacaccagcacaccgaattgacaggcacctgggaagtaaagtcttgtaggtacaggagtccctattttcgtctgatctcgggcacctggcttcacccacaccatttgcttaaaacctttcttaatttcatctttggctgcttggggtctcaaagcaatcaccgtttctaaccctgcaaaccccccaaaatttagtttgcctgttttcttgattctgctggtcagttgctgactcacgtctgtatgcatctctttctccaacagcatgctaaatgctgctggtgccaacagcacccctaattgagtgtgcttttccaccctccttcctgggagtttcacgtctggctagcctctaggttgccttccacattatcccagctgtgctgttccactgaacgtgtttgccaccgcgtcagacagatcttaatttctcagcttctgaaaagtgcagggccccaggactaaccaacatcacatatgttaggttgtcttacagtagcaccctacttccaggaccagtttcatatgaattaatgtaattgacctgctgtcataaagaaccctgaaatataaagttgttaatatcggttagtaaagtcctactgatggctttgggcaaggggtgtgtgctccatggagccatcgggaagcccctgctgagggcagttctgtgattttactgcagggttgaggctcatctggtcaaccacattcagccagcagaggaggaaaagagagcactgaggaatccaataagccagacctagagaaggttctcatcccttcgctcctccaggagcactgcgcaggctcctagccaggagtggcgggagccatgccaccccccaggggcaacctcagctcagcaagaattctctggatggaaaagaatgatagaattctggtggccagccagccgtttctcccacataggcattgaaaaataaagaggtaattatttggaatgaaaatggtatggattacgattttatgttgggtcaattatttcctggtgaattatgccggcatctccctctcctcacagaactctctctatgtcgctgtgtgaaatggatccctgggaggtgtcccgcaaggctcttccagagcagcccacactggtgtgggggattttccggcttcactcacaaagcaggcctgccctgtggccttcctgacttttgggtctattatttttttataaatcttaagttccaatggtcatgtattatttgacctaatattcctttttttctactgaatactacaggtagaataaagtcattttgatttcatccaattatgacctttccagtaaatatctctaagttataggggtttatcttgtagtaatatagaagtcagattccaataataaatgcgggcatgtaattaacatacctaggtttataatcccagtttaccattttataaccagagtcacaaaattataaaacatgtatgatgtcagaaacgctttcaaaagtattcccagcaaaaaacttaatgcaaaacctaaagaaactcacacatactggatcctttaaaaaagaatgtgctgactgtattaatataacattaaaatttaaataatctaaattatcttggaattctgtacatcttaggaagat

SEQ ID NO: 53037 - DNA, 3132 bp, Homo sapiens
aaaaagtgtaagtgcacacttgctccagtgtgtctctctagtccccgtcctgtagacttcacattgcacagtgttgctcgacgtctaatacatactgtgagctaggtgtgagctagatcattaccgccttgcctggaactattagtggtggtcttacctattaggctttctgtgcataagtgtatgtacctatgtgtgcatgtgcacatgtattcctgagtgtatgtgcatgtgtgtatatgtgtatgtgcatatgggtgcatgtgtacatgcgtgtgcatgtgttcatgtgtgtatgtgcatatgggtgcacgtgtgtgcatatgtgtgtgctcgtgtgcatgtgcatgcatgcatgtgtgtgcatatttgttcatgtatgcatgtgcatgtrtgcacatatgcatatgtatgcatctgtgtatgtacatatgcatgcatctgtgtatgtgcatatgtgttcgtgtgtgcatgtgcatgtgtgtgtgtgtgcatttgaatatgtgtgcatgctcagactgtgatcatgggaaatgatcttttctggaaatagcatttaatctaaagacaaaaagaagaaacatggaggaatcccagcactttgggaggctggtgggggtggggggtgtggatcatgaggtcaggagttcaagaccagcctggccaacatggtgaaaaatctctactaaaaatacaaaaattaggcaggcatggtggcacgtgcctgtagtcccagctactcaggaggctgaggcaggagaatcacttgaacccaggaggtagaggttgcagcaagccaaaattgcgccactgcactccagcccgggcgacagtgagagactctgtctcaaaaaaaaaaaaaaaaaaaagaagaaacatataggtatggtgtgttttatttttctccagaaacatttttaaatttttcttttaaagaaaatgtatcattttctttacttaacacaaactacaattgtgataattaatctgaaacatgcctttattaatgacaatttagaaaatatagaaagacacaaagaagaaaatgaaaatcattcgtcccaatgattacaaataagttttatggacacactagcatagagctttcagcaatcttctagccatatgtatatttaaacgacgcatggattaacaatatgttgtgtatcatgacccatttttataatttaaaatatttgttaaataattcatgtcattaaacagtgctttacaaatttcaacattaataatgttactattcagttgaggaattagtggcttaacaccatgaaagttaagtacaagaatatccgggaagagtgtggggcagggctctgttccacacagacactcatggatctaggttgagagaggccctgggttgacattgtaacagcagaaggcacggttaaagcacacacactcacacaggaggttttcatgactcaggtctggaagggttggcctccttctgagtaccttttttttaacaagaagtgaatcacaccagcacaccgaattgacaggcacctgggaagtaaagtcttgtaggtacaggagtccctattttcgtctgatctcgggcacctggcttcacccacaccatttgcttaaaacctttcttaatttcatctttggctgcttggggtctcaaagcaatcaccgtttctaaccctgcaaaccccccaaaatttagtttgcctgttttcttgattctgctggtcagttgctgactcacgtctgtatgcatctctttctccaacagcatgctaaatgctgctggtgccaacagcacccctaattgagtgtgcttttccaccctccttcctgggagtttcacgtctggctagcctctaggttgccttccacattatcccagctgtgctgttccactgaacgtgtttgccaccgcgtcagacagatcttaatttctcagcttctgaaaagtgcagggccccaggactaaccaacatcacatatgttaggttgtcttacagtagcaccctacttccaggaccagtttcatatgaattaatgtaattgacctgctgtcataaagaaccctgaaatataaagttgttaatatcggttagtaaagtcctactgatggctttgggcaaggggtgtgtgctccatggagccatcgggaagcccctgctgagggcagttctgtgattttactgcagggttgaggctcatctggtcaaccacattcagccagcagaggaggaaaagagagcactgaggaatccaataagccagacctagagaaggttctcatcccttcgctcctccaggagcactgcgcaggctcctagccaggagtggcgggagccatgccaccccccaggggcaacctcagctcagcaagaattctctggatggaaaagaatgatagaattctggtggccagccagccgtttctcccacataggcattgaaaaataaagaggtaattatttggaatgaaaatggtatggattacgattttatgttgggtcaattatttcctggtgaattatgccggcatctccctctcctcacagaactctctctatgtcgctgtgtgaaatggatccctgggaggtgtcccgcaaggctcttccagagcagcccacactggtgtgggggattttccggcttcactcacaaagcaggcctgccctgtggccttcctgacttttgggtctattatttttttataaatcttaagttccaatggtcatgtattatttgacctaatattcctttttttctactgaatactacaggtagaataaagtcattttgatttcatccaattatgacctttccagtaaatatctctaagttataggggtttatcttgtagtaatatagaagtcagattccaataataaatgcgggcatgtaattaacatacctaggtttataatcccagtttaccattttataaccagagtcacaaaattataaaacatgtatgatgtcagaaacgctttcaaaagtattcccagcaaaaaacttaatgcaaaacctaaagaaactcacacatactggatcctttaaaaaagaatgtgctgactgtattaatataacattaaaatttaaataatctaaattatcttggaattctgtacatcttaggaagat

SEQ ID NO: 53038 - DNA, 3132 bp, Homo sapiens
aaaaagtgtaagtgcacacttgctccagtgtgtctctctagtccccgtcctgtagacttcacattgcacagtgttgctcgacgtctaatacatactgtgagctaggtgtgagctagatcattaccgccttgcctggaactattagtggtggtcttacctattaggctttctgtgcataagtgtatgtacctatgtgtgcatgtgcacatgtattcctgagtgtatgtgcatgtgtgtatatgtgtatgtgcatatgggtgcatgtgtacatgcgtgtgcatgtgttcatgtgtgtatgtgcatatgggtgcacgtgtgtgcatatgtgtgtgctcgtgtgcatgtgcatgcatgcatgtgtgtgcatatttgttcatgtatgcatgtgcatgtatgcacatatgcatatgtatgcatctgtgtatgtacatatgcatgcatctgtgtatgtgcatatgtgttcgtgtgtgcatgtgcatgtgtgtgtgtgtgcatttgaatatgtgtgcatgctcagactgtgatcatgggaaatgatcttttctggaaatagcatttaatctaaagacaaaaagaagaaacatggaggaatcccagcactttgggaggctggtgggggtggggggtgtggatcatgaggtcaggagttcaagaccagcctggccaacatggtgaaaaatctctactaaaaatacaaaaattaggcaggcatggtggcacgtgcctgtagtcccagctactcaggaggctgaggcaggagaatcacttgaacccaggaggtagaggttgcagcaagccaaaattgcgccactgcactccagcccgggcgacagtgagagactctgtctcaaaaaaaaaaaaaaaaaaaagaagaaacatataggtatggtgtgttttatttttctccagaaacatttttaaatttttcttttaaagaaaatgtatcattttctttacttaacacaaactacaattgtgataattaatctgaaacatgcctttattaatgacaatttagaaaatatagaaagacacaaagaagaaaatgaaaatcattcgtcccaatgattacaaataagttttatggacacactagcatagagctttcagcaatcttctagccatatgtatatttaaacgacgcatggattaacaatatgttgtgtatcatgacccatttttataatttaaaatatttgttaaataattcatgtcattaaacagtgctttacaaatttcaacattaataatgttactattcagttgaggaattagtggcttaacaccatgaaagttaagtacaagaatatccgggaagagtgtggggcagggctctgttccacacagacactcatggatctaggttgagagaggccctgggttgacattgtaacagcagaaggcacggttaaagcacacacactcacacaggaggttttcatgactcaggtctggaagggttggcctccttctgagtaccttttttttaacaagaagtgaatcacaccagcacaccgaattgacaggcacctgggaagtaaagtcttgtaggtacaggagtccctattttcgtctgatctcgggcacctggcttcacccacaccatttgcttaaaacctttcttaatttcatctttggctgcttggggtctcaaagcaatcaccgtttctaaccctgcaaaccccccaaaatttagtttgcctgttttcttgattctgctggtcagttgctgactcacgtctgtatgcatctctttctccaacagcatgctaaatgctgctggtgccaacagcacccctaattgagtgtgcttttccaccctccttcctgggagtttcacgtctggctagcctctaggttgccttccacattatcccagctgtgctgttccactgaacgtgtttgccaccgcgtcagacagatcttaatttctcagcttctgaaaagtgcagggccccaggactaaccaacatcacatatgttaggttgtcttacagtagcaccctacttccaggaccagtttcatatgaattaatgtaattgacctgctgtcataaagaaccctgaaatataaagttgttaatatcggttagtaaagtcctactgatggctttgggcaaggggtgtgtgctccatggagccatcrggaagcccctgctgagggcagttctgtgattttactgcagggttgaggctcatctggtcaaccacattcagccagcagaggaggaaaagagagcactgaggaatccaataagccagacctagagaaggttctcatcccttcgctcctccaggagcactgcgcaggctcctagccaggagtggcgggagccatgccaccccccaggggcaacctcagctcagcaagaattctctggatggaaaagaatgatagaattctggtggccagccagccgtttctcccacataggcattgaaaaataaagaggtaattatttggaatgaaaatggtatggattacgattttatgttgggtcaattatttcctggtgaattatgccggcatctccctctcctcacagaactctctctatgtcgctgtgtgaaatggatccctgggaggtgtcccgcaaggctcttccagagcagcccacactggtgtgggggattttccggcttcactcacaaagcaggcctgccctgtggccttcctgacttttgggtctattatttttttataaatcttaagttccaatggtcatgtattatttgacctaatattcctttttttctactgaatactacaggtagaataaagtcattttgatttcatccaattatgacctttccagtaaatatctctaagttataggggtttatcttgtagtaatatagaagtcagattccaataataaatgcgggcatgtaattaacatacctaggtttataatcccagtttaccattttataaccagagtcacaaaattataaaacatgtatgatgtcagaaacgctttcaaaagtattcccagcaaaaaacttaatgcaaaacctaaagaaactcacacatactggatcctttaaaaaagaatgtgctgactgtattaatataacattaaaatttaaataatctaaattatcttggaattctgtacatcttaggaagat

SEQ ID NO: 53039 - DNA, 1206 bp, Homo sapiens
tgaagaccccatgtgagctggtcccagaggactttctctccaggaatactgggccccgcacctttcctgttcctacgattttcacactccttccccctgtctcgaatgcctttgttatacattctccttctcacacttcagatgttctttgtaaattgaaaaccttctcattcagctacatgtgaacaatgagttacagagaaagcatgagatgtaattctacacactgagagttgtatacaactaaagccaatcatcttctacttcactctgaagtggtaaaatgtaaccccttcctgaccttcctttattatatgtagtatgtaagtgctctgaaactcattatataaaaattattattatggctatatttatcctgagaattaccattttctctggttttctctcttgcagttcagaagccaattactgttaaacaattaaaagcaattaatgagttttgggacgaagtgactatcactgaaatgctgcagaattttacccactgttccagaaaatgcagggcctggcagaccaggggcaaaagctgctgcaatgactgtagaaaagagattctgggatgggacccactgaatctagtcatacaaagagattgcttttcacccttcattgtggaaaagtgaatgccacagcacactgcaaagaatagagcttattatctccaaataccatttgaaaataagtgatcagtgctggagagtcattaaatatacacagttggaatattgagcttttaatctaygggagcgacttggaatatattgcctcattattttattttatggctcaagacataacttgcattatgtttcagtgaacaatgagtatcaaaccctgaaaaaattacctcatttcttttttatgctttctcactataggcaaatgcattacaaactctaatttattctgacccagaaattgctctgtggcacatttctgcaggctgctgtgtgcataaaacagggagtcactcagcataggattattattattttcttatttttttcaaattgtttatatttccaaaagtcaaagtcagattagctattataggcaactttcaatataatgttttccagaagataacaccattacctaggattagtgccattctataacgcctgagaataagaacaactagcacccacattatcaagaaaacaactacgaaatacatgtacctta

SEQ ID NO: 53040 - DNA, 608 bp, Homo sapiens
gggaggaaaaattataaaccctcactattgaatgaagataacatgaaagagtaggaagaaaatattttcaaatacttgttggatatggactctatgctaagtgctacaatgaaagagacaaaatccctatggtgaaggagagacatgaagaaaccaaactctgttttcaactggtcacattctttgtggcctcgtttgttaataaaataaatacttactatcagatgtcatacaaggactcatctggtccccaaatcctgcagggcttagatggcagtggcctggtgcaaaggaaaattkaagcccccaggttgaaagagaatggcaaacatgccagtgttcatgcatacccgatatagtacatacctatgaacaatacatttccattgttcgttctgtcaagggctagaagaaaatatgctcatgaatctagagaaaaattttattaaaaatgatcttattattaactgcagtattttctattcctataatcctaccattcaacttagttcatgtccccagcatctactgaggaccctctacgctgagcaggggaatatggcagagcctgtgggaggcacaggagcaggggaggcagtgggatgaaa

SEQ ID NO: 53041 - DNA, 608 bp, Homo sapiens
gggaggaaaaattataaaccctcactattgaatgaagataacatgaaagagtaggaagaaaatattttcaaatacttgttggatatggactctatgctaagtgctacaatgaaagagacaaaatccctatggtgaaggagagacatgaagaaaccaaactctgttttcaactggtcacattctttgtggcctcgtttgttaataaaataaatacttactatcagatgtcatacaaggactcatctggtccccaaatcctgcagggcttagatggcagtggcctggtgcaaaggaaaatttaagcccccaggttgaaagagaatggcaaacatgccagtgttcatgcatacccgatatagtacatacctatgaacaatacatttccattgttcgttctgtcaagggctagaagaaaatatgctcatgaatctagagaaaaattttattaaaaatgatcttattattaactgcagtattttctattcctataatcctaccattcaacttagttcatgtccccagcatctactgaggaccctctaygctgagcaggggaatatggcagagcctgtgggaggcacaggagcaggggaggcagtgggatgaaa

SEQ ID NO: 53042 - DNA, 1056 bp, Homo sapiens
gttatttatcaaataactaagcatgaaggcaatagaatgaaatgcgtgggtgatatagtttctatcatatccttacacattacaggctatacacacagacacagacacacacacatactttctcaatacaaacatcatgatcacaaaacgtaaattttttaaccttagatagtataagatttacttattttctctccttttacactaaactatttggcaagaaaataaacccttaaaacaggcaccagaaatgtattttaataacaagtgatattaaatcccattttgatttaaaatacttttatgtcagctcctctgaaggagaatatatttgcctgcaaacatgagcggtcacaggagaagataactgcaggagttcctctgtcaagaggtaaagggaaattcctggtagtgaaaagttgaaagcagctgggaggcrtgaatggttattttagttgattgagttcatggtgaaggaaacattgtcattctttccattcccaaaggagtcagttaactttgttgttttccatggaaataaatatcaccttcctaatatgagaggagtagccatgaggtggtaatttgagagcagcattggggcggggtgtggggacttcagaggttatctggccaagttgtcttcaaactgttccttcagagccctagagattaatatacagctctctgagagaccaggagggactgcatccatattctttaatttttcaggaaattttctggtagtaagttttcatcagaagcaaatggatctttagtttcttttctacaaagctctgacttcaaccacctgactgaagggtcccaatgaggtaacacctcctctccaacataggacagtagcacagctacagcaaggcagactctgggtgggggtaaaatcgcctggtacatacaatgagaggcatttattgagcactaacaaccagccagcaactcctacaaatgttgtacattaacttattaaagcctcataacaacccaatgaataagtacaattattgtccccatgtggtgaagtaaataacctagtaa

SEQ ID NO: 53043 - DNA, 630 bp, Homo sapiens
tgccttggcctcccaaagtgctgggattacaggcatgagccacagtgcctggcctatctggactgctgttcatggataattcattaatttctaaattttcacaattatgcgctgaatgacgagtggagtcattgaattgtagctatgagtatcttccactttcttacaagttgccaaactgttctccaaaatcrttttaccagttcatatctccataggtatttgagggtcccaactgtgcgacatcctcaccccccacccccctatattgacagactcgactccgtgcccatctggtggatgtgtaatggtgtatcacagttctcttcatttgcgtctctcacgtggccaataaggttgagcaccttttcacattttaggctattttagccatttaggtttcctcttttgtgagttgcctgttgatatccttaatccatatttaaaaaattggattgttggtcagcccattaaactcctctccacctggcacacccaccttccctatttccacaacctaactgattgctactttttccgggaaacttgttctctttcctcaattcgaatttagagttgcctctaaataatcactggtgacaccgtacctttcttgtggcatttataatt

SEQ ID NO: 53044 - DNA, 581 bp, Homo sapiens
ccccaggcctcagggactctcctgtggctcccagttactctcmagccatccccaggttcctgcgggagtcagccccatgcactcaggagtcccccagagactcacaggtctcgggagaatatgagcggtcccccagccctgactcctcaagattcatgcctgcctcacccagcatctacctctcccctcccaggaactcagacccaaggggcagctcctcacaagggatgtggaagtactctacatcatcccgcagggtttcaccactctcacatccgtcatcggcagaattccacaactttacatttccctttcctaaccaagcaggacaatcactcatgtcattgtgttctcccgtgtcctcctctggagattcctcacagtcaccccagtcatcaataatataccatatgttcttactgccatcatccagcagctcacccccagccaccaatgactctcctgtctgtcccagctactctccaactacgcccagatttcagcgggcgtcggtatcccacaccccagaaacacctacaaactcacagacctcagtgagatcctcgccagtctctctcacg

SEQ ID NO: 53045 - DNA, 581 bp, Homo sapiens
ccccaggcctcagggactctcctgtggctcccagttactctccagccatccccakgttcctgcgggagtcagccccatgcactcaggagtcccccagagactcacaggtctcgggagaatatgagcggtcccccagccctgactcctcaagattcatgcctgcctcacccagcatctacctctcccctcccaggaactcagacccaaggggcagctcctcacaagggatgtggaagtactctacatcatcccgcagggtttcaccactctcacatccgtcatcggcagaattccacaactttacatttccctttcctaaccaagcaggacaatcactcatgtcattgtgttctcccgtgtcctcctctggagattcctcacagtcaccccagtcatcaataatataccatatgttcttactgccatcatccagcagctcacccccagccaccaatgactctcctgtctgtcccagctactctccaactacgcccagatttcagcgggcgtcggtatcccacaccccagaaacacctacaaactcacagacctcagtgagatcctcgccagtctctctcacg

SEQ ID NO: 53046 - DNA, 581 bp, Homo sapiens
ccccaggcctcagggactctcctgtggctcccagttactctccagccatccccaggttcctgcgggagtcagccccatgcactcaggagtcccccagagactcacaggtctcgggagaatatgagcggtcccccagccctgactcctcaagattcatgcctgcctcacccagcatctacctctcccctcccaggaactcagacccaaggggcagctcctcacaagggatgtggaagtactctacatcatcccgcagggtttcaccactctcacatccgtcatcggcagaattccacaactttacatttccctttcctaaccaagcaggacaatcactcatgtcattgtgttctcccgtgtcctcctctggagattcctcacagtcaccccagtcatcaataatataccatrtgttcttactgccatcatccagcagctcacccccagccaccaatgactctcctgtctgtcccagctactctccaactacgcccagatttcagcgggcgtcggtatcccacaccccagaaacacctacaaactcacagacctcagtgagatcctcgccagtctctctcacg

SEQ ID NO: 53047 - DNA, 559 bp, Homo sapiens
ggtttatcccaggtcactaagtatattttaattagstacacctgtttttctttatacacctgtttctggagtatagggtcgcatactcataaacccagtgtaactcagaaacgcatctaatattccaatagacccatcataacgttgaaaaatcataaatcaaaccaacttaagtcacgatttgtcgctggatatgggctccatcaattccattgtattcaataatgctgtacaccattaacaatggcagactgattgggcgtggatgtggataacattataaaaatcagttattagagggatactttaacctgacggaagagctgatctaatggtattagtacagtgatgattatgtgagatgttttgagacagtgtatgagattctgtggcttttttcacttagtaggaacctttgtgtgtggaaaactgagaaaattgctttgtgctgtagagtctggcattcgttgtagattaaagcttatttttctggaagtaaatcttattcaataaaatactactctttataataaaaaacaaagacactggtgatgtgaag

SEQ ID NO: 53048 - DNA, 559 bp, Homo sapiens
ggtttatcccaggtcactaagtatattttaattaggtacacctgtttttctttatacacctgtttctggagtatagggtcgcatactcataaacccagtgtaactcagaaacgcatctaatattccaatagacccatcataacgttgaaaaatcataaatcaaaccaacttaagtcacgatttgkcgctggatatgggctccatcaattccattgtattcaataatgctgtacaccattaacaatggcagactgattgggcgtggatgtggataacattataaaaatcagttattagagggatactttaacctgacggaagagctgatctaatggtattagtacagtgatgattatgtgagatgttttgagacagtgtatgagattctgtggcttttttcacttagtaggaacctttgtgtgtggaaaactgagaaaattgctttgtgctgtagagtctggcattcgttgtagattaaagcttatttttctggaagtaaatcttattcaataaaatactactctttataataaaaaacaaagacactggtgatgtgaag

SEQ ID NO: 53049 - DNA, 559 bp, Homo sapiens
ggtttatcccaggtcactaagtatattttaattaggtacacctgtttttctttatacacctgtttctggagtatagggtcgcatactcataaacccagtgtaactcagaaacgcatctaatattccaatagacccatcataacgttgaaaaatcataaatcaaaccaacttaagtcacgatttgtcgctggatatgggctccatcaattccattgtattcaataatgctgtacaccattaacaatggcagactgattgggcgtggatgtggataacattataaaaatcagttattagagggatactttaacctgacggaagagctgatctaatggtattagtacagtgatgattatgtgagatgttttgagacagtgtatgagattctgtggcttttttcacttagtaggaacctttgtgtgtggaaaactgagaaaattgctttgtgctgtagagtctggcattcgttgtagattaaagcttatttttctggawgtaaatcttattcaataaaatactactctttataataaaaaacaaagacactggtgatgtgaag

SEQ ID NO: 53050 - DNA, 666 bp, Homo sapiens
ggaaattgctgaactacatagatgtgtggcacagggcaggtgtctcctcacctctgcctcttttcacagttcactgatgtccttcccatgtccatgtgggctgggtcaggggcatgattagctggcaaatcagtcatggagttcagttgggtagttggtagtgtgtatagctggtggcaggtgatggagactccagttagcttgtttttcaggagcagggatatagagagctcctactcytggtcatttgaggccattctttcaggaatctgtgctttcatacactgaagatttgaagattggagacttctgtggaaccctgcagaagtagaatctggaagtgggtgtccataggaagaaagatacttagatagtacttagggaaatagaggtacaactatcatgactctgtttcttttctcgcagtctctctccttgggtgtctgagtgcctatgaaaatttttaagggcttgctagtttatgtggacctgaataaggtaggacctatagagtgaaaataatgggattttataattgttaatattttaatctttctgggaaaagtattctcaataagaacatacacctttgctatttgacttctgtacatttagctttcatacatttcaaatattgtgggggctttcctgtaccaatttagggta

SEQ ID NO: 53051 - DNA, 666 bp, Homo sapiens
ggaaattgctgaactacatagatgtgtggcacagggcaggtgtctcctcacctctgcctcttttcacagttcactgatgtccttcccatgtccatgtgggctgggtcaggggcatgattagctggcaaatcagtcatggagttcagttgggtagttggtagtgtgtatagctggtggcaggtgatggagactccagttagcttgtttttcaggagcagggatatagagagctcctactcttggtcatttgaggccattctttcaggaatctgtgctttcatacactgaagatttgaagattggagacttctgtggaaccctgcagaagtagaatctggaagtgggtgtccataggaagaaakatacttagatagtacttagggaaatagaggtacaactatcatgactctgtttcttttctcgcagtctctctccttgggtgtctgagtgcctatgaaaatttttaagggcttgctagtttatgtggacctgaataaggtaggacctatagagtgaaaataatgggattttataattgttaatattttaatctttctgggaaaagtattctcaataagaacatacacctttgctatttgacttctgtacatttagctttcatacatttcaaatattgtgggggctttcctgtaccaatttagggta

SEQ ID NO: 53052 - DNA, 666 bp, Homo sapiens
ggaaattgctgaactacatagatgtgtggcacagggcaggtgtctcctcacctctgcctcttttcacagttcactgatgtccttcccatgtccatgtgggctgggtcaggggcatgattagctggcaaatcagtcatggagttcagttgggtagttggtagtgtgtatagctggtggcaggtgatggagactccagttagcttgtttttcaggagcagggatatagagagctcctactcttggtcatttgaggccattctttcaggaatctgtgctttcatacactgaagatttgaagattggagacttctgtggaaccctgcagaagtagaatctggaagtgggtgtccataggaagaaagatacttagatagtacttagggaaatagaggtacaactatcatgactctgtttctttyctcgcagtctctctccttgggtgtctgagtgcctatgaaaatttttaagggcttgctagtttatgtggacctgaataaggtaggacctatagagtgaaaataatgggattttataattgttaatattttaatctttctgggaaaagtattctcaataagaacatacacctttgctatttgacttctgtacatttagctttcatacatttcaaatattgtgggggctttcctgtaccaatttagggta

SEQ ID NO: 53053 - DNA, 666 bp, Homo sapiens
ggaaattgctgaactacatagatgtgtggcacagggcaggtgtctcctcacctctgcctcttttcacagttcactgatgtccttcccatgtccatgtgggctgggtcaggggcatgattagctggcaaatcagtcatggagttcagttgggtagttggtagtgtgtatagctggtggcaggtgatggagactccagttagcttgtttttcaggagcagggatatagagagctcctactcttggtcatttgaggccattctttcaggaatctgtgctttcatacactgaagatttgaagattggagacttctgtggaaccctgcagaagtagaatctggaagtgggtgtccataggaagaaagatacttagatagtacttagggaaatagaggtacaactatcatgactctgtttcttttctcgcagtctctctccttgggtgtctgagtgcctatgaaaatttttaagggcttgctagtttatgtggacctgaataaggtaggacctatagagtgaaaataatgggattttataattgttaatattttaatmtttctgggaaaagtattctcaataagaacatacacctttgctatttgacttctgtacatttagctttcatacatttcaaatattgtgggggctttcctgtaccaatttagggta

SEQ ID NO: 53054 - DNA, 666 bp, Homo sapiens
ggaaattgctgaactacatagatgtgtggcacagggcaggtgtctcctcacctctgcctcttttcacagttcactgatgtccttcccatgtccatgtgggctgggtcaggggcatgattagctggcaaatcagtcatggagttcagttgggtagttggtagtgtgtatagctggtggcaggtgatggagactccagttagcttgtttttcaggagcagggatatagagagctcctactcttggtcatttgaggccattctttcaggaatctgtgctttcatacactgaagatttgaagattggagacttctgtggaaccctgcagaagtagaatctggaagtgggtgtccataggaagaaagatacttagatagtacttagggaaatagaggtacaactatcatgactctgtttcttttctcgcagtctctctccttgggtgtctgagtgcctatgaaaatttttaagggcttgctagtttatgtggacctgaataaggtaggacctatagagtgaaaataatgggattttataattgttaatattttaatctttctgggaaaagtattctcartaagaacatacacctttgctatttgacttctgtacatttagctttcatacatttcaaatattgtgggggctttcctgtaccaatttagggta

SEQ ID NO: 53055 - DNA, 611 bp, Homo sapiens
ggcttgttttttgtttgtatctctctttgttctcacattttaaattgaaatttttggggaggcagggtctagctctgttgtccatgctgcagtgtagtggcatgatcttggctcactgctgtatccacctctcaggctcaagtgatcctcccacatcagcttcccaagcagctgggactacaggcacacaccatcatgcctgactccttttggtattttttgtgtagagatgtgtcctcattatgttgcccaggctggtctccaactcctgaactcaagcaatccacccaccttggccttgcaaagggctgagattacaggtgtgagccaccrtgcctgggcaacattgagattgatttaaagaaattgattagggctgggtgtggtggtgcacaatgcttatctcaacattttgggaggcagaagtggaagatttgcttgagcccaggagcttgagaccagcctgggaggtataatgaggccttgtctctacaaagataacaataaaaacattagcatgacatgatggtatgcacctgtagttccagctattcaggaagttgaggtgggaagattgcttgaggtcaggagtttgagaccacagtgagcca

SEQ ID NO: 53056 - DNA, 477 bp, Homo sapiens
tatttccatccccatgatgctgtctgtctttgatggtgggctctccttaatgtggctcccctccactggaaacaaaggtcaggaacaactccaaggcccagcctcgtagaccattaattacaaaataggttctttttatggttaaaacctaacatagtgacagaaattaaaacctcaggtaaggaaactcttttaagaagtagctcaggagtgacccaagaggtggtatccagtgatggattcatttattcatgatttgctgttatttccttgacctttgtcaagtgatagcactttgggcaatttgagaatgtgctgagaatttgcctgagaaggtgcttgttctacagggactagacatctcagtgaggcacccactaatggctttctctaggttgatgatgcattcaacattcccagaagaagaatggggttgctaaagagaccttcccttcctatctgtgtgtccwtttccat

SEQ ID NO: 53057 - DNA, 590 bp, Homo sapiens
tatctatctctatttgtcctttattttcacttccatcctagctctatcccttgtctccttcatgtgtctcaggataagtgccctataayattttatatttctggaaacccttcaatataaagttattacatgtaaaaataaaaagtctgttttagcaaactttttcttcacaaattatcttttcctagttccctattggacaatttttgtaggctccatatgctattaatttatattcacttttagaagaattttcatcaaaagcaaaagacttatgtcaattgttaatatgctatttgtacttctatgtatatatacacacatagccacatacatatatgtaactccggaggcctgcctggactgttaaataactgtattgaacaagagcaagaaaaagctgttcaaatttcaaacaacaagttgaactgaagagttcacatctttgaatgaaatagacactagtagcctttaaaaattaaacatttctactgttttaaaaaattatagccatcatagtatgaggaaaaatgtaataatcctttttaattcttgccattttattaaccacagagtccttatgccctgac

SEQ ID NO: 53058 - DNA, 794 bp, Homo sapiens
tgaaagttggttatttattttccatccttacatcaactaaaatgatatctacagttcctcttaacacttttcttactttcaaatatgtgggtatgcttcattagctgaggccatgttccatatgcacatctggctacaagggaaactgggaatgtgagccctgatcctaatgtttgtagagtatttagaaatttgagaattccctccaaataaagagttttttaaaacattgttagacaaaaagtttgaattacaaaatgtggtagtagctcaggtctaactcaaatgcagggaaaaaactattaactctaaaaaaaattaaatacacatttgatggtaatgagaaacagaaaacaggcagaaatagtagaatattcaaccactgatgaagtatttgaccaytgaataaagaaaattgcaatgatttaaatttgcatcaatgtaacttcacacctgatgacacttcccagtctgtgcaaaattagatgtctaagagtaaagcggtgagttttactagcttgaggaataagagtacagagttccaggctgacagaaaagaagaactgggaaatttgaatgacatgggaggacatctcacacaactgaaagtcacagaggagaatgtcacagagtaaaaatctaaaatcagcacttaaacttcattcagatatatgatggctgctacatttcacattcataaaaagagactccatagaatctagcagaaaacaacagctaaattgctagtacagagcagagatttcaaccattgcatatagctcaggagtgaaagt

SEQ ID NO: 53059 - DNA, 794 bp, Homo sapiens
tgaaagttggttatttattttccatccttacatcaactaaaatgatatctacagttcctcttaacacttttcttactttcaaatatgtgggtatgcttcattagctgaggccatgttccatatgcacatctggctacaagggaaactgggaatgtgagccctgatcctaatgtttgtagagtatttagaaatttgagaattccctccaaataaagagttttttaaaacattgttagacaaaaagtttgaattacaaaatgtggtagtagctcaggtctaactcaaatgcagggaaaaaactattaactctaaaaaaaattaaatacacatttgatggtaatgagaaacagaaaacaggcagaaatagtagaatattcaaccactgatgaagtatttgaccattgaataaagaaaattgcaatgatttaaatttgcatcaatgtaacttcacacctgatgacacttcccagtctgtgcaaaattagatgtctaagagtaaagcggtgagttttactagcttgaggaataagagtacagagttccaggctgacagaaaagaagaaytgggaaatttgaatgacatgggaggacatctcacacaactgaaagtcacagaggagaatgtcacagagtaaaaatctaaaatcagcacttaaacttcattcagatatatgatggctgctacatttcacattcataaaaagagactccatagaatctagcagaaaacaacagctaaattgctagtacagagcagagatttcaaccattgcatatagctcaggagtgaaagt

SEQ ID NO: 53060 - DNA, 1593 bp, Homo sapiens
aatgtattctgttattcactataaaatatagaggttaaaaaagacttaggtaagttataaaggtgttcttatattatctgaaactctccttatgctaatatccctgacttccttgattaacggtaattgaaggctttactgttttctcattctttacttttattaatgagattgccatgctctgataagtgcaagctgcaaggacactcttcatacacagaaagagaggcacagaggcagtgaggtatcgagtatgcaagtgaagacattttgggttggaggtggattttccagccacagttgccaaaaactttgtcttgatgagagaactagtcaacaatgacgtttccaaatttttgatctgcaaattcataagcaaaattaagtattcaggttaagtcactaggtttggagagagattttacacagaaacagaaaagaacaagagtgttacttaatctcactgtatttcagtttcctcaactgtaatataaaggttgataacaattcctcataaggtcattgtgatcattaaacaggattaataatgcacacacaagcacaggtatacacatacacacacaaacttgaagaagggtaataaaaatctgagaatatttttaaaaattctattatgtttacagaccataactaattgataattttgttgctatcagaataaatatcccattggagtatctgatttcctctgtggtatgataataaataaaatcataatataaaccaatccacattgatattctactgtaattaacattaaaaatttgaggtgttttcagactcgtgaacatacttatgtgcagtaaataatgaatctttttattctgtttggatatttataggatgacaagtggattaagcttagttttgcaataaaataaattttcagaatagtcttaatagtttaataaaacagggacttcaggccccctacaaaccagagcagtcacattcccacccagctggcaccatagctgaggcagtgccctggctcccacagacgccaagcatgtggcacactagagcgagtgcacattagcaatgttctgttgctgccagaagccatgcagttcaaacctgtgttattcaaggatcgaccgtatacagagagcaacggttgctaggggtgggttctggggagaatagggagatatagatcaaagaacataaaatagcagctatttagattaaacaagtctagagatccaataaggacttcaggtaataaaattaaacaatatttgggattcatgctaaatgagtacatttgagctgttcttgccacaaaaaacaaaaaaatggataagtatgtgakatagtgcataccttaatttgcatccatatagtaatttttttactacctgtatgtattttataacatcatgttgtataccttaaatatacaacataagatttgtttttaagtattttttaaaaatgaaaattttattgatatttttaaatactttatttttgtcaaggttaaatacccattgagatttttttttaacttcttaggtatttgaaataattcatccctaataacatatgggcattagaaacagaatttca

SEQ ID NO: 53061 - DNA, 556 bp, Homo sapiens
tagctggtgatggtggcaggtgcctgtaatcccagctacttgggaggctggggcaggagaatcacttgaacccaggaggcagaggttgcagtcaaccaagattgcaccactgcactccagtctgggtgacagagggagactccatctcaaaaaaaaaaagttttaaataggaaagtttatctgagttatttacctctgtatttaagcatcacaaaataattatcacaatgcttggagaaattttacatgcatctrctcttctcatgcatagtttactatagtaatggtatatattttaagcaaattattggaatattgcaactggctgatgactgtatttataatagcatttaattttatttccccttttttcaaaagtttctctatttgaagcaataccttacgtctaaaagactcttcctcctatgcatataaagagataattaggtactctgaaattttttaatgatatttagcaatatagaaattataggactgatatgaaccattgcatacaagagtggtatacacaatgctcttctcaacttttccttat

SEQ ID NO: 53062 - DNA, 548 bp, Homo sapiens
tcaattgttctaacgttctcactcctcctcaggggactgtggctgtcagtggagtaacgagaaagaggaacaaagatgggaaaagaccagcagctatttgtgaggctgtggccattcctgcctccacccccagaccacctgctgaagggagagatgttaaaaagaaccacgttttccattcctcaaagccaaacaaacacagagagtcggctgagcctctctaaatcagtgactgccaggggagtaaaatgctgaacccaccaaaaggccacatctgcraaataaatccatgtcctgagagtcaaatcaaaacagatgtggtcccacagcagggacccctcccatggagagacacatctacctcggtcctacccagggccctttctcgttgagagatctggccaggttatgaaaaccatttacttccatggtgactcttcttcagtgatgctggctggagcccagccctcctcaggtcacttaaccacaccatcttagggagcccagcccactctcagcctaaagccatcagtgaaagtgcaaactca

SEQ ID NO: 53063 - DNA, 627 bp, Homo sapiens
ttccaaaatctccccatcaaaggcatgactatcaataccattgaataccycacaaggacatctaggatagatttttgactcgccataaaaaagatagccttgaattctcagcaacatcagttgattgggccagagatgtagttcctgtttttcaagaatttgtaccccaggacctggatagagtatcatttaagtattttctataaccctgtgttgagtatatttatgtggacaatggggcaggatgttgaggaaacctgtgaaatataatcattaaagtagggaccacatcctggaattagaaatgagcagtgtttgaatgattacataagaagagaatttgacagtttaaattcttatccaaaaacatatgtagttttatccacttgaaagtaaattacttttagagtgacaggagattagctgcagaagtctcatctgaatacaaaacgtcatctacctctgtttaatacccggaggtgcaagtcatggggaaactgggttttgatgcccagaaatggtctctttcacattcagtgattgaattgcaaagctaacttaattctggaagtactagcaacactttcacatttaggggttatgtcttaaaaatataggtccgggatg

SEQ ID NO: 53064 - DNA, 627 bp, Homo sapiens
ttccaaaatctccccatcaaaggcatgactatcaataccattgaatacctcacaaggacatctaggatagatttttgactcrccataaaaaagatagccttgaattctcagcaacatcagttgattgggccagagatgtagttcctgtttttcaagaatttgtaccccaggacctggatagagtatcatttaagtattttctataaccctgtgttgagtatatttatgtggacaatggggcaggatgttgaggaaacctgtgaaatataatcattaaagtagggaccacatcctggaattagaaatgagcagtgtttgaatgattacataagaagagaatttgacagtttaaattcttatccaaaaacatatgtagttttatccacttgaaagtaaattacttttagagtgacaggagattagctgcagaagtctcatctgaatacaaaacgtcatctacctctgtttaatacccggaggtgcaagtcatggggaaactgggttttgatgcccagaaatggtctctttcacattcagtgattgaattgcaaagctaacttaattctggaagtactagcaacactttcacatttaggggttatgtcttaaaaatataggtccgggatg

SEQ ID NO: 53065 - DNA, 627 bp, Homo sapiens
ttccaaaatctccccatcaaaggcatgactatcaataccattgaatacctcacaaggacatctaggatagatttttgactcgccataaaaaagatagccttgaattctcagcaacatcagttgattgggccagagatgtagttcctgtttttcaagaatttgtaccccaggacctggatagagtatcatttaagtattttctataaccctgtgttgagtatatttatgtggacaatggggcaggatgttgaggaaacctgtgaaatataatcattaaagtagggaccacatcctggaattagaaatgagcagtgtttgaatgattacataagaagagaatttgacagtttaaattcttatccaaaaacatatgtagttttatccacttgaaagtaaattacttttagagtgacaggagattagctgcagaagtctcatctgaatacaaaacgtcatctacctctgtttaatacccggaggtgcaagtcatrgggaaactgggttttgatgcccagaaatggtctctttcacattcagtgattgaattgcaaagctaacttaattctggaagtactagcaacactttcacatttaggggttatgtcttaaaaatataggtccgggatg

SEQ ID NO: 53066 - DNA, 542 bp, Homo sapiens
catcatgcagattgtcccagatcagctgagtcaccttgttggcatggggcagtatccaggcctcagcatccagctcctcctagatcttctttagcttctcagcggtgcaggtaccagctcttttgcagtcactcacatcatccaagcaggaaacttagaagcagtcagagctcaccatgagtcccaatgagagataaacacaggttctaatttatcctcatgggttgcagtttgttcttgatctcctgtgcttcatgcccttcttygctttacaacttctcacccaactgacttagaccagcactaggagtaacaaacttacataataacctatccagttcctggaattgcagaaagtaagtccctataataaatctcctttattactcagtgtggttctgcttctatgattgaatccttgctgataaacctgcatgacaaattgtactgaaatcagttacaaacatggcttagaaacatttcaaaatattggctgccattttctatcaaaatagtttctgttaagagcatgaatttctgaa

SEQ ID NO: 53067 - DNA, 542 bp, Homo sapiens
catcatgcagattgtcccagatcagctgagtcaccttgttggcatggggcagtatccaggcctcagcatccagctcctcctagatcttctttagcttctcagcggtgcaggtaccagctcttttgcagtcactcacatcatccaagcaggaaacttagaagcagtcagagctcaccatgagtcccaatgagagataaacacaggttctaatttatcctcatgggttgcagtttgttcttgatctcctgtgcttcatgcccttcttcgctttacaacttctcacccaactgacttagaccagcactaggagtaacaaacttacataataacctatccagttcctggaattgcagaaagtaagtccctataataaatctcctttattactcagtgtggttctgcttctatgattgaatccttgctgatamacctgcatgacaaattgtactgaaatcagttacaaacatggcttagaaacatttcaaaatattggctgccattttctatcaaaatagtttctgttaagagcatgaatttctgaa

SEQ ID NO: 53068 - DNA, 545 bp, Homo sapiens
tgtgcatttcatcttcttagcagttctgaaagcagaaaagatctgtggttctcattctgcagaagcaaagaccaagcctcagtcaatgactgaggaaaacagatcactgctgtgctattctaggccactgagaaggataaagagtttctcagctcattttcaattctatgccataatacacaaatcagataaagacagactaatactatacatgaatttcacttataaatacaaattctaaatcaaacatttcagattaatataaatgcaaaaattctaaataaaatatttgcaaataggatccagaagtatatgaaataattacataccacagctcctgctatkgtttgggtgtttgtacctccaaaattcatgctgaaactgagtagcagtgtggcagtgttggcaggtggggcctaatgagaggggattggatcatgaaggtagagctcgcatgggttaatgttgttattgtaggagtgggttagttaccaagagagtgagttgttataaagtgaacctggactcctgctttctcttttttg

SEQ ID NO: 53069 - DNA, 563 bp, Homo sapiens
taatgttctgtaaaacagacgtctacagttattatgaatattttgattttcactcaatttcattctgtatttctttattctctgaatatgagccaataacataattagcaatttatgcaataatggccataacaccaagaagataaatacattatagacagccccagaagatataggaatggatccaatttaaaatccggagcaaactggaagttgaggctgttcctggaaattaatcaatacatgttggacaaggtgcaaattttactgattgacattgtagaagaagagacagtggctattggagatctagtggagtgagtttcactattgcacaagggaaaataaaagaaacctttttactggaaacacatctttacttgtacccttactttgaaagaattaaccaatwaaggctgtcaagctgctttgacaataatttttcagtgatgggaccaggttgacttaattgacttcttatttttgcatcatacagactatctgtgttttgtacaatgaaaacacaaactaacctacatcatgcatgtgcttaaactttttta

SEQ ID NO: 53070 - DNA, 543 bp, Homo sapiens
tatttgttcatactatatattagtttcctacacctgccaaaataaagtggcatagattgagtagcaccaacaacrgaaatttattctctcaaagtctggatgctggaagtcccagatctaggtaccactagggttaagttcttgtgagggctctcttcctgacttccagacagccgccttcttacagtgtgctcacatagcagagagagagctctctggtgtcttttcttataaaggcactattcctatgaggatcccacccttataaactcatttaggcttaattactttcttacttcaaacctcccattggggtttagggcttcagcatatggattttgtggggtggggggacacaattctatttataacatactaagtctttaaaatctgatgtgtattttacacttgcagcacaccacagcttggactaagcacatttcaaatgttcaatagccacaagtggattctggctgctgtcttagacagtcctgacctcaataaatggttattggcttcagaagtgagagcaactctgaaact

SEQ ID NO: 53071 - DNA, 544 bp, Homo sapiens
ccagtgaagccaagtggacctgaacatttctagtggcaataatttttgtttattctttatttaaataactccttcagttagtttagggcagtggttytcagcagagatagttttgctcccaataggacatttgtcaatgactggagacatttaggtcacaagctggggagctgatagtggcatccagtggatgaaccacggatcctgctaagcattccataacgcacaaaatatccccttcaacacacacacacacacacacacacacacacacacacaccccaaatgagatgcatcagaacccccaccaagcatggaaataaaggaaaaattctgaggcccttcaagggagagagaccctgaaaaggctattatccatgtacggagagtggataacaaataaatattgaaaacaaccatatgccagtaaaattggcattgacaaataattctacactaggaattctccactttggcgctgctgacatttgaggcagtgctttgtgttactgaactggactcaggtccgcttgcctggcacagt

SEQ ID NO: 53072 - DNA, 595 bp, Homo sapiens
catttacttcatatctgttttctagccaattgaaaaggtcagtttgttatgcaractggagaaccctggcttccttacttattattagcaaaatgtaagcttgccagatttaactaattaaaatgtaagatccacaattacttttgaattttagacaaacaatggatgcatttttagtatatgttccatatattgcatggcatgtacttatagtaaaaaattatttatctagcttaaattcaaatttaattgaatgttcggtggggtgcaatggctcacgcctgtaatcccagaactttggggggctgaggcaggaggatcacctgaggtcaggagtttgaggccagcctggctaacatggtgaaaccccatatctactaaaaatacaaaaaattagccaggtgtggtggaaggcacctgtaatcccagctacatgggaggctgagtcaggagaaatgtttgaacctgggaggcggaggttgcagtgagctgagatcatgccattgcactccagcttgggcaacaagagcaaaattccatctcaaaaaaaaaaaatttaattgaatgttctgcattttaccttgggaccctgtca

SEQ ID NO: 53073 - DNA, 595 bp, Homo sapiens
catttacttcatatctgttttctagccaattgaaaaggtcagtttgttatgcaaactggagaaccctggcttcyttacttattattagcaaaatgtaagcttgccagatttaactaattaaaatgtaagatccacaattacttttgaattttagacaaacaatggatgcatttttagtatatgttccatatattgcatggcatgtacttatagtaaaaaattatttatctagcttaaattcaaatttaattgaatgttcggtggggtgcaatggctcacgcctgtaatcccagaactttggggggctgaggcaggaggatcacctgaggtcaggagtttgaggccagcctggctaacatggtgaaaccccatatctactaaaaatacaaaaaattagccaggtgtggtggaaggcacctgtaatcccagctacatgggaggctgagtcaggagaaatgtttgaacctgggaggcggaggttgcagtgagctgagatcatgccattgcactccagcttgggcaacaagagcaaaattccatctcaaaaaaaaaaaatttaattgaatgttctgcattttaccttgggaccctgtca

SEQ ID NO: 53074 - DNA, 651 bp, Homo sapiens
tccctcttctgttttctggaagaagttgtgtagaaatggtccagcatcatgtgaaagaaagttaggattagtaaacttttattagaaaaaacaaaattgttccaattttaaaaacaagaaccactggactaaattatacattggtaccaatggttttgagtttctccacacattgactggtgagtggtaattgctgtgtttggaaaacacacaaactgatgcccttctcttgctcccaaatggcgcctgaaacctctcagcacctgtagtgaaaagccctgtgaaacaygtccagatgatagagaagcccaaaaagtgggacgattctttccctggcacttgacaaagcctcaaggctctctttctgaaatgtcatcagaaggaaccttcacactactcttactgttgcttaggcttttgttttatttagcatattaggtccaaggaaattatgcccagcaaggaccactgcagtaaatataaatgctttggttaatttgagctctcgttaatatctcttggtcatttattccgaagtggctataatgcagttggcccggtaaaaagctgttgttgaagatctgctaattaagacagtttgacttaaaaaaaaagtgttaattcaatagtcgacaaatgtttggttgtttg

SEQ ID NO: 53075 - DNA, 581 bp, Homo sapiens
tcaaaacagcgaagtaaaggtactttcagttaactgaaaaatgctttttctgctttcttttttctaataagtgttggtagcactatggggatgttattatcattttatycctctttaagtttaaccctagacataatctttctgttgacttcttgtgtgtttttttgtttgtttgtttgttttttgagacggagtttcgctcttgttgcccaggctggagtgcaatggtgtgatcttggctcactgcaacctctgcctcccgagttcaagcgattctcctgcctcagcctcccgaattgctggaattacaggcatgtaccaccctgcctggcaaattttgtatttttagtagagacggggtttctccatgttggtcaggctggtcttgaactcccaacctcaggtgatctgcccacctcggcttcccaaagtgttaggattatgggtgtaagccaccgcgcccgggctttttttttttttttttttttttttttgagacaaagtctcgctcttgtcccccaggctggagtgcgatggtgcaatctcggctcactgcaacctctgcctcccgggttcaggcg

SEQ ID NO: 53076 - DNA, 552 bp, Homo sapiens
actgaataattgagagctggctgcttttgcaaagtgcttttattatcccacatgtaatccttgcattctacaaaatagctagatgtaacatattgatattattgccactcctctaccatattctctctctgtataagagtctatcagaaaatatacaatattagccaagacttggttttatcctttctaaagttacttttctyttgtttacgtcctctttataaaggtattattagagtcttctttgttatcatgaattataccaagggaatcacctttcttcccttcttgaacatattatttcatgagaaatgtgttatgttgcttacatacacaggtagagctctttaaaaacagaaaactcatctattttgcttgctttccagacactatccatctattacagctaagcacacagatttgttctagaaggttggcaactaaaaaacaaaaaacagccttataatattcaaataacttttaaactgttttaaagacaatattgtttgaaaaattagagtataaaaaaaatgaaatcaaacacactttccc

SEQ ID NO: 53077 - DNA, 552 bp, Homo sapiens
actgaataattgagagctggctgcttttgcaaagtgcttttattatcccacatgtaatccttgcattctacaaaatagctagatgtaacatattgatattattgccactcctctaccatattctctctctgtataagagtctatcagaaaatatacaatattagccaagacttggttttatcctttctaaagttacttttctcttgtttacgtcctctttataaaggtmttattagagtcttctttgttatcatgaattataccaagggaatcacctttcttcccttcttgaacatattatttcatgagaaatgtgttatgttgcttacatacacaggtagagctctttaaaaacagaaaactcatctattttgcttgctttccagacactatccatctattacagctaagcacacagatttgttctagaaggttggcaactaaaaaacaaaaaacagccttataatattcaaataacttttaaactgttttaaagacaatattgtttgaaaaattagagtataaaaaaaatgaaatcaaacacactttccc

SEQ ID NO: 53078 - DNA, 552 bp, Homo sapiens
actgaataattgagagctggctgcttttgcaaagtgcttttattatcccacatgtaatccttgcattctacaaaatagctagatgtaacatattgatattattgccactcctctaccatattctctctctgtataagagtctatcagaaaatatacaatattagccaagacttggttttatcctttctaaagttacttttctcttgtttacgtcctctttataaaggtattattagagtcttctttgttatcatgaattataccaagggaatcacctttcttcccttcttgaacatattatttcatgagaaatgtgttatgttgcttacatacacaggtagagctctttaaaaacagaaaactcatctattttgcttgctttccagacactatccatctattacagctaagcacacagatttgttctagaaggttggcaactaaaaaacaaaaaacagccttataatattcaaataacttttaaactgttttaaagacaatattgtttgaaaaattagagtatwaaaaaaatgaaatcaaacacactttccc

SEQ ID NO: 53079 - DNA, 537 bp, Homo sapiens
tatcaaccactcaaaaataacttaaaaatacatttctaaaaagcataccataagcctgggcaacgtagggagtaccctgtctctacaaaaaatttaaaaattagcctcttatggtggcacatccctgtagtcccagctactgaggaggctgaggcgagaggattgtttgagcccaggaggtcgaggctgcagtgagctgtgattgtgccactgcattccagtctgggtgatagagagagaccctgtctcaataaaaaataaaaaataaaaatwaaaataaaataaaataaaataaataaaaggatatagtaatgacctgaaatttaggtgccctgatctaagttggcatcaatagaaataaagagaagtagagctggcaggacatgatgaatcattggattggacagtgggagaaggaagagttcaacttgatgatccacttcttgctacaggcacccgagtagatggaagatagggaacctaggagaatacctctgataagaaaacttatgtatttgataaaatgattaaagttta

SEQ ID NO: 53080 - DNA, 537 bp, Homo sapiens
tatcaaccactcaaaaataacttaaaaatacatttctaaaaagcataccataagcctgggcaacgtagggagtaccctgtctctacaaaaaatttaaaaattagcctcttatggtggcacatccctgtagtcccagctactgaggaggctgaggcgagaggattgtttgagcccaggaggtcgaggctgcagtgagctgtgattgtgccactgcattccagtctgggtgatagagagagaccctgtctcaataaaaaataaaaaataaaaattaaaataaaataaaataaaataaataaaaggatatagtaatgacctgaaatttaggtgccctgatctaagttggcatcaatagaaataaagasaagtagagctggcaggacatgatgaatcattggattggacagtgggagaaggaagagttcaacttgatgatccacttcttgctacaggcacccgagtagatggaagatagggaacctaggagaatacctctgataagaaaacttatgtatttgataaaatgattaaagttta

SEQ ID NO: 53081 - DNA, 547 bp, Homo sapiens
tataattgaagtaaactttcaacatattggcaaggcatttataaaaatttaaatgcctaatgtttgcggatctgtggtgatcctggttgtctcaaactttactaaataatgttataaaatcataaaaataattttagatgctaggaccacacgcattgagtcaccataatgttcatgctatttgattagtaatctcatatcttgtcattaattcaaaagaagcactattaaatagggaaaataaatacattcagaaagatggtttttcaacatttttaacataattaaaaccagaaacaaaatgattgttcaataatataaaacatagaaagaaattatctgtattcagtaggaccttatgataacatttgaaatggtasttaagacgctcagatggttaagaagatatgatatattaaaacaataggcaaaatgtccacctaagaccaaatcagtgaaaggagcatatttgttcctataattaaaaacatattaatgaagcttatgtaagggtggttaggttataggtgccctttttaaaactttg

SEQ ID NO: 53082 - DNA, 547 bp, Homo sapiens
tataattgaagtaaactttcaacatattggcaaggcatttataaaaatttaaatgcctaatgtttgcggatctgtggtgatcctggttgtctcaaactttactaaataatgttataaaatcataaaaataattttagatgctaggaccacacgcattgagtcaccataatgttcatgctatttgattagtaatctcatatcttgtcattaattcaaaagaagcactattaaatagggaaaataaatacattcagaaagatggtttttcaacatttttaacataattaaaaccagaaacaaaatgattgttcaataatataaaacatagaaagaaattatctgtattcagtaggaccttatgataacatttgaaatggtagwtaagacgctcagatggttaagaagatatgatatattaaaacaataggcaaaatgtccacctaagaccaaatcagtgaaaggagcatatttgttcctataattaaaaacatattaatgaagcttatgtaagggtggttaggttataggtgccctttttaaaactttg

SEQ ID NO: 53083 - DNA, 547 bp, Homo sapiens
tataattgaagtaaactttcaacatattggcaaggcatttataaaaatttaaatgcctaatgtttgcggatctgtggtgatcctggttgtctcaaactttactaaataatgttataaaatcataaaaataattttagatgctaggaccacacgcattgagtcaccataatgttcatgctatttgattagtaatctcatatcttgtcattaattcaaaagaagcactattaaatagggaaaataaatacattcagaaagatggtttttcaacatttttaacataattaaaaccagaaacaaaatgattgttcaataatataaaacatagaaagaaattatctgtattcagtaggaccttatgataacatttgaaatggtagttaagamgctcagatggttaagaagatatgatatattaaaacaataggcaaaatgtccacctaagaccaaatcagtgaaaggagcatatttgttcctataattaaaaacatattaatgaagcttatgtaagggtggttaggttataggtgccctttttaaaactttg

SEQ ID NO: 53084 - DNA, 606 bp, Homo sapiens
ttttagattcatttctatctttgtcactataagaacattatttcttattgctatcaaaaataatttcagactttagtgatagaagttatgttttaatgcttgttagttgaaaacatgtaatgataacattgtactacaaattcaataatattttcaaacatttgtaactatagttacaatatcatttgtttccattagaaaagcacgtgtgtgtgtgtgtgtgtgtgcatacacatgtctgtgtctctaggtttgtgtctgtgtattatgggtatgtatagaagagatatttgtaagaattattttaaaccaatgctttaaatgtaataacaaagtagtcgatgtgcttagggaaaacaaaaagttgacaatgatttctaaaggaggaataaaattcaatgagaaaatttaaaaagcagtaaaatggataagcacatttgaaatgctcttgacaattgtggatgaygcatgctcttacagacactgctgagtaagtgccagggggtaggcaaagtgttttttttattcattatctcatttaacaggatgaaaagggtagaaaaagaatacaagaaaaataagttctttactttcaaataggtacaa

SEQ ID NO: 53085 - DNA, 606 bp, Homo sapiens
ttttagattcatttctatctttgtcactataagaacattatttcttattgctatcaaaaataatttcagactttagtgatagaagttatgttttaatgcttgttagttgaaaacatgtaatgataacattgtactacaaattcaataatattttcaaacatttgtaactatagttacaatatcatttgtttccattagaaaagcacgtgtgtgtgtgtgtgtgtgtgcatacacatgtctgtgtctctaggtttgtgtctgtgtattatgggtatgtatagaagagatatttgtaagaattattttaaaccaatgctttaaatgtaataacaaagtagtcgatgtgcttagggaaaacaaaaagttgacaatgatttctaaaggaggaataaaattcaatgagaaaatttaaaaagcagtaaaatggataagcacatttgaaatgctcttgacaattgtggatgacgcatgctcttacagacactgctgagtaagtgccrgggggtaggcaaagtgttttttttattcattatctcatttaacaggatgaaaagggtagaaaaagaatacaagaaaaataagttctttactttcaaataggtacaa

SEQ ID NO: 53086 - DNA, 471 bp, Homo sapiens
tcactcattatcccaagaacagcatgagggtaaccgtccccatgattcaattacctcctactgggtccctcccacaacatgtggggattatgggaactatcgtttaagatgagatttgggtggggacacagacaaatcatatcagcattcttcaatgcaatcaagttgatacctaataccaatcatcacaatctctaggtacaattgttaagactattttgagaaaaggtagtgagttttacatctgatttataaatctrgttaaacatagtttttattgaggaaaagtttagatatataggttacaataatttcgacatttcatatacaaaatgttccaagaatatcatgttaagagatttagcaagtctacagtagaatctaccacctatatttttataaaactccatggataagtttggcgtgcatcagcaattgagaatatatggcctagatgctagattcaaatta

SEQ ID NO: 53087 - DNA, 471 bp, Homo sapiens
tcactcattatcccaagaacagcatgagggtaaccgtccccatgattcaattacctcctactgggtccctcccacaacatgtggggattatgggaactatcgtttaagatgagatttgggtggggacacagacaaatcatatcagcattcttcaatgcaatcaagttgatacctaataccaatcatcacaatctctaggtacaattgttaagactattttgagaaaaggtagtgagttttacatctgatttataaatctagttaaacatagtttttattgaggaaaagtttagatatataggttayaataatttcgacatttcatatacaaaatgttccaagaatatcatgttaagagatttagcaagtctacagtagaatctaccacctatatttttataaaactccatggataagtttggcgtgcatcagcaattgagaatatatggcctagatgctagattcaaatta

SEQ ID NO: 53088 - DNA, 1598 bp, Homo sapiens
tgtcatcctactttttctaggcctgagggaaaataggacagtaatgaatggcataaaaatgactgtgctcaagggtgagttaggccaggcgcagtggctcaggcctgtaatcccagcactttgggaggccgaggcaggcrgatcacctgacgtcaagagttcaagaccagcttggccaatatggtaaaacttcatctctactaaaaaatacaaaaattagccggacatggtggcacatgtctgtagtcccagctacttgggaggctgaggcaggagaatggcttgaacccgggaggtggaggttgcagtgagccgagatcgtgccactgcactccagcctgggtgacagagcgagagtccgtctcaaaaaaaaaaaataagagtgagttaggatgcaagcattccataagttcacagtaatcagcttattttttttaaccttatggtgagtctaagcccttagaaaagacaaatattggcaataccaggaatgagtcaggattttctttttcctgttggtgaagtctatccaaattctcttcttcatgcataataagaccttttaaagattccagccggactccaaaatccttaaactgtgagagaacaaactagaacaagagaaattttcattagaaactattttcatgtacatataaaacagaattaaacacaggcttgggagctgctaaaaattcaagatgtttttggctaggcacggtggctcatggctgtaatcccagcactttgggaggccgaggtgggaagattgcttgagcccaggagttcaagaccagcctgagcaacataggcagactccatctctgcaaaaaataaaaaattagctgggcatagtggtgtgagcctgtggtcccagctttttgggaggctgaggcaggaggatcaactgaacctgggaggtcaaggctgcagtaagctgtaattatgccactgcacgccagcctgggtgacagaataagaccctgtctccctgtctcaaacaaacaaacaaacaaacaaaaaaaaacaaaaaataaaaaaaagtaaattcaagttgttttcaacacccagaagttcactattatctcaagaatcatagataaatattcagaagccccctgatttttcactcgtgcctttgagccttcccaaatggacagatcacccgcctgaggagaccacatagagagtcagtgagcactccgttctctcagtcccactagttaaatgtgcttttttgtttgtttgttttcctgctggtactgagatgtgatactgcaactccatggccttctgtgtagcttgttgacagctcctgcactaaaggctttataaaaagtgaatgaaggctgagagcagtggctcatgcttgtaatcccagcactttgggaggccaaggtgggtagatcacttgaggccaggagttcaagaccagcctggccaatgtggcgaaaccccatctctactaattatacaaaaattagccggccagacacagtggctcacgtctgtaatcccagcattttgggaggccaaggcaggtggatcacgaggtcaggagattgagaccatcctggctaacatggtgaaaccctgtc

SEQ ID NO: 53089 - DNA, 560 bp, Homo sapiens
cgaaaacacaaaagcaaaagcaaaaacaaaaacaaaaaaccctattgcttttgtttttttctaaaaagattaaatgccccatggtttaaaataagctggctctacaaaacattgaattcatcttttawtttctctgtgagcagaggctcctccttctgtttttctaccatctagagatgaatctatatttgtcaatattgacataaattggagacataaatcatgtaagaaccctagacaagccttcaaaataatctgagtcttgctcgtttctcttctcaattatgttgtcagagagagctacctgagatgaagtctctcaggaatagttagaacattgcacttctagagaagatggtgagacagggcaagactcacagtgagaataaaagcttcttctcaatctttcagtgtatctgtttctggtagatgaatccagaaaagattccagagccagggaagagctatttgagagggtagaatcactgtagatcagagtactaggtcatatgtttattagtcaccttctttggtcatattctcagtgctaagcctctgat

SEQ ID NO: 53090 - DNA, 560 bp, Homo sapiens
cgaaaacacaaaagcaaaagcaaaaacaaaaacaaaaaaccctattgcttttgtttttttctaaaaagattaaatgccccatggtttaaaataagctggctctacaaaacattgaattcatcttttattttctctgtgagcagaggctcctccttctgtttttctaccatctagagatgaatctatatttgtcaatattgacataaattggagacataaatcatgtaagaaccctagacaagccttcaarataatctgagtcttgctcgtttctcttctcaattatgttgtcagagagagctacctgagatgaagtctctcaggaatagttagaacattgcacttctagagaagatggtgagacagggcaagactcacagtgagaataaaagcttcttctcaatctttcagtgtatctgtttctggtagatgaatccagaaaagattccagagccagggaagagctatttgagagggtagaatcactgtagatcagagtactaggtcatatgtttattagtcaccttctttggtcatattctcagtgctaagcctctgat

SEQ ID NO: 53091 - DNA, 1100 bp, Homo sapiens
tttattttaatttattttattttgttttattttattttaatgtgactagattttgcctcactccaggctggagtacggtagcatgattatagttcactgtaacctcaacttcctgagttcaagtatcctcctgcctcagcctttctagtagtgagaccacagttacatgctataatgtcaaaataatttttaaaacattttcagtgacaaggtcttgcttaggcttgtctcaaacttctggccttaattgatcctctggcctcagcatccctagcagctgaaatttcaagtgtgagccactgagcccagctctttatttttataaatatttatctctttagttttttctgaagcattttcaacaccttcacctgaactttcaggctttcaactcacagttgattttatccattttgctattcatcctatttattctattgcttatatacttttgtaacatatttaatattttgagttttaaattcttgatacttatatgtatgtatttttagttgtctcttttgcaaggctgcgattctctctagagaagagaatgggctctatgctttcttgagaaaagcattttataacatgggagtaaaacagaccctgtggaaaataaaataaaaggcattttaatcatgattttttataaattgctatttgggagacacaaatttagcaagaagctatatcatgttccattcagatgaggttagggagggacttataaagttttactgcaagtttacacaagtgaaagattttagcacagtctatgatggacaatgtttgattgccagcttagactgtatctaggcaatcatcagcttaattcagcacagctttctctycaggaggtttgtgatcaggctcagtataaacaatccaagtcaaatgcagttgcctttttaggacatctgtaattttcccagttcgaacaggtaaaattccacctgggtgtgtatgagtattaattcaactcctcatgtcctcctagttgtctttagagacctctcaaataactatctccattttggatttcttttaattagaaataaagagcgcaaggattatcactggttgggaatatagaaaaa

SEQ ID NO: 53092 - DNA, 3211 bp, Homo sapiens
gggggcgggaacgacacaccaccgttcggcctcgggcacctgagggacaacccggagcgctccaggagcaccgcaagggcccaggcggagccgacgctcgcgcaaaccccccccgagagggcagcacgacgggccggcgggacggcacccccaccgccgcggaggggggccgcccgcaagtcgacaaccactggaggcgacagcgagggctgtctgccgcgtcagaggaccccgccggcccgcacccgcgaagcagaaggcggcgggcgggacggcgaggtcgggccggggtccgcaccccacgccttcccacacgcaccgccggcgggcggggagaggagagacgaggggacccccgcggggcggagcgagaaggacggtcccgttcgccacgaacgtccgcccctcgcccgtcgcggctcggacccggcccgggagagcacgacgtcaccacatcgatcacgaagagccccccgggagcggaggccggccggccggccagcgagccgatcggctccggccaaccccccactccggggaaggggcggcggacaaccccgcggagacgagaacgcctgacacgcacggcacggagccagcggggtggggttgtcgcggccgccccgggcgcccgcagcggagagcgcacgggggcacggtggccctcgccgccttccccgccgcccccgggtgggtcagagacccggacccgggccggcaccgggagtcgggacgctcggacgcgcgagagaacagcaggcccgcgggccccggcaggcggctcaagcaggagcgcggccggctagccgggtcaccggtaggccagagccccgcgcgcatccggaggcccaacctctccagcgacaggtcgccagaggacagcgtgtcagcaataacccggcggcccaaaatgccgactcggagcgaaagatatacctcccccggggccgggaggtcgcgtcaccgaccacgccgccggcccaggcgacgcgcgacacggacacctgtccccaaaaacgccaccatcgcagccacacacggagcgcccggggccctctggtcaaccccaggacacacgcgggagcagcgccgggccggggacgccctcccggccgcccgtgccacacgcagggggccggcccgtgtctccagagcgggagccggaagcattttcggccggcccctcctacgaccgggacacacgagggaccgaaggccggccaggcgcgacctctcgggccgcacgcgcgctcagggagcgctctccgactccgcacggggactcgccagaaaggatcgcggcagagggaccgcggcccggcccggggaccgctccccggcacccgggggacgggggcgggacggtccccggctccccacggggactcggaaacgaattcggccgccgcctcagacggccaggatgagcgcggacccgcgaccgggccgggaagggcgtccccagcctcccgcgccacgcgcggcgggtccccgcgggtcgcggctcgggcctcgggagctacggcgcgctggtcgaccggcccgggcagccccacgcccgccgcgggcccagaagcgcagcgacagcctctcccccacataaacctgcacgccagagctgtgactcacaagcgacgcgccacagctctggcgccaccgggccagccgggctgacgaccgcgggctttccggagctctgcctagctcacagcggggacggtcccctccctcggcagctgccaccgcagctccggaagccgagagcacgatctcaaagcggccgccagatggagcccgacaaccgccgcggacgtcagcgagacagatccggctggcagggcggcccgtggaccgcgaaagcgaaaccgtgagtcgagaagctcttcccgaggccgaaaacgcagcccctctgccccaaccccacacaaacggtgcccaaaacgcgtctctgcctcgaccgcgacagagtcagaagacaacccacggcgcgtgggtgtttggagatgcctctcggaagcagggagggagggagggagggagggagggagggagggagaaagaacacacaaggactcggtcgcgggtcgctgcagacacacggagaggcagaatgcgtaggctcttccggaatccacgcagagacagacggggggaggggagtggggaaaagagacagatggcgaaagggaaggagggagggaagggagcagggagggagggagggagggagggaggaagaaaatggagaaaagagagacaatttagaaaacgtagatacacaaagtaaacttctgaaacactccattttttaaaagacagacggaaaggaaagaaacacgaaaaagagagaaagaatgaggaaagaaacgaaggaaagaagggaaaaagaaacagagaggaaagaaaaaagaaggaaacacagggaacgaaagagaaataaagcacgaaggaaaaaaggacagaaagagagaaagaaggaaaggaagagaggaagaaaaacctaaagaaggagagaaaggaagaaaggaaggaagaaaaacacgaaggagaggaagaaagaaaacagagataactacgtacgctcgttcatttacacacataaatacgacgcttttcatacgtaaaataaacgtctttatcgacgatcccttctttatagagcgatgtgtatttatttgtataacacagacacctacatctatcatacagaagtctatttccatacaaccgatacgtatttaccatacgcaagagtattcaaygcagagatacacgttgtcgttgtttgcatataagcgtacagaaacgtttacattaatacatataagtaaacgcgtggaaacgaaagaaataaaaaagcgaaatgagtcaacaggccgggcacggtggctcacgcccgtcatcccagcacttcgagaggccgaggtgggcgcatcacaggaggtcgggagttggagaccagcctgagcaacatggagagacacggcgtgcctactaaaaacacaaacatcagccaagccaggcgtgggggtgcctccctgtcatccccgctaatcgggaggctgaggcaggagaagcgctcgaacccgggaggcggaaggtgcggtgagccaagatcgcgccattgcactctagccgtggaaacaagagtgaaactctgtctcaaaaggacgaaacagaaagaaagaaagaaagaaagaaagaaagaaag

SEQ ID NO: 53093 - DNA, 609 bp, Homo sapiens
aatgttgaatgaacttacattccttgttgaataacccaattatttatgatcatggcattttattgttgtttttctctctctctacaaaagctctacataatcattgtggaaattttacttgatttcaataagcaaagacaagaaaatgaaaagcacccaaaatcctaccgcaagagacaagtatagcgtccttttctgggcatatatctctcaatatatttaacattcttggaacagctttattgaggcagaacttgaatatgaaaaaattcacccrtcttaagtgtactgcttgacgagttttaacagttgtgtatagttatgtccctaccacactgaagatattgacatcatcctaaaatgttaccttgtgctaatctatagtcagtcctttcccacgctcctgattccagaaaacgatgatctgatttcagaatgtcatgtagatggaatcagacagtttgcagccgagtctggtttctttcacttaaaatgatgtttgcaagattcattcatgctgtagcatgtatcagtagtttttccttttgattgctgagtactattccactgtatgaatagatcacatgtgtttatccattcatcagttga

SEQ ID NO: 53094 - DNA, 641 bp, Homo sapiens
atcaccaacattggcaggactattascagcagactctgtataaagtagaccaatagcttggctttacaaagaaacattatcctcagggaaggaatcagcagaaaaatatgttcttgcagtgggatttgtctgaaaaagttctaaagttttcattgacataacacagtaatttacccaagcaagcctgagtaattgaaaaaaaaaaaaaaaactttctatggagcaacaagagaattatagcagacttgggaatgatccagagaaggtccagaacactccaagcccaataaggcaggacttttattggaacacaattttccaaagaggtggaggagatggcactatggatgcaacctgtgaaaatcctataagactgttacagtgaccttcttttctgatcacactggaatggtagcaaaatatttttatatgcaaatagatatcaatcaagtcatattgactataattctgagaaaattcatgagttctaattcattatgaaaattcttactattttttgctactaagctttgctttcatttagccagccgactccaatttgaaaggagcccttgggaaaatccacactcctcaggataaaccagactcacattatgagacatatttcttgcttactatga

SEQ ID NO: 53095 - DNA, 538 bp, Homo sapiens
aaagttagactactttactgcattcagaaagaaagttgggacacaggaataggtagaattgaacaatccagaagcaaagctgagaaaatgggttattttttttaactaaaaatagattaaaacctttaggaatctccaaccctacaaagattttggtaagtggatccgtccatttggtgcttctctgacagaatacctgagactgggtaatttataatgaatagaaattcattttctcacagttctgaaggctgggaagtccaagatcaaggcaccatcatctggagaggtgtttcttgctgtgtcktcacaaggcagaaggtagaatggcaaagaaacaaaagggggcaacaaggggactcacttttaaaacacattattcaaacccacgagtgtgaagcccttatgactttatcacctcccagatgtcccacctcctaacagtgccacaatggcaatgaactttcaacaaagcaaacatttaagccacagcagtgactctccccatatttaatttaaattaaaaaatactaaacca

SEQ ID NO: 53096 - DNA, 617 bp, Homo sapiens
ttttttatgttctagtcactggggtgacacgctataataaaagccgcttcttcgatgagtttcttttcatcagaatccagaggcttcaagtgtcagtaacttatttcccataccagtggagaccttaaaactctgccctctattgagcatgcaaagatgcccttctaaagtcaactcagacatccaacaattagaaacarttgtaaattttgagacaaaatagagtttaacaagagctaattcttaatgatatgctgtactacatttaatgtgaggacaaaccatatattagaaggtcacaaaaactattcttgtgactatatttatttctttatagttctttatggcaattgattgaggtttaaaagtcacagatggttgggttgaactttccttgcatttgtctctattggtaaagacattctcatacatactagactagactcctattggcttccaatgaagactttctggctgacatctcttaattctaccatagttctagaagccacacgttttcaatttcagcatgtcccaactgtggtatacattgctataagtataataaataaaatcttagagaatacatgaatagttttaaaaatttaagtgactat

SEQ ID NO: 53097 - DNA, 542 bp, Homo sapiens
tgctgaaacctaaatcctatacctaataacattatcaacagacaattgtgagtaaagacagattaaaatgagagcaaaattaacttattcaacaatcgtttactaagcacttactacacacaggtcactgtgctaagyagtgaagtcctcatggattgctgtgttaatcagggttggttaactgctgtggctctaacaaataatccccaagtcgcagtgacttaatagagtaaaagtttctcttttgtgcaaagtccaattcagatgttcctggcagctctcctccaagtggggactcaggaatttagcctccatgcatcagttggtttcaccatcctctagagccactacactagctactttacaaaggaactcatgggatgttttgtgagccagaactggaagtgatacacaacacttccacctacattccatagaacagaacttagtcacctagcctcaaccttactgcaacggaggctggaaaatgtaatcttcctatgtgtccaataaaaggaaatgaatttgatgaacacctaacc

SEQ ID NO: 53098 - DNA, 538 bp, Homo sapiens
gatctgcccacttcagcctcccaaagtgctaggattacaggcatgagccaccatgcttggcttgtgctctgtgtttcacactcccaacatcacacacaggagtcaacataaaatatgacaagaaatataattctcaaatggtgtcttacgtaattccagttgaatgactcagtagctctataaacactccactaacaaattagggrctcatttggatatttaccattttgtagttataatcctaaatgatggaaattggaaattggccttacttgctgactgtagtcacctctgtatttttctctcattctgctttgcaccaggctctaatactgcatagcccaagagaaaatccaggacttttcattaggaccccagacagtcaaggagcatattttactggaagcagctactcccaggtgcaaatctgatgactttatttgatgattatatattttaaatagccctggcttggaaaatcacttgccattatgagacccctccatctgtgtattttcatgaagaaaacactgttaaa

SEQ ID NO: 53099 - DNA, 538 bp, Homo sapiens
gatctgcccacttcagcctcccaaagtgctaggattacaggcatgagccaccatgcttggcttgtgctctgtgtttcacactcccaacatcacacacaggagtcaacataaaatatgacaagaaatataattctcaaatggtgtcttacgtaattccagttgaatgactcagtagctctataaacactccactaacaaattagggactcatttggatatttaccattttgtagttataatcctaaatgatggaaattggaaattggccttacttgctgactgtagtcacctctgtatttttctctcattctgcttygcaccaggctctaatactgcatagcccaagagaaaatccaggacttttcattaggaccccagacagtcaaggagcatattttactggaagcagctactcccaggtgcaaatctgatgactttatttgatgattatatattttaaatagccctggcttggaaaatcacttgccattatgagacccctccatctgtgtattttcatgaagaaaacactgttaaa

SEQ ID NO: 53100 - DNA, 538 bp, Homo sapiens
gatctgcccacttcagcctcccaaagtgctaggattacaggcatgagccaccatgcttggcttgtgctctgtgtttcacactcccaacatcacacacaggagtcaacataaaatatgacaagaaatataattctcaaatggtgtcttacgtaattccagttgaatgactcagtagctctataaacactccactaacaaattagggactcatttggatatttaccattttgtagttataatcctaaatgatggaaattggaaattggccttacttgctgactgtagtcacctctgtatttttctctcattctgctttgcaccrggctctaatactgcatagcccaagagaaaatccaggacttttcattaggaccccagacagtcaaggagcatattttactggaagcagctactcccaggtgcaaatctgatgactttatttgatgattatatattttaaatagccctggcttggaaaatcacttgccattatgagacccctccatctgtgtattttcatgaagaaaacactgttaaa

SEQ ID NO: 53101 - DNA, 599 bp, Homo sapiens
tgcgcacctttcatcaccggtccctactcagtgtccgcccagggcccagcactgaggcagcacatgctggctgggcacatgttgaaatgcataaacacagcctaggtgagtggcgagagacgtcccgtgggcctgccacaatcacagcttccagagagctgcatgcaagtgcacgaagcccagaaggaaacgggcaaaagtaaaatcatcgctgagttggcaggattctgggagactgggagactctttgctcaacctgagccacctaagcttttggtacttactgtccttattcttgctgtgcaacctcagggtgcagatgaagattcatgtacattctgagccctcctctctgatccacaacaggaaactgacctccaaattcttccactgttcccaactgagggccctggaatagytttattgctgaagaagcacaaatgccatatcacaggagctgtgttcttcactgcttattactaaagtataagttgactgctgaagccggcagggggccaggaaaaggaaattcaccatttgggggctctggggagtgaggggcaggaagccaagcagacacatgctgttgaatttcagga

SEQ ID NO: 53102 - DNA, 599 bp, Homo sapiens
tgcgcacctttcatcaccggtccctactcagtgtccgcccagggcccagcactgaggcagcacatgctggctgggcacatgttgaaatgcataaacacagcctaggtgagtggcgagagacgtcccgtgggcctgccacaatcacagcttccagagagctgcatgcaagtgcacgaagcccagaaggaaacgggcaaaagtaaaatcatcgctgagttggcaggattctgggagactgggagactctttgctcaacctgagccacctaagcttttggtacttactgtccttattcttgctgtgcaacctcagggtgcagatgaagattcatgtacattctgagccctcctctctgatccacaacaggaaactgacctccaaattcttccactgttcccaactgagggccctggaatagttttattgctgaagaagcacaaatgccatatcacaggagctgtgttcttcactgcttattactaaagtataagttgactgcwgaagccggcagggggccaggaaaaggaaattcaccatttgggggctctggggagtgaggggcaggaagccaagcagacacatgctgttgaatttcagga

SEQ ID NO: 53103 - DNA, 599 bp, Homo sapiens
tgcgcacctttcatcaccggtccctactcagtgtccgcccagggcccagcactgaggcagcacatgctggctgggcacatgttgaaatgcataaacacagcctaggtgagtggcgagagacgtcccgtgggcctgccacaatcacagcttccagagagctgcatgcaagtgcacgaagcccagaaggaaacgggcaaaagtaaaatcatcgctgagttggcaggattctgggagactgggagactctttgctcaacctgagccacctaagcttttggtacttactgtccttattcttgctgtgcaacctcagggtgcagatgaagattcatgtacattctgagccctcctctctgatccacaacaggaaactgacctccaaattcttccactgttcccaactgagggccctggaatagttttattgctgaagaagcacaaatgccatatcacaggagctgtgttcttcactgcttattactaaagtataagttgactgctgaagccrgcagggggccaggaaaaggaaattcaccatttgggggctctggggagtgaggggcaggaagccaagcagacacatgctgttgaatttcagga

SEQ ID NO: 53104 - DNA, 533 bp, Homo sapiens
cttggtgaagccattcttgatgtttgtacttagcttaacttgcttcctcttcttcctcccctattgaattctttgtacgctattgttatagctctctcaccataattgtgaatacttacttatattctctaatagactatggtcacagtaaaaacaaaacaagacaaaacaaaacaaaaaatcttataatttgtgtctgtctccaattgcccctcattctaacctttcttccacattgtttcagattagctaaaaactctwaattttcctttattgcttgtaagataaagttcaaactactcagaatagtacaggaggatctccagtctctatcccagtcccaatcgccccacccatgccatgcatgccgcactttaatgtataataaatcactcctaaatgcaccatggtagctgtacacttttgtttattttcccttttttgaagaatgtccttttccttctttccagatgatctactcctatttatgatttgaagattcatgaaacacacacacttttataaagcctccc

SEQ ID NO: 53105 - DNA, 578 bp, Homo sapiens
cttttttttttttttttttttttttgagacggagtcttgctctgtcgcccatgctggagtgcagtagcacgatattggctaactgcaacctccgcctgctgggttcacgccattctccttcctcagcctcccaagtagctgggactacaggcgcccgccactacgccaggctaattttttgtatttttagtagagacggggtttcaccatgttagccaggatggtctcgatctcctgacctcgtgatctgccctcctcagcctcccaaagtgctgggattacaggcgtgagccaccgcgcccggcaayttaatttcatgattccatctgggaatgattcctggcacataattattaaatctacaaaggtctttgatgaataaatgaatgcatttcctaacccttgaattcaatgtggaagaagctacttaacatgcagcagtgtatttgctggatttctgccaactaaatgaagctatttaaatattttctcatcctaagtgggacatggtcaactgttattggctacagatgaaaatgtccttcatttatttaatagaatattagaattcaatccac

SEQ ID NO: 53106 - DNA, 529 bp, Homo sapiens
ataggtaagatattctatgtttaaaagtaacagaaaaataaagtaaaagattcaaaagctctgttaaaattaatacaacatataaggccgggcgcggtggctcacctctaatcctagcactttgaggggctgaggcaggcggatcacgaggtcaggagttcgagaccagcctggccagcatggtgaaaccccgtctctcttaaaaatacaaaaattagccaggcatggtggcgcacacctgtagacccagctactcgggtggctgaggcaggagaatcacttgaactcgggaggcggacgttgcagggagccgagatcgtgccactgtactccagcctgggtgacagagaaagactctgtctaaaaaaaaaaaaaaaaaattaatacaacatataaaaattataaacaaaattgaatgacaaaagacaaacagaagtaattaagtgcaatgaagaacaaagggttaatgttaatatgkaaagggcttttgtaagtcaaaagaaaactactaacgtcataatagaaaaat

SEQ ID NO: 53107 - DNA, 623 bp, Homo sapiens
aaagaaaatataaaacagtagaagaagaaaaattttgagaaaggtaatagggctaggcttgaaaaataatgaagcatgttataaattgacagtatttaaaacaataatacatcttaaagcaaatacagaattcaaattaatacaatactatcattttgggggatcactgagattaaacaacacacttctaaataatacacaggtttaactgactgaaaatgaaaatatcaaaattttaaggaagcaggtaaagcagtactgagaaggaaatttacagcactaagcagttatattagaaaaagggaaaaagctctcaacctaarcttccatctttagaaactagaatataagcccaaagcaagcagatggaagacaagaaggctgagaacaaaaatcaatagagtttaaaacagaaaaaaacagaaaactctattcagaaagataagctagttcattgagacaatcaataaacttcataaaccattacctagactgagaaagaaaaaaagaagaggcaagttattagggagtaaaatagatatcactacagaccatcagacattaaaaagataaggtaattactaggaacaattctacacacaccaattcaataacttgaatta

SEQ ID NO: 53108 - DNA, 636 bp, Homo sapiens
tgttataattagcaaataacttggatatctcttagacttctcatattttccacatagtttccaacaaatctgcatccatattcacaaatttgtaatgatacaaatccctgggctgatacatttgaaaaggaagtctgtgcaaaatcataaagagaataggattgaatattcctatcacactgtattggaggggattgattaacacatttagaagagattcttacctcttctaaaacacaagctgatttttcaacataagtggatcaggaaatccttgttgacctcttaccagtatttaaacacaaacccttttgaaacttgctcttcctttggcttctagaactcctggttaacctcttaacttctccagtctagtctgacagctcttcctagtttacatgccccaaaagtgaaaatgtagatatttcccaggsctctctaaactctctgccaaaaacatctcatccaccctcattaatggcttaataccccctgctgaatttctgaatctctccactctccactctccactctggaattgcacagtctggcaaggaaaccgctagccactagtgagcacttaaaatgtggctggtgcaaaccgagacatactagaaaacacacaagagattttga

SEQ ID NO: 53109 - DNA, 508 bp, Homo sapiens
caaaagagatggtgggtgtgaatgtgtttggtaagctggagagctccgtacaagctccaattktaactgccaccgtacctgtgcaggagattcaaatctggcaggtgtgactgtgcatgtaacagacgctagacccctttgtgaaatcctgaggaacccctacaggacccacgtgatagtcctcatgtgagcagggaggaattttctcagaatactagatgtcagctttgctagttgataattatgagtgtttgctttggagcaccccatcttcttcgaggagttgaactagctgctggaatgatgaatgaaggcgtttttagataagtattatcacacaatgatccaatcgatacacataaaatctgctcagggcaacactgtgccttgtcatttttatgagcatatttacaactgagggttggtctcaggttatctactgtgtatgtaattcaggctcagtggcctcaagtccaagagctatggcatagcaactgttctggttaaa

SEQ ID NO: 53110 - DNA, 650 bp, Homo sapiens
atagaccagggccaggtagaaaagaatgaaagagaaagacagggagagggagagagagagagaggagaaagtgagctcagcgaattggccgggtgacacactgatgaaggggtcaaaggacactctgagttagtgccctcgggacacacagcgaacagtgatcaygaaaagagtgggctcaataattttccataaccttgctcaagattccatgcagttgccatacagcctttgaggtatggtcaacctatagtaagtgagtaaatgataaggggaggaagaaatggaaacctaaacatctactgcaatgaaaaccaacagcaatgtcagtaggagtaattcaaccttcgttgaaaacatgaaattgaacacactcttgttttccctggacctggcatctccaggtgtcaacacagaattaagcatccataattgctcaaagttacctggggcatgatgggtcttggtcttcttccacttcttggtacttttcaatttctgcaataagttcagacatggacagacatattaagctggttctcctacacacataacaatccactgtctaatcctcacacagggacttcaggctcctcagcatgagaataggacactgtgagagatagtcttcaggaggcctgaaggctgat

SEQ ID NO: 53111 - DNA, 650 bp, Homo sapiens
atagaccagggccaggtagaaaagaatgaaagagaaagacagggagagggagagagagagagaggagaaagtgagctcagcgaattggccgggtgacacactgatgaaggggtcaaaggacactctgagttagtgccctcgggacacacagcgaacagtgatcatgaaaagagtgggctcaataattttccataamcttgctcaagattccatgcagttgccatacagcctttgaggtatggtcaacctatagtaagtgagtaaatgataaggggaggaagaaatggaaacctaaacatctactgcaatgaaaaccaacagcaatgtcagtaggagtaattcaaccttcgttgaaaacatgaaattgaacacactcttgttttccctggacctggcatctccaggtgtcaacacagaattaagcatccataattgctcaaagttacctggggcatgatgggtcttggtcttcttccacttcttggtacttttcaatttctgcaataagttcagacatggacagacatattaagctggttctcctacacacataacaatccactgtctaatcctcacacagggacttcaggctcctcagcatgagaataggacactgtgagagatagtcttcaggaggcctgaaggctgat

SEQ ID NO: 53112 - DNA, 648 bp, Homo sapiens
tcagccctgcctcatcaaatactcagattgttcatggtagtgaggattttagacgctgaaattagagtgaaggatgaaatctacaagatctacaaaattgagacaaaatcagagttgtgtgaatttgtcacatctgcccagatccaacatcttgagagtaggattagggcgccacaggcatggcctgagactaggaagagagccttgctcactgacccatcccttgtctgggcttccaagtggaactagagtttcactcaacctacatgtgcctatagktcctccctgtggcaatgacatctctcagctcagtaagggccacttgcagtaggaatatgaccctaaccagaagactcagtggatccttatcaccttcatagaaaggtactcaccatccatgtcaacagccaagccaacacgctgttgctccaatacataaaaggcacttctgtagggctggcatgagtcagtcagttcaagacaacctgaaggagttgaataacatctatccagtgagtcctgcaagacttcaggccctttctcatccagcagctccctgctgagcctggaaaagtgggaaaaagtaaagaataagccagggggaatcagaaaccacacagccccagctagatttcatggctaacgtaa

SEQ ID NO: 53113 - DNA, 644 bp, Homo sapiens
tctcattatctgtgaccatgagtaccacatgagccaaagtatgatacattagccaaaaaatacatatgaatatagtacraacttttttttaacaagacagtgtcaaggtcaggggtgttaataatgccactgttctttgctcaagtcagaccacacttgaagtatcagtttcaatttcgttactacaagagttcaggaactagctgacacgttccagggatactgggaaaggatttatgcatttggaaagagatggaattttaagacttttgaaatttttttcccatttaagattctatagttctctgattttcatgttgctcttggacattaaaaaagcaatcatattataaacagagaaaccacagatcagagagctcaagtgacatgccaaggccctacaattggttaatgccagagttttgtccagaagccacttcataacccacacgcttattaaagaggagtagacagatgagatctgtccagagaactgcaacagggatgacttgggccgcacagatcatttccaaatgactcatgtttaaagaaccagagaaccttgtgagggcgagagagcataatgttgttatcaaataaagctgtcataggaagaagaatgccacttgttgtgattagctgaa

SEQ ID NO: 53114 - DNA, 1105 bp, Homo sapiens
ttgggccattaaagtaagtcaataggtaatgggtataatgcattaatgaagaatgagggataaaaattcgtgttttcagagaaatggagtcactgccaggggaaactgccaagctagtgaatagtggttgcctatttggaagtggagctgggtggggtgtgcatgaagcaggacattcttgttttcaattttaagtgctaagtactattttatttttaaatatgagcacatattactttaggaaaaatgcatgcacacacacacatggctctagctctggttctgagggatgctgaatgatttttcaaatgtgggtgggktctgcacacagtctgtagatgggacatcaatacggaatggatgggctgctacctggaggctagagtgtgtttaaacatacagaaaattatgctgcctttggtctgttacatctccgactgtcacgggaggcaaacattctcctctttagcccagcacacagagagtgcttgtgacttgcacccaagtgctttacttcagcatactattctcgggtttcctcataaaaagttattggggctttcagaatattagaacatgagtttttctgttacataaagattcagcttagcacaattaaaaaaaagatacgtattttttatttgaaaattgtcttgcagtctgccattttactcccaccaaagcaacgtgttgaatgtttaaaaacctttgtcaatatacagagtacagcactcaaccatgagagagtaaactgctggttgctcatgtgaaaatctccactatgagtatctggtatttttctcaagaccttgttgaaattgaaaactgcagaaaaataaatatatttttctttttactgcacaaaacctcttgctcaccctccccatggtagttaaatatgtcagtacatcatgtcttcaaagccattttccttcagcattatttcttttgtattgcatgagtcacaaatcaaccttttgcttttcaacatcagaatcatagcttttctcctatgattgccaagctgaaggtacagtggagcaaaataacatgttttgtacacccagctctctgaagggtggaggggaatggtgcttcaagcccc

SEQ ID NO: 53115 - DNA, 532 bp, Homo sapiens
ctctattagttccactgggggaaagagaaagaaacatgatgaaaattgtcatttaaaacagagaaagagggaaggcacatgaacaagtggtcacagagcaaagagaaaagccagaaagggaccagaaaaaagaaattccttaaagaaaaagccaaaagtatcaaaagcccgacaagacaaatttgattatttgaaaaagatgttgacaatggcttcataaaagttgtgttaatttttttaaagaagatttaatgagaatggtgcaatgagaatcctgaaaaggtaataatttgagtagtacatggaaggcatgtgaatatattgttagtgtagacaacactttggaaatatttggttgtaaagagttagaaagaagttagaaaggttgagggagatctagggtcctaatagagatttttttgtgagtgatttttgttttggtttgaaaatggaaaaatgtgattataaaaaatgtgtaaggkatgattatattagaaagaattattcaagagagaggggctaggtataaaaa

SEQ ID NO: 53116 - DNA, 538 bp, Homo sapiens
tggtcccagaatttttttwaaaaaacttcctgttccattctgatgatcaccctcagatgaaccacaacccagcagaactggagggacagtgcaaggctgtacccaccttagccagtagagccacttccatgtgttgagatcctacagcctctgctgccccctggtggtaactactaaacttaccacacccctctctagttcaatgacatcaagaaatatctattgaggaccatgtcaaaagtatgacataagaaactgtgacataatgccatataatatatttcttcattcatgttttggaagtcaagaaatataagtcatcctccttgaaacagctccaaatacctaactaaacacttatatatgaaactgccactaaaattttgattcaaaatgcagagaaagcaaaaactaatctgttctaatataggaaatttaaaacaacagctatacagagaaccaataataaatactgataaagtaaaattgattattttcttatcagtaatagtattttttctcttttcagaacagatac

SEQ ID NO: 53117 - DNA, 592 bp, Homo sapiens
gcctaccatgccccataacctgttttaggcaatgaaaatatagcaacaaaaaatgaaaggaaaaaagttcttccttcatagagttacattctagtggtatgaaacagggaaactaacaataaatgaataataaatttatggcaaatcagatctattgttttaaaaaagctataaagaaaaataaaacagagaatttaaaaatgtrgcattagaggaagaagaccagaaagttttgcagataagattttgctagaatgttgatatcctaacaaagacataaaagagtagaggagagaggaataaaccctcgttgtgacaaatgcacagattaagatttgaggttgttagtgaagccttctcaagcctattctaattaacatacatcctttcctattttcttttcttcttcctttttttttttttttttttttagagacagagtcttgctctgtcgtccaggctggaatgcagtggcagaatctcagctcactgcaacctctgcctcctgggttcaagcgattctcctgccttagcctcccaagtagcaggattataggtgcatgccaccaggcccggctaatttttgtatttt

SEQ ID NO: 53118 - DNA, 592 bp, Homo sapiens
gcctaccatgccccataacctgttttaggcaatgaaaatatagcaacaaaaaatgaaaggaaaaaagttcttccttcatagagttacattctagtggtatgaaacagggaaactaacaataaatgaataataaatttatggcaaatcagatctattgttttaaaaaagctataaagaaaaataaaacagagaatttaaaaatgtggcattagaggaagaagaccagaaagttttgcagataagattttgctagaatgttgatatcctaacaaagacataaaagagtagaggagagaggaataaaccctcgttgtgacaaatgcacagattaagatttgaggttgttagtgaagccttctcaagcctattctaattaacatacatcctttcctattttcttttcttcttcytttttttttttttttttttttagagacagagtcttgctctgtcgtccaggctggaatgcagtggcagaatctcagctcactgcaacctctgcctcctgggttcaagcgattctcctgccttagcctcccaagtagcaggattataggtgcatgccaccaggcccggctaatttttgtatttt

SEQ ID NO: 53119 - DNA, 556 bp, Homo sapiens
tattttgaaaagagaagggtggcgttattttaaaccaagccaaactaaggagtgaactttcacacttgagctgccgcaaggtagccatgtctctgatgctgggccagcaataactgtcaatccgagcttcctaacctggttggcaaatatttcaatctacatggcaatctgcatctgcctcctttcctgctggacttaaagaggtggcggaaatcgataaatccctaaattggggcaaaataatttgtttttcaatattttttaacagactggaactaattgaaacgtaattggttagaaattgtttttatatgacaaacagacttgaagaaatacagctgcacatattcaactgccatcctatgcatttaccattctaatgtctgttttactaatatttatcacaaagcataattagattaagacagtaagacctctaaaaagtgacacataattacagagaaaaagaaaatactgagtcataaagaatacatttttccattcaagtggattccactgtctttattaaaarccaaaagtattcttgagtaagatt

SEQ ID NO: 53120 - DNA, 2401 bp, Homo sapiens
aaacaaacaaaaaaacacagagataagccaaggctccagctgagatgtaaatggtatttacatcctttgtattctgcttcaagaaaacaaaattattttcaccaaatatcaaatttagagtgaatttaccccataaagacagaggagaatcttttcaaagtagttgaaaagatcagccataaatgtaaagagctagacacctatacagtacacatcaaawttttttcagaaaatttctaaagaatcactggctattatcaaagtcagctttttttttcatggccagaaagtttatgataataggttgatagctctaccggctgaaagaaactttagtaattaagaaaagaaaatgcatgcattagtcaagaaagtattaagaaattaagcatttcggtaagtatgtttacatcctgatgcttcaaatggggcatttgacagaggccaagaggaccatcaaggaattttttggttgaagagatccccaaggaaaggatgaacatcgagctatgatgacatggggatccaaggtcccgtgccccatgtagaccagatacgacctccttcatcccagggtcaggacagtaagagcaggatccctccaccagtccatctccatccagttacagcaggatgcttccccaagagctagccagagcttgtcctggtgctccctgtgctggccgatgctcagaaccttcttttggtttaacacttcctccattcatggttccacagcccaggatgtcattctgtgagagggcagatgctacaagggggtcctgggggctggtttaagaggactccctcttccccttattctgaaaatgaggatgaacttacacagaatcttctccactgagggacttccctgacacagcatatcttccactgggcaacaaaaaatgtctctacactaagtagtactaagtaataaacactaagtagaaaatgcaatatagaatggcataagaacagtctgtatatgctgttaaatagagatctccacgtaatgaaccactttctcaacaccagttacaaaacagcccattttcttcatgggtttatggtgccacttttattgtatattaagttcccaaatagacttgggtgtattctgggcattctctcttattccactggtctatcaaagatgaactgcagatgacttaaagatttaaacatgaaagttaaaattacaaacataatagaagaaagaataagggagtaactttgtgacttggggtatgggaaagactgcagtctacaaatcaacaagaaaaagatgcaaacccattagaaaacaggcaatggatctaaagaggtaattttctagaagaaatgcaaaaggctaacacacatatgaagagatgcccagactcagtaatccatggaaatgtaaatcacagcaagaatgaaattatgctttatacctattagtctcagcagcattttgaaggctagataatggtaagcattggcaggaatacagggatctgcactggtgtgggagtgagactagcaaagtctttctgaagagcaactggtcaaattaagtacacgcatgccttgagccccatcagttccacttctggatgtgcaacccaaagaaaggacacatagcttcataaccaggtatgcataacggtgttctctgtggcgcaatttatagtgggaacaggacttgaggcaagagtactctataatggttaaaatcaatggacttgaaatatacacgaatgaatctttaaaagagtgtcagtttaaaaggtgaaaccgaatgaggtaaagaatcctcatttatgttaaatcaaatatacatgaaccccaaatgacagaacacattctggaacatttacaaacaaacaaaaaatacatatgaaacgctttaaaatggtttcctacagtcagaggtggggagaaaggcagatagaaatggggacagaaaggaataataaaaccagaaaaagatccagcacagggcaacagtgataatgtgccatgaagtgagaagttggattcattcaactttaacacctaaggattatgacaaaaaaatactactgtataaagtacaatcttacattgccatgcagttccacacaattcctgtaagcttttaaatccaacattttcattattttaacaagatactgtcagtaacttatgaaattactcagttaagtgtactggtttaagaatctaattatatctgtttataaatacacgatgaggtacagtaagacacttaagaaaagaaagcagatttatcaattcatggggctatacgctctctggacctaaaactaaaagtcagatgcataagaagcgatggcacagctgctgcattgactgcacgaccatacatgcagccacatgaggtcttgagattggaaaggca

SEQ ID NO: 53121 - DNA, 2401 bp, Homo sapiens
aaacaaacaaaaaaacacagagataagccaaggctccagctgagatgtaaatggtatttacatcctttgtattctgcttcaagaaaacaaaattattttcaccaaatatcaaatttagagtgaatttaccccataaagacagaggagaatcttttcaaagtagttgaaaagatcagccataaatgtaaagagctagacacctatacagtacacatcaaaattttttcagaaaatttctaaagaatcactggctattatcaaagtcagctttttttttcatggccagaaagtttatgataataggttgatagctctaccggctgaaagaaactttagtaattaagaaaagaaaatgcatgcattagtcaagaaagtattaagaaattaagcatttcggtaagtatgtttacatcctgatgcttcaaatggggcatttgacagaggccaagaggaccatcaaggaattttttggttgaagagatccccaaggaaaggatgaacatcgagctatgatgacatggggatccaaggtcccgtgccccatgtagaccagatacgacctccttcatcccagggtcaggacagtaagagcaggatccctccaccagtccatctccatccagttacagcaggatgcttccccaagagctagccagagcttgtcctggtgctccctgtgctggccgatgctcagaaccttcttttggtttaacacttcctccattcatggttccacagcccaggatgtcattctgtgagagggcagatgctacaagggggtcctgggggctggtttaagaggactccctcttccccttattctgaaaatgaggatgaacttacacagaatcttctccactgagggacttccctgacacagcatatcttccactgggcaacaaaaaatgtctctacactaagtagtactaagtaataaacactaagtagaaaatgcaatatagaatggcataagaacagtctgtatatgctgttaaatagagatctccacgtaatgaaccactttctcaacaccagttacaaaacagcccattttcttcatgggtttatggtgccacttttattgtatattaagttcccaaatagacttgggtgtattctgggcattctctcttattccactggtctatcaaagatgaactgcagatgacttaaagatttaaacatgaaagttaaaattacaaacataatagaagaaagaataagggagtaactttgtgacttggggtatgggaaagactgcagtctacaaatcaacaagaaaaagatgcaaacccattagaaaacaggcaatggatctaaagaggtaattttctagaagaaatgcaaaaggctaacacacatatgaagagatgcccagactcagtaatccatggaaatgtaaatcacagcaagaatgaaattatgctttatacctattagtctcagcagcattttgaaggctagataatggtaagcattggcaggaatacagggatctgcactggtgtgggagtgagactagcaaagtctttctgaagagcaactggtcaaattaagtacacgcatgccttgagccccatcagttccacttctggatgtgcaacccaaagaaaggacacatagcttcataaccaggtatgcataacggtgttctctgtggcgcaatttatagtgggaacaggacttgaggcaagagtactctataatggttaaaatcaatggacttgaaatatacacgaatgaatctttaaaagagtgtcagtttaaaaggtgaaaccgaatgaggtaaagaatcctcatttatgttaaatcaaatatacatgaaccccaaatgacagaacacattctggaacatttacaaacaaacaaaaaatacatatgaaacgctttaaaatggtttcctacagtcagaggtggggagaaaggcagatagaaatggggacagaaaggaataataaaaccagaaaaagatccagcacagggcaacagtgataatgtgccatgaagtgagaagttggattcattcaactttaacacctaaggattatgacaaaaaaatactactgtataaagtacratcttacattgccatgcagttccacacaattcctgtaagcttttaaatccaacattttcattattttaacaagatactgtcagtaacttatgaaattactcagttaagtgtactggtttaagaatctaattatatctgtttataaatacacgatgaggtacagtaagacacttaagaaaagaaagcagatttatcaattcatggggctatacgctctctggacctaaaactaaaagtcagatgcataagaagcgatggcacagctgctgcattgactgcacgaccatacatgcagccacatgaggtcttgagattggaaaggca

SEQ ID NO: 53122 - DNA, 608 bp, Homo sapiens
gaggacttacagggagaagtaggagaggggctagggataaaagactacaaatatggtgcagtatatactgttcaggtgatgggtgcgccaaaatcgtacaaatccccactagagaacttactcatgtaaccaaatatcgcccgtaccacaataacttatggaaaaaatttaaaaaatattatcgccaacactaaacaactttgatttttgtaaattgcacacgtgatttatttcatcagtatgtttgatatttatctccaaaagataagtttcttatattaaccwggtttcatgatcttttaaaactgttcactgtcctctgaacatattttagtctccttgtatttctctacctgtgacatccagagccatacttcaataagtggaatgaaattaatccacagagaaaagttatcgtcaccattctgactgcacatatacacttctagataactacctgtttaattgcagaataaaagagaatctatttgctcctttgtagctatcttccaatgttgattcattttaatttaccaatcaggatacttctgacattttcttatgttcgacatgttctcagagcctctactcatatatttttatacaca

SEQ ID NO: 53123 - DNA, 1740 bp, Homo sapiens
  misc_feature (1)...(1740): n = A,T,C or G
cattnnnnnnnnnnnnnnnnnnnnnnnnnnnnnnnnnnnnnnnnnnnnnnnnnnnnnnnnnnnnnnnnnnnnnnnnnnnnnnnnnnnnnnnnnnnnnnnnnnnngtctattaatantcactagccaacatagtatttttgcagcctaagagttcattatttaaaaataaactaaagaaatatgtcacctttgttctgccttggtcttaagagagttgtttctagagaaacaagttttatggttctgttttcatttgtttcattttttgaaattcaggaatacacagagagaaggcctagaggttagagcactagaatgcaaaagaggatttattttcttaagtttaggtagataagtcagctcttttgaatgttttacttatttttgcctgagttcctagctttacgcattactaggaatattttcttttacaggagggagaagggttttgagggagggggtgggtaaggcagtagggatggggttaggtaggggagaacatttctgaaaaagaacttataatgaagctacaaatccatccttatttcttattcagtgctgaatactacctcatgcaaaatattggtgtggctgcaaatttccctctgaagctgacacaattaaggatgaattaccataacatcttcatttttcctcatttcattgcctctcatacagttttctccctctgatttatttcattttggtagtggattttgaattaagtatttatttctctttgcaagtgactatttgattaacacattaaaaattttttaaaaatttcccctttaagttatgatggctgcctatagaatttagactgtttctcaccctgatccatcctgatattatgttattagctacgatttcaaggtcactttgaagtcagacttcacagttttctacaggtgtatttcttgctatgctcagtgggaaccagggagcagaaaagattgtggaaagtgggaacattaattgtcacgtggctgttgagccagagaggccactggctgccatgcctcttaccagccaagttttaaatggttagagtggcattggcattgattttgcttttctcttgggttttcttcatttcttttcataattcatcttcaagctatagatccatccttcttccctatccaaatactttgttctcagtgggcagtcagatttttttggcttccaaacctcactgagcatgttcagagaattcctctcattaaggaaatatttttccccacaattgtctgatgtatgagtcctctcagagcacaagtgcatactaggaaggctttgtaaactggttttgtaggcaggctgtacctgcaaataggcattctgagcaaggatcctaaatttccctttggctcatgtccccccccgccccaccccaccttctcctttttggcatgtctgrtgaaaagctacaaggttcacagggccaaatattctcccttttgttctctaaacatgttgcacacataaactcaagggagtgatttcggttcctaagtcctagggagttctattccatttattctgatgtcccttttaaggaggagttggtgttgaagtgtgacatgctttaatgataactgctttggcaattccccagacaggtatacttcttcatccaaaattgcacctaaggtgttcatttagacaaaattgttcgcttagtgatccactgatctctaatcagaaatatttttaaaaaatacaatttagatctct

SEQ ID NO: 53124 - DNA, 546 bp, Homo sapiens
taagtggtcctaagaccccttatcctacaaaattgacacaaatactatgaggccattttatgtatgcatcatagcctgggtatgtcaggctgaattacttttaaggcaggaaggtgtcactgaaatcacatttgccaggcagtatagagtccttcagtctsgtcctccctctcttgatgaccagctttgtgagtctgagtaagtcccttagcatctctggacctctgtttcatcatctactgaagggcaacctatcaagatacctgattgtgaggatcaaacgaaacaatgtttgggaaggtgctttgaaagatgtgaaagtgctctctaagtatgcagtattcttttcgctggtagcttggaagaggacatatgcctcccagtgcatcagatttctaaccaaagagggacttaagcaattcatggaaaaatgaaatcaacttaagaaatgttacttatagccttcctcccagccacccaccagccatcatccatataccactctactgccctaaaatatttcaatagccagcaaacatctgacca

SEQ ID NO: 53125 - DNA, 418 bp, Homo sapiens
ccatgttatttgcatgtagttagaaacaatgagccatccttaccatagaatggtggtaactgtcctaaaattcagcttcccagatgccagccaagtgcctaccttgtgaacagttcttttgaagtattacagtcgagacgactaagttaactctttccggcacartggtagttctatatattcatagagttaggattacataagtgtatcgctcttttagagatacacttaagttctgtatatttaattgtatgtaaattttacctcaaaagaaaaaatctgtaagcaatattaatgctatacattaatatacatatcaattttactaataagcatatttaaagatggagtgaactgatgatgtgtgcaactattttgaaatgcatcaaaatttaggtggattgatggatgaatagaa

SEQ ID NO: 53126 - DNA, 1342 bp, Homo sapiens
cctctaagtgtgaagcccttgtagagtgtggaacaaatgaggcacaggatggacaagttcagatttattcctgaaggggccccacctaccactaaaggaagcatggaggattagaggccacacatggaagctgagagaacaggtcgcaggttgctgcatataacaataayaaaaatgatgactctaatcacaactagtagttcttgtgcactcctactatgttaattatattagcaatcctcccaaattaaggatgccccatggtgaacaggtagatacatagatcaatgactgagaagatgcaatttgctcactcctttctagagtaggatttttaaaatgtggggcccatgtttgagttttacactgaaaatatttgcaaaacattgggtacctttagtttctgagggagggaatctatagctttggtcacacaattctaaggtcccagacacacctggaccatcttacttggagatgatgaaactatttctgtgaagctgactttgccttgatgacattaacaccgggcggtggagagaatgcattctgttccaggtttctccacttcacagctgtaggactgagtcaagttatttaactgatttgtccctcagcttccttatgcataaaatggtgataataataaaacaaggctagctgtaagtattaagttagttacagagcataaactgtttagacactccttggcctatacaggtactgtttttatcattagacctcattgtagttcactctaatttcatagagggtctgggtgaggctgttacttaataactcacacaggttatgaaataggaacattgtcctcaaaaaccagaatcaggattactgttctttggccagatggttattttaaactttttagacatctgaatactataacaagttttccatgtttgtactgtctgctagaatgctcagagtctaatttgaaacagaaactctaggaaatataccagacattgtatgtattaattctttattttttagagacaaggtcttattctgtcacccaggctagagtgcagtggtgtgatcatagctcactgcaactcataggctcaagcaatctcctacctcagtctctcaagtagctgggactacaggagtacaccatcatgcctagctaattaaaacaattttttggagatgaagtcttgctatgctacttaggctggtcttgaactcctggccttgagcaagcctcccacctcagcctcccaagttgtggggtttagaggtgtaagccactgtacctggcactgtaagttaaattttagcgctgatctttcccttggcttcatctttacatcctcat

SEQ ID NO: 53127 - DNA, 625 bp, Homo sapiens
caactttcactctgtctttgtacacatacatagcttcagtgacagcaaatctaaccacctcagacaaaactacaccaacattcccaagtgtacaggtctctttttttttcatactctctcctcagcctcaaatacgcttttccccttttcatagattaccaatattttaagacccataacaaatagcacctttccagcaccatattttcaaataaaatgtattatcttaagatttacaatatgttactaattgtacacartatttatttattccaaattgaaatcattgattccatcaacattttcggcactaaatattgagcaggcactgggctaggtactgatgttacacacagaaaagacagtctctcccctcattaagcatttttgatgtgcattttctcacaagctcattaacacctcattcatctttgcattcctcagtgaacatcccagagcatcttaagcatgtaaagtgttgaaccatatctcggtgtctacagatggaaaagaggatcctaaaagatattaagtgctatgtgctaggccttgtgtaagtaagtgcttttatataatatactattcacatcaaataattagaacaatttagtataactagctttct

SEQ ID NO: 53128 - DNA, 625 bp, Homo sapiens
caactttcactctgtctttgtacacatacatagcttcagtgacagcaaatctaaccacctcagacaaaactacaccaacattcccaagtgtacaggtctctttttttttcatactctctcctcagcctcaaatacgcttttccccttttcatagattaccaatattttaagacccataacaaatagcacctttccagcaccatattttcaaataaaatgtattatcttaagatttacaatatgttactaattgtacacaatatttatttattccaaattgaaatcattgattccatcaacattttcggcactaaatattgagcaggcactgggctaggtactgatgttacacacagaaaagacagtctctcccctcattaagcatttttgatgtgcattttctcacaagctcattaacacctcattcatctttgcattcctcagtgaacatcccagagcatcttaagcatgtaaagtgttgaaccatatctcggtgtctacagatggaaaagaggatcctaaaagatattaagtgctatgtgctaggccttgtgtaagtaagtgcttttatataatatactattcacatcaaataattagaacaatttagtataactagytttct

SEQ ID NO: 53129 - DNA, 672 bp, Homo sapiens
ctggtcatggtcttttttttggttggtaggctattaattactgccccaatttcagaacttgtaattggtctattcagagatttgacttcctcctggtttagtcttgggagggtgtatgtgtctaggaatttagccttttctactgtattttctagttaatttgcacagaggtatttatagtatcctctgatggtagtttgcatttctgtgggatcagtggtgacatcctctttatcatttcttattgtgtttaaygcttttatatggaaatgtaaaatgatggtacacaatattgtatcattatttatttgattcttctctcttttcctctttattagtttatctaatggtctattttgttcattttttcaaaaaagcagctcctggattcattgatttttggagggtttttcatgtctctatctcattcaattctgctctgatcttagttacttcttgttttctgctagggttagtttgctcttgcctctctagctcttttaattgtgatggtagggtgtcaatttgagatctttttagctttctgatatgggcatttagtactataaatttcccgcttaacactgctttagctatgtcgcagagattctggtacattgtctctttgtttttattggttttaaagaaattatttatctctgtcttaatttc

SEQ ID NO: 53130 - DNA, 672 bp, Homo sapiens
ctggtcatggtcttttttttggttggtaggctattaattactgccccaatttcagaacttgtaattggtctattcagagatttgacttcctcctggtttagtcttgggagggtgtatgtgtctaggaatttagccttttctactgtattttctagttaatttgcacagaggtatttatagtatcctctgatggtagtttgcatttctgtgggatcagtggtgacatcctctttatcatttcttattgtgtttaacgcttttatatggaaatgtaaaatgatggtacacaatattgtatcattatttatttgattcttctctcttttcctctttattmgtttatctaatggtctattttgttcattttttcaaaaaagcagctcctggattcattgatttttggagggtttttcatgtctctatctcattcaattctgctctgatcttagttacttcttgttttctgctagggttagtttgctcttgcctctctagctcttttaattgtgatggtagggtgtcaatttgagatctttttagctttctgatatgggcatttagtactataaatttcccgcttaacactgctttagctatgtcgcagagattctggtacattgtctctttgtttttattggttttaaagaaattatttatctctgtcttaatttc

SEQ ID NO: 53131 - DNA, 672 bp, Homo sapiens
ctggtcatggtcttttttttggttggtaggctattaattactgccccaatttcagaacttgtaattggtctattcagagatttgacttcctcctggtttagtcttgggagggtgtatgtgtctaggaatttagccttttctactgtattttctagttaatttgcacagaggtatttatagtatcctctgatggtagtttgcatttctgtgggatcagtggtgacatcctctttatcatttcttattgtgtttaacgcttttatatggaaatgtaaaatgatggtacacaatattgtatcattatttatttgattcttctctcttttcctctttattagtttatctaatggtctattttgttcattttttcaaaaaagcagctcctggattcattgatttttggagggtttttcatgtctcyatctcattcaattctgctctgatcttagttacttcttgttttctgctagggttagtttgctcttgcctctctagctcttttaattgtgatggtagggtgtcaatttgagatctttttagctttctgatatgggcatttagtactataaatttcccgcttaacactgctttagctatgtcgcagagattctggtacattgtctctttgtttttattggttttaaagaaattatttatctctgtcttaatttc

SEQ ID NO: 53132 - DNA, 678 bp, Homo sapiens
tgcccttattccttgtaaatacatccaataatttaggtagatttagatgctaacagcaaagtcagaggacagtcaggctatctcccccatttgtctactcaattaaatgttcccatcagtgcctttaatatttttcagccaatagtaggctgggttcattgtcacatctaccccccatgatttctctttattgttctgatttatgatatgatcaaaattgagaaattagccaatcatagaatttgacgtttaagggacaaccattgggagattccttcacttgtctctacttgctcagaatcagtagagtaattgactaacatgtccagactagaaaggttgtattagtctgttttcaccctgctgataaagacatacccaagactgggaaatttacaaaagaaagaggtttaatggacttacagttccacatggctgaggagatctcacaatcatggcagaaggcaaggaggaacaagtcgcatcttacatggatggtagcaggtaaaaaragagcttgtgcagggcaactcccatttttaaaccatcggatcttgtgagacccatttagtatcatgagaacagcataggaaagaccagaccccacgattcaattacctcccattggctccctcccatgacatgtgggaattgcaggagttacaattcaagatggga

SEQ ID NO: 53133 - DNA, 553 bp, Homo sapiens
caaattaggatattttcaacttatgatgggtttataaggatgtaacctgtcataattcgaggaacacctataarcttaaagctggagcagggattaaaaataattaacactggaaatttttaaaatatgggatctaagtgccagatcagaagttgtacttaaggattttatgtgcctctcctgtgttagctggaaatgtcaccacaataagaaagaggagactctagaattaggaagaaatacttctgaattactgtcagtaatatgataacagttagcataaattgcttgattttactgtgcttcactcaccacactgaaaatggggtgattaaaaataccttcttgatagaattgagttttcttctttatgatagttttgttaataagtgatatgtaatttgaaattataatattcaaaattcaaattccatgatcctaagcctttctaagcatacaactttgcttatgaatagacaagactgttcaaatgatgtggctataatagcagaaggctttattatgaccttatgaacagacatttcctggatgg

SEQ ID NO: 53134 - DNA, 587 bp, Homo sapiens
agtgttaccatggctttgtaatcttagttttgaagacaggcaaatgtactagtcaaatatgccaaactaacttattaagagcattccaaacaacattttggatccaattctttttaaatgcacttagatctttcttatatcagaatcaagcatatttgtcaattacttaatgtttattattaataactaaaatgatttgttattaataggaatagcttttttaaagtaccttgatctttgtgtttctaagatttgtcctagtccatttatggatctgaaataaataataaatgaggaagacaaagtttaaaagtaaaaattaactttttaaaaaagtatacaaagtatattgtttctaaaacrggaaataagcatacccaaatacatctggaaccagaaaaaaattaaaaacagaaaaacaaaacttgctttaaaaaataattatgattttccttcaaacaataaatcacatatattccactcatacatcaataaaacatatatgcaaaaattcgcacaactgtcagattaagggctactttgtggttaataaaaagacgcttcactttagaaaaaatcattcataa

SEQ ID NO: 53135 - DNA, 587 bp, Homo sapiens
agtgttaccatggctttgtaatcttagttttgaagacaggcaaatgtactagtcaaatatgccaaactaacttattaagagcattccaaacaacattttggatccaattctttttaaatgcacttagatctttcttatatcagaatcaagcatatttgtcaattacttaatgtttattattaataactaaaatgatttgttattaataggaatagcttttttaaagtaccttgatctttgtgtttctaagatttgtcctagtccatttatggatctgaaataaataataaatgaggaagacaaagtttaaaagtaaaaattaactttttaaaaaagtatacaaagtatattgtttctaaaacaggaaataagcatacccaaatacatctggaaccagaaaaaaattaaaaacagaaaaacaaaacttgctttaaaamataattatgattttccttcaaacaataaatcacatatattccactcatacatcaataaaacatatatgcaaaaattcgcacaactgtcagattaagggctactttgtggttaataaaaagacgcttcactttagaaaaaatcattcataa

SEQ ID NO: 53136 - DNA, 587 bp, Homo sapiens
agtgttaccatggctttgtaatcttagttttgaagacaggcaaatgtactagtcaaatatgccaaactaacttattaagagcattccaaacaacattttggatccaattctttttaaatgcacttagatctttcttatatcagaatcaagcatatttgtcaattacttaatgtttattattaataactaaaatgatttgttattaataggaatagcttttttaaagtaccttgatctttgtgtttctaagatttgtcctagtccatttatggatctgaaataaataataaatgaggaagacaaagtttaaaagtaaaaattaactttttaaaaaagtatacaaagtatattgtttctaaaacaggaaataagcatacccaaatacatctggaaccagaaaaaaattaaaaacagaaaaacaaaacttgctttaaaaaataattatgattttccttcaaacaataaatcacatatattccactcatacatcaataaaacatatatgcaaaaattcrcacaactgtcagattaagggctactttgtggttaataaaaagacgcttcactttagaaaaaatcattcataa

SEQ ID NO: 53137 - DNA, 1646 bp, Homo sapiens
  misc_feature (1)...(1646): n = A,T,C or G
catctcaatcagccctcagaggccataccttctaaaacttgccttggggattgagtttctaatatgaactctggaaggggcaaaatcattcaaaccatagcacctsacaatgcctgtttttccttgatttagaatatttccatcaactcttctcttgttttaagaatatttcttctgccccatcttcagatagctggttccttcctgtcatgtagacagtatacataggcccaaagcacatttttattataagatgatttttttatacaccacagcacatgaacatgctaatgcggtttaaacaatgatttacttttataaacaacaggaaatagaatcattggtccaatatttatgatacaagttaaaatataatttatttttaaaaagggttagttgtgtagggcatcctcagttaacttgatttttcttgagttcattgacaaattgctaattttttcaaatcacttaaatacattaattgcatctatttaatttcactgtactaaatttagtgtttggaaattatattattagacttttttcagaaattaactgtgattaataataaaaccagtatgattaaatgaaaaattatgattttaaaatgttaaggttattttaataactttctgaataaagccttattttatttagcatgcactttgacctttcagactgtgttagtctattttcacactgctataaagagctacttgagactgggtaatttataaaggaaagaggtttaattgactacagttccacatggctgggaaagcctcaggaaacacaatcatggcagaaaggaaaggggaagcaaggcacgtcttacatggtgacaggagagagagagcatgaagggtgaagtgcaacacactttcaaacaaccagatcttttgagaactaactcactatcacgagaacagcaggggaatatccactcccatgattcaatcacctcccaccaggaccctcccctgacacatggggattactacaattggagatgagatttgggtggggacacagagtcaaatcatatgtctgaccaagctggaattgcccataaaaatatagttttcagaagaattttgtgagctttgcatagattttatgtggatttactctatttggagaaaaatcttgcctacagatatttctacaataataccttctctattttgggttatttctgctggaggtacaagggactgttccccaaagcttcctagagaccctctagttttactagtattagtgagaagatctgaggcacacacataacctcctgtgaatggactctctggccttttgatcattgagcagcttaagcttgtataggaatacacttatttttcctgcaccactcttttgtaaattgtctcttaattttaatcaggttagattgggcattttctaaataaagtcctcattttattttacttaatgattattttctcaattcatctctcaccctcatgcatttttactgtaagtagcaaggagaacccaggtgacatcttcaacattttgcttggaagtnnnnnnnnnnnnnnnnnnnnnnnnnnnnnnnnnnnnnnnnnnnnnnnnnnnnnnnnnnnnnnnnnnnnnnnnnnnnnnnnnnnnnnnnnnnnnnnnnnnna

SEQ ID NO: 53138 - DNA, 1646 bp, Homo sapiens
  misc_feature (1)...(1646): n = A,T,C or G
catctcaatcagccctcagaggccataccttctaaaacttgccttggggattgagtttctaatatgaactctggaaggggcaaaatcattcaaaccatagcacctgacaatgcctgtttttccttgatttagaatatttccatcaactcttctcttgttttaagaatatttcttctgccccatcttcagatagctggttccttcctgtcatgtagacagtatacataggcccaaagcacatttttattataagatgatttttttatacaccacagcacatgaacatgctaatgcrgtttaaacaatgatttacttttataaacaacaggaaatagaatcattggtccaatatttatgatacaagttaaaatataatttatttttaaaaagggttagttgtgtagggcatcctcagttaacttgatttttcttgagttcattgacaaattgctaattttttcaaatcacttaaatacattaattgcatctatttaatttcactgtactaaatttagtgtttggaaattatattattagacttttttcagaaattaactgtgattaataataaaaccagtatgattaaatgaaaaattatgattttaaaatgttaaggttattttaataactttctgaataaagccttattttatttagcatgcactttgacctttcagactgtgttagtctattttcacactgctataaagagctacttgagactgggtaatttataaaggaaagaggtttaattgactacagttccacatggctgggaaagcctcaggaaacacaatcatggcagaaaggaaaggggaagcaaggcacgtcttacatggtgacaggagagagagagcatgaagggtgaagtgcaacacactttcaaacaaccagatcttttgagaactaactcactatcacgagaacagcaggggaatatccactcccatgattcaatcacctcccaccaggaccctcccctgacacatggggattactacaattggagatgagatttgggtggggacacagagtcaaatcatatgtctgaccaagctggaattgcccataaaaatatagttttcagaagaattttgtgagctttgcatagattttatgtggatttactctatttggagaaaaatcttgcctacagatatttctacaataataccttctctattttgggttatttctgctggaggtacaagggactgttccccaaagcttcctagagaccctctagttttactagtattagtgagaagatctgaggcacacacataacctcctgtgaatggactctctggccttttgatcattgagcagcttaagcttgtataggaatacacttatttttcctgcaccactcttttgtaaattgtctcttaattttaatcaggttagattgggcattttctaaataaagtcctcattttattttacttaatgattattttctcaattcatctctcaccctcatgcatttttactgtaagtagcaaggagaacccaggtgacatcttcaacattttgcttggaagtnnnnnnnnnnnnnnnnnnnnnnnnnnnnnnnnnnnnnnnnnnnnnnnnnnnnnnnnnnnnnnnnnnnnnnnnnnnnnnnnnnnnnnnnnnnnnnnnnnnna

SEQ ID NO: 53139 - DNA, 593 bp, Homo sapiens
agcctccttagagtgatcttttattagcatgaaaaagaaaatggcacctagtggggatgagaaattgagggagaggatggtgactggccacacctctctttccctacwggacaattatgtttgattaagaaccgatattaggcatccaagattgtcattgtcccttagagcttatgatctaactagagagacaaagccttcatcaatctaaaagataaccaagacttgatgtgtaagtgttgaaggagtggtaccagcacacgtagtaagcaaggagagatccctgacccctaaggcagcctgggcttggggaaaagtggggttctgatatggtttggctctgcatccccacccgaatctcagatcaaagtgtaatccccacatatcaaattggaggaagggcctaggcgggaggtgattggttcatgggggtggatttcccccttgctgctcaagtaatagtgagctctcagaaattctgatggtttaaaggtgtgtggcacttcccccttcactctgtctctactgctctcccatgaaaagatgtacttgcttcctctttgctttccaacatgattttaagttacctgagg

SEQ ID NO: 53140 - DNA, 637 bp, Homo sapiens
ttttataagcaaagaagttggaattcaaagaagttaaataatttgcccagggtaatttagcttgcaaatgatagcattttaatccaatattctttctgttacacagttcaaaatgccagttgaaaggtatctacaaaattctagttgaaagatatctatacttctcccatttattttatttttcttcaacttaattaatttttgaataggtaatgtgtaaaatgaatttcaaaatactacaggctctatttacattctgaaatacatctgcctcctaaccttgcaattccccttccttgagacaagcccacgttctgtagagactgctccttgtgcaatttatctcttggcctctattatcttaattaaaattactacagaaaagtataaatagtaggcttctagttttatgacaactgctttttcattcaaaacctcatgtttcctttctggctgccccatctctcatattttctcccactgcagttagtctgttacwcaattattcacaaaggctgtgtaggaagcctgtttactagccctgtttaccaagcaattgtgtgaatttgggcaagtaattcaccttttttgttctataaattgtctgctggttggaatagcatgttttacattcctt

SEQ ID NO: 53141 - DNA, 582 bp, Homo sapiens
aaatgctaaatgcaaatatcagttttggaaattcagtatgaggataaataatctccttttatttaaatactatacaacaaaacaagaacaaagtgagagtaaacacactrtcatttcttttcagctattttatttatttattttgagacagaatctccctctgtcacccaggttggggtacagtggcaggatctcagctcactgcagcctccaccttcgagtccaaggttcaatggattctcttgctcagcctcccgagtagctggaattacaggtgggcaccaccatgcccagctgatttttgtgtttttagtaaagacagggtctcaccatgttgaactcctggccttcagtgatctgcccacctcagcctctcaaagtgtggaattataggaatgagccaccacacccagccttcttttcagcgattttaaaagagcataatcacatatttccaagattcgtttctagatacagtactgattactgattaggtcacttccaccattaaaatcttcaaaccagtgcaacaattgtacatgttttgttttcaagtacacacatgaagacccaacagtgata

SEQ ID NO: 53142 - DNA, 598 bp, Homo sapiens
ctgctttctttttctttatatagggaaattcttgctttaaaaacactgtaacagatgccaagagaataaaagtatttccttgaagccagaagttcctcacagatatttcaaagtcacatgttactttgggcatgatgactgggcccttttttaaaacctcattttcactcattggttgtcagtggtttatttttttggtttgaagtgaaatttctgggctaggcccagaggctcaggcctgtaatcgcggcactttgggaggccgaggcaggtggatcacttgaggtcaggagttcaagaccaacctggccaatatggtgaaaccccatctccactaaaaatctaaaaattagctgggyatggtggtgcacacctgtaatcccagctacctgggaggctgagacagagaatagcttgaacctgagaggcggaggttgcagtgagttggattggcatcactgcactccagccgggcaatagagcaagattccgtctcaagaaagaaaagaaaagtgaaatttctaaatgaaaaatgcttgactatatttgtcttgtgggaattatcgtcaataataagaagctttttgagtgcttatta

SEQ ID NO: 53143 - DNA, 519 bp, Homo sapiens
catccagttagttgatgccttctaatttctcctcaataactacccatcttgctgaaaacaatgagtctctcctcaactccccttcatctcagtagatttctgtcatggcccatgcatcaaaaaacaaaacaaaacacactaggaggaacaaagacaagggaggcaagtcagggatactttggagtgggttgttgacaaacaaagaagacagaaattgggaaggtgaagtatgtcaggccaggatggcatgttccctggagcaaggccaagcctattctagatgcaagggtcaaaagccaaaatgaaattgtaatggaagcaaaataaaaaagatcttgtagaaattctgctagtgtcagtctgttttgtgttgctataacagaataccatagactgggtagtcataaagacaaataatttatttcttacatttctggaggatgcaaagtccraagtcaagtggccttcatgctacgtcatcccggatgggcaagagaggaagagaggacaagaggcgac

SEQ ID NO: 53144 - DNA, 500 bp, Homo sapiens
gacatttgaaaatagaaagttgaattaaacaaccaggggtttggacatgagatgagattccaatttctataacaactgctgctgatgggtgagactcatagccaaggggcttaatacagagtcaggctgagtagcttcctcttgcccaaggttatttctgaaaaggagtataggactaaatcagcagatggggcttaaagaattatagctgggccaggcacggtggctcatgcctgtaatccgagcactttgggaggccaaggcttgtggatcacctgaggttgggagtttgagaccagcctgaccaacatggagaaaccccgtctctactaaaaatacaaaattarctgggtgtggtggtgcatggctgtaattccagctactcgggaggctgaggcaggagaattgcttgaaccctggaggcggaggttgcagtgaaccgagatcgcgccattgtactccagcctgggcaacaagagtgaaactccgtctcaaaaaaa

SEQ ID NO: 53145 - DNA, 599 bp, Homo sapiens
ttaatggcagagaaacaggctctacaaagggggagaaaaggagtgtttttagcaaaccttaygccaaaatatgttgacatataatttacaaaataagcactttctaaatacaataacactttaggtttttcaagaacaaatgaaaacctttaaagatatatgtattaatttaacagtttatgaatttttatacatatccaggtaaaaatcaaagctcaagcaataaaatgtttcgttgtctgcataactggtcttaaatataattaaagcttatttacataaaaggtttggagcccaaataagacttacagattggcggaattcaggttttggctaaggataggtaatttctatactgaaagataaaatctaagagcaaaaattcaaagtagtttcaatttatgtctcaaaatggaacttggaactataaagcaatgttttagactataaaaaatgttaaaattttgttacttctacatgtttgctattattgctgtttgcttagccgaagtggcattacaaagtctcaaattctaaggcattatgaaattgtgtttaagagaagaaacaagagacagaactagaaaaactgcctcccc

SEQ ID NO: 53146 - DNA, 599 bp, Homo sapiens
ttaatggcagagaaacaggctctacaaagggggagaaaaggagtgtttttagcaaaccttatgccaaaatatgttgacatataatttacaaaataagcactttctaaatacaataacactttaggtttttcaagaacaaatgaaaacctttaaagatatatgtattaatttaacagtttatgaatttttatacatatccaggtaaaaatcaaagctcaagcaataaaatgtttcgttgtctgcataactggtcttaaatataattaaagcttatttacataaaaggtttggagcccaaataagacttacagattggcggaattcaggttttggctaaggataggtaatttctatactgaaagataaaatctaagagcaaaaattcaaagtagtttcaatttakgtctcaaaatggaacttggaactataaagcaatgttttagactataaaaaatgttaaaattttgttacttctacatgtttgctattattgctgtttgcttagccgaagtggcattacaaagtctcaaattctaaggcattatgaaattgtgtttaagagaagaaacaagagacagaactagaaaaactgcctcccc

SEQ ID NO: 53147 - DNA, 756 bp, Homo sapiens
  misc_feature (1)...(756): n = A,T,C or G
ctggggaataatttttcatatttttctattaatcttgatgtcagaattacggattgataatttaaggaatctgaaagaagcaascaataaattattcagtgaggcttttattttccctcatgcatattttcagcacctgcaaaccattgattggaatcagtggggtacatgttgttcatgcagtcagaataaagacaagtgtttttatcaaagttgacatgaaggccagtgtttcatcaaaggtagagaatattgaactctatgtccactgagaaactttcgtaatcctcccgagtaactcagccaagcatatttgcttgcatcatgacctttgtttcacatcatgtttcccattctccttcattcttttttggagagcaaataaatatatttatgacatatgttttcaaaatatgtatttggtaatttgaggtagaaaataggcatgcaggaggatgattcctaagtagagaggacgtaagacctatttctgatttggttgaatgcaaaataacaaattaggaaattatattctttcttaaaaaaaaacatccccccacaaaaacaaacctgatnctgaaatcagaaaaatcatattcctctattttaaatcaagtcctttagagtagaacttaaatctcttctcaacacatatcccataaatttatttctcaatgaccacagggcaaattatcttgggtgttcaaggaatgtttgcattattttccaggcctaacaaatgtcccttgagttgcc

SEQ ID NO: 53148 - DNA, 539 bp, Homo sapiens
taaaataattttcctaatggcctgttccttctctcaaattttctaccataacacatggttagaaggtcccaaataaatggccctttacagcttctctgacatttctggtagcaaacattccaagtgaataattttatttctttcataaaatcctggaagggaatcacaaagctgcctggctttagatgaggtctgggtcatctcgtccatacctctgccttcaggaaggttcaaacttactttcctaagcagatcagactctacactgggagataccatgagctactttttctgaggccaggggcaaagttctctcagkgtactgagtcaaatattttgttaaggaaggaacttgggatctggagtcaggggattccagtgcaagcctgggctccagggtttgcccaccctgcaaacgtggacaagtcacgtgacatccttgtgttcaggttgcctcatcttcaaaaccggaaataataacctacatcacagggttgctccagtggtcaagtgagacaatggatgtgaaagggctttgt

SEQ ID NO: 53149 - DNA, 491 bp, Homo sapiens
atccatccacccacccatccatccatccatccatccattcattcattcaagcttagtacacatagtaagcacctaccatgtgtaagcctgtgttaaatattgtgggatacactaaaatgattcagacatggtctctgccctcagagctataaatacaattaaaagaaattgtaaaacaaaatggaatgtaaaaagtgttttaagggaagttattgaaagtgaatgaagggcattgccacatggaaagaatagtgaattaagaacmaggagatttttttctcagccctggttttaatgttggtctaacataaaccctgtcacctccctaggctttggtttccccgaagtaaggaggcagaagtggaagatcccgaggtccctgtaacttctaacatttcattccctctgcctctacgtaagtgaaggtaacattcaaactgagcactgagtagcagggtattgcattccaggagtggagactcatacaagca

SEQ ID NO: 53150 - DNA, 541 bp, Homo sapiens
ccactccacaaaaactgcttggctgcaaagaaggcaaggtggacacaaacacaaccggcgccagccccggcccggacaggcgcagcggggccgggctgaacacaacttctgctggtgtctcaagtctgtagcaccaaatgcaaaagggagaaaagtccaaatcaaggtcaaaggcacttgcgttgctgtygggtggtgacggtcttctggtcaccctggcaccctcgctctgtccaccgcgtggccggccctccctcccccacactccgtctcctctctgagactcccgtcctgcacagaaacccctccgcatcctccccccgcagcccccaccacatcctcgctccgtcccacgtcccgtcctccagcccgctgcacgccccctcctcttgtccggcgcccagcctcagacgtccacctcctgcggccccgggatggcagcactggctgcaacgctgatgtcgaagcaggtgaccatcatgacgtgcgccttgcacaggttcacgcactgctccagggccgccgtggctcgctccagggc

SEQ ID NO: 53151 - DNA, 541 bp, Homo sapiens
ccactccacaaaaactgcttggctgcaaagaaggcaaggtggacacaaacacaaccggcgccagccccggcccggacaggcgcagcggggccgggctgaacacaacttctgctggtgtctcaagtctgtagcaccaaatgcaaaagggagaaaagtccaaatcaaggtcaaaggcacttgcgttgctgtcgggtggtgacggtcttckggtcaccctggcaccctcgctctgtccaccgcgtggccggccctccctcccccacactccgtctcctctctgagactcccgtcctgcacagaaacccctccgcatcctccccccgcagcccccaccacatcctcgctccgtcccacgtcccgtcctccagcccgctgcacgccccctcctcttgtccggcgcccagcctcagacgtccacctcctgcggccccgggatggcagcactggctgcaacgctgatgtcgaagcaggtgaccatcatgacgtgcgccttgcacaggttcacgcactgctccagggccgccgtggctcgctccagggc

SEQ ID NO: 53152 - DNA, 2933 bp, Homo sapiens
gcatacaatgacatgttatataatagatgttagtcagctgatacttgttcaatgggctcatgaacagatgcacataatattaaggatagaaggtattcacgactttacataatcaaattgtatctggaccaatgtagaacaactaaggctaatatgacagccttccctcaggggctacccagtcaacttgcagattgatgacattgaaacccatccctcagggattttgttctcactgaaatagacacttattctgggtacgaactcaccttttacatttgcaatttttctgctggtactaccatgagtgaacttaaataatttgttattcaccatcatgatatcccatacaacattgtttttgactaaggaattcatttcactgcaaaaaaaatatggtattaggctcatgtttgtgcaattcattggatttacaacataatccctatcacctagaagaatctgacatgatggaatggaatcatgtaactcagttaatgctcccagctggtaaacaacacatagtgaggttgggatgttgtcctacagtgtgtggtataaacttagagtcagtgaccaccgtgtagtgttatttatcttacaacaaaaacacatgaatctgaaagtcaaggggagggggctccctgcactattatgcctaatttgcacttgcagactttttcttcccttttgtgaaactttgggttctcctcatttagagataatgattccccagggaggaaactaacttctttttttttttaatttacaaaaggtaggctatgattattagagtcatacacagttgactgtctcagtgtgactcaagaccacaaaaaaaccatttttccttcacttctgagtcctggggttaagacctagaccagcaagcgtactgcttggggtcccttcacaggtttacaagtttttcattgagggcaatctgtgactgtgtgaggttggccagttaggtcaccatcaacaggtcattgatgttgctgtggagcatggtctcgaagtcatcgggaactatttttggtacttggttaaccaggctcatcaggaagtggcccaccttcctgatggtattgtcagctgacacctttccagatagtatatcctctgcatattgcaacactatgctcagggtatcctggatgcgagctgatgcccctcctacttgctgcaagtcacttgagagtccaaccactctgttggggctaaagcaggtcttcatgatcaggtcaactctgatgcattcagtgtcatagaatgcgtatttcactgtcagaggtgtgaacactcccacgatcctcccagggacacccattaaagtgctgacataggctttgatgctcatatggccgttctggagacttgtgtccacagtgaggtggatggggttgggggcctctcggctgtagtactcatggatcagcacagagtgctctgtgatgtcatggcctgcagcgtaccaccccaagatgagctcatttggagaaactttttaggcagttcatacatgttcttagcaaattccatgtcaacagccacttcatctgactcattgtgtgacactgaaaagcaactggtgacctccactgagtgtttgttgacagttcccaacagggtcccgataactcgggcagcacccttgttgcgtctctcgtagctgtccacagtggaggccaaaatgactgggtgcagcctgaccacacggccaccagggaagggccctggaagaacaggaccaggcagagcggttgctggggtctgcgctggagcttgtgctgaggccagggtctggcttaagatgacaggtttcattaagtggaagctgaaataccatttggggatatttagttcttcttgaaactaacggtaaagaaaacagcagacctattaacaggtaattgatctagagatagccaaggtgaaattgggtttctctattcagtaggggcagggaggactatgtgtggaacacaggagtatctcagtcattccatgtgtgatagtacatgaaagagatgagcagttgtagtgctgttcactgtgcaaaagtatcccttcttcctaacgtgggagggctgcttttgcaaatatgtctgtgctatttctcactggtcctgcctcttctgttcttggaatcaaactcagtccacgacagatcccactactagctgaatttctttattagtcctatcacaaatgaaattttgtattagcacctcaggggatttctttaattttgcaaaagtatgtcatcctaatttattatttttttcctaagatctggcaatgagcatcggttctctgcttcctatcttaccctgctcactcacagctgcttcaggtgacctcctttttaggttcagagttatggctgacctcggctttaatcaaaacgaatgtattttggtttctcattttgtttattgcttctgtcttcaaattagaaatcctagagctcatcagatttacttttatgtttatttttgaaagagcatcctgctctgtcacccaggctgcaatgcagtggtacaatgactgctcattgcggccttgacctcctgggctcaagtgattctcctgcctcagcctcccragtagctgggattacaggcacctgccaccacacctggctaatgtttgtgtttttagtagagacagggtttcaccatgttggccagctggtctcgaattcctgatctcaggtgatctgcccaccttgacctcccaaagtgctggaattacaggtgtgagccaccgtgcccagacgatttttatgaccatgaatggggacagatttcttaaacagatcacaatgagccatagttttaagggaataagttgataaattagactatattcaaattaagaatttctgtttattaagagacaccactaagaaagtgacaagacaagttgca

SEQ ID NO: 53153 - DNA, 2933 bp, Homo sapiens
gcatacaatgacatgttatataatagatgttagtcagctgatacttgttcaatgggctcatgaacagatgcacataatattaaggatagaaggtattcacgactttacataatcaaattgtatctggaccaatgtagaacaactaaggctaatatgacagccttccctcaggggctacccagtcaacttgcagattgatgacattgaaacccatccctcagggattttgttctcactgaaatagacacttattctgggtacgaactcaccttttacatttgcaatttttctgctggtactaccatgagtgaacttaaataatttgttattcaccatcatgatatcccatacaacattgtttttgactaaggaattcatttcactgcaaaaaaaatatggtattaggctcatgtttgtgcaattcattggatttacaacataatccctatcacctagaagaatctgacatgatggaatggaatcatgtaactcagttaatgctcccagctggtaaacaacacatagtgaggttgggatgttgtcctacagtgtgtggtataaacttagagtcagtgaccaccgtgtagtgttatttatcttacaacaaaaacacatgaatctgaaagtcaaggggagggggctccctgcactattatgcctaatttgcacttgcagactttttcttcccttttgtgaaactttgggttctcctcatttagagataatgattccccagggaggaaactaacttctttttttttttaatttacaaaaggtaggctatgattattagagtcatacacagttgactgtctcagtgtgactcaagaccacaaaaaaaccatttttccttcacttctgagtcctggggttaagacctagaccagcaagcgtactgcttggggtcccttcacaggtttacaagtttttcattgagggcaatctgtgactgtgtgaggttggccagttaggtcaccatcaacaggtcattgatgttgctgtggagcatggtctcgaagtcatcgggaactatttttggtacttggttaaccaggctcatcaggaagtggcccaccttcctgatggtattgtcagctgacacctttccagatagtatatcctctgcatattgcaacactatgctcagggtatcctggatgcgagctgatgcccctcctacttgctgcaagtcacttgagagtccaaccactctgttggggctaaagcaggtcttcatgatcaggtcaactctgatgcattcagtgtcatagaatgcgtatttcactgtcagaggtgtgaacactcccacgatcctcccagggacacccattaaagtgctgacataggctttgatgctcatatggccgttctggagacttgtgtccacagtgaggtggatggggttgggggcctctcggctgtagtactcatggatcagcacagagtgctctgtgatgtcatggcctgcagcgtaccaccccaagatgagctcatttggagaaactttttaggcagttcatacatgttcttagcaaattccatgtcaacagccacttcatctgactcattgtgtgacactgaaaagcaactggtgacctccactgagtgtttgttgacagttcccaacagggtcccgataactcgggcagcacccttgttgcgtctctcgtagctgtccacagtggaggccaaaatgactgggtgcagcctgaccacacggccaccagggaagggccctggaagaacaggaccaggcagagcggttgctggggtctgcgctggagcttgtgctgaggccagggtctggcttaagatgacaggtttcattaagtggaagctgaaataccatttggggatatttagttcttcttgaaactaacggtaaagaaaacagcagacctattaacaggtaattgatctagagatagccaaggtgaaattgggtttctctattcagtaggggcagggaggactatgtgtggaacacaggagtatctcagtcattccatgtgtgatagtacatgaaagagatgagcagttgtagtgctgttcactgtgcaaaagtatcccttcttcctaacgtgggagggctgcttttgcaaatatgtctgtgctatttctcactggtcctgcctcttctgttcttggaatcaaactcagtccacgacagatcccactactagctgaatttctttattagtcctatcacaaatgaaattttgtattagcacctcaggggatttctttaattttgcaaaagtatgtcatcctaatttattatttttttcctaagatctggcaatgagcatcggttctctgcttcctatcttaccctgctcactcacagctgcttcaggtgacctcctttttaggttcagagttatggctgacctcggctttaatcaaaacgaatgtattttggtttctcattttgtttattgcttctgtcttcaaattagaaatcctagagctcatcagatttacttttatgtttatttttgaaagagcatcctgctctgtcacccaggctgcaatgcagtggtacaatgactgctcattgcggccttgacctcctgggctcaagtgattctcctgcctcagcctcccgagtagctgrgattacaggcacctgccaccacacctggctaatgtttgtgtttttagtagagacagggtttcaccatgttggccagctggtctcgaattcctgatctcaggtgatctgcccaccttgacctcccaaagtgctggaattacaggtgtgagccaccgtgcccagacgatttttatgaccatgaatggggacagatttcttaaacagatcacaatgagccatagttttaagggaataagttgataaattagactatattcaaattaagaatttctgtttattaagagacaccactaagaaagtgacaagacaagttgca

SEQ ID NO: 53154 - DNA, 2933 bp, Homo sapiens
gcatacaatgacatgttatataatagatgttagtcagctgatacttgttcaatgggctcatgaacagatgcacataatattaaggatagaaggtattcacgactttacataatcaaattgtatctggaccaatgtagaacaactaaggctaatatgacagccttccctcaggggctacccagtcaacttgcagattgatgacattgaaacccatccctcagggattttgttctcactgaaatagacacttattctgggtacgaactcaccttttacatttgcaatttttctgctggtactaccatgagtgaacttaaataatttgttattcaccatcatgatatcccatacaacattgtttttgactaaggaattcatttcactgcaaaaaaaatatggtattaggctcatgtttgtgcaattcattggatttacaacataatccctatcacctagaagaatctgacatgatggaatggaatcatgtaactcagttaatgctcccagctggtaaacaacacatagtgaggttgggatgttgtcctacagtgtgtggtataaacttagagtcagtgaccaccgtgtagtgttatttatcttacaacaaaaacacatgaatctgaaagtcaaggggagggggctccctgcactattatgcctaatttgcacttgcagactttttcttcccttttgtgaaactttgggttctcctcatttagagataatgattccccagggaggaaactaacttctttttttttttaatttacaaaaggtaggctatgattattagagtcatacacagttgactgtctcagtgtgactcaagaccacaaaaaaaccatttttccttcacttctgagtcctggggttaagacctagaccagcaagcgtactgcttggggtcccttcacaggtttacaagtttttcattgagggcaatctgtgactgtgtgaggttggccagttaggtcaccatcaacaggtcattgatgttgctgtggagcatggtctcgaagtcatcgggaactatttttggtacttggttaaccaggctcatcaggaagtggcccaccttcctgatggtattgtcagctgacacctttccagatagtatatcctctgcatattgcaacactatgctcagggtatcctggatgcgagctgatgcccctcctacttgctgcaagtcacttgagagtccaaccactctgttggggctaaagcaggtcttcatgatcaggtcaactctgatgcattcagtgtcatagaatgcgtatttcactgtcagaggtgtgaacactcccacgatcctcccagggacacccattaaagtgctgacataggctttgatgctcatatggccgttctggagacttgtgtccacagtgaggtggatggggttgggggcctctcggctgtagtactcatggatcagcacagagtgctctgtgatgtcatggcctgcagcgtaccaccccaagatgagctcatttggagaaactttttaggcagttcatacatgttcttagcaaattccatgtcaacagccacttcatctgactcattgtgtgacactgaaaagcaactggtgacctccactgagtgtttgttgacagttcccaacagggtcccgataactcgggcagcacccttgttgcgtctctcgtagctgtccacagtggaggccaaaatgactgggtgcagcctgaccacacggccaccagggaagggccctggaagaacaggaccaggcagagcggttgctggggtctgcgctggagcttgtgctgaggccagggtctggcttaagatgacaggtttcattaagtggaagctgaaataccatttggggatatttagttcttcttgaaactaacggtaaagaaaacagcagacctattaacaggtaattgatctagagatagccaaggtgaaattgggtttctctattcagtaggggcagggaggactatgtgtggaacacaggagtatctcagtcattccatgtgtgatagtacatgaaagagatgagcagttgtagtgctgttcactgtgcaaaagtatcccttcttcctaacgtgggagggctgcttttgcaaatatgtctgtgctatttctcactggtcctgcctcttctgttcttggaatcaaactcagtccacgacagatcccactactagctgaatttctttattagtcctatcacaaatgaaattttgtattagcacctcaggggatttctttaattttgcaaaagtatgtcatcctaatttattatttttttcctaagatctggcaatgagcatcggttctctgcttcctatcttaccctgctcactcacagctgcttcaggtgacctcctttttaggttcagagttatggctgacctcggctttaatcaaaacgaatgtattttggtttctcattttgtttattgcttctgtcttcaaattagaaatcctagagctcatcagatttacttttatgtttatttttgaaagagcatcctgctctgtcacccaggctgcaatgcagtggtacaatgactgctcattgcggccttgacctcctgggctcaagtgattctcctgcctcagcctcccgagtagctgggattacaggcayctgccaccacacctggctaatgtttgtgtttttagtagagacagggtttcaccatgttggccagctggtctcgaattcctgatctcaggtgatctgcccaccttgacctcccaaagtgctggaattacaggtgtgagccaccgtgcccagacgatttttatgaccatgaatggggacagatttcttaaacagatcacaatgagccatagttttaagggaataagttgataaattagactatattcaaattaagaatttctgtttattaagagacaccactaagaaagtgacaagacaagttgca

SEQ ID NO: 53155 - DNA, 2933 bp, Homo sapiens
gcatacaatgacatgttatataatagatgttagtcagctgatacttgttcaatgggctcatgaacagatgcacataatattaaggatagaaggtattcacgactttacataatcaaattgtatctggaccaatgtagaacaactaaggctaatatgacagccttccctcaggggctacccagtcaacttgcagattgatgacattgaaacccatccctcagggattttgttctcactgaaatagacacttattctgggtacgaactcaccttttacatttgcaatttttctgctggtactaccatgagtgaacttaaataatttgttattcaccatcatgatatcccatacaacattgtttttgactaaggaattcatttcactgcaaaaaaaatatggtattaggctcatgtttgtgcaattcattggatttacaacataatccctatcacctagaagaatctgacatgatggaatggaatcatgtaactcagttaatgctcccagctggtaaacaacacatagtgaggttgggatgttgtcctacagtgtgtggtataaacttagagtcagtgaccaccgtgtagtgttatttatcttacaacaaaaacacatgaatctgaaagtcaaggggagggggctccctgcactattatgcctaatttgcacttgcagactttttcttcccttttgtgaaactttgggttctcctcatttagagataatgattccccagggaggaaactaacttctttttttttttaatttacaaaaggtaggctatgattattagagtcatacacagttgactgtctcagtgtgactcaagaccacaaaaaaaccatttttccttcacttctgagtcctggggttaagacctagaccagcaagcgtactgcttggggtcccttcacaggtttacaagtttttcattgagggcaatctgtgactgtgtgaggttggccagttaggtcaccatcaacaggtcattgatgttgctgtggagcatggtctcgaagtcatcgggaactatttttggtacttggttaaccaggctcatcaggaagtggcccaccttcctgatggtattgtcagctgacacctttccagatagtatatcctctgcatattgcaacactatgctcagggtatcctggatgcgagctgatgcccctcctacttgctgcaagtcacttgagagtccaaccactctgttggggctaaagcaggtcttcatgatcaggtcaactctgatgcattcagtgtcatagaatgcgtatttcactgtcagaggtgtgaacactcccacgatcctcccagggacacccattaaagtgctgacataggctttgatgctcatatggccgttctggagacttgtgtccacagtgaggtggatggggttgggggcctctcggctgtagtactcatggatcagcacagagtgctctgtgatgtcatggcctgcagcgtaccaccccaagatgagctcatttggagaaactttttaggcagttcatacatgttcttagcaaattccatgtcaacagccacttcatctgactcattgtgtgacactgaaaagcaactggtgacctccactgagtgtttgttgacagttcccaacagggtcccgataactcgggcagcacccttgttgcgtctctcgtagctgtccacagtggaggccaaaatgactgggtgcagcctgaccacacggccaccagggaagggccctggaagaacaggaccaggcagagcggttgctggggtctgcgctggagcttgtgctgaggccagggtctggcttaagatgacaggtttcattaagtggaagctgaaataccatttggggatatttagttcttcttgaaactaacggtaaagaaaacagcagacctattaacaggtaattgatctagagatagccaaggtgaaattgggtttctctattcagtaggggcagggaggactatgtgtggaacacaggagtatctcagtcattccatgtgtgatagtacatgaaagagatgagcagttgtagtgctgttcactgtgcaaaagtatcccttcttcctaacgtgggagggctgcttttgcaaatatgtctgtgctatttctcactggtcctgcctcttctgttcttggaatcaaactcagtccacgacagatcccactactagctgaatttctttattagtcctatcacaaatgaaattttgtattagcacctcaggggatttctttaattttgcaaaagtatgtcatcctaatttattatttttttcctaagatctggcaatgagcatcggttctctgcttcctatcttaccctgctcactcacagctgcttcaggtgacctcctttttaggttcagagttatggctgacctcggctttaatcaaaacgaatgtattttggtttctcattttgtttattgcttctgtcttcaaattagaaatcctagagctcatcagatttacttttatgtttatttttgaaagagcatcctgctctgtcacccaggctgcaatgcagtggtacaatgactgctcattgcggccttgacctcctgggctcaagtgattctcctgcctcagcctcccgagtagctgggattacaggcacctgccaccacacctggctaatgtttgtgyttttagtagagacagggtttcaccatgttggccagctggtctcgaattcctgatctcaggtgatctgcccaccttgacctcccaaagtgctggaattacaggtgtgagccaccgtgcccagacgatttttatgaccatgaatggggacagatttcttaaacagatcacaatgagccatagttttaagggaataagttgataaattagactatattcaaattaagaatttctgtttattaagagacaccactaagaaagtgacaagacaagttgca

SEQ ID NO: 53156 - DNA, 605 bp, Homo sapiens
attactactactcctattactaataccacccctgagtcaccctgtaattgttattacaataacaacttttacactgctttaaagttaggcaaagtaagacataaagaggattggttgcaaggtcttactaggtgctaaacgcaaagccagatcttagccagttctgtctacagagccaatgcttcttctgctaccccctgccttgtggattcacatatgacaacctttaaatcacattcactcatgttatctcttttaattcctatgaaatttctttaaattatgcatgacttatcctgggttctgtccgataggattgcctaagaagacatgttacaagaagggttaagggtgagtcagtgaccttgcatttcatggaaagctctcttccagtattgtaaaaagaaaaaaagaaagaaaataaataaatacataaaaggaaagawaagaaagaaagaaaagaaaagaaagaagggagggagggaaggatggaaggaaggaagaaagaaagaaagaaagaaagaaaaagaaaacaaagaaagaaagaaaaagaaagaaagaaaaagaaaaaaaaagcaatgtgctcagacatcatggttatctcc

SEQ ID NO: 53157 - DNA, 605 bp, Homo sapiens
attactactactcctattactaataccacccctgagtcaccctgtaattgttattacaataacaacttttacactgctttaaagttaggcaaagtaagacataaagaggattggttgcaaggtcttactaggtgctaaacgcaaagccagatcttagccagttctgtctacagagccaatgcttcttctgctaccccctgccttgtggattcacatatgacaacctttaaatcacattcactcatgttatctcttttaattcctatgaaatttctttaaattatgcatgacttatcctgggttctgtccgataggattgcctaagaagacatgttacaagaagggttaagggtgagtcagtgaccttgcatttcatggaaagctctcttccagtattgtaaaaagaaaaaaagaaagaaaataaataaatacataaaaggaaagataagaaagaaagaaaagaaaagaaagaagggagggagggaaggatggaaggaaggaagaaagaaagaaagaaagaaagaaaaagaaaacaaagaaagaaagaaaaagaaaraaagaaaaagaaaaaaaaagcaatgtgctcagacatcatggttatctcc

SEQ ID NO: 53158 - DNA, 541 bp, Homo sapiens
atgaaataactaggtagagtctggcctagagaaataaaccttggcctagtctacttacaaatggtatttaaagtcaagggcatggattacagcaatcaggaagagcgagccagaaagaaaaatagtataataattgtaaagagatagccagtgtcaggaatttaatggatgaaatgtcaaaacaaaacaaaatcagccaagacaggataattaaaaccacaaaggctagggtgggggtggggggtagaactggggggtgggmactcctaaagcctgcataaacaatgtgtaggaaagacaggctggaaatgacagtgacacacaggttactagacaaagggcttctgagaaatggcaaaggtaaccaattctaagaacttactaatcttaaggtgatttatagataaaagtcccatcctataaatgtctggattcttgagcccagagatattctgggtctgtctgtactggtattctgctgggcaggtaaaggggttatgaagagaagtactatcttacttgcctgtcaactaatactgat

SEQ ID NO: 53159 - DNA, 637 bp, Homo sapiens
ttgctgtaggctgtatgctgttaatgctaatcgtgataggggtttttgcctccaactgactcctacatattagcattaacagtgtatgatgcctgttactagcattcacatggaacaaattgctgccgtgggaggatgacaaagaagcatgagtcaccctgctggataaacttagacttcaggctttatcatttttcaatctgttaatcataatctggtcactgggatgttcaaccttaaactaagttttgaaagtaaggttatttaaaagatttatcagtagtatcctaaatgcaaacattttcatttaaatgtcaagcccatgtttgtttttatcattaacagaaaatatattcatgtcattcttaattgcaggttttggcttgttcattataatgttcataaacacctttgattcaactgttagaaatgtgrgctaaacacaaatttctataatatttttgtagttaaaaattagaaggactactaacctccagttatatcatggattgtctggcaacgttttttaaaagatttagaaactggtactttcccccaggtaacgattttctgttcaggcaacttcagtttaaaattaatacttttatttgactcttaaagggaaactgaaaggcta

SEQ ID NO: 53160 - DNA, 676 bp, Homo sapiens
ttttgtccaggttattcactgtaaccaaataaatctcatgagtctttagttgatttaaaataatttttatggcccattttcttttgcaaagtacaaattataattccagaagctatctgccaaaaaaagacaatggaagaaaattatgaggacactaaagggaacattcctgactcctaggacacagtattctcatgtaagaatacccatttggctttgccccactttctgttcaagttgtatgtgctgccaagacaaatttcttctcctcactttctgttcaagttgtatgtgctgccaacacaaatttcttctcctaacmcctggaatgagcttgtggctccacggagctcccatgtaggtagaacacattcaagagtgtttcttcaggccaggcacagtggctcacgcctataattccaacactttgggaggccaaggcgggtggttcacttgaggtcaggagttctacactaccctggccaacatagtgaaacctcgtctctactaaaaatacaaaaattagctaggcatggtggtgcgtgcctgtaatcccagatactcaggaggctggggcagaagaatcacttgaacccaggaggtggagttcacagtgaacgaagatcgtgccactgccctccagcctgggtgacagagtgagactccatctcaaaaa

SEQ ID NO: 53161 - DNA, 561 bp, Homo sapiens
agccccgcacgctagtttgtaaacaaacgctctgttgaattctttccagaattccatttgagtgtgcctaagggtgccctgcttgagctatgatgctacagatatccccatgagaaatttctatccgtgggcaagggcagcaaggggtcacgggatcgtggtgtgatttctctgccttaaattagttcctaatatgttgtaatattgttgatgtcagtaagatccaggatggggccgggcacagtggctgacgcctgtaattgcagcactttgggaggccgaggtgggcggatcacctaaggtcaggagttcgagaccagcctggacaacatggtgaaaccctgtctctactaaatatacaaaaattagctgggcgtggtggcaggtgcctgtaataccagctaccctggaggatgaggcaggagagtccctggaacccgggaggcgggggttgcagtgagctgagatcgcaccactgcactccagcctgggtgacagagcaagactccatctcaaaaaaaaaaaaatwataataataataaaaaaataaaaggtccagga

SEQ ID NO: 53162 - DNA, 660 bp, Homo sapiens
atgctctaggaatgacacctagacattcctaaaaaatgatagcctaaaaattcatcccattgtagaaatacaggcagcactagcttctctgggcccctcagttatcaaaaaaagaggagggaggcagaccctcagggttactttacatccatatacctagctacaacataaacatcaaatgatatgtggccaggcgcgctggctcatgcctgtaatcccagcactttgggaggcagaggcaggcagatcacttgaggtcaggagttcgacaccagcctggccaacatggagaaaccccgtctctactaaaaatacaaaaattagccaggcatgatggtgcatgcctgtagttycagctactcagtaggttaaggcatgagaatcgcttgaacctgggaggcggaggttgcagtgagcaagatcgtgccactgcactccagcctgggctaacagagagagactctgtctcaaaaaaaaaaacaaaacaaatcaaaacaaaaagcacaacatatgatattaatgattttccttgaaattaaatagtggtatgagtaacaatgtataataactgtaaatattaattcaactcgtttcatttctacattcaggtgaataaaaatatctgatctattctctgtgggtaataagagtatttttgta

SEQ ID NO: 53163 - DNA, 1751 bp, Homo sapiens
ttatgtgtggtatgtcagtattggaagtacagctgtaaattaaccatctctagaataagtgcaattagaaacaaaaaaacaaaaaagaataagttcaattaaagtatgctcacattaactttcattgtcacttgtctcttttataagcaaaaaaaaaaaaaaaatagcactgttgcaaagcctatgttgctttttaatagtctcttgggatataaactgttaaatattaagctctcttctgaacccaggcagtagtccagatttgtgccttcacattgattctttttctagaaatttgactcccctaaaaaaggttcaggtattagaaaatgatactctagtgagaggcttttgataaatgtctakaagattaaataattttggtgattgaatttctgttgccattactaaagagaacacccttaatatgtggcgagtcacccctactttgtttaattgactatggctgctttcagtatcacagagtttcttacataaaggccaattttagcccccttttccactagccctttttccaaatatgcttatttttaaataagagtatttcttcttgttttttaattttaattttggctttctcttattaactttaattaatatgatgagtttaaaaaaaatcacaggtcaggtcgggtgtggtggcatgtgcctgtaatcccagcactttgggaggcaggtggatcacttgagcaagtggatcattcgagactagcctgggcaaaagggtgaagccctgtctctacaaaacacacacacacacacacacacacacacacacacacacacacactagtcaggtatggtggcatgtgcctgtagtcccagctacttgggaagctgaggtcagagaatcacttgagtctgggaggttggggctgcagtgagccatgattgtgtcactgcactcctgcctgggcaacagagtgagaccctgtctcaaaaaacaaacaaacaaaacagtaaacaaatcacaggtcagtataactatattgttttgttatttaacacgcatttggaggacttagtgaatatgttgtgttatggttattatctctagtattcctctcaaacctgataaagccaaaacaaacaattaaattggagaatcaaaagatttatagaatttgattgagacaactcagagatggatttatcatttagtctcttaagtgtcacttgcccacttttctttgttgtagccacactggaaaatgaaatactttttttgtaactttagagcatgtgtccattagcaaccatgttttcttggatgaagagataggccaggaggagccagtctcctgactcttggggtttcttcagtgcccctcttgatcggcagtgcctttagagcatccacgctgttgatgcaaaaattacttctgccttcctgggatgtgtcatttcacacatctaacctgatagtgtgaatttgttgtatcctaaaccttcctttccctaaaggaagccagctggagagtacagaaaagaaattagggcttcctgttcttttgtatttcatgttcacgtagattgttcacctggaagaaggaaatgcagttccctcattataggttagtactgtaacactggaggaataccttacagagtacagaattttaaaattagttgatcaggatactaaatctatattaagtggctggctccacaaatgaggataacatttaacaaaaattgattctcactattttgggtaaattgcaataagt

SEQ ID NO: 53164 - DNA, 616 bp, Homo sapiens
tgtatacaacccatggtgaacacccacttcttttctctgccttctcccccagagatggacactgctgtggctgctgactccataaacaagggggagacaaatatccccatccttgacctcctatggacctaaaaaaaatcacgcatctcatacaactagttcctggcrgcttatgcaagactagtcagactggttgcccttggaagcaacgtgcaattggtggtctgtttcaccacagagcatctctctatgaacagttacattcatctgaatgaaaaatctatgctgtcacgtggtggacttcagaatgtctagggagatttcacagagagctcccctcgaagaggccagtgttgtagcttgtgctatgtttttccctccctgcccacacacaggcacacacacgtacacaatcttaaaacctcaggtgagaggggtgagctcacatgctccctagtccatggtatgtgccgtcttgggtctacacaatgccctctcttgattgagcaatggtacatggattgccttttatttccattcactactctctggctatgcagaaagtgacattttccctatcgtttaatcttgatatcactgtccctgtatactcaga

SEQ ID NO: 53165 - DNA, 616 bp, Homo sapiens
tgtatacaacccatggtgaacacccacttcttttctctgccttctcccccagagatggacactgctgtggctgctgactccataaacaagggggagacaaatatccccatccttgacctcctatggacctaaaaaaaatcacgcatctcatacaactagttcctggcagcttatgcaagactagtcagactggttgcccttggaagcaacgtgcaattggtggtctgtttcaccacagagcatctctctatgaacagttacattcatctgaatgaaaaatctatgctgtcacgtggtggacttcagaatgtctagggagatttcacagagagctcccctcgaagaggccagtgytgtagcttgtgctatgtttttccctccctgcccacacacaggcacacacacgtacacaatcttaaaacctcaggtgagaggggtgagctcacatgctccctagtccatggtatgtgccgtcttgggtctacacaatgccctctcttgattgagcaatggtacatggattgccttttatttccattcactactctctggctatgcagaaagtgacattttccctatcgtttaatcttgatatcactgtccctgtatactcaga

SEQ ID NO: 53166 - DNA, 411 bp, Homo sapiens
cccattccttcgctcaccgtaatgtgtcttgagggcatctgtgaccaggggaccactgcccagagagtggaggtcctggtgagggagtgtggagagcagcagcgtgaccttgatctgccctgatttggaggcggagcaagtgggtggtgcggcgagggcagctggcccggcctgagcaggtcccagcctctcagcactttgggccctgacgccatctttctaatgcccctctcgctcttgttttctctgacttttcacttttttcctgtttgtatcagagggctactggtggaccccagtggtggtctggtgagctgtttctcactcagggtttaccgacactgtagaacaatgctggggacgaacagcacggaccatttcagacttggaaacgtaattcagargtgggct

SEQ ID NO: 53167 - DNA, 582 bp, Homo sapiens
tgagggagggaagtattaaaatcctccagaaaagatgagttgcctaaccagaacacatgtggacatagatgccatcttcacccagaaggggaacaaggggatcccctcaggaagagttttggaatctgtcttggcacacaggcaaaggagtgattagggccctgagtgtctacacttggctacagaaggcaagtttttagagatttatatccacatgcttgttttgggctctaaaaaagttaaatgaggctgagcacagttgctcacgcctgaggctgaggtgggcagatcactttaccccgggagttcaagaccagcctgggtgtcacggtgaaaccccatttctacaaaaattcaccagatgtggtagcacgtgcctgtgatctcagctacttgggaggctgaggtgggaggatagcttgagcccgggaggttgaggcttcagtgagccgtgattgagccactgcactccagcctgggcaacagagtgagaccctgtctcaaaaacwttttttttaaagttaaaaaaaaaaatcaaatgatagattcaggaagccaagtgaagcccaacatgattaaccc

SEQ ID NO: 53168 - DNA, 1415 bp, Homo sapiens
ggctactgtatatttaccaccagggctttattcatgcactyttagttgaacacagataatacgttttacttattcctcctttgaattctactcatttatcactggaacactatccacatttatatatagcagactcaaactatcttaaactgaattggaagactgcaggcttgaattatttaaaagaaaaacatttccacttgtcctgccaagtacttgatcaatgctcacttaagtgatgtaatcatctcctctcattttgtaagctctattctctctcttcaggtgactaagcagtctgcaatcttccttcctttaattgaataattttcaggcttgtgtcttatccttccggtttttacaaattcatgcaatcattttctcctgtgactacagtaaagggttttatggctatggtcctttcgttagcacacatgtctctagaactctctagatctgctacacatacactgtctcaacgcagactttcatctactcttatgttccagatagactagctactctgcaatggctatctttttctgcttgtggtcttgcttttccttctttttgattgaccttcctgtgccttccacacatccctctggctcaggtattttttttctcctaactcagatattttttttctccatacctctcagatattttttttctcctacctctctggacctgcacggtacttttggtaatgttatcacctactattgtaaacacagctactgtttatcccacctctggacctgcacgatacttttggtaatgttatcacttactattgtaaacatagctactgtttatcccacctctggacttgcatggtacttttggtaatgttatcacctaatattgtaaacatagctactgtttattaagcactaaccatgtgctgtgtttggagccttatgtatgtaacacaaactatccagcttttcctcctacccctcacaatgcactttccagcccctataaaatctgtcacttacaggcctggcacagtgcccggcacatagcaggtgctcaagaaatggaaggtattattatcataattatgagaagaagcaccatatgacttattcatgtttgaccccaatgtctggttcgtttaatatttgtttacaaaactaggcaatgggctgggcacagtggtttacgcactttgggagaccaaggcgggcaaatcatttgagatcaggagctcaagaccagcctggcaaacatagtgaaaccctgtctctactaaaaaaatggaaattactgggtgtggtggcacatgcctgtaatcccagctacttgggaggctgaggcaggagaattgctggaacccgggaggcggaggttgcagtgagccgagatcgcgccactgcactcccgcctaggcgacaagagtgagactc

SEQ ID NO: 53169 - DNA, 1415 bp, Homo sapiens
ggctactgtatatttaccaccagggctttattcatgcactcttagttgaacacagataatacgttttacttattcctcctttgaattctactcatttatcactggaacactatccacatttatatatagcagactcaaactatcttaaactgaattggaagactgcaggcttgaattatttaaaagaaaaacatttccacttgtcctgccaagtacttgatcaatgctcacttaagtgatgtaatcatctcctctcattttgtaagctctattctctctcttcaggtgactaagcagtctgcaatcttccttcctttaattgaataattttcaggcttgtgtcttatccttycggtttttacaaattcatgcaatcattttctcctgtgactacagtaaagggttttatggctatggtcctttcgttagcacacatgtctctagaactctctagatctgctacacatacactgtctcaacgcagactttcatctactcttatgttccagatagactagctactctgcaatggctatctttttctgcttgtggtcttgcttttccttctttttgattgaccttcctgtgccttccacacatccctctggctcaggtattttttttctcctaactcagatattttttttctccatacctctcagatattttttttctcctacctctctggacctgcacggtacttttggtaatgttatcacctactattgtaaacacagctactgtttatcccacctctggacctgcacgatacttttggtaatgttatcacttactattgtaaacatagctactgtttatcccacctctggacttgcatggtacttttggtaatgttatcacctaatattgtaaacatagctactgtttattaagcactaaccatgtgctgtgtttggagccttatgtatgtaacacaaactatccagcttttcctcctacccctcacaatgcactttccagcccctataaaatctgtcacttacaggcctggcacagtgcccggcacatagcaggtgctcaagaaatggaaggtattattatcataattatgagaagaagcaccatatgacttattcatgtttgaccccaatgtctggttcgtttaatatttgtttacaaaactaggcaatgggctgggcacagtggtttacgcactttgggagaccaaggcgggcaaatcatttgagatcaggagctcaagaccagcctggcaaacatagtgaaaccctgtctctactaaaaaaatggaaattactgggtgtggtggcacatgcctgtaatcccagctacttgggaggctgaggcaggagaattgctggaacccgggaggcggaggttgcagtgagccgagatcgcgccactgcactcccgcctaggcgacaagagtgagactc

SEQ ID NO: 53170 - DNA, 607 bp, Homo sapiens
gccttaagattaaaatgcctttaaagagctcaaagagtctgctttttcaaccttctgctttctgggtccatgtggaatttaggcacaggtaaggcctatctcttcagagtaggtttctctctctctctgtctctctgtctctctctctctctctctctcacacacacacactgtctcacactctctatctctctctttctctctctctctccctctctttctctctcttctctctctctctctctctctcatcctctttttctgcacatgaaaatgtataatttttagatttggaagagagaaggaaacattgcttgggtctccggcccaagactttgcctaatcaatgtttggttgaattattaagttgaaaatttaattctaattaaaacacactttgcttctcgtttgcctattaagtttttagtttggagttacttcatatcacagctatggaygctggcttcaaaaattaatgctattaaaataacctaataccaaatctctaattgttaacatagtttgtatacatagctctaaatcttgtcactgaaccagtgtttaattgtgacatctcaaaataatggaaacggaatatgagtttgga

SEQ ID NO: 53171 - DNA, 564 bp, Homo sapiens
tgccaaacrttcatttactgtgatgcaccattttataaataccatagagcatattttaataaggcaatggaaagcttctaagctctagaaaaaaatagaattgtgacattttgtaataggttcaaggaaatcctcaagatagttaaagtatggagaaaaatggactgagagtgttttttaggactattacaattatttattttaaaacaatcaaattctgaaatttgatttaaatataaaatatgattatgctcaaaacggtaatcagttctctcaaaaagaaaacaaagaaaataaaagactcggaggagaatatcatcatttgaaaatgcaaaaccagtttaccatattttaggtaatttttgtgtttaagatcctctctaaagatatttttgacactatagaaagttgtaagacatttttttaagtgtatcaggccctcaggaaacaatttaactaaaccatgcttcagaaaaaactaaaactaagtggttcaactgagcctgataattgaaacctaggttccaaaaattcctgaatagctctctgggactatcttaagtg

SEQ ID NO: 53172 - DNA, 564 bp, Homo sapiens
tgccaaacattcatttactgtgatgcaccattttataaataccatagagcatattttaataaggcaatggaaagcttctaagctctagaaaaaaatagaattgtgacattttgtaataggttcaaggaaatcctcaagatagttaaagtatggagaaaaatggactgagagtgttttttaggactattacaattatttattttaaaacaatcaaattctgaaatttgatttaaatataaaatatgattatgctcaaaacggtaaycagttctctcaaaaagaaaacaaagaaaataaaagactcggaggagaatatcatcatttgaaaatgcaaaaccagtttaccatattttaggtaatttttgtgtttaagatcctctctaaagatatttttgacactatagaaagttgtaagacatttttttaagtgtatcaggccctcaggaaacaatttaactaaaccatgcttcagaaaaaactaaaactaagtggttcaactgagcctgataattgaaacctaggttccaaaaattcctgaatagctctctgggactatcttaagtg

SEQ ID NO: 53173 - DNA, 564 bp, Homo sapiens
tgccaaacattcatttactgtgatgcaccattttataaataccatagagcatattttaataaggcaatggaaagcttctaagctctagaaaaaaatagaattgtgacattttgtaataggttcaaggaaatcctcaagatagttaaagtatggagaaaaatggactgagagtgttttttaggactattacaattatttattttaaaacaatcaaattctgaaatttgatttaaatataaaatatgattatgctcaaaacggtaatcagttctctcaaaaagaaaacaaagaaaataaaagactcggaggagaatatcatcatttgaaaatgsaaaaccagtttaccatattttaggtaatttttgtgtttaagatcctctctaaagatatttttgacactatagaaagttgtaagacatttttttaagtgtatcaggccctcaggaaacaatttaactaaaccatgcttcagaaaaaactaaaactaagtggttcaactgagcctgataattgaaacctaggttccaaaaattcctgaatagctctctgggactatcttaagtg

SEQ ID NO: 53174 - DNA, 548 bp, Homo sapiens
atataattgtcctatggttgtaaccttgatagtgctgttaccatgggggttgggtggtggggcgaagtgcatttcccaaaactgttggctagctgagggatgagagctccatccatgaaaaccagtcttccagaggaggatccccaaacccagagagctatttagagtttgaaacaaattgttctccttctcaaaagtggakcctcagaatggttagaatcatcaactgcacagcctaggtcagaagtgaagtttgtcctgttttatgaagggaaagacacccttgtttagtgagcactgaccaagcactagataccccactgaatactccatatacataaaagcactgaagtatcttaccagctgcataaccttgagcaagttgcttaacatctctgcctgttttctcctctgtgaaatggggaaaataacagcagcaccttataaggttattttgcatattaattaattaatacatatccaagtgcttctaaaagtgcttagcatataaggaaacactcagtagtgaaaactagcattattatttc

SEQ ID NO: 53175 - DNA, 548 bp, Homo sapiens
atataattgtcctatggttgtaaccttgatagtgctgttaccatgggggttgggtggtggggcgaagtgcatttcccaaaactgttggctagctgagggatgagagctccatccatgaaaaccagtcttccagaggaggatccccaaacccagagagctatttagagtttgaaacaaattgttctccttctcaaaagtggatyctcagaatggttagaatcatcaactgcacagcctaggtcagaagtgaagtttgtcctgttttatgaagggaaagacacccttgtttagtgagcactgaccaagcactagataccccactgaatactccatatacataaaagcactgaagtatcttaccagctgcataaccttgagcaagttgcttaacatctctgcctgttttctcctctgtgaaatggggaaaataacagcagcaccttataaggttattttgcatattaattaattaatacatatccaagtgcttctaaaagtgcttagcatataaggaaacactcagtagtgaaaactagcattattatttc

SEQ ID NO: 53176 - DNA, 548 bp, Homo sapiens
atataattgtcctatggttgtaaccttgatagtgctgttaccatgggggttgggtggtggggcgaagtgcatttcccaaaactgttggctagctgagggatgagagctccatccatgaaaaccagtcttccagaggaggatccccaaacccagagagctatttagagtttgaaacaaattgttctccttctcaaaagtggatcstcagaatggttagaatcatcaactgcacagcctaggtcagaagtgaagtttgtcctgttttatgaagggaaagacacccttgtttagtgagcactgaccaagcactagataccccactgaatactccatatacataaaagcactgaagtatcttaccagctgcataaccttgagcaagttgcttaacatctctgcctgttttctcctctgtgaaatggggaaaataacagcagcaccttataaggttattttgcatattaattaattaatacatatccaagtgcttctaaaagtgcttagcatataaggaaacactcagtagtgaaaactagcattattatttc

SEQ ID NO: 53177 - DNA, 548 bp, Homo sapiens
atataattgtcctatggttgtaaccttgatagtgctgttaccatgggggttgggtggtggggcgaagtgcatttcccaaaactgttggctagctgagggatgagagctccatccatgaaaaccagtcttccagaggaggatccccaaacccagagagctatttagagtttgaaacaaattgttctccttctcaaaagtggatcckcagaatggttagaatcatcaactgcacagcctaggtcagaagtgaagtttgtcctgttttatgaagggaaagacacccttgtttagtgagcactgaccaagcactagataccccactgaatactccatatacataaaagcactgaagtatcttaccagctgcataaccttgagcaagttgcttaacatctctgcctgttttctcctctgtgaaatggggaaaataacagcagcaccttataaggttattttgcatattaattaattaatacatatccaagtgcttctaaaagtgcttagcatataaggaaacactcagtagtgaaaactagcattattatttc

SEQ ID NO: 53178 - DNA, 751 bp, Homo sapiens
cctacctctgcctgaagagagagactcccacctcaacagccagctttctgccttctagtcacgcctctcaattaggggtaaaaagaggggtcttcttgttttttgtagtggggggtgtctcactgtgttgcccggactgttctctaactcctggcctcaagtgatcctcctgcctgtagctctgaaagcacagcaattacaggtgtgagctgccacacccagcagcttcttaccctttaaacaccacacaaaattctcctggagttcctgggggagattgtctctttgaaatcaaaatctttcccaggacaccttgagcaatccttcaggctctttctggattggaggcagaagaaattgcagctcggtgaccctccctttgcaagggccccctctgcagcccttgaggggagtgaaagcattttcatttggcctcatgcccagctgmagccagctctttcacttctggagctgggctggttgtgataacctggaggagggggaatgagttgggatgactcacttgccccagcccatcaaccctggcctaggcttgtggccagacacctggttaaccaccccaagagagcttcctttctcagggaaataatgattattgattattgatcctctatatccacttcccaggacactgtcaggcacaccacaggcccttgggcatttttgtggcatcatcagccttattcctggatcaccatgtcaagctttcccaatagcagttggtggcaaa

SEQ ID NO: 53179 - DNA, 2576 bp, Homo sapiens
tgcataggccccagctactgacacgctgctccgagtgagcttgtcctgccttggcacaaattttaagtctcgccagggccacagaaggctcagtcccatggatggtaattttggctgctttctgcacttgaacgtaaagtcctcctcaagaaggcctgtggtccgcctcttggcaaccaagaagcctgcagtaccatacgatccgaggcatggactggagccccaaaggcagtgcacaccctgctcctgagcttgctgcttgtttcctctctgtggctccatttgtaggacagttgttgcactgaagcttgtgcatgccgggcaaggccaagctggctcaaacagcaaccacccacctctgcaagggtatgcctggagcaggtgcaccagtcaccatctagcggccggacatggtacatcacttcttctaccctaaaggtgggctacagcaccatctgcttttcctaaggccactgctccatcagcagttaggtggcagccaaggcaggacaagctcactcagagcagcgtgttagtacctggggcctgtgcatgccagggaggccgagctcgctcaaagagcaaccagccacctctgcaaggtctggccagggctacagaaggcccccctggatggtaatcctggctgcgttctgcacctgaacataaagtcctcctcaagatggcctgtggtctgcctctaggcaaccaagaagcccgcagtgctacacgacccctgaggcatggactagagccccaaaggcaatgcacaacctgctcctgagcctgctgctcgtttcytctctgtggctacatttgtagcagagtagttgcactgagctgtgtgcacgccaggcaaagccaggctggctcaaagagcaaccagccacctctgcaaggctgggccaggagcaggcggaccagccaccaacctcactccctgccagacatggtacatcctttcctctactctaaatgtagggccaagaggcagaccacaggccgtcttgaggaggactttatgttcaagtgcagaaagcaggcaggattgccacccaggggactcggcctgctgtggtccgcagtgccgtacgaactctgaggcatggactggtgccatgtgctttatagaaaaattaacttaagatccattaaagagttaaacgtgccatctgatttacctcaggcctctgctccatcagccatcaggtggcagccactcaggctgttgtaatctcgccatccctgcttccttgagtgggtgagcttggtggctggtccaactggtccaggcacacccttgcacaggtggctggtggctctttgagccagcttggccttgcctgccatgcacaggccccaggtactaacacgctggtccaagtgagtttgtcctgccttggaacaaattctaagtccggacagggccacagaaggccgagtgccctgggtggcaatcctggctgctttctacacttgaacataaagtcctcctctagacagcctgtggtctgcctcttggcaaccaagaagcccacagtgccatatgacgcctgaggcatggactggagccccaaaggcagtgcacaccctgctcctgagcctgctgctcgtttttatatggcgccatttgtagcacagttgttgcactgaagcttgggcatgccggccaaggccaagttgcctcaaagagcaaccagccgcctctgcaagggtgtgccttgagcaggtgcaccagtcaccaactagcagccagacatgtgcttcacttcttctaccctaaaggtagggccacagtgccatctgcttttcctaaggcctctgctccatcagcaattaggtggcagccaatcaagctgtgggaagctggccatccccacttccttcagtgggtgaggtggtggatgctctgcctgctctaggcgcacccttgaacaggtggctggttgctctttgagccagcttggccttgcctagcatgcataggccccagcgactggcacgctgctccgagtgagcttgtcctgccttggcacaaattctcagtctggccagggccacagaaggccgagtcccccggacggtaatcttggctgctttctgcacttgaatgtaaagtcctcctcaagacggcctgtggtctgcctcttggcaaccaagaagcctgcagtgccatatgacccgagtcatggactggagcccgaaaggcagtgtacaccctgtcctgatcttgctgcttgtttcctctctgtggctccattcatagcacagttgttgcactgaggcttgtgcaggccgagcaaggccaagctggctcaaagagcaaccagtcaactctgccacggtgtgccaggcaccggttctccagccaccaacctcactcactcccgcaaatggcacatcagttcttctaccctaaaggtaggaccaaagggccatctgcttttctgaagtcctctgctctatcagccatcacgtggcagccactcgggctgtgggaaccaggccatgtatttccttggttaagtgaggtttgtggttggtctacctgctgcaggtccaccctcgaataggtg

SEQ ID NO: 53180 - DNA, 2576 bp, Homo sapiens
tgcataggccccagctactgacacgctgctccgagtgagcttgtcctgccttggcacaaattttaagtctcgccagggccacagaaggctcagtcccatggatggtaattttggctgctttctgcacttgaacgtaaagtcctcctcaagaaggcctgtggtccgcctcttggcaaccaagaagcctgcagtaccatacgatccgaggcatggactggagccccaaaggcagtgcacaccctgctcctgagcttgctgcttgtttcctctctgtggctccatttgtaggacagttgttgcactgaagcttgtgcatgccgggcaaggccaagctggctcaaacagcaaccacccacctctgcaagggtatgcctggagcaggtgcaccagtcaccatctagcggccggacatggtacatcacttcttctaccctaaaggtgggctacagcaccatctgcttttcctaaggccactgctccatcagcagttaggtggcagccaaggcaggacaagctcactcagagcagcgtgttagtacctggggcctgtgcatgccagggaggccgagctcgctcaaagagcaaccagccacctctgcaaggtctggccagggctacagaaggcccccctggatggtaatcctggctgcgttctgcacctgaacataaagtcctcctcaagatggcctgtggtctgcctctaggcaaccaagaagcccgcagtgctacacgacccctgaggcatggactagagccccaaaggcaatgcacaacctgctcctgagcctgctgctcgtttcctctctgtggctacatttgtagcagagtagttgcactgagctgtgtgcacgccaggcaaagccaggctggctcaaagagcaaccagccacctctgcaaggctgggccaggagcaggcggaccagccaccaacctcactccctgccagacatggtacatcctttcctctacyctaaatgtagggccaagaggcagaccacaggccgtcttgaggaggactttatgttcaagtgcagaaagcaggcaggattgccacccaggggactcggcctgctgtggtccgcagtgccgtacgaactctgaggcatggactggtgccatgtgctttatagaaaaattaacttaagatccattaaagagttaaacgtgccatctgatttacctcaggcctctgctccatcagccatcaggtggcagccactcaggctgttgtaatctcgccatccctgcttccttgagtgggtgagcttggtggctggtccaactggtccaggcacacccttgcacaggtggctggtggctctttgagccagcttggccttgcctgccatgcacaggccccaggtactaacacgctggtccaagtgagtttgtcctgccttggaacaaattctaagtccggacagggccacagaaggccgagtgccctgggtggcaatcctggctgctttctacacttgaacataaagtcctcctctagacagcctgtggtctgcctcttggcaaccaagaagcccacagtgccatatgacgcctgaggcatggactggagccccaaaggcagtgcacaccctgctcctgagcctgctgctcgtttttatatggcgccatttgtagcacagttgttgcactgaagcttgggcatgccggccaaggccaagttgcctcaaagagcaaccagccgcctctgcaagggtgtgccttgagcaggtgcaccagtcaccaactagcagccagacatgtgcttcacttcttctaccctaaaggtagggccacagtgccatctgcttttcctaaggcctctgctccatcagcaattaggtggcagccaatcaagctgtgggaagctggccatccccacttccttcagtgggtgaggtggtggatgctctgcctgctctaggcgcacccttgaacaggtggctggttgctctttgagccagcttggccttgcctagcatgcataggccccagcgactggcacgctgctccgagtgagcttgtcctgccttggcacaaattctcagtctggccagggccacagaaggccgagtcccccggacggtaatcttggctgctttctgcacttgaatgtaaagtcctcctcaagacggcctgtggtctgcctcttggcaaccaagaagcctgcagtgccatatgacccgagtcatggactggagcccgaaaggcagtgtacaccctgtcctgatcttgctgcttgtttcctctctgtggctccattcatagcacagttgttgcactgaggcttgtgcaggccgagcaaggccaagctggctcaaagagcaaccagtcaactctgccacggtgtgccaggcaccggttctccagccaccaacctcactcactcccgcaaatggcacatcagttcttctaccctaaaggtaggaccaaagggccatctgcttttctgaagtcctctgctctatcagccatcacgtggcagccactcgggctgtgggaaccaggccatgtatttccttggttaagtgaggtttgtggttggtctacctgctgcaggtccaccctcgaataggtg

SEQ ID NO: 53181 - DNA, 2576 bp, Homo sapiens
tgcataggccccagctactgacacgctgctccgagtgagcttgtcctgccttggcacaaattttaagtctcgccagggccacagaaggctcagtcccatggatggtaattttggctgctttctgcacttgaacgtaaagtcctcctcaagaaggcctgtggtccgcctcttggcaaccaagaagcctgcagtaccatacgatccgaggcatggactggagccccaaaggcagtgcacaccctgctcctgagcttgctgcttgtttcctctctgtggctccatttgtaggacagttgttgcactgaagcttgtgcatgccgggcaaggccaagctggctcaaacagcaaccacccacctctgcaagggtatgcctggagcaggtgcaccagtcaccatctagcggccggacatggtacatcacttcttctaccctaaaggtgggctacagcaccatctgcttttcctaaggccactgctccatcagcagttaggtggcagccaaggcaggacaagctcactcagagcagcgtgttagtacctggggcctgtgcatgccagggaggccgagctcgctcaaagagcaaccagccacctctgcaaggtctggccagggctacagaaggcccccctggatggtaatcctggctgcgttctgcacctgaacataaagtcctcctcaagatggcctgtggtctgcctctaggcaaccaagaagcccgcagtgctacacgacccctgaggcatggactagagccccaaaggcaatgcacaacctgctcctgagcctgctgctcgtttcctctctgtggctacatttgtagcagagtagttgcactgagctgtgtgcacgccaggcaaagccaggctggctcaaagagcaaccagccacctctgcaaggctgggccaggagcaggcggaccagccaccaacctcactccctgccagacatggtacatcctttcctctactctaaatgtagggccaagaggcagaccacaggccgtcttgagsaggactttatgttcaagtgcagaaagcaggcaggattgccacccaggggactcggcctgctgtggtccgcagtgccgtacgaactctgaggcatggactggtgccatgtgctttatagaaaaattaacttaagatccattaaagagttaaacgtgccatctgatttacctcaggcctctgctccatcagccatcaggtggcagccactcaggctgttgtaatctcgccatccctgcttccttgagtgggtgagcttggtggctggtccaactggtccaggcacacccttgcacaggtggctggtggctctttgagccagcttggccttgcctgccatgcacaggccccaggtactaacacgctggtccaagtgagtttgtcctgccttggaacaaattctaagtccggacagggccacagaaggccgagtgccctgggtggcaatcctggctgctttctacacttgaacataaagtcctcctctagacagcctgtggtctgcctcttggcaaccaagaagcccacagtgccatatgacgcctgaggcatggactggagccccaaaggcagtgcacaccctgctcctgagcctgctgctcgtttttatatggcgccatttgtagcacagttgttgcactgaagcttgggcatgccggccaaggccaagttgcctcaaagagcaaccagccgcctctgcaagggtgtgccttgagcaggtgcaccagtcaccaactagcagccagacatgtgcttcacttcttctaccctaaaggtagggccacagtgccatctgcttttcctaaggcctctgctccatcagcaattaggtggcagccaatcaagctgtgggaagctggccatccccacttccttcagtgggtgaggtggtggatgctctgcctgctctaggcgcacccttgaacaggtggctggttgctctttgagccagcttggccttgcctagcatgcataggccccagcgactggcacgctgctccgagtgagcttgtcctgccttggcacaaattctcagtctggccagggccacagaaggccgagtcccccggacggtaatcttggctgctttctgcacttgaatgtaaagtcctcctcaagacggcctgtggtctgcctcttggcaaccaagaagcctgcagtgccatatgacccgagtcatggactggagcccgaaaggcagtgtacaccctgtcctgatcttgctgcttgtttcctctctgtggctccattcatagcacagttgttgcactgaggcttgtgcaggccgagcaaggccaagctggctcaaagagcaaccagtcaactctgccacggtgtgccaggcaccggttctccagccaccaacctcactcactcccgcaaatggcacatcagttcttctaccctaaaggtaggaccaaagggccatctgcttttctgaagtcctctgctctatcagccatcacgtggcagccactcgggctgtgggaaccaggccatgtatttccttggttaagtgaggtttgtggttggtctacctgctgcaggtccaccctcgaataggtg

SEQ ID NO: 53182 - DNA, 2576 bp, Homo sapiens
tgcataggccccagctactgacacgctgctccgagtgagcttgtcctgccttggcacaaattttaagtctcgccagggccacagaaggctcagtcccatggatggtaattttggctgctttctgcacttgaacgtaaagtcctcctcaagaaggcctgtggtccgcctcttggcaaccaagaagcctgcagtaccatacgatccgaggcatggactggagccccaaaggcagtgcacaccctgctcctgagcttgctgcttgtttcctctctgtggctccatttgtaggacagttgttgcactgaagcttgtgcatgccgggcaaggccaagctggctcaaacagcaaccacccacctctgcaagggtatgcctggagcaggtgcaccagtcaccatctagcggccggacatggtacatcacttcttctaccctaaaggtgggctacagcaccatctgcttttcctaaggccactgctccatcagcagttaggtggcagccaaggcaggacaagctcactcagagcagcgtgttagtacctggggcctgtgcatgccagggaggccgagctcgctcaaagagcaaccagccacctctgcaaggtctggccagggctacagaaggcccccctggatggtaatcctggctgcgttctgcacctgaacataaagtcctcctcaagatggcctgtggtctgcctctaggcaaccaagaagcccgcagtgctacacgacccctgaggcatggactagagccccaaaggcaatgcacaacctgctcctgagcctgctgctcgtttcctctctgtggctacatttgtagcagagtagttgcactgagctgtgtgcacgccaggcaaagccaggctggctcaaagagcaaccagccacctctgcaaggctgggccaggagcaggcggaccagccaccaacctcactccctgccagacatggtacatcctttcctctactctaaatgtagggccaagaggcagaccacaggccgtcttgaggaggactttatgttcaagtgcagaaagcaggcaggattgccacccaggggactcggcctgctgtggtccgcagtgccgtacgaactctgaggcatggactggtgccatgtgctttatagaaaaattaacttaagatccattaaagagttaaacgtgccatctgatttacctcaggcctctgctccatcagccatcaggtggcagccactcaggctgttgtaatctcgccatccctgcttccttgagtgggtgagcttggtggctggtccaactggtccaggcacacccttgcacaggtggctggtggctctttgagccagcttggccttgcctgccatgcacaggccccaggtactaacacgctggtccaagtgagtttgtcctgccttggaacaaattctaagtccggacagggccacagaaggccgagtgccctgggtggcaatcctggctgctttctacacttgaacataaagtcctcctctagacagcctgtggtctgcctcttggcaaccaagaagcccacagtgccatatgacgcctgaggcatggactggagccccaaaggcagtgcacaccctgctcctgagcctgctgctcgtttttatatggcgccatttgtagcacagttgttgcactgaagcttgggcatgccggccaaggccaagytgcctcaaagagcaaccagccgcctctgcaagggtgtgccttgagcaggtgcaccagtcaccaactagcagccagacatgtgcttcacttcttctaccctaaaggtagggccacagtgccatctgcttttcctaaggcctctgctccatcagcaattaggtggcagccaatcaagctgtgggaagctggccatccccacttccttcagtgggtgaggtggtggatgctctgcctgctctaggcgcacccttgaacaggtggctggttgctctttgagccagcttggccttgcctagcatgcataggccccagcgactggcacgctgctccgagtgagcttgtcctgccttggcacaaattctcagtctggccagggccacagaaggccgagtcccccggacggtaatcttggctgctttctgcacttgaatgtaaagtcctcctcaagacggcctgtggtctgcctcttggcaaccaagaagcctgcagtgccatatgacccgagtcatggactggagcccgaaaggcagtgtacaccctgtcctgatcttgctgcttgtttcctctctgtggctccattcatagcacagttgttgcactgaggcttgtgcaggccgagcaaggccaagctggctcaaagagcaaccagtcaactctgccacggtgtgccaggcaccggttctccagccaccaacctcactcactcccgcaaatggcacatcagttcttctaccctaaaggtaggaccaaagggccatctgcttttctgaagtcctctgctctatcagccatcacgtggcagccactcgggctgtgggaaccaggccatgtatttccttggttaagtgaggtttgtggttggtctacctgctgcaggtccaccctcgaataggtg

SEQ ID NO: 53183 - DNA, 543 bp, Homo sapiens
ctttttttatatcatcgagaatcttccataaatgtactttggtttgaaatattttcttgaagtcagacatatttagctgtgacgtggaacagttcttctcacagcatcccctccctgcaaactgcaggtcctgaggtcagtggcccttgactctatggactctatrttcttccctggatccagaccctaactcaggggacagcggcaccgcctcctgcccggctctcggctgcctgcactgctcgtcatggtgacaggatggcctgccccagatgagtgtcagtgtgcgtgtgtgtgtgtgtgtgtgtgtgtgtgtgtgtgtgcttttgctgcatttcttctgtcttgcttttgtcatctctctttctccctttcctccctgaggcctgcacagggcagctgtgctatccacttctgaatgtggggtaagctgtggcccaggcctgggtgcctgctgggacctcccaggagatgtgtgggagcagacagcaggtgggctcagacactctaatgggcacttgtgccttgttctgtccctgtcat

SEQ ID NO: 53184 - DNA, 543 bp, Homo sapiens
ctttttttatatcatcgagaatcttccataaatgtactttggtttgaaatattttcttgaagtcagacatatttagctgtgacgtggaacagttcttctcacagcatcccctccctgcaaactgcaggtcctgaggtcagtggcccttgactctatggactctatgttcttccctggatccagaccctaactcaggggacagcggcaccgcctcctgcccggctctcggctgcctgcactgctcgtcatggtgacaggatggcctgccccagatgagtgtcagtgtgcgtgtgtgtgygtgtgtgtgtgtgtgtgtgtgtgtgcttttgctgcatttcttctgtcttgcttttgtcatctctctttctccctttcctccctgaggcctgcacagggcagctgtgctatccacttctgaatgtggggtaagctgtggcccaggcctgggtgcctgctgggacctcccaggagatgtgtgggagcagacagcaggtgggctcagacactctaatgggcacttgtgccttgttctgtccctgtcat

SEQ ID NO: 53185 - DNA, 543 bp, Homo sapiens
ctttttttatatcatcgagaatcttccataaatgtactttggtttgaaatattttcttgaagtcagacatatttagctgtgacgtggaacagttcttctcacagcatcccctccctgcaaactgcaggtcctgaggtcagtggcccttgactctatggactctatgttcttccctggatccagaccctaactcaggggacagcggcaccgcctcctgcccggctctcggctgcctgcactgctcgtcatggtgacaggatggcctgccccagatgagtgtcagtgtgcgtgtgtgtgtgtgtgtgtgtgtgtgtgtgtgtgtgcttttgctgcatttcttctgtcttgcttttgtcatctctctttctccctytcctccctgaggcctgcacagggcagctgtgctatccacttctgaatgtggggtaagctgtggcccaggcctgggtgcctgctgggacctcccaggagatgtgtgggagcagacagcaggtgggctcagacactctaatgggcacttgtgccttgttctgtccctgtcat

SEQ ID NO: 53186 - DNA, 543 bp, Homo sapiens
ctttttttatatcatcgagaatcttccataaatgtactttggtttgaaatattttcttgaagtcagacatatttagctgtgacgtggaacagttcttctcacagcatcccctccctgcaaactgcaggtcctgaggtcagtggcccttgactctatggactctatgttcttccctggatccagaccctaactcaggggacagcggcaccgcctcctgcccggctctcggctgcctgcactgctcgtcatggtgacaggatggcctgccccagatgagtgtcagtgtgcgtgtgtgtgtgtgtgtgtgtgtgtgtgtgtgtgtgcttttgctgcatttcttctgtcttgcttttgtcatctctctttctccctttcctccctgaggcctgcacagggcagctgtgctatccacttctgaatgtggggtaagctgtggcccaggcctgggtgcctgctgggacctcycaggagatgtgtgggagcagacagcaggtgggctcagacactctaatgggcacttgtgccttgttctgtccctgtcat

SEQ ID NO: 53187 - DNA, 513 bp, Homo sapiens
tcctctcttcttcaggtacattacctgtgctgaatacactcacttttatggtggcaagaagccaggtaaggcatgcagtctttctgttccccgttgggggagtggtattaaggaactgtgtcttcaggatacagtgagctgtaaaaatagacaacaagaacacggaaactatggtagacgaatgggctgaggacacagttcatgaaagagaaatatactcaagatagaagaacctgcttcatcttagtggtgatttttgtaaaatgtaatttaaaatattccccgatgctgggagctaagtaaaaaataaataagtaaatraaatacaaaattacatgtacatttaaatgttttttctctatcaagtttataaggaataaaaagaatgataatattttcagctgtcaaaactatcaagactacaataacaagagcactgtcataattttaatggaagtaaaaagtatgcacttttcccagtaagttcttttttgatgtaccccaagtgttttg

SEQ ID NO: 53188 - DNA, 599 bp, Homo sapiens
ctctgtcatccaggccggaatgcagtggcgtgatcttggctcaccgcaacctccgtctcccaggttcaagcaattccccttcctcagcctcccaagtagctgggattacaggcacccaccaccacgcctggctaatttttgtatttttagtagagacaaggtttcaccatgttggccgggctggtctcaaactcctgacgtcatgtgatccacctgccttggcctcccaaagtgctggggttacaggcgtgagccacgaygcccggccaggaagtcttttttaaaaccatgcggctgcctccagaggggaatcttgtgattagatgaaggtgatggaggaagactttctacttcgtacaattttatgcattttacattttgtaagatacattatgattcaaaaaaataagatctcattaaaaacatagttagggatggagcctaatacaaatttcaaacttgattctctttcaaacatttagaactgagtcttgagaaataaatggataatttttttcacaaatcttgaactaagaaatctatgcctatcatagaatgctgaattgcattgcacttttagaaaattttcattatagaag

SEQ ID NO: 53189 - DNA, 573 bp, Homo sapiens
gcactggcttttctgtcgttcacggcgtggcgctgagtcagcctgcaaccacacaagaaaacagctgttgagaaatacagcttcctgatttaaaaataaaatcagtaaatttctactaaaagtttctgctaaattccttattgcattctatttcaaaggaggggtgaaatatctagaatgccacgatggtttttaagcataaggggttggatctgatgaatttcatgtttgtgctctgggactttactagaaaaaaatgagggatagatgactaattgctacaatattaatttcatacttacattccccataaggcatgaagcaaaatttgtcagcttgagggaaatgagactggactaattaycaggacctcagcaaataatgatccaatatccaaagaactgcagtctgccatgaaatatttgacaattcttttaaaaagtcagcaaacttttctaagaagagaacgcaggccaggcgcggtggctcacgcctgtaatgccagcactttgggaggccaaggtgggcggaacacctgaggtcgggagcttgagaccagcctgaccaacatgg

SEQ ID NO: 53190 - DNA, 573 bp, Homo sapiens
gcactggcttttctgtcgttcacggcgtggcgctgagtcagcctgcaaccacacaagaaaacagctgttgagaaatacagcttcctgatttaaaaataaaatcagtaaatttctactaaaagtttctgctaaattccttattgcattctatttcaaaggaggggtgaaatatctagaatgccacgatggtttttaagcataaggggttggatctgatgaatttcatgtttgtgctctgggactttactagaaaaaaatgagggatagatgactaattgctacaatattaatttcatacttacattccccataaggcatgaagcaaaatttgtcagcttgagggaaatgagactggactaattatcaggacctcagcaaataatgatccaatatccaaagaactgcagtctgccatkaaatatttgacaattcttttaaaaagtcagcaaacttttctaagaagagaacgcaggccaggcgcggtggctcacgcctgtaatgccagcactttgggaggccaaggtgggcggaacacctgaggtcgggagcttgagaccagcctgaccaacatgg

SEQ ID NO: 53191 - DNA, 573 bp, Homo sapiens
gcactggcttttctgtcgttcacggcgtggcgctgagtcagcctgcaaccacacaagaaaacagctgttgagaaatacagcttcctgatttaaaaataaaatcagtaaatttctactaaaagtttctgctaaattccttattgcattctatttcaaaggaggggtgaaatatctagaatgccacgatggtttttaagcataaggggttggatctgatgaatttcatgtttgtgctctgggactttactagaaaaaaatgagggatagatgactaattgctacaatattaatttcatacttacattccccataaggcatgaagcaaaatttgtcagcttgagggaaatgagactggactaattatcaggacctcagcaaataatgatccaatatccaaagaactgcagtctgccatgaaatatttgacaattcttttaaaaagtcagcaaacttttctaagaagagaaygcaggccaggcgcggtggctcacgcctgtaatgccagcactttgggaggccaaggtgggcggaacacctgaggtcgggagcttgagaccagcctgaccaacatgg

SEQ ID NO: 53192 - DNA, 573 bp, Homo sapiens
gcactggcttttctgtcgttcacggcgtggcgctgagtcagcctgcaaccacacaagaaaacagctgttgagaaatacagcttcctgatttaaaaataaaatcagtaaatttctactaaaagtttctgctaaattccttattgcattctatttcaaaggaggggtgaaatatctagaatgccacgatggtttttaagcataaggggttggatctgatgaatttcatgtttgtgctctgggactttactagaaaaaaatgagggatagatgactaattgctacaatattaatttcatacttacattccccataaggcatgaagcaaaatttgtcagcttgagggaaatgagactggactaattatcaggacctcagcaaataatgatccaatatccaaagaactgcagtctgccatgaaatatttgacaattcttttaaaaagtcagcaaacttttctaagaagagaacgcaggccaggcgcrgtggctcacgcctgtaatgccagcactttgggaggccaaggtgggcggaacacctgaggtcgggagcttgagaccagcctgaccaacatgg

SEQ ID NO: 53193 - DNA, 550 bp, Homo sapiens
tgagaatacatgtgtctgctccatgctgcgccagcccagtcatggaactcaatgtttctgcagtttccctccgaacatttccagttgcccaaaggcattcgtggtttcacaaattttactgaaggtttagtatggagacggcagagagttgcatcttgtactccattgcaaacaatggaaaatcctccttcgatgctactctgtaggttacccctaggttacccctcagtgggtgccaccccttagagatcgctctcactctgggagtggtcagagaggagcgcagggctgtccatgtccctcccacatggctgctgcctcctccttcctgactgcagcctygggctgggagctcccgtcttcctccctggtcacagcttgggaaatcgtctcctattacatgttttaaaaattgaggtgaaattcacataacataaaattaaccatttaaaagtgtacaattcaggcgtccaacatggtgaaaccacgtctctactaaaaatataaaaaattaggtgtggtggtgcacgcctgtagtcccagctacttg

SEQ ID NO: 53194 - DNA, 550 bp, Homo sapiens
tgagaatacatgtgtctgctccatgctgcgccagcccagtcatggaactcaatgtttctgcagtttccctccgaacatttccagttgcccaaaggcattcgtggtttcacaaattttactgaaggtttagtatggagacggcagagagttgcatcttgtactccattgcaaacaatggaaaatcctccttcgatgctactctgtaggttacccctaggttacccctcagtgggtgccaccccttagagatcgctctcactctgggagtggtcagagaggagcgcagggctgtccatgtccctcccacatggctgctgcctcctccttcctgactgcagccttgggctgggagctcccgtcttcctccctggtcacagcttgggaaatcrtctcctattacatgttttaaaaattgaggtgaaattcacataacataaaattaaccatttaaaagtgtacaattcaggcgtccaacatggtgaaaccacgtctctactaaaaatataaaaaattaggtgtggtggtgcacgcctgtagtcccagctacttg

SEQ ID NO: 53195 - DNA, 581 bp, Homo sapiens
tcgatcagattgcattgtgattaggaattccctgggtaaccactgagractctccaccctggctggtcagagctattgtctttttaccatgtgagagctctggggaattctatgtttacaactccctggttcttttttactttgtcttgtgatgtttcactcttttgcataatccagcactcatcagactcaagtagacctatatgcaaatctccgggtcttctcatcttcttagctccctcctatccagatcctggcccacagcttccaactggctcagtctccccaaactctcatttccatctcttcattttcatgaggctaccaggttctgcatgactcctcctacctgtacccataacctagaaattgacttcaagcaaaatgctgcagtcagtatggggcccggttgtctgtttctgttttttcatggatcactgtcttgtgttgtcaattgtccaatgtctgaaacagttgttacatacgttcagttttccaaccaaaaaagcttaagtctagtccttgttactctaccataattggaagcagaaggtttttgctttggctttttaactatagtt

SEQ ID NO: 53196 - DNA, 665 bp, Homo sapiens
aaggtatcactgtatcagaaatccaactacaacatacattagccctgtgatcttggataattcactgcacctctctgcttcactgcaaaatatcagtgacgacattgccctgcagagttgttgtgggtgtagtagaattctgaggctggattgtgtttctcctagggacttaatgtacctggctacatttaggtctaaagctctttaaaatggctgaatggattaaaaaaataccattatcagtcaaaatatcctactgcaaattatagattaaatgtactacagctaactgaagtagaaaataaaatcattggaaagataatagaaaggtcacagaatggatggaaatctgagagaagcctagaaataaaagctaatcaggagagtggttcagtagtaagaagcaaatccaaggacacaacccagaaataattggttgagaggtcatgtcagtgatattgctgtagarcacctgatattgccattactgacctcatggtgccaccatctctgatgtgcacactcaatttattgagacttggtcagatgcccacatgagattaactggggtcttgtaattctgcagtaagagagcaagaccatgctctcccgaagacttacacaatagaaatactactaaagtaggaagtgtcaaggcagtgcaa

SEQ ID NO: 53197 - DNA, 665 bp, Homo sapiens
aaggtatcactgtatcagaaatccaactacaacatacattagccctgtgatcttggataattcactgcacctctctgcttcactgcaaaatatcagtgacgacattgccctgcagagttgttgtgggtgtagtagaattctgaggctggattgtgtttctcctagggacttaatgtacctggctacatttaggtctaaagctctttaaaatggctgaatggattaaaaaaataccattatcagtcaaaatatcctactgcaaattatagattaaatgtactacagctaactgaagtagaaaataaaatcattggaaagataatagaaaggtcacagaatggatggaaatctgagagaagcctagaaataaaagctaatcaggagagtggttcagtagtaagaagcaaatccaaggacacaacccagaaataattggttgagaggtcatgtcagtgatattgctgtagaacacctgatattgccattactgacctcatggtgccaccatctctgatgtgcacactcaatttatygagacttggtcagatgcccacatgagattaactggggtcttgtaattctgcagtaagagagcaagaccatgctctcccgaagacttacacaatagaaatactactaaagtaggaagtgtcaaggcagtgcaa

SEQ ID NO: 53198 - DNA, 542 bp, Homo sapiens
gcgtggcacctcacctcacacctgctccctgctgctgagccccacgccaagctggagagcggatgagaagcatgtgtaaccagggtagaggtcgagagtcctctcgtgggggtctccatgttcaagggagctgccgaggcttgagcaggagcccccagcaggtcagcacctccagcctctgcaagtacaggggggtgggagggcaggggcttttgaggggcacgaggcttggggacagaggacccgcatggcttagggatggatggcatggtatgggtgctgggagggaggcaggaagagcagggctggtcccaggggcaagcacaaactcaggcctgttacacggccccagacctcactcagarggggaccctggccgctggcgtgggtttcctcctctctgaagattaggtggtcttggctgccccttttgtatgaagtcatggatatcttttgagatgggggctctcgggaagaaggtgtggggtacattagcaccagcgtttcctgagtgccgcctcccccgttaatgtccctctcca

SEQ ID NO: 53199 - DNA, 542 bp, Homo sapiens
gcgtggcacctcacctcacacctgctccctgctgctgagccccacgccaagctggagagcggatgagaagcatgtgtaaccagggtagaggtcgagagtcctctcgtgggggtctccatgttcaagggagctgccgaggcttgagcaggagcccccagcaggtcagcacctccagcctctgcaagtacaggggggtgggagggcaggggcttttgaggggcacgaggcttggggacagaggacccgcatggcttagggatggatggcatggtatgggtgctgggagggaggcaggaagagcagggctggtcccaggggcaagcacaaactcaggcctgttacacggccccagacctcactcagaaggggaccctggcygctggcgtgggtttcctcctctctgaagattaggtggtcttggctgccccttttgtatgaagtcatggatatcttttgagatgggggctctcgggaagaaggtgtggggtacattagcaccagcgtttcctgagtgccgcctcccccgttaatgtccctctcca

SEQ ID NO: 53200 - DNA, 542 bp, Homo sapiens
gcgtggcacctcacctcacacctgctccctgctgctgagccccacgccaagctggagagcggatgagaagcatgtgtaaccagggtagaggtcgagagtcctctcgtgggggtctccatgttcaagggagctgccgaggcttgagcaggagcccccagcaggtcagcacctccagcctctgcaagtacaggggggtgggagggcaggggcttttgaggggcacgaggcttggggacagaggacccgcatggcttagggatggatggcatggtatgggtgctgggagggaggcaggaagagcagggctggtcccaggggcaagcacaaactcaggcctgttacacggccccagacctcactcagaaggggaccctggccgctggcrtgggtttcctcctctctgaagattaggtggtcttggctgccccttttgtatgaagtcatggatatcttttgagatgggggctctcgggaagaaggtgtggggtacattagcaccagcgtttcctgagtgccgcctcccccgttaatgtccctctcca

SEQ ID NO: 53201 - DNA, 567 bp, Homo sapiens
ttaaatttgtttctttctacaaattctccttttgtctttgaactataccaaaagatctaacctttcctgatttatattttataatattgattatttaaaggaattatccaaaatgtattcaaggatagagcttaatatgatgcttaatcaattttctaatagttttttttagtgtatacatggaattaaatctaagcaaccagtcaagaatctaatacatttttttctcttattttggtatctaattagctgttttcttttcttattgcaagagcacgctcagtaaaatgtagaatcaaaataaaatgaaattatagatataatgttgaattaaattaattacagatataatgatatattgcaggtcttcctctttgaagattataatacaagtgtaacaaatgctawtaattaaattagaaaaaaccataaatacttacaacagagtaaaaatgttgtatcccatttaaaatatatgtgtgattctatatttacttaatgtagttacattcagtcatatttggtatatagtataaatctacctcctgctcaagaagtttcttgcca

SEQ ID NO: 53202 - DNA, 579 bp, Homo sapiens
gagttgtcagcctagagcacaccatcggttccctgtgatgcggccttctcatccttttctctccctaatgacgttcttgttggttccatccttctcatcacacagcatatctcacagaagaccactctttcactgtccaccttgaatactccttatgaatgtgtgcccccatatgcacctgacatacctccagtttcccaaaatccactttgttttcttgcctcccacagcagaattgccttrtctcacacagtggtgacagcactctgtaataatctgcatgggccagggctccttggttgcaggtaacagataccactgttacggcccaactctgttcttctatgttgaagccggaacccccagcgcctcagaatgggatcacatctggagaaggcgcctttaaagaggtgattaaaattgtgaaatcaagtttagcctaaagcttcccccttacatattttaaatttggactaaaggtttctctgtacatcgtgaactgtaacaggtggaggcgtaaaccgaccgtagcctacacttgtgccaatcaccgagttctgaccaatcaaatgcagccaa

SEQ ID NO: 53203 - DNA, 1230 bp, Homo sapiens
ttctaatttaggagaaaaaaaggagcagcgaaattatttttacattataagtgccacctaatatattgtcacagtatttttatagatatccagtttgtatttctcaaaaataaaaaacaaactatattatgattcatatatgctatataataacatagtttaccttgagtttataaactttaaacagaaaattgttctttaaaattcccttaattcagttcttatttaattggttttaacaaagctacattttgtaataaatccaacaattcacctttattttatatggactaaactataatgattaaatatggtgactttattctttaaattatttatcccacctgtaacaatcataatgcttccttatgtcattcatgttaatggcyatatctttctctttgagtaaccatatctcaatataggaagcatctcacagtttgcttctatttatgtctcattcacaccaaattagcattgtgtataccagtctcccaagggaaagaggaaaaacattctgagcagatttgaaagttagttatttggcactatgttctaaaaactttgctgactttttgacatatgccagcccatgtgtagctaatccagaatcctcttaggtaatgctacctccatccttctttcactttaaaaacaagtgggcttgaaaacatttcactagtggagtatagcacatcaaggatcgggctctttccttctcaataacgtatttttttaaaatctaaaacacagaagggattgaccctaagatatattttttaatatgtcataagaacgagtaagtttgctatgtcataacatttctatagaaaaatagacaaaagcccacccaaaatgaaaaggaaaagatgtattcaaatatcatcagtgtgattcatttcaaaagttaaagaaggtcatgatactaagggagagaagcaatgtccggtcttgcctaaagaagatgattatgaaaggaccattccattttcctctcagataaaatgtgatacgttgggattaggtattcatttctgtttgatgtatgaacttattcaaaaaaggtgtcaaatacaaagcattggtgtccaacaatattatttggttatcccttaaattatcctttaaaatgtgcaagaatatggtatattccattttatattatttcttacttatactatcagttgaaatttaatttttatttttaaaatttttcattatttttgtgga

SEQ ID NO: 53204 - DNA, 1230 bp, Homo sapiens
ttctaatttaggagaaaaaaaggagcagcgaaattatttttacattataagtgccacctaatatattgtcacagtatttttatagatatccagtttgtatttctcaaaaataaaaaacaaactatattatgattcatatatgctatataataacatagtttaccttgagtttataaactttaaacagaaaattgttctttaaaattcccttaattcagttcttatttaattggttttaacaaagctacattttgtaataaatccaacaattcacctttattttatatggactaaactataatgattaaatatggtgactttattctttaaattatttatcccacctgtaacaatcataatgcttccttatgtcattcatgttaatggccatatctttctctttgagtaaccatatctcaatataggaagcatctcacagtttgcttctatttatgtctcattcacaccaaattagcattgtgtataccagtctcccaagggaaagaggaaaaacattctgagcagatttgaaagttagttatttggcactatgttctaaaaactttgctgactttttgacatatgccagcccatgtgtagctaatccagaatcctcttaggtaatgctacctccatccttctttcactttaaaaacaagtgggcttgaaaacatttcactagtggagtatagcacatcaaggatcgggctctttccttctcaataacgtatttttttaaaatctaaaacacagaagggattgaccctaagatatattttttaatatgtcataagaacgagtaagtttgctatgtcataacatttctatagaaaaatagacaaaagcccacccaaaatgaaaaggaaaagatgtattcaaatatcatcagtgtgattcatttcaaaagttaaagaaggtcatgatactaagggagagaagcaatgtccrgtcttgcctaaagaagatgattatgaaaggaccattccattttcctctcagataaaatgtgatacgttgggattaggtattcatttctgtttgatgtatgaacttattcaaaaaaggtgtcaaatacaaagcattggtgtccaacaatattatttggttatcccttaaattatcctttaaaatgtgcaagaatatggtatattccattttatattatttcttacttatactatcagttgaaatttaatttttatttttaaaatttttcattatttttgtgga

SEQ ID NO: 53205 - DNA, 317 bp, Homo sapiens
tttttctgctaaagtgaaataataaaatgctggccttggtcttagcctagatcacctgcataatttgtartcaaaatagtagtattttttgtgattttgcatttattgagaaaatgtgtctttctgtgttaaataaaataaactgattcaactttaatttttgtactgtgagtccagttttaccttctcttccttccaataaatagatgtattaaaactgaaatttaagattatttcgtgaccgggcatggtggctcaagcctgtaattccagcactttgggaggcttaggcacatggatcgcatgaggccaggagt

SEQ ID NO: 53206 - DNA, 549 bp, Homo sapiens
aaaatatttttagatttatgaagtagctcagaaaaccaatttcttaaaaatcatatttggaaaaatacattattaggccgaacttactttcatccattgctgccctctctaaggtaaaacacaaaaacaaataaaatctatcaaakaattgtataacttttactagtattgaaaaagggtatttgagttgctttaaattttatttttataatgtatcttgagaagattgcagttttaccactagtcaaacttttataaacacatcagaaattacatttaaaaaccagatcaggaattatttttctaagaaactagaagaaatcaaagacaaattaataataactaatagtttgaagcccgcttatctacaagactctaaagatataaaaacaagaacataagttaaaggcagcttcatttcacgcttcagaaagctggtctttggcacacaagtttgcttgccttgtatgatcattttgcatattcagaggtgaatccctggcggggacaggaaaacatgtgtgggtgaagctcagagtagcagcacgt

SEQ ID NO: 53207 - DNA, 612 bp, Homo sapiens
agcctcccaagtagctggcattacaggcacccgccaccacacctggctaatttttgtacttggggtagaggcagggtttcaccatgttggccaggctggtcttgaactcctgacctcaggtgatccacctgcctcagcctcccaaagttctgggattacaggygtgagccacctcgccctgccactgtgtttgttttttaacttaccctaccattggctgaaatttctgcagctgaaaaatagaagcaagctctagttgctttctacttaagataggtatgtaagtcctggctacatcatgcctcatgacccaaacagccattctaggggcacaggcagcaggcagcatgcataattccatctgtctcatgctaagattcacgggtgatcactttcaaagagcatgctgaacttctagtgaaactttacacactgaaaacttacacaccacactttcatggtggactgcaaggtcagtgtttatggacactactgagagaaggccagggagagtgatgaagtatgaatatgaaagatgcagagaaggcaaagaaaacagaaaagaaacacaaagcttatgtccctgacataacgatgggagacagtcactca

SEQ ID NO: 53208 - DNA, 612 bp, Homo sapiens
agcctcccaagtagctggcattacaggcacccgccaccacacctggctaatttttgtacttggggtagaggcagggtttcaccatgttggccaggctggtcttgaactcctgacctcaggtgatccacctgcctcagcctcccaaagttctgggattacaggtgtgagccacctcgccctgccactgtgtttgttttttaacttaccctaccattggctgaaatttctgcagctgaaaaatagaagcaagctctagttgctttctacttaagataggtatgtaagtcctggctacatcatgcctcatgacccaaacagccattctaggggcacaggcagcaggcagcatgcataattccatctgtctcatgctaagattcaygggtgatcactttcaaagagcatgctgaacttctagtgaaactttacacactgaaaacttacacaccacactttcatggtggactgcaaggtcagtgtttatggacactactgagagaaggccagggagagtgatgaagtatgaatatgaaagatgcagagaaggcaaagaaaacagaaaagaaacacaaagcttatgtccctgacataacgatgggagacagtcactca

SEQ ID NO: 53209 - DNA, 612 bp, Homo sapiens
agcctcccaagtagctggcattacaggcacccgccaccacacctggctaatttttgtacttggggtagaggcagggtttcaccatgttggccaggctggtcttgaactcctgacctcaggtgatccacctgcctcagcctcccaaagttctgggattacaggtgtgagccacctcgccctgccactgtgtttgttttttaacttaccctaccattggctgaaatttctgcagctgaaaaatagaagcaagctctagttgctttctacttaagataggtatgtaagtcctggctacatcatgcctcatgacccaaacagccattctaggggcacaggcagcaggcagcatgcataattccatctgtctcatgctaagattcacgggtgatcactttcaragagcatgctgaacttctagtgaaactttacacactgaaaacttacacaccacactttcatggtggactgcaaggtcagtgtttatggacactactgagagaaggccagggagagtgatgaagtatgaatatgaaagatgcagagaaggcaaagaaaacagaaaagaaacacaaagcttatgtccctgacataacgatgggagacagtcactca

SEQ ID NO: 53210 - DNA, 642 bp, Homo sapiens
accagcccctctggtggttcctgggtgtgcactgaatgtgtatgttttgcttgatgtctgagggtggcagaaaggaaagtgagtttggaccaaccaccagggtgtagaaaactggcctggccattgaagcccctgtctccctactccattctgaacttggatgaggagacagatcattcaggcttgtgggagccacagccacccaataagttttacctcatgctcttgccatccaggtaccctgattccctcaccaaaaaataaatcttgaccgaaaactctaaattatacacagcacttccatgtacattctcctttgaattcttataattgccctaggatgcaggtagatgaggaaactgggtctccaatgctggtgtaactctctgtattgtttacaagttcttttacgttcaaggtctcttccaagrcatacttatgtttgagctcagaggagttgaaagaactgctggagccaggacctaaactcagacaaaagaaagagagccccagcatagcaccctgctgcccctgcctggcttctaagcctctgtgtacctctgagcctcaccctgcctcttgggtaccacagaagaaacacttctcaggagagaccatctggagaaggagagctgaggagtt

SEQ ID NO: 53211 - DNA, 561 bp, Homo sapiens
tacragagcaggtgagtccccgacctggtcacccccccaacccccacaggcaggccgatcctctcccaccatgccaggagatgccagatggctgcaggggcctttgtcccccgcttaccactcacccaattccaccccccctcaccccatcccaccctccgagtgaagagagcaaacacctacgccctgttttccaatccaggagaagttctcacaaacggatatcctgatcctaatgacagcggccatctgccacgatctggaccatcccggctacaacaacacgtatgtacaggattttctctttttttccttttaaaaggcaccctggctactggagggaacctgtcagcccaaccctcagagcagttcccagatggagctgtcaacgacggcctcccagcccccaactctgcctccactgacacagctcctggcttctggactttgcccagggccttgggtctccccggagtaggaactttcaggattatcaaaccccaggggctctttcccactcctgtgcgggcctggcttcaggctcaggtgcacggcagatcc

SEQ ID NO: 53212 - DNA, 561 bp, Homo sapiens
tacgagagcaggtgagtccccgacctggtcacccccccaacccccacaggcaggccgatcctctcccaccatgccaggagatgccagatggctgcaggggcctttgtcccccgcttaccactcacccaattccaccccccctcaccccatcccaccctccgagtgaagagagcaaacacctacrccctgttttccaatccaggagaagttctcacaaacggatatcctgatcctaatgacagcggccatctgccacgatctggaccatcccggctacaacaacacgtatgtacaggattttctctttttttccttttaaaaggcaccctggctactggagggaacctgtcagcccaaccctcagagcagttcccagatggagctgtcaacgacggcctcccagcccccaactctgcctccactgacacagctcctggcttctggactttgcccagggccttgggtctccccggagtaggaactttcaggattatcaaaccccaggggctctttcccactcctgtgcgggcctggcttcaggctcaggtgcacggcagatcc

SEQ ID NO: 53213 - DNA, 561 bp, Homo sapiens
ataaatcctttgtccctcttccagcccaagaaactgaggcttagcaaaggtagggagcctgcccaaggaggggacaggccctggacagacacatctgctgcatccaacataggagagctgccccctgccccataaccccagctgctgtcacctgccacccacagcccagtcagcccccttccttttatttatttttttttcttttgagacagagtctcgctctgttgcccaggctggagtgtaatggcaggatctcggctcactgcaacctccacctcctgggttcaagcaattctcctgcctcagcctcccaaatagctgggattacaggcatgcgccaccaagccggctaattttcggtatttttaatagagacggggtttcatcatgttggccaggctggtcttgaactccagacctyaggtgatccacctgcctcgacctcccaaagtgctgggattacaggtgtgagccaccacgcccggccaccccttccattttagataagggggctttatgcctctcagggcgtgatgggaggagagtgagaggatatctgcg

SEQ ID NO: 53214 - DNA, 613 bp, Homo sapiens
tgttgctcaggctgttcttgaactcccgagttcaaacgatcctcctgcctgagcctcccacagtgctgggattccaggcayagcccccgcacctgacctggaaggtttttactcagcattattctctggaagttcctccaggcctttgtggggatggtttgttcctttctgctgctgagtagtattctgggtgtggatgggccacactgtttgatgattcagaggctgagggatgtctggattgtgtccggttctgggcagcttgctgtgaacattcactgactggcccttccttttgccctctgtgcagagggcccgagcagtccctctggttagataaggcagacacaatgtcccaatacataatttaacaggctctttgcagcctggagacgatgtaatgggttaccaggaaaaaccatttgagttcaagttccagcaacttttcaaaaacaataaaacaaaataaaaaacaccccaaatgctgcctcatgaaaaaaggtactaaaaaaaaaaaaaaaagaatgaacatcgattgacaggactagcatcatttcaccatgattcattaaaagaaagtgccaaaccagtgtttgtgctgaattcaagcatt

SEQ ID NO: 53215 - DNA, 613 bp, Homo sapiens
tgttgctcaggctgttcttgaactcccgagttcaaacgatcctcctgcctgagcctcccacagtgctgggattccaggcacagcccccgcacctgacctgraaggtttttactcagcattattctctggaagttcctccaggcctttgtggggatggtttgttcctttctgctgctgagtagtattctgggtgtggatgggccacactgtttgatgattcagaggctgagggatgtctggattgtgtccggttctgggcagcttgctgtgaacattcactgactggcccttccttttgccctctgtgcagagggcccgagcagtccctctggttagataaggcagacacaatgtcccaatacataatttaacaggctctttgcagcctggagacgatgtaatgggttaccaggaaaaaccatttgagttcaagttccagcaacttttcaaaaacaataaaacaaaataaaaaacaccccaaatgctgcctcatgaaaaaaggtactaaaaaaaaaaaaaaaagaatgaacatcgattgacaggactagcatcatttcaccatgattcattaaaagaaagtgccaaaccagtgtttgtgctgaattcaagcatt

SEQ ID NO: 53216 - DNA, 551 bp, Homo sapiens
ctcgaactcctgacttcaggcgatccacccgccttgactcccaaagtgctgggattacaggtatgagccacygcacccggcctgagctgggctttaaaacactgagttgaagggttattttgatcgcaggcaccttgttaaaggctttgctctcgtacgtatgtgggagggcctagaccttggtgggggattttgtgggctttggagtattcctcaaggctgaccagcacctctgcagaagacttggtttccaggctgctgtgggaagatctgatggtcatgttgtgtattcagagccttggtcccctccttttattgatgtttcctgaaataaaacccttttgctacatttcaagagcagtgatgggccaggcacaatggctcacgtctgtaatcacagcagtttaggaggctgaggcagttggattacttgagcccaggagtttgaaaccagcctgtgggctacgaaaattaaaaacaattcaccgggcgtgggggcacgcacctgtagtctcagctactttggaggctgaagcaggaggattgcttga

SEQ ID NO: 53217 - DNA, 551 bp, Homo sapiens
ctcgaactcctgacttcaggcgatccacccgccttgactcccaaagtgctgggattacaggtatgagccaccgcacccggcctgagctgggctttaaaacactgagttgaagggttattttgatcgcaggcaccttgytaaaggctttgctctcgtacgtatgtgggagggcctagaccttggtgggggattttgtgggctttggagtattcctcaaggctgaccagcacctctgcagaagacttggtttccaggctgctgtgggaagatctgatggtcatgttgtgtattcagagccttggtcccctccttttattgatgtttcctgaaataaaacccttttgctacatttcaagagcagtgatgggccaggcacaatggctcacgtctgtaatcacagcagtttaggaggctgaggcagttggattacttgagcccaggagtttgaaaccagcctgtgggctacgaaaattaaaaacaattcaccgggcgtgggggcacgcacctgtagtctcagctactttggaggctgaagcaggaggattgcttga

SEQ ID NO: 53218 - DNA, 651 bp, Homo sapiens
tgaggttttagtgtgctccccttttaccttcttgacttccttttctcttatacccattaaagtaaatatggagatgaaaagatgttgtaaatacatttccctcaygtagcacctcttcctcattcacctggaacatgtttacctagtgtgacaatgaacagtccagattgtctaactcatgagaaagggccatgtcacaatcacagtgatttgtttaaagaatcttgcccactgcataattagcctgtaggtcaccatctgtctctaagtcctcataaaactaaccatatgttgttttcatcaagggctgaacaaaagtaacatagacccttctccaaggaaaatgctacacgtttcttatggagaaagaggatattgagagaatgcttggcttcccagttattaatgcttggcttctcagttattaccatatttcctttatatttagaaaatttttattttgttctgttcatgctttgaccatggctattaacccaagcaacactaacaattgctagaagtttctgaagggggctcttctaggagacattgggtaaataggcttagggcctccaaattttatttttcctctgtggtttgacctcgtaatatgaagagaaaaacatacaagcaaatatatcttataaacag

SEQ ID NO: 53219 - DNA, 568 bp, Homo sapiens
aatctataaggaagatttccctttctgattaacacttaccattcaaatatatttttcagaaaacttgttgcgtattagttgtattgttcttagtttttctatttcatgtattcaaaatacaaattcatctgattttctgtagtttactcacttttaagtgtctaaaatattttaacaatttaataatacttggattcacaaaagtgtaataagaactaacaaatatcctacttttttggctacagattaatattaacagtaatattttagaaaaaatttcatacccctttagggtaaaagtaaagggctttataaaaatgtacttcaatataaatcatattaaatatttagaattaaatataaaatttgtttttgcttcaaagatayaataattttgaataaaatctgaataattctaaaattccttgtatgttagtaaaaccaaagtgaaaggttctaaggaaactaaaatcaaaagatgactgttgcaccctagattatgtattcattcatgaaggttttcttctttgcttcttttttaatgcttactgttgaacatagttgaaat

SEQ ID NO: 53220 - DNA, 568 bp, Homo sapiens
aatctataaggaagatttccctttctgattaacacttaccattcaaatatatttttcagaaaacttgttgcgtattagttgtattgttcttagtttttctatttcatgtattcaaaatacaaattcatctgattttctgtagtttactcacttttaagtgtctaaaatattttaacaatttaataatacttggattcacaaaagtgtaataagaactaacaaatatcctacttttttggctacagattaatattaacagtaatattttagaaaaaatttcatacccctttagggtaaaagtaaagggctttataaaaatgtacttcaatataaatcatattaaatatttagaattaaatataaaatttgtttttgcttcaaagatacaataattttgaataaaatctgaataattctaaaatyccttgtatgttagtaaaaccaaagtgaaaggttctaaggaaactaaaatcaaaagatgactgttgcaccctagattatgtattcattcatgaaggttttcttctttgcttcttttttaatgcttactgttgaacatagttgaaat

SEQ ID NO: 53221 - DNA, 2213 bp, Homo sapiens
tgcatattcagtgacattgaaggagttttccagtgtctgatcaacttttgagtgggatgtgggtagaaagcaagttagtattgagttctttattctaattcatttctctatcaatgtgtttccatttgttttggagaaacaaacagaagtagaggatggcaaacactggaatctcctttctaacaccagagggcctccaaacaaaatgttcagtgaattaaaagaaatagaattctagtcattgaaaactccaccttctaatctttggatgcaaaatgtcttcatttttcgattggctccatctttctttcatacattcaaatttattcgatctttaagtagtgaaaaatacataaagagaatattgaagaaaaaaaattcaacctcatttattacaccaaaattggttttaggtagatgctttaaaacaattttaggaaatggaatgccattctaagcaggatatgaattcaaagagtggtaatcagcaataattatatctggatagtttgtcagagtttgtgggggtaaagatttttcctaacttaggccttcatgtccttgtatccccctgtctttcttgctccacacttttcttcacttaagtcctacagaactatttatactttccatcatccacatgagtcattttccctcttcaaagtatttccatctacgccacttctttaactccatagttayctgtcttgactgcatatttgaccagctaaataatttctatcccatgtgcaaaatgaaaatgagggatctcttgttgaacaagtactaagaatttcaaaaggacactagcagagcagaaaacccaaaagcagagtcctttgaaacgttgggccctgtaccacagcacaggtcacgtccccatgaatctggcccaactgcacgttataatcacataggaagttgttttttgctttgtttcatttttaaataatgatgctaaggtagtgctcagatgcattagatcagaatttctgggggtaaggcccagacctcagttttgtaattttaattgcattttaattgtaaaaaatttaagtttattttaattttaatgtgtagccaaggctgggcaccaaattcaaaggctatttccttgtgacttggcatatacttacctatttacttttctatctctctcatgagaccattgagttccttaagagtagatatcatatctttttagccttttcatctttatgacatagaacaacacctggaacattttagatatctattaaatagattatactgaatgaatgattaaatagatactaatatgacctcatttttaattttacagggtgtaatcaagaaaaaaagaaagtaaaggcagacttattggatgataatttgaaagtgtaaagagaaaacatactcttagaaaaaatgtaataaaatatttgagaaattagatctaaatttactttttaaatgaagggtattgagagatacaatagtcccctcaattctgtgcttaaggggaaaattatcttatttacactattactcattaaactttcagagttgaggaaaagcaagaataaggaaaaaagatgggagaatgtttacagaattaaggaaatatgatgtttctcaatatgtgtgtaatacagttgaataataggagaataaatttgtggtagaagattccttctcaaagaacgacatggcttgtgaatggtactagaactggaaaataatgagccattattagcactagttttgtctgatcaaattaatagaataaatgtaattgctcataagcactagtaaagaacaatcttaagcatttgctagttttaaataatttggtccagattttaacatagcatacattttccattatatgattgtgctagatgtttacacataatgtaagagtatggcacatataaatagcccattattatgttgtgtttatagtatatcatagcaatttgaggacacatgacatgtctcatttttttctttttggtacagcgtttggcaaactaagttcagagggctagatacatgttttttgtattttctcttttatttaggtaaaacttacatgatgcaaaattcatcattttcaccaaagtatgtaattcagtggttttcagtatgttcacaatattgtgcagatatcaccactatctagttccagatcattttcataacccctaaagaaaactctgtatccattaatc

SEQ ID NO: 53222 - DNA, 634 bp, Homo sapiens
ttcttccacatgtcatgctcctttcttaaagatttttatcatgattctttcacctgcaaacttcctattggttaaaactatccttgaatrccagtgttaatgtctcttgttcagaaatacttccttagatctcctcccaggctaggaaaaaatattacctagcgtttacatatgtatgatcttatattttcttctgccacttatcactgtagttaaggatatttgtcttttcaagactacaagtctcaagagtaagagttccctgagtgccttttaaaccactttatcacagtggctatttcagtacttgcttcagagtaggctctgagtaagtacaattaccccatagcataatgaatagcaaggaacaaaatcaagtaccagtaattgtttctatgaaaaagaggccaggcacagtggatcacacctgtaatcccagcactttggaggccaaggcaggtggatcacttgaggtcaggagttcaagaccagcctgaccaacatggagaaaccctgtctctactaaaaatacaaaattagctgggagtggtggcatatgcctgtaatcccagtgactcgggaggctgaatcaggataattgcttgaacctgggaggcggaggttgcagtgagcc

SEQ ID NO: 53223 - DNA, 634 bp, Homo sapiens
ttcttccacatgtcatgctcctttcttaaagatttttatcatgattctttcacctgcaaacttcctattggttaaaactatccttgaatgccagtgttaatgtctcttgttcagaaatacttccttagatctcctcccaggctaggaaaaaatattacctagcgtttacatatgtatgatcttatattttcttctgccacttatcactgtagttaaggatatttgtcttttcaagactacaagtctcaagagtaagagttccctgagtgccttttaaaccactttatcacagtggctatttcagtacttgcttcagagtaggctctgagtaagtacaattaccccatagcataatgaatagcaaggaacaaaatcaagtaccagtaattgtttctatgaaaaagaggccaggcacagtggatcacacctgtaatcccagcactttggaggccaaggcaggtggatcacttgaggtcaggagttcaagaccagcctgaccaacatggagaaaccctgtctctactaaaaatacaaaattagctgggagtggtggcayatgcctgtaatcccagtgactcgggaggctgaatcaggataattgcttgaacctgggaggcggaggttgcagtgagcc

SEQ ID NO: 53224 - DNA, 584 bp, Homo sapiens
agcatatatataattctacaagatctagcatgatacttcaattccccttctcagctatacaatattaaaaggcatctaaatttcctgagggtcagtgcagtgacgtagccagaacacactgaattctgggagaaaaattggatttaatatttcttacagattaacaaatcttattcactgctggtagcatagggagatacaacttgtttggaacataatgctgtattatctattaattttgaagacacatacatcttatgacacagcactcccagtcccagcaagacttttagcagcactgttaaagccaaaaaacggggaaacctgtcaaagggacaaataaattgtggcatattcatggatactcatgtgctggaatacattacagctgtgaaaatgaactgcagttatgacataatgaagatcagcaagttacagaggaatgtatataacattttatttatttagaaaatatatatatacatatatatgtatgtgtatatatatatacagagagagagagagagagagagagacggagtcttgttctgtcaccaggmtggagtgcagtggcacaatctcgg

SEQ ID NO: 53225 - DNA, 629 bp, Homo sapiens
tccagactcctcctcctcaagtgcgggaggtgaggaatagggagagacggaccttccccagcaccccaactcccatccccatctgtctcttcctcaccactgtgsgagtgtccatgtccgggttgctccagagtgtggtgagaatgaggttctggaagaaggggggaaaaccagatgagggaatatctgacacaatgagtgtgtatttgggggaatatcgaaaggtcagggatcataaaggagaaagaacccttttcctccaaagaacgaaataggttagatttgaggtagaagtcagaggttacttaccaagagcatgaggaatgaggtgcaggaaagcatctcccaggagcccaccggaagcaaaactgagcaagatctgaagtagagagcgatgccggggagagttcgactccacggggataaggaagaggacaaaaaatggagctgctgagatcagcactgtggcccccagtgcctggtgagggagagtcaaggtcaagtactgtggagtttcccaacaatccagaaccagcccttctctctcccatcccctggagactcacataagcccagagagtgacagcatccaggtcctgcttgatgcctggagccccagactccccata

SEQ ID NO: 53226 - DNA, 552 bp, Homo sapiens
tgcttgtaggacataataataacaattgaatgtctgcacagccrctttccacacagacatcataacaaaaaatttccaccaaaccccccctcccccgcttctggccacagcacttaaacacatctctgccaaaccccaaaaacaaagaaccctaacaccagcctaaccagatttcaaattttatcttttggcggtatgcacttttaacagtcaccccccaactaacacattattttcccctcccactcccatactactaatctcatcaatacaacccccgcccatcctacccagcacacacacaccgctgctaaccccataccccgaaccaaccaaaccccaaagacaccccccacagtttatgtagcttacctcctcaaagcaatacactgaaaatgtttagacgggctcacatcaccccataaacaaataggtttggtcctagcctttctattagctcttagtaagattacacatgcaagcatccccgttccagtgagttcaccctctaaatcaccacgatcaaaagggacaagcatcaagcacgcagca

SEQ ID NO: 53227 - DNA, 1803 bp, Homo sapiens
tttcccataattttctaattatttgttgccaatatctgttatttctgtttttttgttttggaatttcccaaatattgttaaaaaagattggcaatagtgggcatccttgtttcgattgtgattttaatagaaatatgttattcttcaccagcaagatgttgggtggtagtgtgtaatacatcttttatctagttcttaaaatatattttataaggaaaaattttatgaaagattttaggttaactcttgactgacatttttggtattaaaggaatttgctgttgtttgatagcatcattatggaagatattgaatagcacatatttgtgatcttttaagttagctatagaagccatcttctcattctgctgtggtaagtgaatgtctttctgactttcttctgggtccctatttcactgatatctaaacctgatttctagcagggaagagactaaagcaagcacatcctttcattcccttgctctcagtgtgtagagctgaaatgtttccatatatgggaatttctcatagcattgggtttggacatacagatgtgataataatcctcacaacaacaacattactgcatctaggaatgtgggtgggccaagacactgtgaagggtttatgtgaattatgtcatttaatcttcagaaaaaaaccactgtaagttctgccagcccattttatagatgaggaaactgtgacttagagcagtgaaataacttgtctatggtcatacagctgagaagtggcagaggcaagttgcttgtaaagtagagccaagccttagagatggatgggtgaagatagatatagatgtatgtgtatataggtatgtgtatatctgtacacatatgcatacatatttgatgtgcttgagagatagatgctaaggactaatgcattttgaaatttttctggagccaggaatatagtaatacttagtggcaaataatgagcctttttccattaataataagaatataatttctttggaaggaaatactatctaattatagtttccctcagtatatctgggggattggttagcagacccctgtgtataccaaaatttgcgcatattcaaatcccaaaatcggccctgtggaacgtgcttccttgtggaacctatttatacagtatgtgggtttcacatcccacaaatactgtgctttcaatctatgtataagtgtgcccatgccattcaaacccatgttgttcaagggtcaactttactttaaggctagataattcttctgtctaagaacttagagtctgagtagttgacgtatattgtacttgtaagtttaccaagtttgactctgcattttgcagacatgtctgtaggattgacataatccataggtgctcctaatgcagtagtctataatttgactttcttattacttttccccttaaaaattctaagacagcattgagtttttggtatcctcagaggaaaagacagttacctctaagatacctactttcagggcaggcgtggtggctcatgcctgtaatcctagcactttgggaggccaaagcaggcgaatcacctgaggtcaggagtttgagaccagcctggccaacatgatgaagccccgtctctactgaaaatacaaaaattagtcgagcgtggtgcaggcgcctgtaatcccagctacttgggaggctgaggtgagagaattgcttgaacctgggagggggagattgcagtcagccgagatcacgccattgcactccagcctgggggataagagcgagacttcgtctcaaaaaaaaaaaaaaaaaaaaaaraaa

SEQ ID NO: 53228 - DNA, 917 bp, Homo sapiens
taatctccctactttattttcttttatttttaattgatacataatcattatacatatttatgggttaaagtgtaatgttttaatatgtgtacacatattgaccaaatcagggtaattttgcatttgtaattttaaaaaatgctttcttcttttaatatacttttttgtttatcttatttctaatactttccctaatctctttctttcagggcaataatgatacaatgtatcatgcctctttgcaccattctaaagaataacagtgataatttctgggttaaggcaatagcaatatytctgcatataaatatttctgcatataaattgtaactgatgtaagaggtttcatattgctaatagcagctacaatccagctaccattctgcttttattttatggttgggataaggctggattattctgagtccaagctaggcccttttgctaatcatgttcatacctcttatcttcctcccacagctcctgggcaacgtgctggtctgtgtgctggcccatcactttggcaaagaattcaccccaccagtgcaggctgcctatcagaaagtggtggctggtgtggctaatgccctggcccacaagtatcactaagctcgctttcttgctgtccaatttctattaaaggttcctttgttccctaagtccaactactaaactgggggatattatgaagggccttgagcatctggattctgcctaataaaaaacatttattttcattgcaatgatgtatttaaattatttctgaatattttactaaaaagggaatgtgggaggtcagtgcatttaaaacataaagaaatgaagagctagttcaaaccttgggaaaatacactatatcttaaactccatgaaagaaggtgaggctgcaaacagctaatgcacattggcaacagccc

SEQ ID NO: 53229 - DNA, 722 bp, Homo sapiens
atctcatccaggagatcattccaaatgctgtttattccattcctttttatggctgtgtagtatttcatcatacatatatgatatatatatgatatatatgatatatatgtgatatatatgatatatatatgatatatatatatmacagtttctttatccactcgttgattgatgggcatttgggttggttccttttctttatcactaaattaatggcagcaataaatccagaacattcctcattaccctaaagtcagccctgtctcccaaactcccttacacatcaggatacctttgtgcccatagatcatgggcagtgcttggcagccaccactgtccacacagagagggtagtcagtaacgtgaggtggttctgcctgctgggatctcaccccaggcacagaaagaaggagccctgggtggagctgaaagtgctcatctgggtttgtcaggagtcccatctgtcagtgaattcacaagaaacagaacaaaacaactccttcaatgttgatgagactgcccctgggatttggaaagctaataacagagaaaaccaatatagacaaaggattttaaacaggactatcggattatgatcaattaagcaaattagaaaaggatacttgaaggagtatttgggacacaggaatcaaaacaccaggaagacatgaggagtttccaagatgtagactatagcaatacttagataaccaataccagtg

SEQ ID NO: 53230 - DNA, 588 bp, Homo sapiens
aaagatatttaaaaaatggtagacttgcatcgattcagacaaaggcattcttcccatccaaactgttcactggtgcattgatcttgaatttgaccatctggggaagggcgtggcctctcctgacagcaaggctctggggcccaggcagggagaatgaggtctcagaatgacgcccttgaaagacgtgttcccttttcaccaatgcacagacccagaggacccctccatcctsgagttcctgccatgagcctcgggctcctgtgctgtggggccttttctctcctgtgggcaggtgggtcctggcggggccccttgtgtggatttcaaggcccatcccctttccactggagctgtagcatcagctttgtccttctctgcaggtccagtgaatgctggtgtcactcagaccccaaaattccgggtcctgaagacaggacagagcatgacactgctgtgtgcccaggatatgaaccatgaatacatgtactggtatcgacaagacccaggcatggggctgaggctgattcattactcagttggtgagggtacaactgccaaaggagaggtccctgatggctacaatgtctc

SEQ ID NO: 53231 - DNA, 588 bp, Homo sapiens
aaagatatttaaaaaatggtagacttgcatcgattcagacaaaggcattcttcccatccaaactgttcactggtgcattgatcttgaatttgaccatctggggaagggcgtggcctctcctgacagcaaggctctggggcccaggcagggagaatgaggtctcagaatgacgcccttgaaagacgtgttcccttttcaccaatgcacagacccagaggacccctccatcctcsagttcctgccatgagcctcgggctcctgtgctgtggggccttttctctcctgtgggcaggtgggtcctggcggggccccttgtgtggatttcaaggcccatcccctttccactggagctgtagcatcagctttgtccttctctgcaggtccagtgaatgctggtgtcactcagaccccaaaattccgggtcctgaagacaggacagagcatgacactgctgtgtgcccaggatatgaaccatgaatacatgtactggtatcgacaagacccaggcatggggctgaggctgattcattactcagttggtgagggtacaactgccaaaggagaggtccctgatggctacaatgtctc
